United States Patent Application Publication US 2019/0348154 A1 - sequence listing, part 58

SEQ ID NO: 215582 - DNA, 297 bp, Klebsiella pneumoniae
atgaatacatttaaaaataaatctactgaaatcttttatgttgtgtccttgcatatctacgcggagctttttaactcgaaggataaaacaaccagtaatatgattataacgcatgtaatggatcatgagtttgtcagtaaactaatcgatctggcgatgagaaatacggagaagcatcttctgaaaaaagcatggaaaaagaacgctgatgaaaaactgtctgaggtggattttaaagaggttaagcaggcattagccaaaatgcattacactgttctggcggaatcaatatgttga

SEQ ID NO: 215583 - DNA, 291 bp, Klebsiella pneumoniae
atgaaaatagaatttaatacgacagagcagtttatcagtgaagcagcggattcgtataaccgttatatgaataaacgactacggaaccagcctgtgcatttctaccacctactgaaaaataaggaggatatgaacgaagtgattgaaaatattatcgataaaacaaagagccgcttttatggggctgaaggtgaacaaaaaaaggaacggatctccgggagcgttaactatgcgaaagtaaagcaacatcttcgtcagctttggattgtctttaagtgtgtataccgctga

SEQ ID NO: 215584 - DNA, 348 bp, Klebsiella pneumoniae
atgaaggctccagcggatcgagagtatcgtttcggtaaaagcacgttcagaaaagttattgaatatcgccttattccgatgatggatctgattttttggggtgctgataataatgataccaagatcccactttccctgatgtcttcactgcttcatgaggacagtgataatgatcgtgatgaaggaatgctcaaggcaacggattacccactggcaatggcgttcctgacagatgaaagctatctgaagtcgcttgaagattacatcatgcaaaacaatcccttaaaagatacacctgttgataagcatgttgaggatgataagaagaagaaaaaagcagccaagtaa

SEQ ID NO: 215585 - DNA, 183 bp, Klebsiella pneumoniae
atgaaaagaagtgaaatcagaaaagcgattgaatcgtggtttgacattgaacgctatgacgcaattgaacagctcactctgcagcagttctatgttgagattgaacggcgtatcttggcttacaggatgttgttgagccgaaataccataccgaccctgaacagattattgctggatgattag

SEQ ID NO: 215586 - DNA, 1233 bp, Klebsiella pneumoniae
atgatgataatgccaaagaaagccagaggactgtctgttcttgctgtttccagacttaaagctgatgggcgttatgctgttggtggggtggatggattatacctgcggattgcagggcgctcccgcgcatgggtcctgagtgtggcaatgggaacccgaattaacaaagcaggtaagacggttccccggcgtctgaacatggggcttggtccctgtcaggaagtttctctggcagaagcgcgtgacaaggcgcgtgaggtgcgtaagcaaattcgtgatggcattgttcccctcgaaaaaaaacacgcccgtaaagcgtttcacgaagctcaggcgcgtaaacaaaaaaccttccgtgaatgcgctgaagctgtgctggaaatcaaaggtaatgagttaaagaataaaaagcatgtggctcagtggcgttccacactggaaacctatgcttatcctgttattggtgataaagcggtcagtgaaattaccaaaatggacttgttggcaatcctcgaaccaatatggctaactaaaaacgaaacagccagtcgtgtccggggacgtatcgaaacggtaatggattacgccaaagcaaaagagtatttcgaaggtgataaccctgctgcatggaaaggtgtactaaaacctctgttgccaatgccaagtaaagttcagaccaaaaaacatcatgcggcattgccttacaaagatgcaggctcatttatggcagaactgcgtcaacgggccgggatttcagccagagcactggagttttccatactgaccgttgcccgttcgggtgaaattcgaggcgctgaatggtgtgaaatcgatctggatgcgaaaacgtggattattcctgctgagaggatgaaagcagcgaaagaacatcgcgtacccctgtcagatactgctgttgaacttcttaaagccttaccacgatttacagataacaatcttgtttttccggcacctcgcggtggacaactgtcagatatgtcattaacagcagtattgaaacgcatggggcgtagtgatttaacccagcacggatttcgatccacatttcgtgaatgggcgggggaaaccacatcctaccagcgtgaagtgattgaacacgcccttgctcaccagttagcagacaaggcagaagccgcttaccagcgtggcaccttatggcctaaacgtgttgcgttaatggatgtctggacaagctattgttctgtagcgtaa

SEQ ID NO: 215587 - DNA, 645 bp, Klebsiella pneumoniae
atggtcgtacatgggaaagttatcaagttattacttactattttgatggtggggttgtcatccgctgcttatagtaaagattatcaggcagggaaaaacttcactgttattcattctactgttaagcaaccgccgccactggttgagtttttttccttctactgcggaccttgttatgcgtttgcagagcgcatcaatgttgatacagctatcagaaagcgcctgcccgacgatatgaaactggaaaaataccatgtcagccagatggggcctttaggaccagcattaacagaagcatgggccgtagcgcaatatgctggggtagatggcaaggtggaaaagttattgtttgagggtttacaggttaagcgtgatattaaaacggcagctgatattgttaaggtgtttaatcaacttggcattacgtcagagaaatatgccgaaatgcaaagtaactttatggtaaaagctttaattgccagacaggataatctggtcgaaaaaatgaaagtgcatggtacgccttctttttatgtttcaggaaaatatcatattaacaatgcatcactcgcgcaagatgactatgatacctatgcagaggatatggctaatctggttttatttttgcttaacaagcccctgtaa

SEQ ID NO: 215588 - DNA, 1218 bp, Klebsiella pneumoniae
atggcggccttattgacttgcgaaaagaacaacatgactgcattttttcatttcctgctggcgctggcggtgatcctcgccctggcctggcttgtcagctacgacagacaaaaaattcgtattcgttatattctccagttgattattatcgaaatagcgctcgctttctttttcctgcacgccgaaagcggcctgtggctggtaaaaaatatttccggcttttttgcttcgctgttaggctttgccgccgaagggaccaatttcgtctttggcggcatgagcgaaaaaggcttagcctttattttcctgggcgtcctgtgtccgattgtgtttatttccgcgctgattggtattctccagcactggcggatcctgccgatttttattcgcgtgattggcaccctgctgtcgaaagtaaacggcatgggtaagctggaatctttcaacgccgtcagctcgctgatcctcggtcaatcggagaacttcattgcctacaagggcgtactgggcgacctctcctcacggcgactgttcactatggcggcgacggccatgtcgaccgtatcgctgtcgattgtcggcgcctatatgaccatgctggacgccaaatatgtcgtcgcagcgctgatcctcaatatgttcagcacctttatcgtgctgtcggtaattaacccgacgcggccaggcagcgagcaggaaataaaactcgagaagctgcatgaatcgcagagtttctttgaaatgctcggggaatatattctggccggctttaaagtggcgatgattattctggcgatgctgatcggttttatcgccctgatcagcgccattaacgcgctattcgccaccctgtttggtctcagcttccagcagatcctcggctacgtcttttatccgctggcgtggcttatcggcatcccgctgagcgatgcgctaaacgccggcagcatcatggccaccaaactggtcgctaacgaatttgtggcgatgattgagctgcaaaagattgccgccagcatgacccctcgcgggctcggcattctctcggtattcctggtgtcgtttgccaactttgcctcgatcggcattatcgccggggcgatcaaaggcctgaatgaaccgcagggcaatatcgtctcccgcttcggcctgcggctggtgtatagcgccacgctggtaagcctgctttccgccagcttcgccgggctggtgctgtaa

SEQ ID NO: 215589 - DNA, 150 bp, Klebsiella pneumoniae
atgccgccatccggcaccaccacgggcacgaaacctgaccgcccggcggcgctgcgcttgccgggcctggagactgccacggccttccgggaacgtctcagcgattttgaggccgtcagcaccggcagtttcagcaacaatggtgaataa

SEQ ID NO: 215590 - DNA, 939 bp, Klebsiella pneumoniae
atgtcttcgttaaaattctccgttagccgccaggaagcgctccttatcatgatcaccatgttctggggagggacgttccttgccgtacagtacgcggtgagcctcagcgggccgctgttttttgtcggtttgcgtttcgcgaccgccgcgctggcggtgggcctgctttcgctgcgcactctgcgcggtctgacgtggctggaggtgaaggccggggtagcgattggcgtggcgattgcgctggggtatggcctgcagacctggggactacagaccatctccagcagtaaatctgcctttatcaccgcgatgtatgtgccgctggtgccgctgctgcagtggctgtgcctgggacgtatgccgggggtgatgtcctgcgtggggattgtgctggcctttattggtttaattctgctggccgggccggaaaataatctgctggcgcttggcgtgggggagatgatcactctggcaagcgcggtggcgatcgcggcggagattatccttatcagcgcctgggccgggaaagtcgatgtccgccgggtgacggtggtgcagctggcgaccgcgtcgctggtggctttcgccgccatgaagccggcgggtgaatcggtgccgtcgttgacgccggccctgctcggcgtcgcgctggggctggggattttcagcgcgatcattcaggtgaccatgaactgggcgcagcgcagcgtctcgccgacgcgggccacccttatttataccggtgaaccggtatgggccggtatttttggccggctggccggtgagcgtctgccgctgctggccctgctcggctgcgttttgatcctcgcgggggtgctggtgagcgagctgaagtggaagcgcaagtcgccgccgcaggtttccacaaacgacgatgcgcagccgctcgctgacctggccgatcgccgcgagccataa

SEQ ID NO: 215591 - DNA, 183 bp, Klebsiella pneumoniae
atggcgcggacgctgtcactgcgcatcattgccgagggcgtcgaaaccgaggcccaacgggattatcttaatcgccagaatattcatctgctgcagggctactatttctggaagccgatgccctacgtcgcgctggtcatgctcctgctgagcaaaccgaaggcgcggattatcgaagaataa

SEQ ID NO: 215592 - DNA, 936 bp, Klebsiella pneumoniae
atgaccatggaaaacagtgacgatatccggttgattgtcaaaatcgcccagctctattacgagcaggatatgactcaggcgcaaattgctcgcgagctggggatctatcgcaccaccatcagtcgcctgctgaagcgcggccgcgagcagggcattgttaccatcgccatcaactatgactacaatgaaaacctgtggctcgagcaacagctcaagcaaaaatttggcctgaaagaggcggtggttgccagcagcgatgggctgctggaagaagaacagctgagtgcgatgggccagcatggcgccctgcttgtcgatcggttgctggagccaggcgatatcatcggtttttcatggggccgcgccgtgcgttcgctggtggagaacctgccgcaggccagccagtcacgccaggtgatctgcgtccccatcatcggtggaccttccggtaaactggagagccgctaccatgtgaacaccttaacctacggcgcggcagccagactgaaagcggaatcccaccttgccgattttccagccctgctggataacccgctgatccgcaacggcatcatgcagtcccagcactttaaaaccatctcatcctactgggacagcctggatgtggcgctggtgggtattggttcaccggccattcgcgacggcgcaaactggcacgccttctacggcagcgaagagagcgacgatctcaacgcccgccacgtcgccggggatatctgttcgcgtttctacgatattaacggcggggtagtcgataccaatatgagcgaaaaaaccctgtcgatcgaaatggcgaagctgcgccaggctcgctattccatcggcatcgccatgggggaagagaaatactctggcattcttggcgcattgcacggacgctatattaaggaaggtgcgaataagtccgagatgtga

SEQ ID NO: 215593 - DNA, 876 bp, Klebsiella pneumoniae
atgctgcccgactcatcaacccgattaaataaatacatcagcgaaagcggcatctgctcgcgtcgcgaagcggaccgctttattgaacaaggcaacgtctttatcaatggcaagcgcgccacgattggcgatcaggtgaagcctggcgatttagtcaaagtgaacggacggttgattgagccgcgcgaagcggatgatctggtactgattgcgctgaataagccggtcggcattgtgagcaccacggaagacggcgagcgcgacaacattgtcgatttcgtcaaccacagcaagcgtatcttccctattggccgtctggataaagattctcaggggctgatcttcctcaccaaccacggcgatctggtgaacaagatcctgcgcgccggcaacgaccatgaaaaagagtatctggtgacggtcgataagccggtgaccgatgagttcattcgcggcatgggcgcgggggtaccgattctcgggaccgtgaccaaaaaatgtaaggtaaagaaagaagcgccgttcgttttccgcatcactctggtgcaggggctgaatcgccagatccgtcgtatgtgcgagcactttggctatgaagtgacgaagcttgagcgtacgcggatcatgaacgtgagcctgacggggatccccttgggtgaatggcgtgatctaaccgatgacgagctgatcgacctgttcaagctgattgaaaactcctcttccgaagcgaagccgaaagccaggccgaaggccaaagcggcgactcccggcatcaagcgcccggtggtgaagatggaaaatagcaacgataagggccgcccggctggtaacgggaaacgtttcacccagccgggacgtaaaaagaaagggcgttaa

SEQ ID NO: 215594 - DNA, 456 bp, Klebsiella pneumoniae
atgcctgagcttcgtgataccggcgtacgtaacgtcgtttgtggggaaaatgtcgttatttaccagcccgccaacctctataattgccagctcggcgataacgtcttcgtcgggccgttcgttgagatccaggggaatacccgcatcggcgcgaacagtaaaattcagtcccatacctttatctgcgagtacgtcaccatcggccagcgctgctttatcggtcacggcgtgatgtttgccaacgacctgtttcgcgagggtaaaccaaacgccgaccgcgccagctgggggcggatcgagattggcgatgacgtgtcgatcggcagcggcgccacgattctggccgtcagcatctgcgatggggtggtgataggcgcgggcagcgtggtaacgaagtccattaccgagaaaggcgtgtgggcggggaatccggcgaggctgctgcggcggctataa

SEQ ID NO: 215595 - DNA, 741 bp, Klebsiella pneumoniae
atgaataaaaaagtcatcttccgcggcgccagcgctattatgcccctatgcatcggcgactttccattttcatttattgtcggcgcattaagcgttagcgcgggcatgagcgtctggcagagtacggcgtggtcggcgatcgtcattgccggctcggcgcaaatgctggcactgaatatgttaaaaaccggcgccacgctcggcgtgattattttcaccacattaattatcaatcttcgccacgtgctgtatagcgcctctatttccggcaccgtgcgcgaagcttcattctttaaaaaatgctttatgtcctatgcgctcaccgacgaggtgtatgccaccaccgtcaaagagatggaaggaaataaaaaggaaaaatatctgttttatggttcggcgatgattaccttctgggcgatttgggtgctggctgattttcttggcgcgctggtcggcgcctcgtttccccacattgagaaatacggtctcgatttcgccatggtcgccgcctttatcgccatcgtggtgccgcaaattaaaagccaggcctgcaccgtcgccgcggttgtagccgccgtttccggcgtgctgttagtggtcctaccctattcgctgggtatcgtcgtcgcctcagtgcttggcgtcctcgccggcctgtgcgtcgacctggcggaagagcgcaagcagatggcaaaaaccgaatccgatatgccgttagtggaggcgatggaaaatgagtaa

SEQ ID NO: 215596 - DNA, 1278 bp, Klebsiella pneumoniae
atgaacaccgataacgcttccctgtacgtaaaatggctcaaacaagaggtcgccccggctttaggttgtactgaacccgtcgctatttccttcgcggccgcctacgccgcacaatatctggatcagccttgcactaaaattagcggttttatttccgccaatctttataaaaacgcgatgggcgtcaccatacccggcaccaccgtttgcggtgtaccgctggcagccgcaattggcgcatttggcggcgacccgcaaaagggattaaaaacgctggaagatatcactccgcgacacgttgaaatggcgcagaagctgatcgccaataacgccgttgatattgccgtcgaagagaccccggattttatccatctcgatttaaccctctctgctggcgagaattgctgtcgtgtcgtggtcaaaggaacccacaccaacgtggtcgaactttatattaatggccagccgcagccattaagcgaaaaacagaatacgcgcacccagcgcgaaacgctgcccactttctcgctacaacaggcttacgaatttattaatcgcgtcgactttaatgatattcgctttattctcgacgccgcgcgcttaaactccgcgctggcggcagaaggcaaaacaaaaaaatatggcctgaacattaacggtaccttttctgacgcagtgaaaaacggcctgatgagcaacgatctgttaagcaaggtgatcatcaacaccgtcgccgcttcagatgcccgcatgggcggcgcgccggtggtagcgatgtctaacttcggctcaggcaatcagggcattacagcaaccatgccggtagtggtggttgcagatcatctcggcgtcgatgaagagaccctggctcgcgctttgtctctctctcatctcaccgccatctcaattcattctcgttatacgcgcttatctgcgctatgcgcagcctcaaccgccgctatgggcgccgccgccggtatggcctggctgtttacccgcgacatcaataccattaataccgcaattattaatatggtcagcgatattaccggcatgatttgtgatggcgcttccaacagctgcgcgatgaaagtctcgtcagtggtatccagcgcctttaaggcggtactaatggcaatgcaaaatagctgcgctggcgccaatgacggtattgtctgcgccgatgtcgagcagactattaataacctgtgccgtctggtgattaaaccaatgactctcaccgataaagaaattatcagcattatggtcgctaaataa

SEQ ID NO: 215597 - DNA, 1353 bp, Klebsiella pneumoniae
atgtctgccccaaaaattacttttatcggcgccggttcgacggtgttcgtcaaaaatattctcggtgatgttttccagcgcccggcgctgaaatcggcgcatatcgcgctgatggatatcgatgaaacccggctggaagagtcgcatatcgtggtgcgcaagctgatggattccgtgggcgcgaacggcgaaatcagctgccaccgcgaccggaaaaccgccctgcagggcgccgattttgtcgtcgttgccttccagattggcggctatgagccctgtaccgtcaccgattttgcagtctgcaagcgccacggcctggagcagaccattgccgatacgctggggccgggaggcattatgcgcgcgctgcgcaccatcccgcacctgtgggctatctgcgacgatatgagcgaggtctgcccggacgccaccatgcttaactacgtcaacccgatggcgatgaacacctgggcgatgtacgcccgctacccgcatatcaagcaggtgggtctgtgccactcggtgcaaggcacagcggaagagctggcgcgcgacctcgatctcgatccggcggatttacgctaccgctgcgccgggattaaccatatggcgttctatctgtcgctggagaaaaagctcgcggacggcagctacgtcagtatctaccccgacctgctacaggcctacgccgacgggcgggcgccgaaaccgaacctgcacggcaacccgcgctgcgaaaacatcgtccgctatgaaatgctcaaaaagctgggctacttcgtcaccgagtcctcggagcatttcgcggaatacacgccatggtttatcaagccgggccgcgatgaccttctcgctcgctataaagtgccgctggatgaataccctaaacgctgcgtcgagcaactggccaactggcatcaggagctggagagctataagcgcggggagcgcattgaggtgaaaccctcccgcgaatatgccagcaccatcatgaacgccatctggaccggcgagccaagcgtggtgtacggcaacgtgcgcaacgataatctcatcgacaacctgcctcagggctgctgtgtggaagtggcctgcctggtggacgccaacggcatccagccgaccaaagtgggcgagctgccggcgcatctggcggcgctgatgcagaccaatatcaacgtgcagacgctgctgacggaggcgatcctcaccgaaaatcgcgattacgtctattacgccacgatgatggatccgcacaccgccgcggtgctggggatcgaagagatctacgcgctggtggacgatctgatcgccagccacggcgactggctgccggcctggctgcaccgttaa

SEQ ID NO: 215598 - DNA, 759 bp, Klebsiella pneumoniae
gtggtcaacgcggcccaggcggagtaccctgcgcagcggtttttcttgctcttttttcaggtggtttctctcgatatgtatgcatttcttcaacaatgggacatggcagtgattatgctgcagattgtcgccatcgacttactgctgggtggcgacaatgccgtggtgatcgccatggcctgccgcaaactgccgccgcagaaacgcaccaaagcgatcatcatcggtaccgtgggcgccatcctggcgcgcgttctgctgctggcgatcgctttgtatctcctgtcgctgccgtggctgaaaatagtcggcgcgctgctcctgctgtggattggcatcaagctggtcaggaatgaggaagaagagagcgaggttagcagctctggcagcctgtggcgcaccgcgatcaccatcactgttgccgatgtgattatgtcgctggataacgtactggcggtagctgctgcggggaaagggcacattgcgctggtcgccctcggcgtggcgatcagcattccggttattgtcgccggcagcaagctggtgctggtcctgctcacccgctttcccgcggtggtgctgctgggcgggatgctcatcggctggattgccgggtcaatgctggtcagcgaccctaccattcgccagctgtttcccagcgccggcgagggcaccgcgcgcctggctggcgccgtcggcgcgctgctggtgctattcaccggatggcgccgccgcccacggccgcaggcgaaagactaa

SEQ ID NO: 215599 - DNA, 786 bp, Klebsiella pneumoniae
atgtctggccacaagaaatacctctctgtcgccctgctgagcgctgtcttactgccggcgatggcctctgccgctgacgcgccggcgactttcaccccggaacaggaggcgaaaatcggcaaaatcgccgccgactatctggtcgcccacccggaagtcctgctgcaggcgagccagaaactgcagcaaattcaggctgagcagcaggccagcgcggccactcaggcggtgctgaagaacgccgccgtgttaacccaggataaaaataccccgacctacggcccggccaatggcaaagtcacggtgatcgaattcttcgactaccagtgcgtctactgcagccgtctggcgccggtgatggagcaggtgattaaagcgcacccgcagacccgcttcgccttcaaagagtggccgattttcggcggccgctgggaaagctcgctggaggcggcaaaaaccggcctgcagatctatcagcagaaaggggcggatgcctatctggcctaccataacgggatttacgctaccggccataacgaaggcaagctgacgacggcggatatccagcagcaggcgaagaaagccggctttgatgcgaagaaggccgccgacgtcgaaccggtgctgcagagcattaacgatctggcgcaggagattggtctgagcggcacgccgggcgtgatcgtgatgccgaccaccggcgccacggaagccagcatcaccgtcttcccggggctggcagacaaagcctcgctggaagccgccatcaaaaaagccggcggctaa

SEQ ID NO: 215600 - DNA, 2490 bp, Klebsiella pneumoniae
gtgttgtgcaatggattcttgatgaacatatggcaaatagaaatggaaagatcaccttattcaaatacgttattgtttaatcgcaacacgaaactctcgctatcaatcggcttgcttttgctcttcccggcgctggttcagggagcggattcgctctatgaccagcaaatcttgcaagcgcgccaaggtcagtacgccccctttctcagttaccttcagcagtaccagctgcggcatgccttaaccccttctcaggtggcggactggctgcaggtggccctctgggccggtcaggacgatgaagtggtgaaagtctggcgacgctaccaggtctatatgccgcttcccgcacggggcaccgccgccgcggcgcaggccctgcgcaaccagaagcagtggcaaacctcgctcaccctctggcagcaggcgctcagccaggcccctggcagcgacgactatcgtatcggctatatcaaaacgctcgccgatgcccgcaaggacggcgaggcgctcagcgaagcgcgtcgcctggtggcggagcaggcgagcgttgcgcacctgcagacgctctcctatgtctacctgcggctgggcaaaagctgggaccagctgttggtggacacgcagatcctcgatcgtgatccgcaaaacaaaaccgcgctggccagcctgatggcgaccctgacccgcaaccggattgattcccctgctctcggcctggcgaatagcgtcgaactgacgcctgcggaaaagcgtaacttgcagttgaacgccgccgccgaactggtgcgccttgccgataccccttcccgcgaagaaaaggcgcgttacgcgctggcccgcacggcgctcacgcagtatgacgcgatgatcgccgcctggcaccccgacccacaggctgcgcccgacatcatccgggcgcgtattgatcgtctgggcgcgctgtacgccagcgccgagtacgcgcaggtcatccgcgaataccaaagcctgatcgcccagcagcgggccgttcccgactgggccatcggctgggtcatctcctcttttatcgcccttaagcaaattgagcctgcgctgacgcttatccaccagcatccttcgtggctgacaagccaacagaatgaggaacacgagcttttctacgctctgctggacaccggtcagtacccggcggcgcaacggtatgtcgcccgcctcaccaggaatgcgccctacatccgtcgtctctacggctcgccaacgtcgcagccgaacgacgactggctcaccgcacagtcgcttaacgtgcactatttagcggccaccaacgacctgccgcaggccgaagcccgaatgcagcgcctggcggcgacggcccctggaaaccagggcctgcagatagactatgccgcccttctgcaggagagaggattgccacgggcagccgaacgccagctaaaagcggcggaatcgctagaacccgccagcctgcagctggagcgccagcaggcctgggtcgccctcgatctgcaggagtggcggcaaatggatctgctgactgacgacgtcgtcgcccgctcgccacgggatctgaacacccagcgcctggccagagcgcgcgagatccatcatctctccgagctgcgcctgagcgttggcaaagggctgcattccgacaacccggtgagcggcacgcacgacctcagttttgagacggcgatctacagcccgccgctagccgacagctggcggttgttcggcgggcaccgcttcgctgaaggcaattttgaagaggggaaaggcagccgtcgccagctgtttgccggtattgaatggcgtccgcgcgactactggggcgagcttgagctctccagcgtcaattttcacggcgagaacaagcccggcgtccgcctttccgccgcccatgacgttagcgatcgctggcagctgggcggcgaactggagcggatttcgcagcagacgccgctgcgcgcgttacgcaacggcgtcagcgccaaccgcggcgaaggctggctgcgctggtctccaaacgaacgccgggagtaccgcttcagcgcggccgccagccggtttaccgatcgcaaccgccgccaggagtacaccctctccggtaaagaacgcctctggcaaaccccatggttaacgctggatttgcagcccggtctgtcggccagcgccaatagccgcaccgacaccgcctactacagtccggcacgggacctcgccgccaccgcggcgctggccgtcgatcacacgctttaccagcgctatgacaccgtctggagccagcagttactggccggcggcggcagctactggcaaaaaaatcacgccgccggggcgatcacggtgctgggttacgggcagcgcctgcgctggaacaacgtcgtcgacaccgggctgatgctgaactgggataagcgcccctacgacggcaaacgtgaaaacaacctcgccatcactcttgatgcaaatatacggttttaa

SEQ ID NO: 215601 - DNA, 234 bp, Klebsiella pneumoniae
atgccgccatccggcacaaccgcaggtacagcgtctgatgtgtatcgcccggcggcgctacgcttgcgcgggcctacgctgtttaacctgtgggggacccgtaggccggataaggaatttatgccgccatccggcacaaccgcgggtacggtgtctgatgtgtatcgcccggcggcgctacgcttgcgcgggcctacgctgtttgaacctgtggaggacccgcaggccggataa

SEQ ID NO: 215602 - DNA, 279 bp, Klebsiella pneumoniae
atgagcaatctaacctccttagactggtgggtaggcttgtactttgtggcttctggtgtcgcagtagcttttacgattggtcagtccctggtaaagctactgcttttaagattcgccagtcgcaagcgtatcgatgacacgctttggtgccttggttctctacttgaacagcgttacggcgagctgaaggaaggtgcaaccctttgcataaaggcaaaacgtttcacggccacaattcagcggacgcaggatgataagtcaaagctgatcaaaaaatga

SEQ ID NO: 215603 - DNA, 153 bp, Klebsiella pneumoniae
atgattccatacatcatattgtctttttctggaggcgtcgcccttggcttcatcatctgtcatgacttgatcaagcaggaactgaagaccaaaacactacgtatcggtaagcgggtatatcgcgtcgttcacgagacaggggtatcaaaatga

SEQ ID NO: 215604 - DNA, 249 bp, Klebsiella pneumoniae
atggagaagctgatcgcgcttaaaaataagctggacgccattaaaacaatgggaacgaacgccaagaaagaggcgctggccagtatggatgacttcgaacaaagaatggtgtcactcatgctgaacccgtttgttcgtttcggggtgaagaaatacaacgtggtcgatccacttagcaagtccgtacccagtgatgagaaggcgatagagctgctggagcaactgattgaagcaggagaattctcatga

SEQ ID NO: 215605 - DNA, 468 bp, Klebsiella pneumoniae
atggctaccaaaactgacttatcaaaaatcccttcgatctctggactcaacggctactcgctgcgttgcccggaagtgaagcttaacggacatgactcgtactgcagctacaccgtctgtcagcacacgatccttgccttcaaagagaagcgactgccggcgtcatcgttcacctcctgtgcgaacgccatttcggccggaaaatgccaggcgctgaaaatgatggtggaggaaatccggcaaggtgagtcgctgtatttcgtcgatatgccggcgctcattgaagaggtggaggaacgaaaccgaacagcgagaaccctgcagccgaagagaggcagtgcatctatctacagtggaattaaagggaagcgccaatcttcgaccgtggctgaaactggcagactgccggatgccagcgagatttattcagaacttatcaaagaaaccttaaaggagaagaccgactaa

SEQ ID NO: 215606 - DNA, 789 bp, Klebsiella pneumoniae
atgaaagaagatatcgaacaggcagttttagagatgatcaagaagtcaggcgtagagcttggcatgggcgagctggagagcatcatcgatgcctcattcaacacggcatcagagcatatatcgaatgcgctatcctgcattcctctcaaagaaggggcgacacatacgtcggtgttagtgtggtacgcaaagacgcctgaaatgcctggtactgttcaaaagcgtgtagctctggttgctttcatcgtcccgtcgcttgagaccggcattgggccagtcgcgcgttttggcgcctggtatgacgacaaaatcatcttctcaaactgctaccagatggaaagcggggaaatgcttgagcatagcgtggacgtgactctaatagccgtagaaagcaaatgcgagacagtaggagaggctttcgtcagcgtcatgacttctcccgatgttgaaaagcgtcatgtagatctggtggcaccaccaggcttgttggaaatgattgtctctggagattacaccaaggctatagcgcgtgttcgtgagctggactatgggcgtatctgcgacttgtgtcgtagtgatctggacttaatcaacgtgatcgttgaggctggccgcgtctgtgatggggtgttggcacaatacgcaagtaagatcagtcgtttggccaatgaaatgcctatgctgattcaggaagccaaatcccacgccgttcatgccgcaaacgacctgctaaccccttatcgatacgaagccgcaagtgacaagatgaccggctgggccacctggtaa

SEQ ID NO: 215607 - DNA, 1167 bp, Klebsiella pneumoniae
atgaaattttttgatgagtcttatgaacatgaagttacttccatcacgagtcatataactagtactttccccttgtcaaatgatttatctaataatccgtttgctgccgacgattcaattttgtctgatgtaattatttcactgtcatggcgctattttatagacttgtattttaagcatagagatttactcaacgaacacacaccatttaatcaagcaaagatagagggtggtaatctccctagcttatcagaattaaaaagtgataaacatttctttttatttaaaatactcagattaatatatgaatacaatttttggacagtgagcgacacaagacaaccactttttttagatttttccattttagaaagattagatagactgtccccaaaggataacattccaatttcgttcacctggatagaacaaacaatgcctgcagcattggttaaacacttattgcggtcagataaattttctctttttaaaaacattgcaactaatgtaggtggctttgaggaagaaatttcgaagcaaataaaaaatggtatcagcacggcgcaaaatgaggcagaacagttaaaagaaaaaattgagactctcgttaacaatgccgattcgtccataaagtctcttcaagaatatgatgaaaaactcaaacagtataaaagtgaatataacttcgttctgttgagcaaagctttctcaaatcttttggaaaccaaaaaagcagaatatgtcacaaatcacagaagtgtaattattttttcttcatggctgattgccacgcctttatttgctttattgaatcatatctataatttcttccccgtagaatttaatttaaatgcattattctattatctgccaatattatcattggaattgttatttttttattttatgcgtctgtattatattgagggcaaggccatcaaggctcagctacttcaaatagaacagcgcctaagtctatgcgagtttatacatgactacgtggagacaaaaaataactcaggtgctgaaaaggaatcatggtcactgtttgagaagttaattttcagcccaatacaggtttcttctgaaaacattccgtctttactggatggcgcatcatctattgccgagttagcagggaaagtattgtctaaagattcaaaataa

SEQ ID NO: 215608 - DNA, 1119 bp, Klebsiella pneumoniae
atgagtgacctcaaagagttactgtccgagctggatttcgaacaatggctggatatggaaggcatcatctatcgtcgcggcggtgtaagcgcccgcggccgcgaagtgaatatcaaagaatgtccggtatgtggaagcacaaactggaaggtctatttcaacctgaccaacaacgtcggaaaatgcttcgccggcgatcacccagaagaaattcaatttaacaagctggttttcctcaaacactacagcggtaagtctcgtcgtgccttcgaggaatacgtacataacgcactcctgtctcaaggttgggcgccaaaaaaagaagaggttgtgctggccagtgctgtggaacttgaaggcccggtggctttaccgcggcattatgagcttccaattgacggtcggctgccggactatcttgttgagcggaacattaccccggagctggccaaatactttgacctgcgttactgcgtcgagggaaaacatgcttatgtcgacccatataccgatcaggttaaagggcaggcattcgatatgcgcatcctgataccgatttacgatctgaatggggtgatgaagacattccaggggcgtgacatcaccggcgcagcagaacgccgatatctctttccaatgcagctgccggcatccgggaggtttctctataacggacataacgcagttggaaagcaaacagtcgtcgtctgtgagggggctttcgatgtcatgggggttaagcgcgcgatattcgacgaagagacgctccgggactacgtagagcccattggcacgttcgggatgcatctgtccggaaacacgactgtagacgcagaagaccagctgggcgcgtttctgtcgttaaaggcagatggtttgcgaaacgtcatcatgatgtgggatagcgagaagcaagcgatccgaaacacaatggcggccgccagacgattagccagtatagggttaaatgtgaaaatagcctgtcttggagaagaagggctagatcccggggaggccacccaggaacaaattctcaaagcctactatcgtgcaaaaccctactctaagcagctggagctgcagagcaaggttctcggtataagggtgtttaattcgtga

SEQ ID NO: 215609 - DNA, 1341 bp, Klebsiella pneumoniae
atgaccgaactttgccacacgggacgagggttgtctgaagagttcgacgacgacttccagaatcgtctggcggcgtatttttgccgcgatcatgagtttctgactcgtgccggcgatctggttgcccccaaccaattctccaatgcggcgaacgccatactggtgaacatggtatcgggctatttccgaatgtataagagcgcgccttcatcggcggccatcctcgatatgttgaagcgtgctaaacgcgataagacgatcagagaagagatgttcccggacgttgtggcggcgtttaagcgggtgctctcggaaaaactctctgatacggcttacatggtcgaccaggtcgcgacgttcgctaaaagtgtagcgttcgacgatgcgttgattaaagcggccgagatgaaggagaagggcgacttccagggagcgatggccatcatggccaaagtgcagcagatcggttctaacgaagcgacgggcatttatgactattacgcctctgcagcggagcgttacaaggcccgtgaatatgaagcctctgatgattacgtgccgaacagcatcaccactggcctgccgctgctggatcgtatgctctatcaaaaagggtgggcgaaacgtgagatggtgctcttcatgggttttgcgaaatcaggtaaatcgacagcgatgggggagttctccattaacgcaacgctggccggctacaacgttttgtatctttctctcgaagtgcatacctcgattctctccgatcgcttcgatgcgcggctgtctgaaacggagatgtcaaagctggtagagcagcgtgacgacgttcaccggaaactcgcggagcttggcgcgacgaaaggggtggggaatctctgggtggttgagcgcccgtcaggaagcatgtcgcctgcagatttggatcgtatgctcaatagcatgaaagcgaatggcatgatcccggatatggtggtggtcgactatgcggatttgatgcgtgccagttacgacctccgtgacgaccgggcgaacatccgttctatctacaccgatctgcgtgctctctacgataagcacaacgttgcaggaatcacggcatcccagaccaaccgtgaaggtggttcatccgaagtggccaccatgatgcacgccgcggacaatatcgaaaaagtccgtatcgccgacttagtcatcactatcaacaagactgaggaggaagaagccaaaggcgaagcacgtctctattttgctggttctcgtaaccagaagggcggggtgagtattcgcgttaagcagaacctcgaacagatgcgcttcatcgagcggatcatggaagttctttaa

SEQ ID NO: 215610 - DNA, 726 bp, Klebsiella pneumoniae
atgagccagatcttttttgacaccataaacaacggccagtacgacttcatgacagagtgggacacggtcgccatggacaagtgggttgcggaaaacatcggtctttcacgatgccagggggaggctgagctctttgatacaaagtggtttgactatcgcgacatgcacccgctgatggcaacctgcctgttcaccgaagcctataagcgcgcatactcacagatcatgctgtctcatggccgcgagcatttcgagacggcgccattcagcactggtctgaaacgcctgccttaccaagagctttcggcggtgaacaaaacctctctctggaaagctcgccagtttgcagatcggtattgctgttcttatgactattttatatcaactgttctctctgcagctgcacgccggctctgggacaaattacctcgccctcagcatctttggcagccagaactgattgagatcttcgaaagcaaactcgccaatcgtgcgggaacgcgtctggatgactctgtcgtgagttttaagcacttgggagacatgcagcatgacccaattcaggaacgttactttgaatgggttctggagcgtttgaagcacatcacccgtgataagcgtatccgcaccatcttctctgctgtctggttgatggagctggtgcctgagcgcgttatatatgcccattacccggaagaactggaagaagcacggcgactgtgttga

SEQ ID NO: 215611 - DNA, 759 bp, Klebsiella pneumoniae
gtgctgtacaaatacgtagggcatgaagacccaaacgaattaatcaaaattcttaaattcttcatcgaagatggaaccatccgagccacccggccacacgacttcaatgatcctgccgagttcaaagccaaatttagttttgacgccacgatccaagagaagcttgtccgatatcatgagatgtggcctggcaaaagcgacgatgacggtgagaactggttaagagggcgaaccaaaaacgccgaagagtttgacgcctatatgctgcgcggaaatctgcttttggatactggtgtgatatgcctcaccagaactgacactaattacctgatgtggtcgcattacgccagctcccactctggattttgcatagggtttgatgacgctattgtggaagcgctggatgaccgacacacagcgttaaacggtgacgtggagtacgtgaaatcgccgcctgaagtgaacttctataccgctgatgtgtacgacattgtcagagccatctttctgcacaagggtgagagctggaagtacgaagaagagttccggattatctctgagctgccagggcttaagaagttggacacctcgctcatcaaagagatttctatcggatgcaaaccctatccagagctggaaagttttgcccgtgaactgctgcacagcaatctggccgtgtacaaaatgctttgccctaccgactcgtaccaactgaagcgtgtggagctggacaagaacctttcttttcaaggttactag

SEQ ID NO: 215612 - DNA, 363 bp, Klebsiella pneumoniae
atgtccatgaaaatgggtgatctggcaaaacgtccggctgcggaagctgctgcgcctaaaagcagcaccccaatgcgccagcccgtccgtccacaaggccgtccaacacgtggcaaagagaaaatcaaaagccgcacgatgtctcttgaagacgagtatttcgaattactggagatgatgaagttcatccctcgcttcgagaagttcacccgttctgatgtgatacgtgcagccattttccatctggcagagaagtccccgcaggaaatagaggacatcgtaaagatgaacgaggcgatcaccgcagccgatgtgacgatgcgtaccgatgaaatcaagcgtgagctgatgaagaaaggttaa

SEQ ID NO: 215613 - DNA, 666 bp, Klebsiella pneumoniae
atgactcagatcattgtggtgggcggtaccaagggtggcccaggcaaatcgactgttgctcagcaaattgcagcctgtctgaaaatcaaaaagaaaaagaaagtccagatcactgatatcgacatccagcgcaccacgacaggatggtgtgaagaccgccggcataatgaagagttggagctgatcccgttcgcctatgtccaggatgacatcatcaaacacatcacttcgcttcgcggccgttacgattacgtcgtagtcgacgctggtggttttgactccgaaattcagcgccacgcaatgttgatggccaacgtgatccttatcccgcttcgcccgaaacgtcgtgatctgaaatccttgcgtgacatcgaccccattgtcgacagcgttagcagcgtgaatgacaaaatcaaaatccgtgctgtaatgaaccagtgcccgtctctgccttcccaggctgcgcgcattatcgctgcaaaagaaattgtcgaaacctttggcatcgaggcggtaccggtgaatctttacaaccgcaacgtctatgacgatgccgaagaggcgggtcgttccatatttgagatgaccggagccgaacgcgacaaaaaggctgaggccgagattgaagcattagtagaatacgtaatgaccttggagggtgaataa

SEQ ID NO: 215614 - DNA, 558 bp, Klebsiella pneumoniae
atgtctaactactctggtttaaacattctcaaaagcaaagctaaagatttagctaaaaaacaagggattaagctaacggaagctcttgaagccatcgctatcgatgcagcgttttcgaactaccatgaactttcatctgtggcgaagcgatttccattagaacctaggttaatgaaggccgcttttggtgagacgcacttcgaaaatgtcatttttttgagtgatgtttacgttcaatttgagatggctgttgacgaacttttatccgatgcggttgcttcaacaaatgctaatggttttgcagtatatgacctcgagccaactgaagttcagtatgacgaggaaaagggactgttgaacatgactgtggcgttcagttatgaaggtgagcaaatgccagatcattttttctccggtacatcattcttcttaacagcaaatgttcctcttatttatcgtgataataattggctaatcgctgaagaaggtatcgaaataatatcttcagactcaaatgcagatcctgacagcgactggtacgaccttacagatagctga

SEQ ID NO: 215615 - DNA, 186 bp, Klebsiella pneumoniae
atgcttctgccgttcatcgcgagcttcgcgataagtggatgcgtgattaaaccccagaccgtgggcgtacaattctgcgatggggctaaccctatctacatcagcaaggacgacgccctgacagaagaaactgagagggaaatcctgatccacaacacgctcggtgagcggttgtgtaagtggtga

SEQ ID NO: 215616 - DNA, 252 bp, Klebsiella pneumoniae
atgaacggcagcctgctttcaaaggtcaaatcgaccatcatgactttggctgccgtcttcttagtgcttgttggggcgtacacctggggtggacgcgctgcccggcgggccatggaagaaaaggcgcagagagaaaacaacaaacggcttcaaggaacaatggatgtgaaaaatgagacgattaatgaagtcaggactaaggatgcttctgccgttcatcgcgagcttcgcgataagtggatgcgtgattaa

SEQ ID NO: 215617 - DNA, 693 bp, Klebsiella pneumoniae
atgagtactccaagaggcattcgtaacaataaccctggtaacctggataaggggtcgccgtggcaagggctagtaaacaatccggcggaaccgcggttctgcacttttaaagaccccgtatgggggattcgagcactgacagtaacgctcatcacctaccatgataagcgccgcgcaaaagacggttccagcatcgatacgatccgcgaagtcatcgagcgttgggcgccgccgcatgaaaacaacactgccgcctatatcaatgaggtctctaaagctgtaggcgtgacgccggacatgatcatcgatctgcatgactacaatactatgcggccgctggtggaggcgatcattcgtcatgagaacggtcgtggcccgttgaaaacactcaacagctggtattcggccgaagttattgacgaaggtatgcgtcgcgccggcgtcgttaaaccggtaactgcagtgaaagcggtacccgtcacgaaagaaacagccggcgcaacggtgactgcaggtatcggtattgcgcagctggcggacgtaatgccgcagatctccgttgcgatggataaggcccagggacatatcaccagcggggataccgttcgcattatcttcggtattgcgaccattgttgtcgccggctttattgcctggtcgcaagttcgtaagcatcaggcaggagtggtgtaa

SEQ ID NO: 215618 - DNA, 324 bp, Klebsiella pneumoniae
atgtcaaacgagatggcaggcgtgacgccagagcaggtggagcgcattgccgcaattgttgcgcgagaagtcgtaggaaaattaagtaaggagcttcgcgatgatattggccaggaggtcaacgatcagctgcgaacctactttggtgatatgactccggcgcaacatagcattcagcattccaacctggacaaacttcttaatcggctcgacacgatttcaagcgggttctttggaggcattatttccaaaattacctcgttcctgatcaccgtgctgcttttgggtttggccgcttatggcgtgaaaaatggactgcaataa

SEQ ID NO: 215619 - DNA, 543 bp, Klebsiella pneumoniae
atgtggttcgaagagcaggtagggacaaaccaccgactaattctttctgttggtggtttttcgcaaccaatacagtattggcaattcctggccgacggcaatatctacggaagccagcgcggtagcgttcagtttctggggacgtctgacgctcgcctgaagcacgatatcacgcctactgatgggcagcagtcagtagaccgcataaaggcgctggagctggtgacgttcgtctataacgacgacgaacagaaccgcgtccgccgggggatcatcgcgcagcaggccgaggaagtagacgagcaatacgtgaaacacgttaatatttcgtacctggatggtaataagcagattaacagtgagcgccttcagctcgacaacaacgtgataatgatggacacgctggcggcggtgaaggtactgattaagcgagttgaagcgctggagaacaaacttaactcaacagaggagaaagagccccccgtgattacaaaccagaatactctagatgctggcttggctatgaccgatgaatacaaataa

SEQ ID NO: 215620 - DNA, 12171 bp, Klebsiella pneumoniae
atggatcagttcaagaaaaagagattgcccctcctgattgcgggagcgggcggcaaaaagagctcaggctcaagccgtacaccagttgaagcggatgataccgttaattcgcgggccatggcgtctatcctcgatctgctcggggaaggtgttgttggtgggcttattaacggtgctaaatctatcttcatcgatggcgtggcgctggagaacgaagacggatcattcaactattccggtgtaacctgggatttccgggatggttcgcaagaccaaagcccgatgcctggtttcgattttgtcgaaacgccaaaggccgttaacacacagctgaaaaccacaaacgcggttacggtcgccatcgataacgacgacgctgatcgtgtccgagtgatcatgaagttcccgtcgctgcgtagcattgacaagaaaacaggggacacaaacggtacttcggtccagtttaagttccagctggccaatggcaatggctctttctatgacgtgattgctacaggtgagatcagctctgacgtgacgctgactgcgaaaaagactggtgtctactaccgcagttacgaaatccagcttccaaagcctgggcgtgcctataaagtgcgcgtgcttcgtctctccgccgacagcaacgatcagtatctctttaacgatacctgggtcgactctatcggtgagatcgttgacaccccaatgaactacccgaactccgttctggttggccttaaggttaactctgagcagtttggtagctctatgccgtcacgttcgtatcttatccgtggcctcaaaatccgtgtgccttcgaattatgatgaaaacacgaacacttataacggcgtttgggatggaacctttaagcttctgtcgtcttccaacccagcctggattctgttcgatctgctgaccaatgctcgttatggcctcggcaaatttgtttcggagtcaatgattgaccttggccagctttatcagatcggtcgctactgcgacgaagaggttgatgatggctttggcggcaaagaaaaacgctttgcaatcaacacccagatcaccagtcgtcaggacgcttatcgtctgattcaggatattgccggcgcattccgtggcatggttttctgggctggtggcatggtgaatatcatgcaggacagcccgtctgaccctgtcatgctgtttaccaacgcaaacgtaaaagatggcctgtttacctataaaggctctgctcgaaaagatcggccgtccgttgctctgattacctataacaacaaacaagacggctataagcagaacgttgagtatgttgaagatcaggaagcgatggcccgttatggggagcgcaagaccgaggccgttgcgttcggatgcaccagccgaggtcaggctcatcgtgtaggtttgtggctgctctataccgcgcgtatggagtcagacatgatcacctttaccgcgggcctggacgcctcgttcctgatgccgggcgaaaccgttctgattcagaacaaatatcgtgccggcaaacgcaattccggtcgcattgtctctttcaccaaaaacagcatcaccctcgatgcacctgtctctctgaaaaagagcggtagcttcatccgcatcatcaatcaggaaggcaaaatcgttgagcgagacatcaacgagaccggcgacaacatcactaaagttaccttcaagacggcgttggccacagccgatcaaccagtagcgaatggcgtctggacgatcaccgaaccagacctggttccaatgcgggcgcgcgttgtcgctatcgcgcaaggtgaaaccccggggtcgtttgatatcacggtggtgcagaacaatgcatctaagtaccaggcgattgataacggggccacgctcgttccagaaaatacgacggttcttgatcccacatattccaaaccgagcaatctggtcatctcagaaggcacctatctgtccagtccgggcaacttgtccgtgaagctgatgcttgcctgggaaggtaaatcaccagaatactgggtcagctggcgccgctccgacgagggcaacgtctccaactggcaatctgcccgcgccacggaagaacaatatgaaatcgtcaatgttgccgaaaatgggcgatatgacttccagctgtattccgtttccttcggcggcaaaaaatccgagatcattactgctgtctatcaggtaaaaggcacgatgacgccgccaggggcgcccacatcactgaccgcggtgggggattatcgtaacgtggtattgaattgggttaaccctgattcagtcgacctcgcgcagatcaacgtgtatgcgtccaaaacaaataagctggacaccgcgacactcattgctcaggccgccacaacgactttcactcacgctgggctgggtgacaacgagacctggtattactggattcgtgcggtaaacaaacgtgggatggtaggccagccgaactcgaacctcggtacagaggccaccactcgcgacgtattgtctttcctgaaagataagatcacatcttctgaactcggcaaggagctgctcgacgaaatcgacagcaaagccactcaggaggcggtagacaacgccattggcgaggttcagaactcagtcaacgagtctattcagcaagttgaaaacgaccttgcgcaaacctcctccgaaattaaggcgcaggttgactctgtcaatcagtcgctgaaagagaacattgataccgtcaatcagacaattgtcgacaatatcgatacggtcaaccagaagatcaataccaacatctccaatgtaaacagccaaattgaagctgcaaaacagtcgattaaagacggcgacgctgctctgtcgcaggagattaagaaagcgcagtcatcactgacaacgtcgctgtcccagaccagcaaagatctgactgcggccattcagaaagagacgaatgaccgtattgcagatgttaatgatgcagccaagcaagcggccgaccaactgctgagcgcgaagaatgagctgaagacctctatcgatagcttgtctgaggttgtgacctccggtgacgaaaatctcgcgcgacagatctcgcagattgccgccggcacaggggaacagttcgactctctgaaaatctggtatttcgaccaggacgctgaaggctggacggaagatgataatggctacacgccaatgagcgtcaccagcgatggctggctgaaagcgaacaatccgacctcaacctgtcgttcccctaacggattgacgatcgatgcccatgcttatcgtttcattaagatgcgcattaaaaaggttggcaacccaacctggaacgccaaaatgttctggatcggcgctgatgaaaccggctggaatgctggtcgctccgtggttatcaatgaaccggaatacgatgacaagggtattgcgattctgaccctgcacgacattgagtggcgagattcgacaacgattcgtcgtttccgcttcgatttcacttcaggtcaggatgcggacaattacctgttattcgactggatcgccgtcggtcggccgacgccgggcgcaggcatggccgcgttacaggaagagcagcaggctcgtgcgaatgcggataccgccgaagcgcaggcgcgcagcacattggctgcacaaatccgcggttcctctgaaagcggaaatctggacgacattcgctccggtctgatctatcaggagaaaaatgctcgtatcaccgccgatgctgcggaagcgagtgcgcgtgaatccttgcagactgaattcaacagaaacaaagcctctgttgcagaagagctgcatacgctgtccactgaacaagcttcccaggcaagcaagattaccgggttgcaaacaagccttggccagaaggccgatgccagtgcggtacagacaatttcccagaaggtcgaagagcagggcaatacccttaaatcacaaggtgcggcattgtctacgctggataatcgcgtaggaagtgttgagtctggtgtatctgcgaacagcaaggcgatcaccggtctgcagtcgaccgtaacccagcaggataaaacccttagcagccagagtgaaagcatcaccaccctgaataactcgctgagcgatatccagagcgataccgatactgccaaaagcaacccgagcaatttgctggttaacgcttcctttgagcgtgacctggcagggtggtctgcaggaaacagcgtatccagtgttatcaaagcgagtgcgccccattctggtagcaaaattcttgtttgcgccgccggaacggtgcaaatcgcgcaatctgtaagcgtcgtcgaagggcggacatacaagctgtcctcttttgtgcggtgcaccactgatgcggtgatcagcagccctggcaacaacaaactgcgtattggcgcggccacgttgctcaaagagattccgatccgtccggagaatctgcccaaagatgaaacatggaaagaggtctctgatacctggaaggcaacgctgaccggtaaagttgacgtatcgatcatgtcttctctcaaaaccggttctcagtacttcgatgatgttggttttgttgacgtcactgatgctctggcgattgaggcgaacgccagtgccaccaatgctttgacctctcgggtatcgtctgttgagggcaccatcacaagccaggggcagcagatcacttcgatgcagaacagcatcaagaacaaagctgacgcttccgctgtgactaatctgacaaaccgcgtaactgctgccgaaaatcagatctccagccagtcccagagcatcaccagcctgtcaaactcgctggataacgccaatgctgatgcggatgcctcgaaatcgatcatcggcaacatgctcaaaaacaactcttttgagcgtggtttcgaaggttgggagtatgtcggctggactctgctggaggcccagaaccccaaatcggggaaatacattatccaggcgggcaaactggcctctggcggtgactcgggctgcaaccaaacgatcgagctgcaggctggcaagacttatcgtatcggcgcatgggttcgcaaatccgctgacttcgccatcaataatgccggtaacaacaagattagtcttcgaaacgcagatctgacgccgataaaggatatcccgatcaccggcgccgggctgtcgactaactgggcacttattagcggcgagtatacgccagccaaaaccgccagcgtggttgtgtctctgcgcgcaagtgtcgcttccggctatatgtatctcgatgacgtcttctgcgttgacgtgagcaatgagaaagcgattgatgcgacgtccaatgcgttatcaaccctcaacagcaccgtgacccagcagggaaaagacattacgtcgaactccaacagcatcacttcgctgtcaaaccagatggttcacggccgccagaacatgtgggtgcgtagcgtatacaacgtacaactgacgaacaataccactgagccgacctttagcgatatcaacggtaaggcgccaatctcgatcgatgaggttcctgacgcggcaaaactggactttgcgagcgccggcagttacgtgatcgcgcattacaaagccttcgtgaaggttaatgctgataccaccatcactatggcaccagggtcccgtgtttttgatgatacgggcgccgtatacgtgaacggtgttagggctgcttttggtaattcgagctggaatacggttagctttgatctgaaagctggctggagcacgattgagttcctggtgaaccaatggactggtcaggcttacattaacctcggctttaaactgtccgagaaggtagcccaactgaattctgctcttgggatgaacgcgctttcgaatgccattagcgccgtcacctcaaacgtcagcaccgtaggtgatcgcgtcacgagtacctcacagagcgttactgacctgcgaaatagcctcgaacagaccaacgctaatctggcgaataaggcagatgcacaggcgctgtctacgctgcaaaatacggtctccaagcagggggatacgatttccagccagggtaacagcatcacgaacctgaataacaccctgaccgctgccagaaacgccggtgacaacctgatcccgaactacgatttcctgcagggtgcaactgcgtgggatatccagtatccggcgggcgttactttcggcaactttggtgatggtaaggctggggttaagctgaaccggacgaccactaccagcccaggcatcttctccaacaacaacaagccgctgccgcttaatggtcagcgcaaatatcgtgttgtggtcaaagccaagggcgtgtccggggcgatgaacatgttgatccggcgccagaataaaatcggccagaccgacagcaattatgaagataaaaacgtcacactaaccagtgagtggcagaccattacctgggagactggacttactgcctctaacgctgatggccagaactttaagctttacgcgcacccggctaatgccgaaatctgggttgatacctttaaggtctttgatatcacggatgaggtgaagatcaaggctaatagcgatgcgctgtctacgttgtcgagcacggtgacgcagcagggtgacaagatcaccagtcagggcaacagcatcactaagttgaccaatgacctcgaagccgctgacgcaaacatcgcgaaaaaggccgatcagtcggcagtcactacgctgacaggtcgggtagagaagacggagtccggtctgacggcggcgaacagcaacattacgtcgctcagcagttctctgaaccagcaatccaaacgcggcgctaatctgcttcctgatggcacttttgaaagctacgcggttggccacaatctatcaaataatcgcgttatcgtgaccactgatgactcgcatggcggtagtaagtgcatccgtgtgacgcgtccgaatgattacaacgctaacgcaactgataacagcgataatcacattttcagcggtttccaggtacgcgataacgcagtcttctatatggaatgctgggttaagctggatgccaagagtaccgctatggccgagaatgcgcagatctccattggcttgtcgctccagtatcaggacaattcctggcagtggccagcagtaaccaaagcggcgaaagagctgtctacagctcaatggacgaaggtttctggttacctgaaatcaacgaagagcggtattaagcaggcaatggtgaggatttctattcctaacgttagcagcgttaaggcgggtaactcattcctcattgatgacctggtcattaccgaagtgactgatgcctacaacgcgcaaagtacagcagatgctaacgccaatgcgatttcgacactggactcgaccgtctcccaacagggtgaccagatcaccagtcagggtaacagcatcaccaaactgacaaatgacctggcaacgaccaataacaacgtcagtaaaaaagcggatcagagcgctttaagcgtgttgtccgggcgcgtcgatcaaacagaatcgggcttatcctctgcgaatagcagtatcactgcgcttaattcatctgtacgcgcagggaatgcgacaagtggcgatttgattagcaacccgacatttgacccagagtttagtcagatgggcttcactgtggtttccagctcgtctgagggcgtgccagccaattgcccatacgcttatgttgcacgcattgcggctcgcgaccatcaccccaattttgctgctattccggcgacattgggggatgtctatgaaatgtctgctctcgtcgcgtgtggtgccggctccgctgatttcaacctgtatctcggaaccgcaacaaggccaagcggcagcgtgggcgcgcctctgtcatccggcggcaaccgcaaggcgtcggccacatggcagcgagtaacctggcgattcaaaattactcaggggattgtcgatcgcggcttcttccgtccattcctgcaaattaaccagtccagcccattcggcaccgtctggtatgtgactgactggcatctgcggaacgtaaccgactcctccaaagtccaggattccctcgatgctacggcgaaagcggttgattcgctgacctctacggtaaatcagcagggggagaacatctccagcattggtacacgtactaccaatcttgagaataatttgagaacaacaaatgcaaacgttgctcaaaaagcggacgccaatgctctgacggcactgaccaaccgtgttacccagaccgaaaaagacattaactcaacgagttcttctgtcacgaatctgaacaataaggttgatgcgatttctgtcggcggtacaaacctgatcaagaactccggcgatatgaccggctggtcgaacgttgtcagcgatacgtatcgtggtaatgcggtaattggcgcaactgtaaaagccggctccggttacaaggatctgcgggaaatcacgcttgagtcgccggtcgatgcaggtgagtacgtttacagcttctatgcgaaaggcggcgttactggccagacgatgacggcgttcttctacaatccgaacaccacaacgtctatcgagaccaaccagggtgcgaaaggtagcaacagtgatggccgtgcgcagttcacgctgaccacttcatgggcccgctattgggttaagtggaagcagacacctactacgggcactaagcgcctgattctgtgtcgtatcgagagcaatacctccaaagaccagacggtgtacatcaacagtccgaagtttgaggtaggtaacgttgtttccgactggaacgagtctccgtctgatagcgccagtgcgtcggctgtggattcgctgacaacgaaagtgaatcagcaaggcacttccattagctctatcggaaatcgcaccacatcgttggaaaacgggctatcgacagctcagaacaacattgccaagaaggctgatgcttctgcattgcaggatctccggaacacggtgacatctcaggggggcgatttaaccgcggcgaacagtagcattaccagcctgcaggcctcgatgaaccgtcgcactgtgtttactgtcactgcacgggggaatggcaacagcgtaactcctggggtttttgatgaaagcggcaaaaacctgtttacccctggtcgcagctgggcgctggtcacttttgcaaaacacagcgacggatcaacggtgattgcgacatccaaaacatacgatgtctttggcagcgcgaataatggcgccacgatgtcggctgatatcgaggcactggccagtgggacttacgtttgtgtcctgacattcgatgagccaactggcaaccgaggtaaagtattgtctgccctggaatctcttggtggcacatccgaagtcgtcaactctctaccgtatcgtggtgcctacattctccttggccgcaaaggcatgaagcctggcgatggtctggaactgcgtgcgccaaccggtggcgacggcaccgcccacatctcgacctcagtcgagtttgtgaacggggtaatgatgggactgggcgccgccggcggtgtgatgatgaaggctgatgcgaacgcgtcggcaattaccacgctccagaacacagtgaagacccagggggataatattgactccctgagctcctcgacaacggcactggaaaacagccttgcgtccagtaacgccagcgtggatgcagcaagccagatccccgggaacctgatcgtaaacccgtcttttgagcgtggtacggagggctatacaggctggagcgggattgccacggtggtaacgctgcaggttccacatcttggcaccaaagccgccaaactggcggcgggtggttctgcaggcgtgggccagaagatctccttcaaaaaggatcggtcgtacaaaattggtatctgggcaaagcaggaccctaataccaccattcagtcgaccgacaatacaaaattccgtgtggcggacggtaatggcctgattgcaagtaaggcttatggcccgttcacctctaactggcaggaggtgtcatggacatggaaggcgacaaaggatgtccttgctgacgttcagttcactgctttcttgtcagccggcgcgatgtactttgatgatttttatgtcgtcgatgtgaccgactctgttgaaactcaggcgaactcgagcgcgatcactaagctcgatagtcgtgtgaccaagacagagaatgacatcaccagccagggcagccaggttacgcaacttaagaatgaccttgcgaccacaaacacaaatgtttcgaagaaagcggatgcagttgcgttaacggcattaacgaaccgcgtcacgcagaacgagaaagaaattgaaacccagagcagccagacaacttcgctcaaaaactctttgagtactgttcaggcgatggggagcaacccgtggtttgatggttctctggagacgtactccgaaaaccagcagatcagcggctcgcgtgcggtcgtcgtcagctctcagaaacgaagcggaacgaagtcgttgcgtgtttcccgcggcgccggtgagggcggaaacagcgataaaaccatcggtaagtggattgctctgcgtgaaaatgcggtattccgcattgaactctgggcgatgatgccggcagatcagtcgccatcctctgggtggtcaacgctcgttggtttgcagacccaaaacgctgccaacaacaataactggccgacggcaatcactatcaatgaagccgcattgggtgcaagaggcgcatggaagaaattcaccggtacgctccgtgtagccgctggccacactcgcggcgcattttgggtatctacccgcggcacaactggcactggtacaccggggtatgatctatatatcgatgacgttgttgtcaccgatatcacggacgcaaaagaggcacaggattcggctaatgcgaacgcatccgcgctcaccagccttacctcacgtgttaccaatgtagaagggcaggtgacatcccaggcgtctcagctgtcctctttgacgtcccaggtgaatgatgcgtcttcgaaggttgatcagatggcgcagaccatcaccaacaacgagaaaacgcagtcgtcgctgaataccagcttgcagtcgcaaattgacgcgcaggcatcggcaaacatcaaaaaccagacggagttgaataacgccaccacctctctggcggcaattaagtcaactcagcagacccaggccacaacgataagcgcactgtctcagcagcagacgaatttgacagctcaggtaggaggccagtcagccgagctgcaggagctgaagaaaacggttgttgaaaacggcaacgttaacagtacctggatggtcaaaatggaaaccaacagcaacggtaaaaagtatgctgctggtatcgctttaggtatcgatggcaaaaatttgcagagccagtttctggttcaggctgatcgcttcggcttaatcaatacctctaacggaaacacgaccacaccatttgttgtggaaaatggcgttgcctacatgaatgccgctgtgattaaggatggctccatcaccaatgcaaaaattggcggtgaaatccgatctgacaatttcgttaacggttcaaatggctggagaattggaaaagacggtagttcacagttcaacaacgtagttattcgtggtgaagttcacgcaaatactggtgtgcttaataacgtgactattaacgagaactgcactgtgcttggcactgttcaggccaataaaattgttggtgacgttgtgacaatgaccgaccgtgttgttaaaaactggccagcttccgggaatacctcatccggcacgcgctacctgattgcaacgattgacggtatgccctttgaacggcgtatggtgttcaatggttccgttgcgattgttcaggtatggcgtcagaacgtaacaattcgcgttgatgaaacgaccgtttggacttttgactctggaaacgatggtaaggactttgaaacatcaatcttctcaatccgtatcccggcgtcaaacttcggtcaacgtcaccagattaccattcagtggccgaaccgtggcgatagcggtcagttccggtttacaggggttgtctcgatgtacagaactactggctccatctctctggcttaa

SEQ ID NO: 215621 - DNA, 612 bp, Klebsiella pneumoniae
gtgtctgaattagttcatgttcagctcggcggtgcgatggcaaagaactttggccgccactggaaattgaaggtgcgcaacaccaaacaagccatcgatttgattgaggcgaatcgcccgggctttaaagcctggattaagcgtaaccgtaaccacttcgataagtaccacatccaggtcacaaataagcagggccacaagtggtcaatggacgacaccgaataccagatgatgggcgagtcggaaaatatcgcaaaaatccgcattactcccgtaccacgtggcagcggtggtaaggcgtttgggtggttccagactttcgtgggcgccgcgatgatcgctgtcggcgctctggcctctgggctgacttttggtgcgtcttccgcgctggtgatgggagggatgtcattgatgatgggcggtgtgtccatgctgatttcgccgcaggcatcaaatgcgtctgtcagacaggcggataacacggattcgttttatttcgatgggcctcaaaacaccagcaaccagggaaacccggttcagcttaattacggcgaggaaattttagttggctcacagattgtgagttcttcaatcaccatagaccaactgtaa

SEQ ID NO: 215622 - DNA, 798 bp, Klebsiella pneumoniae
atgagtaaccagacgttacctgagctgggctcagaagtcatgcaggatatctatcgttgcgctatccaacgttacccgaatgaagcgtgtggctttctggtacgcacacagggtgagaaatatcgctttatggaagcgatgaatgtctctgaaacgccacgtgaggattttgtcatgcgtgccagcgacattattgcggccgaagatgctggggaagtgatcgctatttggcactctcacgttgagcgcagcgcagaggcgtcagacccggatcgctccgggtgcgaggcgacggaactaccgtggatgattctggcaattcgcaaaaatgtggaaagcgatatgccattccactttagcgaaatgaacgtcatttatccgtgtggttttgagatgccctacctcgggcgcccatacgtattcggtgtgtttgattgctggatgctgtgccgcgattacctaaagcgtgaatttgacgttgagctgaatgcaaacgcccacctgcatattccttcctggtacacgggggacaacgacatcctcgaccagaactaccgaaatgaaggacttgtccgcatggcgccggggacggagccccagcgcggcgacatcttcttcatccagtacgggaaaatgccagatcactgcgcggtatacatcggcgacggcatgatcatgcatcaccagatcgaccgtctcagctgtcgggcttattacggtgggatgtatcagaagcacacgacgcatcacctgcgtcacagggatttactcaagggagacgagacgtgtctgaattag

SEQ ID NO: 215623 - DNA, 699 bp, Klebsiella pneumoniae
atgggtattagagctgatattcagagtttatcgccttctgcgctcattgagttgttcgagctggatatgtcggtgacaacctccggcggcaagttgtatttccatgccggcaccaacgggcttagccagccaattgtctggcagggagtttcctatgagccgtggccaattaaagcgtctggctttgataaaagcggtcagggaacacttcctcgtccaaagattcaggtttccaactacgacggtgtaatttctgcggagctgcaggccaatgacgatctgattggctgcaaaatcattcgcaagatgacgcttgcacgttttctggatgcggtgaactttccggatggaaacccgaccgcagacccaagtcagcatttcgctgatgaaatgtggttcgtcgaacagaagaccctggagacacaccagtatgtcgaattcgagctgtccagcgtcttagatctgatgggtgttcaactaccgtatcgtcagatcatcaaaaacagctgcccgtggaaatatcgcggaacagagtgtggctacaccggcccatatttcgacaaaaacaaccagcaaacctctttggccggcgccgactactgcaccaagcgttacgacgcctgtaatgctcgtcgcaactacttcgcgaatggcgttattcattttggcggatttattggggcgacacgatatgagtaa

SEQ ID NO: 215624 - DNA, 336 bp, Klebsiella pneumoniae
atgtcgaggaaagtatttaattggtatccagattatgagtctgagaaaaccgtaaagcctaacgtgaccgtgctgaactacggcgacgattacgagcagcgccagtcgcaggggctcaatcggattaaagaagagtggtctctcacgttcacccgcagccatgacgtggtaaacgacgttgatgactttttgactgcccgcgcaggggtggagtcattcatttggactaacccaagaggcaaagcaattatcgtggtttgtgatagccatacggtaaagcgttacccaggctatcaagtgcttacggcaacatttagacaggtttttgagtcttaa

SEQ ID NO: 215625 - DNA, 4536 bp, Klebsiella pneumoniae
atgtcacaaaacgtagagtttatcctgtcgctggaagacaaacagtttacggcgtcaatcgaccgggcgggtaaattacttaccaaatttggcgagcgggctaccaaaccggctcaaaaaattaaaaacctcgagcgctctctgggttcggtctccagcattcttggcgctcttgaaacacgactcaattctacggcagacaaactgcaggacgtagctgccggttttgagctcgtttccaacacctctcgaaaggcacaacgtgaactgtccgctatcagcactgatttgcggacattcacagatcgcgttgattcggccacatcgtctacgcacaagttcctggcctcattgcggaaggttcagtcggaactcaatgagttttctgattgggtcaaatacgcaggagaccatgccggcaaattcaacactgagattaagggagccactacttctcttggtggaatgaacaccagactaaatgcgaccagcaagcgtctgagcaattgggggacaacgacaagccaggcggccgaggggttaaaaaaagtcaaagatcagatggatggcgttattcgaagccagcagctgatcagccgtccggtcagggtcagaacaaccacaacgggcgggggaggcagcggaggtggcgctgatcgatttaccgctgcgccccatcgcggtggtggtcgtgaaaatggcgtcttctcaggattacgcggcaatattttccttctgggagaaattggggatgcggccagaacggtcactgacatcctgtttggttggcagaagccgatcgtagaggctgcggccgaaatgcagcgtatgcgtgtcatgttgcgtggcttgaacaaggataaagtcaatcctggagaagccgctgctcaagacatgcagtatatcgtgaacatggcgaaaaacgccccatttgcgatgcaggctttaaccgactcatttgtgaagttccgttctgctgggctcgatcccactgatggttcgttaaaggcactggtggactcagtcgcacgttttggtggcgatagtgagttgcttaagcgagcggcggtggctgtccagcaaatgtctggtaagggcgtcgtgtcgatggaagagctccgccagcaattgggtgaagcggttccaaatgcgatgaaggccatggcagatgcggccggtatcacgatgggggagctaaccaaagccgtctccagtgggaccgttgaagcgaaacaggctctttcgttgatgtttgttggtttgcgtgcggaaaacgaaaatgccgccaaagatatgatgcaaacctacaccggtgcgctggcgcagctgcaaacctctttcactctgtttgccgatcgagtgggtcaggctgggtaccttgactctctgaccaaggggatgaaagagctgtcggccgtaatgaacagcgcagaaggcatttcgttcgctaattcactgggagaggggcttaccaccgcgattgatggcctgcgcgagctggcgcaatggttggctaagaatcaggagttggttattacgctgggcaaaattgtcgccggaatggtggcatttaaaatgctcagagcgggcattttaggtgttgtcggcgccggcggccagatgctttccaccttcatgaaaatgtccactgtaatccagacaccattcacgctgggagcgacggcagtcactcgtttcaatcgtgctgcacgcatgggactggcaccaatcccatcgctcatttttgccattcgtggcgcgattacggggctgaaaggggcattcgctgggctgactgcgtttatcgcagcaaacccgattggtgctgcgtttaccgttgcagctgtagcagtggctggactgatcagctatatgactatgctccacagcgaaacgtcaaaagtcgttgatgagatccgcaaaatccccgaggcgatgacggccgccaagcgggcacagatggcggattacaaggaacgtcttgatcgccaaatagctcagaaggagcaggagctaaattctggtgaaaaaatggtctacggaccagggatggccggaaccactatcaaaattgaccgtaagaaggtcgagtccgaactgagcgaccttcgcaaacaacgcgatagagttagtgggactattgaactgggggacactgccgtctccaaacgtctcgcaaaagaggcggctgaatctcagattgaaaaaatccgcgatgaaaacaaagatttttcggccaagttcgtgaaagcgcgccaggaagctttggagaaaattcagaagatcaatgacgacaagtctttgtccgatgatgaaaagaacaagctgctggggccattacgagaaacggtaaataaatcttatctggtaccagcccaaaagttggttgagtctttatcatcgcgcaagaccgcaactgaaaagcagatcgcacacttcagcgatctgctggaaaaggcaaaaaaagaaggaaacacagaacaggtacagaagctgcagggcagtattcgtggctatcaggaacatcttgaaactgttgctcaggaactgacacaggctgagtttgaacgcgataacgcggcgaaaaccgggaagggcgtgaagaccaaccagggaacagtgcttgggttgggcaccagcgacaaaggcgctgataaagcgctcgcgcagtacatgcgcaaccagatggactctgcggtttaccagcgcacgctgcctgatggcacaccaatgatggattttgaaggaaaacctatcattgggccgaagcagcttaaaacccagcttaacctgcagaaagcctccactgcatcgtctctggaaaagatgagtgagaaggagcgtgcagccgccatagccgcactaaccaaagctcgtgaacaggatgccgctgccgccgagagagcagggaagcgtaccgcgaatgcctctgaacgcgccgcgaagagagaggaaagcgcgcaacagaagctggctgccggctaccagaaggctctggataaagctgatcagctcatggggcaaatgggcgaaagttcaaaggccactgtgtcgtttgatcagtcgctgcgtgatgtcactaagtcactaaccgatcttgcaaacgccacgcctaacgagtttatctcgcaggagatggttgaccaggccaaaaaacgtctcgcggatttgaggaacgctacccccgaataccgtgaaatgtttaatcgccgcaacgtcgagcaaatgatcagcgcttgggcgccggaatcggattcgattatcagcgcaggcttgatgcaaagccatgaggagaaggctgccgagttttcggatacctacaaccgcaatcttaaggcgctgattgagctgcgtgataaagcgactgacccgaaaatcatctcgctttacaacaagcagcttaatcagttggtggccgctggcaacaatgcgctgattaagcaaacaggtacagcgacccagcagttggctctggagtatgagaacctggctgagcagattgagggcacctggacagatctgtttagcggcttaaccgacacgcttactgactttgttgttaacgggaagatgagcttctccagtctggccacatcgatccttaaagacatcaccaacatggtcgtgaagacccagatcactctgcctctcatgaatatgttgggaatgggaacgacaaacgccggcaatgcacaaagtggaaatctcatgaatggcgtagcgtctgcgatcgctaatcaaggggttcagctcggtaattctggtggggcggtggccaatggggataaatctgtcggcgaggccactaaggaggcagcctccggcgtgaactctatggggcaagcgtctcagaatgcggccagcggtttaagccaggcggtgaatggtgtctgggactggacgaagtcattgttcaccggtactgacgctacgaaagatcaaaccaaagcggttaacagcagcatcctcagtatggggaatctgtctaccgcggcgggggcactggcagcaacattcgccatggtaggtgcttcgtcgtcgagttcgtccagccgttggctgaatttcggtctgtcactggccagtaccgcagtgtccgcctgggctgggtcagcttcatcgtcttcatctgagccaaagcctaatgtgaagaaacacgccaatggcggcatctttggcaaggaaggggttgtacctctgagagcctatcagaaaggcggaatcgccacctcaccgcagttggcgatgtttggcgagggctcaatgaatgaggcttacgtaccgctgccagatggtcgaaccattccagtcacactttctgcagagtcggctggaaagagtacgggtaacgcggtgtcccctgtctcaattcaaatcaatgtgaccaaggatggacgaaccagcgagagcagcagtggaagcgagagcaatctctggaacggtgcagcgcggcaaattaagtcgattgtgcttgagacgattgccgaagagaaacgttctggtggttcacttaatccgcataccaccagagggtag

SEQ ID NO: 215626 - DNA, 234 bp, Klebsiella pneumoniae
atgttctggatgctcagccgcaatatcgatcgtctgcgagcggaagaggatgtccgcaatctgcaggtcgcccgcgtcgcccaagcggatggcgatggcgttaaggcgttcatggaggggttgcaactcaggattggaaggccagtcgttactgataaagtctaccgtccgcatatggataaggcagaccccgacgccaaagagcagctgatgcaaatttttggcagaggatga

SEQ ID NO: 215627 - DNA, 318 bp, Klebsiella pneumoniae
atgaccaaattactcgatctcgactccattctgccgccgaaaaaaagcatcaaatttggtggcaaagaatatcccatcgttgaaatgaccgtcggcctctttgtttctatcaagcagatggaagacaaagacctcatgaatatgtctcccgtcgaccaggtaactgcctacgcagaactggtacgcaaagtcattccgtcagtacctgactccgttctggagaaactgactgtccagcaactccagcagatcttcaccttcgccatggaagtgattgatgaagagaacgaaaaagcggctggcgaaggggcaaagtaa

SEQ ID NO: 215628 - DNA, 747 bp, Klebsiella pneumoniae
atgtccaatacccatgttaaaaacatcaagcttggcgcctgcaaggtgtcgtttggtggcgtggatctgggttacaccaaaggcggcgttcaggttgaaatcgcaaccgaaacgctgaaagtgaccgtagaccagctgggccagaccacgatctccgagctgatccaaggccgcaacatcaccattactgcgccgctggctgaatccgtgttgaaaaacatggtcgatctgatgccgggttccacgctgagttcgggcgaagataccgtaaccatcacgtctgcgcagggtgtgaacctgatcgacgttgcgaaagagttggtgctgactccgcaggatgcgacggattatgttctgaccatccctaaagcagcaaccgcgggtaacttcaccatgacctaccagtctgacgacgttcgcgtgttctcagttgagttttccgcttacccggacgacgctggcgtgttggggaaaatgagcctcccaaagccggttgagagcgtcacgctgaccccgtcttcaccgaccgtaaaagtgggcgctaaagttcaattgagcgcaacctttaccccggccgatgcaaccaataagactggcgtgtggagctctgatgcgactgataaagcgaccgtagatcagaacggactggtaactggtaaagctgtcggttcagccaatatcaccttcacaactaatgacggcgccaagaaggcgaccaaagccgtctctgtaactgccgcaagctaa

SEQ ID NO: 215629 - DNA, 393 bp, Klebsiella pneumoniae
gtgtttgtagaagcattcgcaaaattgatacaaaaaaaggggcttggaaaagtagggacggacattttctgtcactacatgccagcaaaagttaagtctggcatcttgctgattaatcccaatacaggcatagccatcgacccggatttgcggggtttttacttcgactcattcacgatagtagttcgcaatgcgagtattacaaaatctgttgaaatggccaacgaaatcatgggcatccttcctgttagcaacgttgagtctgacggggtgttcttcaaaatggttaggccgatggcgatgccaataacgtatccaataaatgacggatcgcttattgaaacggggattccacttgaatttgccgggtactttattgaactgaataaataa

SEQ ID NO: 215630 - DNA, 474 bp, Klebsiella pneumoniae
atgggtttgaaatatgacgcacaccagtttaagcgtgccggcgccagacttaataacagccagaaagcgttcaagcgatatctaatcagggacatggaaaagctggcgcgtctggttgaacgactggcacgagccatggccccgcttgaaaccggttcgcttgagagcgccatttttgcacgggttgtaaaagaaggatacgcggggcttcgtattgagctttccgtttcaggcgcaaagcagcgagaagggcatccaggcgttgaggtgggggactatgccaaatacatggagcttggtaagtaccgtcttggttatttgtctcgtatgaagaatgttaccaaccctcctgtcgccggcgtgaagcctaaagtgggcccatatttccttgagcgagcgactcagatcagcgaaaagcaattttcgcagacgatcttggaagctgccagaaaagcaggatttacgcgaggttga

SEQ ID NO: 215631 - DNA, 345 bp, Klebsiella pneumoniae
atgaatatttcgtggcaagccgaattgtcgatctaccggtttggttccaaaaacgtctacggtgaagcgcaattgcagttcgtcaggaagacgaaagtaggcgtcgttaaatttgaacagagcaatgaaaaatcgtccgtcagggcagatagctctggaagccgcggaaaggcggcgctggaattgtttgacgcagtacttattgctccacttgaagccgctgttcaactcgacgacgttcttgtgctggagggacagaagctgaaggtctcaagcgtacatcggcgatggggactacgaggccgccctgggcatcttgagttgggggcgaatatatgggtttga

SEQ ID NO: 215632 - DNA, 834 bp, Klebsiella pneumoniae
atggctctgatcgacacgtttcgtagcggagacatcgtgtctctgaccttcgcctttaacgtactggatatcgattccgcctcttacaccgtgcgagatagtgcaggtaccacacttgtggacgaagagcctctcgatattgcagaaggccaaatgtctataccggtagtggtctcagcagagcataaccagctggtcgaaaaagagcgtgatctgcgctacgtcatcgtgaaggcaacagctggtgggctaacccacgaagagcggcagatgtatgtgctgcttaatagctttgaactatccgtcccgggtcagtcgtttgccaccgtagccgatgctcaaatgcaggccattgatatgatcaatggagatacattgctggctgatggagagggtttgatgcgcaagcggctaatcgaagcgacacggcgaattaaaaccttacctttctctatccggaggatcatgcgcatcgatttcgaccggtatgaccgtccccaaaacatgctgaatgtctatgacatcccctggggggctgacggcgtgtatcggcaagatttggtggactgggaacggatcacttcggagcagtttgcggatttaccagactactttaaagaggcgctgcttctggccaccgttaatgaggcatgcgagatcgccaatggcaacgatattgcgagtgcgcgagaagacggcattttgtctgaatcgatcggtgaaacaaccaatatgtaccgcacaagcaaagtggcgaatgtccgtgtggcccgtagcacctggcgattgcttattagttacatcaacaatcggatgattgttcgtcgtgcgtaa

SEQ ID NO: 215633 - DNA, 435 bp, Klebsiella pneumoniae
atgaaaccagcaaaaattcatctactggaacctcagttccttggatacacgggcatcctgtgcggcgtttactttaaagacggcatttccgtagcagagctgccattcctcgatcaacagcggatctgcgcctcaatgcgtgccgaaaccattgatggaaaaaatgtctctccatcagctgccttcagcaatcgtaacgagctggtggccgatcagattgtggagcctacggcccctgatattgtccctatgaaacgtggcgtcgcgaatgaggagacaaaacatgtgcagcgcttcacccgagaagaactggagtctattgctgactgtgaaggtatcgccggcctgcgccagatcggtaacacgcttggcgtgaaagcgaagggcattgttgaaatgattgagggcatcctgaaagcacaaggcggtgagtga

SEQ ID NO: 215634 - DNA, 429 bp, Klebsiella pneumoniae
atgtcagaaaaaaaagtgaagatcactgaaaaggccttcaccgactttacgggggttatgttccgtacttctttcactaaatcggtgtccgatcatccagtaaacgagcgcatgcagaaccgtatcaccgcagctatgcgagcggttccgatggagcccactgtcgctgttaccggtgtgtcggtaagtcctaagtcggcatcggtggaggtgaaaaaaacggttcaactcacggctaccgtggcgcctgctggtgctaccaacaagaaagttacctgggcgtcgaaaaatgctgaatttgcaacggttgacgcggctactggtctcgtgaccggcgttgcagaagggactgcgacgattgaagtcacgaccgcagacggcggccataaagcgaccgcaactgttcaagtcacagcagctgcagcctga

SEQ ID NO: 215635 - DNA, 879 bp, Klebsiella pneumoniae
atgccattactgcgtgaagaagctgaaaagctgtctaataacgagcttgaacagggcgtgatcgagaccattatcgatcgtgacgacctgtttgccgtcctgcctttcatgaagatcaattcgaaggcatatctttataaccgcgaaaaaaccctgagcgaagctactttcattgatgtgaacgacaccatcaccgaaggtgcagcaaccttcgaagagaaagttgcgaagctgcgcattctggctggcgacgttgacgtcgacaaattcctggctaccactatggctgataccaacaaccagctggctatccaggttcgtcagaaagtcaaaggtctggctcgtgccttccgtcgcaatctgattgttggcgactccaccactaacaacaaagccttcgacggtattccgaagctgatgcatgacgatcagaagatcgacatctccggcgcttccatgactttctccatgttcgacgaactggtcgacgcagttaaagatctgggcgcagactgcatcatgatgcgttctgagcatcttcgcgcatatcgtgcgctgctgcgaactgtaaacgtaggcccgtccgaaatcatgatggaaaacttcggtcgaccaatgctgtgccataacggcgttccgtttatcgtaaacgacttcattccggttgcggattccaccaaagcggatatctactgtctgcacctttctgaagaaaacggtgtaactggtctgtacggcggcgaaaatgccggtatcgttgtggaaaacattggcaccgttcagaacaaagacgcagtacgtactcgtgtgaagtggtactgctctctggccaataagcacgataaagctatcgcggcgctgactaacgtcaaaatttaa

SEQ ID NO: 215636 - DNA, 900 bp, Klebsiella pneumoniae; identical to SEQ ID NO: 192948

SEQ ID NO: 215637 - DNA, 1575 bp, Klebsiella pneumoniae
atggaattgactgataagcaaattaaggatcttgtggcaagacgccaccccgaatacataaagaaaaaagagcactgggatttcctcgccagcacatacgctggcgggcgtgcctggttcgatgacaacattttccgatacttcaaagaaggtgatcaggagttcaaggagcgtctggaacgcgcctaccgcttcaatcacaccagggaagtggtgaacctgattaataaatatctcttcaaagaggacatccatcgaaatgtagaagaagcgcctgagccaattcagaaattctggaaacgcgcgacacgacagaatgtttccatcgatggctttatgtccgcgcttgacctccagtcctccatctatggccgtgtctgggtggtggtcgatagcacgatggatagtgacgcagaatccgtcgctgacgagaagaagaaggatgttcgcgcctatgcctactggatttctccgcagcagatgttggatatggcgtgggacgatgacggcaatttgatctgggcgctgattgtcgaagtagcgcgcgatgatcaagatccttttacctcatctggccaggaatatcagcgttatcgtctatggacacgtaacgagtggtatctattccgggaagaggttaagaaaggcgccgggaatgccggtcgtcggaccgcaaaagttgtgcttgaagataaaggcgaacacaaacttggcgttgtacctgtgtttcctgttgattgcataggggagagcgaatcgccgtattttagcccgtcgcttattgatgatatcgcctaccttgaccgtgcagtagccaactatctgtcgaaccttgacgccattattcaggatcagacgttcagccagctggccattcctgttcagtcgctcctgccaggcgatgagaatcacgcaaaggtaatggaaatggggacaaaacgcgtcttcacctatgactcggaaagtggcaaccagcctttttatttgtcgccagaccctaagcaagctcagatgatcatcaccactatccagaccgtgattaatgagatctaccactccgttggggtcgctggcgagcgaacaaagcaggataacgctaaggggatcgataattcatccggggccgccaagttatatgactttcagcgggttaatagtctgcttattactaaagccgagcgtcttgagcgggctgaacgccagatgatgtttttggcggcgaagtggatgggggtcgatctggatgaggagcattcgctgattgcctatccagagagctttgatatccgcggtctgacggatgaatttgccgttgccgagaaacttgggctgctggaagcaccggattctgtgcgtcgatatcagatggaaatgctcattgagaaaatcttcccgaatatttcggccgcgatgcagaaagaatttgagaaagatctcttgaattttccgccaaaaaatgctcttaacacccttgaaaataagtcagtacttacttatcctcgtgatacagtccaagagagcggacaagatctatcccaagggaatgggaactcatcaactcaagcaaccgagtga

SEQ ID NO: 215638 - DNA, 1257 bp, Klebsiella pneumoniae
atgtccatcccgtcgtctctaagtctcgtacagctgcattccgggcagatgcaagtcttccagtcgccacatcgtttcaaagtggtgtgcgccggacgacgttggggtaaatcgaggctgtcgatctcaaccatcattcgcgctgccgctaaggaaagaaaacaacgagtttggtacgtcgcgccgacctaccaaatggcgcgccagattctatgggatgatctgcaggaagttttgccgcgtaagtggattcggaagaagaacgacaccacgatgaccatcgtgttgaaaaacggttcggagatcgcgcttaaaggcgcggataaaccggatacgcttcgtggtgttgcgctgcatttcgttgtgctcgacgagttccaggatatgaagccagacacctggtacaaggttctccgtccgacattgtcatccacccgcggcggcgcgctgatcatcggtacaccgaaagggttctccgaattccataaactatggactatcgggcagaacaaagagctgcagcgcaaaggtcagtggaaaagctggcagtttgtaaccgctgattcaccattcgttccgacggcagaaatcgaggcagccaagaacgatatggaccctaagtcgttcgctcaggagtacctcgccagcttcgaaaacatgtcagggcgcgtgtattacccgttcgatcgtagcgttcacgttaagccgctgcagttcaatcctagattaccggtgtgggtaggccaggacttcaacattgatccaatgtcgtcggtcatcctgcagccacaaccgaatggggagctgtgggctgtggatgagcttgtcttgttttcgtcgaatacggcagaagtgtgcgatgagctggagcgtcgcttctggcggtggaaatcgcaggtcacaattttcccagacccggccggcgcttatcgtcagcacgctcgtggggaatcggacatcgacatcttcaaggagaagggctttctgcgtgttgattatccgaaaaagcacccaccgattgctgatcgtgtgaactcagtgaaccgcatgttgatgagcgcctctggcgaaactcgtttgtatatcgaccctaagtgcaaacatctcatcgattcactggagaaagttatctacaaaccaggctctcgcgatatggataagagcggggggattgagcacagcgcggatgccttgggctacccggttcatcgtaggtatcccgtaaaaaatcgtgttattcttggtggctcaaggtaa

SEQ ID NO: 215639 - DNA, 642 bp, Klebsiella pneumoniae
atgactgtcgaaaaagacgagagcaaaactcgcctgactccggctgaatgggcggaagccgaagcgaaatggacttcgggcgagtatacgctctcaaaactggaagaagagtacggcatccgtcgtgaaacgctctccagacacttcaaaaagcgtggattagagaaaggcgccgattctgttggaaagatggtgcgcgagtctctcaagtccgatgcagaactgcgcgctaaagcccgagccgaaaagatagaagaccgccggacacgctatgacggctgggcgtatgcccttggtcagatggtgatggtcgaggtcactacagcaaagcgcgaaggtaagccactggcctcgattgaggacgatcttaaaagcctgcagcgcgccagcggcacgctggctaaatgcttcgaaatttcctccaaggcattgggcatggagaaagaagaaggcggtgaagaggatattccgaaccttgtctttggcgagctaaccccatcacaggtggcccagctgcgcaaggaagatgatgagcccgaagtgattgatgacgatctgttggaatcactcgaagaagaagcgctgagcgaagctgagagcgattttgacgcatcgggcgaagacgatgatggagatgcataa

SEQ ID NO: 215640 - DNA, 267 bp, Klebsiella pneumoniae; identical to SEQ ID NO: 192944

SEQ ID NO: 215641 - DNA, 891 bp, Klebsiella pneumoniae
atgacagacatcatcatcaaacgctaccgtccggaagagttcccgcgccatctggattttcttgagcgcatgaccgtcaccagagggacggtagaagactggcacgcgcttaagtcgcttcactacaagacagatgggaagccgttcgcccctacctactaccgttgtgagctagatggtcggttggtaggcgttgtagttatggccttccctaaactgctgctggcgccgcggcatcgcatgtttccaaaactgaaacccacaaccaacaccaccgtggcaaatcagtactggggacgttacgtaaataacaacttcgctgtgatcagccgctctgtagtggacacccagtatcgtggcgtcggggtatcgtatcgcatgattaatctggttagcaggatgcatgaccggccaatcatcgagatccagtcgtcgatgagcaaatataacccgtttgctatgaaagcagggttttgcttcatacgtcctgaacgtccaaagagctacgaaagcgcacttcgcgtctttcagcgccattttcgttctgatccaggcgacaacgaagcgattgtgaaggagctgtttgcgatgactgattcacgccggcgccgcgcactgcgagatctggtggcggactaccacaagaatagttctctggcaaaagcaggccgcaaccgtggcactaccattcaggatatcgcggatagcctggtggatgaggccagcatcgtgaaactgctcaaggatattcacaatctgagcttcacttcaccgctctatggggtttatcgcaaccctgattttggtcgccagctgcctgagacactgccactgctggcttttgataaacaaccgctgaatgcaccactggatattgcgttaccggcataa

SEQ ID NO: 215642 - DNA, 255 bp, Klebsiella pneumoniae
atgcctgatttgaagatcgtagagctgaagccatcgaaagagactgacaacaataacgttgaagtcatccgcctgctggaagatgcactccagtacgccagagaaggcaaaagccagagcctggcgctgctgatgatcaataacgacgggagtgttctggattgctggcataacggtgggcgcccatacgtcatggttggggcgatggaatcgcttcgcctggacttcatcaatgccaatatcgagcgcaggtga

SEQ ID NO: 215643 - DNA, 639 bp, Klebsiella pneumoniae
atgagcacctataccatcaacgtatcgttccagacccgtgtcaacaagactactcgcacgcttgagatcgccgaatcgtttgggcttggtctggatgaaaaagactggacgctttacgacaatcttgagctggaagtcgagcagggggatgtggtttacatcactggccagtcaggttccggaaaatctgtcgtgctacgtgagctacaacgccagatgaaagaggaagggctttcagtcgcctccattgatgactttacctttgacaacgacgtaaatgtcatcgaccagctgggtaaaaccaccagcgaagcgttagggctgctttcgatggccggcttgaacgatgcctatctctttgtgcgcaaaccttctgaaatgtcggatggacagaaataccgtctcaagatcgccaagcttattgagtcgggcgcgaaggtgtgggctgcggatgaatttggcgcagttcttgatcgtgttaccgcccaggttgtggcttcgaaccttcagcgtgccgcgcgaaaggtaggtgcgacggtaatggtggcgacgacccacgaagacctgaagaacgcgctgcgcccggatatgcagatcactaagcactacaaagaacgcgtgaaggtggaatatgcctga

SEQ ID NO: 215644 - DNA, 669 bp, Klebsiella pneumoniae
atgaccaaaacgttcgaaatcgtctaccgagacccggcagagctcattccctatgaaatgaacgccaaaaagcatgacgagcagcagatccgtgacctggccgcagccataaaaaagcgtggttttgaccagccgatcactgtcgataaagacgatgtcatcattactggccacggccgccgcgaagctgcgcttttagcggggctgaaaagtgtgccggtgatcgttcgcgacgatctgtccgaggaagaagtgaaggcgaagcgtctggaggataaccggctggccagcattgattacgatgccatcaagttacagaaagagctggagtctctggtacttggtgacgttgaagtcttcggctttgacgagcgtgagctgaacgtgctggtcggtagcatgaccgaagaaatggatactggcgcactggttatggatctgggggaggaaaccgagcgccagaaagaagagcacaccgaaatcagtcgcgaagtcgccgccgaagaggttcgagtggtcgatgttctgggctttaaaacgctccctgctggctctgcgattgtcgtgggggatttgctcgcccatatggaagaaatcacgggagagagcggggtagacgcgttcgttgcttatgcgcagaaagtttcctccgagggagtcgaagcatga

SEQ ID NO: 215645 - DNA, 705 bp, Klebsiella pneumoniae
atgcaatggattgtatcaaaaagtatggacgtaaaaattaccattctgcaggtagaagtggccagactccggccaaatccctggaacaccaactcggttggtgctcaaaacttcgaaaaactgaaaggctccatcgaaaaactgggttttttcaagccaattctcgcgcgagagctggacggtggccaatttgagatcctcggtggcgaacatcgctggcgagccgctatggaacagggtatttccacggttcccgttatatcggtgggcaaaataagcgatctggtcgcgaaacaaatgtctctggtcgataacgagcgatacggcgaagacgatcaggtcgcattacagcgtctgatcgaggaaattcagtccgaactcgattatcagctgtcggaaattgccccttacgacgacgaactggcggccacactggctcgtgagtcggcaatcgacctggaaatgcttgaggcgttgtcgcgtggcgacgaagagcccgttgagaaggactctcgcgaaaaagatgagcgtgtcggtgcggaacaccagaccatgcgcttcaaagtgacgtttgacgcttctgatcgcgttaccgaaaccattaaatccatcatcaaagagcaggcgatcaacaccggcaacgacatggagaatgctggtgaagctctggtatggctggtcgataactacaaggagtgtatttaa

SEQ ID NO: 215646 - DNA, 1560 bp, Klebsiella pneumoniae
atgactgttaggattgtttcgaatgcggtcaacgctatggtctccggcgctgatgacaacgtgaagcgactcgtccaggaaatgctgagttacgaagtcgaagccggcgactggaaaggcaccagtactatgttcaactggagcaaaaatgccttccccgcgggttttgccaaatcggtagcagccaatctggtgaaggctggcatcaaatgcgtccatattcgcaaagacaaggttccggcgctgggcaaaccaaacccggcagttaacccattcccctataatccggactatgcgtatcaagatcaggctgtagagacactggttcgcgaaggaatgatgattgcgcagatcgccactggcgggggaaagtctaacgtggcttgcaaagccgcggcgcgtattgggcgcatgacgctgtttttaaccacccgctctgttcttatgttccaaatggcagataacttccagaagtcgatcgactatcgagctgagaatggcgaacagtggctcaaaggtcagaaggttggcatcattggttctggtgagtttcaggtatctcgccatatcaatgtcgcaacagtgcaaaccctggcgagttttcttgaagagcctccacgcgatatgccggctgacaaaaaggcttatcatcttaagcgccgggagctggttaagcgtttcctctcaagcgtctcactgctaatcctcgaagaagcccacgaatcctccggttcaaacttttatgacatcgccaggctttgcattaacgcagactatcgtctggcgctgacagcaactccgtttatgaaggcttcaactgaggccaatatgcgtctgatggcggttgcaggccgcatcgagataaaggtcactgaaaaatatctgatcgagcgaggtattttggccaaaccttacttcttataccataaaatcgcgtacactccggatgaggctcgtatccgagcggagctcgcttccaagcatctgaacttcagagttggtatgagcacgccgtatcagaaagcttatcagctcggtatcgtttacaatattggacgtaacgaggccgtcgttcgcgacgcgctgatgtaccgtgatcatggactgaactgtatgaccctggtgaggatcaaacgccacggtcagatactgatggaaatgatgaaagagagcggcttacgggtagattttatttacggtgaatccaaccagagtaccagacaggctaagcttaacagcctggctgcagggaaaattgatgtgctgatcggctctacgatactggatgtcggtgtcgatgtgccaagtgttggcgccgtaattcttgccggaggaggcaaggccgaagtcgaaatgcgtcaacgtgttggtcgcggccttcgtgccaagaagaatcaggcaaatgtgtgttttatttcggattttatcgatataagcaacaaacacctgatgtcacactcatacgaacgaaaacacattattgacaccactcccgggtttgcggaaggcgtgttgcctgtcgggagcagttttgactttggtgtattacaaagagattaa

SEQ ID NO: 215647 - DNA, 276 bp, Klebsiella pneumoniae
atgaccgaaaatcgctcaatttcatgtcaggtgaagctcaccgaaaaagccaacgaaaagcttggttcgttcaaaaagcgcctgaaagagcgcaacatcaaaatgtcgaagtcagacatcattaaccttgttctgaccaagatgagcacagcagagtttgagaagatcgcgacctcgatggcagcggctgagaacgcgagacagaaagtgttgcagatctacgagaactccgggatgaccaaggaagacttggaagatatcctcaaacgtctctaa

SEQ ID NO: 215648 - DNA, 531 bp, Klebsiella pneumoniae
atgcccaataccattaccgatatcacctacgggatacctgctgaggtctggccgcgcgattactcaaaagtagaggcgtcgttgatgttctggcgcaaggagcaaattcccgtaaaggtcacgatggaagatggccaggtgttctgcatgtacgttcaggggacgatgtcctcccgtaacaaggtagatctatgcccggcgccgttcgacaaagacaatcgtgtaaggttgccacttgagcgaatcagcactatcgagtcaggtgtaaatgacgctgtcacccatgatttcgttggtcgcgtaaccgtacatccagactatgttgataaccggccatcccgccgtgatttctttaaaatttgccgccaggctcacgagaaccataaatctgtaagggtctacatggcggacggccgcgaaattgaaggtgtgtcacttggcgtcgacgcttgtcaggtcacacttgccgttgggaacgggcgaaaaatgatcgtcctgtttgattgggttgaacgaattctgccgttttaa

SEQ ID NO: 215649 - DNA, 651 bp, Klebsiella pneumoniae
atgtctaacgtaaccatttctaaaaaatccatcattgatgctgctgtagttatcactgacgaattacaattaaaagcagatcaagctacacagacttacaacgaacattatcagaatggcacgcacaccaaagcagataaagctaacatgcttgcagcgtctactaaactcgcatacttcgtgaataacgttgtaaacgcagtaaacgacgataagttgtctggtgtcttctactacgcgattaaagcaagcaagcaaacgccagaagtgtttttccgcgaagcgatgacaaatagctactctctcgaaaagctggtttatctggttaagtctatcaagtctggtaaatgtgtgtattcagtcgctgatatgtccggatctcgtgtattcgctttaatcgatatgattaacgatgagatcgacacgttcacaaatggtgctgttttcgatttgatgaatgaagcaaaacaagcaaatgaaattaagttagatgcaggatatacgcaagccaaccagctgatcaatctgtgtgaacgtctgggactggtcgagaagattaaaggaatgggcgctgccaaaaacggatcacagcaatatcgctttatcaaaaatgatttttataactatctggctgacgctttcaaagcataa

SEQ ID NO: 215650 - DNA, 204 bp, Klebsiella pneumoniae
atgattagctatgaccagatccgcgcggagtatcgcgctaaatatcgcgcttataaacttgaactcatcgacgaattaagcgcccagcgtgacgcgctaaactttacgttctctgatttgcttaacagcaagcgagactgtaaacggaaaagagaatatttgcgcttgtctgaaatgatcggaaagttgcaaaacagcatttag

SEQ ID NO: 215651 - DNA, 483 bp, Klebsiella pneumoniae
atgaactatatcgccactgtaaacactcccgcgcatggcaccatctctgttacatactccgatattgaaaagaacatcctgggcgcctggcgcgaagaagagaccatccagctgtccggaaaagagaagcagcagatcgccaacgacatcatttgcaaccgtcgattcacgcgtgtcttcgaaaaagcttatgtcaccacctcaggattcggggtgtttatcttcccggttcgaagcgggcggttctgtcagtcaaaactcatcgagctcgcaacacagattgctgtgtggatcaaaacagagtcagggttcgactttacagaccaggaagcaacagcgcagggtgtgcggatcgccgacaatgctcttaagtgcaaaaacgtcatttacgaagccggtatcgactcgtggaaggtcacttgccgggagttcgtgaaagagatgcacgccagtaatcggattcacatactggctggcaagtaa

SEQ ID NO: 215652 - DNA, 177 bp, Klebsiella pneumoniae
atgctggtggctcttaactaccacctgctttcccgcaggctaaaaacacccacctcttaccgccaggctaccgaagcacccaccgacttcccgacggccaccagctgccgaaacagaacgcttggacgcctcacacccactgcgataattaaaccaacgagaaaacaagttgtttaa

SEQ ID NO: 215653 - DNA, 282 bp, Klebsiella pneumoniae
atgactgatttcaccatctccccgaaagcagaaaacgtatggctggaatcctggcttgacctgtcgccggccgagcaaaaagaaatggatcacgtcgaaccggacgaacaaaccagctcccgcttcttccattatcaggatagcgtttatgacattgccgatttcatgcgcgatgaccgcttcccggaatggcacgccggctatccactgaatgccttcgctatgctgatgatccgcttaactgattcaggcgacaccatcgacatcggattacttcattga

SEQ ID NO: 215654 - DNA, 375 bp, Klebsiella pneumoniae; identical to SEQ ID NO: 209216

SEQ ID NO: 215655 - DNA, 408 bp, Klebsiella pneumoniae
atgagtttgaccaaagaagatttagtatttgacctttactacgcatccagcactgacgaagaaggcaataaactggcccagctgaccgttcagttccgtgatgcatcggctgttccgcatgtgaccacccagctggcccgcacaactcttaagcgagatcgctcgaaggtttatgccgtcggcgagcaatccgtgaaaaatggttcggacactctgctggccgccattgaagcctattatcgaacagacccgaagaccattttcgaaaacctgatggcacaggttcaggatatgatcgagggcaatctgggcgccaacaatacctgggttggttcatacggcataaccattgtgtctggcggctctctggaagagtatctgcctgagtccgtctacaacgtccagtaa

SEQ ID NO: 215656 - DNA, 312 bp, Klebsiella pneumoniae
atgaataccgagatgattttgaaactggataaactccagcctcgcaaagacaaacctgcagtactcggttcgatcactttactggacatagtggccaacggcacagccatccgacttttcaaagagaccgttgtcgtcttcggcgaaacttctcgcaagcgcatcgtaatgagcgtcaggcgctatagtgcgaaagggtgggtagctaaacaagttatctggcctgagtcagaactggagttggctttactggaagttaacaaggtcgcccagcaggaaattcaacgagcaacaaccctcgccatagcatag

SEQ ID NO: 215657 - DNA, 213 bp, Klebsiella pneumoniae
atggatatgcctgtgattgtggaagtatggagcgtggactcgctggccgaatgtcttgatggcgtagggccagcactgacccgtaaattatggtcgtttgtaccagctaagggagagtcacccaaagggaaggatgtttggcacctgctgactgatgaagagaagcgggagctggtggccgcagtgaaagaggagttccctgacgaagattaa

SEQ ID NO: 215658 - DNA, 219 bp, Klebsiella pneumoniae
atgtacaagcatttgaacatcagcatcaccctttgcggagaagagacatgtactgacgaactccagatctctctggatgacgttatccgctctgcggatgtcgctgggcgcattggtacgctgattggcgaagggtatcgcgagggcacgtttgattttcatatcgaggacaacgcaatgtccgtcgcgtggaactgcaccacgtcagagtccagataa

SEQ ID NO: 215659 - DNA, 1866 bp, Klebsiella pneumoniae
atggctggccagtatgaaaaagcaataacgataaaacaagcgatagattcgattaatttacgccactaccttctgcctgcaattcagcgaaagtttgtctggagttacaggcagatatgtctactatttgattccatcatgcgagactacccgataaactctttcatgatgtgggatatccgtagtgccagtattaaaaacgattacaaattttatgagttcctgaaagaatactgtcagcggtttaatgaagaaaacccatatgtaccaacaaatgcgggatttcatgattttaaggcggtgattgatggtcagcagcgtctcacatctttatatattggactgtgtggaacgtatgcgtataaaaagccccgggagtggtggccttcggcacaggatgatcgcatcctgccgcccagaaagctttacgtcgatttaacagcgccacttgactcagacgatgagcccatgatgaagtacaacttcaggttcctcaccgacaaggaatacactgattcacttaccgataacaaacatcactggttctgccttcacgaaatattcaaatacgagcaaattgattctccggatgatatcttatttaaagttgtcgtaccagaactcgaaaaaagaggactcatttccagtgaattctccagaaaaaccctgcttaaactttataccaagataagaactgagaatcttatccactacttcaatgagagcagccaggacattgatcatgtgttggatgttttcatccgcacgaatagcggggggacaaaacttgagttctccgacttactgatgtcaatagctgtagcacactggcagggtgatttcagaagagaactggatgaactaacaaaaaacattcatcagaataatgaaatggggttttatattgaaagagactggttcttaaaaaccagcctgatgcttattgactctgacgtccggttcaaagtaaaaaacttcacttcagaggaggtcggtaagatacaacaacaatggtctgaaataaaatcctgtatcaaggagacttttgttcttatcaggcgattcggcatcaatccacagtctttgatatctaaaaatgcagtcattcctgtggtctactggctttacaaaaagcaaaccaatggacacccattatatacaacgattaatctcctgaataaaaaccacaatgaacgctcagtaattagccagtggttttacatggtacttctgaaagggatctttggaagccaggcagatgcgctactcacgagcatcagagacgtaatgaagaatagtctttcagatgttcattttcctcttgagaagattattgacaggtacaaaggctcgaataaggacctcagatttgacgacgaatacatcgaaagccttctcaatatcagatatggcgaaggtcgctgccgcgcactattgcatcttctgttccctgaaatgaatccgaccgaggtgtttcatattgatcaccttcatccaagaaatcatttttcaaataaatatcttgaaaaattagattatattgtgaattcaccggagaaactcagcttttacgaaaatccggaacactgggacaccatacctaatcttcatttactgaatcactctcagaatacaagtaaacagaatacatccctgaaacaatggttatctcagtcatcaaacaattatactccatcaatgctgttagtttcagatgaaaatattgagttcagtcgcttccaggaattctacaatgagcgaagaaacgccctaaagcaaagactactgaatcgggtgtttcttacaacaaaaatagattcatcaccatccacaatggatacggatgaagaaattctcaccgactga

SEQ ID NO: 215660 - DNA, 1557 bp, Klebsiella pneumoniae
atgacaaaccttcagcagcgtgcagagctacaccgccaaatctgggccattgccaatgatgtcagaggctccgtagatggatgggattttaaacagtatgtactcggtgcccttttctaccgcttcatcagtgagaatttttccagctacatggaagcaggggatgagagcatacattatgcagcacttgatgacagcatcattaccgatgacatcaaagacgatgccatcaggactaaaggttacttcatatacccgagccagctgttctgcaacgttgccgctaaagcgaacaccaacgacaggctgaatgctgatttaaacagtatcttcgtcgctattgaaagctctgcctacggctatccgtctgaagctgacatcaaaggcctgtttgccgatttcgatacgacaagcaatcgactgggtaacaccgtcaaagacaaaaacagccgtcttgctgccgttctgaaaggcgttgaggggctaaagctcggggattttaatgagcaccagattgacctgttcggtgatgcctacgagttcctgatttctaactatgcggcaaatgccggtaagtctggaggggagttcttcacacctcagcacgtctctaagctgattgctcagcttgcgatgcacggtcagactcacgtcaacaaaatctatgaccctgccgcaggttctggctcactgctgcttcaggcgaagaaacactttgataaccatatcattgaagaaggtttttatggtcaggagataaatcatacaacctttaacctggcgcgtatgaacatgttcctgcacaacatcaactacgacaaatttgatatcagactggggaataccctgactgagcctcactttggcgatgaaaaaccgtttgacgcgatcgtctctaacccaccttactcagttaagtggattggcagtgacgacccgaccctgattaacgatgagcgttttgctccagcaggtgtgctggcaccaaaatcaaaagctgactttgcgttcgtgcttcatgcgcttaactacctgtccgccaaaggccgcgcggcgattgtctgcttcccgggtattttctaccgtggaggtgctgagcaaaaaatccgtcagtatctggtcgataacaactatgttgagacggtgatttcactcgcaccaaacctgttcttcggcaccactattgctgttaacattctggtgctgtccaagcacaaaacagatacccgcgtgcaatttattgacgccagcgggttgtttaagaaagaaaccaataacaatatcctcactgacgcacatatcaaacagattatgcaggtctttgacaccaaagcagatactgaccatctggcgatatctgtgccgtttgagaccgtggccgccaatggttataacttgtcagttagcaactatgtggaagccaaagatacccgcgaaattgtcgatatcaccgaactgaattccgaactgaaaaccaccgtcagtataattgaacagttgcgtaaagatattgatgcgattgtggcagaaatcgaaggcagtgaggctcaggaatga

SEQ ID NO: 215661 - DNA, 1236 bp, Klebsiella pneumoniae
atgaacaagctaagttatctggaaaagttgctggatggggttgaggttgagtggaaaacactagagaaagtgcttaaacgaactaaaggcacaaaaataaccgctgggcagatgaaagctcttcacaaagataatgcgccgcttaaaatttttgcaggaggaaaaacagtagcctttgttgactttaaagatattccagagaaagatattaatagagagccatcgatcattgttaaatccagaggtattatcgaattcgagtattacgataaaccattctctcacaaaaatgagatgtggtcatatcactcagataatgatgcgataagcataaagtatatttattacttcctaaaaataaatgaaggatatttccagaaaattgggggtaaaatgcaaatgccacaaattgcaactcctgatacagataagtttgaagttccaatcccttgcccggataatccggaaaaatctctggccatccagtctgaaatcgtccggattctggatacatttactgcgcttatcaccgagcttaccaccgagcttaccatgcgtaagaaacagtacaactactatcgcgaccagttgctgagttttgatgagggtgaggttgagtggaagacgctaggggatgtaacaaaaaaatggtactcaggcggaacacctacagcaggcaaagctgagtattatgaaaatggtgagattccttggttaaggactcaagaggttaagttctccgatatcaacagtactgaaataaaaataactcaagctgcgttaaagaattctgcagcaaaatggattccagaaaattgtgtaattattgctatttcaggagcaacggcgggacggtctgccataaataaaatccctttaacaaccaaccagcactgtggttgtttagaaattgacgacacaaaggcgttatatcgttatgtcttccattgggtaagcttcaattatgaaaacataaagtcgctgggacaaggtgccagaggtgacctcaactcaaccattataaaaaatttcaaacttcctataccttatgcaaccgccccagataaatcacttgaagaacaagctcgcattgttgaaattttggataaattcgacacgctgaccaactccatcactgaaggccttccccgcgaaatcgagctacgccagaaacagtacgaatactatcgtgatttactgtttagcttcccgaaaccagaagccaccagcaactga

SEQ ID NO: 215662 - DNA, 3117 bp, Klebsiella pneumoniae
atgacacaacagatacataccattgctgaatccaataactttatcgtccttgataaatactccaaagttcaggatgctggcgacagctaccaaagcgaatcggaccttgagcgggagttgattcaggaccttcttaatcagggttatgagtttatctctgtaaagtcgcggactgcgatgctggcgaatgtgcgggaccaacttcagcgtcttaatggtgtggtgtttaacgaaagtgaatggcggcgcttcgcagagcagtatctcgacagccccagtgacagcagcctggacaaaacccgtaaaatccatatcgactatatctgcgacttcacctttgacgacgggcgtctggagaatatttatcttattgataaaaagaacctgctgcgcaataaggtgcaggtcattcagcaatttgagcagactggctcacacgctaaccgttatgacgtcaccattctggtcaacggccttccactggtgcaaatcgaactcaaaaagcgcggtgtggctattcgtgaagcctttaaccagatacaccgttatagcaaggaaagctttaacagcgacaactccctgtttaaatacctgcaactcttcgtgatttccaacgggactgatacccggtactttgccagtaccactaaacgggataaaaacagctttgatttcaccatgaactgggcaaagtcggataacactctgattaaggacctgaaggactttaccgccactttcttccagaagcatactctgctgaatgttctgtttaattacagcgtgtttgacagcagccagacgctgctcgtcatgcgcccctatcagattgccgccaccgagcgcattctctggaaaatcaacagctcttttaaagcgaagaactggtcaaaacccgaaagcggtggatttatctggcataccacagggtcaggaaaaaccctgaccagctttaaggccgcacgtctggctactgagctggactttatcgataaagtcttcttcgtggtcgacaggaaagacctcgattaccagaccatgaaggagtatcagcgcttctctccggacagtgtcaatggttcggataatacagcaggcctcagaagaaacctggataaagacgataacaaaatcatcgtcacaaccattcagaaactcaataacctgatgaaagccgaagctgacctgcccgtctatcagcagcaggtggtgtttatctttgatgagtgtcaccgcagccagtttggtgaggcccagaaaaacctcaaaaagaaattcagacgcttttatcagtttggttttaccggtacgccaattttcccgcaaaacgcattagggtcggaaacgaccgccagcgtttttggccgtgagttacattcttacgtcattactgatgcgattcgtgatgaaaaagtgctgaagtttaaggtggactataacgatgtccgcccacagtttaagtctcttgaaacggaaactgatgagaaaaaactcagcgcggctgaaaaccaacaggcatttttacacccactgcgtatccaggaaataacgcaatacattctcaataacttccgtcagaaaacgcaccgaaccttcccgggagccaagggctttaacgccatgttagcagttagcagtgtggaagcggcaaaagcttattactcgacgtttaaagtactacaggaagaagcagcaaaaaaatcaggcagctataaacgccttcgggttgcaaccatcttctcctttgctgcaaatgaagagcaaagcgccattggtgatattactgacgaaagttttgataccagcgcgatgaacagcagcgcaaaggaattcctggattcagctattgatgactataacaaccactttaaaaccaatttcagtaccgacagtaacggctttcagaactactaccgcgatttagctcaacgagtgaaaaatcaggatattgaccttctcatcgtggtgggaatgttcttaaccggctttgatgccccgacgcttaacactctgttcgttgacaaaaacctgcgttatcacggcctgatgcaggcattttcccgcaccaaccgtatctatgatgcaaccaaaaccttcggcaatatcgtgactttcagggacctggagcgtcccaccattgatgccattacactttttggcgacaaaaacaccaagaatgtggtactggaaaaaagctacgaagagtacatgcagggctttagcgatgcggcaaccggcgaagctaaacgaggttttatgtctattgtttcggagctggagcagcgcttccctgaccctgccagtatcgacagtgaaaaagagaaaaaagccttcgtcaaactgtttggtgaatatctgcgggcagaaaacatcctgcaaaactacgatgaatttgccacgctgaaagccctgcagaaggttgatattagtgacccggaagcggtagaaacctttaaagcagagcactacgtggatgatgaaaaatttgctgaattacaaaccattcgcctccctgccgaacgtaaagttcaggactaccgctcagcttacaatgatatccgggactggcagcgacgtgaaaaagcagcaaacgacagggatacatcaaccacggactgggatgacgtggtgtttgaaattgacctgctcaagtcgcaagagattaacctggactacattctgggcctgatttttgaccacaaccgtcagaaaaagggtaaagaagccctgactgaagaggtcaggcgcttaatccgctcaagtctgggcaaccgtgccaaagaaggtctgattgttgactttattcagcaaactaaccttgatgacatgccggataaggccagtatcattgatgcattctttacctatgctcagcgtgaacagcaacgggaagcggaagcgttgattaaggaagaaaacctcaatgaagaggcggcaaggcgctatatccgtacatcactcaaacgggaatatgctaccgaaaatggaacggagttaaatgagacgctaccaaaactcagtccactgaatcctcagtacaaaacgaaaaagcagaccgtattccaaaaaattggggcgtttatcgaaaaatttaaaggggttggaggaaggatttaa

SEQ ID NO: 215663 - DNA, 216 bp, Klebsiella pneumoniae
atgagtgctgcgctttctgtccttgagtcttttgcttcgaacaccggtatcgaccacagcaaagagatgaacgtcatccatgcaatcgtggccgagtgcgagaaagggatcgcgttcatgcaccaggttcacgacttcacttatggcgacgaacgtcactggaataagtgtttaagatttgtactacctacattggaagtggaaattatttggtag

SEQ ID NO: 215664 - DNA, 579 bp, Klebsiella pneumoniae
atgtgtgataaatgcaccgccgctaacgctgaagtaaagaagatcattaatgaagtcggggctaaaaaactcgtagggatgcttgattctataactggtcatggtgacgctcatccgctggaacgcatcatggccatcgtccaggtcatggacttatttgatgaaccaatgaaaattctgatgcttgctcgtcactttggcggggcgtatgtggaagagcatgaacgtgccaataaactgcaggcaactctggacatggtgagcgaaccaaaatgctcgccggcgcctgatctctccggagacaatatcggcattgaaagcaaagagcgggagatcgccagccttaagtcttctttaggcatgttaattaccgcctttaaactaatggcaacccataacggtttcaaaatgccagagctaaccggcgatgaacatcccactgctattcgccagctgcttggtgtgatggcggataatatggatgaagcgaagagccgtatcgaagacatgatgcgagaacttgcccatcgccacgatctaaatgaccagccgcacaagatgcagcaagccagccactga

SEQ ID NO: 215665 - DNA, 156 bp, Klebsiella pneumoniae
atggcagagaaattaaggctggccgtcgtcgccattcttctcgtgctggtcgtgctggtggacttcactggcaaactgatgtctatcgcggcagatggcgtgttggttggattggctatctactttgcccgacctctacttaaaaaatcgaagtga

SEQ ID NO: 215666 - DNA, 426 bp, Klebsiella pneumoniae
atgttaggtttcttcaaaaagaaaactcgtaaagcggttattgaagttaaaaaaatggagaaccgcgatgcggtcgaagctactgtctggggcgcatacatgatcgcttatgcagacggcaactgtgatgcaaaagaaatcgctattctggagaagaccatctccgcattgccagctttctcaccgttcgcgggtgagatcgcccagatgagcagcaatattcgtgctcgctatgaagcttctcctcgttccgccaacgcacaggctcttcgggagctggctgatgtcgccggcactccagaagccgttgatgtgttgtgtctctgcctggatattgccgatcaggatggcatcggtgaagaagaagaggttgtgctgaagaaaattgctcaggcgctgcagttatctctggatgcgtacatctaa

SEQ ID NO: 215667 - DNA, 540 bp, Klebsiella pneumoniae
atggcacatcaaacgccttcctcttctcttaagaaacacccccgttcgctacgactcatcctggcggagttattctccggccgtgtgtctgcacgcctgtccgaactggaagagaaagtaggtcaaatggagcatcgtctggatgaccatgcggtggccatctctaacctgggggctcgtgtggcaatgggggaagtgatgaagacccgaaccgcaaaaatcctgcgagacacctggggcgtgcgagccaatcaaacgcgcatggagagctcagatggatcaatttcaacgaaaaagactacttccaatggcctacgggctgatcacgatttgtctggcagccgtagcaataccgtcgactcaggcgttgctgatgccggactcatgcaaaacggtttcgcagcagacgccggcaccagtcacggaaagcacaaccagcatcaccaccatgccccggtctgccactctggatgggatgcggttggattcgattcctcaagttcgtcctgcgactccggatcttcctcctgctgcgactga

SEQ ID NO: 215668 - DNA, 948 bp, Klebsiella pneumoniae
atgagtatttcaataattcttgaacgtgcattgccgcttggtgaagatattctttcacgtatacattctggtgagttagtcgtctcagggggaacaattcgtgatcaggctggtagaattgttaaacatttagtcttcccttctgataggcaaaataataacgctgaagagtcctttggaggacctaattctacaactgaccagaactatcaagaaataatgcatcaattatctaatcaaacagctatgttagctgctgttaatataataagtgcgcgtaacacaaatgaaataattggaaagaagcttgaagagatcagtgataaacttgatattttgaatgctaaattatcagatattcaggataatataatatttgataaactaatgaaatttagcgaaataaaaagctcgacattatcttcaattgaagaagcaatatatgctaatgaaactcaaagagaatctcacattatccgattgcatataatgccacttagaaaaaatttttacactcttaacgaattattagtggatattcttactggctttagtaataaaaagataattgattgtatccagttcataatgttgattgcagaccttaaaaataaggcgtcatttgtgttaggacaaacgcatattcgtctcggtgaagagggttttgctcaaaattatttcaataaaaacattgactcaaataatgttctacgttctaaattagaggttttagttaaaacaggtgcgcttagccctcatgtgataactgaaaaggattttttaatttttaaaaatgatatcgagactttcaaaaatttagaaattcaatctcagttgttatcaactcaaaatcaattatctctcgaactgagattgccccattatcaaattttaaacaattcattcaaaactatccacatgcttgatcctattactttaaataaatga

SEQ ID NO: 215669 - DNA, 669 bp, Klebsiella pneumoniae
atgaaaagcattgactttgcacgaaacgaccatgatctctttcccatattgcaagaagccactagtgatgagaaagctatattagcggaaattatttccaataaacagtcttctagcatagataaaaatgaacgtgatgcactgaaactggctatagaactacaaaatatggggggggatagcttcatgaacttgctccgcagacgcggggtctcctatcgggagattgttatcgatgttgccgataaggtaggcgtaaaagttgataaacaagatgagatcgtcaaaatcgaagaatcaatagctgtaaaagtgattgataattataaagaaaagctgtcagaaaaagaaagaaatcaatttgatgatgtactccgtgaaagtttagaaaaccagaaacttgctatggaggcaaaaaacgctgcagctcgtagtctgatgggcattacaccggctcttttggctatcggtagttttatgctacgccgtggagctatatcagccattcccgtggcgggtcagttccttggagcgcttacaggagttgctagtatagttttggctttcacagggacagcctatagcgttacgattccagctgtgctagttgttggtagtattcgttctcgactagttgctgagaactttatggaacaggtgaaattatga

SEQ ID NO: 215670 - DNA, 234 bp, Klebsiella pneumoniae
atggcatacccgaccaacgttgtagcgctcgttgagagcgattttttggctaacgctcgcgaactcatgaaggatcgtgaaaaggcattcagtctttacgagtggtcactgaaatgtttgcacactggcgaacacaaagacctgattgagcagctccttggcgagctaatcaacgaggtttttgctctgcaagttcagcttcatggtagacaaaatgatcagtcaaaaaagtaa

SEQ ID NO: 215671 - DNA, 594 bp, Klebsiella pneumoniae
atgatagcagccgaaaaaatcaaaaagcgagagcgagatgcctctcttcgagacctttggcgcacaccgaaatggttgtttgtcgccattcagcgatatctcggcattacgtttgatgttgatgtcgcctgtaacaaagaaaacgcgcttcttccgagctacataggtgtggaacgagatgctcttaaatccagttggggtgatcctggtacggtggcctttctcaacccgccctactccaaaataaccccctggatagaggcggctatccgagagcaagcgcgtggcgtaaccaccgttatgctcattccgcaatcgctcgacacgatgtggtatgagcgcgccaccgagtgcgcaaaccagacggtagttctgtctggcggccgcgtagcgttcatggaaccagacgtcacattgggtttggttgaggtcaatatcaaccctggcggaagtatgctggtggtcttccgcggattctgtcagaacgctggtcacttcatgaataaagtcccgctgacggtgatgaaaagtctgggtggttacgatcctgccaaagtgatcaggaaaaaaagaccacggaaacaggctgcttaa

SEQ ID NO: 215672 - DNA, 834 bp, Klebsiella pneumoniae
atgagcaacctcaacaatacagtcaaaaaagatgatctggatgagctgaccgccatgctgcaactgctcgatgagcctgaaaaactggcttcggaggctgttgtaggagacgaaatagacgacctgctggcagatcttaacgatgagacgatcgtgccggtgccggctgttgctgaaactgtaatggaagcgaaagacggcggcgatctcaccggtgtgtttgaagagttggaaaacgaacatgagtcgctgaaggtggttgatgttgagatacctcaagtcgagtcgatctccactcttcctgagatcgactcgacacagggtgataaacctcagactgatgaaaaaaaggagaaacacgccaaagaatcgtcagttgcggctcagccaaaagagtcgaaggcggcgaaaaaagagcgcgcagcacccaagcctcgattcagcctgaacgataagggcgatgatttttatgctgcggctggtctgaaacgtgaggtcttcatcgaagctctgaattcggcgccggttaaggcaaaagacaagatctctaacctgctaaattggttcaatggcggaccggatatcagcatctacacggtgattgcattgcggcatcttattgacacaaaagaggcaagcagcaatagcattaagctggcgttaatgagctatccggaaaagccatatccactcagcaccgcgtcgactcaggctggccagatgatggctgttttcccagtcacgggaatcgctacgagggatggtggaagattgcttcttaatgaagagtccccgatcgtaaggaaatttatcgcggagtattccattggctga

SEQ ID NO: 215673 - DNA, 549 bp, Klebsiella pneumoniae; identical to SEQ ID NO: 204249

SEQ ID NO: 215674 - DNA, 795 bp, Klebsiella pneumoniae
atgggacaaccagtaaatatagcaggcaaacgttttggaaagttggttgcacttaaatattccggtatttcaaacaaacaggggcgactttgggattgcatctgcgattgcggtaacacctgccaagttagttacgggaagctaaatcacagggcgacaatatcgtgtggctgtgtctacaacgcacatcgtcgtagcataaagcctcatggtatgagtaaaacgccaatttatcgtatatggctgggtatgcgggaacgatgtgaaaaaacaacccatcacgcctataagtggtatggcggccgaggtatcaaagtctgtgagcggtggcaaatctttgaaaatttttatgctgacatgggagagcgaccagaagggatgtctcttgatcgcaaagatgtgaatggtgactacgaacctgaaaattgcagatgggcgacttttgaagagcaggccaataacacgcgttcaaacttaattttggagcatatgggggaaaagctgactctctcacaatgggctaaaagagctgggattcaggcatctactcttcactatcgaatcaagaaggggtggccattagatcgcgcgcttaacgccagcgtcgacacatatgccaaccgagatagtaagcgtctgatcgagtgtcgtggcagaactcagcggattaccgaatgggcaagagaggttggcttgactgcgaccattatctcgcagcgaattttgaggggatgggatgttgaagctgccattttcacaccatccaaacgaccagtaaaaggagataaaaagtga

SEQ ID NO: 215675 - DNA, 420 bp, Klebsiella pneumoniae
atgttaggcgaaatatctctggctgatgagttagatcgtaaaacgatagaggcgctgacacgcatcgcagacgagcagtcccgatcgctgatgacagaacgagaggccaggctggctatcagagctgtttttgagtccgttcagggattggtaggcgatgatgtgggagaggttctgaatgtggcaatgtcccagttcagcgaacgcggcaagcgacctatcttccccatgcatatcaaaatggctgccggcacggttctgtatgtgtcgatttgtctggatacaaatgaaattcgcattctcaacgtcaccactggtgagtggcatgcgccggtagtgtgcgaatcgcaggaggagaccatcaaaaaagcagctcaattcgtgcgtagcgcactgcttaaaggtgccaaaaagctgtaa

SEQ ID NO: 215676 - DNA, 645 bp, Klebsiella pneumoniae
atggattaccgaattgggatcactggcgctcagggcagtggaaaaacaaccctggcaaagtttatcgacgagcattacggcattccgtatgtggatgctggcgtcggcgcactgatgacaaggcttggagtcaacgtaggcgatccaatgccgctctttgagcgtctgcaggtgcagatggaagttgcccgccatattgagctggtaacacgcggagcggaaggttttgtaatagaccgtacgcctgctgatgtgatggcttatacgctcgatttggtaggccagaccaatgaccaacgatgtattgatctggcgctggaaattgagcgtttttgccacaagaccgcgttgtccaattttaatgccattgcggggctgcgcccgggcgtgaatttgagagcagaagattatgaacgtgcccagagaggttcgcttgatcgcctttatgtcgctcgtatcgactcgttgatgtgtggcgagctgacaaaaattaactctctggccaaatccggagatctgcaggttttcgtcctgtcggaaacctgcagatccgttgacgcaagagcacgctcgatcatgcgagtaatagaccgccatgtggaacgtatagagagccgtatctcaaatcgcgtcaccttccactga

SEQ ID NO: 215677 - DNA, 477 bp, Klebsiella pneumoniae
atgaagatgattgcagctgtcggtcgcaattatgagatcggtagaggaaacgaactcccctggcgctgcccctcagacttaaaactgttcagagagctcaccacaaacgccacagttgtcatgggcagaaagacaatggaaagtcttaagcgcccgcttccggagcgccataacgtcgttctaacgcgctcatctgggttcatgcccaatggtttttaccctgccactatggacgatgtaatgcagcttgatggtcccgtttgggttatcggcggtgcgcagatctattctctgtttctgcctcacgtcgaggaactctggctatcgcatatgggcgtagacgttcctgacagtgatgctcattttccgcggcaaatgatgcgtaatctcggcttctttcctgtgttaacggctcatacacaacggggaacggaggatgagcccggcttccaacagattgtttacagaaggtggtaa

SEQ ID NO: 215678 - DNA, 414 bp, Klebsiella pneumoniae
atggccagaggcatgtatgtgttatgtgaaattgaagatgtgctggcgagagccggccatcgtaaagccgctgctgatgaaaacgcagacactctcgttgcaggtgatgagctcatattccctaccagccgcatgttgcgtggctttgctcgctctggtgctgaagtggtgcttatcagccaccgtccggaagcgctcgaaagcgcaaccaagaaatggctgagagatttcggcattgattatgactggctgcacctggcaccacgtggagtcaattacgaaacccatataaagcgcacgcttgccgcgcataaagatgatctgatgatcgcggcactggtgagttcgtcgcgtctacgagctgctctgtctggttttcaccagcgcccggtaatgtatgaggtgtctcaatga

SEQ ID NO: 215679 - DNA, 1104 bp, Klebsiella pneumoniae
ttgtcttttttacttaatcgagaattcagtaacggtcagctggcttcgagctcttatggccgtgtcattcagaccgttgttgataccggcgttccttccgaagatcgcaccggcaccggtacgcttggcgtttcttatgtgccttcctactacatgcttaccggcggggctgttccgctcatttcttcaaaacaggtaaacctgaaaccgctactggttgagcttgaatggtatttacaaggttcaggcaacattgggttccttaaagagcatggtgtgaagatctgggatgcttgggccgacgataatggcgatttagggcctgtatatggcaagcagtggcgccgatgggaggacaccagaattgtcccttacagcgagtatcgccttaaggaggacatcttcctggaacgtggttatcgcgttgaaggttacattgggctgaatgaagaccgcgtcgttatcacccgtgaaatcgatcagttacaacgtatggttgatcagttgcgcaacgacccgaccgatcgccgcatcctgcttaatgcttggaatgttggtgagctggaggacatgaagcttccaccttgccactttgtgttatccgtatggagtcgtgagctcgatttccagacccgtttgtctatggccaccgatattggcatccagcataaccggcatggctatgaatcgatctatacccagatgctttgcctgatagagcagcgaggcagtatctctgagccaatgctggatgagcttggtatccctaaacgtatcctgaactcctgcctggtgcagcggagtgtcgatactttccttggtatgccattcaatattgccggttacggcatcctcacgcagttcattgcgaagattacgggtcacatggctggcgccttcgtccatttcggctttgatgttcacatttacaaccaccacttggagcaggttgaagagctactggctcgcgaacatccggagtcgtccgaccccatcgtcgtcttcccgcacgaatgggaagagttggatgacttcaaatgggacggcgtgcagatcttcggctacgaaccacttccatggattaaggctccagtggcggtgtga

SEQ ID NO: 215680 - DNA, 876 bp, Klebsiella pneumoniae
atgaaattaacgaaactgaccgaccatctcaagctggccaccgataaactggtgggcttcaaaccagagccatatgagctgaaccccggttttggagaagcgacagagagtatttacaagatggttgaccagttccacgagctgtttcagcacccgcgtcgtgtaatgcccactccggagctgctgcgcctgcgcgctaagctgatccatgaagaggcggtagaagaagggctgcctgcagcgaaaaagggggatatgcagggattgctggatgcaatggctgatttcctgtatgtgggtgtcgggacgatggtagccatcaaaggtgggctatcaactggcatgagctactacactcaggagcaaagcgtcgatcgctttattcataccattatggtgcctggaaataccgtcttcgacgatatggccatccccttcaatgaagcagaagaagctgcgcttatgttggccgcgctggccgataaacttgaacataacaaggtaggtgatgctgagctgattcaggatctgcgccgcgtgatgaacaaaatctatgtggcgtgcatgatggtgtatcgcctggctgaattccttggcgtcgacgtcgtggaactggtggcggagatccaccgttctaatatgacaaagctgtggccggcggatgctgaagcgcgtcgtcttgccgttgagagatgtaaatatgataagaatgacctcggattccgccatgctgacggcactgacatgatgatcggctatcgcctgtctgatggaaaaatccttaaatcgccgacatatagcgatgtcgatctgtctcgtttccttgagcaagcacaggcatcttcgctgtatgaagtggttaaaaacaccttgtaa

SEQ ID NO: 215681 - DNA, 1143 bp, Klebsiella pneumoniae
atgagttactccactttccgtttgggcgctaacgacgcaaccaaagagcctatgttcctcgggcagtctgtcaacgttgcgcgctacgatcagcagaagtaccgcgatttcgaaaagctgatcgaaaaacaactctccttcttctggcgcccggaagaagtcgacataaccaccgatcgcatcgatttcaatactaagctgcaagagcatgagcgacacattttcctgagcaacctccgttaccagactctgctggattccgttcaggggcgcagcccaaacgcaacgctgctgccgcttatttcaattccagagctcgaaacgtgggtggaaacatggtcgttctctgaaaccattcacagccgcagctacacccacattattcgcggtatggtggatgatccgagcattgtcttcgatggcattgtgaccgacgaggaaattatcagccgggctatcagtatctctacagagtacgacaagctctatgagatgacctgcgcgcgccagcacctgggagaagatgaattcgaacggctctacgtctccgaatttgacggaaagccctaccctctccagcgccagctgttccgtactttggtatccatcaacgcgctggaggccattcgtttttacgttagcttcgcctgtacgtttgcttttggagaaaggaaattacttgagggcaacaccaaaatcatgcgtttcattgcgcgcgatgaggcgcttcattgcgaaggcacagaacgaatgctccggtttatgcgtacaggccgcgaaggcttgctatgggcccagatcgctgcggatgaggaaccattcatctatcagaccatgatggacgttgccgaacaggaaatgcgctgggcagattatctgtttaaagacggctcaatgattggtttaaacgccgatatcctgaaaagctatgttaaataccgaaccaatcttgcgatgcgccgtcttggcctgaaaccactgtacccggagataaaagatgacccgctggtgtggatgaacaaatggctgttgtccgacaccttgcagattgcaccgcaggaagctgagcaaagcacttatctcgttggccagattgactccgctgttgatcgcgctggcctaagccagtttgccgatttgtaa

SEQ ID NO: 215682 - DNA, 2304 bp, Klebsiella pneumoniae
atgataaggattgtcaaacgtaatggctccacagagccgctatccgaagagaagtacaaccgcgtcgtgatgtggggggtagaaggtatacgtaacgtaagcgcctctgccgtagccatgggcgccgccgcgagcatttttgacggcatgacaacttcgcagcttcatgaggcattggttaagtcggctgcagatcttatttcgcctgaaactccgaactactcccaggtcgcagcacgcctgaacatgttcaaaattcgcaaagatgccttcggcgaatacgcttacccaagtttctatcatcatatcgtcagcaacgtcagccgcggcgtttacgatgaggatttgcttaagttttactcccgcgaagagatcgcagaacttggcgtgtatatcaaacccatgcgtgacgaactctttggttatgcctcgactgttcagctggcgagtaagtacctcgtccagaaccgagtcaccggcgaaatctacgaagccccgcagcagctgtatatgctggtgggtatgtgtcttttccagaattgggaagatggttgtgccggcaaaacacgtctggaaatggtgaaggggttctatgacgtcaccagtacattcaaattgtctctgcccaccccaatcatggccggcgtccgtaccccgacgcgccagttctccagctgcgttctgattgagtccgaagacagtttgaaagggatcagcgctgcgtcctctgccattatcgattacgtgtcgcgtcgtgctggcattgggattggttttggccgactgcgtgcattggggagtgagatccgcaatggagaagccatccacactggcgtaatcccctttctgaaacacttccagaccgctgtgaaatcatgctcgcagggtggcgttcgaggtggcgcagcgacggctttctaccctatttggcatctggaagttgaaagtctgctggtattgaagaataaccgcggcatcgaggagaaccgtgttcgtcatctggactatggcgtaatgatcaaccgcctgatgtatcgccgcctggtacgcaacgagaatattacgctgttcagcccgcatgatgtaccggggctctatgatgctttctttgtcgatcaggacaaattcgaagcgctgtacctgcaatatgaagctgatgagagcatccgcaagaaatccgttcccgctgttgatctgttctcaaccctgatgcaggaacgagcctctaccggccgcgtgtatattgcgaacgttgaccatatgaacgaacacggcgccttcgatccgaaagtcgctccagttcaccagtcaaacttatgcatggagattacgctgccaactaaaccgctggcgtttaccgatgaccccgatggtgagatcgccctttgcacactgtctgcgtttaatctgggggcattacgctcactggacacgctgaaagaggttgcattctatgcggtggctgcgctcgattccctactcgactatcaggattacccgatggccgcagcggaaattccggcaaaagcacgtcgtagtttgggcgtcggcgttaccaatcttgcgtactatctggcgaagaacggatttaactactctgatccggccggcaaccagctagtgcatgaaacgtttgaagcgatccagtattacctgcttgatgcaagttgccggctggcggaagccaaaggtgcctgtaattggttttcccaaactaaatatgcccagggacagctgccgattgaccattaccgcaagtcgcttgacgctaaccctgatacgtcctttgagctgaaaatgccttgggaagagctgcgcgaccgcatacgcgaatatggtctgcgtaactctaccctgacagctcagatgccgtgcgaaacgtccagccaaatcaccaactccacaaatggtatcgaaccgccgcgtggccctgtttccgtgaaatcatccaaagacggcattgtgaaaatggtggttccggactttgcggcactgaaagatcagtacgagtacctttgggatatgccggataaccgcggctatctgaccaaagttgcgatcattcagaagttctttgaccaggctatttcagccaacaccaactatgaccctactcgcttcccgggcgacaaggttccaatgatgaagttgcttgaagatctgctcttcgcttatcagcaaggcgtgaagacgctttattaccacaacacacgagatggtgccggtaagcgtgaagacgatgatctggcctctgttgcgttggttgagccagaagatgagtgcgatggcgcatgcaaaatctaa

SEQ ID NO: 215683 - DNA, 570 bp, Klebsiella pneumoniae
atgagtaaagtgatcaaagtagttggcgtcgacccttcaatgagcaacttcgggctggccattggtacgctggatctggatacagacaaacttgaaatccacggtcttgaactggttgaaaccaaagccggcggaacgaagaaaaccgtcagagtaaacagcgatgatctgcgccgggccaaagagatctggcgcaccgccaggcccatcattgaacaggcccacatagtgttttgtgaactgccggtaggtagtcaaagctctcgcgcgcagacttcttacggtgtgtgtatcggtgttcttgcttgcgttgataagccacttatccaggttacgccaaatgaaattaagcactacgtcgggaataaactgaccacatctaaagaagagatcatccagtgggcgattgcaaaacagcctgatgccccttggttgcgtcggaaacaagcgggaaaagacgtactcgttgccaagaatgagcacctggctgatgccatagcttcgatatattctggaatgcagacagaccagttccgacaagtgcgcgacgttcttaaagggattttataa

SEQ ID NO: 215684 - DNA, 747 bp, Klebsiella pneumoniae
atgtcgtttaatcttagccgcacgcagtttttgcaaatgtttgctgtgatgcagtcattcaggctgattaacagctataccgctgctggggcggctcctggtgtcggttggcaaaatctcaatattgagacggagcagtttacggctctgaaagatctacttttcaagaccccgttgatgccaagtctgaaatcgatgccgtcaggaagtacagcgcccattctgatcaacccattttcggaaggtggctatcttccacacactgggcctgggttcgtggtgatcccggaatcacctgagatggttatcaaagatgatgcgcagtacggggctatagaggcgcataccagcagcgcgtttactaacctgactcgactggcaaatgcacgtgctgggcaggttgcaatgccaggcaaggcatttgctggcatcgatttcaattacgatacacttgagacatttccaggaagaggcaaattaagctttgagactgaagatggcgataaggcaatggttgagctctctgtcccctatgtacttcgttttaacgggatggttgcgcgtaagctgatagatatcatgtcctacttcatcgggcagagcatgatcgacgcagacatagaaaatggtgtgctgaccagtgacaacatacatgtggtgagccgcattccagagcccgttcgcaagtctccagttaaaaccctggaagagaaattaatggaatgcccggtatgggcaacatggtaa

SEQ ID NO: 215685 - DNA, 1917 bp, Klebsiella pneumoniae
atgaaatttttaacgctcgaagtggaaaacttcatggcgctggcaaacgccaaggtcgagcttgatcagcgtgggctggtgctcatccagggtgttaatgccggggactcatcggccgccagcaatggcgctggcaaatcaaccctcatgaatagtttgatgtggtgtatttatggcgagacatcccatggcgttaaaggtgacgacgttctctctacgggccatgagaagaactgtcgagtaaaagtcaccattgaagacgaaggtaaacgctacgccattatccgtcaccgcaagcataaggaatttaaaaaccggcttattgtccgtggcgaagacggcgacatgacaaagggtaaagattcgctcacccaggagtttgtagagcgactgatcggtgcgtcaaaagaagtatttatggcatcgatctacgccagtcaggaggcgatgcctgatttgcctggcatgtcggataaaaacctcaaaaccatcgtagaagaggctgccggcgtcgatcgtctcaccaaagcctacgcgattgctcgcgaacgagccaacgcagctgccgcacgcatggagaccactaaaaccaagatggacgcctgcttgtctctggtcgaatcggcccagaatgagctggagtctgccaaaacctcttctgaagcctgggagcgagaccgcagcaaacggcttgatgtcgcccgtgccgatctggttggggcggaagtcacgctcactgaggtcgaaatggagttgcgcagtctgccagagcagatccgcgatactgaaaatgccatcggtaaagagcgggaaaaacttgcgtccaaagaagaacatgacgccaagctggttaaggttcgtggagcgatcactgatatacgtgccagcatccgcattaccgaaaacatccagaaggaagcgatgcaacgtgctcgcgcattcaaggtgaaagcggaagaagtaaataccaaagtcggagagccgtgccctacctgtggcaaggcttattgcgttgaagatctgtccatcgtgaaggagagttttgttgaacaggcgcgcagtgagatcagccaagcgcaggcatctgcaacgtcagtggctaaataccaagagcatcttgagaaggcgctcaaaattgaatcatcacttgtcgccagtacaccagatgtgtctgccattatttcccgaatcgaacaactgactaaagagctgggaacgcttcgtcatcgggaaaaagaagtcgtggctgtagaagctttggttgcccgggcgcggagcgaagtagatcgcattaccaaagaaactaacccatttctggctgtcatcaaacgccatgaagaaagcctggctgccaataaatctaactatggtgtacttaaaactgagttaaagaatatacaggagcaggctctgctgcttgataaagcgcgccaggtctactctcctgccggcgttcgctcgcacatcctgacctccgtgacgcctttcctgaatgcccagacagcggaatatctcaatacactgtcggacggaaacattgtggcggaatggtcaacgatggaatcaaccaagaagggcgaatggcgcgataagttcaatatcagcgtgcgcaagatcggcgccagcaaaaccttccagacattgtcaggtggcgaaaaacgcaaagtgcgcattgcgtgctccctggctctgcaggatctggtggccagccgcgcgagcaagaacatcgagctgtttatcggtgatgaaattgacgatgcgctggatactgccgggctggagcgtctgatgggtattctggaagcaaaagcgcgcgagcgcggcacggtgatgatcatctctcacaaagaaatgaagtcatggttccgggaaaccatcacagtggaagtgaaagagggtcgcagctatgtcgtttaa

SEQ ID NO: 215686 - DNA, 1086 bp, Klebsiella pneumoniae
atgacgttgccatatggggtgatctccgatccccattaccacaaatgggattcattctcgacgaccgatgcagatggtctcaattctcggctagccattcagctggaggccacaaaagaagcggccatagctatgaaaaaagcgggctgcagccacatgctggtggccggcgacacattccacgtccgcggaaccgtatcccctaccgtactcaactacgtctccgatgcctatgagtggatcgtcaaagatctggggctcagcgttgctatgctggccggcaaccatgacctggaaacaaacgactctgtctacagcgctaacgccgcagcggcgctgaagtcgattggtgtacagatcgtctgcggccgtaagccacacagcatcaaattgggtgatgtcacagtccatatggtgagctggcgaaacaaccatgccgagttaattagcgacctgaaagcacttcgtgcgcggcttgacggggatctgcacgacgtcgtgattcataccgccatcaacaaagctatccccacaatgcctgatgttggcatcgatgcgcaggagctgaaagacataggctttcgcctggtactgtccggccattaccacaaccacaaggaggtgatccccggagttatcagtgtcggcgcgctgacgcaccaaaactggggggacgtaggttcgctggcgggatacatgattgtgaaccctgacggctcgttcagtcatttcgaaacctcggcgccgaaattcgtaaacctggaagacgatgtggatgacaagcagatacgcggcaattacgtgcgcttccgggccgtcgtcgaaaacgatgaggaaggcatcaagctgcagaacgtcctgaagtccatgggagcgaaaggtgttgtatgcaacttcatccgcaagggctcaatgatggagggtactgccagcacctcagagaccagcaaaatcgacagccttggcgagtctgtttctgcttactgcaaaatcgttcatgacacagacggtggatttgacctgaccaaactgaatgccttgtgtcaggagatcctcaccgaagcggaaagtgcggaggcggtgtag

SEQ ID NO: 215687 - DNA, 495 bp, Klebsiella pneumoniae
atggacgatttttactcaagagagattactctggctgatatgccctttctgatgcatgaattcgaggaaggagcacgtcttggtcactttacaaatgagatcatcacgcaagccggtgggaagaagtttgaaaaacaaatgcgtgaagccattaagattcgcgacgctaatggtgagtcaggccatttcatcttcatcctgcttcgtcgttcagacgataaaaaaattggcctgatctggtttactcctgagattgatccggctggatatcaacgtcttgaactccgtaccttctgtatcaccaaatctatgcagggtaaaggatatggttcgatgttcctgtcggatatgattgactcaaacgcaccactaccaatgatggcaaagtgttacgtcaaatcgacaaaaatggctgaaatgcttaagcgccgtggctttcatcttgttgataccagccccactggcacacaactgcttttccgcaacccacgctga

SEQ ID NO: 215688 - DNA, 645 bp, Klebsiella pneumoniae
atggacttaaaacgcacacgttgggtacgccgtctggaagacggaacctacaccatagaatcaaactccacactgagcaacgagaaggttctctgcagcctgtgtggcatagcctcgaaatgcaacatcaacgagacccgactcaagttgcgtgacgccggtgttaacttccacctgaacagctgtgccagatacgtaccactgctggcatttcgaaaaccgatcatcggtctggataccccctacttcaatactatgcgttcaggcgttacctggcgtgacagattgaccgaggggaaaattgtctgcctggttgaagctgatactgcgaagatccttcgattcggtgtcgtggataaagtttactctgggccagttgatgagatgctgagaaagcacagtcgattcaatcacctctgtatgggcggagagaagatcgaaaaagtgggtgaagtgatccgccgatcctatggccacttcctgaaagaagacagcctgctcacagcgatttacatcagacacatcaaacgggactttgatatcgagtatcacagcgaagaagaactcgatttagtcgaccctcggccaaaagcagaagtttttagcatcgcaaatgcgcgtcagaagctctctgacgaaccctaa

SEQ ID NO: 215689 - DNA, 1098 bp, Klebsiella pneumoniae
atgtccacaagaaagaaaaaagagagcgatatcaaagaaatacctgaagacaacgaaattcctgaggaagaagctctcactttgtacacaggtgatttagttcctaacagcaacaacacggtgcagccaatcgctttaatgcgtcttggcctcttcgtgccgacactcaaaggaacgaagaatagctctcgcaacaagtccaacatgatcgacgcatccagagagcttgtccagctggaagtcgcgcggtcagagggttattcaaacattaaaatcaccggtcctcgactggatatggatcatgacttcaaaacctgggttggtgttgttcgctctctggctgaatacggcgagccaaccgggcgcgttgagctgagcatcacgaagttcgccaagttctgcggctacccgtcttcgcagatccgcaagaccctgcgagaccgcctgacaaacagcttgctcaagatcatgcgcacgacgttgtcgttccagcgcactcatgaagagaagaacgtcgacgacaccaacaagatatccctgttgatggttcacctcataaacagcgttgattacaacgagaagaaagactccattgtcttttatgctgaacctaagctgtctgagctctatcgctttgaccataaagttctgctgcagttgaaggtcatcaacaagctcccgcgcaaagagacggcccaggcgctgtatactttcatcgaaagtcttcctcctaagccggcaccggtatctcttgcccggctgcgcgccaggctcaatctgagcacgcgcaacgtcagctcgcaaaaccagactatcaggaacggattgaagtcactgcaagagctgggctatctcgaatatagcgaggttaagcgtggccgttctgtctacatccagatccacagtcgtaacccaaaactgaaagtaacatcgagcaaacctgagaagccagaggcgcctaagcaggcagaagaagcgaagggtgaaattgatgcgaaacagaacctcaaaaacaaaatttctgagctgtcgcagaacctgacgccagagaatatcaagctgatcgagatactcaccaatagcctcaaattgctttga

SEQ ID NO: 215690 - DNA, 213 bp, Klebsiella pneumoniae
atggctctcacaatgactggtcttgagattgagaaaacaagcggctactggagagcgaaaggcttcagaaaaccggacatgctggagcgtctggaacgcgaagatggttacatcatccaccagcgtcgggaatggcgcatgtttgatcctgaaactgggaaactcacatcgaaagcacaaacgctttggggcctgctcaagcagatccactaa

SEQ ID NO: 215691 - DNA, 336 bp, Klebsiella pneumoniae
atgagaaaaataacgctactgctggccgccctctccttttctctgctggcggatacccggatttaccaatgcgatatgaccgtatcgcaggtgaaaaatgatcaaatcagcagacctactaaagctgacttcggcgcgctggtcgttgatagcggagagcagttctatgtcgtccgcggcgataaggttctctcatctccatatctggctaaacgcaacggtaaactggttggcgttggcgaggacaagcttatctacaacaaatcccacgacgtctacggcgttcatagcaaagaccaaagtttctttttcgatggatgtaaggaggttggttaa

SEQ ID NO: 215692 - DNA, 1077 bp, Klebsiella pneumoniae
atggcaaaaggaaaatcagcactggcactggcattaaaaaagaaaatcggcagcaatgacgagatccaaaaggtttcacactggattgattccggcttccctccgctgaataaagccatctccgggcgctatgacggcggtttcccaagcggacgtatcgttgagatctttgggccgccaagtgctggtaaaaccttcctggcgacggccgccatggtctccgctcagaaacaggagggtctggctgtattcctcgaccacgaaaacagctttgatgttggtctggcggtggcaaacggcctgaatgcggatgaggatgacggccagtgggtctataagcaaccggacacgttcgaagaatcggttgagctgatcggcaccatcctgaaactggtgcgggacgaagagctgatccccgctgacgcccctatttgcatcgttgccgactctcttgcgtcaatggtgccaaactccaaagccgagaagttcgacaaaatggcggaaggtacagcgaaggataaagatcagctaaacatgaacgacaatacggccttggctcgtgctacgagcgccaactttccaacgctggcgctctgggcgcgcaagtacaatgcctgcattattttccttaaccaggttcgtacaaaaatcggcgtgatgtttggcgatccaaccacctcccctggtggtgattctccgaagttctacgcctcagtacgtattcgtcttggcgcttctgttatgaaggatggcaaagataagatcggtcaggacgttggcgccgagtgcatcaaaaacaaagtggcaccgccattcggcaaatgctcatggaaattctacttcgacccgacccgcggtctggacgttatcgagtcactggttgagcacatgctcgaagaaggatacctgccaaagaatgccagcggccgcgtagagattggcgacaagaagtacaccaaatcgcagatcgtcgatatgtatcgtgataagccccttccggagatcattgcggcgctacagaccatcgacgaacgtcgagctaaagagtctgcttcagccaaaacagaagaagcgtaa

SEQ ID NO: 215693 - DNA, 267 bp, Klebsiella pneumoniae
atgttgaaatcactcatcaacggcaatacgaccacgcctacgatgctggctaaggagattgtcttcttccatggagaacatgccgttgttgcactaccgcgcattctcggcgcggccggcatgagcgtgacagaacgagagtacgggctgattagcgaacaggtcgtcaagatcctcacccgcatggccaaacacctcaaccacgacgcaataaagtttgatgaagccgccgcttccaaacgcatcaaagagacaaaaggagcctaa

SEQ ID NO: 215694 - DNA, 945 bp, Klebsiella pneumoniae
gtgaattatctctttgtggacggtaacagcctgggctattaccaccagcaatctgacaaattacataacggcgaaatggaagttcaggcggtgtttggcttcgtcaaaaacgttcgtcgctatgcgtccattcttcacgctcgccccatgatcctgtgggacggctttagcgacaagcgtcgcgactattacccggaatacaaagcaaatcgcgatgaagatccggaaatgaagaagatgaaagaaggctttgcagtccagaagccttatatcctgaaaatgatggccgcccttggcgtcaaccagctgatcgccaaagacgccgaggccgatgacctggcggggatgctggttggtcgtcttgcgccacaaccaacggtcgatcatatctacctgctcaccggcgacggcgactggctgcagctggttcgagaaaaagtcagctgggtgagccttcgtgaagacgccaaacacaagcaggtgaactttgagcagttcccagagctgatcggtctgcctactcctcgtgctttcctcgaagccaaagctctgcagggggatacctccgacaacatcaaaggtgtaggcgggattggtgacggtggcgccaaggagctgctgcacgaatggggaagcgtcgccgctatggtgcgcggcattaacgacggctcgatcgtcatcaataaaggccgatacaaaacggcattcaacaaactggccaaaaatgccttcaacgagaagaccggctgccggatgctggaagccttcaaacgcaacatgacgctgatgaacctcatcgataccaagttcccacccagcgaaattgaaaagataaaaggcgcacgtgatttgaaagccttcgaactgctctgccatgagctgaacttccggtcattcctggaagatctggacgtgttcgttttgccttttgagaggtactgctga

SEQ ID NO: 215695 - DNA, 1008 bp, Klebsiella pneumoniae
atgtctaagtcattacttgatctgcttaacaagacccgcggcgatattgcttccaaacgaggcaacaacgtcgacctaacccgcctgaaagacggtaataactatctgcgcatcttccccaacaaggacgatcagaacggtgtgttcttccagactttcggtatgcactacgttaagcatcagaatgaggagggcaaagaagttaccactgcctatatctgcgaacagcacacccacaatcgtgcgtgccagctgtgtgagatggtgatggaaggtcgcgctcgctacaaaggcaacaaggcaatggaagagcgtatcggtcaaatgcgcgctactccacgctacctggtcaatggcgtactttcagctcgtgaagactttggcgacgcagaaaaatgtcagctgattgagctcccgtccactgtgttcgacgatatctgcaaagtgatgtctgaggatatcgcagatgatatcggcaacccgttaagcaaagaagaaggctatgcgttcctgatcaaacgcaccggctccggtcgcgataccaagtacgacgtatccccaaaacgtaaagtctacaagggcgatatccctgaaaaactgtggtcgacccagcatgacctgatcgcttacgccaatcaggctgatgaaactcgtctgctgtctaccgttcgcaccatggggcgtctcattggtattgcagcacctgccgccgccaccgctgctatttccgcaccagctgctgcaagcgcagcaacgctgcctggttttggcaccatcactggccatacggaaggtgcagctgctgttgccacgacctctaccccggaaccagcaaaaacatctctggtagacgaagagatcttacgtgccgcagaagctgagttcgtaccagagccggaagaagttaaagcatcagctgctgccgccactaccactgcagccgcgaccagcacttctaatgacgatgagggtcttgacgatctgctggcggaattagaatcgctttaa

SEQ ID NO: 215696 - DNA, 432 bp, Klebsiella pneumoniae; identical to SEQ ID NO: 192887

SEQ ID NO: 215697 - DNA, 216 bp, Klebsiella pneumoniae; identical to SEQ ID NO: 192886

SEQ ID NO: 215698 - DNA, 426 bp, Klebsiella pneumoniae
atgagcgcagcggataaaattgcacaagagctcacagcaataccacaggagtttcaggataaggcgattgaagccactctgcgatcccagttctgggaaattattgactgccctgtcacgctcgatctggcattggcgtttgcaaagcaggatggcgccgaccctatttgtcgattacggaaatgcgcgcgtgcgctggcattaaaaacgcaagatccaaaggcgtgccaatatctgctggagatttatgaatctgacaaaccagaagaagagctggcttcatttaaagcgttccgtgcccgtcttgtcctgaaggtggccaaggagttcatggaggtgagtaagataggcgacgtcagaagataccggcttaagaggcagaccagagtcactctatcaaacattttcggtagaaaagtagcataa

SEQ ID NO: 215699 - DNA, 1170 bp, Klebsiella pneumoniae
atgaaaattgccaaagttatttccgagcaggaaggtcttagccctgagaaagcccaagaagtatgggacgcctttgagaagttcggtggatatgccttcaacaaatcacactccgttgcctactcgctgatcagctatcagtctatgtggttaaagacacattaccctgctgagttcttcgctgctgctctcaccattctgggcgaggataagcaccaggggctggttaaggatgcgctgacctatggcattcgcgtattgccaccagacgttaacgtgtcatctaaccgaattgagatccgcacgctggaagacggcagccaggttctgtatgcgccattctctgctgtgaaaggctgctctgagaatggttgccaggccatcatgagagcgcgtgagaaagttggcggcaaattcgagtcacttgagcaatttgaggaagcggtcgagaagcgagcctgtaacagccgagtacgtgagtctctacaaaaggttggtgcattcgcctctattgaacctggcagtatgccggcgaccgatccggaacgtctgcgcgatcaggcagagctgatgggcaatctggtgatcgatgcggtgaaagcttcacgcccatttgaaatgaacccaaaacgctctgcagaggtcaatgtgctgatgactcgcatggccgcagaaatgggtctgggcgatgagttgatacgaccaagcatcggcattaagccaaaaattatggtcatactcgacaacgccaatggcaatgatgcacgtaccggctacttcatggagaacggctacgatgacttcaaagccaagttgctggtttctggtgacctgcgtatgggtgatttgtatgtcacaggcgtgtgtaaaaaggtaaaggataaggaaaaagactacaccaaagatgagatcggccagtttatcgactttatgcgggaagagataaatctggttcgtccaacttacgtgctgacgtgcggcagccgggcgacatcgctgtttaataacaagagcaagccatccgatcttgttgggcgcaaagaatatctgccagacctggacgtgaccgtgttctatggatttaacccgaatattttgtacttccgtccagaggaaggagaaaagctggaagccattctggcagaggttgcggagactattaacaaatga

SEQ ID NO: 215700 - DNA, 696 bp, Klebsiella pneumoniae
gtggaagaaatttggaaatccattcctgagtttgaaggttattacgaagcatccagtttaggtcgcattcgctctttagatgttatacgaacagcccccaatgggggcgaatgggtgaagaaggggcaaatcctcaaacctcgcgtaatcaatgattttggacatctgggcgtgaaactaagcgtcaacggcgtcaaatgcgaccgcacagttcattatctggtagcaactgcattccacggagaacgaccagaaggcttacttattcgtcatcttgacggaagaccatcaaacaatgcgccctccaatctcgcgtatggcactcaagtcgacaacatggctgacgccattgcacacgataccgttgagtttggtgagaggcgctacaacgccaagctaaccaacgaagtcgtcattgctattcgcattaaaaagtcagaaggcgctctgaacaaagacctcgcggccgaatatggtttaactgagctttacattcaccatatcgtcaccgggaagaaatgggcacgagctggtgggccgatcgttgtctcaagagcatccaaaaaactggatgctgaagcaagagctgaggtggtcgccttgcgcaaggctggcgcaacctatgaaaagttgcgagaaaaattcggcatctctaacactcaaatcgcaaatatctttaaaaaagctagcgtttga

SEQ ID NO: 215701 - DNA, 2364 bp, Klebsiella pneumoniae
atgaaagcactgatggtcaggactgatttttccctgggagaatcagcactgaaagcagagcacgcagtaaaggtagcaaaggaggctggctataccgcggttatctctgctgacacgatgaatatcgccagcgttatccccctgcaacgagcagctggcgatgagatggcggtgatctgtggtgttaagctgaatgttgtcgacgatccaacatacgagtaccgggctaaactggccaaagagtctaatggatgtatggaatcattggagcgtggacgtaactactgcttcaccgcactgattaaaaacgagcaaggttatcgcgacatttgcgaactaatgactttagccaatacccgcgagcagttttacttcgtaccacgtctggcgctcgaacagctggcggctacttacgctaaaggcaatatactgttgctgacttcggatatcggcagcgtattccagcgcccggacttcgctaaaattattagcgcgctgattgctgccggcggacgcgagaatttctacagcgtagtttatccgcaccctacgccattctatgaccagatcaacgtgcgagccatgaaagtggcaagcgcactgaaaatcgagcccgttgcgttttacccagcttattacgaaggggttgatgacgctgacatcaaagacatcgcccacatggtgatgaacaatatcaaagtcgatcagccacaccggctgcgtatcccccaccagcgcgacaatgcaataaatggtcgccgtcatctgctgcaggctctgaaagagttttctgtccggatgggcgtatctgtatctgccgccatggcttctacaacgcaggacgccatcgttaaggcgtgcgaatggcgctggcacgagatggcgccgacactgccaaaaatggcagacgatgagcctgcaacgttgatgaagctggctgtcgcagggcttcgaaaacgtctcagcaacaaagaatttggctacacgccaccagcttccgagcaccgcgtttacgtcgatcgcctcaagtatgaaattgagacgctcactcgcctgggattctgcggttatttcctgatggttcgcgatctgatgaatcatagtcgcgagactggtattcctgtcgggccaggtcgtggttcatccgccggctctctggtggcatggtgcatcggcattactaacgttgacccaatccgtcatggtcttctgttcgaacgtttcattaaccctgaacgtctcgacttgccggatgctgatctggactttagccaggcgcggcgccatgaggtgatcgagtatctgaatgcccgatatggcgaagagtatgttgcaggcattccgaacttcacttatctgggcgccgcttccgcactgcgcgacacagcgcgtatttatggagttgatgcggcggatatggctgtttccaaggagctaaagaccctggaggatgacagtttatctctgtcggagctgcgcgagcagctggccagcctggacaagtacgccaccaaacatccggacgcatttaaggcggcgagcaagttgcaaaacctgatgcgtggcttcggccgccatgctgcagggatgattgtcgctggcgtacctctgacggaacgtacccctgtagagcgacgtggagacgcgcgttgcatcgcattcgataaacgatactgcgaggccatggggctgatcaaactggacgttctgggcctggccactctcgatctgctggatagcgcaaaacgttacatcaaagagagcaccggcaaggacatcaacctcgatgccatcccactggatgatcgcaaagtacttgatggattcgccgcggggtatacgcaaggtgtgttccagcttgagtccggccccatgaggaagctactcaaagatctgggtggtggtatcgagccaatgagcttcaaaaccattgtggccacaactgcgcttttcagaccaggtccaattcagtcaggcatgttggacgactatgtctccgtggcaaaaggttttatggctccacattcaattcatccgcgtcttgaggaagcaactaaagaaaccaacggcgttttactctatcaagagcagatcatgaaaagctctcgcgtactcgctggattctctatggctgaggctgacgctctgcgttccgctatcggtaaaaagaacatggataagatgaaagcgatcggcagcgattttgtagaacgagcgcaagcaggttgggtgacactgtcacttgaaaacggaagcacagtagaagtccacaaaaaggccaagctgatgtgctctgacggcaaacgcagaacctatgacgaagcgattggtgataacgctgatattgttgattttggagtttga

SEQ ID NO: 215702 - DNA, 1233 bp, Klebsiella pneumoniae
atgaccgcgactgcgctaccacaagacgcccactctgatgccgtcacctgcaaatggtgcggaaaatccttccatcacctcaaatcccacatttcgatgggacgttgtgaaggcattccggaagaagccaaagggcttggtgtggatgacgtagtgaaaatgtacaccacagcattccctggggaaccaacgctgtctccaaaggccattgaagcgttaaagacgaaacgctctgagaaggctggcgcagacggcaaaatcgcggatatcagttcccaccctggctatgcagggacagtcgaatacaaaacagagcttgtcgccgcgcacgagctgcttggcctgactatcaaggaacttggcacgccccgaggcaaaccccttcaggtaacggtcaacatcaacacgccatatccggagttcgtgccagaagtgaaagccggctatatatacggcgacttcgatctgattaaagacatcttcatgatgctggagatcggcattcctggttatctgtggggtcatgctggtacggggaaaacctccctgccaacccagctttgcgcgctcctgaatcgcccggtgatccgctcacagcatacggcatcaactgaggaagcccatattacgggccagattctggcacgagaaggcacaacctactttgaaccagggcttctgtcgctggcgatgaagaacggttgggtctatctggcagacgaatacgattttgcattcccgcagattctggggatctaccagccagttctggaaggcgaaccactcgtaatcaaagaagcgacaccagactggcgtcgcgtggctccgcataagcgcttcgccttcatcggtacaggcaacactaatggttcaggggatgaaacggggctttatcaaggaacgaacatccagaacgcggctaacttctctcgctttggcatcgtatctcacgtcaagtacatgaagcctggtgctgaggtaaacatgctggtcgaagcgggaatcatccgtgaatacgccgaaaaaatggttaagttcgccaatctggtacgagacgggtatgagcaacacctgatcagccaaccaatcggcccgcgtgagctgcttctgtccgcaaaaatcggaatgatgcgaggtgatttcgcagccggcatcgagaagtcattcatcaataaactcccctccacctctgcgcaagcggcgcgtgaagtggttcagaaaatcttcggttaa

SEQ ID NO: 215703 - DNA, 2280 bp, Klebsiella pneumoniae
atggcaaccaaacccagcaaaactgtactcaaagaggtacaggacttccgcgattccgtaaaacgcgtcgttggtcttctttcgggcaagaacattcctgtagctgaatacggagacacagcatacgttcgctacaataaaaagggtgaaccagtcatggttaacatcccatccataccagatgacgcgagccctgcgcttatgaatgccatacgtggattccttgatcacgaggttggccatctccttttcacagacgaaaaagtcgtcaagaaaatgcgcaacacaaaggcattcggactctggaacgccctggaagacgtctacatcgaacgtcgcatgagtgaagcgttcaccggcagccggcggaacctattgtccacacgtaacctcatgattgacaaatattttaatccccatgttaaaaaggcggtggcgatgtgccgcggggatcaacgcgagttgtttctaaagttcttcctctgtccggttctacgggcgtgggatggccaaccaacttttgttgatttcatggaggagcactggcacctcatcgacaaacctattgccgttctgaaagagtttggcgtcgatgaagctgtccgtcgtatggatagcactgaggattgcgtcaaggttgcagcagcaatggctaagatcctgcgtgaaatgactgagatgccagaaggcccgttacctgagcttgaatcctctgtaaccaaaaagaccgaaccagaagaagacagttcagatgagccggctgctggagacgatactgaggtttgtgacgaagaggggctcgaaagcactcctgatgggtttagctctgacgatgaagatgatgaaaaatcagacaaatcgataagtaagtacatacctaacaggcatgaagtaataaatgatacagaaagcaaacctgaagatggcgatttaggccatgaaaatgttgacgacttgcctgacagcggagaaacgacagctgatgaacctgttacatctctgggctcggatgtaggggaagaagtggatgatgaaggagattacagtccctccacggatgatggctcagaggacaggcatggcagctcctctgatgacagcgaagctgtcgaagacggtgaaggcaaggcagataaagacggtggcaaggagaaggatgaagggggccgggacacctcggatgaaagcgatgccggctttgccccacacgctgacgatatgtctcttgatgatgctctcaaggcattagaaaacttcgatgaagaaataggttcttcaactgaagatgcgctggcgtcggcgatcaagtcggagctggccagcgcgtcactatctgattaccggccatacaatcgctcctacgacttcctggggccaattgacgaggcagaagagcatattaagcgcgccagaaaagcttttggcgcaatccctatgtattcgcccgtagatcgctaccgcattgttccagagggcagaaaactgtttgagatgaaggtggagagacatctgtcttcctcggtgtcatctaccttggccaaagacctggagcgcgcgatcgccagtcgcaaccgtgttcagttcatccctggccagcgtcgtggacgcgtacatggggcgagtctttaccgactgtcgatgaatgacgatcgggtattccggagaaaagaagaccacaaggccgtgaacgcgtgcgttcaacaggtcatcgatttgtcaggttcaatgggcggccgaaaaatcgagctcgcgctggcatccgcatacacactggctgacgccctagatcgtatccacgttccgaacgtcattaccggcttcactacgtatggcaatccggatgtagcaactatgtcgaaacgtgggtttagccgctttgaagcgcttatgctgccgattattaaaaactggcatgaaaaagcgaactccccagagatacgtgctcgtatgggctgtgtggcggagactttccccctgctaaacaacgtggatggcgagagcatcgcacagctggcttctctgtttgcagggcgtatggaagacaagaagatcatgattgtgcagagcgacggcgccccatgcgctgcgggggatggctttagtaaccatctgcgctctgtaacgaatgacatcgaaaacacaagtcacatcaacctgttggccattggcattcttacggacgcgccgcgccggtattacaaaaactatgcactggtgaataaggtcgaagagttgggtacgtcagttgtcagtgagttatctcgtatcattctagagtaa

SEQ ID NO: 215704 - DNA, 213 bp, Klebsiella pneumoniae
atggaaaaattgtcatctaatttacttgctctgaatgtaggcaatgttttcgcgctgacacacctggaggctgcagaagtactatctgagttaccaaatcaccaggtaaacgttagagcgcgcgacactactgttttccggttctccctggaaaatggctctttcacgctgatcaatactggcgacctctctttcgcggttcgaatcaactaa

SEQ ID NO: 215705 - DNA, 381 bp, Klebsiella pneumoniae
atgacaatggccgatgagaagaccgctcgttacgtcgcctacatcgattctttaatcactgtttcgccgaaaagtcagtcggcgatctcccgtgagattggttacaagaatcccaacattttgtccctgataaaaaagggaagaattccgctgccggtagagaaagtgctaccactggcagaagcactgaatgcagacccagtacgtctcatgatgatggttcttgaagaccgtcagcctgagctggcagattttttacgagaccagggcatagcgccgctgactccggaagaacgtgaggttctcgcagctttccgcaaccgctttccggctcaaactgatggtgttgagcaggttgtcgaagcaattaaaaagctatga

SEQ ID NO: 215706 - DNA, 1101 bp, Klebsiella pneumoniae
atgaaaaacacgtttgacagagcacgcgcagcggaaaacacgtcacaggaagcgatcacctatctggatcgggcatcgcagatggatgcccggtcggtctcgatgcagggtgccgatctgactttcgccgacgcattcatgttattcactcgcttatcattattgataactcgccgccggcccgagatagctgtccattgtgttttgatacatgttctcccgcatatcgctcaggaaaaagtaagtaacctgaatagaataatggtgaatcagctggtcaacccgctgatccttgaagggaagatcgtgatgggtcgccgtgttttttccatcatgaagcagttcctgggatggtgtgccttccaggggattatcgaaacatcgcccctgaatgatatgtcgctgaacaaagttgccggcggcgcgaagacggcaccgcgggaacgatgcctgacggacgcagaggtttgggtattctggaatgtctgggactatttcgacgtatgtccaggcacgaaatgggcggcaagactttgcctcgtagctgccagacgtccagatgaagtgctgcgggccagagtaagtgagttcgaccttaagctgaatgtatggaatcaaggatctcgcaacaaatcggcccggtcgcacacccttccgatgagctcactgatgcggaagtgcgtagaagaattgattgattatggcgccggcagccagtggctcgtcccgtcgaacaaaaagaaagctgatacgccaatgtcaaaggttgcaatagcccaggcgttgaggcggattctagagcgaccagagcttggggaagtggagtcgtttaccccacgtgatctgcgtagaacggcacgcagctactttccagcccttaatatttctcaggaagtatcacgtaagatcatgaatcatagtctggaaggtatcgaccgtgtatacgaccgatatgactacatggatcagatgcgagaagcccttgagagcttctcatcgtacatctcgtcgattgttgagcaaccagatttagaagaaattgaccacaaaatgaagggagatcgcctatccaccgagctgatcagagtaaacttctcatag

SEQ ID NO: 215707 - DNA, 360 bp, Klebsiella pneumoniae
atgatgaccttaaaatattatttacggcactgcttatggggatggtgtggttatggctatctgatctattttatagtgcgcgatatgaatgacggactcatttttcctgcctatgctccttatatgccatttgtggttacatatcttgttttaagcgccattctgtacccattctcatattatacttcggagaaactagcccttaagataatgaccaaacccttttgggatcgtcacattggcgtgaatagcggtgtgtatggcatgttcattattttgtggttattttgcctgccgctttctgtaccgttatttctcgtatatttatgcatacgcgcaaagactagattaagtgcctaa

SEQ ID NO: 215708 - DNA, 411 bp, Klebsiella pneumoniae
atgaaagtcacatggaacagtgatagttacgcccaatttttggagccggtcttcagagtaatgcctgatctgaagacctccttacttgctgactttgtgagttttaagaatggcttttatccggccgttttcggcaaagatggcccctataccgaacctggttctgtagtttcctctcgtgtttaccacgttcatctcttattcaccaagcaagaacgaaatagtcaccgcaacaggttcaactgtacaagcgaccgcgccctcgtttatacccagcacgccaagtttcaggacgtgtatagtctgctggccatcttcccgaaagaggcacacaaaacagccagtgatccagtcaaaatgagcgacatcgccaaatacgcggcagccttccagaaattaacaaacccgtag

SEQ ID NO: 215709 - DNA, 618 bp, Klebsiella pneumoniae
atgcatttagaaaattgcctggaagatatgaatgtcattagcaatgctcttgctaccgtgacttctaacgcttcacgcttttcgaatgcaaatagcactccgaaagcattcccgaagcgtgtacacacaaaatttaagatgcgtccccgtatcggcggcatcacaaggtcgacgaggccaggttttgcagattctaacgagttcagactgccgcaaacagaaggaattccggtagctgaaagcgataccgcagctcaacttgcggatattgaacaaaggctcgcagagctgacggcgaaacacgttcagttgacccacaacatttcaggttacagtgcggaacagatccgcgatactttcggtgaaagccgttacgaggacttgaagaacgttgacctgtccatacgcggtttagaaggcttcgttaacaagttcatccgtgacgccgaactgccacatccgtacctgaaacgcttgagtgatgctatcactgagtaccgtctggcggtttctgacctcctgatgattctaaatcagtgctttaacgaggtagaagttatcgaatcgcagacaggcctcattgatgaggacgtcttcgcaaacttctccttccattaa

SEQ ID NO: 215710 - DNA, 369 bp, Klebsiella pneumoniae
atgattgttatggcgatctcgaaagaactcttacctttaccgttcggtgtggccggctactatccacctggttcagagatcggctgcaatccccagttctgcgaggataaacgagagaaaacaatgaagtttgtgatttatggacgagaaaattgctccttctgcaagcgagccgttgagctggcgaagcagctgcagggccatggatatggcgaatatcagtacatcgatattgtcgctgccgggatcgataaacaaaagctgagtgacatggttgggaagccggtagaaaccatcccccaggtctttttggacgatgttccaatcggcggttacacagaatttgctgctttcgcaagcactctgtaa

SEQ ID NO: 215711 - DNA, 777 bp, Klebsiella pneumoniae
atgggaaacaaacgtaaacaggcgcgacgtgcagctcgccaggcgcttaagtcaaaatcgcgtattctcggatatgagatcgacactattatcgtagacgagctggcctccgccgtccctgctctgcccccaaaaccgaagcgtgacacttcccccatagaggcacgcaatgaggcccaggcccactatcttatctctcttgatagcaaagcactgacgttcgccactggcgaagccggctgcggtaaaaccttcctggcgacggccgtcgcggcgcagcgattactcgataaggaagtagaccgaattatcgttacgcgccctgtactgcaggcagaggaggatttgggcttcctgcctggcgatatggctgagaagttcgctccgttctttcgtcccgtctacgatgtgctgcagaagcgcctgggcgcttcatttctcgaatactgcctaaagccagaggtggctaaagtcgagatcgcccccttcgcatacatgcgcggccgcaccttcgaaaacgctgtggtcatcctcgatgaggcccaaaacgtgacagcgtcacaaatgaaaatgttcctgacccgtatgggtgagaacgtaacggtcatcgtgaatggtgatataacccaatgcgacctgccgggtcatgttaaatctggtcttgaggacgcactgcagcggttccaaccgtctcgccaggtagggctcattaagttcacggccgaagattgcgtgcgctctgagctgtgcaaagtggcgcttcaagcctatctgtaa

SEQ ID NO: 215712 - DNA, 1257 bp, Klebsiella pneumoniae
atgccatttctattcatatttgccatattgtttgcattggttcctattttttggaatttcatcgttgaaaactatgttgcgatcggtacagtggctacagctttcgcttttttagctacggcgtgggcggctttcgaagctaggtacagtgcgaaagcagcaatgaaggctgtaaaactaacctctgattctttgtatgaaatgcgtaaggcttcttttaagcaatggtttcaactattactcgaacagcatgcgccaatgcacgatgaagttcaaaacttaatatctaccgatcaagatatatctatcaagtttaatattaattttttgcaatcctccttcccaacattatccaagaagactgaagtaattaggtatattaatcatatagtaagtatactggaattcgttgataatgatttttatactacaaatgcaagctttaatgaaaagaaacaatatgtagaacagttaacaaacagaatcaactcagatgttaaattggtaattgcaattttaggattaaatgtttttgataatggaacatacaccccaagaagattaaatgagttactgaataaatatgatttttttaacagagaatgtttttttaaagaggccattgaaaaaataaacactttagatgattatgtcaacgaactgttttataaaaactatagaaattacattgaaatttacatgaaaaaaaatgtcttaactcatcaggttgaaatcataaatccaatcgctaactcaaatttcaaacctaaagttaaaactagcattgcggtgatttgggcatacaacaatctatgtcatgcttatttaaaaaaatcctttgatgagttgcctgggtttatgaaagccactatcgacatttggcttgagaattcacttacaataaaagacgagcataatgacatttttcgcaactatgtcggcttcgatctaaacatacaaggtcacgatacaataaaaatcaaggcaatacgtcaattgaaatttttgatagacgtttatcttaaagaaagaggaagggttgatcctcactctatcacccttaccaaaggaaccgaaaaggttcattttgtaaacttcatcccaaaaatagaagaatacgaattcaataatgcgctattaaaattagaaaaaaatcatgaaaaaaaagccattattagaaagattctagaagtggtaaatgaaaacatagccttttataaagagcagttagatgcttgtacctttaataaaaactaa

SEQ ID NO: 215713 - DNA, 1038 bp, Klebsiella pneumoniae
atgaccgttcgaaaattaagcgacgggcagtgggtcgctgacttttataccgtcaaccgaagtgatggtaaacaaggtaaaagagtccgtaaaaaattcgcgaccaaaggtgaagcgcttgcctttgaaaactacaccttgcaaaaaatcgaagatacgccctggctgggagacggtaaagacaaacgacgcctctcagaattagtacatctttggtttgaacgtcatggaattacacttcgcgatggggagaagagaaagagcgcaatgttatgggcggctgagtgcatggggtcgccactggcgattgaattcagtgctcagcttttcactgcatatagggcgaaaaggcttgatggtcagtttgcaagaactaagcgcgtcagtcaggtctcacctcggactatgaatcttgagcacgcttattttttggccgtattcaacgaacttaaaagaataggagaatggacagcccctaaccctctagaaaatgtacggcaatttagggttgatgaaagtgaaatggcatacctcactattgaacaaatcgaccaactgttgcaggaatgccgggacagttctgcaaaagacctcgaaacgatagtcaagatatgcctggcaaccggggcaagatggagtgaagccgaaaccctgagacgctcccaaatctcagcgggaaaagtaacgtttataaaaaccaaaggtaaacgtaatcgaacaatccctctagatctggatttgataggtgagcttcccaaaaaaaatggcgcattattcacgccatgctattacgctttcaggaatgcacttgaacgggctggtatagatctgcccgctggtcagctaacccatgttctacgacatacgtttgcgagccacttcatgatgaacggtggcaatatacttgtactacaaaagatactagggcataccgatataaaaatgacaatgcgttatgcgcactttgcgcctaatcaccttgaagaagcggcaagactcaacccattaaaatgtcgcaaaagtgtcgcaggaagttag

SEQ ID NO: 215714 - DNA, 585 bp, Klebsiella pneumoniae
atgaagctacaaattgatttttctcaaggcggaaacgacacgttagatcgtgtcattgaagcatatggatttagaacaaaagtcgcgctagccgagcatcttgggatcgctagtagcagcctggctaatcgatataagagggactttttcccggccgatatcgttgtacgctgtatggctgagacaggtgccaagctggaatggctggttactggcaacgggccaaagtttgatggcgaagaactcgacattttaagggtttcgagacaaaagatcgtcgacggccagctttatgagtcaggggttttaatgttggataaagctacattcctgccagggaaagccgttcctcaaacaccgctttgcgttatcgataactcaacgacttatgtaatcgaaacggagttttcagaggtatttgatggtgaatggcttgttgatattgaaggtaagacaagcgtaaggacacttacccgaatacctgtaaaaaaggttcgcgtcagtggttccggagcggcttttgactgttctatagatgacatcaatgtcataggtcgtgtggtactaacaattatcagtagctga

SEQ ID NO: 215715 - DNA, 222 bp, Klebsiella pneumoniae
atgcgaccaaacattacaatcgtcatcccggagccttacttgccactcgatgagtattgccgccgtactggtactaataaagaaacagctaagaacttgattgaatatggaaagttaccaatcaagccaaagggtaaacagactaagggcctggttgaagtgaacatggctgctctgactattcaagctctgagtgaatgcgacatttcacttaacgtgtaa

SEQ ID NO: 215716 - DNA, 510 bp, Klebsiella pneumoniae
atgttagattttcgcgtttcgtcacatgcacactttgatgatgcatgcagaaaattcgcggccacgcataacgttaaagagctggcggataaagccggtatcaagccgcatacgctttacaacaaactcaacccggaacagccgcaccagttaacgccgcgcgaaatctggacgctgacagacctgaccgaagactcgacccttgtcgatggttttctggcacagatccattgtctgccatgcgtgccggtcaacgaactggcaaaagagaagctgcaatcctacgtcatgcgcgcaatgagtgaactcggcgaactagcgagcggtgccgtttcaggcgaccgtcttaccccggcccgtaagcaaaacatgattgcgagcgtaaacgcgggtattcgaatgctgtccctgtcggcaatggcattgcaggcccggctccaggctaacccggcaatgacgagtgtcgttgataccgtcagcggcatcggcgcgtcattcgggctgatttga

SEQ ID NO: 215717 - DNA, 372 bp, Klebsiella pneumoniae
atgaacgaaagaatttcagctcatgacacccaggcgagcaagctttttagcaatgcagattggtctactgagcaaccgaagaccatgaccggcgaagagtgtttcgcacggtttcatcaaaaactgaaggcaacagaaaataaggcgctgcgtaatttcaataagcttgatgaagattttaagtttgtggttttaacgcttgctaaccgaaataatccgggcgcgtttcgctctgatgaagttggtaaaccatatgagtattttgatatggatcgccgcaagctgattattgcgtcaatgaataaaatttcccgttggggtgggattttgccccggcatatttccatccatgaatgctttttagctaattaa

SEQ ID NO: 215718 - DNA, 225 bp, Klebsiella pneumoniae
atgcacaaacaagcttcagaacctaaagaaaataccgacctgcttcttgaggttatcagtattgcaaaacgtgaagagcgtaaaggtcgcgctctcgctgtttccattcgccttgaggcgctggcaacccatattgctaacaagggtatgagtgccattgaagcggctgaactgctgcgccgcgaagctacccgctacgaaaacgaatctcaggagctgcactaa

SEQ ID NO: 215719 - DNA, 228 bp, Klebsiella pneumoniae
atggccgatgcaatggatatcgcacaacagcgcgagcaggcagaacgcgagcgccttatcaacaacgcgcgcagccgtatcgctgcgccatctcgttttacatgcgaggaatgtgacgcaccaatcccggaggagcgccgcattgccatcaagggcgttgcactatgcgtcacttgtaaggaaatcgcagagcttaaaggtaaacactataacggaggtgctgtatga

SEQ ID NO: 215720 - DNA, 273 bp, Klebsiella pneumoniae
atgagcattcgcatcgaaatcggcgacaaatggattataaacagcgaccagtatcaattcattttgagcgagaaaaaggtcgcaaaaagcggccgtaaagctggcgaggagtggctcgatactatcggctactatccaaaaatcgaacagcttatttccggtctgattcatcaccacatccagcagtcgaccatcacctcaattgaggaaatggccgcagagattaagcgcatcggagaaatgtgcgcctcctcaattaaggcggcggcatga

SEQ ID NO: 215721 - DNA, 282 bp, Klebsiella pneumoniae
atgagaaaaacacatcaactaaaaatccggcctgaattttttcaggctgtcattaatggaacgaaaaaagcagagtttcgtcttgatgaccgtgcgtttgctgtaggggacttactttgcttaaacgagtacggcccctgcgagtatgaaccgcaaaaggtcgggtttacaggcgcatttgtctacgtactggtgactcatgtagctgaccttaacgagtgggcccctggctatgtaatgctcagcatacagcgcaggcaaatgggggagctatgcgggtaa

SEQ ID NO: 215722 - DNA, 2148 bp, Klebsiella pneumoniae
atgttcgcggctttgctgcatgcgagaaaagggctttctctccagccagagtgcgtgcgctttgacgtttatcgcaccactgcggtactggagcaaaatcagggcagtcaacgagccaatgcctttttaatcagcttctgtaaaaaggcattgccacgtcttgaactggtcgcaaaaaaatacgagtgcatgggtatcaacagcaatgtatcaactgctgttttcggtggttattttgacacccgactcatgcaatatctggcgtctcgtatggttaatctggtcgccagatataaccgcctccctgatatgtcgcgcgccgatgttgacctgttggccggtgatattgctaatttcattcgttctgagctggcaaatattgatgactcaggttttggtgaactcaaaacgctgtacacctggtacatgcatgctggttttatttctctgcaatttaatgtcacccctccccattgggagcgcgtggcaaataaatacttcaacaaagatgatatcgcccccgcagtaatccgtatgtttactgagtcatggtggcgtaatcgtctgcgtcgtgtcgcgtcggcatggcgcgaacatctacaaattgcagtcggcaacgtcagcaagaaaaagcacgcctacgcgagtaaaaactgtgtgaccgactggcgcgagcaaaagcgccgcacgcgtgagtttctcaaagggctggatctcgaagacgaagacggcaaccgcatcagcctgatagaaaaatatgacggttcggtcgctaaccctgcgatacgccgctgcgagctgatgacccgcatccgtgggtttgaaaatatctgcaatgaattaggctatgtaggggagttttacaccctgaccgcaccgtctaaatatcacgccacgactaaagcaggctaccgtaacagtaaatggaacggtgccagcccgtcggacacgcagagctatctaaccggcctttgggcgcgcatacgcgccaagctgcaccgggaagaaatccgcattttcggcatacgcgtcgccgagccccatcacgacggaacgcctcactggcacatgcttatgttcatgttgccggaggacgtcgagcgcgttcgcctaatcatccgtgattatgcgtgggaggaagaccgccacgaactgagaagcgataaagccaaaaaagcacgtttccacgctgaagctattgacccggagaagggtagcgctaccggctatgtcgctaaatacatttcgaaaaatatcgacggatatgctcttgatggcgaaaccgatgacgaaagcggtgaactgctgaaagatacagctcctgccgtatcagcatgggcggcgcgctggcacatccgtcaattccagtttattggcggcgcgccggtgacggtctaccgtgaattgcgtcgtctcgctgacaccgagaccgcgcacggtctgagcgttgaatttgccgccgtccatgatgccgctgacgccggtgactgggctggttacgttaatgcgcagggtggcccgtttgtccgtcgcgacgatttgcaggtgcgcacgctgtatgagcctcgcgccgagtttaaccagtatggtgaggaaactatctgcattcgtggcgtgtacgattccgccgtcggcgctgacaccccgattttaacccggctaacgcagtggaaaattgtgccgaagcgtgccgttgatttggccgttgacgttaagggcgctcctgcgccctctcggagttctgtcaataactgtacgggaagcgaaagcgagccgccggagttggatttatccaaaccgttgagtcgaagtgagaggcggaagctaacgaccagactcagggataaaaaacgggttatcaggcgtgattttgtccacggaacggataagcaaagcgcggcaattgaaagaacaatagacgagatccagctcatgaccggtgaaagcattagccggggcgaggctatacaccttttagcaggtggtaaaagcaacataaacggaaaatggtgtcgtggatctgcaaacggtgaaattttccgggcgacaccatcgaacgaggccagggcagaggctaaccggggaaaagccagagaaatcttaaaccgggttgcgaggttagctgatgttttcaaggcgaattgctaa

SEQ ID NO: 215723 - DNA, 441 bp, Klebsiella pneumoniae
gtggatagagagttaaacgagcaagtcatgattgaacgggtggaaatgattgcgcgtctgacaacagagggtgtgtgtcaggaaagggatcgtgaaattgctttaaatttaatcgcggagatagcaagaggtaacttgatgaaaaacaactatttttctgttgtttttactcccacccctgtagaaaaacgattaaaaaaagggggagaagtgagagttaacatcacgttagataaagaacagaaagtagggcagcaagtaattgacgcatttcagaacgaactaactagacgagtacagaccatttttccgacaacgcgtattacggtaaaaaaaggggcaatgacgggagtcgagttagtggggtttgaccaggagtcagatcgagaggcattagacggtattctccaggaggtttgggaagacgatagctggagataa

SEQ ID NO: 215724 - DNA, 258 bp, Klebsiella pneumoniae
atggggaaacacgattgcaactatcaaatcgtttaccgcggcgaaacgttacaaaagtacgagcctggcgggtgggtatttttccaacgaccaaaagaatgtggtggtggttactggtttggccgcacatacgatggtgtttttatgctggatctggaaagaccggtttcacttcatgacggcataatcttcctaaatcagttaaacgaagtcgcgtctaacttcatgacttttgatgatgattttaagctgatttag

SEQ ID NO: 215725 - DNA, 1044 bp, Klebsiella pneumoniae
atgagtaaatacaaaggccgcaagccacagccacaaaagcgcccgcgcaacatgaaagacagcgcgccccaaaaaatggaggcgtttacctttggtgaaccgagcgccgtgctcgaccgccgcgatattctggattacgtggaatgcgtcaataatggccgctggttcgaaccgccggtcagctttaacgggctggcgaaaagcctgcgcgccgccgttcaccacagctcgccgatttacgttaagcgcaacattctggcctcaacgtttattccgcacccgctactgtcacaacaggacttcagccgcttcgcgcttgattttctggtgtttggcaacgcgtttttagagctccgaaagagtgtcaccggtcgcccgctgaagctggaagcgtcaccggctaaatacacgcggcgtggtattgaagatgatgtctattggtgggtgccgtcattcgaccagccgcacccgttcgcgccgggatccgtattccatctgctggagcctgacatcaaccaggagctgtacggcatgccggaatatctcagcgcgctaaactccgcctggctgaatgaagcggcgacgctgttccgtcgcaagtattaccagaacggggctcatgcgggttacatcatgtatgtgacggacgccgcgcaaagcggtaccgatgttgaggcgctgcgcgatgcgatgcgcagctcgaaggggctcggcaacttcaaaaatctgtttttctacgcaccgcacggaaaaccggacggcattaaaattgtgccgctcagtgaagtggcaacgaaagacgatttcttcaatatcaaaaaagtcagcgccgccgacctgctcgacgctcaccgcatcccgtttcagctgatgggcggcaagccggaaaacgtcggttcgctcggtgatatcgagaaggtggcaaaggtttttgtccgtaacgagctcataccgctacaagaccggatgcgcgaggtcaacgcgtgggccggtcaggaggtgatccggttcaaaagttacaccctcgacaccgaaagtgactga

SEQ ID NO: 215726 - DNA, 1770 bp, Klebsiella pneumoniae
atgaccatcaccaccgacaccactttattaaacgacccgcgacgccaggcggctttgttgtactggcaggggttttccgtgccgcagattgccgaaatgttgcagaccaaacgcccgacagtgcagagctggaaacagcgcgaccagtgggaggaaaccgcaccgctgaaccgggtcgaaagcaccttagaggcccggctgattcagctttacgcaaagcccaacctgacaccccacgatttcaaggtggcggattttctggcccgacagatggagcgctttgcgcgcattaatcgctatggccagaccggaaatgaggttgaccttaatcccaatgtggccaaccgcaacaaaggcgaccgcaaaaagccgacaaagaactttttcagcgacgaggctatcgagaaactggaagagatttttttcgcggagtctttcgagtatcagctccgctggcaccgcgccgggcttgagcaccgtattcgcgacattctgaaatcgcgccagattggggcgacgttctacttttcccgcgaggcgctgctgcatgcgctgaaaaccggccataaccagattttcctgtcagcgagtaagacgcaggcgtatgtattccgcgagtacatcattcagtttgcccgccgggtcgatgtcgacctgaccggcgacccgattgtcataggcaacaacggcgcaaagctgatttttctcggcaccaactcaaacaccgcgcagagtcacaacggcgacctgtatgtcgacgaaattttctggatccccaacttccagaaactacgcaaagtgtcgtcgggcatggcctcacaaagccacctgcgcagcacctacttttcgacaccttccaccctggcacacggcgcttacccgttctggtcgggggaattattcaaccggggccgcgccagcgccagcgagcgggttgatatcgatatcagtcatgacgcgctcgccgctggcgtggcgtgtcctgacggtcagtggcggcagattgtcaccattgaggatgcgctcgccgggggctgtacgctgttcaatctggagcaactcaagcgcgaaaacagcgtcgacgacttccgcaatctgtttatgtgcgagttcgttgacgacaaggcgtcggtgttcccgttcgaggatttgcaacgctgcatggtcgacagtctggaagaatgggaagactttgcgccgttcgccgacaacccgttcggctcccgcccggtctgggtgggatacgacccttcgcacagcggcgacagcgccgggtgtgtggtgctcgcaccgccggttgtcgccgggggcaagtttcgcattctggagcgccatcagtggaaaggcatggacttcgctactcaggccgaatccatccgccagctcaccgaaaaatacaacgtcgagtacatcggtatcgatgcgaccggcctcggtattggcgtcttccagctggttcgctcgttttatcccgccgcccgcgatatccgctacacgccggaaatgaaaaccgcaatggtgctgaaagcaaaagacgttatccgccgtggctgtctcgaatatgacgtcagcgccaccgacatcaccacctcgtttatggcaatccgtaagaccatgaccagcagcgggcgcagcgccacctatgaggccagccgcaccgaggaagccagtcacgcggacgtcgcctgggcgaccatgcacgcgctgttaaacgaaccgcttaccgctggcagcggccaggtaacatcatccattctggagttcaactga

SEQ ID NO: 215727 - DNA, 855 bp, Klebsiella pneumoniae
atggcaaaaaaagtttcaaaatggtttcgcatcggcgtcgaaggcgatacctgtgacggccgcgttatcagcgcgacggatattcaggaaatggcagagacctttgacccccgcgtctatggttgccgcattaacctcgaacacctgaaaggcatcctgccggatggcccgttcagccgttacggcgatgtggttgagctgaagtctgaaaagattgacgacgattcggtactgaaaggcaagctggcgctgttcgccaaaatcaccccgaccgatgacctgatcgcaatgaataaaaaattgcagaaggtctacacctcaatggaaattcagccgaatttcgccaatagcggtaaatgctacctggtcggcctcgccgtgaccgatgacccggccagcctcggcaccgaatacctcgaattttgccggggtgccaaatttaaccccctcaaccgcttcaaagccgagccgggcaacctgatttccgtcgccaccctcgccgagctggagtttgaagaccaggcggaaaatgtctttaccgccctgagcgacaaagtgaaagcgatcttcagccgcaaacaggccagcgatgacgcccgttttcaggatgtgcatgaagccgtgacggccgtcagtgaacatgtgcaggaaaacctcaccgccactgagcagcgtcttgccacgctggaaaatgcctttgcgacgctgaaacaggacgtcaccacgaaggccgaccagaccagccaggcattcagccagttaaaaacgtcgctggataaaaccgaaagcaccgcgcagccacgccgcaagctctccaccggtggcggtggcgatgagctgctgaccgactgctaa

SEQ ID NO: 215728 - DNA, 1059 bp, Klebsiella pneumoniae
atgcgtcaggaaacccgttttaaattcaatgcctacatgtcccgcgttgctgagttgaacggcatagacccggacgacgtgagtaaaaaattctccgtcgagccgtccgtcacgcaaaccatgatgaacaccgtgcagatgtcctcggcctttttgcagaaaattaatatcgtgccggtggatgagctgaagggtgaaaaaattggcgtcggcgtcaatggcaccatcgccagtacaacggacaccaacagcggcaaggagcgtaaaacctccgactttaccgcgctggagtccaacaagtacgaatgtgatcaggtcaacttcgactttcacttcaaatataaaaagctggatttgtgggcgcgcttccaggacttccagcgccgtattcgtgatgccatcatccagcggcaggcgctcgatttcatcatggccgggttcaacggcgttgagcgcgccgaaacctctgaccgcgccactcatccgatgttgcaggacgtcgccgtcggctggctgcagaaataccgtaatgaagcgccgacccgcgtgatgagcaaaattgtcgacgaagaagggaaggttgtttccgctgtgatccgtgtgggtaaaaacggcgattacgttaacctcgatgcgctggtcatggatgcaaccgacaacctgattgacgagatttatcaggaagatgccgaacttgtagcgattgtgggtcgtaagctgctggccgataaatatttcccgatcgtcaacaaagaccagcccaacagcgaagcgctcgcggctgacatcatcatcagccagaaacgcatcggcaacctgcccgccgtccgtgtgccgtacttcccggcgaacgcgattatggtgacgcgtctcgataacctgtccatctatttcatggacgaaagccaccgccgatccatcatcgaaaacccgaaacttgaccaggtggaaaactacgaatcgatgaacatcgattatgtggtcgaaacctacgccgccgggtgcttcattgaaaatatcaagctgggcgatttctctgccgcgcaaccggagggctaa

SEQ ID NO: 215729 - DNA, 744 bp, Klebsiella pneumoniae
atgacgagccccgcacagcgtcacatgatgcgggtctcggccattgaaaccgcgcagcgggaaaacaacccgctgcggcatgccactgcctatgagcagatgctggttaagctggccgcagaccaacgcacattaaaagccatctttggtaaagagctgaaagccacgaaaaagcgcgagctgctgccgttctatctgccgtgggttagtggcgtgctggaacagggcaaaggcgcgcaggatgacatcgtgatgaccgtcatgctgtggcgtcttgatgtcggcgatatcagcggcgcgatggatattgcccgctacgcgtttaagtacggtctgaccatgcctggtaaacaccgccgcccgccgcagtacatgtttaccgaagaggtggcactcgccgccatgcgcgcccatgccgccggtgaaccggtcgtcgtcagccagctactcgacacgctggcgctgaccgccgccgccgatatgcctgatgaggtgcgcgcaaaactgcacaaaataaccggccaggtgctgcgggacaacaaacagcccgccgacgcactggcccacctcaagcgagcgatgcagctcgattgtcaggcaggcgtcaaaaaagacattgaacggcttgagcgagagctgaagcccaaaccggcaacagtcgttaaagccccggtaagagtgccgcgcgccgtgaaaaccacggcaccggctaaacgtggccgcccgaaaaagaccgtcggttaa

SEQ ID NO: 215730 - DNA, 507 bp, Klebsiella pneumoniae
atgacgacgctgattattaaaaagaacgatgagccgcagccgggtggcgtggtggtcatcccgccacctgccagcgatgagccggtgataaaaaatacgtttttctttcctgacatcgacccgaaacgcgtgcgtgaagggatgcgacttgagcagaccgtcgccccggtccggctgcgtgaggccatcaaaaccggcatcgccgaaaccaatgccgagctgtttttgtggcgggaacagcagattgccgggggttttagcaagcttgccgacgtaccggctgacgatctcgacggcgagagtgttcgcgttttctattacctgcgcgccgtcacctcaatggcgaccgccacgctctatgagcgttatcgcggtgtggatgccagcgccaaaggtgacaagaaagccgacagcatcgataccactgtcgacgagctgtggcgggacatgcgctgggcagtatcacgcgtccaggacaaaccccgctgcattgtgagccaaatctga

SEQ ID NO: 215731 - DNA, 204 bp, Klebsiella pneumoniae
atgcaggccatcgcgcaacagggcgacacgctcgacatgatttgcgcccggtattacgggcgcactgagggggtcttcgagtcggtgctcgccgcaaatccggggttagccgagctcggcgcagtattgccgcatggcactgtgatcgaactgcctgatgtgaagtcatcccccgtaacagaaaccataaacctctgggagtaa

SEQ ID NO: 215732 - DNA, 291 bp, Klebsiella pneumoniae
atgacggaaggggaaaaaagcgtcatttcgctttttatcatcggcgcgctgattgtcgtcggtaaagtgctggccggtggtgaaccgattaccgcacgtctttttattggtcgcacgttgctgggtggctttgtttcgatggtggccggggttgccctggtacagtttccagacctgccaaccgcggccgtgtgcggatttggctccatgctgggtatcgccggttatcaggcggtagagcttgctatccagcgcaagattaaaaaaggggaaaacgatggcagtcattaa

SEQ ID NO: 215733 - DNA, 498 bp, Klebsiella pneumoniae
atggcagtcattaagacacatcccaacgttgcggcattcctcgacatgctggcgttttcggaagggacagcaacgcatccgctgacccgaaacaacgggtacgacgttatcgtcacgggtatcgatggcaagccggagatttttaccgattatcgcgatcacccgttcgccggtggacgcccggcgaaggtcttcaatcgtcgcggggaaaaatccacggcatccgggcgttaccagcagctttatctgttctggccgcattatcagaaacagctcgctttgccggatttcagccaggtatcacaggacaggctcgccattcagcttattcgggagcgtggtgcgctggaagatttgcagcaggggcgcatcgagcgcgcgatttcccgctgtcgcaatatctgggcttcattgccgggtgccggatacggtcagcgtgagcacagcctcgacaagctggtcgcagtgtggcgcaaggccggagggggaactgcatga

SEQ ID NO: 215734 - DNA, 432 bp, Klebsiella pneumoniae
atgaagatagtgattctcctgctggcgctggcctgtgcgggtctgctgtggatgagacacgataacagcaatttgcgcgactcatttgaacgtgcgaaccgggtcgccggtacgcagaaaaccaccatcatcatgctgaaaaatcagctcaacgttgccgcagagcagtcgcagcgcaaagagctggcgcaggttgccatgcgggacaaactcaccacggctaacctgctggcctttcggcgtgaacaaactatcacgaggttactcaatgaaaatgacgcgtttcgccgctggtatcgcgctgatttacctgatgctgtgcgccggttgcaccagcgcgccgcctgtaccaacgccgccgccggtgattgtttacaacgcctgcccgaaggtcagtccctgcccgatgccgggcagcgacccgcagactaa

SEQ ID NO: 215735 - DNA, 468 bp, Klebsiella pneumoniae
atgaaaaagcccaacagtctgcgaaaagccttaactgatgcggtgccggtactgcgtaccaaccccgatatgctttgccttcgcctggacgatggcaacaatacggcgacgctggcgcgctccctgtcgtttgaaaagcggtacacgcttaacattgtggtcacggattttaccgacgatattgacctgctatttgtgccgattatggcctggctgcgggtcaatcagccggacatcatgacaaccgacgaggggagaaaaaaaggatttgcctggtacgctgacattaataacgacagtagccttgatgtcagcatcagcctgttgctgaccgagcgaacgctggtcaaagagatcgacggcgcgctgcacgttgagaacatcccggagccgccaccgccggagccggtaacgcgccccgttgagatgtggagtaatggcgaactggtgagtaaatgggatgaatga

SEQ ID NO: 215736 - DNA, 450 bp, Klebsiella pneumoniae
atgaatgacttcaaaccctttgaggacaagcttaccgggttgatagcggccctttctcctgccagacggcgtcggatgaccgtcgacattgcgaagaaactgcgccagcggcaacaacagcggattaagtcacagaaagcgccggacggttcgccatttgccccgcgtaagcgccagcccgtcagggcaaagaaaggccggattaagcgcgagatgttcgcgaaactgcgaaccaaccgctatatgaaagctagtggtaacgacagcgcggcggtggtggaatttaccggaaaagtgcagcgcatcgcccgcgtgcatcagtttggattacaagataaaccctccctatacggccgcgttattgagtaccctacgcgccagttagttggcttctctgttgatgatgttgactttgtggaggccttgatcattaataatctacaggaataa

SEQ ID NO: 215737 - DNA, 546 bp, Klebsiella pneumoniae
gtgcgagaaactagcgaagaaaatgaaaatcaggttaataagaaaatagaattgatgattaaagttatcattcgcacggatacgtatttaaattatgctaatactaagtcaacaatattgctcagcttggcctctgccataatagctgcaattgccgtgaactttgacaaaattacttcttttgttgtcgttggttctgataagtgtttcttgtctttcttgcttggattggctttgtgttttcttatagtgtcagtgtttttttcattgaaagggataactccttttattaaggtaagtgaaagtgttaataccttttcatttgttgatatagtgaaaggctacgatagcctggctgattataaaaaagagttttgtacagtaggtgactcatctttccttaatcaattaatatcattgaatcataacttgtcaaaggctttgttatcaaaatatgaaaatcaaataattgctataaaatgcatcgaggtggctaccggtgtaatttgcttctccatttatataattttcttatctaatctgtga

SEQ ID NO: 215738 - DNA, 1359 bp, Klebsiella pneumoniae
atgtcaattaagaatatatattctaacttagagcgtagtctggaaaaaacaatttctgaatcacgggcaagaccgcgcgatttagtaaaagcagattctgcttttgattcagcatctgggcttgaggggttaggtaagtcatttgattttctgaatgatgctgtatctatggaaagtattcaagaaagtgttgttaaccaacactatggcgtaaaagaaatagtaagggggaaatttggtaagcatgggaagttaatgcctacattcggctgtcatcctgatttttcaaatatgaaggagggagagttaaggaatggatatgccataacaatgtttatggatattataggttcaactaagctaggtgttatatttactcctgatatagtctttagaattaaaaacgatatcataaggtgcactattgaaactgttaattcatttgatggtcacgtccatagaataatgggggatgctgtgatggctttcttcagaagtgatataaatacgcaggagggtcgaattgctgatagtgctgttgatgcaataaactgtgctacatacttaatagaaatgtttaaaagtgtcgtaatacccaaacttaatgatttaggtgttgatgagaacttagggataagaattggtatcgattatggagcgaatgatcaagttgtatggggggtgtatgggtatcaggagagtcgagaggttactgcaacttcattttttgtcgatgtggcagcaaaacttcaacaaaaggcaccaaagaattgcataatgattggcgatagcttggcccaacttttaggacttgatgataatcagttgtctattaaaactgttacaaaatcgaatgaaactgtacctgtaaaatacattactccaaactataaagatgctcaaggtaatccaattaattataagcagtttattttaaagaatgaattttatctcaagctattaccgacgagtatagaagaggaaagtttttatatcagagcaagcctgaaagatgatgaagatgatgtgtctgatgatgaatattacccttgctctcgaacaataaaaaaagggagagggatatcgtttaaaggatactttcattcgggtactctatataaaaatccgagatttaaattcagggtggtaaacaccggcagtgaggcgtctaaaaatttaaataatgggaatcacgaggcgtttgaaaacgccaccttctcatctgctgataaacggtattttgcaaaacattgggaggaaactgcatataaaggcctccaccatatgtatgtgtctttttgggatggggaacagcctatcacaaatgaacaatgtttctcagtttttattaatgagtaa

SEQ ID NO: 215739 - DNA, 642 bp, Klebsiella pneumoniae
atgaatactctcgcatctatccaggaacttgcccgggcgatacgcaacatgatccgcaccggcatcgtcgtcgaaactgacctcgatgccgggcgctgtcgcgtgcagaccggcggcatttataccgactggctccagtggttaactcatcgcgccgggcgctcgcgcacctggtgggctccctcaattggtgagcaggtgatgattctggctgtgggcggtgagctcgataccgcttttgtgctgccgggtatttattccgacgacaaccccgcaccgtcggcctcagcggatgcctggctcgtcgagtttcccgacggtgccgttatgagttatgagccggaaaccggcgcgctgaccgtcaccggcataaaaaccgccgatgtgaccgcatccgactcggttgccgtcagcgtgccggtggtgctggtaaaagccgagacccgcgtcaccctcgatacaccggaggtggtctgcaccaacaagctgacgaccggcacgctggaggtgaagcaaggcggcaagatgtcaggtgatatcgagcacagcggcggcgctttcacttccaacggtgtgcaggtggataaacacggacacggcggcatcaggcgcggcgatgaatggacggagggcacccaatga

SEQ ID NO: 215740 - DNA, 348 bp, Klebsiella pneumoniae
atgacggcgcgttatctcggcatgaaccgcacgaccggtgaaagcatttcagacgttgaccatatcagtcagagcatcggggatattctgcgcacgcccatcggctcccgcgtcatgcgtcgtgaatacggctcgctgttgtcgcagatgattgaccagcctcagaccccggcgcttgagctgcaaattatggcggcgtgctacatggcgatcctgaagtgggaaccacgcgtcaggctgacaagcatcaccacagcgcggcagtttaacgggcaaatggtcgtcgacgtgaccggccaaatcaccgataccggcgagagcctttccttaaccattcctgtgagttga

SEQ ID NO: 215741 - DNA, 909 bp, Klebsiella pneumoniae
atggcagttatcgacctgagccagctccccgcacctgatgtggtggaaacgctggattttgaagccatcctcgccgagcgcaaagcgacgctgatttcactgtacccggaagatgagcaggaagcggtcgcaaggacattgacgctggagtcagagccactggtgaaatatctcgaagagaatgcctatcgcgaggtgattttacgccagcgaattaacgaggcggcgaaagccgggatggtggcctatgccatcaaaaacgacctcgaccagctcgcggcaaataataacgttgaacgcctggtcatcacccccggagacgagacccaaatcccgccggtggcggcggtcatggaatctgacagcgatttacgtcagcgcgtacctgctgcttttgaggggatgagtgttgccgggccaaccggtgcctatgaatttcacgccctgagtgccgacggacgtgtcgcggatgcttcggcgaacagcccggctccagcagaggtcactatcgcggtactgtcgcgggaaggtgacggcacggcgtcggacgatttattgctggccgtcagtaccgcgctgaatgatgagagtgtacgaccggtcgctgaccgcctgacagtcgtctcggctgaaatcgtcaattatgcgatcgacgcggtgctgtatgtgtaccccggcccggcgaccgagccgattcttgccgccgcaaaagcgcagttaactgcctatatcacggagcagcgccgccttggtcgtgacatccgaatgtcggcgatttacgccgcgctgcatgtgcagggggtccagcgcgtcgaacttcgcgaaccgctggctgatgtggtgctggataaaacccaggccgcttattgcaccgacgcccgcgtcattatcgggggatcggatgaataa

SEQ ID NO: 215742 - DNA, 603 bp, Klebsiella pneumoniae
atgaataattcgctgatggcgaacgggtcatctctgctggaacagcgagccgccgcagcatgcgcctctatcagcgatttatctgtaccgctgcgagatttgtggaatccgtggaaatgtccggtgaaattcctgccctatctggcgtgggcgttttctgtcgaccgctgggaagaaacctggtcagaaacggaaaagcgccaggctgtcagtgatgcgttttggatccaccaacgcaagggaaccgtcgccgccgttcgtcgggtgattgaaacgctgggctacagcatgacgctccaggagtggtggaaggttgccgaccctgccgggactttccgccttgagattgacctcaatgatatcggcatcaccgagccgatgattaaagagctggagcggattattggcgacgcgaagccagtcagcagacatatatcacagctcacgttatcagcatcaacttatggcccggcaaatattggtgccgctgtgtttgatggtgatgtgattaccgtttatccgccgggatataagccggatgacagtatttattacgatgccactgcgcattacgacgaaaattatcaatattccggggactga

SEQ ID NO: 215743 - DNA, 2886 bp, Klebsiella pneumoniae
atgtctttaatcagcgaaacagcacagtgggaaagcgacattccgttaattaagcgcggtgacaaagtggccggggggacggatggtctggtgaacgttcagacgagtattctcgccgaccgcacagcctacctgagagatcagcttaatgcctacaatggcctgttaaaatcgggcgaattaccgttcaccagtgcggcggcagcacaggccgcgattgctgccgggaaaataccggaaggaggcgtattctctatccggtcaaccaaccctgcctactgggttgaagaggcaaagaatacaaatggggcggtaacgctgaccgggaaaactattctgtctgatttaatgcagatggtcacagtaagggtttccgataacgacaccgacggaacagcggcgggattatccgcgacaaagccggaacagcattttctggtaattaatccagatgataaaacctctccgttcacggtatataaaaataataaaggtgtggcggaaagggtgtccgatattattggctactcgacgttacagggatttattgatgccgggtttattcccgaataccttaacccggcgagtggctttattgttgctttccgcgacccggtcacgcagcgcggcgcgctggcaattacgagaagcggggaagtgattgcccccctgctgagaatcgagaagggggttatttctcacagtaatctcgatcttggtttacaggaggtggtgccgacaaaactcgacccggcctacgggttttctctcgcctggattgatccgaaaacccgtcgctgcgccctgcgggtgacaacttcaggagaagtggaaatcccactgattaagctgggtgatggttcgatcgcgctggagaaactggcgccagaggtgcaggggttaatgccggtgacactcgacccggcaagcggttttgttctcgcctgggttgacccgaaaaccaaacgctgcgcactgcgggtgaaacagaatggcgtggttgaaatcccgctgctgtccattggtaaaaacgtgattaccctggacaacctgaccgaggaactcaagagcgccgttctgccgtttgcacaggacgtggttgatgttccacctgatgccgtacgcgcggtactggctgatgttaccgcacggacgaatgatgcggatggttctggctggacggcgctgtcaccgcgagcctgtcgcgcgctgtacggggtaaaccataccggtacagcggttgaatatcgtcgcgcgtttggcctgaaaatcgccgggaaagcacagggcaccccatttaaccccggctctctggcttccctgcgtcgtcgcgggcggctgaccagtacgaccattgccacgccgtccggccagtttgtggcgggtgattactacagctatgaggcgtacaacaccaattccagcgtgtcagagaaaacgccaggcatctggaacggaatgcaggtctatctcggtgatctgcttgtatacgatggcatcgggtggaatatccagcgctccccaggctccggcgcgccgcgtaaaaacgatacctggtatgaagtcaccgcgccgggcgtgtttgcgggtatgacactggccgccggggataaactcctttttctcactctccagacggcagggggtggttttttgcaaccgcagtttgctgccgttagtgccggggctgacctgcttttttacgccggtgaatttaatccgtcggaggggatgccgtctcgtcctctgcaaaatgtcatctggcaggcgtccgccgggggcgtggccggtacagagaattttcgcgccggtgactatgccctgtttgacggtaatgcatgggtgatgattgccaatgatgcccctgaacaggttccagacgggaaaagcatcagcctgcggtgtaccgccagtgctgacgaatgggagtttcggcgcgtggacaagtcagccgctgccgtcggtattcgcctgacgtcgcaggtggcctctgcgatgaaaaccgggctgggtaaaaagctgttgctcatcggtgattcaatgttcggcagcggaacatcgggcagcaccattatcgccgccactaaccgcaccggggaggtgcgctcttacggtggctccacctctgatcaggtgctgggcatgtttaagcaggaggtactctcctggggagaccgctgggcgggccaggtgattgcggtctggcacggtcagaacaatcagccgaaaaccgatgttaatgcctcgcaaatccgtgaagcgtcattgcagattgcggcactggccggtgcgcgcgatatccgctgtttgttcctgaccatcatgggacaacgtgaggccacctggaacggcgagcgattagtgtttccccagcatgaaaaccagtttgcggaaacaggatacctgtatgagttgactgagtggtaccggcgcattctgccgggccgtcatgctgtggtgtacgaaattatgctatcggctgcgacggatgccatcgacccgacgcatccgggcatgactgaaaagcaggtggcggcacgatacggtgtgttgccctggtctttcttcaataacgcggtactgcctggggggatgacaacatccgacattcactatgtgggtacttggagcgcgtccggcctgccgtccggcggcaataacgccgattattatctgcggattgcaggcggcaccgtgggaaatgttctggtgaataacggcggtacatggtcagaggtggcgattgatatcacacacatgagccaggcaggagggcgggcgctggcttatggcgggccgggtttcagcctgggtgacggctacaaatccattccggcacgtgacggtatcgccggaattctgatgaacaattatttttttaaatga

SEQ ID NO: 215744 - DNA, 837 bp, Klebsiella pneumoniae
atgggcctgcttaatgaactcattggcgcaaatttcactgacccgcgactgccgattattctggactatcccggcctgacgctcggatcgctggcattaatggatgtctcagaaattccggccgattttgatttttcgggcgttgggaaaaatatccccctgaataatctggcaagcaaagaagctgccaccctgacagggaaaacaaaagcggagctggaatttagctggaataacacgctgatcaccacgggcgccacgccagaggcgaagtttgaacgcacgccgcgtggcggtgttcacgggattgtatcgctggttaaccagacgctgggacaccgtggccggtttacctgtccgggtatcatgccgtacatcgctgagcaccagaacgatcataaatttgccgtgtttgcgcactatcaggttacgcgggtgggaagtggcacaccggcaacccagaccacggaaatgctgattgcgacgcaggtttccccttcaacgaaccgtttgattgtggggcgtttgcctaacgcggtatcagctggcccggcgctgttcagtctgcaatcggacaaaaatggcaatgatttcacaggcagtatttattaccaggatttaccggtatggggggcggcgtcgggatttggttccctggtgaataatgcctgtaagtcctatgtgctttaccgcctgcaccttgtggatattgacgcatcagggatgtcatttgctgaaatcgcagcaaccgaacaacaggtattcagcgccaactttggcgaaggcggcaagtatgccggtgacagtattccaacctcgccggcagcgctgccgtaa

SEQ ID NO: 215745 - DNA, 1071 bp, Klebsiella pneumoniae
atgaattattatgccattctgaccgattacggggaggcggcgtttactaaggcggtggcaaccggtgagcctgtgaattttgcagaaatggcggtcggtgatggcgcgggtatcatcccgcagccggacagaacgcgcacaggtctggtgaatgaagtgtatcgcggcccgcttaaccgtgtagtcattgcagaccagagcgcgagtgttatccgcacggaaatgataattctgccgcaaaccggtggtttctggctgcgcgaggcagcgctctatgacgatgccggggagtgcctggcggtagccagtctcccgccagtgtataagccgcttctggcagaaggggccgggcggttgcaggccatcaatctgtggatagccgtcagcaaaacagccgcggtggagcttaaaaccgatccaacggtcattattgcctcggtggaggaggttgatcgtgcgaaaaatgaggcaaaggattatgccgacaagattgcgggccagctggatacggatattcagcaggtgattgccgatgcgataacggcggcaaagcgagatttctgggaagatgataacccggtgggcactacgcgattttttaatcagaacgtcaaccctaatgaaaaatggccgtggtcagaatgggtgtacaccggcgagaataaaacaattcgtgtaggcaaagcggacggttcgaacgtcgggcagagcggcggcagcgataacgtcacacttcagcaggccaacctgcccgccgttcagattgacgtgagcggcgaaaccagcgaacaggggcagcaggagctgacgacatcgggcaacggaaggcaccggcacagggcaggggatggggcaccgggggatacctggcaggaagccacacacggaacggataaccagaaatatacggggtggaactataccgactatgcagaagaccatcagcatagcgtcacgatcccgccgcacaaacactcgaccagcggcaaaacagccagcctcggtgagggcaaatcgttcagtgtggtggaatcccacacgctgctgatgtgctggagtcgtgttgcctga

SEQ ID NO: 215746 - DNA, 1182 bp, Klebsiella pneumoniae
atgagcgattttcatcacggcgtccaggttgtcgagattaacgacggcacccgcgtcatttccaccgtatcaacggctattatcggcatggtctgcacggccagcgatgccgatgctgccaccttcccactcaataagcccgtactgattaccagcgtgcaaagcgccatcgccaaagcgggtacaaaaggcaccctggcagcatccctccaggcgatcgccgaccagtcgaaaccggtaattgtcgttgtgcgcgtagccgaaggtgtcggcgacgatgccgaagcgcagactatctctaatatcatcggcggcaccgacgaaaacggcaattacaccgggctgaaagcactgctcacggcggaggccgtaaccggcgttaaaccgcgcatcctcggtgttccggggctcgactcccttgaggttgcaactgctctcgcgccgatttgccagaagctgcgcgcctttggctatatcagcgcatgggattgtaagaacatttccgaggcgatgctctatcgcgagaatttcagccagcgtgagctgatggttatctggccggattttctggcatgggataccacggcgaacgcgaccgagaccgcctgggcgaccgcccgcgcgctgggcctgcgcgccaaaatcgaccaggacaccggctggcataaaaccctgtcaaacgttggcgtgaacggtgtcaccggtatcagcgcgtcggtcttctgggatttgcaggaatccggcaccgatgccgacctgcttaacgaggctggcgtcaccacgctcattcgcaaagatggttttcgattctggggtaaccgctgctgctccgatgacccgctgttcctgtttgagaactacacccgcaccgcgcaggttatcgccgacacaatggccgctggtcacatgtgggcggttgacaagccgatcactgccacgctgattaaagacatcgttgcgggtatcaatgcgaaattccgcgagatgaaaacggcgggctatatcgtcgatgcgacttgctggtttgatgaatcggccaacgacgcggcgaccctcaaagccgggaaactgtatatcgattacgactatacgccggttccccctctcgaaaacctgacgctacgccagcgcattaccgataaatacctggcgaatctggtgtcatcggttaacagcaattaa

SEQ ID NO: 215747 - DNA, 516 bp, Klebsiella pneumoniae
atggcaatgccgcgcaagctcaaatacctcaacacgtttctggatggcgtcagctatctcggcgttatcgagtccgtcaccctgccaaagctgacccgtaagctggaaaattaccggggcggcgggatgtcaggctcggcccctgtcgattttggcctcgacgatgacgcgctggcgatggagatttccctcggcggcttccctgatgatgcgatctggtcgctttacggtgccgtcggtaccgggacgctactgcgctatgcaggctcttaccagcgggacgataccggcgaaaccgtggcggtggaagttgagacccgtttcaaggtgaaggaagtcgataacggcgagagcaaacagggcgaggataccagcagcaaattatcgctggtctgcacgtactacaagctgaccatgaacggtaaagagctggtagaaatcgacgtcctcaacatgattgagaaggtgaacggcgtcgaccgactcgaccagcaccgccgcaatatcggcctgtaa

SEQ ID NO: 215748 - DNA, 276 bp, Klebsiella pneumoniae
atgagcaaagaaaacatcgtcaccctggaaaaccccatcaaacgcggcgagcaggtcatcgaaaaaatcaccctgatgaagcccaacgccggaaccctgcgcggtgtcagcctggccgacgttgcgcgctctgaagtcgacgccctgattaaagtgctgccgcgtatgaccagcccatcactcaccgagtcggatgtcgtcatgatggatttacccgatttgatggcgctggcaacaaaggtgatcggttttttgtcgccgaatttggcggattaa

SEQ ID NO: 215749 - DNA, 2439 bp, Klebsiella pneumoniae
atgagtaacgacgttaaattgcaggtattactcaaggctgttgaccaggcgacccgcccgtttaaatccatcctgacagcgagcaaaacgctgtctggtgacatccgggacactcaaaaatcactgcgtgaactgaacggccaggcatcccgtatcgacgggtttcgcaaggccagcgcgcaacttgccgttaccggtcaggagctgaagaaagctaaacaggaagccgccgcactggcgacccagtttagaaatacggaacagccgacgcgcgcgcaggcgcaggcaatggatgccgcccgaaaaagtgccgcagcgctccagctcaaacacaacagcttgcggcaggctgtacagcgccagcggcaggaactcagccaggcgggaattaatacccgcaccctggcggcagacgagcgccggttaaaaaccagcatcagcgaaacgacggcgcagcttaatcgccagcgtgaagcactggcgcgcgtcagcgcgcaacaggcaaagctcaacgcggttaaacagcgatatcaggccggtaaagagctggccggaaatgcggccgcaatgggtgccgccggtgtcggtatggcgacgacaggcacgctggccggtgttgcactaatgaaaccgggttatgattttgcgcagaaaaactccgagttacaggctgtactcggcgtggcgaaagactccgcagaaatgactgcgttgcgaaatcaggcccgactgctgggcgacaatactgccgcctctgccgatgatgcggccggtgctcagattatcattgcgaaagcaggcggagacgcggcagcgattcaggcggcgacgcccgtcacacttaatatggcgcttgctaaccgtcgaacaatggaagagaacgccggtttgctgatggggatgaaatcagctttccagcttactaacgagcaggtctctcacatcggtgatgtcctgtcgatgacaatgaataaaaccgccgcagattttgacgggcttagtgatgcgctgacatatgctgcgccggtggcgaaaaatgccggtgtcagcattgaggaagccgctgcaatggttggcgccctacatgatgcgaaaattacggggtcaatggctggtacgggtagtcgcgctattttaagtcgactccaggcaccgaccgggcaagcctacgcggcgattaaagagcttggggttaaaacggcagacagtaaagggaatacccgcccgatatttaccatcctgaaggaaatgcaggccagttttgataaaaataaactgggtaccggtcagcgcgctgaatacatgaaaacgatatttggcgaagaggccagttctgccgccgctgttttgatgaacgcggctaaatcaggaaagctggataagctcacggctgcatttaaagcctctgacggtaagacggaggaactagttaaggttatgcaggaaaacctcggcggcgactttaaagagtttcagtcggcatatgaggctgtaggtactgacctttttgaccagcaagagtcctctttacgtaaactggtgcaaaccgctaccggctacgtgctcaaacttgataagtggatccagcgaaataaagagctcgcgcagacgctgggggtgattaccgctgcggcgatcggggtcgtggggatgattggggctattggactgattgcctggccggtgataaccggtgtaaatgccatcatcgccgctgcgacggcactcggtaccgtatttactacggtggccggtggtgttgtgactgcaattggcgcgatctcctggccggttgttgctgtcgtggccgcaatagtggccggggcattgctcatccgtaaatattgggaacccatcagcgcgttttttggcggtgtgatggaaggattgcgcacggccttcgcgccagtagcagaactatttgcaccgcttaaaccgatgtttgactggctaggcggaaaacttaaagccgcatgggactggtttaacaatctgattgcgccggttaaatcatcacaggaaacgttaaacagtttccgtgatgccggtgtgttgtttggtcagcgccttgctgacgctcttactttaccgcttacagcattcaataagctgcgcagcggtattgattgggtacttgagaagctcggcataatcaacaaagagtccagtacgcttgaccagactgccgcaaaagcaaacgcagccacgcagggtaactcttatatcccggctaccagtacttatagcggctatcaggcataccaacctgtcaccgcacccgccgggcgttcttacatcgaccagagcaaaagcgagtatcacatttccgttgatggtagcgggaacggcacgcagctcgatcggcaactacaggatgcgctcgaaaagtttgagcgtgacaagcgtgctcgtcagcgggccagcatgaaccacgactga

SEQ ID NO: 215750 - DNA, 480 bp, Klebsiella pneumoniae
gtgatgcttgcactcggtatgtttgtttttatgcgccagacgttgccacaccagacgatgcaacgcgatgccgaatatctgtggccgtcaaactcacgcgtaggtaaacgggattctttccagtatctggggccgggggaagaaagaattaccctggccggtgtgttatacccggagctcaccggcggaaagttgacgatgacagctattcgtttaatggctgacgaagggcgcgcctggccgttgctggatggcaccggtactatttacggtatgtacgtcatcaataatatcagcgagacagggagcctgttttttgctgacggcacggcgagaaaaattgatttcacgctgacactcacccgcgtggatgaatcactcgcggctctgtatggcgatataggcgaacaggcttatgcacttatcggcaaggcgggaaatatggcctcgtcagtatctggcatggtgggaattagctga

SEQ ID NO: 215751 - DNA, 1161 bp, Klebsiella pneumoniae
atgctggatatgatgaatctcaatgcgggcggcgtcctgacgccagattttatgttgatgctcgaaagcaaagatattaccggcaatgtcagtaaccgcttaatgagtctgacgatgaccgataatcggggatttgaggccgaccagcttgatatcgagctcgatgacgccgacgggcttgtcgagttgccgttacgtggtgccgtgctgacgctttatctgggatggaaagggtttgcgttaattaacaagggctctttcactgtcgatgaagttgaacatcatggcgcgccggatagtgtgacaatccgcgcccgtagcgccgattttcggggaacgttaaattccaggcgagaagagtcatggcatgacaagacgttaggcgaaattgtggcggcgatagcgacgcgtaacaatctgacatcgagagtcatacctgaactggcgggaattaaaatcccgcatatcgaccagtcacaggaatcggatgctaaatttttaactcgtctcgctgagcgaaacggtggcgaggtttcgataaaagcgggaaagttactttttctgaaagccgggcgtgggttaacagccagtggaaaggctattccacaagttactatcacccgcagcgatggcgacaggcatcagttttcgattgccgaccgtggggcatataccggtgtcacggcaaaatggttacacaccaaagacccgaaaccacaaaagcaaaaggtgacgttaaagcggaaaccgaaagagcaacatttacgtgcactacagcacccaaaagccaaaccggtaacgaagaaaaaagcggtgaagacgccggaagccagggaaggtgaatacatggtcggtgaggatgacaacgtgttcgccctgacgacaattttttcaaccaaagcgcaggcgatgcgagctgcccaggcaaaatgggacaaactgcaacgtggcgttgctgagttttcaatcaggctggcgacggggcgggctgatctttaccctgagacgccggtacaggttaaaggctttaagcgcgttatagacgagcaatcttggacgatcactaaagttatgcactacctgagtaaaagcggctttacgacgagcctagagcttgaggtgagattgtctgatgtggaatatgatgctgtggatgcttaa

SEQ ID NO: 215752 - DNA, 408 bp, Klebsiella pneumoniae
atgaaactcttcaaaatagttcttttatgctctgctaccgccctttcatgcagtgccttttctcaaagcgttgacattcaggtactaaagaagagccttaacccatggcaacctattgaaattatcgataacaagaatatatcgaagatcgtattaccaactgccacagtaacctctgatgcatatgaagctctgatatcgtccggtgtctgcactcctgtttgggttaaaagtgcccctgagggatatctcaaaaacaccaaagagatacatgttgttaataaatattctgcgcagggctatacgtttgaaaaccctctgattacatgtaaaaagatgggtacgctgatggacgatgaagcaaagactttgatgtatgaaaacacccacggctacgtttcaagatga

SEQ ID NO: 215753 - DNA, 1866 bp, Klebsiella pneumoniae
atgagcaaaggatcgacaagcagtgacgccccgtttgggacattgttaggctatgcacccggtggcgtagcgatttattcatcgaattacagtagcttaaatccgcaggactacccggatgacgcgacgtttcgcagctacatcggtaatgagtatatggggcataaatggcagtgcgtggagtttgcgcgccgctttctgttcctgacctatggctttgtcttcaccgatgtggggatggcttatgaaatcttctccctgcgtttcctgcgcgaagtggtcaatgacaatattctgccgctgcaggccttcgccaacggctcccgccgtccgcctatcgctggttcgctgctgatctggcagaaggggggcgagtttaagcacaccggccatgtggcggtgatcacccagcttgtcggcaataaggtgcgtatcgccgagcagaacgtgattcactcgccgctgccgcagggccagcagtggacccgcgagctgaccctcgaggtcaacgacggccggtacacgatcaaagatacctttgccgataccgaaattttaggctggatgatccagaccgccgataccgaacacagcctgccgcagccggtgctgccgggcgaggcgatggccatcaaaggcgcgcggctgccaaacaacggccagtttcgcggtaaatggctgaacgagaaagacccgctgcagaaagcctacgtggcagccaacggtcatttcatcaaccaggatccctatcagtatttcaccatcagcgaaagtgccgaacaggagctgatcaaagccaccaacgagctgcacctgatgtatctgcacgccaccgataaggtgatgaaggatgacaacctgctggcgctgttcgatattccgaaaattctctggcctcgtctgcgcctctcgtggcagcgccgccgtcatcatatgatcaccgggcgcatggatttttgcatggacgagcgcgggctgaaggtgtacgagtacaatgctgattccgcttcctgccataccgaaggcgggctgatcctcgaacagtggctgaagcagggctactacggcaccggccacaatccggcggaaggtctgctcgatgagctggcgggggcgtggaaacacagccgggcgcggcccttcgtccacatcatgcaggacaaggatctggaagagaactaccacgcgcagtttattcagcgttcgctgacccaggccggttttgagagcaaaattctctttggccttgatgagctgcgctgggacgctgccggtcagctgatcgacgccgacgggcggctggtcaactgcgtctggaaaacctgggcatgggaaaccgccattgagcaggtgcgcgaagtcagcgccgaggagtacgcggcggtaccgattcgtaccggacatccgcagaatgaggtgcggctgattgacgtcctgctgcgtcctgaagtattggtattcgaacccctgtggacggtgatccccggcaacaaagccattctgccggtgctgtggtcgctgttcccgcatcatcgctatctgctggataccgattttgaggttaacgacgagctggcgaaaaccggctatgcggtgaagcctatttccgggcgctgcgggaacaatatcgacctgatcggccctcaggatgaacttctggataagaccagcggccagtttgtcgatcgcaagaatatctaccagcagctgtggtgcctgccgaaagtggacggtaagtacattcaggtgtgcacatttaccgtcggcggtaactacggcggtacctgcctgcgcggcgattcgtcgctggtggtgaaaaaagagagcgatatcgagccgttaatcgttttgaaagacaaagcatga

SEQ ID NO: 215754 - DNA, 912 bp, Klebsiella pneumoniae; identical to SEQ ID NO: 210053

SEQ ID NO: 215755 - DNA, 1608 bp, Klebsiella pneumoniae
atgagtatttccttgaagaaatcagggatgctgaagcttggtctgagcctggtcgccatgaccgtcgccgccagcgtgcaagcgaaaaccctggtttattgttctgaaggctcgccggaaggctttaacccacagctcttcacctctggcaccacctatgatgccagctccgtaccgatctataaccgcctggtcgaatttaaaaccggtacgacggaagttattccaggacttgctgagaaatgggaagtcagtgcggatggcaaaacctatattttccacctccgtcagggtgtgaagtggcaggataataaagactttaaaccaacccgtgacctgaacgccgatgacgtggtgttctccttcgatcgccagaagaatactaataacccgtaccataaagtttctggcggcagctatgaatactttgaagggatgggcttaccggacctgattagcgaagtgaagaaagtggacgataataccgtccagttcgtcctgacccgtccggaagcgccgttcctcgctgatctggccatggacttcgcctccattctttcgaaagagtatgctgacaacatgctgaaagccggcacgccggagaaagtggatctcaatcctatcggtaccggtccattccagctgctgcaataccagaaagattcccgcattctgtataaagccttcccaggctactggggtaccaagccgaagatcgatcgtctggtcttctccatcaccccggacgcttccgtgcgctatgccaagctgcagaaaaacgagtgccaggtgatgccgtacccgaacccggcggacatcgcgcgcatgaaggaagataagaacattaccctgctggaacagccgggtctgaacgttggttatctctcctttaacaccgagaagaaaccgctggacgacgtcaaagtacgtcaggcgctgacctacgcggtcaacaaagaagcgatcatcaaagcggtttaccagggcgcaggccaggcggcgaagaacctgatcccgccgaccatgtggggctataacgacaacgttaaggactacacctacgatccggagaaggcgaagcagctgctgaaagaagcgggcctggaaaaaggcttcaccatcgatctgtgggcgatgccggtacagcgtccgtacaacccgaacgcccgccgcatggcggagatgattcaggctgactgggccaagattggcgtccaggccaagatcgtcacctacgagtggggcgagtatctgaagcgggcgaaagcgggcgagcaccagagcgtgatgatgggctggaccggcgacaacggggatccggataacttcttcgcgaccctgttcagctgcgccgcggcgaaagacggctccaactactcgcgctggtgctataagccgtttgaagatctcattcagccggcccgcgctaccgacgaccacaacaagcgtattgaactgtacaaacaggctcaggtagtgatgcatgaccaggctccggcgctgatcattgctcactccaccgtctatgagccggtgcgtaaagaagtcaaaggctatgtggtggacccgctgggcaaacaccacttcgataacgtctctgtcgaataa

SEQ ID NO: 215756 - DNA, 645 bp, Klebsiella pneumoniae
atgataataaagaaatgcaatggcctccgggggttcttgatcccggcgagcgtatccgtctgggtgtcatgtgtctctggagcgaatgcctggcaacaggaatatatcgctatcgatacaaaaagtaatacgtcggaacgctatacatgggatagcgatcaccaaccacgttatgaagatattctcgccgagcggatgaagtcctctgagacgcccggcgggctggcgttaaaccaggggctggcgccgccggacagcggccgcggcctgagcgttggctggaattatccgctggcaaacggcgtaacctccgggccggtggccagcctgcgcagcgacgtcaccgcgccgacggtgagaagcgcaggcgaggcgggctacgttaacacgctcggctggcgcatggattatcaggcgctgtggggcgtgcatccctgggcgcaggtgagctataaccagtcgctcgccagcgatgtctgggcgccgatgacccgtgccagggagggaggctggagcgatgtcaccctgggcgctgatatgcggttgggatcccacgtggcggcatgggcaacgctgtcgcaggcggataacctgccgtcaggggaaaatacgctctatttgatgggggtcagcgccaatttttaa

SEQ ID NO: 215757 - DNA, 1542 bp, Klebsiella pneumoniae
atgacctggctactcgaaatgaagaacatcaccaaaaccttcggcgctgttaaagccgtggataacgtcagcctgcgcctgaacgcaggcgaggtggtctcgttatgcggtgaaaatgggtcggggaaatcgacgctgatgaaggtgctgtgcggtatctatccgcacggaagctatgagggcgagattatttttgccggcgaaacgctgcaggcaaaccatattcgcgataccgaacgcaaaggcatcgccattattcatcaggagctggcgctggtgaaacatctcaccgtgctggagaatattttcctcggcgccgagatctcccgccatggtctgctggattatgaaaccatgacgctgcgctgtcagaagctgttggcgcaggtcaatctgcccatttcccccgatacccgcgtcggcgacctcggccttggtcagcagcagttggtggagatcgccaaggcgctgaataaacaggttcgcctgctgatcctcgacgaaccgaccgcctccttgaccgaacaagaaaccgcgacgctgttggcgatcgttcgcgatctgcaaaaccacgatatcgcctgcatctatatctcgcataagctcaatgaggtcaaagcgatctccgatacgatctgcgtgatccgcgacggccagcacatcggcacccgcgatgccagcggcatgagcgaagacgatatcatcaccatgatggtcggccgcgagctcaccgcgctctatcccagcgagccgcacgcccacggcgaggagatcctgcgggttgaacatttaaccgcctggcacccggtaaaccgccatattaaacgggtcaatgacgtctcattttccctgcgtcgcggagaaatcctcggcatcgccgggctggtcggcgccggacgtaccgaggcggtacagtgcctgttcggcgtctggccggggcgctggcaaggggagatctttattgatggccagccggtgagcatctctaactgccagcaggccattgcccacggcatcgccatggtgccggaagaccgcaaaaaagacggcatcgtgccggtgatggcggtgggcaaaaacattaccctcgcggcgctcaaccagttcaccggcgcaatgagcagcctggacgacgccgccgagcagcactgcatccagcagtccattcagcgtttgaaaattaaaacctcctcgccggagctggcgattggccgtctgagcggcggcaaccagcaaaaggcgattctggcgcgctgtctgctgctcaatccgcgcattctgatcctcgacgaacccacccgtggcatcgatatcggggcgaagtatgaaatttataaactgattaaccagctggtgcagcagggcatcgcggtcattgtcatttcatccgaactgcccgaggtgctcggtctcagcgatcgggtgctggtcatgcacgaaggcagactaaaagccaatttggttaatcaacatctgacccaggaacaggtgatggaagccgcgctgaggagcgaacgccatgtcgaagaacacgtcgtctga

SEQ ID NO: 215758 - DNA, 1179 bp, Klebsiella pneumoniae
atgtttgaaaagcgtcaccgtattacgctgttatttaacgccaacaaagcttatgaccgccaggtagttgaaggtgtcggcgagtatctgcaggcctcccagttggaatgggatatctttattgaagaggactttcgggcacgcatcgaaaacatcaaagagtggttgggcgatggcgttatcgccgactatgacgatcccgaaatcgaaaagctgctggccgatgtccacgtgcccatcgtcggcgtcggcggatcttatcatcagccagagcagtatccgccggtccactatatcgccaccgacaacgccgcgctggtggaaagcgcttttctccatttgaaggaaaaaggggtgcaccgcttcgcgttttacggactccccgcctccagcggtaaacgctgggcggtagagcgcgagtatgccttctgccagctggtcgcgaaggagaagtatcgcggcgtggtctaccaggggctggagacagcgccggagaactggcagcacgcgcaaaaccggctcgctgactggctgcaaaccctgccgccgcaaaccggcatcatcgccgtcaccgacgcccgcgcccgccacgtcctgcaggcctgcgagctactgcatatcccggtgccagagaaactgtgcgttatcggcatcgataacgaggagctaacccgctatctctctcgcgtcgccctctcctctgtcgcccagggcacccgccagatgggttatcaggcggcaaaattactccaccggctgttgaataacgaggccctcccgctgcagcgccagctgatcccgccgatgcgcgtcgttgagcgacgctccaccgactaccggtcgttaaacgatccctccgtgatacaggcgatgcattacattcgcaacaatgcctgcaaaggcatcaaggtggaacaggtgctcgacgccgtgggcatctctcgctctaatctggaaaaacgcttcaaagaggaggtcggggagaccatccacacggtgatccacagcgaaaaactggaaaaggcgcgcagcctgctggtgtccactagtctgtcgatcaatgagatttcgcagatgtgcggctatccgtcgctgcaatatttctattcggtgtttaagaaggagtacgacgtgacgccgaaggagtaccgcgatcggcacagcgaggtgatgctgtag

SEQ ID NO: 215759 - DNA, 1257 bp, Klebsiella pneumoniae
atgacattttcccttttcggcgacaaattcacccgtcattcaggcatcacccgcttgatggaagaccttaatgacggtctgcgcacgccgggcgctattatgctgggcggcggcaaccccgctcagatcccggaaatgaatgactacttccagcagctgctggccgacatgctggataatggcaaagcccttgatgcgctttgtaattatgatggtccacagggcaaaagcgagctgctggctctgctggcgaacatgctgcgcgacgagctgggctgggagatcgaaccacagaatattgcgctaacaaacggcagtcagagcgcatttttctacttatttaatctgtttgcaggccgtcgggcagatggcaccacccgtaaggtactgttcccactgacgccggaatacatcggctacgccgatgccggtctggaagaggatctgttcgttgccacccggccgaacatcgaactgctgccggaaggccagtttaagtaccatgttgattttgagcatctgcaggtgacggaagagaccgggatgatctgcgtctcgcgccccaccaacccgaccggcaacgtcatcactgatgaagagctgatcaaactggatgcgctggcgaatcagcacggggtcccgctggtgattgataacgcctacggtgtaccgttcccgggcattatctttagcgacgcccgaccgctgtggaatccgaacatcgtgctgtgtatgagcctgtccaagctgggcctgccgggcagccgctgcgggattatcatcgccaacgaaaaaatcatcaccgccatcagcaacatgaacggcattatcagcctcgcccctggcggcatcgggccggcaatgatgtgcgaaatgattaaacgacaggatctgctgcgcctgtcagagacggtgatcaagcccttctattaccagcgggtgcaggaaaccatcgccattattcgccgctatctgccggaggagcgctgccttattcacaaaccggagggggcaatcttcctctggctgtggtttaaggatctgccgatctccaccgagctgctgtatcagcggctgaaaaagcgcggcgttctgatggtgccgggggattacttcttccctggtctggataaaccgtggccgcacacccaccagtgtatgcgcatgaactatgtaccggacccgcaaaaaatcgaagccggagtgaaaatcctcgccgaagaggttgaatttgcctggcgcgaacaggaagcataa

SEQ ID NO: 215760 - DNA, 828 bp, Klebsiella pneumoniae
atggtgatgaaagagagcgagacaggacaagacaaagagcggccggcgggaagtcagagcctgttccgtggactgatgctgattgaaattctgagcaactatccaaacggttgcccgctggcgcatctgtcagagctggcggggctcaataaaagtaccgtccatcgattactgcagggtttgcagtcctgtgggtatgtcacaccggccccggcggcgggtagctatcggctcaccaccaagttcatcgccgttggccagaaagcgctctcctcgctgaatatcatccatgtggcggctccccatcttgaagcgcttaacctggcgacgggcgaaacggtgaacttttccagccgggaagacgatcatgcgatcctgatttacaagcttgagccgaccactggcatgctgcgtacccgcgcttatattggccagcatatgccgctctattgctccgcgatggggaagatttacatggcgttcggccatcctgactatgtggagcattactggaacactcaccaggatattattcagccgctgacccgcaacaccatcaccggcttgccagccatgcatgatgagctggcgcagatccgtgaacggaacatggccatggaccgggaagagaatgagctgggggtgtcctgtctggcggtgccggttttcgatattcaccagcgcgtgccctacgccatttctatttctctgtcgacgtcgcgcctcaagcagataggcgaaaagaacttgttaaaaccactacgtgagaccgccgaagcaatttcgcgtgagctgggtttcacggtgcgtgaagcgtcaggcaaatga

SEQ ID NO: 215761 - DNA, 999 bp, Klebsiella pneumoniae
atgaaagtaactttttcgcagttaaaagaggccttcaatcaggtactgcttaaacgcggcgtggcggcagaaaccgccgaggcctgcgcggacatgttcgcccgcaccacggaatccggcgtctattcacacggcgtgaaccgctttccccgctttattcagcaactggacaatggcgatatcatcccggaggccaaaccacagcggattaccagcctcggcgcgattgagcagtgggacgcccagcgctccatcggcaatctgacggcgaaaaagatgatggaccgggccattgagctggcatccgatcacggcattgggctggtggcgctgcgtaacgccaaccactggatgcgcgggggcagctacggctggcaggcagcggaaaaaggctacattggcatctgctggaccaactccatcgcggtgatgccgccgtggggcgccaaagagtgccgcatcggcaccaacccgctgatcgtcgccatcccgtccacgccgatcaccatggtggatatgtcgatgtcgatgttctcctacggcatgctggaggtgaaccgcctggcgggtcggcagctccccgtcgacgggggattcgacgatgaaggcaatctgaccaaagaaccgggcgtgattgagaaaaatcgccgcattttacccatgggctactggaaaggatccggcctgtcgatcgtgctggatatgattgccaccctgctttccaatggatcttctgtggccgaagtgacccaggaaaacagcgatgaatatggtgtttcgcagattttcatcgccattgaggtcgataagctcatcgacggtgcgacccgcgatgccaagctgcagcggattatggatttcatcaccagcgccgaacgggccgatgaaaacgtggccatccgtttaccgggacatgaatttacccgcctgctggaagagaatcgtcgcaacggcatcaccgtcgatgacagcgtctgggcgaaaattcaggcgctgtaa

SEQ ID NO: 215762 - DNA, 465 bp, Klebsiella pneumoniae
atgatctttggccatatcgcgcagcccaatccgtgtcggttgcctgcggcaattgagcgagcgctcgacttcctgcgcagcaccgatttcagcaaactggcccccggcgtagtggagatcgacggcaaaaacatcttcgcgcagattatcgacttaaccactcgcgaagttgctgaaaatcgcccggaagtacatcgccgctatctggatattcagtttctggcctggggtgaggagaaaataggtttcgctattgataacggtaataacaccatcagcgaatcgctattagcgcagcgcgatattattttctatcacggatgcgaaaatgaatcttttcttgaaatgatcctgggaagctatgtcatatttttcccgcaggatgttcatcgcccgggatgccataaatcggtcgccacgccgatcaggaaaatcgtggttaaagtggcgattgacgctttataa

SEQ ID NO: 215763 - DNA, 930 bp, Klebsiella pneumoniae
atgaaaaataataccggttatattatcggtgcgtatccctgtgcaccctcttttcaccaaaaaagtgaagacgaagaaaaagcattctggcgacaactggctgataccccggatattcgcgggctggagcaaccctgccttgaacatctccatccactgggcgacgagtggttaatgcgccataccccagcagactggcagattgtcgtcacggcaattatggaaaccatgcgccgccgcgggggtaacggcggctttggcctggcatcgagcgatgaggaacagcgtaaagcctgcgtggcctactaccgccacctttaccagaaaattaatgcgatcaatgcggcaaatgccggaaaaatcgtggcgctggaactccatgccgcgccctgcgccagcaaccctaacgtcgcccaggctaccgatgcctttgcccgttcactgaaggaggtggccagctgggactggtcgtgcagtctggtgctggaacattgcgatgccatgaccggccccgcgccgcgcaaaggatttctgcctttagagaatgtgctggaaacgcttgccggttatgagatcagcgttgccataaactgggcccgctccgcgattgaaggccaggacaccactctgccgttgacccatacccggcaggccagccaggccggtaagcttggcgcgttaatgttttccggcaccacgctcaatggcgaatatggcgaatggcaggatttacacgcgcccttctctccgttctgtgcgcaaagtttaatgacccacacgcatgtgcgggaattattagcctgcgcgggcagcgacgccctgcaatttctgggtattaaattactggaaattaacccggatgcggacgtcaatcaccgcatagcgatattacgcgacggcatcgctgccttaaataaagcacaacaataa

SEQ ID NO: 215764 - DNA, 1320 bp, Klebsiella pneumoniae
atgaatatgacctctagaccaggactaaatgaagtcccacgtcagcgttggctgcgaattattccacccattctgatcgcctgtattatctcttatatggaccgcgtcaatattgcttttgcaatgccgggcggtatggatgctgaactcggtatttccgccaccatggcgggactggccggcggcattttctttattggttatctgttcttacaggttcccggcggcaagattgccgttcacggtagcggcaagaagtttattggctggtcgctggtcgcctgggcggtgatctccgtcctgacgggattaatcaccaaccagtatcagctgctggtgctgcgcttcctgctgggggtggcggaaggtgggatgctcccggtagtgctaaccatgatcagcaactggttcccggacgccgaacgcgggcgcgctaacgccattgtcattatgtttgtccctatcgccgggatcatcacggctccgctttccggctggatcatcaccgttctcgactggcgctggctgtttattattgaagggttactctcggcggttgtcctgctgctgtggacctatgccgtttatgaccgcccacaggaagcgcgctggatctccgatgccgaaaagaattatctggtggaaacgctggccgccgagcaaagggccattgccggcaccgaggtgaaaaacgcctctctcggcgcggtgctttccgataaaaccatgtggcagcttatcgcactgaacttcttctatcagaccgggatttacggttacaccctgtggctgcccaccatcctcaaagaactgactcacagcagcatgggccaggttggggtgctcgccattctgccttacgttggcgccattgccggcatgttcctgttctcttctctctcggatcgtaccggcaaacgcaagctgtttgtctgcctgccactgattggttttgccctgtgcatgttcctgtcggtggctctgaagagccagatctggctggcctacgccgcgctggtcggctgcggattcttcctgcaatcggcggcgggcgtgttctggaccattccggcacggctgttcagcgccgaaatggccggcggcgcgcgcggggtcatcaacgccctcggcaatcttggcggtttctgcggcccctatgcggtgggcgtcctgatcaccctctacagcaaagacgcgggggtgtattgcctggctatctccctggcgctggccgcgctgatggccctgctgctgccggcgaaatgcgatgccggcgccacgcccgtcaatacggtgaatccgcggaagcacgccgcgtaa

SEQ ID NO: 215765 - DNA, 1506 bp, Klebsiella pneumoniae
atgagtgagaaagcacgcttctggctgggcattgattgcggcggaacgtatctgaaagcgggattatatgacgcgcaaggccgtgaacatggcattaaccggcaatcgctgcagacgctatcgcccttgccgggttacgccgaacgcgacatggaccagctctggcaacaatgctccgccaccatcgccggcctgttacaacgtaccggtatccacggcgaacaaattaaaggcgtgggcatctccgcgcagggtaaggggctgttcctgctagataaacaggatcgcccgctgggccatgccatgctctcttccgaccgtcgggcgctggcgatcgtccagcgctggcaacaggacgggatcccggaaaaactctatcccgtcacccgccagaccctgtggaccggtcacccggcttcactgctgcgctgggtgaaagaaaatgaaccgcagcgctacgcgcaaattggctgcgtgatgatgggccatgactatctgcgctggtgtttgaccggcgtgaaagggtgcgaagagagcaacatctctgaatccaatctctacaacatgaccagcggccagtacgatccacgcctgacgcaatggctggggatcggcgaaattgacagtgcgctgccgcctgtcgtcggttcagcagaaaaaggcggggagatcacccctcaggcagccgccatcaccggtctggcggcgggtacccccgtcgtcggcggcttgtttgatgtggtctccaccgcactctgcgccggtattgaagatgaattcacactcaacgcggtgatgggcacctgggccgtcaccagcgggatcacccatggcctgcgcgaccatgaagcgcacccttacgtctacggccgttacgttaacgacgggcaatacatcgttcacgaagccagccccacctcgtcgggcaacctcgaatggttcactgcccagtggggtgaactctcttttgacgagatcaatcaggccgtcgccagcctgccgaaggccggtagcgacctcttttttctgccatttctctacggcagcaacgccggactggagatgacctgcggcttctacggtatgcaggcgctccacactcgcgcgcacctgctgcaggcgatttatgagggcgtcgttttcagccacatgacccacctcaaccgcatgcgcgaacgctttacccgcgtgcaggccctgcgcgtcaccggcggcccggcgcactctgacgtctggatgcagatgctggcggacgtcagcggcctgcgcgtcgagctgccgcaggttgaagagaccggctgctttggcgccgcgctcgccgcccgggtcggcactggcgtctattgcgatttcaacgacgcctgccgccaccttcagcatccggtgcgcacgctgctgcccgacatggccgcccacgcgcgctaccagcacaaatatcaccattaccagaatctgattgaagcactacagggctaccacgcccgcattaaggagcatgcattatga

SEQ ID NO: 215766 - DNA, 663 bp, Klebsiella pneumoniae
atgagccgaccattactgcaactggcgctcgaccacaccagcctggaagccgccagccgcgatgtcgccctgctacaggaccacgtcgatatcgttgaagccggtaccatcctctgcttaaccgaaggcctgagcgcggtgaaagctctgcgcgcccagtgcccggataaactcatcgtcgccgactggaaggttgccgatgcgggggaaacgctggcccagcaggcctttgccgccggcgctaactggatgaccatcatctgcgccgcgccgctagccaccgttgagaagggccacgccgtcgcgcaggcctgcggcggcgaaattcagatcgagctgttcggtaactggacgctggatgacgcccgcgcctggtaccgcaccggcgtccgtcaggcgatttaccatcgcggccgcgacgctcaggccagcggacaacagtggagtgacgccgatctggcgcggatgaaagcgctctctgatatcggccttcagctgtcgattaccggcggcatcaccccggccgatctgcccttgttcaaagatattcaggtgaaagcgtttattgccggacgcgcgctggccggagcaccgcaaccggcgcaggtcgctgcggctttccatgcgcagatcgatgctatctggggagataagcatgcgtaa

SEQ ID NO: 215767 - DNA, 861 bp, Klebsiella pneumoniae
atgcgtaaccatccgttagggatctatgagaaggcgctggcgaaagatctcagctggccggagcggctggtgctggcgaaaagctgcggctttgatttcgtcgagatgtcggtggatgagaccgacgagcggctgtcgcgtctcgactggagcccggcgcagcgcgcctcgctggtcaccgccatgctggaaaccggggtggcgatcccgtcgatgtgcctctctgcccatcgccgtttcccgtttggcagccgcgatgcggccgtgcgccagcgggcgcgggagatcatgagcaaagctatccatctggcgcgcgatctcggcatccgcaccatccagctggcagggtacgacgtctattatgaagcgcatgatgaaggtacccaacagcgcttcgccgaagggctggcatgggcggtggaacaggccgcggcggcgcaggtgatgctggcggtggagatcatggataccgcttttatgaactccatcagcaaatggaaaaagtgggatgagatgctcgcctcgccgtggttctcggtctacccggacgtgggcaaccttagcgcctgggggaacgacgtcaccgccgagctgaagctgggtatcgatcgcatcgccgccattcatttaaaagatacccagccggtcaccgcgcaaagcccaggtcagttccgcgacgtaccgtttggcgaaggctgtgtggattttgtcggcatcttcaaaacgctgcatgagctgaactatcgcggcgcattcctgattgagatgtggacggaaaaagccaaagagccggtactggaaattatcgaggcccgacgctggatagaagcgcggatgcaggaaggaggatttgcatgttag

SEQ ID NO: 215768 - DNA, 699 bp, Klebsiella pneumoniae
atgttagaacagttaaaagccgaggtgctggcggccaacctggcgctcccggcgcaccagctggtgacgtttacctggggcaacgtcagcgcggttgatgaaacgcgcacgctgatggtgattaaaccttccggcgtggaatacgacgtgatgaccgccgaggatatggtcgtggtcgagatcgccagcggcaaggtggtggccggcggcaaaaaaccgtcatcagataccccgacccatctggcgctttaccgccgctatccgcagatcggcgggatcgtgcatacccactcccgccacgccacgatctggtcgcaggcgggtctcgatctgcccgcctggggcaccacccacgccgactacttctatggcgcgatcccctgtacccgcctgatgaccgaagaggaaattaacggggaatatgagtatcagactggcgaagtgattattcagacctttgaagaacggcgcctcgatccggcgcaaatcccggcggtacttgtccattcacacggtccgttcgcctggggaaaagacgccgccgacgccgtacataacgccgtggtgctggaggagtgcgcgtatatggggctgttctcacgccagctctcgcctcagctgccggagatgcagtcggtattgctggataaacactatctgcgcaagcacggcgccaacgcctattacggacaaggctga

SEQ ID NO: 215769 - DNA, 1842 bp, Klebsiella pneumoniae
atgattattgccaccgctggacatgttgaccacggcaaaacgacgctgctgcaggcgataaccggcgtgaatgccgatcgtttgccggaggagaaagcgcggggaatgacgatcgatctcggctatgcctactggccgcagccggacgggcgggtgctgggatttattgacgttcccgggcacgaaaagtttttgtccaacatgctggcgggggtgggcggtattgaccatgcgctgctggtggtggcctgcgatgacggggtgatggcgcaaacccgcgaacacctggcgatcctgcagctgaccggaaagccgacgctgaccgtggcgctgaccaaaacggaccgcgtggcggccgccagggtggcggaggttcaggcagaggtcgagcagaccctgggcgagctgggctttgacgccgtcgctttctttcccaccgcggcggcggaaaacatcggtattgcggaactgcgcagccatctgctgcagcttgcggagcgcccccgcccgcagcagcagcggtttcgcctggcgctggaccgcgcttttaccgtcaaaggcgcggggctggtggtcaccgggacggcgctctccggcgaagtacgggtcggggataccctatggcttaccggcgtcaacacgccgatgcgcgtccgcagcctgcatgcccagaatcaagcggttgagcaggcgcacgccgggcagcgcattgcgctgaatattgtcggcgatgcgcaaaaagaggcagtgcaccgcggcgactggctgctctcctcaccaccgccggagccagcagaacgggtgattgtcgagctgcagtgccatacgccgctcagccagtggcagccgctgcatattcaccatgctgccagccacattaccggccgggtgtcgcttcttgagggcaacctggcggagctggtgctggatactccgctgtggctggcggataacgaccggctggtgctccgcgatatctccgctcgcttgacgctggcgggcgcacgggtggtgacgctggatcctccgcgtcgcggcaaacgtaaaccggaatatctgcagtggctgcacgccctggcagcggtcggcgctgacgatgcgcaggcgctggagctgcatctgcagtgggatgccgtccggcttgagcacttcgcctgggcgcggcagctcagcgaagccggaatggcggccctgatccagcgaccggactatctgcaggccggacagcgcctgcttagcgcgccgcttgccgcccgctggcagcgaaaattgctggatgcccttgcgcgctaccatgagcagcatcgagacgagccgggccctggccgggagcgcctgcgccgcatcgcgctgccgatggaagatgaagcgctggtgctgctgctgattgagcagatgcgcgagagcggcttagtccacagccatcacggctggctgcatttgccggagcataaagccgggtttaccgacgagcagcaggcggtctggcagaaggtggagactctgttcggcgacgatccgtggtgggtgcgcgatcttgcgcgcgaagtccatgttgacgagtccctgatgcgcgcggtgctgcgccaggcggcgcagcaggggatgattaccgcgatcgtcaaggatcgttactaccgcaacgatcgcattgtgcagttcgcccagcgggtgcgcgagctggatcggctgcgcggttcaacctgcgcggcggatttccgcgataccttaaacgtagggcggaagctggcgatccagatcctggagtatttcgatcggattggcttcacccgccgtcgcggcaacgatcatatcctgcgcgataaggcattgttccggtaa

SEQ ID NO: 215770 - DNA, 609 bp, Klebsiella pneumoniae
atgaaactgatcggcagctacaccagtccctttgtgcgcaaaatatcggtgatcctgctggaaaagcgcatcccatttgagtttgtcaacgaatccccctacagcgaaagcaacggtgtggcgcgctataacccgctgggtaaggtaccggcgctggtgacggacgacggtgagtgctggtttgactccccggtcatcgcccagtatctggagctgctgggcgtggcgccgccgatgatccccgccgaccccagagccgctctcaggatgcgccagctagaggcgctggcggatggcgtgatggaggccgcccaggcgctggtgcgtgaaaaggctcgcccgggcgcgcaacagtcagagcaagagctgctccgccagcgggagaaagtggctcgcggtctcgacaggctggaagcctgcgcggcagacggaacgctgcgcggcgacgaggttaatctggcgaccatttccacggcctgcgccattgcttatctgaactttcgccgggtcgcgcccggctggtgcgccacccggccgcagctggtgaagctggtggatgcgttgttccagcgcgccagctttgcgcgcactgaaccgccgcggacttga

SEQ ID NO: 215771 - DNA, 1017 bp, Klebsiella pneumoniae
atggcgacgtcacggcgggatttactgaagataggcgggttggcaaccgcatcgctactggtcagtcaaaaaagcttcgcagcatgggccccctctgaacgctatccggacccacgcatcgtggccgtcgatgatagctttcgtcgctatatgcttgccagcgcaaaggtcgaacgcatcgccagcggcttccgctgggcggaaggcccggtctggttcggcgacatgcgaatgctgctgtggagcgacattccgaataacgccatcatgcgctgggatgaagtcagcggagaaaccagcatctttcgctacccggccaattatagcaatggtcacgcccgcgacagacaggggcgcttaatcagttgcgagcacgacacccgccgcattacgcgtaccgaatacgatgggtctgttaccgtactggccgatagctaccagggtcatcgcctcaattctccaaacgatatcgttgtgaagtcagacggcaccatctggtttaccgatccgccatttggcatcagtggtttttacgaaggccacaaagcaacatcagaattgccgcaaaacgtctattgtctggagccggaaagccgcaaactgagcgtggtactgggcgacgtaaaagggccaaatggtttgtgtttctcgccggacgaaaagaccttatacgtggtggaaagccgggcgacaccgaaccgcttaattctggcgtgggatgtggaaggcaatacgctgaaaaataaacgggtatatctcgactgtgggaacggtaccgccgatgggatcgcctgcgacgcagacggcaatctgtggtgcggatggggaagcggaaacgaagaactcgacggcgtgcggatcttcaacccacagggtaagcatatcggcaccattaaactgccagagcgctgcgcgaacttgtgctttggcggcgaacagcgcaatcgtctgtttatggcatccagcacgtcaatctattcgctgtacgtcaatgcgcagggcgctaagctgatatag

SEQ ID NO: 215772 - DNA, 384 bp, Klebsiella pneumoniae; identical to SEQ ID NO: 138968

SEQ ID NO: 215773 - DNA, 930 bp, Klebsiella pneumoniae; identical to SEQ ID NO: 138967

SEQ ID NO: 215774 - DNA, 636 bp, Klebsiella pneumoniae; identical to SEQ ID NO: 213097

SEQ ID NO: 215775 - DNA, 903 bp, Klebsiella pneumoniae
atggcttaccaatcgcaagatattattcgtcgttccgcgactaacggtttcacccccgcgcctcaggcgcgggaccaccagcaggaggtggcgaagcttatcgacgtcaccacctgtatcggctgtaaagcctgtcaggtggcctgctccgaatggaacgatattcgtgatgaagtcggtcacaatgtcggggtgtatgacaacccggcggacctgaccgccaagtcatggacggtcatgcgcttctcggaggtggaacaaaacgacaagctggaatggctcatccgcaaggatggctgcatgcactgcgcggacccgggctgcctgaaggcctgcccgtcagaaggcgcgatcattcagtacgccaacggcattgtcgacttccagtccgagcagtgcatcggctgcggctactgtatcgccggctgtccgttcgatgtaccgcgtctgaacccggaagacaaccgcgtctacaaatgtaccctgtgcgtagaccgcgtgacagtcggccaggagcctgcctgcgtgaaaacctgtccgaccggcgcaatccactttggctccaaagaggatatgaaaacgctggccggcgaacgcgtggctgagctgaaaacccgcggttatgacaatgcgggcctgtacgatccggccggcgtcggtggcacccacgtcatgtacgtgctgcaccatgccgacaagccgaatctgtaccacggcctgccggaaaacccggagatcagccagaccgtcaagttctggaaaggcatctggaaaccgctggcggccgtcggcttcgccgcgaccttcgcagccagtatcttccactacgtcggcgtcggtccgaaccgcgcggaagaggaagaggacaatctgcatgaagagaaagacgaggtgcgcaaatga

SEQ ID NO: 215776 - DNA, 2415 bp, Klebsiella pneumoniae
atgaccaaccactgggttgatattaaaaacgccaacctggtcgtagtgatgggcggtaacgccgcagaagcgcatccggtggggttccgctgggcgatggaagccaaaattcataacggcgccaagctcatcgttatcgatccgcgctttacgcgtacggcgtcggtggctgatttctataccccgattcgttccggtaccgacattaccttcctgtcgggcgtgatcttgtatctgctgaataacgaaaaattcaaccgcgaatacaccgaagcctacaccaacgccagcctgatcgtgcgtgaggactatagcttcgacgacgggctgttcagcggctataacgcagaaaaacgccagtacgacaaaaccagctggaactatgagctggacgaaaacggcttcgccaaacgcgatactacgctgcaacatccgcgctgcgtctggaacctgctgaagcagcatgtttcccgttataccccggatgtggtcgaaaacatctgcggtacgccgaaggccgacttcctcaaagtctgtgaatacattgctgaaaccagcgcgccggataagaccgcatcgttcctgtacgctctcggctggacccagcactccatcggtgcgcagaatatccgcaccatggcgatgatccagctgctgctcggcaacatggggatggcgggcggcggcgtcaacgccctgcgcggccactccaatatccagggcctgaccgacctcggcctgctctccaccagcctgccaggctacatgtcgctgccgaacgaaaaacaggccgacctgcagacctacctgacggctaacacgccgaagccgctgctgaaagaccaggtcaactactggggcaactatccgaagttcttcgtctccatgatgaaagccttcttcggcgacaaagccaccgcggaaaacagctggggctatgactggctgccgaagtgggataagagctacgacgttctgcagtacttcgagatgatgaatcagggcaaagtgaatggctatatttgccagggctttaacccggtcgcctcgttcccgaataaaaacaaggtcgtcgcttccctgtcgaagctgaagttcctcgtgactatcgacccgctcaataccgaaacgtccaccttctggcaaaaccatggtgagtcgaacgatgtcgatccggcgaaaatccagaccgaagtgttccgtctgccctccacctgcttcgccgaagagaatgggtctatcgtcaactccggccgctggctgcaatggcactggaaaggcgcggacgccccggggatcgccgtcaccgatggtgaaattctcgccggtatcttcactcgcctgcgtaagatgtatgccgaagagggtggcccggcgccggagccggtgctcaacatgacgtggaactactccacgccacacgagccggcatcggaagaagtggcgatggaaagcaacggtaaagcgctggcggatatcaccgacccggcaaccggcgcggtgatcgtcaagaaaggccaacagctgagctcctttgcgcagctgcgagatgatggcaccacctccagcggctgctggatcttcgccgggagctggacgccggaaggtaaccagatggcgcgccgcgataacgccgatccatccggtctcggcaataccctgggctgggcctgggcctggccgctcaaccgccgcatcctgtataaccgcgcctccgcggacccgcagggtaaaccgtgggatccgaagcgtcagttgctgaaatgggacggcgccaaatggggcggcgtggatattccggactacagcgccgccgcgcctggcagcgacgtcggtccgtttatcatgcagccggaagggatgggccgtctgttcgctatcgacaagatggcggaaggaccgttcccggaacactacgagccgtttgaaacgccgctcggaaccaacccgctgcacccgaacgtggtctctaacccggccgctcgcgtcttcaaaggcgatctcgagcagatgggtaaggccgagaagttcccgtacgtcggcaccacttaccgtctgaccgagcacttccactactggaccaagcatgcgctacttaacgccatcgcccagccggaacagttcgtggagatcggggaaaaactggcgaataagctcggcatcggccacggcgataccgtgaaagtttcctccaaccgcggctatatcaaagccaaggcggtggtgaccaaacgtattcgcacgctgaaagttgacggtaaggatatcgataccatcggcattcctattcactggggctatgagggcgtggcgaaaaaaggctttattgccaataccctgacgccgttcgtcggtgatgcgaatacgcagacgccggagttcaaagctttccttgtgaacgtggaaaaggtgtaa

SEQ ID NO: 215777 - DNA, 588 bp, Klebsiella pneumoniae
atgcaggtcagcagaaggcagttctttaagatctgcgctggcggtatggcgggaaccacggcagcagcgctgggctttgccccggcaactgcgctcgcggagacacggcagtacaaattgctgcgcacgcgcgaaacccgtaacacctgcacatactgttctgtcggctgtgggctgttgatgtatagcctcggcgacggcgcgaaaaacgccaaagcatccattttccatatcgaaggcgatccggatcatccggtcaaccgtggtgcgctctgtccgaaaggggctggtctggtggactttatccattctgaaagccgcctgaaattcccggaatatcgcgcgccaggctccgataaatggcagcaaatcagttgggacgaagcgttcgatcgcatcgccaagctgatgaaagaggaccgcgacgccaactttatcgcgcaaaacgacgccggcaccaccgtcaaccgctggttgacgaccgggatgctgtgcgcctccgcctccagtaacgaaaccggctatttaacgcaaaaattcacccgcgccctcgggatgctggcggtggataaccaggcgcgtgtctga

SEQ ID NO: 215778 - DNA, 837 bp, Klebsiella pneumoniae
gtgaacaagaagcctctcgaacaaatcaaaaatgtgacgaatgtcacaggatatcgccaggtctccctctggaaacgcgaggatctgcaacaccctcagccagatgagttagcggaagaggtgcccgtcgcgctggtctacaacggtatctctcacgtggtgatgatggcctccccgaaagatctggagcaattcgccgtcggcttctccttatccgaagggattatcaagcaccggcgggagattttcggcatggacgtggtagcggtgtgcaacggccttgaggtgcagattgagctctccagccggcgttttatgggcctcaaagcccggcgtcgcgcgctggccgggcgcaccggctgcggcgtatgcggcgtcgagcagctcaatgatattggtaagccggtccagccgctgccgttcactcagtcgttcgatttagccaatctcgatcaggccctggcgcatcttaacgactttcaaccggttggccggctcaccggctgtactcacgcggccgcgtgggtccggttgacgggcgaactggcgggcgggtttgaagacgttggccggcatgtcgccctggataaattgttgggccggcgggcggaagtcggcgaggggtggcagcatggcgccgcgctggtctccagccgcgccagctatgaaatggtgcagaaggccgcgatgtgcggcgtcgagatcctgttcgcggtctcggcggccaccaccttagcagtggaagttgccgagcgctgcaatctgacgctggtgggcttttgcaagccgggcagggcgacagtttatacccatccgcagcgtttaattgcgggttaa

SEQ ID NO: 215779 - DNA, 213 bp, Klebsiella pneumoniae; identical to SEQ ID NO: 137889

SEQ ID NO: 215780 - DNA, 324 bp, Klebsiella pneumoniae
atgggcaatatgacgctgtttatcgccggtatcgccatcctgtcgctgggaacctatctgatgcgcctcggcggcgcgaagctcggcaatcggctggcattttccgagcgctcgcaggcgctgctttccgatgcggcgacggtgctgcttttttccgtcgccctggccaccactttctatgagggcgcacatttcgccggtatggcgcgcgttctgggcgttgctttcgctgtgttcctcgcctggcgcaaggtcccgctgatcggcgtgattatcgccgccgccgtggtgaccgcgctgctgcgcctggcgggtataaactaa

SEQ ID NO: 215781 - DNA, 1008 bp, Klebsiella pneumoniae
atgaaagctatcgccattactcaagccgccgctgacggcaacaacatcccttctttaaccgagatcgacctgccgatccccaccgcccacgggcgtgatctgctggtcgctgtgaaggctatctcggtcaatccggtagacaccaaagtgcgcgccggctttcagggcgacacgccgcgggtgctgggctgggacgccgttggcgtggtgcagtccgtcggtgaggaagtgacgctgttcgcgcccggggacgaggtctggtacgccggcgcgctgggccgggccggcagcaacagtgaatatcagctggtggatgagcgcctggtggcgcacaaaccgcgcaccctcgataatgcctccgccgccgcgctgccgctgacggcgatcaccgcctgggagctgctgtttcaccgtctcggcgttgaggaaggcggcaatgcgggcgacacgctgctaatcgtcggcgcggcgggcggcgtggggtctatcctgacccagctggccagtaaactgaccgccatgacggtgatcggcaccgcctcgcgtcccgagagccagcagtgggtccgcgaggcgggcgcgcaccatgtgatcgatcacagcaagccgctcgccgacgagctggcgcgcattggtatcacgtcggtaacccatgtcgccagcctgaccaataccgagcagcacttcaacgcgctgatcgacgccctcgccccgcagggcaagctggcgctgattgatgacccggagaccctggacgtggtgccgctgaaagcgaaaagcctgtccctgcactgggaatttatgttcacccgttcaatgtttgagacggatgatatgatcgcccagcatcagctgctcacccgcgtggcggcgctgatcgacaaccacactatcaaaaccacccttggcgaacactacggcgccatcaccgccgccaatctgcagaaagcgcatcgccagctggaaaccggacgcgccgtcggcaagatcgtgctggaggggttttaa

SEQ ID NO: 215782 - DNA, 300 bp, Klebsiella pneumoniae
atgacaaaaccaacatcaaccaccaaaaagccacgcacgcagcacactcctgaatttcgtcaggaagccctgaaactggctgaacgcatcggggtggcagctgccgcccgcgaacttaacctgtatgaatcacagctctacaactggcgaagcaaacagcaaaatcagttctcttcttctgaacgcgagcaggacatgtccgctgagatcgcccgtctgaaacgtcaactggcagaacgggatgaggaactggccattctccaaaaggccgcgacatacttcgcgaagcgcctgaaatga

SEQ ID NO: 215783 - DNA, 867 bp, Klebsiella pneumoniae
atgaagtatgttttcatcgaaaaacatcaggctgagttcagtatcaaagccatgtgccgtgtacttcaggttacccgtagtggctggtacatctggcatcagcgtcgttatcaggtaaaccggcgtcagcagttccgccttgtctgtgataacgtcgtccgggaagcattcagtgacgcaaaacaacgctatggagcgccacgcctgacggatgagcttcgtgtccagggttaccggttcaacgtgaaaaccgtggctgccagcctgcgtcgtcaggggctacgggcgaaagcttcacgaaagttcagtccggtcagttaccgcgaacatggtctgccagtctcagagaatctgctgaagcaggacttttacgccagcggcccgaatcagaagtgggtgggtgacatcacgtatcttcgcactggtgaaggctggctttatctggccgtggttatcgatctgtggtcgcggtcagtcattggctggtcgatgtcctcacggatgacagcacagcttgcctgcgatgcgttacagatggcgctgtggcggcgtaaacgtccggaaaacgtcatcgtgcatacagacagaggcggtcagtactgttcaacggattaccagagcttgctgaaacgccataatctgcgggggagtatgagcgccagaggttgttgttacgacaatgcctgtgcggaaagcttcttccatacgctgaaggtggaatgtatccacggagaggactttgtcagccgggaaatcatgcggacagcagtgtttaattatattgagtgtgattacaatcggtggcgtcgtcacagtgcctgtggcggtcttagtccggaacaatttgaaaaccagaacctcgcttag

SEQ ID NO: 215784 - DNA, 1536 bp, Klebsiella pneumoniae
atgaaacaagagacaatcattcaaaaaatttggagtttatgtaacatcctgagaggtgatgggatcacctattatcagtatgtatctgaactcagctatctactgtttctcaagattgctcaggaaaatggttcagaaaaattgatacccaaaggctatcgatgggctgacctagagtcccatgaagaagaaggcttactagggttctatcaagagatgctcacacatttgggtgcaaatgttgaaaatgaagttataagagcgatttatgcattccctacaacggttttttctcattccgaaaatttaaaagctgtcatagacggtatttcaaaaatagagtggcatcaagtaggaaaagatggatttggtgacctctacagcggcttaatcgataagagcgctcaagatactcgttcgggggctgggcagtatttcactccacgctctttagttaatactattgtgagattaatacaaccatcccttggcgaattaattcaggaccctgcgatcggaagtggtggtttcttagtctctgctgatagcttcattcgaaataaatattcacataaagaatatcaaactaaccctccaaaatatcaaggtgtagaaatagagaagaatactcgtcgaatttgcttgatgaatacttttttacatcgtttagacgcaaatattatttatggtgatgcgctaactgatgacgcagcggaattggataaagctgacgtaatcgtagccaaccctccctttggtaacaaggccgggggacagcgtcctttgcgcagcgatattccatttcctaatacaaataaacaacttgcttttttgcagcatatttatctggggcttagggctggtggtcgggcagctgtagtgttgccagataacgtactatttgagtctggtgttggtacggatgttcgccgtgatttaatgaataaatgtaacctccataccatcttgcgcttaccaactggtatcttttacgcacatggcgtaaaaaccaatgtattgtttttcactaaagggaccgcaaaaaacaaatatcagcaagaaaactgtactgagaatgtttgggtatacgacctgcgtaccaatatgcctagttttggtaagcgcacaccctttggtgatgccgacattgggtttgcgccacaagactttggcacagacccacacctcggcgcatttgaaaaagtgtatggtgacaaccctgaaggaaccagcaagcgtactgaaggtgaatacagcttcggtgcgcaagagatagaagtacgcaaagacataatgcaagaaaatcaggatattgatgaacgcctcagccattcacgctggcgctgctttagccgtaaatggatcactgacatcaaaggtgactcgttggatatctcttggctaatagataaagatagcgtggatgccgccaatttgcccgagcctgacgtgcttgcgcgagaagcaaaagaagaactggaaaccgcgctgaatgagctggattggttgttggcggcgttggaaggggctaattaa

SEQ ID NO: 215785 - DNA, 1713 bp, Klebsiella pneumoniae
atgatttcaaccaattcatgcaattggatagatctaaaaattggggacattgcagacgttgttgctggagggaccccaaagtctggtaatcaagaaaactttaaagaatctggtacggggattccttggttaaccccagcggatcttagtggttatactggcaaatatataagcttcggtgctcgagatttgagtcagcaagggtacgattcgagttccgcaaaaatattgcctaaaggaagtttgctgtttagcagtcgtgcaccgattggatatgtagccattgcacaaaatgagatttcaacaaatcaagggtttaagagctttgtttttacctatggtgtcgattcagtttatgcctaccactaccttagaagcattaaggatgtagctgaaagtatgggcacgggcacaacctttaaggaaatttcgggcgctactgcaaaaacgttgcctttcatacttccccctttagctgaacaaaaagttattgccgataaacttgatacactgttggcgcaggtggaagctactaaggcccgtctcgaacgcatccctgaaatcctaaagaccttccgccaatctatcctcactgccgcagttagtgggaagttgacagagatatggcgaatgaagaataaattcaacaacgtagcagtgaaacacaatgtcaatctgccaacgttaacccaagatgaatattaccttgaccctatcgaaggatggcaatgggtgagactagggtctgttgttaatctcataaatggagatagagggaaaaattatccgaataaaagtgaatatgtggaaaaaggaattccatttatcaatacagggcatattaatgcagacggaacacttgctgatgaacgcatgaattttatttctgaagctaagtatggctcattaagtggagggaaaacgaaatcaacagacctagtttattgtctccgtggagcaacaatgggaaaaaccgcccgtgttcactacaaaataggggcgattgcatcctcccttgtaattgtcagaccaagtgattacatagacagagatttcgcatattattttcttattagtcctcctgctaaaaatttaattaataagtttgataatggttctgctcagccgaatctatcagcaaagagtttggctacataccctttacaactcccttcgtgtaaagaacaaatcgaaattgtccgccgcgtcgaagaacttttcaccttcgcagatcatgccgaaataaaagttgcaattgcattagagcgaatcaataaaatcagtcaatctatactagttaaagctttccggggtgagctaactgctgattggcgcgtggccaacccggatttaatcagcggagaaaacagtgtcgaagtcttgctacaaaaaattaagaccgcacgtgaggctgtcaaaaaacaacctaaaccaacacgttctgccgtaaaaaaaaatgcaggtagccgtatgagcaaacagattatcaaagtagttgaagcgttaaaacaagctggagaaccgcttagtggtcagcaattgttagcggcggctggctatcccaacgacagcagcactgagcaactggaacagttctttctagatattcgtgacgctcttgccattgaaaaatccattgtaaaacttgagcgtggtgatgacggccaagattggttcaccttagctgagaaagtcgagataagcaaagcatag

SEQ ID NO: 215786 - DNA, 1659 bp, Klebsiella pneumoniae
atgaaagtcgacaaactatatatccgctcacgctttaaaaatctagaaaacgtgaaagtggattttgacgaaaatcatctgatgaccgttgtggtaggtcgtaatggttccggtaaatccaacgttctagaagccttagtatctatattccgcaatcttgacttaggtgaggcgccagcgttttcatacgaactgacttatcgattgggtgaacctcacaaacccaatcgacccagtaatcgatggctggaaatcactattgatgccgatccaaatcgcggaacgctggcaaagcaatacgaagtacgtatgcgcaatcttttgaatgacagcttacctgaagacatatttgatgaaaagactttaggtatagttattccattttcaaaggttaagcgcaataaagaaggtaaagcgccgtacctgcccaactatgtgtttgcctactattcaggtcctagtgatcgattagaaagctacttcaagaaacatcggacagatttttatcgtcatttattaaatgataagccggataaaaagctaaatcttaagggcgacattcgtccgcttttttatgcaaaaccctaccacagccagtttgtactcttggcatttttcttatctgacgaaaatagccctcagcgcacttttattaaggaacatttaggcatagaagatttagatagcattcactttgtgatgcgacaacctggctgggcaaaacaaaaaggcgagctattctggggtgcacgtggcgtagtccgccgtttcctagatgagctaataaaatatacgctagcacctataaaagtgacacgacaagaagatacatctttaactggtagtcatgttcgaaacgaattttttcatttatttttacctaatgtcgaagtactacacacatttgcaaaaggattaagtgatgacgagctttttaaaatgctcgaaagtacactgctatcagaaattatctctgaagtaagtattcgggtgaaagtatccagtagcaaagtacctcttactttccgagaactcagcgaaggagaacaacaactactaaccgtgttgggactactcaaattcaccggcggcaaagactccttgtttttactcgacgaacctgacacccaccttaatccgtcatgggccattaagtatctgaaattcctgcgtgaattcgtacccaaccatgaaactagccatttactgatggttacacaccatcctttggctattgctgagctaaagaaacagcaagtccaagtcatgtggcgtgatgatgagtataatgttcactcacaagaaccttacatagatccacgtggtgctggttttatggccacacttactgaagtttttggtctaaatacaacattggatcttgagacccaaaagttactggatgataggaacgaactggcccacatcgaaagccgaacagaagctcagagcaaccaactagatctccttaatgatgagttaaacagacttgggttttcatttgaaaacagagatccattatacagtgagttccttttagcatggcaagatctaaaatacagtgaaaggccacccttaacgccagataaagcagctcagagacgagttgccatgaagaaggtaattgaggtacttcaagctaagaaggctagcgaatga

SEQ ID NO: 215787 - DNA, 843 bp, Klebsiella pneumoniae
atgattttcatcaaacgagacgctgcgcttattcctgaaaaggtacttaatgttgctcagcgggcacaaaatgctctggaacaattacccgccgagcagaggaaagatttcatcaagaaaaagtctcatatatggagaggcttttcaaagtatcttgccaaaatgtcttatggtaagtgctggtattctgaggctaaagatgcgggtgcaaatttcgatgtagatcatttcagacctaaagcagaagcaaaaagggctgaaaatttagtcgatgtcgaaggttatgcatggttagcatttgattggaaaaacttccgactttccgctcaaaattgtaaccgtttgaacacggatgaatcaggtaacaccgtaggtaaaggtagctggttccccctgctaaatggtagccctaaagcaagctgggataatcgttgtattaatgatgaaagagtcactcttctggaccctgtagttcaagctgacctcacctatatagactatgacgacaacggtagatttacttcgagtagacactgtattggacaagcagcattaaggatacaacagtctgctgttatttatggtcttaattttgagaaaatgcgtgaagcacgatttcaggtcatgagagaagcaaaagaacttctcgaaactattcaacaaagtgttgaggacttagatccattaggtgatgaagcaccaatgagaactatagagcgacagatagaacaactgaaggccaaaacacgggctgatgcaccatttagccgtgcagtgagagcacagcttataaaacttggtgcagaggattacttaattgatagaagtttggatgcagcttga

SEQ ID NO: 215788 - DNA, 426 bp, Klebsiella pneumoniae
atgaagactttgatgaactttattgtgctgataattcctacatttttttcaatgaaatcttttgcagaaaataaactttgtgaagcgaatacaacgttcttttttgctaacaataaagcacatacaaagtctgttgaactttgctatgaaaaaaagggggttaaatatatctttggtccagaaggtaaaccagaaatcacattagaagtttccagagaaaaaattatctatgaatatgagaatggttgtgaaaacattaccattcctaatgggaaaacggattactatatttatcagtgcgggagtgcacctcaaacagatcccactttacaagttaatcaatatggtaatcctgttgctacaattgaattagatggcaaggatgggaaatacttaaatgccatttctgatgctggttatgagtaa

SEQ ID NO: 215789 - DNA, 375 bp, Klebsiella pneumoniae
atgaaaattacatcatacatgtgtaaattagttttagtaatcattttgtctgtgtttagcctgcaaggcttggcctctgagtcaccaataaaagtagatgttggtggtgataaaatgaagattggccctaattatttgcctatttggagctacaatatcactagtattgaaaatgaggtcgttattacttcaatagttgttaatcgcggcaattgtctgccttcgattgcaggtcgcgtaaataacatgaataaacgacttgggtatggtgaaacatttacatttaccattccaacaaataaagattatacacagtgcaaaccacttgagttgataataggcactcctaatggatcattgaaatatacgtggtaa

SEQ ID NO: 215790 - DNA, 171 bp, Klebsiella pneumoniae
atgcaagtaatactttttatatttttctttttaatagctatcccattagcgctaaaatttccgaagatcgttaaagcaatctttaagggcatttttagtttcattatttattttgtaaaaaatgctcccgatgcaataaataaagcaaacaatcaaaaaaggaaaagttaa

SEQ ID NO: 215791 - DNA, 138 bp, Klebsiella pneumoniae
atgtctgaacgttttgaagatagcccagagtatgacgactggatccaggaaacaggcggaagagatgaagactattcggattactataatcaatgggagcgcagaaaacttatagaatcattgcgtaagaaaaattaa

SEQ ID NO: 215792 - DNA, 1212 bp, Klebsiella pneumoniae
atggcgctaaccgatgttaaagtgaaaaccgcgaagccaaaagaaaagccctataagctggctgatagcggcggtatgtatctgctgattaacgctaatggttccaaatactggcgaatgaagtaccgcttcgccggtaaagaaaagatgctttctattggcgtataccccgatgtttcactggccgacgcacgagagaaacgtaacgaggccagaaaaatcctcgccactggaggcgatccgggtgaggcaaagaaagaggaaaaaatcgcccagcaaatgagtctgaaaaataccttcgaggccgttgcccgcgaatggcaccagacaaaagccgatcgctggtcactacgctatcgtgatgaaatcatcgatacctttgagaaagatatcttcccctatattggcaaacgccctattgctgaaatcaaaccaatggagttattggaagccctacgtaagatggagaaacgcggggcgctggagaaaatgcgcaaggtccgccagcgctgtggtgaggtgttccgctatgcaatagtcactggaagggccgactataaccccgctccagaccttgccagcgcattagctacgccgaaaaaagtacatttccccttccttactgccaatgaacttccccacttccttaacgatctggcgggctataccggcagtattatcacgaagacagccacccaaatcattatgttaaccggtgtacgcacgcaagaactgcgcttcgcacgctgggaagatatcgattttgaggcaaaattgtgggagattccggcagaggtaatgaagatgaaacggcctcacattgtgccgctctcagagcaggtcatagccctgtttaagcaacttgaaccgatctcaaaacatcatccactggtttttatcggcaggaacgatcctcgcaagcctatcagtaaggaaagcatcaatcaggttattgagttgttgggatataaaggcagactgacggggcatggcttccgccacacaatgagtactattctgcatgaagagggctttaactcggcatggattgaaacacagcttgcacatgtcgataagaacgcgattcgcggaacgtataaccatgctcagtatctggacggaaggcgagagatgatgcagtggtatgcggattacattgacgctttggcgaaagggacagttatacagggaacatttggtaagacagcgtga

SEQ ID NO: 215793 - DNA, 2319 bp, Klebsiella pneumoniae
atgaaaatcagtgatggaaactggctcattcaaccagggcttaacctgatccaatccgtacaggtttacgaggtggagcagcaggggaatgaaatggtggtctatgccgcgccgcgcgatgtccgcgaacgcgcctggcagctggatacgccattgttcaccctgcgctttttctcgccgcaggaagggataatcggcgtgcgtatggagcacttccagggcgcgctggataacggcccgcactatccgctgaacgtgcagaaagacgtccatgtcgaaatagaaaatacggccgggttcgccgagctgaaaagcggcagcctcagcgtgcggttgactaaaggcgaattctgggggctggattttctgcgcgacggcctgcgtatcaccggtagccagctaaaaaacaacggctacgtgcaggatagtaagacccagcgcaactacatgtttgagcgcctcgacctcggcgtcggcgaaaccgtctacggcctcggcgagcgctttaccgctctggtgcgcaacggccagacggtagaaacctggaacgaggacggcggcaccagcaccgagcaatcctacaaaaatatcccgttctatctgaccaaccgcggctacggcgtgctggtcaaccatccgcagcgcgtctccttcgaggtgggctcggagaaagtctctaaagtccagttcagcgttgaaggcgaatacctcgagtacttcgtcatcgacggcccgacgccgaaagcggtgcttaaccgctatacgcagttcaccggccgcccggcgctgccgccggcatggtcgtttggtctgtggctgacgacctcgttcaccaccaactatgacgaagcgacggtgaatagttttatcgacggtatggctgagcgccatctgccgctgcacgtcttccacttcgactgcttctggatgaaggccttccagtggtgcgattttgaatgggatccgcagaccttcccggacccggaagggatgatcaagcgcctgaaggcgaaagggctgaaggtctgcgtgtggatcaacccgtacatcggtcagcgctcgccggtgttcaaagagctgaaagagaagggttatctgctgaagcgtccggacggttcgctgtggcagtgggataagtggcagccggggctggcgatttatgacttcaccaatccggaagcccgccagtggtacgctgacaaactaaaaggcctggtggcgatgggggtcgattgcttcaagaccgactttggcgagcgtatcccgaccgacgtccagtggtttgatggttccgatccgcagaaaatgcacaaccactacgccttcatctataacgagctggtgtggaaggtgctgaaagagaccgtcggcgagcaggaggcggtgctgttcgcccgctccgcctcggtgggcgcgcagcagttcccggtgcactggggcggcgactgctacgccaactacgaatcgatggcggaaagcctgcgcggcgggctgtcgatcggcatgtccggcttcggtttctggagtcacgatatcggcggtttcgaaaacaccgcgccggcccacgtctacaagcgctggtgcgccttcggcctgctctccagccacagccggctgcacggcagcaaatcctatcgggtgccatgggcctacgatgacgagtcctgcgacgtggtgcgccacttcacgcagctgaaatgccgcatgatgccgtatctctatcgtcaggcggcgctggccaacgagtgcggcacgccgatgctgcgcgcgatgatgctcgagtttccggacgatccggcctgcgactatctcgatcgccagtatatgctgggcgattcggtcctggtggcgccggtgttctccgaggccggcgaagtgcagttttatctgccggaagggcactggacgcatctgtggcataacgatgaattgccgggtagccgctggcataagcagcatcacgatgcgctgagcctgccggtctacgttcgcgacaacagcctgctggcgctgggcaacaatgaccagaagccggattacgcctggcatgagggcaccgccttccagctgttccaccttgaggatggacgcgaggcacgctgtgacgttccggcggcagacggctcgacgatcttcaccctgaaggccaggcgccagggtaacgccatcgctgtgagcggcgaaggcgaggcccgcggctggacgctgtgtctgcgcaatatcccgcaggtcgcgggcgtgcagggcggtacgcagaccggtagcgaactgggcgtggtggtgagcgccgagggtaatacgctgacgattacgttgtaa

SEQ ID NO: 215794 - DNA, 1380 bp, Klebsiella pneumoniae
atgaaattaaccgtattaggcgggggcggcgttcgctctgcatttttagcgaaatctctggcctataacgctcaccgcattggtttaacagaagtcgtttttctcgataactctgctgataatctggcgatatttggcgaaattgcccgctatgtatttaataccattcgcccggatattcagtttagtaccaccaccgacccggtcgcagccctgcaggacgccaactatatcattaccaccctgcgggttggcggcgatgaaagccgcattcgcgacgaacgtattgcgcttgagcataacactctcggccaggagaccaccggcgccggcggtttcgcgatggccatgcgctcgatcccggcgatccttcgctattgccggctgatcgaagaacatgccgccgaagacgctattctgtttaactttaccaacccgtcaggtctggtgacggaagcgattattaagtccggctttaagcgccgggtctatgggatctgcgatgccccctccgagctgattcgtgaactgccggcgatccttggctgtgaggagcgcgacctcagcgtggaatgctatgggctgaaccatttctcctggtttacccacttcaccgtccgtggggaagaggtgaccgaacggctgatcgccagcccggaactgtaccagaagacggcgatgcagtacttctccccggagctggtacggctttgcgataatcagctcctcaatgaatatctctattattactactatcgcgacgaggcgctgaaggcgattcaaggggccggcgagacgcgcggagagcagatcgcccgcatcaatcaggagatgcgcgaggcactgcgcaccgtggatgccagaacgcaaccggaggccgccttcaccatctggatgcagcattacctacgccgggaaaacagctatatgcagaacgaatcccggcaggagaaattccacacccgcgaaccgctgacgctgcgccagtttatcgaagagccggacaccggcggctatgccggagtggcgctggatatcctggaagcggtgaacagcaccaccaccaagcggatcgtggtgtcgatccagaataatggcacgctcgattttttacgcccggacgacgtgatcgagatcagctgcgacctgagccgggatggcctcaagccggtgacgccggtgaaggtgccgacagcgcagaagaatatgattgcctgcgtgaaggagtatgagcggctggcggtggcggcgatcctgcagcaggataaatcgctggcggtgcgggcgctgatggcgcacccgctgatcggttcctattcgctggcgaaaaccctggtcgaagcctacctcgacaatgagcagttcgccgcctggcggtaa

SEQ ID NO: 215795 - DNA, 1560 bp, Klebsiella pneumoniae
atgcctgaaatacgtcagcgtattctggagaatatgcaaaaattctcccgggccatgatcggcgccgtattgttcttgccggtcattggcttaattctggccctcagttcagtattaactaatccgacattaattgctgaaaccagtttcttacatcagcttgggcaaatgctcggcgacaccttttggcctttatttggcaacctcggcttattattttgcgtcggcatcagctatggcctggcaaaggataaaaaaaccgaagtcgcactggtttcagtgatgtgctttattatgtttcttggcgccaaccactcctggctggaacacacccatggactcgccgaaaaaattaacggtgaatattatggcaccgggcaaacccagctgctgggctttgtggtggtggatatgggcgttttcctgggcattattctcggctgcacgattgcgtgggtgcacaataaagtctctgccattgagctgcctggcgcgctgtcgatgtacggcggcgccaagctgacgctggtggcgatgacgccggtggttatcttctacgccatcgcctttacctggatttggccctttatgacccacggcatctccgccctcaccggttttatgaaaaatgccggggtcgccggggtcttcgtctatggtttctttgaaaaattccttatccccaccggcctgcaccatttcgtctggtcccccttccagctcacccagattggcggcacgctgaacgtggatggtcaggtggtctccggcacccaggccattttcctcgcctatatgcgccatcccgacctgacgccggtcatgaacgacgcattacgcttttcgcagcaagggatgaccactatctttggcctggcgggcgcctcgctggcgttctaccacaccgcgaaaccggagaagaaagcgatggcgaaggcgattctgctgccggcgcttatcacctcgatgctgaccggcatcaccgagccgattgaattcaccttcttatttgtctcaccgctgctgtgggtgatccacgcgacgttaaccgccgcctcgcaggccatttgcgacatcttcaccgtacgtccctggggagcatcgggcctgatcgagtttctgatctataacctgccgctgccggtctccttaacgcgctggccgggctatgtccttatcggtatcggccagttcgccgtctactacgtgattttccgcaccctggtggtgaagctgaacctgaaaacgccgggccgggaagatgacgagaacgtgaagctctacagcaaagcagagtaccgccagaaagtcgcgcaaccgcagtcggtcaccgatgacattatccgcggcctcgggggcaaggagaatattctctccgtcgataattgttttactcgcctgcgcgtggccgtgcgcgatatggcgcgggttgatgacgcgcaattaaaaaataccggcgccaacggcgtcgtacgcaatcgaaatgaagttcaggttatttatggcgtcaaagtgggacaggtacgttcccgggttgataactggttagcagaaaattaa

SEQ ID NO: 215796 - DNA, 1059 bp, Klebsiella pneumoniae
atgaaaattaccgacagcatgcagtgcgatatctggtatcaggcgctgcttgaacgcgcggtggaattcaccggcgtttttttcgtcggcgtgaaaactaccggcgtattttgtatctcggtctgtcgggcgcgaaaaccccggcgggaaaacgtcgaattttataatgactttaaatccgcgctggatgccggcttccggccatgcaaagtctgtcgcccgacggagaatgcccggacggcccccgcctttgttgaacaagcgctccgcctgctgcgagaagctccaaaggtccgcctcagcgatagcgagctacgtcagcacgatattagcccggaacgcgttcgccgctggttcctgcaaaaccacgggatcacctttcaggcttttcaacggatgcagcgtttgaatatggcgcttcaggaattaaaagcaggccgctcaactaccgatgtcgctttcgatagcggttacgagtccttaagcggcttcggctatacctgcaaaaaattgaccggtttcgcacccagcgcacaacgccaggttgttttaattcatcgttttaccaccccgttagggccaatgtttgtttgtgcaacgcaacggggaatttgtctgctggagtttgtcgacagacgagcgctggagtcagaattcagcgacctgcagcggcggttcaacgccagcatcatcgcaggtgaaaatgcccacaccaggcaggcgcaacaggaaataacggagtatttcgccggacagcgtcaatcgttcgaggtggcgcttgataccccaggcagcgagttccagcgagcggtctggcgccgtttacagcacgttagcttcggtgagacgacgcattatcaatcgattgcgatggagataggtaaaccaacggccacgcgcgcggtggctgctgcaaacggcgctaaccgcgtcgcgattatcatcccgtgccatcgaattatcggcaaagatggttcgatgaccggttacggcggcggcattgcacgaaaaatatggcttattaaccatgaggcaaccatcagggaaaaacgcggctga

SEQ ID NO: 215797 - DNA, 918 bp, Klebsiella pneumoniae
atgaataatctttgtattgatgtaaaaaatctcaataaacattttggcgagcatcacgtcgtaaaggatttctctttacaggtggcaaaaggcgagatctatggttttctcggtccgaacggtagcggaaaaacgacatcgattcgaatgatgtgtggtttgattacgccggattccggtgaaggtacttgtctgggtatggatatctttacgcagcgggaaaaaataaaaaaaaagataggctacatgacccagtatttctcaatgtggggaaatttaactattcgggaaaacttactttttattgcgcggttatatagcctcgatcagcgtagagatcgggttgaacgtgcgctttctgagttaggcctcactgcccgacagcaccagctggctaaggagctttctgggggctggaagcaaagaatggccctcgccgcctgtatgttgcatgaacctgttttgctatttctggatgagccgactgctggcgtggatcccaaggcgcggcgagagttctggcaaatgctgcaccagctttctgaccgggggatctcgatactggtgagcacgcattatatggatgaggctgagcgctgccataaggttgcctatctctcttatggtcggctgctggcgaatggcactattgcgtcgattatcgcctcccagaatttgatcaccatgcgaaccagcggcgccggtctgacgctgcttgaaagccagctacagcgcttgccggatattgagcaaacggtcatttttggcaatcagctttatattacatccagagatgaagcgaagttaaaatccgcgctttttgcctttacgcaacagggttatgagttctgtaaggtggataccaatctggaagatgcatttacctacttgatgaaaaataattatgaaaaaaattaa

SEQ ID NO: 215798 - DNA, 909 bp, Klebsiella pneumoniae
atgaaaaaaattaattttagcttctccgttacgcggtggattggcgtggttattaaggaaattcacgagctacgccgtgataaagtcagcatcagtatggtgctcctgacacctctttttcagctgatcattcttggctatgccatcaatatggatccgcataatcttccgaccgccttactaaattatgataccgaacgcatgagtcaaatctttgtgacggaagcgcaaaataccgggtatttttcgatgattcctgtcgattcagaagaggcggcgcagaaagcctttgtgcggggggatgtcacttttatcgtgacgatccctgaagggtttacgcgcaagttactgcgtggagaaaagccacaactattaattcagggggatgccatcgatccgatcaccacggggaatgcgctcagcgcccttgtgcaggtggcgaagtcgatgtttcagcacgatttgccgggcgacatgcgtgtggtgcaaaaagaggatgatttcgagcttatcattcatcgcatgtttaaccctgaggggataacccagtttaatactattcccggtattatggggtcgatactcagtacaacgttaatcttgatgaccgccctgtcaattacccgcgagcgagaaaacggggcgttagaaaatttactggtctctccgttgtccgggcttgaggttattattgggaaaataacgccttttgttatcattggtctgtttcaggcgacgttaatcctgattgccgccgttttgttgttcgatatcccccttcacggtagcgtcttcctactattttttgtgctgttaatttatgtctttctttgtctgtcaattggtatcggtatttctggcttagggaaggtgcgaataagtccgagatgtgagatcatcgtgttgtaa

SEQ ID NO: 215799 - DNA, 2634 bp, Klebsiella pneumoniae
atgtttttatttttccattctgaacaaaccgaaaaaaacaccagctattacaagggtttactttttgaagagttgttaaaagaatacttggaaggctctgggtacgacattgagttaaggaaaaaagaatctagtttagagtacgacattgaaggattcgctagagcaactggccaaaagattattggcgaagctaaagcacacagcaaaagcatgagtggacaaacagttgctgcgttcgttggaaagcttttgcccctaggtcttctggaaaagaaggtgcatggattgtttctgtcattatcaccattaacaccggaggcggaagattattttcgaactgtcgaaaatatggggttaacgacaaaggtaggaaaggaactttataaccaaataactgcgactttgcatttgccgactgaggaatttctatatagagaaattaaaggttatgaccttgtggccccaaatattctcaagactgatacggggttgtataagttatttattttaaaagaggtgaattcaggaacgccatcaaattttgtggtattcaataaaagtggcagccaaattgatgatgaaagatttttggaagatttaaaaatagggatttcagaacttgctggtttggatttcattatgcctagcaagcaaaaaatagttgacgaaacgcctcaggtaaagcgtgaaatagttcgaggattaactgttgggactgaatgggctgactataggctacctgcagggccaactgtgttcgttggcaggaatgaattcataggtgaacttctttctcacatcaaacataatgagctaccacatgttcttcagataaaaagtcgctctggagtaggaaaaagctcccttgtatcctttttagaaaacaagctctcaatggatggagttattactgaattacatgactcaagggatgtaaaaacaatatatgatgttttttatcttgttcagaggtttacccaaagcagcattattgcgactaattttatagagcttgatgaacaactgaaagacttgcagctttcactaaatggccaaaaggcagttttctttgttgaccaatttgaatctacattttcgaatcctgacatattcgattgctatgaatacattgcgaactcaataacaaagcttcgtggtggcgtatacatagtgtttgcgcgtaaaaatgatcagctaacaacctatgacaacagtaaagtttctcttaatagaattaatcagctatcgaaaagctttactcttccggattttgaaaacaaagaatcaatacttcttttagaaaaaataaatgaaaataactctaatattctcagcaaagaaatactaccctatattattgaatttgcgcagggttttccttggcttttaaaaagaactatagctcatgttttaaaactcactcgaaaaggtgactctcagagggacttaatcagtgcgggcttaaaactgaacgacctttttgaagaagagcttgaaggtttggatgaaattgaaaaagattatctagttaagattgcagccaagctaccagcagatttcaatgaacttcaataccaatttgacgaagacccaatgcttgtaaaagtcctcgataagttaacagcttacagattggtacgcttgagtggttctacttatgatacttataacgatgttttcaaagaatatcttgtataccaaaagcttcccgagtttagactgctagttatttatagaatgtatccaagctctgttatatctcagtttcataaactgataacaatgagaaagctgacaattacaaaaataacagaaaacctaaatgtaagggaaggttacgcatttaatctcgtgaaggaattgcggaatttagacttgcttgatgcagttaaaagtggtgaatggataattccaacaaatgtaagagatatatattctcaaggtacccttgctggttatctacgccgaaagattttagacaatcaactcgtcgagactttacttaaaaaaattctttctggagaaaaaattttcgagagcgatatacccacgtatttttccgaatcctatccttttattgaggcatcagagaaaacatggggattatactctacgattttaaagtcatggttgcttgccctaaaaattatagaaattgatggagaaggtcgcattattgcctcagatgtgtcgcataatgatgcaacagctgagttaggaaatcttaagaaaatttcgggcttaagggcaggaaataaagggcttttcttccctgtaacatctcacgccaaaatgattgaagttaccagtttgatactgaacggtgaagagcctactggaaaagaagcgcttaaagcaaaatctgatttaaataatgctggtgttttagtcggtggacacttagcagtatctaatattgaagagcttaatgaggcacttacagctcaaatacttgatgacgggtatgaggatttctggaaagcaatacatgctgatcagccctgttatgaaatttttaaaggtattgcaggggaaggattaactgagtccacccttaaatggcgcttaagaaagttaacagctttagcaaaaagactgaaaatcataccaaacaaaagattcaaatattaa

SEQ ID NO: 215800 - DNA, 858 bp, Klebsiella pneumoniae
gtgactgatatccttcaaaaccactattcacaagttaaaaacccgaacccggttttcacgccgcgagaagggaaaaagaccctgccgttctgccgtaagctgatggcgaaagccgaaggcttcacgtcccgttttgatttttccattcatgtggcgtttttgcgttcgctgggtaagcggcacaggatgccaccactgttgcgccggcgtgcaattgacgcgctactgcaggcaatgtgttttcactatgatccgctggccaatcgcgtgcagcgctcgattaccaatatggccatcgagtgtggactggccaccgagtcaaggagcggcaacctgtcagtcagccgtgccacgcgggcgctgaagtttttggcggagctggggctcatcacctatcagacggaatatgacccgcagatcggctgtaacatcccgaccgatatcaccttcaccccggctctgttttccgcgcttgacgtttctgaggtggctgtggtggccgcgcgccgcagccgtgtggagtgggaaaacctgcagcgcaaaaagcagaaactgaaaccgctggagatggacgagctgatcgcaaaagcgtggcggttcgtgcgtgagcgttttcgcagctatcaggctgagcgtaaatctcacggccggaagcgggatactgcacggcgggatgcatcacggcagcgtcatgacatcgagacgcgcgtgcgtcagcaactgacccgcgaatacgccaccggccgcttcaggggcgataaagaagcgctgaagcgtgaggttgagcgccgtgtgcaggagcgcatgctgctgtcgcgcgggaacaactacacgcgactggccactgtgcccatataa

SEQ ID NO: 215801 - DNA, 561 bp, Klebsiella pneumoniae
gtgaaaaaaatgaaccgtacgctccgcagatgttgtctgtccgggcttatcagcctgtctttgtttgcaccttttccggttgtgtatgccgacagcatcgagacgggatattcgccggaaggaacggctctgcagctggtcctgaagactattaattctgcacagcaggaaatccggatgatgggctattcctttacctcacccgaagtcgccggcgcgcttgtcagggcaaagcggcgtggcgtcgatgtgaaagtggttctggactggaaagccaataccggcaagcaaaaccaggcgagtctggcggccatgaatcttctggtcaatgccggcatcccggttcgcacagtgtcgcagtacaaaattatgcatgacaaagtcatcattgctgatgaccgcaatattgaagtcgggtcttttaactacacccgctccgccgatcgggtcaattcagagaacgtgctagtcgtgtgggatgttccagtcgttgctcaacgctatctgcagcactggtcgacccgctggtcgcagggaacggactggaaacgggcttattaa

SEQ ID NO: 215802 - DNA, 258 bp, Klebsiella pneumoniae
atggctggtaataaaatttcagattttacggaagaagaatttactgcttttgttagtaaaataatcgctgctgattttcaaactgacaaagagaacgatgatgctatttattcgttcgcccaactaacagagcatcctgctggttggaacctcatcttcaagcctaaggtaggcgaagattcttcggcgaaaggaattgttaaaaccgtaaaggaatggcgagctgctaacggtaagccaggttttaaaaaatcgtga

SEQ ID NO: 215803 - DNA, 867 bp, Klebsiella pneumoniae
atgatgcctggcgatgcgtttggtctgcctgataccgcggcattgaataaagcagcagatcagaaaacatctgtcagtatgccggttcgtggccgtctggttatgaatgatagcggcattctggatgttcagctggtcaaaaccaatactgccggtgccgtgaaggtcgctcgtgctgtactggataaggaaaccggctactggggctatactcttcccgctgtcgcagatgttccggcgcaaactatttttgtcagcccggctgacgcacctggtgcaaacggaccactgacgctaagcgggccggtaccactaccggagcgtattctgcataccggtgatcagatttcggcgccacaggctacagataaaaccgtgacgccggtagcggatgacctcgattttgaagatattattctggtgtttccaccggagtccggcctaaaaccgctgtatatgatgtaccgtagccctcgtaacatgcccggtacagtaagcggcaaagggcagaacgttggcaataactggatggggggggccagtaccggggatggtgctcctgttccttcccagattgcggataaattacgcgggaagactttcggtagttttgattctttccgtcgggcgttctggaaagcggttgctgacgattctgcactaagcaagcaatttagtgaagctgatattaatcagatgaaagctggaagggcacctactgcggactttttagaatcagtagggaaacgtgttaaaattgaattacaccacgaaaaagaaatatctcaaggaggggctgttatggatgtcgataacattaaggcgctaacacctaaaaatcatattgagacacataaaggaaaataa

SEQ ID NO: 215804 - DNA, 546 bp, Klebsiella pneumoniae
atgccattacctgagcgaatgaaacccgcacgggtcacccgtaaacagatgaaagaactggtcagtcagctgaatggcattctcgatcacatcgataacgggatggacgaaaacaatgaagaactaaaacagatgatggcagactggaatgcacaggtcgtcatgccctgcgggttctctgattttcgtgatttttcatcctggacaagcgcactagatttcaccaggatggcgcttaatcaggaaaaataccttgatgactttacatggacagaactgaacgacgttatcaactttatacgcaaagcagaaggtagtgcatctgaccacagctatgcactccagttactggagattaatttcagggcaaacccactggatctcatctatcaccctgactgctggttcaatgatgaagcattgtttcatgctcggctgactaccgaagaaattggtggctacctgatgaaaaaatcaggtcgatggctcaacgatgcaccggatatccagctggtgtatgccatcccccaggatgtttatgattaa

SEQ ID NO: 215805 - DNA, 348 bp, Klebsiella pneumoniae
atggattttgaagcgcggaaacaaaaggcgctggcgataatggccagccgtaagatgtggaaaagcaattatgcaccgcttctgatacgcctgctgtggcggctggggataaagattccccctctgccgtttgctccgctctggcaggtttttggcgtgatgacagcctctttctccgtcggatacgggctgtggatgtactggatggtgtggcgggcccaggggatgtcccccctgttcgcttgtaaaatcagtcttatcgccggcgtgttatttggcctgacgatggcgttgtttcatctgtggcgtcgaaaggtgaataaattacctgactggaaagatttataa

SEQ ID NO: 215806 - DNA, 597 bp, Klebsiella pneumoniae
atggcagaagaaaaacgccctgtactgagcctgaaacgaaaaccggcggagaacagtacgacccccgcagaggcgacccctgctcctggtgtggtgcgccgtaagaaggtcgtggtggtctcgtccccgccggcctggaaggcaaagaaagcgaaacttgagaaggttaaacaagcggccgaagccgccgcgcgcaacactgcgccggcgccggttaaagcggtaaagacgccacctccggtgcgttatcttcgcctgctgccgccggaacaggccattatgacgctgaaggctttctggccacagctgttcgacggaaactccccccgtctgctggtaacgggcatgcgcgaacagctgtttgccgatattgtgaagcgcgacctgccgctgtcgcataaacaggtgatcaagtgcctgaagagtctgacccggtctgcgggctatctgtcccggatgaaggtgggggcctcccgctatgatctgcaggggaatgccgtcgcgaccgtcaccgcagaggaagcgcagtacgccagtgagcgcatgatgaaagaactcctgcgaacggagcgtatgcggagccagtctgctgactga

SEQ ID NO: 215807 - DNA, 726 bp, Klebsiella pneumoniae
atgacagcacacacaatgggtttcagagccgctgaccgctggctgcaggcattactgacctggacaccgggtcagacggatatgattaaaacggtggccctggtcctgatggtcaccgaccatgccgggttactgctggcacacaataacgagataatgcggcttctgggacggggctgttttccgctgttcggtctggcatggggaatgaatctggcacggcacgcggaaatacgccagtcgcagctcaacagcctgtgggtctgggcgctggttgcccaggtgtcgtttatgctcatcgggtacccgtggtataccgggaatattctgtttgcctttgccgtcacgggccaggtcctgcggtgggtcagccagccgtcctggtattacaccctcccggcggctggactgctggtcgcctggatacccctgtcaaccgccagctacggcatggccggagtgggtatgctcaccgccagctggctgctttgtcgcgcacagcatgcaccggaacggctgggatacggtgtgctgtgggccctcatggtgttgctgatgaatatgaatgacgtgagtgaatcagtggccgggctggcgattgcgctgctgacgctgatggtgtgctcatctgccggagagcgtgtgaaacgcttctggccgcggcagttcttcgtgatgttctatgcggtgcacctggcggtactgggtattgtcgtctcaatgtga

SEQ ID NO: 215808 - DNA, 5259 bp, Klebsiella pneumoniae
atgcttagtttcagccaggttaaatcagctggcagtgccggtaattactatacggacaaggataattactactttatcgggagtatggacgagcgctggcagggtaaaggcgcggaagcgcttggtcttgaaggaaaggtggacaagcaggtcttcacggagcttctgcagggaaaactacctgatggcagcgacctgacccggatacaggatggcgtgaataaacaccggcccggttacgatctgaccttctcggcccccaaaagtgtatcgatgctggctatgctgggcggcgataagcgtcttatcgatgctcataatcgcgcggtgacagtggctcttaaccaggtggagtctcttgcctccacacgggtaaagagagatggcgtttctgaaacggtcctgaccgggaatctgattattgcccgctttaaccacgatacatcgcgcgctcaggacccacagatacacacgcacagcgtggttatcaatgcgacacagaacggcgataaatggcagacgctggccagcgataccgtcggtaaaaccgggttttccgaaaccatactggccaaccgcatcgcattcggaaagatataccagaactctctcagggccgatgttgagtctatgggttacaagacagtggatgcgggtaagaatggcatgtgggagatggagggcgtgccggttgagtcgttttccacgcgcagtcaggagctccgggaggctgcaggacccgatgcctccctgaagtcccgggatgtggccgcgctcgatacccgcaagtcgaaagaagccatcgatccggcagagaagatggtggagtggatgaacacgctgaaggagaccgggtttgacatccgggggtaccgtgaggccgccgatgcgcgggccgcagagctggcccgtgcacctgccgcgccggtgaacactgacggtccggatatcacggatgtggtgacgaaagcgattgccggtctcagcgaccgcaaggtgcagttcacgtatgccgacctgctggcacgcacggtcggccagctggaggcgaaggacggtgtctttgagctggcgagaaagggcatcgatgccgccattgaacgggagcagcttatccctctcgatcgcgagaaaggcctgttcacctcaaacatccacgttctcgatgaactcgccgtcaaagccctgagtcaggaggtgcagcgccagaatcatgtctctgtcacgcccgatgcgtctgtggtgcgccaggtccctttcagcgatgccgtcagcgtgctggcgcaggatcgcccggtcataggtatcgtttccggtcagggcggtgcaaccggccagcgggagcgggtggccgagttaaccctgatggcccgggagcaggggcgtgacgtccatatcctggcggccgataaccgttcacgagattttctcgccggtgatgtgcgtctggccggggaaacggtgaccggtaaatccgccctgcaggacgggacggcgtttattccgggcggaacactcatcgtggatcaggcggagaagctgagcctgaaggaaacgatttccctgcttgatggcgcgatgcgccataacgtgcaggtcctgctctccgacagcgggaagcgcagcgggaccggcagcgcgctgacggtgctgaaggacagcggcgtgaatacgtatcgctggcagggtggccatcagaccaccgccgacatcatcagtgaaccggataaaggagcacgctacagccggctggcacaggagtttgccgtcagcgtgcgtgaagggcaggaaagcgtggcccaaatcagcgggacgcgtgaacagagcgtactcaacggcctcatccgagactccctcagacaggagggggtgctgggtgagaaagacacgaccattacagccctgacgccggtgtggctggacagcaaaagccggggcgtgcgggattattaccgggaggggatggtgatggaacgctgggatccggagacccggacgcacgatcgctttgtcattgaccgggtgaccgcgagcagcaatatgctgaccctgaaagaccgggaaggggaccgtcttgatctgaaggtttccgcggtcgacagccagtggacgctgttccgggcagatacactgccggtggcagagggggaacgtctggcggtgctcgggaagataccggacacacgccttaagggcggggagagcgtcacagtgatgaacgtggaggacgggcagctgacggtacagcggccggggcagaaaaccacgcagaccctggccgtgggtgcgggcgtgtttgacggtattaaagtcggccacggctgggtggaaagtcccggcaggtcggttagcgagacggcaacggtctttgcgtcggtgacgcagcgtgagctggataacgccaccctcaaccagctggcacagagcggaagtcacctccggctgtactcggcgcaggatgcggcgcgcacgacggagaagctgtcgcggcataccgcgtttagcgtggtctcagagcagctgaagtcccgatccggcgagacggatctggatgcggccattgcgcagcagaaggccgggctgcataccccggcagaacaggccattcacctggccatcccgctgcttgagagccaggacctgaccttctcccggccccagctgctggcgacggcaatggaaaccgggggcgggaaggtttcgatggcggacatcgacacgaccatccaggcacaaatcaggtcggggcagttgctgaatgtaccggtggcacccgggcgtggcaatgacctgctgatatcccgtcaggcctgggacgccgagaaaagcctcctgacccgggtgctggaaggtaaagacgcggtggcccccctgatggaccgcgtgccggacagtctgatgacggaactgaccgccggacagcgggcggcgacccggatgattctggagagcacggaccggttcacggtggttcaggggtatgccggggtggggaaaaccacccagttccgggcagtcatgagtgccatcagtctgctgccggaagagacccgcccgcgcgtcatcggtctggcgccgacgcatcgcgcggtcggggaaatgcagagtgctggcgtggatgcgcgcacgacggcgtcgttcctccacgacacgcagctgctgcagcgcaatgggcagacacccgatttcagcaacaccctgttcctgctcgacgagagctcgatggtggggctggccgatatggcaaaagcccactccctcatcgccgccggcggtggacgggcggtgcccagcggggataccgaccagctgccgcccatcgcgtcgggccagccgttcaggctgacgcagcagcgcagcgccgccgacgttgccatcatgaaagagattgtgcgccaggtacctgagctgcgaccggcggtctacagcctgattgagcgggatgtgcaccgcgccctgaccaccattgagcaggtcacgccggagcaggtgccgagaaaagaaggcgcctgggcgccgggcagttctgtggtggaattcacacagaagcaggaaaaggagatagaaaaggcactgagcgaggggaaaaccctgccggaaggtcagcccgcgacgctctacgaggcgctggtgaaggactataccggacggaccccggaggcacagtcgcagacgctggtgatcacccatctgaataaggaccggcgggcgctgaacagtctgatccatgacgcacggcgggagaacggggaaaccggcaaagaggaaatcaccctgccggtgctggtcacgagtaacatccgtgacggtgaactgcgcaaactgtcgacctggacggctcacaaggaggcggtggcgctggttgataacgtataccaccgtatcagcaaagtggataaggataatcagctgatcaccctgacagacagtgaaggaaaggagcgatttatctcaccccgggaggcatcggcagaaggcgtcacgctctatcgtcaggaaaagatcaccgtgtctcagggggaccgaatgcgcttcagcaaaagtgacccggagcgcggctatgtggccaacagtatctgggaagtgcagtctgtttcgggtgacagtgtcacgctgtctgatggcaaaatcacccgtacgctgaccccgaaggcggagcaggcacagcagcatatcgacctcgcctacgccatcaccgcccacggcgcccagggggccagcgagccgtatgccatcgcgctggaaggggtggccggtggccgggaacagatggccagctttgagtctgcctatgtggctttatcccgcatgaaacagcatgttcaggtctacaccgacaaccgtgagggctggataaaggccatcaagaattcacctgagaaagcgacggcgcacgatattcttgaaccccgtaacgaccgggcggtgaaaacagccgatctgctgttcgggcgggcaaggccactggatgaaaccgccgctggccgggcagccctgcagcagtccggtctggcacagggaaattcaccgggaaaattcatttctccggggaaaaagtaccctcaaccacatgtggcgctgccggcatttgataaaaacgggaaagccgccggtatctggctcagcccgctgaccgatcgggacggacggctggaggctatcggcggagagggacggattatgggcaatgaagacgcccggttcgtggcgctgcagaacagccgcaacggtgaaagcctgctggccgggaatatgggggagggggtcagaatggcccgcgacaatcccgataccggggtggtggtgcggctggccggtgatgaccgcccctggaaccccggggccatgaccggcgggcgggtatgggctgatccggcgccggtgggtccggtaccgcaggccggggctgacattatcctcccgccagaggttctggcgcagcgggcggcagaagaacagcagcgccgcgaaatggaaaaacaggcggaacagactgcccgggaagtggccggggaggcgcgtaaagccggcgagccggcggaccgggtgaaagaggttatcggggacgtcattcgcggactggagcgtgaccggccgggtacggagaaaacgacgctaccggatgatcctcagttccggcgccaggaggcggcgattcagcaggtggcctcagaaactctgcagcgtgagcgtttgcaggctgtggagcgggacatggtgcgtgacctgaaccgcgagaaaaccctcgggggcgactga

SEQ ID NO: 215809 - DNA, 2310 bp, Klebsiella pneumoniae
atgagttttaatgccaaagatatgacgcagggtggtcagatcgccaatatgcgctttcgcatgtttggtcagattgccaatattattctctacgtgctgtttattttattctgggtgctgtgcgggctgatgctgatgtaccggctcagctggcagacctttgtgaacggctgcgtatactggtggtgtacgacgctgggtccgatgcgcgatattattcgttcccagccggtatacaccattcagtattacggccagtcgctggaatatacctcagaacaaatcctggccgataaatatactgtctggtgcggtgagcagctgtggaccagtttcgtctttgctgccgtggtttctcttgttatctgtatcgtgacgttcttcatcgccagctgggtgctgggccgccaggggaaacagcagagtgaggatgagaataccggcgggcgccagctttccgataagcccaaagaagtggcccgtcagatgaagcgtgatggtatggcctccgatattaaaattggcgacctgcctattcttaaaaactccgaaatccagaacttttgcctccacggtaccgtaggttccggtaaatcagaagtgatccgccggctactgaattatgtccgtgcccggggcgatatggccatcatttacgatcgctcctgtgagttcgtcaaaagctattacgacccgtcactggataaaatcctcaacccgctggattcgcgctgcgcggcctgggatttgtggaaagagtgtttgacgctgccggacttcgacaacatctccaacacccttatcccgatgggtaccaaagaagacccgttctggcagggctccggtcgcactatctttgccgaaggcgcgtatctgatgcgcgaagacgacgatcgcagctacgagaagctggtcgataccatgctgtccattaaaatcgacaagctgcgcgcctatctgcagaacacgccggcagcgaatctggttgaagagaaaattgagaaaaccgccatctccattcgtgccgtgctgaccaactacgttaaggctattcgctacctgcagggcatcgagaagaacggggagccgttcactattcgggactggatgcgcggtgtccgtgaggacagacccaatggctggctgtttatctcctccaacgctgacacccatgcttccctgaagccggttatctcgatgtggctgtcaattgccatccgcggcctgctggcgatgggtgagaaccgtaaccggcgcgtgtggatattcgccgacgagctccccacgctgcacaagctgcctgacctggtcgaaatcctccctgaggcgcgtaaatttggtggttgttatgtgttcggtattcagtcctatgcccagctggaagatatctatggcgtcaagcctgccgccacgctctttgacgtaatgaatacccgggccttcttccgttcacccagcagggagatcgcggagtttgctgccggtgaaattggcgagaaggaaatcctcaaagccagcgagcagtactcttacggtgctgacccggtgcgtgatggtgtatcgaccgggaaagaaaaagagcgggaaaccctggtcagttactccgatattcagacgctgccggacctgtcctgttacgtcacgctgcccggaccgtatccggccgtgaagctggccctcaaatacaagccgcgtccgaaaattgctgagggatttattccgcgccgactcgatacgcgtgttgacgcccgcctcagtgcgctgcttgaagcgcgtgaagctgaaggcagtcttgccaggacgctttttatgccggatgcgccggcatccgggcccgcggatacaaacagtcacgccggtgaacaacctgagccgatcagtcagcctgcgccagcagacatgacagtatctccggcaccggtaaaagcgccgccgacaacaaagagtcgggcagcggaaccttccgtcagagcaacggagcctcccgtcctgcgggtcacgaccgtaccgttgatcaaaccaaaagcagccgcagcggccactgctgcctcaacagcatcctctgccggtgcccctgcagcagctgcaggcgggacagaacaggagctggcgcagcagtccgcagagcaggggcaggacatgcttccggccggcatgaacgaggacggtgtgattgaagatatgcaggcgtatgacgcctgggcagatgagcagacacagcgggatatgcagcggcgtgaggaagtcaatatcaaccacagccaccgccacgatgagcaggatgatgtcgagattggggggaacttctga

SEQ ID NO: 215810 - DNA, 690 bp, Klebsiella pneumoniae
atgacaatatctgagcctgtcaggtctcttaatacacatgaactgatgcctggcgatatttacccacatcctgcagtggggggaagttattccctgtcacattgcgaggtctgttctctcttcagtgaccacatcatgtatatctgcagcgcgttagttattcttctacttgttttcatcgcaggtgtctttttccaaaagttaatgacgtcttccacgggacgtaagcgagacacggcgtcagttattcccgatacaaagccagaagcacagagcaaaccggaatacttccatctttccatatgtgtggaaggcccggccagcacggatgactccgccttgtcctctcttgcctcccgtgttgtccgcgaagcagaaaatctgtatatccccggcgtcaatcgccgcgacagcgctgacgacgtgtttgcctggtccgtgcagactcagtttccttctgacaggctcttcggcacacggattttcccgtcgaccggctggtttgaacgtccggatatgattaaacctccggtgaaatgctactgcgtctgcctgcagtacacggctgaaacattgccatccacactgcatgccctggtcgatgaggccggacggcaagtggcgaagtcgtatattaaaggcgggcactgccctggctcagagggctattccttctgcataacctcttaa

SEQ ID NO: 215811 - DNA, 732 bp, Klebsiella pneumoniae
atgcaattaaataaattgatgactgttatggtcgtcagctctacgctggtgttatctggatgtagtgcaatgggaaccgccattaaaaagagaaatctggaagtaaaaacccagatgagcgaaacaatctggctggaaccttcaaataataagacagtttatctgcaaatcaaaaatacctccgataaggatatgagtggcctgcaggcaaaaattgccagcgctgtcacttcaaagggatatcaggtcgtcagtaaccccgatacggcgggctactggatccaggcgaatgtgctcaaggccgataaaatggaccttcgtgagtctcagggctggttaagccggggttatgagggcgctgtgactggcgccgctcttggggcggggattaccgcttacaactccagttccgcgggagcaaccctgggagtagggcttgcagccggtctggtcggaatggcggctgacgcgatggtggaagatgtgaactacaccatgatcaccgatgttcagatcgcggaaagaaccaaaacacaggttcagactgataacgtggccgtattacgtcagggaacatctggcgcaaaagtgcagacaagtactgaaacgggtaatcaacataaataccagactcgcatcgtctctaacgctaataaagttaacctcaagttccctgaagcccagcctgttcttgaagaccagctggcaaaatcgatcgctaatattctgtaa

SEQ ID NO: 215812 - DNA, 603 bp, Klebsiella pneumoniae
atgaaaacgattgctttgctacttattcagtgtatatcgtgcctattagcaggatggcgagtatcagaaactatttttatagtattagcatccgcgatgtggttgttggtgttcaaatatgttttcattaaagttggtacgaaaacaaaacgcccaataggtgatgttagtaatctttatcttgttctggccggagtctgttgtattgttaatcccattgcctgtttgatgagtattgttttatacccactttgggttatgaataaagcactaaagtttgcatctgtgaaatttagtaatgataatgaaagtgcattcgaaaatgggaccggcaggaattatgtcgggagaacgcaatcattgacgaccttaccatacaaggaaatgttctccgagcgagagtttatgagttatcagcttgagcattgttctgacggttcagtcaacctcgaccaacctaatagtacatgtagcagtgctatggggtcatatggaaatgagatatctataagtacccatgatattaatcctgcgagtgggcttcctatgattgaaaatgtagacgttgcaggaaacgtgtatggtatagatcggaatcattaa

SEQ ID NO: 215813 - DNA, 2823 bp, Klebsiella pneumoniae
atgcttgagatatatgccattgctggcggcgactggttacggggcaacctgaacgcgattgcggcgtttatggggaccagcacatggtcgactatagaaaagatgtgtatcgccatctcggtactcattgtggcggggaactgggtaaaaaaacacaacgtaatggaccttattggctgggtcttttccctcaccctggtctctatgctggttgtcattcgtacccctgtgcagatcatcgattacagtaacgttgcgcaggtctatgaagtcgataatgtgcctattggtctggcgattccggcgtcgctgacaacacgggtaggaaacgcgcttatccagagttatgagatggtcttcgctctgccggacagtgtcacgtacagtaaaacggggatgttatttggcagtaatctggtcgcgaaaagtacggattttttgtcacaaaatcctcagattacgacgctgttctccgattacgtacaaaactgtgtgatgggcgatattttcctcaatcataagtactcttttgaagaattactgaattcacctgacccgtataccctgatttttgcaaacccaagcccactgcgtggcgtgtttgataaaaacaaccagttccagacatgcgaagaggcctcacgggatctgaaatcggctcttgcgctggatactcagacaggcgggaaaacctggaactactatgttcgtcagctgtttggcggcaaacctaatcccgatctgcttttcagccagatgattggcgacagctacaattacttctacagctcgggacagagcgccgggcagattatccgccagaacgtcacgatgaacgccctgcgcagtgggatccagagttatgcggcccgcagcggggacaccgccagtctggtcaatatggctaacacatcatcccttgaaaagcagcggctggcacaggccacaatggggcaccaggcgcttcgcgcacttccactgatgcagaccgtcattatgggtttaatgattgggatgttcccgatcatggtgatggctgccatgtttaatatgatgacgctgcaggtgcttaaagggtatgtgtttgcgcttatctggctgcagacctggccattactgttcgccatcctgaacagcgcgatggcctactatgcgaagcaaaatggcgtgccggttgttctctctgagttgtcgcaggttcagctcaaaaactcggatattgcgaccaccgcgggctatattgccgtgatgataccgcccttgtcgtgggggatcgtgaagagcatgggggccgctttctccagtgcctacagccatttttcttcttcggggctcagtgcaacatcgcaggcggcctccggcgtggtggacgggaattactctttcgccaacatgcagatggagaacgtcagcggctacagctggggtaccaacagcacaaccagtttcggacagatgtcgcggcagctggcgaatgggggcatgagcacgcagacgcgggatggatcgatggtctgggacagtggtggtgcaatgtcaaaactgccggtggatatcaacgtcggtcgtcagatagccagtgcgcagcaacagatggcgcgtgagtcagatgtccaggccgaaagcgcgctgcatggctataacagcagcgtgacaagtgcctggaatagtctgcagcaatttggtaccaataaagggaacagcgcctcaacaacgaccggggccgatactaccgagtcttcgcaggattcgatggccagaagcaagatgatgaatgctgtagattcgtatgctaaagctaaccatattagccgtgatgaagcattcggccagcttatggacaagtcagtgagaggtgatgtttctggcgaggcttatgtaggagccagaggtggtgttggattcgagctcttcggtaatggcggtaaagctgaattcggtgggaggatgtcggcgagagggacagcaagttctggatctcaggacaatactactgagtcaggacgccaatctaatgctgacaatcatgataccagcagtcaggcagttaaagacttcagagagtcttctgattacttcatcaaccagaaatcaagccagtctggaaacatcactgataacaatgcatcttctcgggttgatcaattttctgcctctttggccagtgcgaaaaatagctatgaccagtacacgacgagcaaaacacgtagccatgagtatagtgaaatggcctcacgaacagaaagcatgagcggccagatgaacgaaaacctgactcaacaatttgctaatttcgtacagaaaaatgccccacaaaatgctgaagctattcttactgacacgtcttcacctgaaatcgctgcccaaagggagcaactggctcgtgaatttgtgaaacaacaggttgaacctaaagtcgatgaggcgtaccaggagggcagaagaaacattggcgcaaatatgccatcagtttctgaaggtaaaggaagcggtacagtatatgcggactacaactctcacggtgatagtatcgatgagatgaccaaaaatgcaggtatcaaaaatgatgttcaccaatcggttgaacacatgtttagcgaaaaccagcaagctcataaggataggcaagatagcatacataagcaggaggatgatgttcagaatgaacacactcgtctgaaaaaccaccataatttagaaggaaataaatttgagaaagaatacaatgacaaaaaggctgaacagagagcacttcctggagcggatacaagagacgaactcctagctaaggcccaggaatttgagcggaagcataaaccctaa

SEQ ID NO: 215814 - DNA, 1368 bp, Klebsiella pneumoniae
atgcgaattaaacttctgtcacttttctgcggtgccgcgcttggcctgtcatttagcgccgccgccgacgtgaatggcgacatgaataacttcttcaataagctcgggtttgcgtccaataccagccagccacaggtctggcaggggcaggcggcgggttatgcctctggcggttcgctgtatgccagaacgcaggtgaaaacgatccagctggtcagcatgaccctgccggatattaacgccggctgcggcggcatcgatgcgtacctggggtcgttctcctttatcaacagcgagcagctgcagcgctttggcaaacaaattatgtccaacgccgcgggttacttctttgaccttgccctgcagaccacggttccggagatcaaaaccgcaaaggacttccttcaaaagatggccactgacatgaacagcatgaacctcagttcctgccaggctgctcagggaattgtgggtggcctgtttcctcgtacccaggtcgctcaacaaaaggtctgccaggacattgccggtgaaagcaatatcttttcggactgggccgcctcgcgccagggttgtacggtgggcggcaagatggacagcgtccaggataaggccagcgataaagacaaagaacgtgtgatgaagaacattaacatcatgtggaatgccttatcgaagaaccggctctttgatggcaataaggagctgaaagagtttgtgatgaccctgaccggtacgctgatttttggtgagaacagtgagatcaccccgttgccggcacgcaccactgaccaggatctgattaaagccatgatggagggcggcacagctaaaatctaccactgcaatgactcggataaatgtctcaaggtcgttgctgatgcgaccgtaaccatcaccgccaataaggcgctcaaaaatcagattcgcgctttgttgagcagtatccagaataaagcggtggctgatgaaaaactgacagagcaggagaaagggtttatctccagcaccaccattccggtgttcaaatacctggtcgatccgcagatgctcggggtgtctaactcacttatttaccagctgacggactatatcggctacgacatcctgctgcagtacattcaggaacttatccagcaggcccgggcgatgatctcaaccggtaattatccccagtcgacaatggatatgatcatggaaaatctcaaccaggcgagtgtgcagattgccgctttccagtcccgtgttcaggtccagcaggacgccttgcttgtggttgacagacaaatgagttacatgcgccagcaggtctctgcccgcatgatgacccgctaccagaataactatcattttggggggaatctgtaa

SEQ ID NO: 215815 - DNA, 444 bp, Klebsiella pneumoniae
atgaacaaatatatacgttcgacgggactgtatgcgtttttatttccagccagtttaaaggactccgggcagacagcagcagaaaaaatagaacaactgaagccggaatttatccaccgggaaaggcgtctggaaatctatctggaattattcattgtgtttctcactgcaggtgctctgctgttatggataatgagatttttatttaatctctgcgtggatgactggatagccagcggtgacctgcgagtaaaagacctgtggaatattatgatgtacgccatcccttatgcgctgatcgctgttggggtggggttctttgttgccggagtgacattagcaatccgcaattttttcagttatcaccttaagaccctttttattctgagaaatgacaaagttaaaaagaatgctgtgcgtaatggaggacaggatgcgaattaa

SEQ ID NO: 215816 - DNA, 558 bp, Klebsiella pneumoniae
gtgaaaaacagcctgatgaacctcgctaagacgccgctggcggcactggctctttcccttgcactggctggggtggcacatgcgggaacgctcgatgaggtgaagtcgctctgggatccgcggggtatctccggtactgaaacggcctccccgcagagcgacactccccaggcggtgagcggggcatctcagccacgctggttacgactcagcaacggaaagcaggtggacctgcgcgactggaaagtggtgctgttcatgcagggacactgtccctactgtcataagtttgacccggtgctgaagcagctggccggacagtatggcttctccgtgttctcttacaccattgacggacagggtgatgacgcgtttccggaagcgctgccggcgcctcctgacgtgatgcagacctttttccccaatatcccggtggccacgccgactacgtttctggtgaacgtaaacacgctggcagcgtacccgatcctgcagggcgccacggatgcacagggctttatggccagagtggatacggtatttcagatgatgcactga

SEQ ID NO: 215817 - DNA, 240 bp, Klebsiella pneumoniae; identical to SEQ ID NO: 92395

SEQ ID NO: 215818 - DNA, 753 bp, Klebsiella pneumoniae
atgcgaacaatacatgccgccatgctggcggggtgcctttgctgcgccctgatgccggctttcgccaaagacgcgggctggcagtggtacaacgagaaactgaagccccgtgatgaggacaggaaagccgtaccagcggcaccaccgccgcaaatggatattctggagaaactcgccacactccaggcggccaccaaacggtcgttgtacgaagccattctgtatccatcgtctgaaaacttcgttaagtatttccggctgcagaactactggacgcagcaggcaggtttgttctcgatgagtgcgaagaaagccatgctggaaaaccccgaactcgattacaacctgcagtacagccactacaacggcacggtaaaaaaccagctcgctgccgactatgccgaacagcgacaggctatctccaccctcgcacagcactacggcgtgatgttcttctaccggggccgggaagcgatcgatggccagctggtccaggtgattaaaaattttcgcgaaacctatggcctgagcgtgataccggtgtcggttgacggagtgattaaccccatgctgcccgacagccggacggaccagggccaggcagagcagcttggcgtgaagttcttccccgcgatgatgctggttaacccgaaaagtggccaggtgaagcctctcagttacggctttatcagtcaggacgacctggcgaaacagttcctctatgtctccagcgactttaaaccgaatttctaa

SEQ ID NO: 215819 - DNA, 327 bp, Klebsiella pneumoniae
atggaagagaaaaaagcatacgggctggtcatggtgtttgtcggggtgtttgtctttctcctggtcagcattatgtcgtacagcctgtggcgggacaggcaggttaacgcatttatgacaaccaaccgggcctgggggatccagtgcgacactgtttctcaggccgcgtgggtgatcagggacggggagcgggtggaccttcagataaattatctgcctctgtactgcagcggttatcgctttgaagcccgtgatgatgcaggaaaggtacagcgccagctcgataaatacagtgtctatcagcatctgtcacgccagccgcattaa

SEQ ID NO: 215820 - DNA, 249 bp, Klebsiella pneumoniae; identical to SEQ ID NO: 185373

SEQ ID NO: 215821 - DNA, 255 bp, Klebsiella pneumoniae
atgaaaatgagttttcacaaaaagcctgttattgattttgtcctgagattaacgctaacaataatcattatttctccggtgatttatttctcctgggatgccgtcaaagggacgtcgggaagtgattatgtcgaaagtgtggtctttattcttatggctgggtttgccatgtctgtgtgttatttgtttttctcagtcctggagaaagttataaatgcaaggaaaagcaaagatgaatcgatatatcacgattga

SEQ ID NO: 215822 - DNA, 1956 bp, Klebsiella pneumoniae
atgaagacggttatttccgtgctgaccgcgcatttttttgtcctgagcgccttcatctggctggcatcccccgcctgcgctgacagtggaagcgactataaagctggttcggattttgcgaaacaggtgcagggcaatggtctgaactcactgaaaaatttcagtggtgagcaaaacctgccggggtataccgacagccctgatcagacaaaatactatggcggcgtcactgccagcggagacagctctctgaaaagcgattcagccctggagttcagccagggagataccggcaaagcgattactgagtcgttcacgaaccggccaccggatcagatatctcaggatgcgccgtttattcaggccgcaaaggatacagaatcccgcgccgacagcattgtcggcgataccgggcagtcctgtaccgcccaggttgttaaccgcagcgagttcacaaaccatacctgcgaacgtgatctgcaggtggaaaatttttgcacacgggaagcgaccctgaaggataacgccaccacgcagaaagttaaccgaacctatcagcaggtggtgacgctgaattatgcccggagtacccggcaatggagtggcaacctgacgatcccgaccaacggtcgtctgctgaatgcctcggtggatggtgagcctctggtgatcccctggattgaagaatgcgacgccgaagggaaggtgcgggatagctgcaagagtgcagtcagtgaaagcctgaccctctttgaacgaacgttccccatagatgtgatcagttggccacgttcagaatcgatgtgttcaggcggtcagaacacgcattgtacgaaatatacctatgacgggcaggggaagattcatcagtcgtttggtgtggacaaagcggttactgcaggccagaactttgccgtaagcaaaacatcacggaccgtatcatcggccagccagaaacccgtacaggtcacggtcaccctggtgatggaagaaaccgaaaccgtctacgcacctgaagtcgtctgggtggaaagctgtccgttcagtaaggatgaaggaaaaaaaacgggggaggaatgtatcagcccgggaggaacgcgaaccatcaccctcggaggcagggattactcgttcacggaagcctgctggaaatataaggatacctggctcacgcaaccggcggacaacggctcctgtgaaagcctgatgaaaaatacggcctgtactctgtcatcccgccagtgcgccttctccagcgaggaaggcacgtgcctgcatgaatatgcaacgtattcctgcgaaaccaggacgagtggcaagcaaatgatctgcggcggtgatgtcttctgccttgatggtgaatgtgacaaagccacgtccgggaagagcaacgactttgggcaggcggtgtctgagctggcggcactggctgccgctgggaaggacgtcgcggcactgaacggggtggatgtccgggccttcaccggaaaagcgaagttctgtaagaagtttgctgccggcttcagtaactgctgcaaagacagcggctggggccaggatgtggggctggcacgctgcagcagcgaggaaaaggcgctggccaaagcgaaaaaagacaagctgacggtcagtatcggggaattctgctctaaaaaagttctgggtatttgcctggagaaaaaaaggagctattgccagttcgactcaaaactggcgcagatcgttcagcagcagggacgaaacggtcagctgcatatcggttttggcggcgccagcagtcctgactgtcggggcattaccaccgcggaactccaggggattgattttaacaagcttgatttcaccaactttatggacgacctgatgaaaaatcaaaaaataccggaaaacgatgtgctcaccaataagaccagagaacgaattaaggaaatcatgagtcagcaatccgcgcaataa

SEQ ID NO: 215823 - DNA, 639 bp, Klebsiella pneumoniae
atgaaattaatgaatctgttgatggtcatgcttttgctgaccgggcgagaagtgttggctgaaacttcctctgttacagacagagaatggctgaagcagcaggaagacctcagcgaacagctgcgccagcatccggataaacagctgcagcaggagcttgaggcacaaatcagccgtaatcctctgcccaaatctgaccgccagtttatcgataatctggtcagtcagcagaaagcggcgaatcaggaaaagccggcagaaggggcgctgtactttgtctctttctcgatacctgaagaggggctgaagcggatgctgcacgaaacccggcagtacggcattccggcgacactgcgtgggctcgtcaataacgacatgaagaccaccactgacgcggtgctgcagctggtgaaggatggcgtgaccgacggggtgcagatcgacccgacactctacacgcagtacggcatccggagtgtgccgtctctggtggtacggtgtcaggccgggtatgacgtggtacgcggtaacattcacatcaaacaggcgctggagaaagtcgcacaaaccggtgactgcgcacaggtggcccggcagatgcttgatgcgccctcgaatgccgccgggagccagccatga

SEQ ID NO: 215824 - DNA, 993 bp, Klebsiella pneumoniae
gtgaaaaccctgacgctttttctgagtgccctcatgttgtgggggtacagcctcagtgcggctgctgacccctcctgtgagggccgattcgttaacccgatctccgatgtgtgctggcgctgcatatttcctttatcacttggcagcgtgcaggtcggcagaggcgaagtgccggatacaactaacccggctagccctatacagtattgcccggccccacctcctgtgtttgttcgtattggtctggctatcgggtactgggaaccgatggctatgaccgatgtcagccgttcccctggatgcatggttaatctggggggcttcagtatcaatcttggtaaaacgggtatggggacggcaaaaaaggatgacaaacaggtaaacggagcgttctaccatgttcactggtacaaatacccgctgacatactggttgaatatcatcacgtcagcaggctgcctggaaggcggtgatatggatatcgcttacctctctgagattgacccgacctgggtggacagcagtctgaccacgatccttaatcctgaagccatattgtttgccaacccgatcgcacagggggcctgtgcggcagatgctattgccagtgcattccacttaccgctcgacccgcttttctggtgtgccggatcgcagggctcgatgtacccattcagcggatgggtcagtaatgaatccagcccactgcagtcctcggttctgctcagtgaacgtatggcttacaagcttcatcggcagggccaaattatggaaacggtcggcgccgatactgccgtttgttacgaatatccgtcccctattattccgaaagaacggtggcgttatcagatggtgaacatgtacccggacagcggccagtgccatcccgtggggcggagcgtgatgcgctgggaggccggcaaaaatccacccaacacccgcaagaactacggctatctgatgtggcgtaaacgcaattgtgtcttcctttga

SEQ ID NO: 215825 - DNA, 2640 bp, Klebsiella pneumoniae
atgagtaataacatcatcgatgccgtcacccaggctgtgaattcactggtatcagcactgaagctgcccgacgaatccgcgaaagccaatgacacgctgggcagcatgaatttcccccagttcagccgtattttgccctataaggattatgattccgcgaccgggctgtttattaataacaaaaccatcggttttatgtttgaggcgcgtcctttacccggtgcggataaaagtatcgtcgccacactggagcatttactgcgcagcaagcttccccggggcgtcccggtcagttttcatctggtctccagcaaactggtcggcaatgatatcgactacggtctgcgtgaattccgctggagcggtaaacaggctaagaagtttaacgccatcacccaggcctactatctccgggcagcggagacgaagttccccctgcctcctgcactggatttacccctgacgctgcgaaactaccgcgtgtacatctcctgctgcgtgccccggaagaaaaactccaccacgcaaattgtcgagatggagaaccagattaagatcctgcgggcgtcactgggcggtgcctatattccgacgcgtatccttgatgctgccgggctggtcgaactgatgcgcgagctgataaacccggacccgcacgagatgtaccgcgtaccgtataagctggacccctatcaggatctgaactatcagtgtgtcgatgacagctttgatatgcaggtcaccgccggtcatctgaaaattggccgcctggggcgtgacgggaaagagtgcgtaacccgggtgacgagctaccatctggagagtgatccggaaatggccttcctctggacctccgcggataactacgccaacctgcttaacccggagctctccatctcctgcccctttgtcatcacgctgacgctgatggtggaggaccaggtgaagacccagaatgaagccaacatgaaattcatggacgtggagaagaaaagcaaaacctcctacgcgaagttttttccgaacgtgataaaggaaatgcaggagtggggcgatatccgccagcgactggcgaccaaccagacctccctggtgtcctacttctttaatatcaccacgtacaccgcagacagcacagaggcctctctcgccgctgaacagcaggtgctcaacagctaccgtaaaggcggtttccagctgatcccggcccgctaccatcacctgcgtaactttctggccatgatgccgttcaagtgtggtgagggcctgtttaaagagctgcaggcggcaggcgtggtgaagcgggcggagacgttccaggtggctaacctcctgccgatcgtcgctgacagcccgctggcgccggcgggactcctggcgcccacctaccgaaatcagctggcgttcatcgacctgttctacgagggaatgaacaataccaatttcaacatggcagtctgcgggacgtccggggcgggtaaaaccggtctgattcagcccctcattcgcagtgtgctcgactccggcgggtttgcctgggtgttcgacatgggcgatggctataagtccctgtgtgaaaacatggggggcgtatacctcgatggcgataccctcaagtttaacccgttcgccaacgtgctggatgatgctcactttgacatgtcagcagaacgtatacgcgatcagatgtcggtgatggccagtccgaacggcaacctcgatgaagtccatgaaggtctgcttctgcaggcagttcaggcggcctggttaagcaagcgtaatcatgcacgcgttgatgacgtagtgcagtttttacaggacgcgaaggacagcgatgaatatgctgattccccgacaatccggggccgtctggacgagatgataatcctgctcgatcagtacacggtgaatgggatctacggggactatttcaactcagataaaccaacacttcacgatgacgcccggatggtggtactggagctcggtggcctggagtcgcggccctctctgcttatcgcggtgatgttctcattgattatttacatcgagaacaggatgtatcagtcaccgcgtggcctgaaaaaactgaacgtcatcgatgagggctggaagctccttgatttcaagaatgaaaaagtggggcagtttatcgagaaaggctaccgtaccgcgcgtcgacataccggcgcatacatcaccatcacgcaaaatatcgtggacttcgactccccgaccgcatcgagcgctgcacgcgctgcctgggggaactcgtcgtacaaggccattctgaagcagtcagccaaagagtttgccaagtataaccagctgtacccggatcagttcagcaagctggagaaagacatgattaacggcttcggttcggccaaagagcagtggttctcctcttttatgctgcaggtggaagcgaactgctcctggcaccgcctgttcgttgacccgctcagccgggcgatgtactcctccaaaggcccggattttgagtacatgcaagcgcgccggcaggagggggtcgatatccacgatgcggtatacggactggcgtgccgcaactttaaagacgaaatggcagagcttgaatcccgaataccggtgaatgacatggaggataaacagtga

SEQ ID NO: 215826 - DNA, 393 bp, Klebsiella pneumoniae
atgatgctgttttttagaaagtatggttttttgtttatccctccagtctactggctcatctatctgggagtcaggctgacgtacaatggactggcaggagagttttctcctgatttctttcagggtattcgacatgaaggcctctatattatctgtagtttgtgtgtcttttattttttctgcctggaggtggaaattagtgatggggagttctcagcgaaccttctgttcctgattgttttctttcatgtggttttattatttatcactctgcttatttgtttgtggcaaggggcgatgttgttggatgcgatctttatgggccagattattgcctccatatgtttattgtttttcattcctgtgctttccattataagaaggagcttctag

SEQ ID NO: 215827 - DNA, 405 bp, Klebsiella pneumoniae
gtgaaagcgtactatatacttggacataacgttgcatggcttaacggtatatgcctgattctttttgttattggtgtggtcggtgcgctggcaatggttgccatccctgaaaaattcaatcttcgagttaacagaggcgatacattcatatactgtgcgcttatggcggtggttgggttttgcgggatgttcgttatctccattcactcattttcgatggatgaacttgaagcaggtagacactggaaaaacgactgcaatacacttgaagtaaacataccgacaggcgcttttaccagccctgtaaataaactggactgtgatggcatcatcattaatgtgcctggtaggcagtattattcgtatatccatcagtgggaattatataaagctaacaaaaaatga

SEQ ID NO: 215828 - DNA, 339 bp, Klebsiella pneumoniae
atggctgaatctctgttaagttttgatagtgatggttatgtacgactgttttttgcaatggcaatcattatctgtggttacggctatgtaattatgggtgtttttataagagatgcgctttcctatattttaatgttgtttgggcttacaggtgtcagtgctttattttctttcatggtattcatggataaaaacatgtgggccggttctcctgatttgactctgtcagtaataacgggattttttacagccacagtgatcttttatatgttttatgtcttgatttattcctttgatcggatggggcaggtgaatagtaagaccgatggtcagtattaa

SEQ ID NO: 215829 - DNA, 219 bp, Klebsiella pneumoniae; identical to SEQ ID NO: 98222

SEQ ID NO: 215830 - DNA, 291 bp, Klebsiella pneumoniae
atgagtgaattattcaaatggacgatggctctggtgtttttattgacaggttatagtctgcttttttctactgacagtaatacagtgcccgaagttctttctcatcactggaaaaatgactgccggttgcttgagactaatattgataaagggtttttctctccagcgcaaaatcgacttcagtgtggtgatgttattgaaaatgtaagcaagtctgattatgacagagcgatgagtggcgataagcaaacaactctcgcagaggcaatgaaagaaatattcattcgttaa

SEQ ID NO: 215831 - DNA, 558 bp, Klebsiella pneumoniae
atgctgttaattcctctgggcagcgctttgctcttaaccgggtgtgcgggcacagagaccgaatttcaatgtaatgccacgacgtcagatacctgtatgacgatggagcaggcaaatgaaaaagcgaagctgaaagaggaacgcagtgatgcaaagccggctgcggccgggttgccacaactggctgagggtaatttcagaaccacatcagttaattcgtacccgctgccgccacagccaaatttaatgcgtcccggagcaacgacaactgcaccgactaatacagtaacgtcaggattgctgacgaataacaggaaagtcagtacgccggtgtatcggcccgtggctgtagcgccagctgttcgaccagtgagtgtatcaacttttacatcgccggtgacggttcctggtaattatccccggccattaagaaaaggtgaggagacaacgtcattatggatagcgccgtatgtggattcagatgatgtatatcaccagccagcaacggttctttttgtcgtaaaaccatcggcgtggggacaacctcgccttaattga

SEQ ID NO: 215832 - DNA, 426 bp, Klebsiella pneumoniae
atggctaagtctctcattactgctgttctgtcagcactgcgctgggctcactggctggttaagtgtgcggtggtgtatccgctggccatgatgatgttactggttgttctggtgttcctgacgggaccgtacacgttcggccagacgctggtgaaaaccgtagagtctgtgcagcaggagggatatgtcattcaggactgcacggggccgaaagaacttaatggtgatgcggtgaacgctccactgcctccggttttacaggaagactgcaccaccgtcagtacggatgcggcagggtatgcagcatatatcgaccagagctatacgcataatattctctggctctggctgctgatggcggtggtgtttaccgggatggctgtggttttccgtaggactcctgtccgcaggggatttctcgggtga

SEQ ID NO: 215833 - DNA, 1425 bp, Klebsiella pneumoniae
atggccaacttcaacacgctgatcaaacgtaagcaatatatctggctgggactcattctggcgggcggcgcggcagcagtcggaggcgggctgtatctgtcagatctgaacatgagctctgatgaggaagccccgactcagggcgaacccgcaccggatatgaccggggtggtcgacagcagcttcaacagtaaggtggagcagcacgcgacaacagaaatgcaggcgactgccgctgatctcaacaagcgttttgactccctgcagggggaagtggacctactgagtaaggcgcgaaccgctgaccagatacgtatcgacaaactcagcagtgacaatgaagccatgcagaatcagctgaaggcgctgggcgtgaaaccggctgtctctggtggcgagcccgcgccgactcctccgtcaccgccacccggtccggaaggggagccgcagccagccagttatccgccgcaaaccggcgccgcggtaccgcctccgacggcattctatccggggaatggtatgacaccgccgccgcaggtcagctaccagtctgtaccggtaccaaaccagatacagcgtaaaacgttcagttacgacaaaggaaaaaaaacgaagtcattgccgtacattccgtcggggagctttgcaaaaagcatgcttatcgagggggcagatgccaacgcgtctgttaccgggaatgaatcaactgtaccgatgcagttgcgtatcaccggtcgcgtggaaatgccaaacagcaaaacctacgacctgacagggtgttttgtgggccttgaagcctggggcgatgtctccagcgaacgcgccattgtccgtacccgcaatatcagctgtatcaaaggtgataaaaccatcgatcagcccattaacggccacgtttcctttatggggaaaaacggggttaagggagaggtggtgatgcgtaacggaaaaatcctcggctgggcatggggggccggttttgttgacgggattggtcagggcatggaacgggcttcacagccggctgttggcctgggggcaaccgcatctgttggcgccggtgacgttctgaaaatgggggtcggcggtggtgcatctaaagctgcgcagacgctgagcgagtactacatcaaaagggccgagcagtatcacccggtcattccgattggtgccggcaacgaagtgaccgtcgtgttccaggatggattccagctgaaaacgattgaagaactggaagcggaaaagaacgggcaacagcaggctcagaatcaggaggcggagccggcaccgcaggctgatgcacatcatcagtcgggcggcggtatgaacggattcaatactgacgagatgctgaagaagctgggcaaacttgatccgcgtgagttctctccgggcgcagcgccgcagggggaaaataatggctaa

SEQ ID NO: 215834 - DNA, 741 bp, Klebsiella pneumoniae
atgaaaaaaattaacccgttatttatttcaggttgtctgctgttggtcgcccctgcgatgtcagcgacccttagcggtacgctggcgccgacagtggttcccctgaccaatggcggtcaggcaaatattgccgtgagtaacaccgatccgaatctgttcacagtacctggagatcgcatcacggcgataaacagcctggacggcggcctgacaaaccaggagcagaccgacagcggcggcgccattctggcgaccgtcagtaaaaaaccattcaccttcattgtggaaaccgaacgcgggctgaacttctccattcgtgccgtgccccgtgccggctcaggccggacaattcagctggtcagcgagctggcgggtacccccggtccggcaaaagcctgggaagagtcgaatccctatgaatcgttactggtttcgttgaatcgcgccgtgcgtcagggcagcgtacccgatgagtatcagtctgtccccgtcacttctgaagtgctgcaggtgccggctggtctgcgcgccactgccgatcgggtctgggtcggtcatcacctgaaagttgtccgttacagtctggacaatgtctccctgtcggcccgaatggtgcgtgaaagcgatttctggcagcccggaacacgtgccgtcatgttcagtaccccggcgggcctgctgactgccggtggtcgcatgcagatctgggtcacaacgtcagatgaaggagtgaagcgctga

SEQ ID NO: 215835 - DNA, 567 bp, Klebsiella pneumoniae
atggaacatggtgccagacaaaataccacccgcgttatcgctgtgggatttatcagtctggggacactcctgaccctcagtcttgcaaccaatattatccagggcataaataattaccgtctgcagacggaacagaaagtggcggtgacaccgatgttattccgtgccccctttgcggtgtctcagaaccaggctgacgcttcttatattgagcagctgggcctgtcctttgttgccctgcgtctgaatgtcacgccggaaacggttgatgcccagcatcagcagcttctccggtatgtattacccgctgcgcagaacagcctaaaggtccagctggctgaagatgcgaaacgtattaaagacaataacgttaatgccaccttttatatgacctcgatccgtgcgtggccggcagagaaccgcgtggatatccggggtgagctgaaaacgtggattggggattccaaaccctacagtgaaattaaaagttatgtcattcagttcagtcgtgtcgatggtgtcagctggctggcgcgttttggagaaataaataatgaaaaaaattaa

SEQ ID NO: 215836 - DNA, 306 bp, Klebsiella pneumoniae
atgacgggagacgaattaaagcgataccgtttcccggaaacactgactaaccagtcccgctggtttggcttatatctcgatgaacttatcccggccgtgatttgtctcggctggggtttctggaccagcaagttcatttttggcatagcttcagcggtactggttttctggggtatcaagaaactgaaaaaagggcggggcagttcctggctacgcgacctgatttactggtatctgccaacctcccttcttaaaggtttctttcatgatgttccggactcctgtttccggcagtggattaaataa

SEQ ID NO: 215837 - DNA, 369 bp, Klebsiella pneumoniae
atgaatgctgtattaagtgttcagggctctgctgtctctgaaaaaaccaaaccgtcttttatgtcccgcgttttcaataaaaagaaagccctgaaagtcgctaaagttgcgctgccggttgctgctgtggcggcgttcttcccggatgctgcgatggccaccaccacggcaaccgacctgatgaagtccggggatgcgaccgttaaaggcacgtttggtaagcaatccagcgtagtcaaatgggtggttctggcagaagtcgtcgccggtggcatcatgtacatgatgaccaaaaacgtgaagttcctgtttggcttcgcgattatttccacctttataaccatcggtatgtcggtcgccggttactga

SEQ ID NO: 215838 - DNA, 720 bp, Klebsiella pneumoniae
atgtgtgcgaaggatcgtagtcatattgctgtgcgcagtcaaacagattccattcattctatgcgcgagatgcttaatatttcatcttgccctgcttttattcgtgattcccggggcgaagtaattcacaccagcccaacctttgacaaaattttcttaacatctggtggaactggagcatttgatacacccagagcacctggaagctggtttctggatctctccctggagatcaaactggaactgatgcagtcagaactgaaatcgttttcagaaggttctgctgtacttgttaaaaatatttggttggcaggttcactttggactgtttttattgaaacgttctcgattaatgaagataaatacagtaaatgggtttttataaatgaagatgaaccgatgcctcatccttcaatggaatacaatgacttttctataaagatgcaaagatatatcgaaagaattcagcgttcagcaaagtctgactgggctatctttaatctgtatgcggttgggttttctcatgcatctatttcgaagattacaggtgttggggtgcaaacctcaaaaaatacagttagtaaaataaaaaaggaactgagctttgataatcgtgactatatcataatgtcatcgatctatactctaagttatggaaagtttatatcgaatgtggtttcgatattaaacgatggtgttaattttttgttaaatcaatag

SEQ ID NO: 215839 - DNA, 384 bp, Klebsiella pneumoniae
atggccagggtacaagcttatgctagtgatgaagttgcagagaaaattaatgcaatagtggaaaagcgaagggctgaaggggcaaaggaaaaggatgtcagtttttcaagtgtcgcttcgatgctccttgaattagggcttagggtttatgaggctcaaatggaaagaaaagattcagggtttaaccaaactgagtttaataagattttgcttgagaatgtcatgaagactcagtttaccgtatccaaacttttggctattggctctctaagccctcatgttacaggtgatgaacgattcgagttccgcagcatggtgagtaacattcgagaagatgcaaaagatgttatttctcacttcttccccgagcaggaagaagagtaa

SEQ ID NO: 215840 - DNA, 486 bp, Klebsiella pneumoniae
atgaagggagcagcgtttggtatcatcctgtctttaataccattgtcatcaatggcagcagactgctttgatatggctggcagggattacaaaattgatccggatctcctgcgtgctatatcatggcaagaatcacgatttaaaattgatgcgattggtcgtaatcctgttacgggttatggatcaggcttgatgcaaattgactcgcagcatttcaacgaactgtcgcgatatggaataaaaccggatcatcttattagcgatgcttgtcttaacatctacaccggagcctattatctggctcaggcgtttaaaaagtggggcgtttcgtgggatgcagtcggggcatacaatgcaggcttcaaaaagaccccgcgccaggcagcaagacgttacgagtatgcgaagaagatccattactactacacggctatcaaagcaagcaaacgaacttcttctaaagatcagaaaatcgccatgaactaa

SEQ ID NO: 215841 - DNA, 822 bp, Klebsiella pneumoniae
atgcgtttagcatcccgatttggacttactcattccattcgtcaggaacgcccactgactaacgatgaattggtcaaggttgtaccttctgtgttttcagaagaaaagcataattcacgtagtgatcgctatacctatattccaaccattacactgctggataaattacgtgaagaaggttttcagccattttttgcctgtcagtcacgagtaagggatgaggataaacgggggcatactaagcatatggtaagacttcgccgtgaaggggtcaataaaggaacagaagtacccgaaatcattcttcttaactcgcatgatggatcgtccagttatcaaatgatcccgggtatgttccgttttgtatgcacaaatggccttgtgtgcggtacgtcgtttggtgagattcgtgtacctcataaaggtaatattgtgggaagggttatcgaaggtgcttacgaagttttgggaattttcgataaaataactgaaggcgttgatgtcatgaagtctattaccttaaccaaggaagaacagcgtctgtttggacaagctgcattaacctaccgatatgaagatgaaaataaatctccggtcagtattgaacagataattcatccgcgccgttatgaagataaaaaagatgacatctggactacatatcaaagggtccaggaaaatctgattaaaggcggtttgcctggccgaactgaaaaagggaaaagaacaacaacccggccagtaaaagcaattgatggtgatgtcaaactcaataaggcattgtggttaattgcggagaaattccgcactcttaaaggctaa

SEQ ID NO: 215842 - DNA, 414 bp, Klebsiella pneumoniae; identical to SEQ ID NO: 109942

SEQ ID NO: 215843 - DNA, 279 bp, Klebsiella pneumoniae; identical to SEQ ID NO: 198457

SEQ ID NO: 215844 - DNA, 225 bp, Klebsiella pneumoniae; identical to SEQ ID NO: 102183

SEQ ID NO: 215845 - DNA, 213 bp, Klebsiella pneumoniae
atgaaagtatacggccatcaacactcatcagaggctttcttccgggaaaattccccatcctgttttgaaccaaaagcggaaaaggtgatcgcttttcatggaaaggatgccagttacgcctataacgtgctggccgatctgaaagcagcaggtgcttcatatacgcgccggaatatcatcgccgatatgttccgccgtctgggtgtgaaatga

SEQ ID NO: 215846 - DNA, 357 bp, Klebsiella pneumoniae
atgagcacacaaaacgtcaacgaaaaaccctccaccaaagaaagcacaaccctccggactgacggttttgtgcgcaacattcattcccgaaacccgttcgatgttatccgcgccgatgtagtgcttgaacgtatcgagaaaaaggctggtcggagctgcgggatgcattacgagctgtatcaggcccatctgctgggtggtgcgctggattatctggatgcgctgccgttgaaagaccgtccggtgttaatgggcgctgcggcaaagcgcggctatctgctgacgctagccgaagaggaacgcgcgctggaagcacgggatgtactgatgagtgaactggcggcaaacgactgctga

SEQ ID NO: 215847 - DNA, 351 bp, Klebsiella pneumoniae
atgaaaaaagaaatctcccgcaacccctctttcacgccttcgcctaagctgcgagcacatctgaactcccacagggaaggggtgactgaaaggctgaataatatctttgatcgctatgcgcatctggttcgggtctgtgcccttcctctcgatgacgacgaaacacaggttctgcttaatgtgctgagtggctccgttgtggaacccgcctttattgaatatctggctcaggaaattcgggactcggatgattatctggaagggatacccgcagctaaatcactgtacgaaaagtgtcagtcagcgacctatccgcaattgctggccaccgtcgaacgtctggaacgataa

SEQ ID NO: 215848 - DNA, 273 bp, Klebsiella pneumoniae
atgaacttcacgataaaatcccgtaaaaccggcgaaattttcagtttttacgcacccgagagtggcggttatgtccacctggagtccccgggacactctggtaacacaggtgctcagatttgctgtggtggagggttcatggggagtacgctttcctgtggcgcttctgaggacgatctggccagtgttgcccgtaaatggtaccgacagttcgtgagggagcggcgcaaattcttaatgatgtcgggccagtattctgaggataacccatga

SEQ ID NO: 215849 - DNA, 162 bp, Klebsiella pneumoniae; identical to SEQ ID NO: 139499

SEQ ID NO: 215850 - DNA, 375 bp, Klebsiella pneumoniae
atgaggtactggttgctcgttatcttaatgaacgtgctgttctggttgatcgtgaagcatgttgctccggaatggtatggttcccctggttattatgcaggccaaattatctgcacactaatagctgcggtcatcacatggcgtgatccgcctgactggttagatggaatcctgctcggcgtaataaaattcggcgttctgattgccgggattatattctttgtctggggcatcgggtacaagctggcattctgggggcaacatgatcctaataccatatatgcaagtgcaaacgatgttattttgcctaatcttgcgctgggcacgggcgtcttgatcgcgggatgggtatacattagatatttaaagcgctaa

SEQ ID NO: 215851 - DNA, 327 bp, Klebsiella pneumoniae
atgaagtggcgctattctctgcgctggaaactgccgcacaggccctgcccgggtccacgggaactgatttccgttgtcgtggaggctgggcaggcggcacctgaagaggtgatgtcacgctgggtggctggctcaggttacgctgtatgcgtggattttctcggccagaaacagatccaacgctggagcgatgaacggaaagcagcggtgagaaggcgcaacatgcaggcacgtattaatcgtgttgcccctttgtttgccgacgagttaatcgagcgtgaactggctgcgcgtccggagtatttcaatggcaagtccgcccgatga

SEQ ID NO: 215852 - DNA, 729 bp, Klebsiella pneumoniae
atgatcccgtcatccagtgctcttgtatccctgaaaccagcccgtcaggcagcgctgcaggccatcatgacggtggaagaggctcgccagcgcggcgcacgtctgccatcgatgccacacgtccggacattcctgcgcctgctgacaggctgtagccggattaacagtgacgttgcccgccgtattcctggccttcaccgtgatccaaaagaccgcctttccagcctgaaacaggtggaagaggcgctggatatgcttatctccagccacggggaatactgtccgctgccgctgacaatggatgtgcaggctgaactttttccggaagtccttcatacccgaacagtacgcaggctaaaacgtcaggactttgccttcacccgaaaaatgcgccgtgaaacccgtcaggtcgagcagtcctggttactgcgtcagaacctgctgggacaggctgtcacagaactgaattttcagtcaccggaaaccgtctgcacctggtacacccggtggagcgacgagtttgacgcggcagagcttgcagcaccgttctggcgctggcagtcgcgattcgcatcgctgaaggaacttgactggcttcgcatcagcggtgagccgctgcatgcagtgatgtacgaaattccgtttattgtccgggaaacacctgagcatattcgtgttgctgaacgctggcaggtgccaaataagctggctgatcggagtggtgtatga

SEQ ID NO: 215853 - DNA, 432 bp, Klebsiella pneumoniae
atgaaaacgttactgactctggatgtcctgaaaaccatgtcttctgatgagctggaagactaccgcgccgccggtgaagactttcgccgggagctgagtcacgctgtcatgcgcgatctgacctcaccgtccggctggtccgtgaatgccgaataccggtgcgaatttggcggcttctttcctgtccagatccgttttaccccccctcatggtcactttgatgtggcggtatgcagtccgggggagctgaatcctcgctggatagtggtctttgttacccgtgacggtcagccgttctctgtcgttcgcgtgatggatgcattcaaccctgaactcatcacccatactctggaactcatcgagtgtcttgacgccggtggctactcgtttgccagtatcatcagcacgctgtcacaggagggcgcacaatga

SEQ ID NO: 215854 - DNA, 2058 bp, Klebsiella pneumoniae
atgtctgcaacagagtctaaggtaaaaactgcaccgaaaaccagcaaaaaaacgcttaagtctgccgaagctgaggcgcttaaagtggctctcgatgccgcacaggtcgagtatgtcccggtgacggcactggtgaagtctcccctgaacgtcaggaccattccctatccggcggagaaagtctgttcaatggcagattccattgaagccattggcctgttgcagaatctggtcgtgcataacctcccggatggtcgctgtggtgtggctgccggtggtcgtcgcctgaaagcgctgcagctcctgcagagtgaaaaccgtatcgatgccggatatcaggtgatggtgaaaaaggtacctgatgaactggctgttgcggcatcaatggcagaaaacgaacagcagatggcaatgcatccgtctgaacagatcgccgggttccgcacactggcagagcaggggaaaacccccgcgcagattggcgatttgctggggttcggtacgcgtcatgttcagcgcatgttgaaactgaccgaactggctcccgaaattctggcggcgctggcgaaggatgaaatcaccactgaacactgtcaggcgctggcgctggagaacgatcaggcccgacaggtcgaagtactggctaccgcgcgtaaacgtggatggaataacgaaccatcggttgccactatccgtgacctgattactaacgaagaagtctccactactggcaaaaaattccgctttgtgggagaggccgctttcagccctgatgagatccgtgttgacctgttcagtagcgaaacaggagggtttgtaaaaagtgcttccctcgatgccgccctgctggaaaaactgcagaacatcgcggagcacctccgcgaagcggaaggatggtcatggtgtgatggtcgtcttgatccgatttctcactacgggaaggacactaaaatatggcgtctgcagtctgttccaccgattgaatattctgagacagaatcagaacgtcttgcggagctggaagctctggaagctaagtatgaaggcgagaaccccggcgtgaatgatgacgtcgtggccggggctctggaagccgtctgggaagaacagcagaccatcgcgcaccgtgcaaaacaccgggcatggacggatgaatataagcagacctccggtgtggtggtttcctggaatggtcatgaggtgacggtgcagcgtggcgtagtactgcgcgccgatgaaaaaatggaggagaaggatgcatccaccgatcaggctcctgaaaaagtcgatccgctggacgccgtcagtgtcccgttgctgacccgcctttcttctgaacgcacactggcggttcaggcggccctgttgcagcagccgcagaaagccgtcgcgctgatggtctggaaaatgtgtaactcggttttccataccacaacgtccgtcaaagagccgttctgcattagcgtgagtgtgtcgcattacgcgctgacccgtgaagcacctgacggtgaaaacagcgttgcgtttcaggccatccagtcagaaaaagaacgccttgaagccctgctgccgggaaactggcgaaaggatatgaccaccttctttacgctcgatggcgaaaccctgatggcgctgatggctttctgcacggcctgttccatagatggtgtacagggcaaggatgaatttggtcgtaaacaccagagttcgctggatggggtggaaaacgccattcagtttgaccttcgtgactggtggaaaccgacggctgataaccttttctcgcacatgaagctgccacacattgtacaggcactctctcaggccggactggctggcgcagcacaggacgccgcgaagatgaagaaaaaggatgccgctgaacatgcagagcacttcctctcaaaaatccgttgggttccggaatggatgaccagtgctgacaatcagaaacagcttgccgcaaagtctgaactcagtctggcaacaagtcagaacgataccgacgctgatgccggcgacgtcaccgactataacaacccggcctgcgccgcctga

SEQ ID NO: 215855 - DNA, 249 bp, Klebsiella pneumoniae; identical to SEQ ID NO: 209381

SEQ ID NO: 215856 - DNA, 543 bp, Klebsiella pneumoniae
atggcagcacgtggcgttaacaaagtcattctggttggacatctgggacaggacccggaagtgcgttacatgcccaacgggggcgcagtggtcaatctgacgctggccacgtctgaaacatggcgtgacaagcagacgggagagatgcgcgaaaacaccgagtggcaccgtgttgtcatgttcggcaagctcgcggaagtggcgggcgaatacctgcgtaaaggcgcacaggtctacatcgagggccagctgcgcacccgcaactggcaggacgatgccggagtcacgcgctacgtcaccgaggtgctggtcgggcagaacggcaccctgcagatgctcggcggccgccgtgaagccggtgttcctgagagcgccgcgcagtcgcagagtcctgctaccccggcacaacctgctcaggccgcgactaaatccccgaaagcaaagggcggtaagaaaggccgtcaggacgccgccccgtctcagcaaccgcctcagccactcccggatgatttcccaccaatggatgatgacgcgcccttttaa

SEQ ID NO: 215857 - DNA, 564 bp, Klebsiella pneumoniae
atgcatcatgaccttaaacaccgtattcaggcgatgcgggacaaactggaagggcgtgcccctgtcgctgaaattcagggtagctcgcaactttttgtcaccccctccccggaatgtcgccggctggttgagctggctgatgtccgggaaaccgatcgcattctggaacccagcgccggaacgggcgccatactgcaggcgatcagggatgcagttccccgggcgaagtgtgacgccgtggagctgcacgccgggttagcccgtcacctgcaggcgcatttcccggaggtccggatctggtgcggagattttctcgaatatcatccggagcgccggtatacacgaattatcatgaatccgccgtttaatcgcggtgatgatatccggcatatccggcgggcattaactctgcttgagcctggcgggattctgacgggcatatgcctggacgggccgcgtcagcaaaaggcgctggagtccctggcggacgtctgggagccattgccgcggggaacattcacgtatacccaggtagcgaccgccattctcagaataaccgtctga

SEQ ID NO: 215858 - DNA, 1356 bp, Klebsiella pneumoniae
atggcaccgactaccgcacagatcatgacggaaaataccgtcagccagacttaccgggcaacctattcaccagatgataataaattgcgactttacgcatcattacggctcgatgaagaaacgtattccctgatcaacaaagcaggctttcgctgggcgcccaaacaggaactttttgtggcgccagcctggacgccggggcgggaggatgtcctgctttccctcgccggtgatatcgaggacgaggacagcaccctgtttgatcgccaggagcagcgcgccgggcggttcagtgactacagtgaccggcgggcggttgaatcggagcaggcgcttgcgcatgttgattcgctggcatcggctgtccctctgggacagccgatcctggtaagccaccacagcgagcgccgcgcgcgccggcatgcgcagaaaattgagagcggcatgaaacgtgctgtgatgctgttcgagcgtgcggaatactgggaacagcgcgcgcaggcctctctgcagcacgcgaaatacaaggagcgtccggatgtgcgttaccgccgtatcaaaaaaattgaggcggatttacgcaagtcccaaaagcacattgcccggtctgaaaagtatatgacgatgtggcgtgcgcagacgctcgatctgaaaatggcgttactggtcagtaattatgaccatatttatgcctgcttcacgctcgacaaatacccccgcccggcagagaaaagccagtatgagggctcgatgtctctccattctgccctgtctgaggagattattacttttgaacaggcgcgtgatattgcgatccgctgtcatgagcgcacgattagccaccaacagcgctgggttaatcattaccagaaccgcctggcctacgaacgcgcgatgctcaatgaaaacggtggcgttgtcacccgaacacaggaatttgaaccaggcgggcaggtactgagccggggagaatggttaaccattctccgggttaaccggagtaagggggaggtgacttcagtcgaaacgcccggttatcgctttctgggctacagcggcacgatgaaactcacgcccgaccgtatcacggactacaaagccccgacagcggaggaagccagcgacgcgaagaaagcggcgaagcgcccaccgatcgtcaattatccgggggaagggttccgggaaatgacaaaagccgagtgggcgaaattacccgctgattataaaggcgtgcggggtgctgcagaaaccgaaacacacggcgcctaccgcttccgccggtgcatgacgcacggttgtacgctcgtgaatgtgtatatcacagacatgaaaaccgttgaaattccgaaaaaataa

SEQ ID NO: 215859 - DNA, 231 bp, Klebsiella pneumoniae; identical to SEQ ID NO: 185380

SEQ ID NO: 215860 - DNA, 228 bp, Klebsiella pneumoniae; identical to SEQ ID NO: 195746

SEQ ID NO: 215861 - DNA, 318 bp, Klebsiella pneumoniae; identical to SEQ ID NO: 185382

SEQ ID NO: 215862 - DNA, 255 bp, Klebsiella pneumoniae
atgtcgcagtggaatattgcctctttttcaaaagaggagcaggacaaagttgccgtcgataaggtggccgctgctgtcgcctggcaggaaaggatgagcaagcccgtcgtgccggaacttgttgagcgggaacagcctgagcacctgcgcgagtatttccgtgaacggctccgcgtacatcggctgaacagtcagcagctgccgcgcgcaaatgcgcccgaatataataaaccgggcgaggatcagcagaattga

SEQ ID NO: 215863 - DNA, 426 bp, Klebsiella pneumoniae
atgtttcatgcccgtcaaaccatgctgaatgttgaggagtccgaccgtctctcgttcctgccggatctgtttggtaacgattttcttgccggagagatgcaggtctatgcgctcgctgagaaacacatcaccgattactgcggaggcttctggcatttcatccgtattccggagggcggcggctacatgatgcctgacggtgaccgtttccatctgactaacccggataactggtttgatcggtccgtcagcgcggatgcggccggaattatcattacggcgctggcgatcaaccgccgtatctggctgcaccatgaacgcggtgatgctgccctgacacgccacctgatgctgcgggaatcgcagctgtggaatttcattgactctcatgacgaatgcgctgctatttacgcggctctggactga

SEQ ID NO: 215864 - DNA, 957 bp, Klebsiella pneumoniae
atgagtcagccaaatcaacactgcatcggtattgatgttgctaaattgtcgctggatattgctggtacgacagaattctctccattttctgccagtaacgatgaggacgggttcatgtcgattctgaacgtgctgaaagaatgggagatctcgctggtacttatggaagcgaccggggggctggaggcttcggtagcctgttgcttacaggccgccggatatgaggttgttgttatcaatccccgtcaggccagagactttgcccgctcaatgggatatttggccaaaacagataagcttgatgctgccatgctggcacagctcgctcagatcatcgatcgtcatcctgaccgcagccggtatatccgtgttctgccggacgaagcgcgcgccgtacttaccgccatggtcgtccgtcgtcgccagctgaataacatgctcgtcgccgagcgtaaccgacgctatccctctcatccgcaaagtcgtaagagcatcgagaacatcattaatgcgcttgaaagcgaactggaccacatcagtcaagagatgaagcagcacgtaaaagtttttttcatggaacaggccgagttgattgggagcgttaaaggtgtcggtgaagtcactgtcgcatatctgattgctgagctgccggagttgggaaaactcaatcggcgggagataagcgcactgactggcgtagctcccctgaaccgggattcaggaaaaatgcggggtcgacggaccacttttggcggaagggccggtgtccgggcaacgctttacatggcagctcttgttgccacgcagtttaatcccactattaaagtgttctatcagcggctacttaccgtcggtaaacccaaaaaactcgcactggtagcctgcatgcgcaaactcatcaccattttaaataccatggtcaggaagggagaaaagtgggatgcttcgttcagataa

SEQ ID NO: 215865 - DNA, 549 bp, Klebsiella pneumoniae
atgtcttccgcttttcaacatcgtttcattcttacaggtggcccagggtcaggcaaaagcacgataattgatacgattatgaaacgaggattttggtgttctaaagaatctggaagaggtgttatacaagaccaggttaacatcggtggtgatgcattgccgtgggccaatcagactgcatttgcagagctcatgctatcctgggaaatgcgttcgtggcacgaagcggaagggcaaacacaaccatgcttcttcgaccgtggagttcctgatattgtaggctatttacttctttcagcgcttaccataccgaggcatctagaaaacgccatcgagaaatttcgctataaccgaaccgtatttattgcaccgccctggaaggatatatatgtacaggatacagagcgcaagcaatctttcgatatcgccgttgcgacatatcacgcaatggtgaaaacataccgtatgtatgactatcagttgattgaattgccatgcgtttctgtagaggagcgtgtcgattttatcctttccaggatagtacgttga

SEQ ID NO: 215866 - DNA, 918 bp, Klebsiella pneumoniae
atgaacatcagaaaccttatcttgagtctctgcgccttgctgttcagcgttagcgtcagcgcaaaaacatttacagttggtgtggcgctggctaacttcgacctcaactttgtttccatcctgcgcacccagatgcagcaggagctaaaaaaaaaccagcttaacggccagtttgttgatgccaaaggtgacgtcgcgcttcaggtacaacaggtggatgattttatcaatcagggcgttgacgccattattcttaatccagtcgatactcagggcgtactgccgatgatcaatgcggcaaaaaacgccggtattccgctggtctttgttaaccgtaaaccggaagtgaagttgcctgctgatatggcgtacgtcggctctgattctgcacagggcggcgaaatgcagatggaagcgctagcgaaaaagatgaactacaaaggtaacgtagccattctaatgggcgcactgtcaaatgaagaagcgcgagagcgcacccgcgcagtagaagcggtgattgccaaatacaaagatatgaaggtggttgagaagcaatctgctaaatggcagcgcaatgaagcggtggatgtcgtctcaggctggcttttgaatcagcgcccaattgatgccatcgccgctaacaacgacgaaatggcaattggggcgatcatggctttaagccaggcgaaaaacgaaaaaattcttgtcgcaggcatcgatgggacgccggacggccagcagtttatcaaaaatgccaaaatggcactgaccattttccaggatgccaaaggacaggccaacggcgcggttcaggtgaccaaagcgctgttgaataaacaaaatgttcagacatataattgggtgccttatcagcttattacgcctgaaaattatcaggcattttctgctgaaaagtaa

SEQ ID NO: 215867 - DNA, 780 bp, Klebsiella pneumoniae
atggcctcttatcaactctcagtttgcgctgaaatggtattcctcgatctgccgtttatcgagcgcgtcaaacgtattcatgaactgggcttcggtgtcgaaatctggggatgggccaataaagatatcgaggcgctggctgcgaccggcgcgcgctttacctctatgaccggctacctgagcggcaaccttacagacgatgctgaaattcaccagctgctgcaaaccgctgaagcgtcgctggcagtggctgcgcggctcaactgcccggtgcttaatctgcatggcaccggtcttgacgatcgaggcctgccggtaaaacccgtgacggcagtaaccggcgcgatgtggctgaaggccgccgatacgctgcgccagatcgcacagcttggcgagcgtgctgggcgggtttttaccctcgaaaaccttaatctgatactcgatcaccccggcacgccgtttgctctggcagccgatacgctggcgctggtggaagcggtaaacagcccggcgctgaagatgaatcttgatctctatcatgcgcagatgggtgaaggaaatctgatcgaactcatacggcgctgcggtgctgccatcggggaagttcaggtagccgatgtgccgggacgtcagcagccgggaaccggggaaatcaactatcgcgccatcgcacgcgcactgcaggatacaggttacagcggcaccgtcgctatggaaggctgggccagtggtgacagtacggccgcgctgcagcaattccgcgatcacttcaccctgtaa

SEQ ID NO: 215868 - DNA, 1014 bp, Klebsiella pneumoniae
atgaatcagcaaacagtgcgtgtgggtttaatcggcgcaggccgcatgggcagttttcatgccgaaaatctggcgtatcgcgtgcccggcgccacactggcggcagtcgccgatccgtacccggaagcggccgaaaagcttgctacccgactgggcgtcagcaaagcgtacagcgatctacatgcgcttttgcaggatgcggagatcgatgccgtcgcgattgccgccccggcacgcacgcatgcggaatgggtaattgccgcagcgaatgccggtaaacatgtgttctgcgaaaaaccaatggcaataacgctggaggaagcggatcgcgccatcgcggcggcaaaacgggctggagtggtattgcaggttggttttaatcgtcgtttcgattccggttttgctgccgcgatagcagcggtgaaaaacggggaaaacggcaccacgcagctcagccgttcggtaacacgcgatccgcttttgcacgatccggctccgattccgcagtggacaattttcctcgaaacgctgattcatgattttgacacgctgctgcacttcaatcatggcgcgaagccggttgaggtttatgcgctggccgatgcgctggtgcgaccagattttaaagacaaagggttgctggatacttctgttgtgaccatccgcttcgataatggcgcgatcgccattgccgaagcgaacttccaggcggtgtatggttacgacgtgcgcggcgaagtttttggcagcaaaggcatgttgcaggcgggccacatcaacgccaatcactgcgtgcgttacacggctaacggcattgcggttgacacctcgcggctggattcagatttactgcgtgaagcctatgtggctgaaatgaccgaatttgcccgctgtatccgtagcggtgaaacaccacgcgccaccggggaggatgcccgaaacgcgctggaaatcgcgctggcctgcatcgaatccgtcaggcgcaaccagccagttaaactgggggcgcgctga

SEQ ID NO: 215869 - DNA, 1449 bp, Klebsiella pneumoniae
atgcgcaaacataattttcgcctgattctgtttatctgtgccatcgcttcgctcagcggggtgatcctcggttatgacgcctcggtgatttccggcgttatcgaaccgctgacagagcatctggcgctgacgccgtgggaaagcggctgggcggtgtcaaatgtcattctcggttgcatcgtcggagcctggggcgtgggctttatctcagaccgaatcggccgcaaatccacgcttatcatcactgccattctgttcgtcttttcagcagtcggcgctgcgctggccgactcgttaacggattttgtgatttggcgtctggtaggcggtctggcggtaggtatggcgtcggcaattacgccgctgtatatcgcggaaatctcaccaaaggactggcgcggacgtatgctcggcctgcagcagatgctgatggtcggcgggcaggtggcggtctacattgtaaattacctgatcgcgcgcggcatgtcgcatcagtggatcgtcattgaaggctggcgctggatgctggcatctggcgtggtgccctgcgcattgtttctgctgctggtgccgtttatgcctgagtcacctcgctggctggcgctgcaaggtaaaacagagcgcgcccgcgctgtactgacccgcctgtctaatgcgcagcacgccgatcgtctgctgcaggaaatcctcacctcaaaacagcatgacaatattcagaccagccagcgcggcattctgcgcgatgcgcggacccgctacattctgctgatcggctgcgctattgccatcctccagcagatttccggcatcaatattctgctgtattacgcgccatcgctgctgcaaaacatcactgccagcacgcaggcctctcttttccagagtattttcctcggcctggcgctgctggctggcgtggcaggttgcctgaatgccatcgaccgtgttggccggacgcctctcctgcgctggggagcgctcggatgtgctgtatgtctggtgttgaccgcctgggcctttatcgcacaggtcggcgggctgttgccggtggtggggctggtggcctttgtgctgatctttggcctgtcatggagcctcggcgcctggctactgatttccgaaatttttcctaaccgcatgcgcgccgtggcgatgggatttgcgtttgcctcaatgtacgtcgcgaattttatcgttacccagactttcccaatgatgaaccgtaaccgcgtgctgatggaccattttcatggcgcgtttccactgatgttgtgcgccgtaggttgcctcgtggcgttctggtttgtgcgccgctttttaccggaaacccgcggcgtttctcttgagcatattgagccattgatgctctccaaatcccgtcgtttcgccgatgagacgtcgcgatcagatcaacaaccttcctcgtccgtatgggcgaaagtgaaataa

SEQ ID NO: 215870 - DNA, 1962 bp, Klebsiella pneumoniae
gtgaatcagcgtctgttattaagagaagagagtgatgccatctttagcctgccggatagcgcggaagctgccagctgggacgatctgctgtggcaaagctggcagcgctttctgcagggcgagaagccgcaaacgctgcggcgcagtattttgcagtcgtggcaacgttcgcagcagcacgccatcgatccggacagttttgtctatatcactccgcccgccagtgaactggccgccatcctcgaacacaacgccgaactgatcctggtggcgcgcagtatcatggaaaatctgctggcctataatccggacggccatatcaacctcaccgacgcgcgaggcataacgctgtatttttgcggcgcagatttgacgccggttggcagcattctgcgcgaagaggtgctcgggaccaactgcacagcgcgttgcctgattgaacagcgcctggtctacgtgctgagcggcgagaactggaagcttgatctgcgcaagcgtaggcggcagtgcgccgccgcgcccgtacgggatagcagcggccagttgattggcgtgctcacgctgaccgccacgccggataacttcaacgcgcataccctgggtacggtgcaggcggcggcggaagctgtcgggcagcagctcacgctgcgccgcctgctggcggagcagcaatccattctggaaacgctgaatgaaggcgtgatagtctgcgataaacatggacgcatcaaaaccctcaaccgctatgcgcgacagatattcagcggcctcgatccgcaggacacgccaattgatgtgttattgcagcctcagggtggatcgctgctgaccatgccattttgtaatgaccgcgagatgcagtttatgccagaaggtcttgctcctctcccctgcctgatttcgctcatgcccgcgccagatggtggccgcgtattgtcgctgcgtgaaaatcagcgcattcgcgccatcacgcggcgggtcatgggtgtcagcgcaagttatacctttgagatgatccgcggccaggcgccacgcatgcagcaggcgatccagaaagcacgcgccagtagccgtaccgacagcactgtgctgcttagcggggaaagcggtaccggcaaagagctgtttgcccaggcgattcacaacgccagtccgcgccagcaggaagcgtttatcgccctcaactgcggcgcgctgccacgcgatctggttcagagtgaattgtttggctatgcagatggtgccttcaccggttcgcgacgtggcggttcggcgggcaaattcgagctggcagatggcggcaccctttttctcgacgagattggcgagatgccgctcgaagcacaaaccagcctgctgcgcgtgctgcaggagagcgaagtgttacgcatcggcgcggcgcatccgataaaagtcaacgtgcgcattatcgcggcaacacactgcaacctgctggatgcggtggaaaaaggcgcatttcgtcgcgatctctattaccgtctgaacgtcatttcactggaaattccaccgctgcgtgaccgtcgcgaagatattccggaactggtcaatacctttattcaggcgctatgcacgcgcctgaagcgaatcccgccggtagtggcttcagacgctatggagagtttgcagtcatgggattggccgggcaatgtccgcgagctggaaaatatgattgagcgggtggtaaacctgtgtgaagggctatatatcacccgtgcggatttacccgagcagctactgaaactaccgacaaaaactgtcggccccgatgcgcagttatcgctgcataaccttgagcgcgcacatattctgcgagtgcttgacgagcagaagggcaacctgcgtcagtctgcacaacagctggggatttcccgcacagcgctctataacaagctaaacgcctgggaaattaactatcactctttcagaaaaagcgatcgttga

SEQ ID NO: 215871 - DNA, 381 bp, Klebsiella pneumoniae
atggaagaagaagatgacgagggcgaagatgatttttcatttgagtccgcaataatgatgtctaacaaaacagtactgggattatggataaatgctcgcctcatcggaggtgctgttatttccgaaaattctacaaaaatacatatccttgatagatttttcattctgcctgaagaacagagcaaaggctacggtttgcatgcatggatggaaattgaaaatatgtatcctgacgctaaagaatggacactgagaacgccgacatgcctgattaataacgtgtgtttttacgtaaataagtgcggttttaccattgtgcgcgttgaggatatgggaaaagatggggttggcatgtacgttttctcgaagaaagcgagctaa

SEQ ID NO: 215872 - DNA, 159 bp, Klebsiella pneumoniae
atgcgaagttatttaggctcttcagggatgggttggactgtccgctcctggcacgaagccgaggagtttactggtttgaatgtccgcagtgagcgaaaagcagacaatgctttttcagatattcagagtttttacatcgaaaaatctttccagatctaa

SEQ ID NO: 215873 - DNA, 1038 bp, Klebsiella pneumoniae
atgccgatcatagcagcaattcctgatgaagaacgacaactgatgcgcaaagaggcccaacaaacccacgataaaaaccatgcgcgacgacttatcgccatgctgatgctgcatcagggaatgaccgtcactgacgttgccagattactctgtgccgcccgctcatccgttggtcgatggataaactggtttattttacatggtgttgaaggactaaaaagtctcagacccggatgtgctccacgctggccggtcgctgatatccttcagcttttgcccctgttggtacagcgctccccgaaggattttggctggctgcgctcacgctggagcacggagcttctggcgcttgtcgtcaaccgactttttgatgtgacgctgcaccgctccaccctgcaccgatatctgaggcaggcagatatggtctggcgcagggcagcgccaacgctgaaaatcaaagatccgcactatgaagaaaaacggcttgtcattgagcaggcgctggctcaggagcagactacacatcctgtgttttatcaggatgaagtcgacatcgacctgaacccaaaaatcggcgctgactggatgcccaaaggacaacagaaacgcatcgccacgccgggacagaaccagaagcattatctggcaggcgcactgcattcaggtacgggacgggttcactacgtcagtggcagcagcaagagttctgatttatttatcagtctgttagaaaggttacgccgtacatacaggcgggcgaaaaccatcacactggtggcggataactacatcatttataaaagccgtaaagtggaacgctggctggaagaaaacccgaagttccggttgctgttcctgccgacgtattcgccgtggctgaatccgatagagcgactgtggttgtcgttacacgaaaccataacgagaaatcatcagtgtcggtacatgtggcagttactgaaacaggtagcacactttatgaatgccgcttcaccgtttcccggcaatcaacatggtctggctaaagtggagcggtaa

SEQ ID NO: 215874 - DNA, 144 bp, Klebsiella pneumoniae
atgagcgaggagcggacgttgtatttgacacctacacgctctgtgcctcaggtgttccctgatggaataccaatttccattgcccgttctcagatatttcccagcatgaagaacgaagggatgcacgattaccatctgtattga

SEQ ID NO: 215875 - DNA, 231 bp, Klebsiella pneumoniae
atgaatacgggtttaaggcaggttctgcgatatgcaggcgtcccggttgacgccgctgaaccggtgcgccggcaattcggtagccgcctgattttaatcgtgacggttgctcttcttccgctgttgattgttgacgtccctcagtggctatttgtgctctcccagattatctggggaagcagtatgtacattggtatctccgtggccagtgataaaccagatcgccgataa

SEQ ID NO: 215876 - DNA, 426 bp, Klebsiella pneumoniae
atgaagttcattcctgcagtatcagaagccagcatagtaaaaattcctttgttcacagagcgatgccctgcgggttttccgtcaccggctgcggactacacagagtctgaactggatctgaatgagtactgcattcaccggcgccactccacctattttgtcagggcgattggcaactcaatgactgatattggcctctattccggcgatctgatggtcgtggataaagcagaacagccgcggcacggggatattgttatcgcggaaattgagggtgaatttacggtaaaacgcctgcttctgacgccgcggccagccctgcaggcgatgaacccggacttcccttccctgtacccggatccggaaacgctgcaaattttcggcgtggtgacggccttcattcataaaacccggagggcagactga

SEQ ID NO: 215877 - DNA, 1272 bp, Klebsiella pneumoniae
atgttcgccctggcagacgtcaactccttctacgccagttgcgagaaggttttcaggccggatttgcgcggcaaacctgtcgtcgttctcagtaacaacgatggctgcgttattgcccgaagtgctgaagccaaacggctgggtataaagatgggaaccccctggttccagctcaaagaggcgcagtttcctgaaaaactgtacgttttttccagcaactacgagctctacgcgagcctgagtaaccgtgtggtcgccctgctggaagagctgtcgccccgcgtcgaacaatactcaattgacgaatgtttcctggatgcccggggaattggccactgtatggatctggaggattttggcaggcagctgcgtgggcatgttctcagtggaaccggactgacgatcggtgtcggcttcggcgccacaaaaacactggccaaatcggcgcagtgggcgtcaaaggaatggccacaattcaggggggtgctggcgctgtcgcccgataatccacgcagaacggcaaaattactcagcctgcagccggtggaagaaatctggggcgtggggaaccggatagcgaaaaagctgcacgttatggggatcaccaccgccctgcagctgtcgctgacgaaccccacatttatccggaaaaacttcaacgtagtgcttgagcgcacggtacgtgagctgaacggcgagagttgcatttcactggaggaagcgccgccgccgaaacagcagattgtctgcagtcgcagcttcgggcagcggatcaccacctacgaagaaatgcgccaggccgtctgccagtatgccgagcgcgcggcggaaaagttgcgcggtgagcgacagtacagccggcatatcagcaccttcatcaagacatccccttttgcggttaatgagccgtattacggtaacgtggccacggaaaaactgaacacccctacccgtgacacccgggacattatcgcggcagcggtcaggtctctggacaggatctggctcgatggccaccgctacgcaaaagcggggataatgctcaatgatttcagtccgaacggcgtcgcgcagctgaatctgttcgatgacgtgcagccacggccgcacagcgatgcgctgatgaaggtgctcgacggtattaatcattccggactcgtgaaagtctggtttgccggacggggtattgcgccggactggcagatgaaaagggagatgctgtcaccggcatataccacccgctggaaggagctgccggttgcccgtttctga

SEQ ID NO: 215878 - DNA, 252 bp, Klebsiella pneumoniae
atgacaaacatcattctgtgtgatgtgactgccagcgtcagcgaacttaaaaacgatccggagaccaccgccagtgccggcggcggctacccggtcgcgattattgaccgcaactgccctgttttttattgtgtgcccgcggctctgtatgaacaaatgctcgatgcgctggacgaaaaagacctggtgcaattgatcacagaacgtcaaaaccagccgctacgtgaagtggatctcaatcagtatctgtga

SEQ ID NO: 215879 - DNA, 138 bp, Klebsiella pneumoniae
atggaaacctttgacaaggtatgtggtgataacaggggcctccttgccgtcacccaaaaacaaaacggtatgtttatgcgctgtgatgattcccccggattcttttcatggtcccgtggtgtatacaaagtcaattaa

SEQ ID NO: 215880 - DNA, 741 bp, Klebsiella pneumoniae
atgaacagcatcattcccctgcagaattcaccagaacgcgtctccctgctgccgatcgccccgggcgttgattttgcgaccgcggtggcactccggcggatggccacctcaacaggggccacgccggcttacctcctggcgccggaagtgagcgccctcctctggtatatgcctgaccagcgtcaccacatgttgttcgccaccatgtggaataccgggatccgtatcggtgaagccaggacgctcaccccggaatccttcgacctggatggtctgcgcccgtttgttagggtgctgtcggagaaagtgcgggcgcgccgcgggcggccgccaaaagatgaagtccgcctggtgccgctgacggatggcagttttgtgcgtcagatggaaagctggatggtcaccacccgcccccgccggcgggagccgttatggccggtcacggatgagacaatgcgcaactggctgaaacaggcggtgaagcgggctgaagctgacggcgtacacttttcgattccggtaacaccgcataccttccgtcacagctatattatgcacatgctttatcaccggcagcccaggaaggtcatccaggcgctggccgggcataaggatccgcgctcgatggaagtctatacccgggtatttgcgctggacatggccgccactctggccgttccctttaccggtgacggccgtgatgcagcggagatcctgcgctccctgccaccggccggctga

SEQ ID NO: 215881 - DNA, 1218 bp, Klebsiella pneumoniae
atgcgaagagaagaaaggcttaaaaagtttgatatgaaaacaagaaataagataagagccattcttagtgaaaaagatggtaatgcaattgtagccttatcaaggctatatgctagtttaaataaaatgcaagcagaaaatctagattcaatccttaatagtcacttgttaacaaaagcagtcagatttttttcatcgttccctaaaactccaccctttaaggatactttacaagcaaatttctttaatgatctagtagaaatacttaaatatatcgagggttgttcgcaaaaaaataatgaaaaactaaaacaccttataagattgttgcaaaattttgatgagttatactcaaaaaaagagcattcaaaatgcattgaattaattgaatttatcatagagcaacatggttggagtcatgttgttttgaggaaattgattctcctaagagaaaatattggccaagatgaaacagatgaaagaatagagcaactagttattaaagcaggaataaaaggggttgttgtttcttctcttattaatacctttacacgagatcaaaatattctaatgagtaagcggtcagtgctaaatattacagaccgaggcgttattaatagatatacacgtacattgtctaaattgagcattcaaccatttgcaacatccattgctgacttcgaggtttatcttaaagaagttataaagtgctcattaatagatgctattatttttattaaatttaatcgtcatttaatgtgtactaacaaataccctgtcatttctgaactcgtaaatatgcttgggtcttctcttttctttgaagagcttataaaaaactatgatgcttcttcgagcgaaagtgaatatgcatttttcaaacagtcgagtgcgtggttggaatacgattcaattagagagtacagagttttgatagataactattatgactcttctaccacagaaaaagttactatgcctcatgaattgaaaatagttttagaacattgggtaggcaatgcaacattagaagatctcgttagtggaaaacaatttacaaatcatcaatatcccacgctagctcgacttgaaataaatggaaatgtaacaaggtctgcactatttaactattggctcactgagtctgaaggccaaatcgcatttgaaaaggagaacctttttacattaatggggttggtaatgactccaacttactga

SEQ ID NO: 215882 - DNA, 294 bp, Klebsiella pneumoniae; identical to SEQ ID NO: 27531

SEQ ID NO: 215883 - DNA, 1674 bp, Klebsiella pneumoniae
atggggttaactagagatctagctcgcactattcctattaatccagcacggacagcagctaagttagcaaaagatgttttggttaaacttattttattactcttattagctaaaagaagcaaaaacgagcttgacagttttttattacggaagttacttgaagatgttactttaaaaaattatgatggttcgcttgttaatcttgttgaaaattatgaaaaatcccatccttatatttctgaatatatatatgatatagccaccgaagattttttagctaaattaacaaaattggctccccatcgttccgacatccctgagattcgagcatcattacatgaatggatggcaaggtttacgaatgaaaaatattatttgcaacgtgcaagagctgtcagaattgaccatcaaattaatagagtaagaaatgaaatagatgatcatagaatatacgtagatcccatgcgtttcacgtcatggattgaagatgaaatgatgattgagttaaatggtgctttgacttctacaggttcaggaaaaaaaggtaaaacggtaacgtgtgacgaatctattatatccatggttattacgcagagttataattccttttgtacaaatccagtttttggtattgcatcatatattggaagaagaatacgccatggcacttttcatggtcaactgtattctagtgtgattaataaaattgaaactaatacaaagtatgaaaggttgtttgcacattctggatttaaagataaatggaactcttggaaagaagcttataattatagagtcgaagatataatttcagaacgtttacatgtttattcaaaaacaaaacctttaggattgctaaccccagaattgtatactccaaaaaaacaagatgttctatctgtagcagttgcaacaattagcgctatttatgctgagactacttcttctgatgacctatgccctattattatagattattgctggagacttgcagagctagatttaatatcagtaattcattttcttaaagcccagcagacccctctaaaaaatcaaaaatatatagaagaagaattgatgccaattgctgtcatcgctacaaacaaccgaatggcagaatcatttaggagagagttagaactttccatcgatagaaagttggctacaatgcttggatggtttaaacgtccatcaataattgcacctcaggcatctgtatcattactttttgctgctacggtagcagaggtaaaagatacaattccggatttcgaccctcaaaatgcagattacagtcgtgaagaaatagaactcgtaggaaacttctatcatcttatctatgattcacttgctatagtagtaggtaatgccgcaaaatatgcagaccgaaccgcaccattaatcaggaattttgagatagttactggtaaaaataaacagttggtaattgaaatatcgtctaaaataaagccaactgataatcctcatgacgtttcctgcaggatagagaactttaagaaagcaggttttttaaacgctaatttatatgataaaaatagcgggattgccaagttattattattagcaaataatagaaaagattttgagcttgctcagtatgaagtggtgggtagagaggtaaaagtgaggttaatatatgctttggaacattga

SEQ ID NO: 215884 - DNA, 219 bp, Klebsiella pneumoniae
atgctttggaacattgataaattaaactgtttaattgttgaagatgatcagtttaaattagagggtgttcgttcttttttaaactccatattttcaaacgaagtggttacagatgaatgccatgcattagcatccgcaaccgcgctattatcgataaaaaaatatcatatagcaattattgatatgtctatacatagccatgagggctttgttgaataa

SEQ ID NO: 215885 - DNA, 1266 bp, Klebsiella pneumoniae
atgagcaaaacacatttaacagaacagaagttttccgacttcgccctgcacccggcagtcattgaagcccttgaaaagaaagggtttcataattgcacacccattcaggccctcgcccttccgctgacgctggaaggccgcgatgtcgccgggcaggcgcaaaccggtaccggtaaaacgatggcgttcctgacgtcaacgtttcattatcttctctctcacccggctatcgccgatcgccaggttaaccaaccgcgcgcgctgattatggcgccgacgcgtgaactggcggtacagatccacgccgacgctgagccactggcgcaggccaccggtctgaagctgggtctggcttacggcggcgacggctacgataagcagttgaaagtgctggaaagcggcgtcgatattctgatcggtaccactggtcgtctgatcgattacgcgaagcagaaccacattaacctcggcgccattcaggttgtcgtgctggacgaagccgatcgcatgtacgatctcggctttattaaagatatccgctggctgttccgccgcatgccgccggccactcagcgcctgaacatgctgttctccgcgaccctttcttatcgcgtccgcgaactggcgttcgaacaaatgaataacgccgagtacgttgaagtcgagccggaacagaagacaggccaccgtattaaagaagagctcttctacccttccaatgaagaaaaaatgcgcctgctgcagacgctgctggaagaagagtggcccgatcgcgccatcgttttcgccaataccaagcaccgttgcgaagatatctggggccatctcgccgccgacggccatcgcgtaggtctgctgaccggcgacgtggcgcagaaaaaacgtctgcgcattctcgaagaatttacccgtggcgacctcgatattctggtcgcgaccgatgttgccgcccgtggcttacatattccggccgtgactcacgtctttaactacgatctgccggacgactgcgaagattacgttcaccgcatcggccgtaccggtcgcgctggcgccagcggtcactccattagcctcgcctgcgaagagtatgcgctgaatctgccggcgatcgaaacctatattggtcactcaattccggtcagtaagtacaacccggacgcgctgatgaccgacctgcctaagccgctgcgtctgacccgtgcgcgcccaggcaacggcccgcgccgtaacggtccaccgcgcaatcgtcgtcgttcaggttaa

SEQ ID NO: 215886 - DNA, 912 bp, Klebsiella pneumoniae
atgtattatggatttgacattggcggcagcaagatagcgctgggcgtatttaatcaggagcggcgactgcagtgggaaaaacgcgtcgctacgccgaaaagtagttatgaggattttctccaggcggtagaggcgctggtccgcgaggccgatgagcgcttcgaccagcagggttcggtcgggatcggtattccgggaatgccggaaacggcggacggcacgctgtatgccgctaacgtgccagccgccagcggccggccgctgcgcgctgacctcagcgcgcggttggggcgcgatgtgcgtctcgataatgacgccaactgtttcgcgctgtcggaagcgtgggacgatgagtttacgcaatacccgctggtgatgggattgatcctcggcaccggcgtgggcggcggcctggtgttgaacggtaaatcgattaccggacatagctatatcaccggcgagttcggtcatattcgcctgccggtggatgccctggaggtggttgggcgcgattttccgctgctgcgctgcggctgcggccagctgggctgtattgaaaattatctctccggtcgcggtttcgcctggctgtacgaacatttttatcagcaaccgctctcctcgccggagattgtggcgcagtggcagcagcacgatccgcgcgcgcaggcgcacgttgagcgctatctcgatctgctggcggtgtgtctggggaatatactgaccattgtcgacccggatttgctggtgctcggcggtggattatctaactttacggccattagcgaagggctggcgcaacgattgccgcgccatcttctgccggtcgccagggttccgcgcattgagcgcgcgcgccacggcgatgccgggggaatgcgcggtgcggccttccttcacctgacccattaa

SEQ ID NO: 215887 - DNA, 963 bp, Klebsiella pneumoniae
atgattgaacaagactcagattacgccctgctcactgaaattgcggtggcttattacgatcaggaacaaacgcaggaagagatcgccaaacgattcggcatttcgcgtatcaaagtcgggcgcctgctgaaaaaagcgcgccaggaagggattgttgagatcagcgtcaaataccatccggtcttcagctcccagattgagcagcagtttatttcgcactttggcattaagcgcgcgctaattgccctggatcaccatgatgaagatgaacagcgccagcaggtggcggccctggtcagtaactaccttgccggggtgttaaaaaacgatatgaccgtcaccgttggtcaggggcgcaatgtggccgcggtggcgaatcacgttggcgtgtttcctgagcgccactgccgctttatctgcggcatcggcggaaccaagcgtgacaatcagctgattgatgccgaccacatcagccggaatctggcgcgcaaatttaacggcttcagcgaaacgctttacgccccggcctatgtggaaaccccggagctgcgcgcggcctttatgcaaaaccgcctgattaaggccacgctcgaacaggccagcaaagctgacgtggcgatcatcggcctcggcgatatgaatgaaaacagctttatggtgcagctcggctggtttacgccgcaggaaattgccaccgcgcgtcaggaacagggggtggtgggcgatctggcggggtacagctttttcaatattcagggcaaacccgtcgatacggtgatgaatgaccgggtcattggcttaagtctcgaacagctgcgggccattccctgcgtcatcgctatcgcctccgaaagtacgaaagcgacagcgatcctgggggcattacgcaccggggttatcgatgtgctggctaccagcgcctcgaacgcccgttcggtcattaatatgcaaaaggcgctataa

SEQ ID NO: 215888 - DNA, 798 bp, Klebsiella pneumoniae
atgatgaccccgatatggttaggaaccagctggaaaatgaacaagccgctgtcgcaggccatggcctggtgcgaaacgctggcagcgcggatgccggagggctgtcaccctgctattcagcccttcgtcattccccccttcaccgcgatccaacccgtcagccattttctgcaaacgcatcagttaccgcttctgaccggcgcgcagaatatgcatgaagcggatcagggcgcctggaccggggaaatctcggcggccatgttggcagaaaccggcgccacgcttgttgagctgggacattcagaacgacgcgccgcctttaatgaaagcgatgccgcgattaatcgaaaagtgcatagcgccttaggtcatggcctgcgcccgctgatctgtattggcgatagcgccgaggagaaacgctggcaggtgtcgcgtgaaagcgtggtgcggcagatgaagatcgccctgtatggcctgagccaccagcaggcgctgcggaccctgattgcgtatgaaccggtgtgggccattggcgaacatggtacgcccgcctcaccgcaggaggcgggtgtcattcatcaggcgctacgtcaggcgctttgcgagcggtttggtcacgagacgggaacccgtatcccgctgctctatggcggcagcgtaacgctgcaaaacgcggtggaattgctgcgccagcaggagatcaatgggttgtttatcggccgcgcggcctgggacgcgcaaggctattgcgacattgttcaacgcgttacacaggaatttattttgcaggcgcagtaa

SEQ ID NO: 215889 - DNA, 1008 bp, Klebsiella pneumoniae
atgtcagcagagaaaaaacccgttgtggcgattaccattggcgatccggcagggatcggcccggagatcaccgtggccaccatgatggacaaaagcgtgtatgacgagtgcaaaccgttcctgatcggctcggtaccgattatcagccgggcgatgaaaatcatgggctgcgattttgctatccataaaattgcccatccgcaggaggcccgttttagctgggggacgttggatgttctggaaactggcgactacgattgcgacagtatcgaatggggcaaggtgcagaaactggcggggcaaatgtcgctggactatgtgatgaagtcgatcgagctgggtaaagcggggctgatcgacgtggtctctactgcaccaattcataaggaagccatcaagctggcaggatgtaagctcccgggccataccgaaatctatcaggtggaaacccaatctgattacggtctgaccatgttccacgtccacaacctgcgcgtcttcttcgtgagccgtcatatggcgctaaaagcagcctgtgactatgccaacaaagcgcgagtgctggcctgcgttcagcagatccaccatgaatttaccgccctgaacatcaaaaatccgcgcattgccgtggccgccctgaacccgcatggttccgacaatggtctgtttggtcacgaagaggctgacaatctgatcccggcggtgaaagctgcccaggagatggggatcaacgctatcgggccggttccggccgattccgtgttccatctcggcaaacaggggcgctacgacgccattctctcgctgtatcacgatcaggggcatattgcctgcaaaaccctcgactttgaacgttcgatcaccattaccttcggcctgccgtttatgcgcagctccgtcgaccatgggacggcgtttgatatcgccggtaccggtaaggcgggtaccgtcagtatgctggagtcgacgctggtggcggcccgttactggaaaatgaagcatcaataa

SEQ ID NO: 215890 - DNA, 1719 bp, Klebsiella pneumoniae
atggaaaaacatctgttgattagcaagggctgtaagggctggggcgggccgctgactatcacgccaggtcaggggaaaaagattgcgtacatcaccggggggatccgtcccccggtcgtcgaccgccttagcgaactgaccggctggccttccattgatgtattcaagaatggcgaaccgccggcggaagagattggtttaatggtcatcgactgcggcggcacgttgcgctgcggactctatccgaagcggggaattcccaccattaacctgcatcccaccggtaaaagcggcccgctggcggaatttatacacgaagggatctacgtctccggcgtgacgccagcctgcattgagatggtctggccgcaaggggaaggcggaaagcttgggatcgtggctgacgatctgaccggggcaactaccgtcggggtgctgctggcgcgcagtggtttaaaaaccgccgcgtttttcgataccgaatccttcgcccgcaatgaggtagagtatccggcgatggtggtcagcagcgacagccgcccattgccgaaagcggaggcccagcacaaagtgagcgctgcggtgaaacagctgcaggctcgcggcgcgcattacttcaccaagcggattgataccacgctgcgcggcggcatcggatttgaaatcgacgccatgctggaacaactgccgcaggagacggtggcggttgtggtgccggcgatgccgcagtcacggcgtattctcgtcggcggttactcggtgattgattcggtagccctgtcgcggaccgatgtggctcgcgatgtacgtaccccggtcaccgagtcgtgggtgccgggactgttggcggcgcagacccatcatcaggtcgggcatatcgcgctgacatcggtgatgaaaggcgaagggcaaatccagcaggatttacaggaacaacaacagcgcggcgtgcgggtgatagtggtcgatgcgataaccgtcgacgatgtcgatgccatcgccggggcggtagtggccctgaactggaacgtgctggccgtcgatccggggccctttaccgaacggctggcggttcgtcgcggcctgatgcgcgaagcgcggagcagcgcgcccgcgagcctgacagcggacggccagcgcggctcgattttgatcgttgccggcagcgcaacgccagtaaccaaaaaacagctccagtatttgatcgctaatgatgcccgggtctgccatatcccggtggatgccgagctgttggttgaccggaaaaacgccgctgagattgaagtcaatcgcgtggtgcagcatgcccgacagtgcgttccggcgcagcacaacgcgctctttgtttttgagtccgccttgaccgggcggttgctaaaccttcaggaagaggagcagcgatttggtctggcccacggtgaggctgcgcaaaatattaaccacggattgggcagtattgtgcgcgaggtgcttaactgtgcgtcgggtgaaattaaaggattgtatatgaccggtggtgacaccatggtcaatgtactaaaagagctgggcgccaccggaatagaaatgattgactatgtcatcccgcaaaccgatatggtgcggatcattggcggcgattatgccggcttaatttgcgtcgggaaaggagggctaaccggaccggaagatattattagcatcattgttgaccgaatttatcaggaagcacagcaataa

SEQ ID NO: 215891 - DNA, 1020 bp, Klebsiella pneumoniae; identical to SEQ ID NO: 138292

SEQ ID NO: 215892 - DNA, 375 bp, Klebsiella pneumoniae
atgagcgtgccgttgtattcattacggattaccgccgtcggggaatatgttgagtgttctttgcgggagctgcggcttattttattctccgatgccgttcccgacgatattgcgagttattgcgctgtacaccaggccagcgaactgaccgccgagttatcgcctggtcagcaaatgaaattaaatgataaaaattatcgggtgaccgcggtaggccgtgtggcaacggcaaatttacgacagcttggccatatcacgctaaattttgatggcgcagatatcgctgaattacccgggacggtacacctttacggcgaaccaccacaaattattcagcctggcgaccaaatttcgttttacccgaattgtcattaa

SEQ ID NO: 215893 - DNA, 459 bp, Klebsiella pneumoniae
atgaaaacaatcgctattggtgcggatgatgccgcctatgcttttcgcgattccatcgtcgcttatttgaatgggttgggaattaacgtcgcggattacagcagcgataaacgccaggggagtaccgtttatccggatgttgcccatgcggtggcgatgtcgattaaacagggcgaacacgagcgtgggatcctgatctgcggtaccggcattgggatgagtattgtggccaataaagtccccggggtccgcgccgcacagtgtcacgataccttctccgccgagcgagcgcgtaaaagtaacaacgcgcagattattacccttggcgcgcgggtgattggcgctgagctgggcaaaaaaattattcaggcgtggcttgagtccgaatatgaaggcggcggatccgcgcccaaagtggaacgtattgattattacgaacaccagcatgccagagattaa

SEQ ID NO: 215894 - DNA, 951 bp, Klebsiella pneumoniae
atgagccagttagacgaactgaaaaaatacaccacggttgttgctgataccggcgatattgaatcgattaaaaagtttgcaccccaggatgcgaccaccaacccctcgctggtgctgaaggccgcgcagctgccgcagtatcagccgctgattgccgatgcgattggcaaggcacgccgccagggaggcagcgcagaaacgcaattgattaacgcctgcgatcaggtggcagtggatatcggcagcgaggtgctgcgccatgtgcccgggcgtatctccaccgaagtggatgcccgctttgcctgggatcgcgggatgtgcgtcgcgaaggcgcgcaagctcatccagttatatgagaaaaatggcattggtcccgagcggattttaattaagctcgccgccacctgggagggcattcgcgctgccgaagagctggagcagagcggtataaactgcaacctgacgctgctgttctctttcgctcaggcccgggcgtgcgccgaagcgggcgtctttctcatctcgccctttgtgggccgcatctacgactggtatcagaagcaccagccgcagtcagcctatcaggtggacagcgatccgggcgtggtctctgtgcgccagatttatcagtattacaaatcccatggctatgacacggtggtaatgggtgccagcttccgtcgaattgagcagatccaggcgctggcgggctgcgatcgcctgaccatctctccggcactgctggacgagctggcggccagcgaaggagtgctgacccgccagttgactcccggctgcgtgacggaaacccgtcccagcccgatgacgcaggcggagttcctctggcagcatcatcaggatcccatggcagtggaaaaactagcggaagggatccgactgtttgctgtcgatcaggtgaaactggaacaacagattcagcagatgttgtaa

SEQ ID NO: 215895 - DNA, 987 bp, Klebsiella pneumoniae
atgaaaaaatacgctttttctcgttctctaatagcaatatctttgcttgctctattctcttcaggagccagcgcagctgaaaaaatcacgttaaaactggcacataaccttgaacgcagtcacgtggtgcatcaggcgtttgaagagatggccaaagaggtaaaccaactttctgacggtaatatgaagattcgtatttaccccagtagccagatgggcagcgcacgcgaaacgatggagttattacaaaatggcgcgctggatttgaccaaaggttccgccagcgatctggagtcatttgataatatctacgcgatatataatttaccgttcctgtttaacgatcaaaatcatttcaataaggtggtattcgggaaagtgggcaaggaaataatggattcgacgaaagagaaaggattctttgccctttccgcttatgtcgccggaacccgaagtttttatgccaaaaagcccatcaccaaaccggaggatttaaaaggactgaagatccgcgtgcaggccagcccgacaaccttaaaaatgattgaattaatggggggctccccgacaccaatctcctttggtgaagtttacaccgccatgcagcaaggggtgatggacggtgcggaaaataacgttccctcctgggtgcagactcgccatatcgaaatcgcgaaagtgttctctgaagatgagcatgcctccattcctgacttcctcgtgatctccagcaaaacctgggacaaactgacgccggggcagcagcaaattctggtcaaagcggccaaagcctcagaggtatatcagcaacagctgtggcagaagatcgacgccgatacccgcgcgcaggccaaagccctggggggcgaaattatcaaagtggataaagcaccgttccgtgccgccgtgcagccgctatttgatgactttaagaaagatccaaaacaggccgccctgctggccaaatttgacgctgccgctgaataa

SEQ ID NO: 215896 - DNA, 507 bp, Klebsiella pneumoniae
atgatgatacttaaccgcataaagctggcggtggaccgcaccatcgccgcattctctgtcgtcgtaatgattgcgctggttgtctgcgtcgtctggcaggtgttcagccgctacgtgctcaaccagcctagcaccctgaccgatgaactggcgcgtttcttaatgatctgggtcgggctactgggtgcggcctataccgtcggcgcccagcgtcatctggcgatcgatttacttacgctgatgctctcttcccgcaagcaggcactgctcagcgtcattatcaatctgcttatctttctgtttgctggctcagtgattgttaccggcggcgtaaaactgattgaaaaaacgctgtcgaccgcccaggtctcagccgcaatgcagatcccgatgggctatgtgtatctgatcctgccgctcaccggcatcatgatgatgttttacgcgttgtgttttatcagcaacggactaaaaaacatgaaacattcagaagcaggagcaaattaa

SEQ ID NO: 215897 - DNA, 1302 bp, Klebsiella pneumoniae
atggatagctatattgcactgacgctgtttggctcgttctttattctggtctttattggcgtacctatctctttttccatcggtcttgctaccgtcggctcaatgctgctgatgtttccctgggatatcgcggtgattaccgttgctcagcgcctggcgaacggactcgataacttcgcgctgctggctatccccttctttatctttgccggtaccctgatgaacagcgggggaattgctatacgcctcatcaatctggcgcaggtgatggttgggcgggtacccggatcgttgggacacgtcaacgtgctggccaatatgatgttcggctcgatctccggttcggcagtcgctgccgccgctgcggtaggggggacgctcaatcccattcagacgcagaaaggctacgatccggcattctccacggcggtaaacgtttcatcctgcatcacgggcctgctcattccgccatcaaacgtgctgatcgtcttttctctgacggccggcggcgtctcggtcgcctcgctgtttatggccggttatttgccgggcattctgatgggtctgtccatcatgctggtctgcgctggtatcgctaaacaccgcggatatccggtttccgaccgcccgacctgcgcccaggcggcaaaggcttttttcgacgccctgcccagcctgctgctggtcattattgtcatgggcgggatcctcggcggtattttcaccgccactgaagcttccgccatcgccgtggtctacacctttatcctctcagtgctgatttatcgggaagtcaaatggcgcgacctgccaaagctgatccttgaatcggtggtgatgacgtctatcgtccttctgctgatcggtttttccgtcggcatgtcgtgggcaatgaccaatgccgatattccctacatgataagcgatgcgctcatggggttttctgaaaatccgctggtgatcctgctgctgattaacatcgtgctgttaatcgtcggtatctttatggatatgaccccagcagtactgatttttacgccaatatttctccccatcgctgaggatttaggcatgaacccggtccattttggcatcatgatggtcgccaatctgtgcatcggcctgctgaccccgccggtaggcagcgcgctgtttgtcggctgctccatttcaggggttaaaattcagcagctcatcaaaccgctgctgccgttctacgccgccctgctgatcgcgctgatgatgattgtttatatcccgcagatctcactgtttattccacagctgctggggctgatgtga

SEQ ID NO: 215898 - DNA, 534 bp, Klebsiella pneumoniae
atgcgtatcctgccgataatcaccgcgattgccgtctcgttcctgtctgtcgcctgcagcacgcccgccccgccgccgggcgtcaccgtggtcagtcccttcgacgttcagcgctatctgggtacctggtatgaaatcgcccgctttgaccacccttttgaaagcgggctggaaaaagtcacgatcgcctggcacccacgtgatgacggcggtctggatgtggtgaataaaggttataaccccgaccgcggcatgtggcagaaaacggacggggtagcgtactttaccggggagcccagccgcgccgcgctgaagatttccttcttcggccccttctacggcagctataacgtcattgctctggataaggagtatcgttacgcgctggtctgcggccccgatcgcgactatctctggctgctggcccgggcgccgaccatcgccccggaggtcaggcagcagatgctggacattgccacccgacagggctttgatgtcggcaaactggtctgggtcaatcagcgctatgattag

SEQ ID NO: 215899 - DNA, 576 bp, Klebsiella pneumoniae
atgacatttaattcatacatcattaatgatgaggttatttttaatatggacgtgaatgagcttcagccagtagcggggaaagaccatgaagccattacgttaaatacccccacagcccgatgtttacaactacttttagaaagtaatggaaacattatttcccgagatgaatttttatccgctgtgtggaaagagcgtggtgtcgttgtttcgcaaaatactttttatcaaaatatctccttgctaaggaaatcgttgctcagagcgggactgactcaggatgttgttgttacggttagacaacgtggcttcgtcattgctaccggaaccgtaattcgacaagttacactgcagaacgagttcaatagtgctcaaccgttaagtaccgacgcaagcatgcgaataataaatgataaatatatagccaaaattgatgatgcagaagtacaaaatagcgtgaggaaaactttcaggattaatgggttaacttcacgacaactatcatggtggacctttattattgtagccataatggccataatcaatataatttttttatgcttcaaatatttttga

SEQ ID NO: 215900 - DNA, 1287 bp, Klebsiella pneumoniae
atggcacgaaagctctatcgcaaggaagcgattgaatataagaaattacactggaaaggaaaagcattattactggcaggtatgccagcatggcttatcgttattctgtcaagttgttttctcatcgcactcatctcgactcttatcctatgtacattcacccaacgtatagatgtacggggggaagtcatcacattaccgcattccgttaacgtctttgcaccgcagcaaggctttgtgttaaatcaatatgttaaggtcggagatatagtcaaaaaaggtcaaaaattatatgaaatagatatttctcgtaataccactaacggtaatgtgagtcttgctcaaactgccgtcataaatgaaaagatcattaatgctgagagcattattacaaaactaattcgcaacaaagatgaaacattgaatgcattagacacacaactaaatacgattaaaaaatctcttagcgaaacaacctcaatgcttgccaacacgcaggcagggttaaataaaatgcatcagaatctttcaagttacgataagtatctgaaagaaggcctcattacaaaagatcagtacaactatcagcactcactttattttcaacagcaaagtgcgtatcaatctctggtaagccaaaagatgcaactggaatctcagataacccagttcactagtgataaagtcaccaaagcggcagattttgataatcaaatatcaaaccaacaaaatcaaattaatgattataaaaatcaactagttgagtccgatgcaaaaggcaatgtcatcatcaaggcgacaacggatggaagaatcgaatcgctagccgtaaccaaagggcaaatggttgataatgggagtagtttggcacaaataaagcccaccggtaatgttgagtactatcttattttatggttacccaataatagtattccttacgtaaaaccgggggatactatcaacatccgatacgatgcctttccggcagataaatttggtcaatttctaggagaggtaatatcgatatcatctatgcctgcttcacgacaggaaatgtcagaatatactaacgttaataatggcacgaatcaacaagagcttgcactatataaaacgattgtaaaaatcaagcaaaaatcctttagttacaatggaaaaacattgtacttatctaatgggttaaaagccgaagctgttgtttttcttgaagagcgtccgttatatatgtggatgtttactccgttttataaaatttctcaaagtgtgagcggcccaattaatgaataa

SEQ ID NO: 215901 - DNA, 2121 bp, Klebsiella pneumoniae
atgaataacaaactctttgaaacgattattgcaaagttaaatttttcgctaattaagaaaacaccggtaattttacaatcagaatcagcggaatgtggtatcgccagcctggcaatgatctgcggacactatggattagatatagacttattcaatttccgccaacgcttcggcagtccatcgcaaggtgcttcactgctgcatttgagcaaaaccgccgagcgtgctggccttaaaaatcgcgcgctttcattagatttagatgaaataaaacagcttaagctcccttgtattatccactggggaatgaatcattatgtcgttctaacgaaagtacgaaaatctagctatgttgtgcatgatcctgctttgggtaaacgtataattggtttgcaggagatgtctaataatttcaccggcgtggctctggaactttggcccgatcagaactttcagcaagaaaaggcaaaagcacgcttacgtttattagacctgatgcgaaacattgtcggattaaagtctgcattaattaaaatcttcgcattctctgtcgtaatcgaagccattggccttttactccccattggtacacaactggtcacagaccatgtcatcatggcccatgaccagagtctgttatccgtcatttgtataggactggtctttttcactctcttccgtacctttgtcagtatgctaagggcatggacctcactgactctcaatactctgactaatattcaatggaaaacgacattgtttgatcacttgacaagcttgccgttatccttttttgaaaaacggcatcttggtgatatccagtcacgttttacttcattggatactatccgctcaacgttcactaatagtattgtcagtggcatcattgactcgatcatgacaattggtctgttaattatgttaaccctttacggcggctggctagtatgggtggtcgtaggatttacgctttgctacgccattatgcgcctggcgacataccgtttttaccgtcgggtagcagaagagcaagtcattaaaggagcccgctcgagctctcatttcatggagtcactttatggaatatcaacgattaaagctcttaatttaaaagagcgccgttcgcagcattggcttaatattaacattgatgcatgtaatgcaggaattaaacaaactcgctttgatatgatgttcagtggcataaacaccttcatatcatctatagatcaagttgctatcctatggttaggcgccattatggtgattgataacaacatgacgttaggtatgtttatggcgtttaactcttatcgtggccagttttctcaaagagcatctaatttgatcgatctctttatgcaactgcggatgttatcattacataacgagagactatctgagattgttttcagcgaacccgagaaagagctcccagcacgtcgagttttcgatgagaatagtggagtgaagctggagattaaaaatctcagttatcaatatgacccgttctcgcaacctattttttctaactttaacctgcaggttgagccaggagaatctattgcgcttgttggaccttcaggggtcggtaaaacgactttactgaaagtgatgtgtggtttgttatctccaacgtcaggtgaggtaattgccgataatcttgacatttataaaatagggcttaataactaccgactggggacagcatgtgtcctgcaagaagatcgtcttttttcagggtcaattagcgataatatcagcggatttgaagataatgcggatgaagaattaattgttgagtgtgctcgacgcagtaatattcatgatgaaattatgaaaatgccaatgggttatgaaacaatgataggtgagttagggctgggtatttcaggtgggcaaaaacaaagactcttaattgccagagcgctttaccgcaagccgagcattttgtttatggatgaagcaacaagtcatcttgatttgaagaatgagtctgccataaaccaatctattgccagtttaagtataactcgaatcattgtcgcgcatcgtccttcaacgatagcgtctgcagaccggataattgatctttctcaatatggaaagcaagcatcataa

SEQ ID NO: 215902 - DNA, 861 bp, Klebsiella pneumoniae
atgataagtaccgtgttaggttttaacaccgcaatcataaagcaaaatgataattttcttgctctggcgctgaaaattaaaagaggagacaacacatgtcagacatactacttacagtatgcaaccttaaatgatttattaataattctaaacaaccaaatgcagcgtgtggctcatcgattaatagagcagggagaaagctatagagaacaattccgcgaacaagttgagagctatattaaaaccactccgcaaatcgaggcagccgaagtgcaatcaccggaacccgggcggaggattatatcgctaaccctcaaaacagggaaaacggaatccactttaatagccatgcttcaatctgaacaaattgatattatcaaaattgatgatatgcaggcagagttaatgctattggcaatacgtcaggcctttttacatgctggaactgaggaatttatatccgttttagagtctacaactgattttttaatgctatatgccgtagaaatcatagaaaattcacgtttcagctacgagcagtttgatcatgaaagctggaagagaggtttattttctcatcatctggctattctttattgctatgaaacagagaaagggaaacaaattctctccggagccgttattaaaacaaatgcaccccatccctctgaattagaaaatggcattgctattcgcatcaacgaaagatttcctaaattaaaatcaacgcaggaaaaatatacattatgtcagatattcagtaaagttataccatcatcagataacatggacactttagatgcctgcttgcaacctttaaaggctttttttcttgaagaacaagcaaaactagatttttaa

SEQ ID NO: 215903 - DNA, 543 bp, Klebsiella pneumoniae
atgaataaacgtattatcgcagcactgatcgccgcaagcggcctggtagcattcaatgctagcgctaacgatggcaccgttaattttattggtgacattactgatggcgcatgtactgtcgatgtacaaaatactggttcttctaccggtcaggttactctcggctctgtaccaaaatcagcattttctggcgtcggttcgactgccggtaacggttctggtctggcagcaatcactatttccctgtcaggttgccctaccactaaaaccgacgcttatgtgactttcgacggtgactattacaatggtctgaatgactatctgaaactgactggttacggtaacactggtgttgcgaaaggtgttgcaatcaagctgatggattccaacaacaatcatctgaagctgggtgagaaatctgcagcaattccgctgacagctggcgcagcagatgttgcatttaaagcaacttatgcgcaggttgaaggcactgttgacgctggtactgcaaatggcgtcgcaactctgctggtaacttactaa

SEQ ID NO: 215904 - DNA, 681 bp, Klebsiella pneumoniae
atgcgaatcttaaattcattgctatctattatacttctcctttctgcctcttttgcatgctacgcgggagtacaggtcggaacgactcgcataatttatgctgaaggcaaaaaggaagtaagtgtttctcttgataaccaggatataacgccttatttgataaagtcatggatcgagaatgataaaaatgtcggcactcattttttgcttaccccgccactttttcgcctagagggtaagcaaaaaaacgtagtcagaatttttaagcttgacggtcagttaccaaccgaccgagagtcacttttcttttttaatacaacctcaattcctgctagttcaacagaggccgatcgtaatacattacaaattgcggttcgtaccaaacttaaactcatttttcgtccgaaaagcttgagcgacgacgtgcccgtaaaccatgctaaagaactgtcctggtcacgaagcggtaaccaagtcatcgtcaaaaacccttctcctttctacatcaactttatgtttattaaggtgaacggtcagtcgctaataatgaaagataaaaattttgtagcaccgttttcctctgctagttacgcgttaccgtcaaccaatggtggaaaagtagaatggaaaatcatcaacgatatgggcggccaaagcgacctttatcaaagcagtttatag

SEQ ID NO: 215905 - DNA, 2571 bp, Klebsiella pneumoniae
atgattacaaaattcaaattatctccatgctgtttagctcttataagtatcggtgtgttaaccatatcttccgagctatatgcaagagaattttttaacccagcatttcttaccgatctaaacggttcagacgtgagtccggacctttcggcttttgaggtagcaaattctcaggcccctgggaaatatcgggttgacatcatcatcaatggtaccgttgtcgataccaaagacgtcgattttttttctacggcagaacaaaaagcaagctatcttaacgaggcgggagaagagcttaaactatacccatgcttatcaacagaggaattaagtggttatggtattaaggtaaaagcaatctcttcattaaaaacaaacgctaatggttgcgtcattatcagttccattccagaagcctctgttgattttaactttaacttacagaaacttgagttgagtgttccgcaggccgcagtatcctcgacggttcgtgggtatgtttcacctgatgaatttgacaatggtattaacgcgttctatttaaattatagatataatggaaccagtagctacgcacgagataacggattatcagatcaagagaaccatagtgtcaatttactaccaggcttaaatatcgggccatggcgtattaaaaactacactacgtggaataaagatagttatgataatgatagcaatggtaaatgggatactatctatacctatgctgaacgaaatattatttcactgaaaagcatgttgacattgggtgaaagcacttcggatgctgatatttttgatagtgtgccatatcgtggtgcgcaattaaactcagacgattacatggatgcggaaagtatccagggatatgcacctgtagttcgaggaattgcgaaaagtaacgcaaaagttattattaaacaaagtggatatgttatttatcaatctttcgttcctccaggggcctttgagatcactgatctgtattcgacaggtggcaatggggacctcaatgtcacgatcgaagaagctgacggcactcaacaaaattttgttgtagcttatgcttcacttccagtattacgtcgtgaaggtagcctaaaatacagcattacatccggccaataccgctcctccgacggtagcgttgattatactccgttttcacaagcaacggccagctatggtttaccatacaacaccaccctatacgggggattccaggctgcttcgaaatatcaatcagtggccattggcgtcggtaacaacctgggcgtacttggcgctgtttctttagacgtaacacaggcctggtcgacgaagcaagatcaagataagatatcgggtcaatccgtgcgtatacgctacagcaaaaacctgaacgatataggcacaaatatagctattgcaggctatcgttactcaacgagcggctttaataccctttcagatgttcttgaaacatatcgtgatgactataaatactactacaacgatcgcgttaaaaatagaactgaaattaccgtaagtcaaagcctcggtgataagttaggctattttaacatcggcggtgtaatggaggattactggaatcagcgtcgcaggaataactcacttaacgtaggttacagcaatagctggagcggtattacatataattttaactattcccactcccgctcctcaactgactatgagggttacggtagaaactattctactgataatatcttttcgttcaatatcaatgtgccattgaatttctggatgcctaacacctgggctacttatggtttaaataccagcgatcctggttcgacaagcaacagtgttgggctttcaggtcttgcattggccgataataatttaagctggaaccttcagcaacaatacgataatcgcgattatagtagcggaaccgctggtgttgattataaaggcacctatggagagatttttggtagttataattatgatcataactggcagcgccttaattatggtataaacggtggaattgtcgctcatcgtgatggtatcaccgcagggcaatcattcagcgataccagtgctctcgttaaagcccctggtgttaatggtactcgagtagtgggtaacaccggcgtaaaaactgactatcgtggctacgctatcgtacctaatattacaatgtatcgtagaaatgatgtggtattagatactgaaacgatgcctaatgatgttgaccttgacactacggtagccactgttgtcccaacccgaggtgcgatcgtacgagcagaatattcagggaaaaaagggatacgcgcgctgctgcagctagtggatacacataataagtttataccttttggtgcaatggtaaatcttgcttccgaaaattcgacgaataataacagcgggatcgttagcgacaatggtcaagtttatctggctgggttaccgacaacgggagtactgcttgtcaaatggggaaatagtatatctaaacagtgtacggtaaattatcagttccctgggtctgaaaaggtcaatggtatcaaacagggccagtttatctgccgctaa

SEQ ID NO: 215906 - DNA, 957 bp, Klebsiella pneumoniae
atgcgtaattacttcctggccattagtactgcttttgctgcaatttatagcccaagcattttcgccgccagcgggtgcgtggttattgatggaaaaacttatgagttgaatctagcatctatgcctattgatcctgatgtggatgttggaactgttttgtatacggcgagggttgatacttcaggtcctaaactgacttgtccattaaatacagcaaggggaaaatattcctctcaaatgcttggttcttttcaaacattagtgggtactaacgcttatggcaatatctatgcctccggcatagacggcatcggcatccaaataagagatctggaacaatctgcaaaagctgttccctatgaaaccagtatggattctggtgcactctactactggagcacagataaaaagacacaaatccagtttatcaaaacaggaaaaattggaactggcacaagttacactggcttagcagctcagttcaagttagattcctgggttgttgccaagatatctataaagaccaaggtggcctggataaccaaaagttgcgtagctgaaccgaactccaggatacagaatattcaactggggaaaccactggcatcatcttttacctctatcggcagtacatcgcctgatgtgaacttttcagttaaattaaaatgccaagaagataacattcccgtttatgtctcatttgaaccttctaccggcagcaccggtaatggaatgttaaatttagatactagtaatgctgatgctgcatcaggtatcgccattgagattttaaatgctgccgatcgttcgaaactcgttttttccagtgaaaagaaatatcatacggcaagtgaatcatcaattgagattccattaattgcgcactacaagcgtacagggactgtaaaagcaggcactgctaatgcagcaatgacgtttgtaatcaaccagtactaa

SEQ ID NO: 215907 - DNA, 363 bp, Klebsiella pneumoniae
atgaaagagttaactatcaacgaaatggaatctatcgcaggcgcttacagctgggatttttcctcttttagttcagctttaaccagtatcttatctaactcagcagaggccgttgcatcggccctcctgcttggttctgcagctgcagcactgggaagtactattggtggaacgcatggtagtgataacggcggcctgtttggtgtgggtacgctgggtatggcaattggtgggctttatggtcttattgctggagccattaccggtgcaatttctggtttgatgtatggctgggatgcagcaagtgctgaagctactaagatgtgggattctttctcttctggttcgcatggcatttattaa

SEQ ID NO: 215908 - DNA, 609 bp, Klebsiella pneumoniae; identical to SEQ ID NO: 196936

SEQ ID NO: 215909 - DNA, 1317 bp, Klebsiella pneumoniae
atgaaaaacaagtacaaaatgattgttgataaatacgttgatttaattcgatccggagaattgacagcagggacccggttacctacacacagggatctggctgccagtaagcgtatttcactggctacagctacccgggtctatgctgagttggagacaatgggcttagtcagtggggagatcggacggggaacctttgtcagagaaatatcactacctcctggacatggtatcgatcagcatgatgtagcggcgggtataattgacctcaattttaattatccatccctaccgggacagggagagttatttcgtgaagctctcagacaaatatctggttctggcgatattgaatcgcacttgcggtgccaaccgcatgccgggaggttatctgacaggcaaattattgcagggcatctttcgcgcggtgattttgagccaaaagcggacaacgtgattatagtcaatggagctcagcatgggttaaccgtcacagtaatgggactcctgagaccgggggatgttgtcgctgtagatgcgctaacatactcaggttttaaagttcttggtgcattgtatcatttggaactgatacctatcccggtaaaaaacaacggaccagatcttgaagccttgcgtcaaatttgtaggttaagacatgttcgagccatatatgtaatgcccactttacataatcctctgggttgggtactaagccatgagcaacgtaaagaaattgttaatattgcgcgttcaaatgatttgctaataattgaggatgctgcgtatcattatctggttaaaacccaacccccggcagttgctttttttgctccggaaagaactatatacgtcaccggcttttccaaaaatgtggcgacagggttgcggattggcgtaattatctgtccagaggtttatcgtcccgctcttgaaagagcagtaagagcaacaacatggaatacaccatctcttatcgtatcactggtctgcaattggattcaggacgggactgtgtcacggtttgaaacgctgaaaaggcgtgatgcacgtgagcgacagaggatacttaaggaaacgcttggacacatgacctgtctatcacatcctgattcgtattttgcatggttccctcttccggaagatatgagggctgacaacgttgttaaagtattaatggaaaataatatttcggtttcaactgccgaacctttttgtatttctcagaatgtacctcaagctatacggcttgcgctaggatccgtcagttatgaaaatctgcataaagccctgcagaaggtcagaaatttgatttaa

SEQ ID NO: 215910 - DNA, 465 bp, Klebsiella pneumoniae
atggcaaacaaacaacctgttcccctacccgcacaggttaccgacggcgactgggtggtcgttcgcggcggcggcgaacacaatcttaaaaacgtcaacgtcgctataccgcgcaacgcactggctgtgttttccagcgtgtcgggttccggcaagtcttcgctggcgtttggcactatatataccgaggcgcagcggccctactttgaatcggtcgcgcgctatgcccgcggattatcgatcatgccggcgtgctcgacgttgactgccgccggcggttgcgcttcagcagcagaacggtgccagcaacgcgtgctcgtcggtgggcaacgtgaccacgctttcaagccaggtacggatgatgtactcgcgggcgggcccctatccgtcggccagccgttgctgaatgccgaggacttttcggccaatacgccccaggtgacctgcccgtccagcacggcctaa

SEQ ID NO: 215911 - DNA, 1032 bp, Klebsiella pneumoniae
atgccgatcatagaaccaattccccatgacgaacgacgcctgatgcagaaagctatccataaaacgcgtgataaaaattatgcccgcagactgaccgccatgctgatgttgcaccggggcgagcgcgtcagtcatgtggccagaacactctgctgtgcccgctcatcgattggtcgctggattaactggttcactctgtctggtgctgaaggcctgaagtcattaccgtcaggacgtggcaggcgctggccgttcgaacatatttgcgcattgctgcgtgagcttgtgaagcattctcccggtgatttcggttatcagcgttcccgctggagtaccgaactgctggcgataaaaatccgtgatgtcaccggttgtccgctacatgcctcaaccatccggagatggttacctgctgccgggctggtatggcgcagagcagcgccgacactgcgtatccgtgacccacacaaagaagaaaaaatagtcgctatccatgaagcactggcgaaatgcagtgcggaaaatcccgtgttttacgaagatgaagtggatattcatctcaacccgaaaatcggtgctgactggcagttacgcgggcagcaaaaacgtgttgtcacaccgagccagaatgaaaagtactatcttgccggtgcgctgcacagcggtacgggaaaagtcagctatgtaggtggaaacagtaaaggttcatctttatttatcagactgttaaaacatcttaaggcgacataccggcgggcaaaaacgattacgctcattgtcgataactacattattcacaaaagccgtaaaacgttgcgctggctgaaagcaaaccagaagttcagggtcatttatcagccggtttactcgccatgggtcaatcatgtcgaacggttgtggcaggcgcttcatgagacaataacccgaaatcaccagtgccgttcaatgtggcaactgttgaaaaaggttcatcactttatggataccgtcagcccattacccggtggaaaacacgggctggctaaagtgtag

SEQ ID NO: 215912 - DNA, 153 bp, Klebsiella pneumoniae
atgtatgacctgatagtgcccactccgaccctcagcatccgcgataaggctatcgcctcatggccgccggcctggcggggacaaaatctacgcgatattcaggtctcgctgggctatgacgtcgatacaccctggcaggcgctgccggagtag

SEQ ID NO: 215913 - DNA, 330 bp, Klebsiella pneumoniae
atgattgatgttctaggtccagaaaagcgcagacggggcagcgttcaggaaaaaatcgccattattcagcagagctttgagcccggaatgaccgtgtcgctggccgcccgtcagcatggtgttgctgccagtcagttgttcctgtggcgtaagcagtatcaggaaggcagcctcaccgccgttgtcgcaggagaacaggttgtacccgcgtcggagctggcctctgcgatgaagcaaatcaaacagctgcagcgtctgctgggcaagaagacaatggaaaacgagctgctgaaagaggccgttgaatatggccaccaaaaaagtgaatag

SEQ ID NO: 215914 - DNA, 612 bp, Klebsiella pneumoniae
atgccaaaatacctcatcatgcgtcagaatgtgctgctgcttgagcgtaaactggcaataccgccatcgaagcgggcgcatacagggaaagtggtcgttggagaaagtaaccagcggtggtgctctgacggcttcggattcagctgtgataatggcgaaaaactgcaggtcacgttcgccctggactgctgcgatcgtgaagcactgtacagggcggcaagtaccggtggatatgacagtgaaaccgtacaggacgtcatgctggttgcagtagagcgtcgcttcggtaacagcctgccggcatcacctgttgagtggctgacggataacggtgcggcctaccgttctcatcaaacgcgtcagttcgccagaatggtaggactggagcctggacatacggcggtacgcagcccggaaagcaacgggatgacagagagcttcgtcaaaacggtgaagcgcgactacatcagtatcatgccgaaacccgatgggttaacatcggtaaagaaccttgcggaggccttcgaacattacaacgaatggcatccgcatagtacaccggggtatcgttcgccacggaatatctgcggcggcggaccagtaatgggttaa

SEQ ID NO: 215915 - DNA, 861 bp, Klebsiella pneumoniae
gtggatattaagttattgcgtgcatttgttactctctcgcaacttaagcggtaccactcggcggctgaaaaactatgtgtcactcaaccggcattgactaagcagatacagacactagagtctttatcaggaataaccctatttcagcgaggccgtcatggggccagattgaccgttgcaggagaactgttactacaacgggcttctgaagtactggcatcctatgataatttccgtactgatgtgtccagcattcagcaaggactagtgggtaaactgacggtaggcttcggtatttcatctttccgcgtcgcccctgaaaaggttgctattttccgtgctctgtatccagacgtgcaagtgtccctgaatgatatgtcctcggcagtacagttccagaagcttgcagaagggcaacttcagacggggtttgttcggcttcctgcacctgaacgactggagagtaaaattctggcagaagaaaagctagttcttgccgtagcccacgagcatgatactgagttatctagtgcggcagagctgctaggatcgaggaagctcctgcaattatccagggacagaggggaggggctgtcggaacagatattgcgttttctttcacttcgtcaactcactccccagacagtctttccagcagatgacattcagactcttctggctcttgttgccaccaaaaacggcgtggccttattgcctgcatcagttatccatattcttccttgtggcgtcaggcttatacctcttgagggggaacatacaacctggcagacaggaattgcctggaacccgcaaataaacgaccctgtcagagataattttataaatatagtgataccataa

SEQ ID NO: 215916 - DNA, 267 bp, Klebsiella pneumoniae
atgaaatcagatgttcaactcaacctaagagctaaagagtctcagagagcactcatcgatgcagctgcagagatccttcataaatcgcgaaccgactttatcctggagatggcctgcaaggctgcggagaatgtgatccttgatcgccgtgttttcaattttaacgacgaacagtatgcagagttcatcgatatgctcgatgcaccagtcgaggatgagcccgccattaataaactactggcaaggaaaccgcagtgggacgtataa

SEQ ID NO: 215917 - DNA, 483 bp, Klebsiella pneumoniae
gtgggacgtataaccgcgcccgagccgttatccagctctcatcagctggctgagttcgtcagtggagaaacagtcctcgatgaatggctaaaacacagaggtttaaaaaatcaagctcttggcgctgcccgaacgttcgttgtttgcaagtcggggacgaagcaagtagctggtttttactctttggccaccggtagcgttaaccatacggaagctacaggcagtcttcggcgtaacatgccagatcctataccggtgattatactcgctcgcctggcggtagatgtctcattgcacggaaaaggggttggcgccgatttacttcacgatgccgttctacgctgttatcgcgtagctgagaatattggcgtccgtgcgataatggttcacgcgcttactgaagaagctaaaggcttctatactcaccatggatttacggcatcgcaaactcatgagcggactctgttcctaaaacttccataa

SEQ ID NO: 215918 - DNA, 1116 bp, Klebsiella pneumoniae
atgaacgaagttaaccggcttaaagttatccaggacgtcgttgaccggcggctgacaactcatctcgcagctgagcgtctcggtatttccgaacggcactgtcgccgcctgcttcagcgctatcgtacagacggtccgctgggtatggctgatcgccggcgcggcaagccaagtaactatcagctgcctgctggccttgctgaacgtgctgtacagatcatccgcgagcgctactcagactttggtccgacgctcgcctgcgagaagctggccgagcttcacggcgtgacgctgtctaaagagaccgtacggaagctgatgatgcagtcaggcctctggatcccgcgcaggcatcgtgcgccaaaaatccagcaaccacgctaccgccgcgcgtgcgttggcgaactgatacagatcgacggctgcgatcaccgctggttcgaggaacgcggtccggcctgcacgctgctggtttacgtggatgacgcgaccagccgcctgatgcagcttcatttcgtccgctccgagtccacgttcacctactttgaagccacgcgcggctacctggaacagcacggcaagccgctggccttttacagcgacaaggccagcgtgttccgcattaacaacaggaatgcggctggcggcgacggtcagacgcagttcggtcgcgcgatgaacgagctgaacatcaccggcatctgcgccaacaccagctctgccaagggccgcgtggagcgagcgcatctcacgttgcaggaccggctggtcaaggaactcaggctgcgtgacatcagtacgcctgacgcggctaacgcctttgccgctgaatttatggcggactacaaccggcgtttcgcgaaggcaccgaggcatgattttgacgtgcaccgtccgctcgatgcagacgacaacctgaaccagatatttacttggcgcgaaccgcgcaaggtttcgaaagcgctgacggtccgctacgataaaatgctgttgctgcttgaggacaacgatgacagccgccgcgcgatgggcaagtatctggatgcctggcagtacccggatggccgcgttgaactcaggagtcacgggcacggtgcttccctactctgcctatga

SEQ ID NO: 215919 - DNA, 279 bp, Klebsiella pneumoniae
atgttggtgaccatgtcagagaaagagttaaaccggattaacgtgattcagtcagttactgacaggcgaatgcggcgccgtgatgctgcatatcagttgaacctgtttgaacgccaggttcagcgcctgatgaatcttttccggaaagatggcgctgctggacttgccagccttcgccgtggaaaaccaggtaatcaccgtctgccggaatcactgaaactccaggtactgacggtagtaagactggcacccagtttgctcgggtcctgcatgagatag

SEQ ID NO: 215920 - DNA, 567 bp, Klebsiella pneumoniae
atgcgtctgaacgggattagtagtattgaggaagccaacgcatggctggaatccttcatcaccgattttaaccgtcgctttgccagagtacccagataccccaagaatttgcatcgtccggtcaccgaaagcagcactgagctgaacgatatttttgcctggcaggaatcccgtaagctgtctaaatcgctgacattccgctatgataaaatgatatatctggttgaaccaacagaagaaaattcacgtattgcaggtgagaatattaaggtatttgattacccggatggtactctcgctttcaaatacggtcaccgcgccctttcgtgtcagttttttgataagctggactgtatagatcagggacaaatcgtcgataacaagcgtcttggcgcagttttacgactggcacagaataagatggacgagctggatcgacagggaaaacgggagcgaagtaaaagtcttccaaaacgacgtgcgcaggcccgaatccaggagcaacttcgggcaattaatccggtactggccaacccggaagaattcagagccagcctcaaacgatag

SEQ ID NO: 215921 - DNA, 531 bp, Klebsiella pneumoniae
gtggttaattatgttcgtaggcacgttaaccagactatttataattttaaagatcaagattgtgatatgaaaataagacgataccgacagggtgattcagaaaaattatgggaattggtttttaataccgttcatctaataaatgttctggattactcgcatgatcaggtcaacgcatgggcaccaaaagatatagatatggactggtggaagaaggaactatctgataaatcaccatttattttatgtaatgatgaaagaatttatggctatgctgacatacagaaaaatggacatataaaccacttttttgtagctcatgattgtcagcgtcagggtaaaggaaccattctgataaatactcttattgatcacgcattagaaatggggctgaagaaattaagcgttgaatccagtctcactgcaaagtctttttttgaacatcatggattcaccgttgtaaaagaagaacacgatgcatatttacgtgggcaaaaatttctcatcttcaatatgaggaaggaattataa

SEQ ID NO: 215922 - DNA, 663 bp, Klebsiella pneumoniae
atgaagatggcgcgtatttatgaacgggtaagcacaactgaccaggaactgacacgacagagtgctatcgagaggatggcaaccgagaacggtttctacattgcgggcatttatagggaaaaagcgtccggagcacgggctgacaggccagagttactcaggatgattgctgatctccagcagggtgatgtggtaattgctgaaaaaatggatcgtataagccgtctgccacttctggaggctgaacagcttatagcttctatccgggcaaaaggcgcccggcttgcggttccgggtatagtggatctctcggaacttgctgctgaaacagatggagtggggcgactcgttcttgaatccattcaggagctgttactgaaacttgctctgcaaacagccagagatgattatgaaacacgacgcgaacgccaacgacagggcgtacagctcgccagaattgcggggaaatataaaggacggaaagccgacctgagagggcacgagcggattatcacgctccgtgaatcaggtctaactatcgaacgtaccgccatgctggccgggtgtagtatcagtcaggtaaagcgtgtatgggcgatgcataaagcccgtcaggcagaggattacgtaagaccgccgttatccgatttagcatgtaagtaa

SEQ ID NO: 215923 - DNA, 603 bp, Klebsiella pneumoniae
gtgatagctaaaatcaatggtaagaacgccggaaaggtcattgcccttgaacttcacgccgccccgctggcgggcaatgccaacgtgaatcaggctaccgacgcctttgctcgttcattaaaagagattacccgctgggactggtcctgcgaactggtgctggagcactgcgacgcgatgaccggtaccgcgccgcgcaaaggatttttgccgttagaaaacgtgctggaagccattgccgactacgacatcagcatctgtatcaactgggcgcgctctgctattgaagggcggaataccgttctaccgctcacccatacgcagcaggcaaaacgggcagggaagctcggcgcgctgatgttttccggcacgacgcaaaccggcgagtacggcgaatggcaggatttacacgcgccattcgcgcctttctgcccgcagagcctgatgaccaccgaccacactcgtgaattatttgcctgcgcaggagccgatcccctgcaattgtcaggtatcaaattactggaaatcactgccagcgcaaacgttgaccatcgtatcgcgatattacgcgacggcatctcagcgctaaaacaagcacaataa

SEQ ID NO: 215924 - DNA, 297 bp, Klebsiella pneumoniae
atgaatataacctctaactttacacccaaagatataccgcgccagcgctggttaagaatcatccccccaatactgatcacctgtattatttcttatatggaccgggtcaatattgcctttgccatgcccggaggcatggatgccgacttaggtatttccgccaccatggcggggctggcaggcggtattttctttatcggttatctatttttacaggttcccggcgggaaaattgccgttcacggcagcggtaagaaatttatcggctggtcgcttgggcggttatctccgtgctga

SEQ ID NO: 215925 - DNA, 1023 bp, Klebsiella pneumoniae
gtgctgacggggttaattaccaatcagtaccagctgctggccctacgcttcttactaggcgtggcggaaggcggcatgctgccggtcgttctcaccatgatcagtaactggttccctgatgcggaacgcggtcgcgccaacgcgattgtcattatgttcgtgccgattgctgggattattaccgccccactctcaggctggattatcacggttcttgactggcgctggctgtttattatcgaaggtttgctctcgctggttgttttggttctgtgggcctacaccatctatgaccgtccgcaggaagcgcgctggatctctaaagcagagcagaactatctggtcgagacgctggccgcagagcaacgggccattgccggcaccgaagtgaaaaacgcctctctgagcgccgttctctccgacaaaaccatgtggcagcttatcgccctgaacttcttctaccagaccggtatttacggctacaccctgtggctgcccaccattctgaaagaattaacccacagcagcatggggctggtcggggtgctcgccattctgccgtacgtcggcgccattgcagggatgttcctgttctcttctctttcagaccgaaccggtaaacgcaaactgttcgtctgcctgccgctgattggcttcgctctgtgcatgttcctgtcggtggcgctgaaaaatcaaatatggctctcctatgctgcgctggtcggctgcggattctttctgcaatcggcggctggcgtgttctggaccataccggcacgtctgttcagcgctgaaatggcgggcggcgcgcgcggggttatcaatgcgcttggcaacctcggcggattttgtggtccttatgcggtcggggttctgatcacgctgtacagcaaagacgccggcgtttattgcctggcgctctccctggcgctggccgcgctgatggcgctactgctgccggcgaaatgcgatgccggtgctgcgccggtaaagacgataaagtcacataaacgcactgcgtaa

SEQ ID NO: 215926 - DNA, 489 bp, Klebsiella pneumoniae
atgagcaagaaacaggccttctggctgggtattgattgtggcggcacgtatctgaaagccggtttatatgatgccgaaggtcatgaacatggcattgtgcggcaagcgctacagacgatgtcgcccctgccgggttacgccgaacgcgacatgcatcagctctggcaacactgcgcggcaaccattgccggactattacaacgggcaggggtatccggtgaacagattaaaggcgtgggcatctccgctcagggtaagggtctctttctcctcgataagcaggatcggccgctgggtaacgccatcctctcatccgatcgtcgggcgctgaatatcgttcagcgctggcagcgggaccgtattcccgaacggctctatcccgttacccgccagacgctatggaccgggcatccagcttctctgctgcgctgggtcaaagagaatgccccagcgctacgcacaaattggctgcgtgatgatggggcatga

SEQ ID NO: 215927 - DNA, 1062 bp, Klebsiella pneumoniae
atgccccagcgctacgcacaaattggctgcgtgatgatggggcatgactatctgcgctggtgtttaaccggtgtgaaaggctgcgaggacagcaacatctccgagtccaacctctacaacatgtccacgggccagtacgacccgtgtctgacccaatggctggggatcggcgaagtggatagcgcgctgccccccgttgtagggtcagccgaaatatgcggggagatcaccgctcaggcagccgctttaaccggtctggcggcgggtactcccgtcgttggcggcctgtttgacgtggtctccaccgccctttgcgccgggattgaggatgagtcaaccctcaatgcggtgatggggacctgggccgtcaccagcggtatcgctcacgatctgcgcgaacatgaggctcacccttacgtttatggccgctacgtcaatgacggccagtatatcgttcacgaagccagcccgacctcatccggcaacctcgaatggtttaccgcccagtggggcgacctctcgtttgatgagatcaatcaggccgtagccagtttgccgaaagccgggagcgagctgttttttctgccgtttctctacggcagcaacgccgggctggagatgacctgcggcttttacggcatgcaggcgctgcatacccgcgcacacctgctgcaggcggtttatgaaggcgtggtattcagccatatgacacatctcaaccgtatgcgcgaacgctttacaagcgttcaggccctgcgcgtcaccggcggcccggcacactccgacgtctggatgcaaatgctggcggacgtcagcggcttacgcgttgaactgccgcaggtggaagagaccggctgctttggcgctgccctcgcggcgcgcgtcggcactggcgtataccgcagttttagcgaagcccggcgcgctcggcagcacccggtacgcacgctgctgcctgatatgaccgcccatgcgcgctatcagcgcaaataccgccactaccaggatttgattgaagcactacagggctatcacgcccgtattaaggagcacgcattatga

SEQ ID NO: 215928 - DNA, 663 bp, Klebsiella pneumoniae
atgagccgaccattactgcagctggcgctcgaccacaccagtcttcaggctgcgcagcgcgatgtcgcccagctacaggatcacgttgatatcgtggaggcggggaccatactctgtttgaccgaggggcttaacgcagttacagccctgcgcgcccagtgtccgcagaagatcatcgtcgccgactggaaagtcgccgacgccggtgaaaccctggcgcagcaggcctttggcgctggtgccaactggattaccatcatctgcgccgcgccgttcgccacggtcgagaaaggccacgccgtggcccaggcctgcggcggtgaaattcagatggagctgttcggcaactggacgctggatgatgcccgcgcctggtaccgtaccggcgtccgtcaggcgatttaccatcgcggacgcgatgcccaggcctgcgggcagcagtggggggaggcggatctggcgcgcatgaaagcgctctccgacattggccttgagctatcgatcaccggcgggattacccctgccgatctgccgctgttcaaggatatcaacgtcaaagcgtttattgcagggcgcgcgctggcaggcgcagcccatccggcacgggttgccgccgaattccacgcgcaaatcgacgctatctggggagaacagcatgcgtaa

SEQ ID NO: 215929 - DNA, 861 bp, Klebsiella pneumoniae
atgcgtaaccacccgttaggtatttatgaaaaagcgctggcgaaggatctcagctggcctgagcggctggtgctggccaaaagctgcggttttgattttgtcgaaatgtcggtggacgagaccgacgaacgccttttgcgcctggagtggacatcggcccagcgggcatcgctggtgagcgcgatgctggaaactggcgtcgctattccctcaatgtgcctgtccgcccatcgccgtttcccctttggcagccgcgacgaggcggtacgcgagcgggcgcgggagattatgactaaagccatccgcctggcgcgcgatctggggattcgtactattcagctggcgggttacgacgtctattacgaagagcacgatgaaggcacccggcaacgttttgccgaagggctggcttgggcggtagaacaggccgccgccgcgcaggtgatgctggcggtggagatcatggataccgcctttatgaactccatcagcaaatggaaaaagtgggacgagaggctttcgtcaccgtggtttaccgtctatccggacgtcggcaacctcagcgcctgggggaacgacgtcaccgccgagctgaaactgggtatcgatcgtatcgccgccatccacctgaaagacacgctgcccgtgaccgacgatagcccgggccagttccgcgacgtgccgttcggtgaaggatgcgttgattttgtcggcatctttaagacgctgcatgagctgaactaccgcggttcgtttctgattgagatgtggacggagaaggccagcgaaccggtgctggaggttattcaggcccggcgctggattgaatcacggatgcaggaaggaggtttcacatgttag

SEQ ID NO: 215930 - DNA, 699 bp, Klebsiella pneumoniae
atgttagagcaactgaaagccgaggtgctggcggcaaacctggcgctcccggcgcaccggttggtcacctttacctggggcaacgtcagcgcggtggatgaaacgcgccgtctgatggtcattaagccctccggcgtcgaatatgaggtgatgaccgccgacgatatcgtggtcgtagagatcgccagcggtaagatcgttgaaggcgctaaaaaaccctcttcggatacgccaacgcatctggccctttatcgtcgctatccgcagatcagcgggatcgtgcatacccactcccgccatgcgacgatctggtcgcaggccggtctctatctccccgcctggggcaccacacacgccgactatttttatggcgccatcccctgcacccggccgatgaccgttgaggagattaacggggagtatgagtatcagaccggcgaagtgattatcaaaacctttgaacagcgcggtctggatccggcgcaaatcccggcggtattagtccattcgcacggcccgtttgcctggggtaaagacgccgccgacgccgtgcataacgccgtggtgctggaggagtgcgcctatatgggcctcttctcgcgccagctggcgccacagctgccggatatgcagtctgaactgctcgataaacactatctgcgaaaacacggcgcgaacgcctattacgggcaaaattaa

SEQ ID NO: 215931 - DNA, 300 bp, Klebsiella pneumoniae
atggtgaaagtgatgtgctgccagtcgccgttggggagggtatggttctgctgcgccccccattgctcggtggctttgagcacaatgaaaaaattagctgctggtttactctgcgtttttctggccttcctagcactggcttcccgtcagatgaccgatgataccggacacaacgttaccctttccgacagcgtgaacaggattgccgaaggttggtacgcccaccaatccttgctgatgacgctgggggttggcgataacattgtcgctaccgtcaaccgccccgacactcgcccgtag

SEQ ID NO: 215932 - DNA, 351 bp, Klebsiella pneumoniae
atgcaggtggtttcgccggagaaagtgctggcctggcagccggacattatcattctcggccccggcagcggcgactggaagacatccccttgggctggacttttcgccagcctgaacgcggtgaaaaacgggcaagtggtgcagaatccgtcaggtgttttcccatgggatcgttacggcaccgaaagcgcattgcaaattcagtgggcggctaagctgcttcatcctcagcgctttgccaatgttgatatggtgagcgtcacacgtgatttctaccagcgcttctttgattatccgcttaatgatcaagaggcaaggcgtattttacaggcgctacagccgcaacaataa

SEQ ID NO: 215933 - DNA, 408 bp, Klebsiella pneumoniae
atgggacgctggcttgctggcagactcatgaaagagttggggctggtcagttgcctgcagccgactcaccggtataagcatggcggtcatgagcacgctgctatcccgaatcatcttgagcgacagttcgccgtaacggaaccaaatcaggtgtggtgcggtgatgtgatctatatctggacaggtaagcgccgggcgtacctcgccgttgttttcgacctgttcgcaagaaaaccagtgggctgggccgtgtcgttctcaccggacagcaggctcaccatgagagcactggaaatggcatgggaaacccgtggtaatcccgttggggtgatattccacagcgatagtaataatgccgatgtcagtctttaccaccacttagtttgccgtttaaccagattggtgtga

SEQ ID NO: 215934 - DNA, 1077 bp, Klebsiella pneumoniae; identical to SEQ ID NO: 97051

SEQ ID NO: 215935 - DNA, 225 bp, Klebsiella pneumoniae
atgctggcgaatggctttgcggaagaagcgaaaggccgctgcggcatcccgtttagccgtcaacaaaaagtcgatggtctgaccttctgtatcgaccgcccggtacagatatttccactgtcacctgactctgatgtaagtttcatccattcgctaccggcgtcctacggcacgtttatgccgacgaaatgccttatccagcagagataccagcgaacacactga

SEQ ID NO: 215936 - DNA, 1317 bp, Klebsiella pneumoniae
atgagcaaatccagtaacaagatgggagtggtacagctcaccatcttaaccatggtcaacatgatgggctccggcatcatcatgctgcccaccaagctggcggaggtggggactatctccatcatctcctggctggtgacggcggtaggatcgatggcgctggcgtgggccttcgccaaatgcgggatgtttagccgtaaatcaggcgggatgggcggttacgccgagtacgcgttcggcaagtctggcaactttatggccaactatacctacggcgtctcgctgctgatcgccaacgtcgctatcgctatctccgcggtgggttacggcaccgagctgttcggcgccaccctgtcgccggtgcagattggcctggcgactattggggtgctgtggatctgtaccgtagccaacttcggcggcgcgcgcattaccggccagatcagtagcatcaccgtatggggggtaatcattccggttgtcggcctgtgcgtcatcggctggttctggtttagcccgacgatgtacgtcgagtcctggaacccgcaccacgtaccgttcttcggcgccgttggttcgtcaatcgccatgacgctgtgggccttcctcggtctggaatccgcttgcgccaacaccgatgtggtcgaaaacccggaacgtaacgtgccgatcgccgtactcggcggtaccctcggcgcggcggttatctatatcgtttcgaccaacgtcatcgccgggatcgtgccgaacatggacctggctaactccacggcgccgtttggcctggcgtttgcccagatgttcacgcctggcgtaggtaaagtgattatggggctgatggtgatgtcctgctgcggttcgctgctcggctggcagttcaccatcgcgcaggtctttaaatcatcgtctgacgaaggttacttcccgaaaatcttctcccgcgtctcagcttccggcgcgccgattcaggggatgctgaccatcgttatcctgcaaaccggcttgtcgctgatgaccattagcccgtcgttgagcaaccagttcaacgtgctggttaacctggcggtggtgactaacatcatcccgtacattctgtcaatggcggcgctggcgattatccagaaaatggccaatgtggaaccgggcaaagcgcgatccaccaacgtgattgcctttatcggcgcggtatacagcttctatgcgctgtactcctccggcgaagaggcgatgctctacggcgcgatcgtgacctttatgggctggacgctgtacggcctggtatcaccgcgttttgagatgaaaaacaaacacagctaa

SEQ ID NO: 215937 - DNA, 2199 bp, Klebsiella pneumoniae
atgactgatttaaaaattgccgttagccgtacatgtccaaactgtttttctacccagcgtaatattgtcaatactagcgaaaccaactttattgatgtggccgcggtagtattaaccctggaagatatcgaatgcggtaaactcgatgagttaaaggccaccggctataacatcccggtatttatcgctattaataaagaagaggttgtcccggccgagtatatggcttcggtgcagggggtatttgaacacgacgaaacccgcaacgacttttacggccgccagctggaagccgctgcgcataaatatgaaaccgaactgcgtccgccgttctttagcgcgctggtcgattacgttaaacagggcaacagcgcctttgactgcccggggcatcaggggggtgaattcttccgccgtcatccggccggtaatcagttcgtcgagtatttcggcgagacgctgttccgctccgacctgtgcaacgccgacgtcgccatgggtgacctgctgatccacgaaggggcgccatgcattgcccaacagcatgcggcaaaagtttttaatgccgataaaacctacttcgtgctcaacggtacctcctcttctaacaaagtggtgctcaacgcgctgctgaccccgggcgacctggtactgttcgaccgtaacaaccataaatccaatcaccatggcgcgctgctgcaggccggggcgacaccggtctatctggaaaccgcgcgtaacccgtatggttttatcggcggtatcgacgcccactgcttcgaagagcgctacctgcgcgagctggttggggaagtggcgccgaatcggaaacaggatgcccgcccgttccgcctggcggtgatccagttaggtacctacgacggcaccatttataacgctcgtcaggtggtcgataaaattggtcatctgtgcgattacatcctgtttgactccgcgtgggtcggctatgaacagttcattccgatgatggctgattgttcgccgctgctgctggagctgaacgaaaacgatccgggcattctggtgacccagtcggtgcacaaacagcaggccggtttctcccaaacctcgcaaatccacaaaaaagacagccatatcaaaggccagcagcgttacgttccgcataagcgtctgaataacgcctttatgatgcatgcctccaccagcccgttctatccgctgtttgccgcgctggatatcaacgccaaaatgcatgaaggcgagagcggccgcaacatgtggatggactgcgttatgaacggcatcaaggcgcgtaagctgatccttgaaagctgtaagcacatccgtccatttgtgccaaaaatggtcgatggtaaaccgtggcagtcatatgaaaccgcgcaaatcgccgttgacctgcgcttcttcgagtttggcccaggcgaacgctggcacgcctttgacggttatgccgagcatcagtacttcgtcgatccgtgcaaactcctgctgaccacgccgggtatcaataccgccagcggcgaatatgacgccttcggcgtaccggccaccattctcgccaacttcctgcgtgaaaacggcgtggtaccggaaaaatgcgaccttaactccattctgttcctgctgaccccggcggaagatatggccaaactgcagcagctggtcgccctgctggcgcgcttcgataagctgctcgacgccgatgcgccgctgcaggaggttctgccgtctatctacagccagcacaaagagcgttatgccggttataccctgcgccagctgtgtcaggaaatgcatgatctgtatgcccgtcacaacgtcaaacagctgcaaaaagagatgttccgtaaagatcacttcccgcgcgtggtgatgaacccgcaagaggctaactacgcctatctgcgcggccaggtcgatctggtgccgctgccgcaagccgaaggccgcgtggccgctgaaggcgccctgccttacccgccgggagtgctgtgtgtagttccaggcgaagtctggggcggcgcggtgctgcagtacttcaccgcactggaagaagggatcaacctgctgccgggcttcgcgccggaactgcagggggtttatatccaggagcacgatggccgtaaacaggtctggtgctatgtcatcgcggaaagcgagaaacaaagcgcgctgctgaaaggggaaactgtatga

SEQ ID NO: 215938 - DNA, 195 bp, Klebsiella pneumoniae
atgctcaaaaataaactgaacaatggtgttgaaataccccgactggggttcggtgtcttccagatgaacgatgccagcgtttgcgagacggcggtatccagtgctctggagaccgggtatcgtctgctggataccgcagcagcttacgagaacgaagaggctgtgggtaacgccagcattccctgtctggcataa

SEQ ID NO: 215939 - DNA, 240 bp, Klebsiella pneumoniae
atgtttccggttcacgtcagttggctggaaaagtatttcaataatggcaaatttctgatgctgggtccctatattgacactgacgctcatgcgggtgttatttttgcacaggccagcaacagggaggaactgcagtctatcctggaggaagactgttattatcccggctttgcccggtatgacgtgcgtgaatttacgcctaaattcattgcagataactttgatacagcggcgaagtaa

SEQ ID NO: 215940 - DNA, 561 bp, Klebsiella pneumoniae
atgaaaaacgttcttattgtttcaggtcatccgaatctgaatggctctctggctaatgccactattcttggggaagttgccagagaattaccggaagcgaatattcgtcgtctcgatgagctttatccgacttaccagtttgatattaatgccgaacagcaggcgttattagaggccgacctgattgtctggcagtttcctttttcttggtattcactgcccggcattatgaaattatgggtggatgaagtgtttgttcacgggtttgcacacggctcaacggcaaaactcggtggtaaaaagcttctcctttctttcaccacaggagcgccggaactggcctactccacggctggtttctttggccacacaattgaagagtatctgccccagtttgagacaacggcagtgctgtgcaatcttgagtatgcgggtgccatctatacgaatggtgtgagttacgcaggccgggaagatgaagaaaaaagaactgcccagagacattctgcccgtgaacttgctgcccgtctgattgatgctatcagaagcaacgtagcctga

SEQ ID NO: 215941 - DNA, 747 bp, Klebsiella pneumoniae
atgagtcgcttcagtggaaaaacggcactggtcaccggtggcggagccggaatagggctgagcatcgccttaacacttgcccgggagggagcagatgtcatcgttaccggtcgatctgaatcaagcctggcaggtgcgtcaaccgcacatcataaaatcaccacgattgtggctgacgttgctaaatcccctgatgtggcgcgtattatggagcacatcagcaaggattttggccgccttgatatcctcattaataatgctggcatggcgcctgtaacagcactcgccgatcagaccctgactgaatttgatgatgtgttcaatataaacgtgcgggcagtagtcgatctcagcgttcaggctttaccatttcttaaggcaagcaagggctgcatcatcaacatatcttctgccgttgccagccgcccgcttccgggtatgtcagtttactgcgccagtaaggcagccctcaggacactgaccttcgtctgggcaaaagagctggcaaaggacggaatacgggttaattcggttgctgtcgggccggttgaaacaccgatttatgagaaaaccgaactgtcagacgaggccgcaaaggctcacagggagcgtgtcacacacctggtgccgctcgggcgttttggactaccgcagaatattgcctctgcggtggcctatctggcatcagatgacgcatgttttatcactggttctgacattgccgtggacggtggatttagtatttaa

SEQ ID NO: 215942 - DNA, 807 bp, Klebsiella pneumoniae
atgccgtcactgatgatttatcaggatctcaccactgccgcgctgctcggccatgcggcgcagtatcacagcgagaccgagattgtctcggtgagtactggcggtgagaaggagcgcagctgctggggggaggtggccagccgtgctcagcggctggcatcggcgctggcgtcgctggggctgccgccgggcgcccgctgcgccacgctggcatggaacaaccgccgccatctggagatctattttgccgtcgcctccggcggctgggtgacgcataccgtcaatccgcggctgtcggttgaccatctgcggtatatcctcaacgacactgccgatgaagtgctgttttttgaccagacctttttgccgctggtagcgcagctgctgccgcagctgccgacggtgaaacacgtcgtgctgatggagtcccgcagcgaagcggcgctcagccagctgccctcattgctgttttatgacgatctgttgcagcaggggatggcagactatcgctggccgcagctcaatgaactgactccggcttcgctctgttacacctcgggaaccaccggccggccgaaaggggtattgaacacccatcgttcgctggtcctgcacgccctgagcggcaaccagccggacgccgccggcatatcggcgaaggacagcctgttgccggtggtgccgatgttccatgtcaacgcgtgggggacgccgtttatcgccgccatggtggcgcgcggctggtgctgccggggccgcacctcgatggcgacagcctgctgcagctgctggccgccgagaaggtga

SEQ ID NO: 215943 - DNA, 786 bp, Klebsiella pneumoniae
atgatcggtcgactgctgcgcggcggctttatgaccgccatctacgcgtatctctacatccctattattattctgatcgttaactcgtttaaccggtcgcgcttcggcatcaactggcaggggttcaccacagactggtatagcctgctgatgaacaacgatagcctgctgcaggccgcccagcactcgctgaccatggcggtgctgtcggcgaccttcgccacccttatcggctcgctgaccgccgtggcgctgtaccgttaccgctttcgcggcaaaccgtttgtcagcggcatgctgtttgtggtgatgatgtcgccagatattgtgatggccatctctctgctggtgctgtttatgctgatcggcgtccagcttggtttctggtcgctgctgttttcgcatatcaccttctgcctgccgtttgtggtggtcaccgtttactcccgcctgaaaggctttgacgtgcggatgctggaggcggcgaaagatctgggcgccagcgagatgaccatcctgcgcaaaattatcctgccgctggccctgccggcggtagccgctgggtggttgctgagcttcaccctgtcgatggatgacgtggtagtctcctcgttcgtgaccggtccggggtatgaaatcctgccactgaagatctattcgatggtcaaggttggcgtttcgccagaggtgaacgccctggccacgattttgttggttctgtcgctggtgatggtcatcgccagtcagttaattgcacgtgataaaactcaggggacgttaaaatga

SEQ ID NO: 215944 - DNA, 1167 bp, Klebsiella pneumoniae
atgaacggtgagcgcgtgctagaatacgccgcctcgaagttcaatgtagcgagtatttccatgtcagaaagccagaaaaaagtgatcgtcggcatgtccggcggcgtcgactcctcggtctccgcgtacctgctgctgcagcaagggtataaggtggaaggcctgttcatgaagaactgggaggaagacgacggcgaggaatactgcaccgccgccgccgaccttgccgatgcgcaagcggtctgcgataagctgggcattgaactgcacaccgttaactttgctgccgaatattgggataacgtctttgagctcttcctggaagagtacaaagccggccgcacgccgaacccggatattctgtgcaataaagagatcaaatttaaagccttcctcgagtttgctgccgaagacctcggcgccgactacatcgccaccgggcactatgtgcgccgcgccgatgtcgacggtaaaagccagctgctgcgcggactcgacggcaacaaagatcagagctacttcctctacacccttagccacgagcagattgcccagagcctgttcccggtgggtgaactggaaaaaccgcaggtgcgtaagatcgccgaagagctggatctgatcaccgcgaagaaaaaagattccaccggcatctgctttatcggcgagcgtaaattccgcgatttccttggccgctatctgccggcgcagccgggcaaaatcctcaccgtcgacggcgaggagatcggtacccatcaggggctgatgtaccacaccctgggccagcgtaaagggctgggtatcggcggcaccaaagagggtagcgaagatccatggtacgtggtcgataaagacgttgagaataatattcttatcgtcgcccagggccatgaccacccgcgcctgatgtccgtcggtctgattgcccaacagctgcactgggtaaaccgtgaaccgctacaaggcaccctgcgctgcacggtgaaaacccgctatcgccagaccgatatcccctgcaccgttaccgcgctggatgaagaccgtatcgaagtccgcttcgatgagccggtcgcggcggtgaccccgggccagtccgcagtgttctatttaggggaagtgtgcctcggcggcggaattattgaacaacgactgcctctgcagtcctga

SEQ ID NO: 215945 - DNA, 459 bp, Klebsiella pneumoniae
atgtttaaacctcatgtcaccgttgcctgcgtggttcacgcccaggataaatttctcatcgtcgaagaaaccattaacggcaaagcgctgtggaaccagccggccggccatctcgaggccaatgaaacgctgctgcaggccgccgaacgtgaactgtgggaagagaccggcattcgcgccacgccgcagcacttcatccgcatgcatcagtggctggctcccgataacaccccgtttctgcgcttcctgttcgccatcgaacttagcgatctgtgcgccactgaaccgcacgacagcgatatcgatcgctgcctgtggctcagtgctgaggaaattcttaacgcgccgaacctgcgctcgccgctggttgccgaaagcattcgctgctacctgcaggacccgcggcagccgctgtcgctgattggcgcatttaactggccgttcacagggggtgaatga

SEQ ID NO: 215946 - DNA, 651 bp, Klebsiella pneumoniae
atgcggcaattgataaagcctgaaaataccatgcagaaaacttcatttagaaaacatcgcgttgagcgattcagcacacaacaagtcaccagacaacgtaaagaacgccagccaaaaactgtgatcttgttcaataaaccctatgatgtgttgccgcaatttaccgatgaagccgggcgcagcacgctgaaagattttattccggtggcgggcgtttacgccgcaggtcggctcgatcgcgacagcgaaggcctgctggtgctgaccaacgacggcgcgctgcaggcgaagctgacccagccgggtaagcgcaccggcaagatctactatgttcaggtggaaggcgaacccacgcccgaggcgctgaccgccttgcgcgacggcgtcacccttaacgacggccccaccctgcctgccggcgtagaacttgtcgaggaacccgtctggctgtggccgcgcaacccgccgattcgtgagcgcaaatcgattcccacccgctggttgaaaatcacgctctacgagggacgcaaccgccaggtgcgccggatgaccgcccacgtcggcttccccaccctgcggctgatccgctacgccatgggcggctataccctcgacggactggccaacggcgactggcgcaaagccgaataa

SEQ ID NO: 215947 - DNA, 2592 bp, Klebsiella pneumoniae
atgccgggcaacctcattgtcaacggcagttttgagcgcggcgcggcgggctttaccggctggagcagtaccgcgacggtggccgatttacaggttccgcattcgggtaacaaggcgctgaaaatgtccgccggccagtcgaacctggtcgggcaggaaatcagtatcacgcagggtcgtacctaccgcatgggggtatgggcgaagcaggacccgggaaccacgattaaagatgcgggtaacacgaagtttcgtgtggccgacagcactggcctgctggtcggctcaaactacggaccgtttagttctggctggcaactggtaacgtttgactggaaagccacgaagaccacgacggccagtttccagctgacgaccttcctcagcgcgggggcaatgtatttcgatgatttccatgtcctcgatgttacggatgaaaaggatatcgcagctaatgccggggccatttctcagatgaatacccgcgtcaccgctgctgaaggggctatcaccacccaggcgcagcagctgacgaaactcagcggcgatctggccgtcacgaatgcggcggtcagtaagaaggccgagcaaagcgctgtcaccgggttgaccacccggatgacgtctgccgagggtaaactggattcgcagtcgcagcagctcaccagtctgcagaacagcctgaccacgatgaatactgagctgggtaaaaaggctgacacgtccgcggtgagttcactgaccggtcgcgtaagccaggtggaaaacaccatcaccagccagtcgcagagcatcacgtcgctgaccagcaccatcaataccatccgcactcagggagctaatccgtgggttgacggtacgtttgaaagctacagcgatggccaggtgctgggcgggaacggcacagccgttgtggtggcgtctcagaaatacaccggcggtaagagcctgaagttgagacgggatgagaacaacagcggcaacagtgataaacagcttggcacctggcagtcaatccgtgaggacgcgaagttccggtttgagttctgggccatgatgccggcggatcaggcgccctcctccgggtggacaacgctggtcggtatccagtcgcagaatgctgccgggcaaaatgcgtggcaggcggcggtcactgtcagcgaagcctctctgggcgcgcgcgataagtgggtgaaattcacgggtatcgccagtaacaacggggcaggcagaacacgcgcggtggtctggatctccactcgtggcgccaccggcaacggtacccctggctattcactgtatatcgacgatctggtcatcacggatgttaccgatgcgaaagcggcacaggatgcctctgacgcgacggcgagcgccgtgatcggcctgacggcgcgcgtaacggatgccgaagggaaaatcactgcccaggcgcagcagcagacagcactggcctcgaaagtggataacgccaactcccgcgtcgataacatggcgaaggcgctaagcgacagccagagcacacaggccagcctgaatacctcgcttcagtcgcagattgacgcgcaggcggccgccaacatcaaaaaccagacgacgctggacaacacgattaaatcggtggccagtatcaccagtacccagcagacgcatgcaacggcactggaggcgctggcaacgcagcagacgaccctgacatccagtgtcggggatctcagcgcttccgttcagaacaccgccaaaaccgtggcggatgtgaatggtacggtgagttcgctgtggtcgatgaaggttgagacggttaacgggaagaatgttggcgcggggattacgctgggcagcaatggtgaaacgagcgacatgatcctctacgctgaccgcttctcgctgtttaaccgtaataatgcgacggctgttccggtgatggttgccgaaggcaatgagctgtatatcgatacggcacgtatcaaaaacagttccctgacctctgccaaaatcgcggacggttccattacgaacgcgaagatcggcaacgagatccgctcgaataactttgttgacgggtcgcaaggctggcgtatcgccaaggatggctcttcgcagttcaataacgtgatcgttcgtggcagggtcgaagcgaatagcggcgtgttccgtggcactgtccaggcggatgcgttcatcggtgacattgcggtggcaaaaggttacgacagcctgaccttccgccgcaaccagacggtacagcggaacggtgcgtatcagaacagggggtatagcatgacagtggttctggcctgcaccctggtgtgccagacctatgggacgggcagtggcctggggtatacctctgatattacgttcaacattggtgggcaggaggtaatccgccgtatcttcgtcgatgccggtaatatcacagctggcaccacggcctttgaattgcggtttgccgcgcgcctggatgctgactacaacaatgtcggcttctttatcaaggctacaggtcgaaatgccgcgattgattacacctgcacagtcgagaacatcaccgcaaccgccttccgaacggacaacagttcatttagctaa

SEQ ID NO: 215948 - DNA, 1161 bp, Klebsiella pneumoniae
gtggtctaccgcagcggtagtgctgacctgtatgcgatcaaatctgtggacagcgacacgcaactgacgctgaccaggaatatcaccaccgcattttccggtgccagttacggcattattaccgctgaaaccgccagcacctcgtcgtttgctaaccagctggccagcgcgtttgcattctggcgtagtgtagtggagggctggtcgatggccctgaccggcagcggcaatatcaccctgactgacccgatcaccggaaagcaggtgaccgtaccggcgatagccgggatggcgaaggcatcggatcttaacgcactggcaaaactcactggaggaaacgacctcgacggctcgcaggttataaccagcgataatgccggttttattcttggcaggaacaacgatattggactggtcaaaaaatcaggcacctacgggaagctgatggtgggcagcggaacgcgcttcagcgtggtgaaaggaaataaggcgaccatcagccctgaagatacccagactgagattatgggggtcgatagcgccggcaatctggctgttccgggcaacatcagcgcggggaaatattttgcgcaggccattgagctatcgatgagtacgccatacatcgactttcatttcaacgatagtaccgccgattacacaacacggcttatcgagaacgtagcaggtgagctgactctcgaaggggcctttatgtgtaaaaagcatctatacgcctggggagcactcatggcgagaagcgttgccccgagcaatccagcgaatggacaactgatcaccggcgcaccgttccagtcgatgattcaagggcgtggcggctttggcgatgcccgtggtgcggtagcaaactattatgttgaggagtctgtgggttcggagcacagggcggttgtctatctcgatggttatggccgaactgatgcatggatcttccgtgctggcggcaccatttccactggcaaaggggacgtcctgaccaccggctcagacgtgcggcttaaagaggattttacggaatctcgggaaggtgcctccaggcgcattaacgcgctgggggtatgcgagttcaacatgaagggtgaaacgcgccggaggcgtggttttatcgctcagcaggctgaaaaagctgatgatctgtaa

SEQ ID NO: 215949 - DNA, 1059 bp, Klebsiella pneumoniae
atgttaacaaaattcccagatgaaaaatacatatctgacagaaattcatcgtttattaaaagagtatatttcttacgtcagataggtgtcgttctttgctttcttcctatatattcagtcctccaggaacagtcacatcaaaaaataacgatagccctgttaattttgaatgcactcatctggccatcggttgcttatctggcaagcatgatgtcgaaggatatgctgagtactgaaaaaaagaatatggtactcgattcattctgggctggtatctggatagccgtaatgcaagctagcccaattccatcattattcataatctccgttcaaatagctgatcgctatgctgctggtggatggaaaattttaaaaccagcattaacgtggatgatgattagtttcgtgatagtttggttagcaaatgatttcagatatactatagaattcagcacccgaacggtattgctttctttaccgttggcaacctgttatcccatagtgttgagtgttgtttcaaggcacttatctataaagttgaggaaaagaagggagttactggaaaaacaggcgctgatggatcctggcttagatctgccaaatcgccgattttttgagcaaaaaatggaaagtgcttttcgtgcgacgcgtaaaaagagaattcattcttatcttatgctcattgatgttgataattttaaaaaaattaatgatacatatggtcatgaagtaggtgatgcggtgttatctcgtatatcaacaatattacgagagtgcgctggcgagaaggatgtgccagcaagatttggtggcgatgagttggctattattgttaacaacagtaatagcaagcttgttatagccatggttgatataattcaggaaaaaattaaagatctttcattgccttctcataaagatatgtactgtactgtcagtatcggtatttcttgtgcagaaaataaagaatcaattatcgagtggatcaaagaggctgatcaaatgctatatgaagttaaacgtaatgggaagaatggatattgcatgccgaataattga

SEQ ID NO: 215950 - DNA, 693 bp, Klebsiella pneumoniae
atgttaaagaacagtgtggaaatagaatcctgcaggtttgttttagaaccatcttacaaaaaagatggttctattcattcttgggaaattctcacgaaaagtgttaaaaaaaagaacgctaatgattatcatgctaatgaaggtcttttttgcttcagttcgctaagcgataaagaaaaaatcgatgtgtttaagagacagatattgacaattgaaaagcttgatgcatcaaaattgaagttcaagccagtttcgttgaatgttgacagtcttattagcgattgtattttgaacgataaatatattggtgattacttaaaaaaccaaaaaaacattgcttttgagattaacgagtattttcatgaattcaatactaaatgctgtatggctgacttaaagtgtctttcaaaattgtgtccagtatggctggatgattttggaaggggcttaacaagtttaacaattattgatatgtttaattttgaatgtataaaaattgataaagattatttctgggaaatacagagtgagagcgaattctttaaaagaataaataaaataaaatcatactgcaatttcgtgattgttgagggagttgagacaatagaacaaaaaaataaagtacattctgttgttgattgcgcttgccagggaaggttgtggatgagtgattactattatgttgagatttaa

SEQ ID NO: 215951 - DNA, 804 bp, Klebsiella pneumoniae
atgaatacctggttaaatttaaaagataacgtcattatcgtgaccggcggcgcctcgggaattgggctggccattgtcgatgaattattatcacaaggtgctcatgtccagatgattgatattcatggcggcgatcgccatcacaatggcgataattatcacttctggccgacggatatttccagcgcgacagaggtgcaacagactatcgatgccattattcagcgctggtcgcgtattgatggtttggtcaataacgctggcgtgaatttcccgcgtttattagtcgacgaaaaagcaccggccggccgctatgaattaaacgaagccgcttttgaaaaaatggtcaatatcaaccagaaaggggtgtttttcatgtcgcaggcggtggcgcgtcaaatggtcaaacagcgcgccggtgtgattgtcaatgtctcttcggagagcggcctggaaggctctgaaggtcaaagctgctacgccgcgaccaaggccgcgctcaacagctttacccgctcctggtccaaagaattgggtaaatatgggatccgcgtggtcggcgttgcgccggggatcctcgaaaaaaccggtctgcggacaccggaatatgaagaggcgctggcctggacgcgcaatatcaccgtcgagcaacttcgcgagggatataccaaaaacgccattcccatcgggcgggcaggaaagctctcggaagtggctgattttgtttgctatctcttgtcagcgcgcgccagctacatcaccggagtcaccactaacattgccggcggaaaaacgcacggttaa

SEQ ID NO: 215952 - DNA, 1140 bp, Klebsiella pneumoniae
atggaagtctcttttagcagtcttggttttcgcgaacgcgatcatttgcaagagtggctggcaaacaatcctcaagcgttgactaagaaagatgataaagaggacgaacttttaattattcagaaagagtttgctggttttgatgagactaacgaacgtctcgatctgctggctatcgacaaaaaaggcaacttggtcattatcgagaataaacttgatgattcagggcgtgacgtggtctggcaggcgctgaagtatgcgggttactgcgccaaccttcgtcaggaaagcgttgtcgaaatttttcagctttatcttacacaacatgaaccctcggaaatccgccctgcggcagaagttattgcagaatttatgggctgggaaagtttgaaagaaggtgtgctcaatcgaaaagggacacagcgcgttattatggtagcggcgaatttccgcaaagaagttaccaatactgcactatggctaatgcagtttggcatccgagtgcaatgcttcaaagcgacgccgtacctctttgccgaggatgtttttgtcgatatacggcaggtcattccgactcctgaagcggaatcctacatgattggaatggcgcagaaagaggcagaagagcagtccacctcaagcagtagcgaactgcaacaacgacattatttacgccgtgagttctggtcgttagcactggaaaaattccgtaccagcacatgttcattatttaacaaccgagcacctacgacagaccattggctggcagcgggttcgggggttagtggcgtgccttttgaagtgatcttctcgcaaaaagatgctcgcattcagctcaatatttcacgttcagatgcggtagaaaatacatggctgtttgagcgtctgtcagagcgcaaaacgcatattgagtcgcagtttggtgggatgctcaattggcgactactgcctgagagaaaaagctgccaggttgtttgtgcaaaagcatttgacggcggaaacaaagaactttggcctgacatcattagctggatgattgattgtatgacccgtctggaaaaagcaattcgcccgagcttacaggagctggcggttgagctgaaaaagtcaggtctgatcaccgaaggtggggacgagtag

SEQ ID NO: 215953 - DNA, 549 bp, Klebsiella pneumoniae; identical to SEQ ID NO: 204453

SEQ ID NO: 215954 - DNA, 192 bp, Klebsiella pneumoniae
atgaaaaagatcaccggatttgctgctctgctgatggtaatgtctggctcagccatggctgccagcgcccccgcctgtgttactgctgaaaaaacccagatcgaagggttgttcgataagtggaataactccctgcaaaccggcgacgcccacaaggggtcggttccggctgagggcgaaatgacaccctaa

SEQ ID NO: 215955 - DNA, 954 bp, Klebsiella pneumoniae
atgtcagtaatacgtacactgttactcgcctgtattgccatcgtgggggggctgacgttcagccataatgcccgcgcggataccacttgctggaacttaagcccgggggggttctccttcggtaatgtgacggcagggcaaacggcctcggccaataacaccctcgaatttcagtgtaataactacacccagacagcggtctatgtacggatgtgcctgagccagaccaacaatactacgccagtaatgaacaccaacccggcggtaacgccgctgtattaccatatttattctgcaaatgaacccagtatggcaataggtggcaataacaccacctatgcggaaaacacctttgccatgtctgccgggcaaagtaacgcgtcttatccaatgccgctggtcgccaggatcgtggcgaaccagaccacgatcgccgcgggggattattatgattacaacaccagtctgacggtgaaatatgcaaccagccagacagaatccgggcttccctcctgtaagaccatgaccggtaccaccatttctgattcaattggtgccaatgcgaccgtgaaaaacggctgcgagctggtgagtgtcgacccgatggacttcggtgaaaaaacaccggtggacggcacccggctgagtggcagtgcgcaatccagcgtggtcgtacgctgcccggtgggcaccagttatacggtggcaatggatatgggccagcacagcgacggcagcagccgcaggatgtgcaatggcagcgagtgtgtcacttacgggctttaccaggatgcgggtggctcagtcacctgggataacagcgcgaatgtgctgacggagatctcgtccaccgggaataatcagtcaatcccggtatacgggaaaataccggcccaggagtggccggctgccggggattatactgataccgtggtggtcaccctgagttactga

SEQ ID NO: 215956 - DNA, 2346 bp, Klebsiella pneumoniae
atgcatccagtcaggctattacgctcacccgttagtggccttttgtctgccctgctgctttgccatccggctgcagctgcagaggcagacaaactgctgtatttgtctgtcagtatcaatggctccccggtgcagggccttacccgggtgaaccagcaaggagactccctgagcatcctcgcccaggatgccagccggctgaatatccgtaccgatgatttgcccgccgctgacggttatattcagctggccccccgtgacgggctgaaatacgaatacgatgcgctcagccagaccctgaaaatcaccgcagaccgcagccgtctgggcggcgggcagcgccttcaggttgagcatggcggggcatacctgcatgagaaccagctatcccccccggtcaccggcgtcgccctgaactacagtttattcgccagccacgacagtgataaccagtacctgaccggctacacggaagccagaaccttcggcatcggcccggggacattatccagctcattcaacacccgaatgacagagcaccacacaaccagcgatgacaccgggacccgcagactgatgacctggtggaactgggaaaatgtggacaaaatgcttagcctgaccgctggcgacagctacaccgcaacccagtcatggaccagcagcgtgcgttttggcggcatcagcttgtcccatagttacagtatgcagccaagtgtgaacacctctgcccaggatatcctgacagacacggtgacaatgccatccacggttgatctgtatatccagggggtgaaaagcgcctcccgccaggtaacgccagggcagttcactctgaatacatccccgatcctcaccgggaccggcagtgcccaggtggtgatcaccgatattaacggccagcagcgggtggtgaacctggcactgtatggcagtaaccagctactgagcgccgggctgacggactggacggtgaatgccggctgggtaagaaagaattacacttataagtcattcagttatgatccgtcttttgtcaccgtgggtgatatacgccatggggtgagcaaacgcctgacgctggaatcgcacaccgaacagggcggcaacctgaacaaccttggcgcggggatgaattatctactctccccggccctggggatcctgcacagtgatttatcctgggggcgttaccggaatgacgccggtatgcaatggggcacgggctggcagtggaataaccgcagtgtaaacgtctcgctgagccacattcagcgcaacagcgcgttccgggacatttcatccattgccgataacagcctcgccacccgtgaagacagcagctttgtaggctggtccgtgccggttattggtaccctgggtgtcagctggatcgaccgccgctaccctgatgaagagacccggtacgccgggttatcctggtcccgcacctttggacggcacctgatcatgtctgccagttacacccagaccctggatgccagccgggacaagacgctgtacgtgaatattaacgtgccgctgttcagcagccgggacaacctctcgctgcaacataatcacgataccaacggcaacagtgaacaggtcagcctgagccattcgcttgagtccaatacccctggctgggggtggaatgcctctgcccgcaacggcagcagcaatgacagccacctgactgtgcagcgccgcaatacctggagtgacatggagttaggcatgaaccgctacagcagccagaaagaatactatgcgtccatgtctggtgccgtggggctgtttatgggcaatgtgtatgccacccgggaactgggtgatgcctttgtactggtggatactgaaggggtgccggatgttccggtattactggagcaccgcaaggtagggaaaacagacagcaacgggcggctgttcctcaatgatctgctgccgtatcaggaaaaccatatcaatatcgatgccctgcacctgggggctgactaccgggcgccctacacgggccaggacgccatcccgcggcgaaataatggcgcggtagcgcgtttcagcgtttaccgtacccggagcatattgctggttgcccgtctgcccgacggcaaacctgtgcccttctccgcccaggtacagatactggatcaacacgatcagccaccggcccggggcaccctgaacaccgtcaccggttatgacggcaatatatacctggaagatgcgccggcaaacgggcacgcccgggtaacctggaacaacgggcaatgcaccattaccctccctgccgcacaggccgataccgccagcatgagaagagacgttatatgtcagtaa

SEQ ID NO: 215957 - DNA, 720 bp, Klebsiella pneumoniae
atgaaacgcataatactgggcggcttattcgcactcaccgggggctgcttttgtgcgggatcatatgccgccagcctgcagatgtacccgctgaccgttaacttttgtaacggtgaagcggtagagccggtatacgttaaaaataccggctctgagcccattggcgcccagttacggctctaccagtggcagcaacgcaaccacaaagatattctgacccccacccaggcgctgatcagcagcccgccgattgccagcatcccgccaggcaaggagcaactggtgcgggtcatcaccccgggggccgtgcccgctggcggaaatgaacagtcctaccggttactgattgatgaactccccggtgcgcaggcgaaaagccaggacagccgggtgcactttctgctgcgctattccgtgccggtgttcatgagctgcgccagcaaaaaagtcgatttaacgacacttcatgcatcgcagaataacagcggcggccaccagcagctggtgatccgtaataccggcagccagcacctcaaactgagtaacgtctcgctggttgcgggcggtaaaagctacattctgaacaaaggactgctgggatatgtattgccaggcagtgaaatggcatgggacatccccgataacttacctgccggtaccgccattaacgctaccctgaacgacaatgcatccagtcaggctattacgctcacccgttag

SEQ ID NO: 215958 - DNA, 540 bp, Klebsiella pneumoniae
atggcctgttgctctgtcagatatattaacaacactgaccatggggtctttatgaaatacaaaaatgccgctgttctggcattaagtgccgcagggatgctgtttacctccctggcaaatgccgacgataccactcagtctctgacgcaggatatgaatgtaaaactgaaagtcactgctgcctgcagcatgacagtcagcgatctggattttggtacccatgccagcacggacggggaactgaaagaaagcaccaacgcccaggtgacctgcaccaaaggcgcgccttataccctgacagcggaaagcactgacaaatatgtcatgaaaaataccaccgatgatacatcgaccgtggcgtataacctgtacagcgacgattcttacgccaccagcctgacggacaccaccggtgttgacggcgtgggtaacggtagcgcccagtcggtgcctatctacggtaaggttacctctgcgcagctggcccaggccgctgtgggcgattaccttgacgttgtcacccttcagttaacctactaa

SEQ ID NO: 215959 - DNA, 543 bp, Klebsiella pneumoniae
atggaattaacattacctttaacaaaagaaatagccaaaacccttaaagttggtgatattatctatctcactggctttgtttatacctgtcgagatgcggcccataaaaaaattgaaatcgctttgaaacatggtgaaaaaccaccggtcgatcttaaaaaccagatcatttactatgcaggaccgtgtccggcaaggcctggcctaccgattggttcgaatggcccaaccactgcagctcgaatggatccctttgtagaaatgatgtttcagcaaggcgtaaccgcttttctaggaaaaggtgaccgtgccgattatgttgcagacctctgcaaaaaatatggtggcgtctccctattggggattggtggagcttctgccatcaatacgaaacatgtcaaatcagttgaaattcttgcctatggtgaactgggcaccgaatccataaaaaaaatctattttgatcgctatcgcgtaatagtgggaatcgatactgaaggaaatacactacagaagcaggaagtgagaaaatatgctcggtaa

SEQ ID NO: 215960 - DNA, 846 bp, Klebsiella pneumoniae
atgagtagaatactgaatacagaggtcatcgttccagttattgaagaactggtaaaaaaagcctgttatgagcttgatgataatctgatgtgtgcttttcgtaaagcatatgagaaagaagagtctaaacttggtaaagagacaattaaaatattaattgataacggtgagtatgccaaaaaagagcaactcgcatgttgccatgatactggcacctgcattgtcatcatggaaataggtcaggaagtatgttgggaaggattttctcttcagcagcaggtcaatcagggtgtacggcaaggctatgaaaagggttatttaagaaaatcaatggttgcagatcccctcgatcgtatcaatactaatgataatactccggcagtattacatactgaaattgttgagggtgatcgcgtgacaattaccgtcatgcctaaaggcggcggcagtgaaaacatgggcacatttaaaacattattgcctggagatgatattgaaggcgtaaaaagattcgttcttgaaaccgttcgccatgtaggcggaaatccgtgtcctccatatattattggtattggaataggcggtacaatggatcgttgtgcgtggatggctaaaaaagcattattacgccctattggcgaatataatgcaaaaccgctttatgcaaaattagaagctgaactattagatgaggtcaataatactgggattggcccattaggcatggggggacgtgttaccgctcttggcgtacatattgattattatccatgccatattactgctctgcccgtagcaattaatttccagtgcaatgctagtcgtcatgctagcaaaactatttaa

SEQ ID NO: 215961 - DNA, 885 bp, Klebsiella pneumoniae
atggaaattagacagctggaatattttattagcgcatctgcattaggcaaccttaccaaggttgcagaacgtcattatgtttcgcaaccaaatataacagttgctataaaaaagctagagtctgagttaggtgttaatctgtttgagagaaggaaaaataagttggtgttaacggaagaaggggaattcttcttattaaaagtcaaacctctcattattgcattgaagaatagtgttgctgaaattaaagattatcataataaaaacagtggagtggtaacattagggattcctcctatgattagcctttttttgtttacaccactatttaaacattttcgcgaattatattcagaaatggaactttcattagttgaggaaggtacctttgggttgcatcaaaaactttctcatggcgatattgatttggcgattgtcattatcaatgatgcaccagaagagttagtaactgtaccattaatgactcagcagcatgttgtatgtatatccgataagcaccctttggcgaagaagaaaactatcgactgggaggatttgcaaaatgaaccattaattgttatgaaaaaagattcatggcatcgtaaagctattctaaatgaatgtgaaaagaggggtgttaatactcatatcttcttatcttccaatagtgtaaagaataatattgatttggtggcaaaaaatgagggtatatcatttattctcgatgcggtagggctaaaatgtgatggtgtaacaacaagagcgatgacagaacctgtctatgtcgagataggcctggcatggaaaaaggataaatatttatcatacgcatcaagagcattaattgcattcctggaacagtatattaaagacaatttccaatag

SEQ ID NO: 215962 - DNA, 927 bp, Klebsiella pneumoniae
atgcaatatcggcatcacctggaactaacatggcttgaagactgcgtagcactgaaagaaacattgaatttttcaaaagcatctgcggcaagatatgtgacgcaacccgcatttagccgtagaatacagtctctggaagaatgggttggcacaccactctttgaaaggagtaaaagaggtgtatcgctgaccaaagctggcgaggtttttattgaacaattaccagaactaatacacgacttatattcattaaaaaacaatgcgctggatgcagctggcaataagcaaccacatttggttttctcagcaacccatgcattatccttttcatttgttccaagcatgttaaaacaaagtgaaaaaatagctaagtttggctcatgtcgtctgctctctgattcgttgaactcatgcgaaaaaatgatgcgtcaaggcgatgcccaatttctgctatgtcactaccaccctcatatgcacctcaatctaaatgaaagccattttatgagcatccgcttaggaatggatatactcatcccttttagtaaaccaaatagtatgacaatgaagccgttatggtgtattgagaataggtccaattttccctatctttctttttcatcacaatctggattaggtaggataatatcaaatacaacttcaattaacagaatcacacataacatgaaaattgcatttgttgccgatctggcggccactttgctggcaatggtgagatcgggtgatggtgtggcctggttgccacaaacgcttgcggcacaagatgttgcctctaaaaccattgtggcggcagcagatcaagaaagcaatttatgggtaccaatcgaaataaggctttatcgaccggcaaaaaaaatgccaccagatgctgaagaattatgggagttatttgttgaggaacaaatataa

SEQ ID NO: 215963 - DNA, 1269 bp, Klebsiella pneumoniae
atgtcaccagctattatcactttgttgattttggttgttgcaataataatctttattagcgatcgcttgcctatgggattggtggcttttatggtcccgatggcattgtatttttctggggttattggtgtcaaagatatctttgcgtcaattgttaatgaaaatgttatccttatcattgccatgtgcgtgttgggcgcggcctttttcaaaacagggctagcatggcaatccagtaaaattttattgaagtatgcaaagacggagagaagccttagcgttttaatttttatgattagcggcgttatgtcggcatttgtttctaatagtggcactgttgctgtgcttattcccattgttttaggtatcgccgggactagtcaaatcaaacccattaaactactcatgcccttggtgtttggcgcgacaattggtgcagatatatcaattatcggttcgcctggaaacctgattgctaaaaatacaattgaaacttttagtaaagggaacttatcggtaccattttttgagtatgccaaaattggcatcccattgatgatagcgtgtgcattgttacttttcttctttggttccaggttaattccggatcgtgatgggcatgagcaatctgatgtacaaatggattatagccacattcctgagtggcacaagcttttaaccttgattgttttcgtattagcaattttgggaatggttgcaacagactatgttaaatttcttccacctattcatatcattgcttgctgcgccgctatcgttttggtattgaccggtgtattaaatcaaaaagaaacgtttaattcctttgagacattaactgtttttatgcttgcattcatgatgccacttggtgccgctttaaattcaactggagcaggtgagatgatagcaagagcggtaatttctgtaacagggaactctggcgtcatagtcatcatggcttcactatggatactgacctgggctctcactcaggtgatgagtaatactgctgcttgtacgttgttatgtcctgttggatggacaattgcacaatctatcggtgctgatccacgggctgtcgttattgccatttttattgccagtagcgtagcagtgtgtacacccatggccattccagccaattcgatgattatcggtcctggtaatgtgaagtttaaggattttttaaagccaggcttagcgataagtttcgtctgttttatcgttagcatgattttgttacctgttttttatccgttctattaa

SEQ ID NO: 215964 - DNA, 141 bp, Klebsiella pneumoniae; identical to SEQ ID NO: 36145

SEQ ID NO: 215965 - DNA, 930 bp, Klebsiella pneumoniae
gtgaaaagagtacagtttaaccgctatggcggtccggaagttatgtcatttggtgagtatgctctatcagaacttgctcctaaccgggttcgtgtccgtgtaaagaccgctgcactaaatccacttgattggaagttacgccaaggcgtaatgaagtttgtaactgggagaaagtttccgcagggtatgggatccgattttgcgggtgttgtcgaaagcgtaggctctcaagtgacagattttgaagtcggtgatgaagtatttggtaccgtcgagattaaaagacagggagccttcgctgaactggttgatgctgatgccagcttgttggtacacaaaccaacagcaatatcctttagcgaagctgcctgtattccaatcccagcggcaacagcttgggctgcggttattgacgcagcaaacgcaagagaaggtgcacatatttttattaatggctgtagtggcgcagtaggtagcttcgctgtccaattagctcttgcttatggtgcttgtgtatctggctcttgtggtacgtcgtctgcacaaagcgtacaagcagccggagttaatcccgtctttgcgtatgaagacaaaacagcaatggcagcaaacggtccttacgacgcggtatttgatacattgggatcacttcctgtaacagatggcttagctatgcttaagaaaagagggcgttttattgatattaatcccactctaggaagaatactccgaggctttgtgtccggtcgctataagatggtatttgcaacatcaggttttaagagcctgcaaaatatcgcagacgtagcaatggacgggaagctccattcatccattgctttagaagtaccattctcagaggcactgaacgttatcaaagacgctgaattaggtaagcgcccacctggtcgagttgtgctagttatgtaa

SEQ ID NO: 215966 - DNA, 591 bp, Klebsiella pneumoniae
atggcagagaaaatccccggtctaagagagcagcagaaagcagccactcgtaaacagttaatccttactggcgtcgaactatttttgaggcaaggttttgtaaacaccacaattgagcaaatcgtggaacctttaggcatggcaaagcgtactttttttcgctacttcgacacaaaagaagagcttcttttcgcctggcaaatggacaaaacgactcagttaatagacgaattaacctccaggccaaaaaatgaatcacctatgcaggtcatacgcgcaacgctttcttcgttgctcaaaaattatgatgcgagtccagcgcaggcattagcttttatgcgtttgaccagggagacgccagcgctagttggtcgcgattacgaacgaagaatggtttgggagcaagctttagcggcagcattgatagaaagaaatggcagtgaagcactcgatcctctgaaggcgcgaattattgtcggaacagtgatgtctgcttggactgctgcattgggagaatggtacgacggagagggtaaagaggatttacgttcaattgttaatcgtgcgttttcaatgatcagtaaaaaatga

SEQ ID NO: 215967 - DNA, 285 bp, Klebsiella pneumoniae
atgggcacaccacgttttacccctgaatttaaggaagaggccgtccgccagatcaccgagcggggctattctattgctgaagtatctgaacggctcggcgtgtcggcgcacagcctatataaatggctccgggctgttaagcctgacaacagtggacagcaggcacaggatttactggatgccagaacagaaattctcaggctgaaagcacagcttaaacgcactgaggaagagcgggatattctgaaaaaggcaacgcggtactttgcaagggagcccgactga

SEQ ID NO: 215968 - DNA, 804 bp, Klebsiella pneumoniae
atgtgtcgggtccttaaggttgcccgtgccggattttatgtctggctccataaccctgtatctgccggagaaaaggataaccagcgactgctggaactcatccgcgactcctatacgctgagtggtggagtttacggttatcgcagggttcatggcgatcttcgcgaaattggcgaagtgtgcagcagaaaccgggttgccaaaatcatgaggaaaaacaggattcaggctataaatggttataaagtgccacgcgggagccggggacgaccgtcactgatagcgcctaatcacgtgcggcgtgaatttactgtagtgaagcccaatcaggtgtgggtcaccgacatcacctacatccgcacctggcagggctggctgtacctggcagtggttatcgatctttttgcccgtaatgtggtgggctggtcgatgaagccgacactgtcgcgcgagctggcactggatgcgctgctgatggcggtctggcgacgtaaacctgaagaaaacgtcattgtgcaaagcgatcagggcagtcagtatggcagtgatgactggcagcggttctgccgggccaataatctggtaccgagcatgagccgtcgcggcaactgctgggataatgcagtggcagaatcgttcttcagttcactcaaaaaagagcgcatcaggaagcggatatacaaaacccgggacatggcccgggcggatattttcgattacattgaagtgttctacaaccgtaaccgacgccacagccacctcggcggcgtcagcccggaggccttcgaaaaggcctcgcagtga

SEQ ID NO: 215969 - DNA, 906 bp, Klebsiella pneumoniae
atgattgatgtcttagggccggagaaacgcagacggcgtactacacaggaaaagatcgctattgttcagcagagctttaaaccgggaatggctgtctcccttgttgcccggcaacatggtgtggcagccagccagctatttctctggcgtaagcaatgccaggagggaagtcttactgctgtggctgccggagaacaggtcgttcctgcctctgaacttgttgccgccatgaagcagattaaagaactccagcgcctgctcggcaaaaaaacgatggaaaatgaactcctaaaagaagccgttgaatatgggcgagcaaaaaagttccgctgtgataacggagaaaaactgcgggtcacgttcgcgctggactgctgtgaccgtgaggcactgcactgggcgggcacaacgggtggcttcgacagtgaaacagtacaggacgtcatgctgggagcagtggaacgccgctttggcagcgagcttccggcgtctccagtggagtggctgacggataatggttcatgctaccgggcgaatgaaacacgtcagttcgccaggatgttgggacttgaaccgaagaacacggcagtgcggagtccggagagtaacggaatagcagagagcttcgtgaaaacgataaagcgtgactacataagtatcatgcccaaaccagacgggttaacggcagcaaagaaccttgcagaggcgttcgagcattataacgaatggcatccgcatagtgcgctgggttatcgctcgccaagggaatatctgcggcagcgggccagtaatgggttatggagtgaccacgctccggtagacagtttctgtcctcactgcgaggccttttcgaaggcctccgggctgacgccgccgaggtggctgtggcgtcggttacggttgtag

SEQ ID NO: 215970 - DNA, 1002 bp, Klebsiella pneumoniae; identical to SEQ ID NO: 196938

SEQ ID NO: 215971 - DNA, 600 bp, Klebsiella pneumoniae; identical to SEQ ID NO: 196937

SEQ ID NO: 215972 - DNA, 1302 bp, Klebsiella pneumoniae
atggaaagtctgaacgccctgattcagggcatggggctgatgcacctcggcgccggccaggcggtgatgctgctggtcagcctgctgctgctctggctggcgattgcgaagaagttcgagccgttactgctgctgccgattggcttcggcggcctgctctccaatatcccggaggccgggctggcgctcaccgccctggagagcctgctggcccaccacgacccggcgcagctggcggtgattgccgcgaagctccactgcgcgccggacgtccacaccattaaggaggcgctggcgctggccctgccgtcggtgcaggggcagatggagagcctcgcggtggacatgggctactccgccggggtgctggccatcttctataaggtggcgattggctcgggtatcgcgccgctggtcatctttatgggcgtcggagcgatgaccgatttcggcccgctgctggctaacccgcgcaccctgctgctgggggcggcggcgcagttcgggatcttcgccaccgtgctcggggcgctgacgctgaactacttcggcatcatcagcttcaccctgccgcaggcggcggccatcggcatcatcggcggcgccgacggcccgacggcgatttacctgtcgggcaagctggcgccggagctgctgggggccatcgcggtggcggcgtactcctatatggcgctggtgccgctgatccagccgccgatcatgaaggcgctgaccacggataaggagcggaagatccgcatggtgcagctgcgcacggtgagtaagcgggagaagatcctcttcccggcggtgctgttgctgctggtggcgctcctgctgccggacgccgcgccgctgctggggatgttctgcttcggcaacctgatgcgcgagagcggggtggtggagcggctgagcgatacagtgcagaacgcgctgatcaacatagtgaccatcttcctcggactgtcggtgggggccaagctggtggcggacaagttcctgcagccgcagacgctggggatcctggtgctgggggtgatcgccttctgtgtggggaccgccgccggggtgctgatggcgaagctgatgaacgtgttcagccggcacaaaatcaacccgctaatcggctcggcgggggtgtcggcggtgccgatggcggcgcgggtgtcgaacaaggtgggtctggaagcggacgggcagaacttcctgctgatgcacgccatgggcccgaacgtggcgggggtgatcggctcggcgatcgccgccggggtgatgctcaagtacgtgctggcgatgtag

SEQ ID NO: 215973 - DNA, 1779 bp, Klebsiella pneumoniae
atgaccgttgccattaccgatgtcgtcctgcgcgacgcccaccagtccctgttcgccacccgtctgcgtctcgacgatatgctgcccgttgccgctcagctggacgacgtcggctaccgctcgctggagtgctggggcggcgccacctttgacgcctgcatccgctttctcggcgaggacccgtgggtccgcctgcgcgagctgaaaaaggcgatgccgaagaccccgctgcagatgctgctccgcggccagaacctgctcggctaccgccactacgccgatgacgtggtggagcgcttcgtggagcgcgccgtcaaaaacggcatggacgtcttccgcgtcttcgacgccatgaacgacccgcgcaacatgcaggccgccctgcaggcggtccgccgccacggcgcccacgcccagggtacgctttcgtacaccaccagcccggcccacaccctgcagacctggctcgacctcaccgaacagctgctggagaccggcgttgactccgtcgccatcaaggacatgtccggcatcctcaccccgcatgccgcctttgagctggtcagcgaaatcaaaaaacgctatgacgtcaccctgcacctgcactgccacgccaccaccgggatggcggagatggcgctgctgaaggccattgaagccggcgtcgacggcgtcgacaccgccatctcctcgatgagcgccacctatggccacccggccaccgaggcgctggtggccaccctcgccggcacgccgtacgacaccggcctcgatatccacaggctggagagcatcgccgcgtacttccgcgaggtgcgtaagaagtaccacgccttcgaaggccagctgaaaggcaccgacagccgtatcctcgtcgcccaggtgccgggcgggatgctcaccaacctcgaaagccagctgaagcagcagagcgccgcccaccgtctggatgaggtactggcggaaatcccccgcgtgcgcgaggacctcggcttcatcccgctggtgaccccgacctcgcagattgtcggcacccaggcggtgctcaacgtgctgggcggcgagcgctacaaaaccattgcgaaggagactgccggtatcctgaagggcgagtacggccgcaccccggccccggtgaacgccgccctgcaggcgcgggtgctcgacggcgccgacccggtgacctgccgcccggccgacctgctgaagccggagctggcgcagctggaagccgacgtcagacgccaggcgcaggagaagggcatcacgcttgccgaaaacgccatcgacgacgtgctcaccgtggcgctgttcccgcagcccggcctgaagttcctcgaaaaccgccacaacccggcggcctttgagccggtaccgcaggcggaagccgcgcagccagtggcaaaagcagaaaaacctgccgcctccggcgtctacaccgtggaggtggaaggcaaagccttcgtggtcaaagtcagcgacggcggtgacgtcagccagctgacggcggctgctcctgctcctgctcctgcctctgcacccgccgctgccgccccggccggcgccggtatcccggtgaccgccccgctggcgggcactatctggaaggtgctggccagcgaaggccagacggtggccgaaggcgaggtgctgctgattctggaagccatgaagatggagaccgaaatccgcgccgcgcaggccggcaccgtgcgcggtatcgcggtgaaagccggcgacgcggtggcggtcggcgacaccctgatgactctggcgtaa

SEQ ID NO: 215974 - DNA, 1947 bp, Klebsiella pneumoniae
atggacgctgtacagaaagccaaatccggccacccgggggccccgatgggtatggctgacattgccgaagtgctgtggcgtgatttcctgaaccataacccgaacaatccggcctgggctgaccgtgaccgttttgtgttgtcaaatggccatggttcgatgctgatttacagcctgctgcacctcactggctacgatctgccgattgaagagctgaaaaacttccgccagctgcactccaaaaccccgggtcacccggaagtcggctacaccgcaggcgtggaaaccaccaccggtccgctgggccagggtatcgctaacgcggtcgggatggctatcgccgagaaaaccctggcggcgcagttcaaccgtccgggacacgatatcgtcgaccactacacctacgccttcatgggcgacggctgcatgatggaaggcatttctcacgaagtgtgctccctggccggtaccctgaaactgggtaaactggtggcgttctatgatgacaacggcatctccatcgacggccacgttgaaggctggttcaccgacgacaccgcgaaacgctttgaagcctacggctggcacgtggtgcgcggcgtggacggtcacgacgctgacgccatcaaacgcgcggtagaagaagcacgggcggtcaccgacaaaccgtccctgctgatgtgcaaaaccatcatcggtttcggttcgccgaacaaagccggtacccacgactcccacggcgcgccgctgggcgacgccgaaatcgccctgacccgcgaagcgctgggctggaaacacgcgccgtttgacatcccgtctgacatctatgcccagtgggatgccaaagaagccggccaggcgaaagaagccgcatggaacgagaagtttgcggcttacgccaaagccttcccgcaggaagcagccgaattcacccgccgtatgaaaggcgagatgccgtctgacttcgacgcgaaagctaacgagttcatcgcgaagctgcaggccaacccggcgaaaatcgccagccgtaaagcctcgcagaacgccatcgaagccttcggcccgctgctgccggaattcctcggcggctccgcagatctcgcgccgtccaacctgaccctgtggtccggctctaagccgatcaacgaagacgctgccgggaactacatccactacggcgtgcgcgagttcggtatgaccgctatcgccaacggtatcgcgctgcacggcggcttcctgccgtacacctccaccttcctgatgttcgtggaatacgcgcgtaacgcggtacgtatggccgcgctgatgaaacagcgtcaggtgatggtctacacccacgactcgatcggtctgggcgaagacggcccgactcaccagccggtagagcaggtggcttccctgcgcgtgaccccgaacatgtccacctggcgtccgtgtgaccaggtggaatccgcgattgcgtggaaatatggcgtggagcgtcaggacggcccgaccgcgctgatcctctcccgtcagaacctggcgcagcaggagcgtaccgcagagcagctggcgaacgtggcccgcggcggttatgtgctgaaagattgcgccggccagccggagctgatcttcatcgccaccggttcagaagtggaactggcggttgccgcatgggacaaactgactgccgaaggcgtgaaggcgcgcgtggtttccatgccgtccaccgacgcgttcgacaagcaggatgcggcttatcgcgaatccgtactgccgaaagccgtgaccgcgcgcgttgccgtggaagcgggtatcgctgactactggttcaaatacgttggcctgaacggcgctatcgttggcatgaccaccttcggtgagtctgcgccggctgagcagctgttcgaggagttcggcttcaccgttgataacgtggtcgctaaagcgaaagcgctgctgtaa

SEQ ID NO: 215975 - DNA, 1161 bp, Klebsiella pneumoniae
atggccattccgttcggcctcaagttcagcggctatgcccgctatggcgctcacttccagaccggcgaccagaaatatgtcggcgtcgacggctcctataacggcgcctcggcgatcggccgtctgggcaacgaaagcaacggcggcgaattccagatcagcaaggccttcaaaagcgcgcagggggctatctgggatcttaacgtgatgttcgaccactggagcgacgaagttaacctgaagaaggcctacgtcggggtcaccaacgtgctggaatccaaccccaacgcctatatctgggccggccgcgacttccaccagcgtccgcaacaggggatcaacgactacttctggatgaaccacgacggccagggcgccggggtgaagaactttgatatcggcggcgtgcagttcgacgtggcggcggtctcgcaggtgaaatcctgtagtccggaagtgatggccgacgagaccaacccgtcgcgtatcacctgtaccggcagctccgacaccggcgacaacggccactacgcgctgaccaccaaaacccacaacatcaaggccgggccgatcgacgtcgaggtgtacgccaactacggctttgattcgaaggcggtggacagcgacgcgcgtctcgaagcctggcagggcgggctggtgctgagccacaccaacgacagcggggtaaacaaggtgatcctgcgctactccgacaactcggataacagcgtctacaacaaaaccgacgacctgaccacggtctacgccagcttcgagggcagccataagttcacccagcaggcgcagatcgaatacctgctggctttccatgactacgacaacggcaaagataataccgacaaccgcaaaaactacggcgccatcgtccggccgatgtacttctggaacgacgtgcactccacctggctggaagcgggctaccagcgcgtggattacgaccagggcggggataaccacggctggaagctgacgctgtcgcagaacatcgccatcggcatggggccggagttccgtccgatgctgcgcttctacgtcaccggcggccaggtggataacgagcacaccgcgaaggtaaacggcacccaggaccagcagctggattcgctgaacgtcggcgggatgtttgaggcgtggttctga

SEQ ID NO: 215976 - DNA, 759 bp, Klebsiella pneumoniae
atgaaaattcgctcaaccgtacttgctcttgggatcgcagcaaccctcaccggatgtcagaacatggactccaacggtctgctcagctcaggcgccgaagccttccaggcatactctctcagcgacgcgcaggtgaaaaccttaagcgaccaggcctgtaaagagatggacgccaaagcgaaaatcgccccggccaacagtgaatacagccagcggctgaacaaaatcgcggctgcgctgggcgataacatcaatggtcagcccgtgaactacaaggtctatgagaccaaggatgtcaacgccttcgccatggccaacggctgcatccgcgtctacagcgggctgatggatctgatgaacgataatgaagtcgaggcggtgatcggccacgaaatgggccacgtcgcgctgggccacgtgaagaaaggcatgcaggtcgccctgggtaccaacgccgtgcgtgcggcggcggcctccgcgggcggtatcgtcggtagcctgtcgcagtctcagttgggcgatctgggcgaaaaactggtgaactcgcagttctcccagcgtcaggaatcggaagcggatgactactcttacgacctgctgcgtaagcgcggtatcaatccgtcgggactggccaccagcttcgagaaactggccaagctggaagccggtcgtcagagttctatgtttgacgatcacccggcctcagaagcgcgcgcccagcatattcgcgatcgcatgaaggccgacgggattaaataa

SEQ ID NO: 215977 - DNA, 981 bp, Klebsiella pneumoniae; identical to SEQ ID NO: 187672

SEQ ID NO: 215978 - DNA, 945 bp, Klebsiella pneumoniae; identical to SEQ ID NO: 15685

SEQ ID NO: 215979 - DNA, 747 bp, Klebsiella pneumoniae; identical to SEQ ID NO: 15686

SEQ ID NO: 215980 - DNA, 1860 bp, Klebsiella pneumoniae; identical to SEQ ID NO: 15687

SEQ ID NO: 215981 - DNA, 306 bp, Klebsiella pneumoniae; identical to SEQ ID NO: 15688

SEQ ID NO: 215982 - DNA, 1026 bp, Klebsiella pneumoniae
atgaccgctaagaatatttccctcgaccgctataaacaacgtttctttggcgactttctggagcttcccggcctgacggaaatcgccgtcaaccgtccaggtgaactgtacacaaaaatcaacggcgtgtgggagcaacatgccgttcctttgaactatgaggattgctacaactttgcccggtgcctggcaaaacaccacggcgacaatatcgaagatattaagccggggctgtcagccacgctggaatccggcgaacggtgccaggtgattgttcctccggcctgtgagcgcgatacggtgtctatcaccatccgtaagccatcaaaggtacaaatcccgcatcagtcatatatcgatgcggggttttataaccgggtaacaggcgaggaaaaaacggagacgcacgacgaggaattaattgcattgtacaatacaaaaaacattcctttgtttatggagaaatgcgtcgagtacggtaaaactctcgcggtcgccggggaaaccagtacagggaaaactacctatatgaaaatgttgataggttatattccggtacatcttcggatatcaacaattgaggacaacccggaaatcacgttctttatccataaaaactacgtccatcttttttatccgtcagaatcatcagatgaaaaaggttctatcgttaccccggcgagccttttacgctggaattaccgtatgaaccctgaccgcattttattaacagaggttcgcggtgcggaagcctgggacttccttaaaataacaggttccggccatgaagggagtatgacctccattcatgcaggatcagcgaaagaagctatagatgggtttattacccgttgctatgaaaatccacagtgcgcccagctcccctatacatttatgttacataaggttctggatagcctggacgtgattgtgagcattgatttagacggaaatgtccgccgtatgaatgacatttatttccgtccaattcatcgaaaccagtattttgaggaaatgaaaacatga

SEQ ID NO: 215983 - DNA, 1263 bp, Klebsiella pneumoniae; identical to SEQ ID NO: 15692

SEQ ID NO: 215984 - DNA, 906 bp, Klebsiella pneumoniae; identical to SEQ ID NO: 15693

SEQ ID NO: 215985 - DNA, 684 bp, Klebsiella pneumoniae; identical to SEQ ID NO: 15694

SEQ ID NO: 215986 - DNA, 1074 bp, Klebsiella pneumoniae; identical to SEQ ID NO: 15696

SEQ ID NO: 215987 - DNA, 243 bp, Klebsiella pneumoniae; identical to SEQ ID NO: 15697

SEQ ID NO: 215988 - DNA, 714 bp, Klebsiella pneumoniae; identical to SEQ ID NO: 15698

SEQ ID NO: 215989 - DNA, 2739 bp, Klebsiella pneumoniae
atggcaaagctgctcaaggcaatgaaacgcccggcggcgctgtggggggtgcctatggtgcccctgctggctgtcacgggtgtaaccatcatcgttgctgtctggacttccgtcgcactcctgttcttacttcccgtcgaatttctggtgatgaaatccctcaccagaaatgaaccaatgcggttcaatctgattgccgtttggctgagagtgaagggaaaaccggtagcaaaccgtttatttggcgcaacaacacttatgcccgttgagcatgaggctgttgatatcaaggagtttctcgacgccatgaaactaaatcagtgtgccaccatcaagaagtatattccgtactcatcgcacattcatcagcatgtggttcgctcacctaaaagcgatctgtactgcacctgggaattgatgggaacgccgttcgactgcgagtctgacgaatcactccagttcgggacgaaccagttacacgggctaatccactcattcgaaggtatgcccgtcactttctatatccataacgaccgcaatacgtttaccgacaatcttcataaagattccggcaacccgtatgccgatgaagttagccgtctttactacgcttctgtcggggtgttccggcgtaaccgcctgttcctgacagtctgctatcgcccgtttgtcagccttgaaaaagcagaacgcaaacggatgaaagacagccagaaactaaaggaactggacggtgctttgctggaaatgctggaaataaaaagcacgctcaataccgcgctgtcgcgctatggtgcgcggcctctcggtacgtttaccgaaggaagcgcggtgttttcgtcgcaactggctttctatgaatatctgttaacgcaccagtggcgaaaggtgcgcgtcacccgcaccccggcctatgacgtgatgggagcggcggcgttgttcttttcggctgaatccgggcagataaaccacgccaacggtacgcaatatttccgggggctggaggttaaagagttctccgaagaaaccgccacggggatgatggactcccttctttatgccccctgcgattacgtgatcacgcagtcctatacctgcatgtcacgcgaggaagcgaagaaagccattaagcgtacccgtcgccttttgatgagtgccgatgacgatgctgtttcccagcggctggatctggatgtggcgcttgacctgctgacatcggggaaaatcgcttacggaaagcaccatttttccatcatggtgtattccccgtcgctggaaaacctagtggctgatactaacgaaatcagtaatgcgctgaacaacatcgggataacgcctgttccggcagaaatatcgctttcagcggcgtatatggcgcaactgccaggcaactacaacctgcggccacgtaaaggggagctaagtagccaaaactttgtggagctggccgcactccataatttctatccgggcaagcgcgataaagccccctggggggatgctatggctttactgcgcaccccgtcaggagatggctactatatcaacctgcataacacactggcagataaggacgaattcaacgaaaagaacccggccagtacctgcatcctcggtacgaacggttcgggtaaaaccatgttgatgacgttctttgagatcatgcagcagaaatacgggcgtgaggatagcttctccccggatgccaaaaccaaacggctgacaaccgtttacctcgataaagaccggggcgcagagatgaacatccgggcgctgggtggccgttactatcgggttatcagtggtgagtctacagggtggaacccgttctcgttgccagcaaccaaacgcaatatcaatttcatcaagcaactgatgaaaatcctttgtacccgcaacggctcgacgatcttcccacgcgatgaacgccgtctgagtgatgcggttaatgctgtgatgaatgacgagccacaatatcgcgtctacggcattacccgaatgctggagaatttgcctgagccggctacgaaagaagcccaggaaaacggccttagcattcggttgtcacagtgggcgcagggcggtgagttcggctgggtgtttgataacgagtctgacacgttcgatatcagcaactgcgataacttcggcatcgacggaacggagttcctggacgatgcaagcgtatgtgcgccaatctcgttttatctgctgtaccgcattaccagcctgcttgacgggcgacgcctggtcattttcatggatgaattctggaagtggttacgcgacccggtgtttaaggactttgcttataacaagctgaaaaccatccgtaagctgaacgggatgctggtcgtcggcactcaatccccggctgagatcatcaaagatgatatcgccccggcagtgattgagcagtgcgggacacagattctggcggcgaaccccaacgccgaccgcgcacattatgttgacgacatgaagtttgaaccggaagtgttcgacgtggtgaaagggcttgacccgcaagcccgccagtatgttgtggtgaaaaatcagttcaagcgcggcgataccaaacgttttgccgctcgtgtcacgctagacctgtcgggtatcggcagatataccaaagtcatgagcggcgatgcccccaacctcgaaatattcgaatcgatttaccgggaaggaatgcagcctcatgaatggctcgatacctacctggctaaagcactctga

SEQ ID NO: 215990 - DNA, 294 bp, Klebsiella pneumoniae; identical to SEQ ID NO: 15700

SEQ ID NO: 215991 - DNA, 711 bp, Klebsiella pneumoniae; identical to SEQ ID NO: 15701

SEQ ID NO: 215992 - DNA, 234 bp, Klebsiella pneumoniae; identical to SEQ ID NO: 15702

SEQ ID NO: 215993 - DNA, 582 bp, Klebsiella pneumoniae; identical to SEQ ID NO: 15705

SEQ ID NO: 215994 - DNA, 186 bp, Klebsiella pneumoniae; identical to SEQ ID NO: 15707

SEQ ID NO: 215995 - DNA, 927 bp, Klebsiella pneumoniae
atgtcaaaaaaatatcagccattgcttataactcattatatgtcaacatgggtcactataacggaagcagttgagatcactaccaaaaccataaaacaaaaaattactcctagcgatatttatcgtcatgccttgagtggcaacatcctactatcggtctatttccagtctcctgtgatacttaagaagatacaaacttttaatggaaaaataaaattcaggcagtttgagggagacctacttgataaactatgcatgcttgacagggacggttttatttatggtcaaaatttaagactctgtacagaagccagatatgtttgtcctgtgcaacaaattatagatacccccctgataggctatgaatatgttttgattcagcgcatactggcacgtgaacttaaatttccctccccaattgtgggggcaagaaaaactaaccatggtattatagtaagattttcagaggagctttttcaaattttcgaaacgatgagttggaaagaacgcgtagaaaaacaaatttccagactacctaaaaacacagcattagatgtcataaaaaaactaacagaagtgacgaccataaaatataatcacaatgggtgttttcctctttatacattaccgcctgatgcctgttttgttattcgccacaccgaagtcgaaagactaattaatttatacaaaaaaagggagagtcatcccatttcaccttcccgtatgacaacaccgttatcacgcctgttttggctggcctgcaagcacaatgatactatcagcccactgctgaatcatccctataagctcctttctatttttgaacaatgggcatcagacgatggcatcggggaaaaactggacgctgaaacactgaaaaatgcgctgaagcgtggttcgccatcttcgacatccttatccggctaa

SEQ ID NO: 215996 - DNA, 2022 bp, Klebsiella pneumoniae
atgaaaatgacacggctttatcctctggccttggggggattattgctccccgccattgctaatgcccaaacttcacagcaagacgaaagcacgctggtggttaccgccagtaaacaatcttcccgctcggcatcagccaacaacgtctcgtctactgttgtcagcgcgccggaattaagcgacgccggcgtcaccgccagcgacaaactccccagagtcttgcccgggctcaatattgaaaatagcggcaacatgcttttttcgacgatctcgctacgcggcgtctcttcagcgcaggacttctataaccccgccgtcaccctgtatgtcgatggcgtccctcagctttccaccaacaccatccaggcgcttaccgatgtgcaaagcgtggagttgctgcgaggcccacagggaacgttatatggcaaaagcgctcagggcgggatcatcaacatcgtcacccagcagccggacagcacgccgcgcggctatattgaaggcggcgtcagtagccgcgacagttatcgaagtaagttcaacctgagcggccccattcaggatggcctgctgtacggcagcgtcaccctgttacgccaggttgatgacggcgacatgattaaccccgcgacgggaagcgatgacttaggcggcacccgcgccagcatagggaatgtgaaactgcgtctggcgccggacgatcagccctgggaaatgggctttgccgcctcacgcgaatgtacccgcgccacccaggacgcctatgtgggatggaatgatattaagggccgtaagctgtcgatcagcgatggttcaccagacccgtacatgcggcgctgcactgacagccagaccctgagtgggaaatacaccaccgatgactgggttttcaacctgatcagcgcctggcagcagcagcattattcgcgcaccttcccttccggttcgttaatcgtcaatatgcctcagcgctggaatcaggatgtgcaggagctgcgcgccgcaaccctgggcgatgcgcgtaccgttgatatggtgtttgggctgtaccggcagaacacccgcgagaagttaaattcagcctacgacatgccgacaatgccttatttaagcagtaccggctataccaccgctgaaacgctggccgcatacagtgacctgacctggcatttaaccgatcgttttgatatcggcggcggcgtgcgcttctcgcatgataaatccagtacacaatatcacggcagcatgctcggcaacccgtttggcgaccagggtaagagcaatgacgatcaggtgctcgggcagctatccgcaggctatatgctgaccgatgactggagagtgtatacccgtgtagcccagggatataaaccttccgggtacaacatcgtgcctactgcgggtcttgatgccaaaccgttcgtcgccgagaaatccatcaactatgaacttggcacccgctacgaaaccgctgacgtcacgctgcaagccgcgacgttttatacccacaccaaagacatgcagctttactctggcccggtcgggatgcagacattaagcaatgcgggtaaagccgacgccaccggcgttgagcttgaagcgaagtggcggtttgcgccaggctggtcatgggatatcaatggcaacgtgatccgttccgaattcaccaatgacagtgagttgtatcacggtaaccgggtgccgttcgtaccacgttatggcgcgggaagcagcgtgaacggcgtgattgatacgcgctatggcgcactgatgccccgactggcggttaatctggtcgggccgcattatttcgatggcgacaaccagttgcggcaaggcacctatgccaccctggacagcagcctgggctggcaggcgactgaacggatgaacatttccgtctatgtcgataacctgttcgaccgtcgttaccgtacctatggctacatgaacggcagcagcgccgtcgcgcaggtcaatatgggtcgcaccgtcggtatcaatacgcgaattgatttcttctga

SEQ ID NO: 215997 - DNA, 1578 bp, Klebsiella pneumoniae
atgaattcttcctttgaatctctgattgaacagtatcccttacccattgccgaacagttgcgccactgggcggcccgttatgcctcgcgaattgccgtcgttgatgcaaaggggtcgttaacctacagcgcgcttgatgcacaagttgacgaacttgccgcaggtctgtcatcactgggtttgcgttcgggggagcatgtaattgtgcagcttcccaacgacaacgcgtttgttaccctgctgttcgccttgttaagactgggcgttatccccgtgctggcgatgccctcgcaacgggcgctggatatcgacgcgctgattgagctggcgcaacccgtcgcttacgttattcacggggaaaaccacgcagagctggcccgacagatggcgcacaaacacgcctgcttgcgtcatgttctggtcgctggagagaccgtgagcgacgattttacgccgctcttctcccttcacggtgagcgacaggcatggccgcagcctgatgtttccgccaccgcgttgttgttgctctcaggcggcacaaccggcacgcccaaactcatcccgcgccgacatgccgactatagctataacttcagcgcttctgctgaactgtgcggcatcagccaacagagcgtgtatctcgccgtcctcccggtggcgcataactttccgctggcctgccccggtattctgggaacgcttgcctgcggcggaaaagtggtgctgaccgacagcgccagctgtgatgaggtgatgcctttaatcgcgcaggaaagagtgactcacgtcgccctggttccggcgctggcgcaattatgggtgcaggccagggagtgggaagacagcgacctttcgtcgctgcgcgtcattcaggcaggcggcgcccggctcgacccgacgcttgctgagcaggttatcgccacctttgactgtaccctgcaacaggttttcggtatggcggaaggcctgctctgttttacccggctggacgatccgcatgccaccattctccacagccaggggcgcccgttgtcccctctggatgaaatccgcatcgttgatcaagacgagaacgacgtcgcgccgggcgaaaccgggcaattgttaacgcgcggcccttataccatttcgggctattaccgcgcccctgcccacaacgcgcaggcctttaccgcgcaagggttttaccgcacaggcgacaatgttaggctggatgaggtggggaacctgcacgttgagggacgcataaaagagcagatcaaccgcgccggagaaaaaatagccgcggctgaagtggaatcggcactgctgcgtttagcggaagtgcaagattgcgcggtggtcgccgcgccggacacgctgcttggcgagcggatttgcgcgtttatcatcgcgcagcaggtgccaactgactatcagcagttgcgtcaacaactgacccgtatggggctcagcgcgtggaaaattcctgaccaaatcgagtttctggaccactggccgctcaccgccgtcggcaagatagacaaaaaacgcctgacggctctcgccgtcgaccgttatcgccattctgcccaataa

SEQ ID NO: 215998 - DNA, 804 bp, Klebsiella pneumoniae
gtgacgcaatctgcaatgtgcatcccgctgtggcccgcccgaaacggtaatactgcgcatctagtcatgtgccctttcgctggcggcagcagtagcgcgtttcgccactggcaagctgagcaactggctgattgcgcgctttctctggtgacctggccggggcgcgatcgccttcgccatctggaaccgctcagaagcattacacaactggcggcactgctggcgaacgagctggaagcatccgtatcgcctgacacgccgcttttactcgccgggcacagcatgggggcacaggtggcgtttgaaacctgccgacttctggagcaacgggggcttgcgccacaaggactgattatttccgggtgccatgccccgcatctgcattctgaacgccagctcagccatcgcgatgatgccgactttatcgctgagctgatagacattggcggatgttctcctgaactgcgggaaaaccaggaattaatgtcgctgtttcttcctcttctgcgcgctgatttttacgccaccgagagctatcactacgactcgcccgacgtctgtccgccgctgcgcacgcctgcgctgttattgtgcggcagccacgatcgcgaagcctcctggcagcaggtcgatgcctggcgtcagtggctgagccccgttacaggcccggtggtgattgacggcgatcatttctatcccattcaacaagcccggtccttttttacgcagattgtccgccattttccccacgcattttctgcaatgaccgcgttgcaaaaacagcccagtacttcagaaaggtga

SEQ ID NO: 215999 - DNA, 1101 bp, Klebsiella pneumoniae
atgatgccgtccgcctccccaaaacaacgcgtactgattgtgggcgccaaatttggcgaaatgtacctgaatgcctttatgcagcccccggaggggctggaactggtcggcctgctggcgcagggaagcgcccgttcaagagagctggctcatgcgtttggcattccgctgtatacctcgccggaacagataaccaggatgccggatatcgcctgtattgtcgtgcgttcgaccgtcgccggaggaaccggtacgcagcttgccagacactttctgacgcgcggcgtacacgtcattcaggagcatcccctccacccggatgacatcagttccttacaaacgctggcgcaggaacagggctgctgctattgggtaaacacgttttatccgcatacgcgcgcgggacgcacatggcttcgcgatgcgcagcagctgcgtcgctgcctggctaagacgccgccggtagtccacgccaccaccagccgacagttgctctactccactctggatttgttgttgctggctctgggcgttgatgccgccgccgtggagtgcgacgtggttggcagctttagcgattttcactgtctgagactcttctggccggagggagaagcctgcctgctgcttcagcgctatctcgatcctgacgatccagatatgcatagccttatcatgcaccgcctgctgctgggctggccggaaggtcatctttcgctggaggcgagctacggccccgtcatctggtcatccagcctgtttgtcgcagaccatcaggagaacgcccacagcctctaccgcagaccggagatcctgcgcgatctgccgggtctgacgcgcagcgcggcgcccctgagctggcgcgactgctgcgaaaccgtcgggccggagggcgtcagctggttgctacaccagttgcgcagccatctggcgggcgaacatccaccagcggcctgccaaagcgtacatcagatcgcgttatcacgtttatggcagcagattttacgtaagaccggcaatgcggagatcagacgcctgacgccgccgcaccacgaccggttagccggtttctacaacgatgatgataaggaggcgctgtga

SEQ ID NO: 216000 - DNA, 9492 bp, Klebsiella pneumoniae
atggataacttgcgcttctcttctgcgccgacagcagattccattgatgcatcgatcgctcaacactacccggactgcgaacctgtcgcggttatcggctacgcctgccattttcctgaatcgccggatggcgaaacgttctggcaaaatctgctggaaggtcgtgaatgcagccgacgctttacgcgcgaagagcttctggccgtcggtctggatgccgccatcattgacgatcctcattatgtcaatatcggtacggtgttagacaacgccgactgcttcgacgccaccctgtttggctattcgcgacaggaagcggagtcgatggacccgcagcagcgcctatttttgcaggcggtctggcatgcgctggaacatgccggttatgcccccggcgccgtcccccataagaccggcgttttcgcctcttcccggatgagtacctaccccggtcgcgaagcattgaacgtgacagaagtcgcgcaggtaaaaggtctgcaatctctgatgggcaatgataaagactatattgccacccgcgccgcgtacaaactcaacctgcacggcccggcgttatcggtacagaccgcctgctccagctcgctggttgcagtgcatctggcctgtgaaagcctgcgcgcaggcgaatccgatatggcggttgccggcggcgtggcgctctctttcccccagcaggcaggctaccgctaccagcccggaatgattttctctcctgatggtcactgtcgtccctttgacgcctcggctgagggcacctgggccggtaacggtctcggctgcgtggtgctgcgtcgcctgagagacgcgctgctgtcaggcgatccgattatctcggtgatcctctccagcgcggtcaacaacgacggcaacagaaaggtcggctataccgccccttccgtcgcagggcaacaggcagtcatcgaagaggcgttaatgctggcggccatcgacgacaggcaggtaggttacattgaaacccacggcaccggcacaccgctgggcgacgcgattgaaattgaagcgttacgcaacgtctatgcgcctcgcccgcaggatcagcgctgtgcgctcggttccgtgaaaagtaacatgggccatctggataccgcggcgggcattgccggactgctgaaaaccgttctggcagtcagtcgcgggcaaattcctcccttactgaattttcacacccccaacccggcgctgaaacttgaagagagcccctttaccataccggtgtcggcacaggcatggcaggacgaaatgcgctatgcgggcgtctcctcctttggtattggcggcaccaactgccatatgatcgtcgcctcgctgcccgacgcgctcaacgcgcgcctccccgatacggatagcggcagaaaaagtaccgcgctgctgctcagcgccgccagcgacagcgcgttgcggcggctggcgacggattatgccggggcgctgagagaggatgcggatgccagctctctggccttcacagccctgcacgcgcgccgtctcgatctccccttccgcctggcggcgccattaaaccgtgaaaccgccgaggcgctcagcgcctgggccggtgagaaatcgggggcgctggtttacagcggccacggcgccagcggcaagcaggtgtggctgtttaccggccagggctcgcactggcgcactatgggtcaaacgatgtaccagcactcaacggcgtttgccgacacgctggatcgctgtttttccgcctgtagcgaaatgctcacgccgtcactgcgcgaagcgatgtttaaccccgattcggcgcagctggacaatatggcctgggcgcagccggcgattgtcgcgtttgaaatcgcgatggcggcgcactggcgtgctgaaggactgaagccagacttcgccattgggcattccgtcggtgaatttgccgctgccgttgtctgcggacactatacgattgaacaggtcatgccactggtttgtcggcgcggcgcgctaatgcagcagtgcgcaagcggcgcgatggtggcggtatttgcagacgaagacacgctgatgccgctggctcgccagtttgagctggatctcgccgccaacaacggtacgcaacatacggtattttccgggccggaagcccgtctcgcggtattttgcgccacgctctcgcagcatgacattaactatcgtcgcctgagcgtaaccggtgcggcgcactccgctttactggagccgatactcgatcggttccaggacgcctgcgcgggactgcacgcggagccggggcaaataccgattatttccacgctcaccgccgacgtcattgatgagtcaacgctcaaccaggcggattactggcgccgacacatgcgccagccggtgcgttttatccagagtattcaggtggcgcatcagctcggcgcccgcgtttttctggagatggggcccgatgcccagttggttgcttgcgggcagcgcgaataccgcgataacgcatactggatagccagcgcccggcgtaacaaagaggcgagcgatgtcctcaatcaggccctgctccagctttacgctgccggcgtcgccctaccgtgggccgacctgctggcgggcgatggacaacgtatcgctgcgccatgttatccgtttgatactgagcgttactggaaagagcgcgtctccccggcctgcgagcctgccgacgcagcgctgtctgccgggctggaggtggcgagtcgcgccgcgacagcgctcgatctccctcgcctggaagcgcttaaacagtgcgccacgcgactgcacgccatctacgtcgatcaactggtacaacgctgtaccggcgatgccattgagaacggcgtggacgccatgaccatcatgcgccgtggacgtctgctgccccgctaccagcagctactccagcgcctgctgaataactgcgtggtcgacggcgattaccgctgcaccgacgggcgatacgtccgcgcccgccccattgaacatcaacagcgggaatcactgctgacggaacttgccggttattgtgaaggttttcaggctattcccgacaccatcgcccgtgccggcgatcggttatatgaaatgatgagcggcgcggaagaaccggtggcgattatcttcccgcaaagcgcctccgacggcgtggaagtgctgtatcaggaattcagctttggccgctatttcaaccaaatcgccgccggggtattacgcggcattgtccagacgcgtcagccccgccagccgttgcgtattcttgaagttggcggcggaaccggcggcaccaccgcgtggctgctgccggaactcaacggcgttccggcactggagtaccatttcaccgatatctcggcgctgttcacccgtcgcgcccagcagaaattcgccgactatgattttgtgaagtatagcgagctggatctcgaaaaagaggcgcagtctcagggtttccaggcacagtcttacgatcttatcgtggcagcgaacgtgattcacgccacccgccatattggccgcacgctcgataatctgcgccccctgctcaagccgggcgggcgcctgctgatgcgcgaaatcacccagccaatgcgtctgtttgacttcgttttcggcccgctggttcttccgctacaggatctcgacgcccgcgaaggtgagttattcctcaccaccgctcagtggcaacaacagtgccgccacgccggattcagcaaagtggcgtggctaccgcaggatggcagcccgaccgccgggatgagcgaacatatcattctcgccacgctgcccggtcaggcggttagcgccgtaacattcaccgcgccatcagaacccgtgttggggcaggcgctgacggataacggtgattatctcgccgactggtctgattgcgcaggtcagcccgaacggtttaacgcccgctggcaggaggcctggcgtctgctttcacagcgtcatggcgacgctctacctgtggaaccgccccccgtcgccgccccggagtggctggggaaggttcgcttaagctggcaaaacgaagccttttcccgcggtcagatgcgcgttgaagcccgtcatcctgctggcgagtggctgccgctatcgcccgccgcgcctcttcctgcgccgcagacgcattatcaatggcgctggacgcccctcaacgtcgccagcattgaccatccgcttacctttagcttcagcgccggtacgcttgcgcgcagcgacgagctggcgcaatacggcatcattcacgatccgcacgcctcttcgcgactgatgattgttgaggagagcgaggatacgctggccttagcggagaaagtgatagcagcgctcaccgccagcgcagccggattgattgtggttactcgccgcgcgtggcgagtcgaggaaaatgaagcactctctgcatcccatcacgcgctatgggccttgcttcgcgtcgcggccaacgaacagccggaacggttgcttgccgccatcgatctcgccgaaaacaccccgtgggaaacgctgcatcaagggttgagcgcagtctcactatcacagcgctggctcgccgcacggggtgacaccctttggctcccttcactggcgcccaatacgggatgcgccgctgaattaccggcaaacgtgtttaccggcgatagccgctggcatctggtgaccggagcgtttggcggattaggccgccttgccgtgaactggctcagagaaaaaggggcgcgacgcatcgccctgctggcgccgcgcgtggatgagtcatggctacgcgacgtggagggcgggcagacgcgcgtctgccgttgtgatgtgggcgatgccgggcaactggccacggttcttgacgatctggcggccaacggcggcattgccggagcgattcatgccgctggcgtattggctgacgcgcccttgcaggagcttgatgaccaccagttggctgccgttttcgcggtaaaagcgcaggcggcaagccagctgttgcaaaccctgcgcaaccacgacggacgctatcttattctctactcttccgctgccgccaccctcggcgcgccgggtcagagcgcccatgcgctggcctgcggctacctggacgggctggcccagcagttttccacccttgatgcgccgaaaacgctctctgtcgcctggggcgcatggggagaaagcggtcgggcggccacgccggaaatgctggcgacgctcgccagccgaggtatgggcgcgttaagcgatgccgaaggctgctggcacctggaacaggcggtgatgcgcggcgccccgtggcgactggcgatgcgcgtttttaccgacaaaatgcccccgttacaacaggctctgtttaacatcagcgccacagaaaaagccgcaacgccggtcattcctcctgctgatgacaacgcctttaacggcagcctgagcgatgaaacagcggtgatggcatggctgaaaaagcggattgcggttcagctaaggctgagcgatccggcgtcactgcatccaaaccaggatctgttgcaactcggcatggactcgctgctcttccttgaactcagtagcgatattcagcactacctgggcgtacgcatcaatgcggaacgggcgtggcaggatctgtctcctcatggactcacgcagcttatctgttctaagccagaggcgacgcctgccgcttcgcagccggaagtgttgcggcacgacgccgacgagcgttatgcgcccttccctttgacgcccattcagcacgcctactggctggggcgaacccacctcattggctatggcggcgtcgcctgtcacgtcctgtttgagtgggataaacgccacgatgagttcaatctcgccatactggagaaagcatggaaccagctcatcgcacgccacgatatgttgcgtatggtggttgatgccgacgggcagcagcgaatcctggcgacaacgccggagtatcacatcccgcgtgacgatctgcgcgcgctttccccggaagaacagcgcatcgcgctggaaaaacggcggcatgaactgagctatcgcgttttgcctgccgaccagtggcctctttttgagctggtggtcagcgaaatcgacgattgccattaccgtctgcatatgaacctcgaccttttgcagtttgatgtgcagagttttaaagtcatgatggacgacctggcgcaggtctggcgcggtgaaacgctggcgccgctcgctattaccttccgtgattatgtgatggctgaacaggcgcgccgacagacatcggcatggcacgatgcctgggattactggcaggaaaaactgccgcaactgcccttagcgccagagctgccggtggttgagacgcccccggaaacgccacacttcaccaccttcaaatcgacgatcggcaagacagaatggcaggccgtgaaacagagctggcagcagcaaggcgtcacaccgtctgccgcgctgctcacgctgtttgccgccacccttgagcgctggagccgtaccacaacatttacgctgaacctgacgttcttcaatcgccagccgatccatccgcaaatcaaccagttgattggtgattttacctccgtcacgctggttgattttaacttctcagcgccggtgacgttgcaagagcagatgcaacagacccaacagcgcctctggcaaaacatggcgcacagtgaaatgaacggtgttgaggtgatccgtgagctgggccgcctgcgcggatcacaacgtcaaccgctgatgccggtagtgtttaccagtatgctggggatgacgctggaaggcatgactatcgatcaggcgatgagccatctgttcggcgaaccctgctatgtattcacgcaaacgccgcaggtctggctggatcatcaggtcatggagagcgacggcgagttgatgtttagctggtactgcatggacaacgtgctggaacccggcgctgccgaggcgatgtttaatgactattgcgccatcctgcaagccgtcatcgccgcccctgaaagcctgaagactctcgccagcggcatcgccgggcacattccccgccgacgctggccgctgaacgcgcaggcggactacgacctgcgggatattgagcaggcgacgctcgaataccccggcatccggcaggccagagcggaaataaccgaacagggcgcgttgacgctggatatcgtgatggccgacgatccgtcgccatcagcggcgatgcctgatgagcacgaacttacccaactggcgctgccgttgcctgagcaggcgcagcttgatgagctggaggcgacctggcgctggctggaggcgcgtgcgctacaggggatcgcggctacgctaaatcgtcacggcctgtttaccacgccggagatcgcccatcgctttagcgcaatagtacaggcgctgtccgcgcaagcgtctcaccagcgtctgctgcgccagtggctacagtgtctgacggaaagagagtggttaatccgcgaaggtgaaagctggcgctgccgcattccgctcagcgagattcctgagcctcaggaagcgtgcccgcaaagccaatggagccaggcgctggcgcagtatctggaaacctgcatcgcccggcacgacgccctcttctccgggcagtgttctccgctggaattgctgttcaacgagcagcatcgcgttaccgacgcgctgtatcgcgacaaccccgccagcgcctgtctgaatcgctataccgcgcagattgccgccttgtgcagcgcagaacggattctggaggttggcgccggaaccgcagccactaccgcgccggtgctgaaggccacgcggaacacgcggcagtcgtaccacttcacggacgtctccgcgcagttcctcaatgacgccagagcccgtttccatgatgaatcgcaggtgtcttatgccttgttcgacatcaaccagccgctggatttcaccgcccacctggaggcgggttacgacctgatcgttgccgtcaatgtgctccacgacgccagccatgtcgtccagacgttgcgcagattaaaactgttgctgaaagccggcggacgtttgatgatcgttgaagcgacggagcgaaacagcgtattccagctggcgagcgtgggctttattgagggattaagcggataccgcgatttccgccgccgggatgagaaaccgatgctcacccgctccgcatggcaggaggttctcgttcaggccgggtttgcaaacgagctggcgtggcccgcgcaggaatcgtcgccgctgcgccagcatctgctggtggcgcgttcgcctggcgtaaatcgcccggataaaaaagccgtgagccgctatttacagcagcgctttggcaccggtctgcccattttacagatccggcaaagagaagcgttatttacgccgctgcatgccccgtctgatgcgccgactgagccagccaaacccacgccagttgccggggggaatccggcgctggaaaaacaggtggctgaactctggcaatcgctgctgtctcgccccgtggcaaggcatcacgactttttcgaactgggcggcgacagcctgatggcgacaaggatggtcgcgcagctaaaccggagagggattgccagggctaaccttcaggatctgttcagccattcgacgctgagcgacttctgcgcccatctacaggcggctacgtcaggagaggacaacccgatacccctttgccagggcgacggtgaggaaaccctgtttgtcttccacgcttcagacggcgatatcagcgcctggctgccgctcgctagcgcgttgaacaggcgcgttttcggcctgcaagcaaaatcgccgcagcgctttgccacgctcgaccagatgatcgatgagtatgtcgggtgcatccgtcgtcagcagcctcacggcccttatgtgctggcgggttggtcgtatggcgcgtttcttgcggcgggcgccgcacagcgcctgtacgccaaaggcgagcaggttcggatggtgttaatcgatcccgtgtgccgacaggatttctgttgcgaaaaccgggcggccctgctgcgcctgttagccgaaggacaaacgcctctggcactgcccgaacatttcgaccagcagacgcccgacagccagcttgccgactttatcagcctcgctaaaacggccggtatggtgccgcaaaacctgacgctgcaagcggcagaaacgtggctcgacaacatcgcgcatctgctgcgtttactgactgagcatacgccgggcgaaagcgttccggtcccctgtctcatggtgtatgccgccgggagacccgcgcgctggacgccagcagaaaccgagtggcagggctggataaacaacgccgacgacgctgtgattgaagccagccactggcaaatcatgatggaagccccccacgttcaggcttgtgcgcaacacattacgcgctggctttgcgcaacctcaacgcaaccggagaacacgttatga

SEQ ID NO: 216001 - DNA, 6108 bp, Klebsiella pneumoniae
atgatttctggcgcaccatctcaggattcgctgttaccggacaaccgccacgcggctgattaccaacaattacgcgagcggctcatacaggaactgaatttaacgccgcagcagttacatgaagagagcaacctgatccaggccggcctggattccataagattgatgagatggttacactggtttcgtaaaaatggctaccgccttacccttcgcgagctgtatgccgcccccacgctggcggcatggaaccagttaatgctcagccggtcgcctgagaacgcggaagaagaaacgccgcccgacgaatcatcctggccgaacatgaccgaaagtacccccttcccattgacgccagtacagcacgcctacctgacgggccgcatgccggggcagacgcttggcggcgtgggttgccacctgtatcaggagtttgaaggccattgtctgacggcgtcgcagttggagcaggccatcacgaccttgctgcaacgccacccaatgctgcatatcgcctttcgccccgacgggcagcaggtctggctaccgcaaccttactggaacggcgtcaccgttcatgatttacgccataacgacgctgaaagccgccaggcctatctggacgcactgcgccagcgcctgagccaccgtcttttacgcgtggaaatcggcgaaacgtttgattttcagctgacgctcttgccggacaatcgccaccgcctccatgtcaatattgacctgctgattatggatgcctccagctttacgcttttcttcgatgagcttaacgccctgctggccggagaatcgctgccggctatcgacacccgctatgatttccgctcgtatttgctgcaccagcagaagatcaatcaaacactgagagacgacgcgcgcgcttactggctggcgaaagcatcgacgcttccccccgcgcccgtcttgccgctggcctgcgaacccgccacgctacgtgaagtccgtaatacccgacgccgcatgattgtcccggcaacacgctggcacgcctttagcaaccgggccggcgagtatggcgtgacgccgacaatggcgctggcgacctgtttttctgccgtgctggctcgctggggcggcctgacgcgtctgctgcttaacatcaccttattcgaccgccagccgctgcacccggcggttggcgcgatgcttgccgacttcaccaatattcttctgctggataccgcctgcgatggcgataccgtcagcaacctggcgcgtaaaaaccagctcacgtttacggaggactgggagcatcgccactggtccggcgtcgaattactccgtgaactcaaacgccagcagcgctacccccacggcgccccggtggtatttaccagcaatctggggcgttccctctacagcagccgcgcagaatcgccgttgggcgagccggaatggggcatctcgcaaacgccgcaggtctggatagatcatctggcgttcgagcatcacggcgaggtctggctacaatgggacagcaacgacgcgctgttccctccggcgttagtcgaaacattgttcgacgcctactgccagttgattaaccaactctgcgatgacgaaagcgcctggcaaaagccgttcgcagatatgatgcccgccagccagcgcgcgatacgcgaacgggtcaacgccaccggcgcccccattcccgaaggcttgctgcatgaaggcattttccgtatcgctctgcaacagccgcaggcgctggcggtaacggacatgcgttatcagtggaattatcatgagctgacagactatgcccgccgttgcgcgggcaggttaatcgagtgcggggttcagcccggcgataatgtggctatcacgatgtcgaaaggcgcaggacaacttgttgcggttctggccgtcctgctggccggggcggtttacgttccggtttcgctggatcagcctgccgcacggcgcgagaaaatctacgctgacgccagcgtccggctggtgctcatttgtcagcacgacaccagcgccgggtcagacgatattcccgtccttgcctggcagcaggccattgaggcggagccgatcgccaacccggtagtacgcgcccccacgcaaccggcctacattatctacacctccggctctaccggtacgccgaaaggggtagtcatttctcaccggggagcgcttaacacctgttgcgatatcaatacccgctatcaggttggcccgcatgacagggtgctggccctctccgccctacattttgatttatcggtttacgacatttttggcgtactgcgcgcgggcggcgcgctggtgatggtgatggaaaatcaacggcgcgatcctcacgcatggtgtgagctgatccagcgccatcaggtcacgctctggaacagcgtcccggcgctgttcgatatgctgctgacctggtgtgaaggtttcgccgacgccacgccggaaaacctgcgcgcagtgatgctttccggcgactggatcgggcttgacctccccgcccgttatcgggccttccggccacaaggacaatttatcgcgatgggcggcgccaccgaggcgtctatctggtctaacgcctgcgaaattcacgacgtccccgcccactggcgctccatcccttacggttttccgctaaccaaccaacgctaccgggtggtggatgaacagggccgggactgccctgactgggtgccgggtgaattatggattggcggcattggggtcgcggaaggctatttcaacgatcccctgcgtagcgagcagcaatttttgacgctcccggacgagcgctggtatcgcaccggcgatctcggctgctactggccagatggcacaatcgagttcctcggtcgtcgcgacaagcaggtcaaagtcggaggatatcgcatcgagctgggcgaaatcgaaagcgcgctcagccagctggcgggggtgaaacaagcaaccgttctggcgatcggcgaaaaagaaaaaacgctggcggcatacgttgttcctcagggcgaggctttttgcgttaccgatcatcggaacccggcactgccgcaggcgtggcacacgcttgcgggaacgttgccctgttgcgccatctcgccagagatctccgcagaacaggtagccgatttccttcagcatcgcctgctaaaactgaagccgggtcacaccgctggcgccgatcctctccccctgatgaactcactcgctatccagccgcgctggcaggccgtggtggaactctggttagcatttctggtgacacaacggcgactgaagcccgctgctgaaggttatcaggtctgcgctggtgaagaacacgaggatgagcacccgcacttcagcggacatgatttaacgttatcgcaaattcttcgcggtgcccgtaacgaactgtcgttactgaacgacgcgcagtggtcgccggaaagcctggcctttaaccatccggccagcgccccgtatattcaggaactggcgacaatttgccaacagcttgcacagcgcttacagcgcccggtacgcctgcttgatgtgggaacccgcactggccgcgccgcagaatcgctgttagcacagctcaacgccggacagattgagtatgtcgggcttgagcagagccaggagatgctgctgagcgcccggcagaggctcgccccctggcctggcgcccgtctgtccctctggaatgcagacacgctggcggcgcacgctcactcggcggacattatctggcttaataacgccctgcatcgtctgctgccggaagatcccgggctccttgcgacattacaacagcttgccgttcccggcgcgctgctctacgtgatggagtttcgccagttaacgccgtccgccctgctcagcacgctcctgttaaccaatgggcagccggaggccttgctgcataacagcgccgactgggcggcattatttagcgcggccgccttcaactgtcagcatggcgatgaggtcgcggggttacaacgcttcctcgtacaatgtcctgacaggcaggtgcgccgcgatccccgtcaacttcaggccgccctcgccggacgtctgccggggtggatggtgccgcaacggatcgtcttcctcgacgccttaccgctgacggctaacgggaaaattgactaccaggcgctgaagcgtcgtcatacccctgaagcggaaaacccggccgaagcggatttaccccagggcgacattgaaaaacaggttgccgccctctggcagcaactcttatcaactggcaatgtcaccagagaaaccgacttcttccagcaaggcggcgatagcctgctggcgacccgtctgaccgggcaacttcatcaggcaggttatgaagcgcaattaagcgacctgtttaatcatccccggctggcggattttgccgccacgctgcggaaaaccgacgtcccggtcgaacaaccattcgtccactcccctgaagaacgctaccagccctttgcgcttaccgacgtgcagcaggcttacctggtggggcgtcagccgggctttgccctgggcggcgtcggctcacatttctttgttgaatttgaaattgccgatctggacctcacccggctggagacggtctggaaccgattaatcgcccgccacgatatgctgcgcgccatcgtgcgtgatggacagcaacaggtgctcgaacagacgcccccctgggtgatacccacacacaccctccatacgcctgaagaggcgttgcgggtgcgcgaaaaactggcgcatcaggtactcaaccccgaagtgtggccggtattcgatctccaggtcggatacgtggacgggatgcctgcccgcctgtggctgtgtctggataacctgttgcttgacggtctgagcatgcagatcctgctggcggagctggagcacggctaccgctacccgcaacagctgcttccgccgctgcccgtcaccttcagggattatctgcaacaaccctcgctacagtcgcccaatccagattctctggcatggtggcaggcgcagcttgatgatattcctccggcgcctgcgttgccgctgcgctgcttgcctcaggaggttgaaacaccgcgcttcgcccgcctgaacggcgcgctggacagcacgcgctggcatcggctgaaaaaacgggcggctgacgcccatctcaccccgtcggccgtactgttgtcggtgtggtcaacggttctctctgcatggagtgcacagcctgagttcacgcttaaccttacgcttttcgacaggcgaccgctgcacccgcaaatcaaccagattctgggcgatttcacctcgctgatgctgctgagctggcatcccggcgaaagctggctgcacagcgcgcagtcactacagcagcggctgagccagaacctcaaccaccgcgatgtgtcagccatccgcgtgatgcgtcaactggcgcaacggcaaaacgtgcctgccgttccgatgcccgtcgtctttaccagcgcgctgggctttgagcaggataacttcctcgcccggcgtaatctgctcaaaccggtctggggcatctcccagacgccgcaggtctggctcgatcaccagatttatgaatccgaaggcgaactgcgctttaactgggattttgtcgccgcgctgtttcctgccgggcaggtggagcgccagtttgaacagtattgcgcattgctaaaccgaatggccgaggatgaaagcggctggcaactgccgctcgccgcgctggtgcctcccgttaaacacgcagggcaatgcgcagagcgctcaccgcgcgtatgccctgagcactctcagccacacattgcggcggacgagagcaccgtcagcctgatttgcgacgccttccgcgaggtggttggcgagtctgtcacgcccgcagaaaacttctttgaggcgggcgcaacgtcgctgaatctggtgcaactgcacgttttgttacaacgtcacgaattttccaccctgacgttgcttgacctcttcacccacccttctcctgctgccctggccgattatctggccggcgtcgccacggtggagaaaacaaaacgacctcgccctgttcgccgtcgtcagcggcggatatag

SEQ ID NO: 216002 - DNA, 960 bp, Klebsiella pneumoniae
atgacggagtcaccgcaaacgcaatctgaaatctctattcaccagttggtggtcgggaaacctgcaaacgatggcaatattcctgctcagtgtgaactgctgcgctgttcgttgcaggaaggtatggatattttgctctggaggggccattttgcgcggcctgagacgttgcagctacacgacgatctgggcaggattaacttctcgtgcatcctggaaggcacatcgcgctttgcgattcagggactccggcgccacaccgactgggagcttgcgcgcaatcgccattacattacccatacgccagactgtcgcggcagcgcctcctattgtggccgattcgagagcattaccctctccttcagccctgaaaccctcgcgctgtgggtgccggatattagcgcggtcattaagaataagatcgactcccactgctgttgccagcagcagcgttgtaatgctgaaacccacttaacggctcaggccttgcgtcacgcgctgatgcgcatgcacggcggcttcagtcatgaacaaaagccgtcgacgctatggttgcaggggcaaagtctggtcatgctcagtctggtgctggatgaacatcgcgaagacgccagttgcctctcctgccacttcaacccgatggaacgccagaaactgctgcgggcgaaggatctgctgctggctgatctgacgcaagcgccgggcgtcgcggagctggccagagagtccggtctgagcgttctcaaaattaagcgaggcttccgcgttctgttcaacaacagcgtctatggcctgtttcaggctgaacgaatgcaggaagccagaagacgcctggccaacggcaatacctccgtcatgacggtggcggccgatctgggctatgccaacgccagccatttctctgccgccttccagaaacagtttggcgtaaccccttcgacctttaaacgcgtgatgtaa

SEQ ID NO: 216003 - DNA, 1713 bp, Klebsiella pneumoniae
atggcgctggcggggctggcggcattaaccagcctgggggcgctcctttttctggcgtggagcctgcgtgacattcgcgcgacgcctgacgctattccggcctggccgctgggcggcgtgatcggctgcgtggtcttaacttttgttctgcgcttacaggcgttcaacacctctcattacgcggcttttcatctggagaacattctgcgcagcaggttagcccgtaaagcattgcagcttccgcctggcgtgttacagcaaatgggcagcgggtcagtggcgaaagtgatgctggatgacgtgaagtcgttacatatttttgtggccgacagcacgccgctctatgcccgcgcgatcatcatgccgctggcgacaatcgttatcttgttctggctggactggcggctggcaatcgcgacgctgggggtactggcgtttggatcggttgttctcgtgctcgcccgccagcgttcggaagatatggctcagcgttatcataaggcgcgcgagcaggttagcgcggcggttattgagttcgtgcaggccatgcccgtggtgagaacgtttgatagcggcagcaccagttttctgcgctatcaacgcgcccttgaagagtgggtcgatgtgctcaaaacctggtatcgcaaagccggtttttcagcgcgtttttccttctcgattctgaatcctctcccgaccctgtttgtcctgatctggtcgggatacggcctgttgcactatggcagtttcgattttatcgcgtgggtggccgttttactgctgggcagcggaatggccgaagccgtaatgccaatgatgatgctcaataacctggtcgcgcaaacgcgtttaagcattcagcgtatttatcaggttctcgcgatgccggagttatcgctgccgcagtctgaccagcagccgcaagaggcgagcattacctttgagcaggtgagctttcattatccgcaagcgcgtactggcgccgcgttgcaggaggtgagctttcatgtgcctgccgggcaaattgtggcgctggtcgggccaagcggcgccggaaaaagcaccgtggcgcgcttgctgctgcgttacgccgacccggacaaaggccatatccgtattggcggcgtggatctgcgtgatatgcagacggacaccctgatgaagcaactctcgtttgtgtttcaggacaacttcctttttgccgacacgatagccaataacattcgtctgggcgcgccggatacgccgctggaggcggtaatagcggcggccagagtggcgcaggcccatgattttattagcgctctgccagaaggttacaacacacgagtcggggaacgtggggtatttctctccggcggccagcggcagcgcattactatcgcccgggcgcttttgcaggatcgccccatcctggtgctcgatgaggcgacggcgtttgctgacccggaaaacgaagcggcgcttatcaaggcgctcgcggcggccatgcgtggccggacggtcatcatggtcgcgcatcgtctctcaatggtgactcaggccgatgtgatattgctgttttccgacggacagctcagggaaatggggaaccatacgcaactgttggcgcagggcggcctgtatcaacggctctggcaacactatcagcaggcgcagcattgggtgccgggtggaacacaggaagaggtggtggaaaatgaaagacaataa

SEQ ID NO: 216004 - DNA, 1803 bp, Klebsiella pneumoniae
atgaaagacaataatcctgcggataacctggcctggcgcgtcatctggcgccagcttatctccagcgttggcagtcaggccaggatgctgcgacgcagtatgctggcgctgttgctggcggcattcatgcaggggatcgcctttgcctgtctttatccgatcattgatgcgctgttacggggagacgcgccgcaacttcttaactgggctatggccttcagcgtcgccgcaattgtgacgctggtgctacgctggtatggcctgggctttgaataccgtggtcatctggcgcaggccacccatgagttgcgcctgcgacttggcgagcagttacgccgcgtgccgctggagaagctccagcgcggcagggcgggtgaaatgaacgccttgctgctgggcaacgtggatgaaaacctcaattatgttattgcgatagccaatattttgctgctcaccattgtcacgccgctgacggcgtcgctggcgacattgtggatagactggcggctggggctggtgatgttgctgatcttccctctgctggtgccgttttattactggcgccgcccggcgatgcggcgacaaatgcagacgctgggggaagcgcaccagcgtctgagcggcgatatcgttgaatttgctcaggggatgatggtattgcgcacctgcggcagcgatgccgataaaagccgggcgctgctggcgcatttcaatgcgctggaaaacttacagacccgcactcaccgtcagggcgctggcgcgacgatgctgatcgccagcgtcgtggagttgggcctacaggtggtggtgttatccgggatcgtctgggtagtgacgggcactctgaacctcgcctttttgattgccgccgtcgcgatgattatgcgcttcgcagaaccgatggcgatgtttatcagctacacctcggttgtggaactgatcgccagcgccctgcaacggattgagcggtttatggcgatagcaccgcttcccgtcgcagagcaaagcgagatgccggaacgttacgatatccgctttgacaacgtcagctatcgctacgaagaaggcgacggccacgcgcttaatcatgtttctttgacgttcccggcagccagtatgagcgcgctggtgggtgcctccggcgcaggcaaaactacggtcaccaaactgttaatgcgctatgccgatccgcagcaagggcagatttctattggcggcgtcgatattcgccgcctgacgccggaacagctcaatagcctgatttctgttgttttccaggatgtctggctgtttgatgacacgctgctggcgaatatccgtatcgcgcgcccacaggcgacgcggcaggaggtagaagaggccgcccgcgcggcgcagtgccttgagtttatttcccgtcttccgcaaggctggctgacgccaatgggagagatgggcggccagctatcgggcggcgagcgccagcggatttccattgccagagcgttattgaaaaacgcgccggtcgtcattctcgatgaaccgactgccgcgctggatattgaaagcgagctggcggtgcaaaaagcgatcgataacctggttcacaaccggacggtgattatcatcgctcaccgtttatccaccatcgccggggccggaaacattctggtgatggaagagggacaggtggttgagcagggtactcatgcgcaattgctctcacatcatggacgttatcaggcgctgtggcaggcgcaaatggccgcgcgcgtgtggcgcgacgacggggtttccgcgtctggagagtgggtgcatgagtga

SEQ ID NO: 216005 - DNA, 1281 bp, Klebsiella pneumoniae
atgagtgatgttcagtcgaatgtgaaaccgctgacgttgacgaccgggcgggtgatttttgctattgccggcgtctatgtgacgcagagtctggtatcggcgctgtctatgcagtccttacccgcgctggtgcgcgctgctggcggttcgctggcgcttgccggtgcgacaaccctgtttatgctgccctgggcgctgaagtttatttgggcgccatggatcgagcgctggcggcttccgcccggtagccaggaacgccgttcccgcatgttaatcctgcgtggtcaggtcgcgctagcggcgatcctgactattgccgcagcgattggctggtttgggcgagaagggggattccccgatacgcaaatcgtcgcgttatttgttctgtttatggtggcaggcacggtcgcctccaccattgatatcgccagcgacggcttttgcgtcgatcaactgacccgcacgggttacggctggggaaacagcgtgcaggtcggcggcagctatctgggaatgatgtgcggcggcggggtgttcctgatgctgtcggcggcatccggctggcctgtcgccatgctgatgatggcggtgctgattatggcgctgtcactcccgctgtggcgcattacggagccgacgcgaacagcgactatcccgcatgttccggcgttaggttatgcgctaaggaggaagcaggcgcgcctgggcttactgctggtattgatgctgaattcaggcatgcggtttgtgctgcctcttctggcaccgctgttgttggatcatgggttgagcatgtccgcattgggcgcgctgttcagcggcggcaatattgcagcgggcatagcaggaacgctggccggcggattgctgatgaaatacacctcacccggcagagcgctgttgacggcttatggcgtccaggggatcgcgctgctggcggtggtgatgacgctcatgatggcgccgggtcatctgctgctgccgattctccagtgtctggtcattgtccagtccatttcgctggcctgcgcgctggtctgtctttacgccacgctgatgtcgctttcatcgcctttgcaggccggtgtcgacttcaccctctttcaatgtactgacgcggcaatcgccattctggcaggcgttatcggtggcgttgttgctcaacattttggctatgcggcctgcttcctgtttgccggggcattcacgttgctggcggcgtgggttgcttatatccggctgcattcggcaagagaactgatgacaagcgcaattgattga

SEQ ID NO: 216006 - DNA, 1305 bp, Klebsiella pneumoniae
atgaaaatcagtgaatttctacatctggcgttaccagaggaacaatggctaccgacgatttctggcgttttacgccagttcgcagaagaagagtgttatgtctatgagcgtcaaccctgttggtatttaggcaaagggtgccaggcacggctgcacattaatgccgacggaacgcaggcgacatttattgatgatgccggggagcaaaaatgggcggtggattccattgccgactgcgcgcgtcgttttatggcgcatcctcaggtgaaaggacgtcgggtatatggacaggttgggttcaactttgcggcgcatgcgcgggggattgcctttaacgccggggagtggccgctgctgacgttaaccgttccccgtgaagaacttatttttgaaaagggaaatgtcaccgtttatgcggactccgccgacgggtgccgacgtttgtgcgagtgggtaaaagaggccggtacaacgacgcagaacgcaccactggcggtggataccgccctcaatggtgaggcatataaacaacaggttgcgcgcgccgttgcggagatccgccgtggcgagtatgtcaaagtgattgtctcgcgcgccattcccctgccatcgcggattgatatgcccgccacgctgttatacgggcggcaggcaaacacacctgtgcgctcgtttatgttccgtcaggaaggacgcgaagcgctgggctttagcccggaactggtgatgtcagtgacgggcaataaagtggtcactgaaccgcttgcgggcacccgcgatcgcatgggaaacccggagcataataaggcgaaagaggcagaactgctgcacgacagtaaagaggtgcttgagcatatcctttctgtcaaagaagctattgctgaactggaggccgtttgccagccgggcagcgtggtggttgaagatttaatgtcggttcgccagcgcggcagcgttcagcatctggggtctggcgtgagcggtcagcttgcggaaaacaaggatgcctgggatgcgtttaccgtgctgtttccgtcgattaccgcctcaggtatccctaaaaatgctgctctgaacgcgattatgcaaattgagaagacgccgcgagagctttattccggcgcaatcctgctgctggacgatacgcgctttgatgcagcgctagttctgcgttccgtatttcaggatagccagcgctgctggatacaggcgggggcgggaatcatcgcgcaatctacgccggaacgcgaactgacagaaacccgggagaaattagcgagcattgcgccctatttaatggtgtag

SEQ ID NO: 216007 - DNA, 1263 bp, Klebsiella pneumoniae
atgtcccttaccgacgcaaaaatccgcaccctcaagccttctgataaaccctttaaagtctccgattctcacggtctgtatctgctggttaagccgggtggctcccgccactggtatctcaaataccgtattagcggtaaagaatcccgcattgcgctgggtgcctatccagccatctccctgtctgatgcgcgacagcaacgtgaaggtatccgtaaaatgctggcgctgaatatcaacccggtacagcagcgggctgctgaacgtggctcacgaacaccggagaaagtttttaaaaacgtggcgctggcgtggcataaaagtaacaggaaatggtcgcagaacaccgccgaccgtctgcttgccagcctgaacaatcacatctttccggtcatcgggaacctacctgtatcagaacttaaaccccgtcatttcattgacctgctgaaagggatcgaggaaaaaggtctgctggaggttgcgtcccgcacacggcagcacctgagtaacataatgcgccatgcggtccatcaggagttaatcgatacgaaccctgcagcaaaccttggcggcgtgaccacacctcctgtcagacggcactatcctgccctgccgctggagcggctgcctgaactgcttgaacgtattggggcatatcatcagggccgtgaactgacccggcatgccgttctgctgatgctgcatgtgttcattcgctccagtgaactgcgtttcgcccgctggtcagagattgatttcacaaaccgagtctggacgatacccgcgacgcgagaacccattattggcgtgcgttattccggccgcggggcaaaaatgcgaatgccgcatatcgtccccctctcagaacagtccatcgccattctgaaacagattaaggatatcaccggtaataatgaactgatcttccccggcgaccataacccgtataagccaatgtctgaaaacacggtcaataaggcactgcgggtgatgggttacgacacgaaaaaggatatctgcggtcacggcttccgggcaatggcatgcagtgcgctgatggaatcgggtttatgggcaaaggacgcagtagaacgccagatgagtcatcaggagcgcaataccgtgcgcatggcttatattcataaggcagagcacctagaagcccgcaaagcgatgatgcagtggtggtcggattatctggaagcatgccgagaatcttatgcaccgccttatacaattggtaaaaataagtttatcccataa

SEQ ID NO: 216008 - DNA, 246 bp, Klebsiella pneumoniae
atggagtggtgggtaaaaaaagtacaggacaacgcttcggccagcctctgccgcgtcgtgcttcagagcggtgcgctggagatgatcgcagagattgaagcctgtcgcctccgcctgcgggaaggggataaactcactccgctggccgatgcgcgctattgtctgaataataatccgacgcaaactttgaagatccgcaacgccactcattatagcagcgagcgttggacaaacgccgacaaataa

SEQ ID NO: 216009 - DNA, 1623 bp, Klebsiella pneumoniae
atgaagcatctatttcgacactggcgaacgtcgggcgccgttatcggctcactgctgaaaaaagggagcattgcggtactggcgctgctggtggtctttctcgccgggcggatctatgagtcccagcgcggcccggccctgcatcgctggcatacctggagtggcaacgagatgtcggccgaagagatcgaccaggcgacctttgcccagtatctggcgcgggagaagacgattttcgccgatctccagcgtgaggtgacagaggctttgccggaggaagataaaaccccggtcaaccgcttttatcgtcacagccgggtctggccggggcagtttaagcaggactggaaccgttcttttgtgctgatgccgctgggcaagccgcgcggcagcgtggtgctcctccatggcctgaccgattcgccctacagcgtgcgctatctggcgcaactctggcagcagcggggttatgtggcggtggcgccgcgtttgccgggacacggcaccgcgccgggggcgttaacggcggttgactgggagacctggctggcggcgacgcgtctggcggtacgcgaagcgacccgccttgccggggcggacgtgccgctgcatctggtcggctactctaacggcggcgcgctggcgctcaagtatgccctcgatagcctggaagacaatcacttgcgccagccgcagcagatcattctgctgtcgccgatgatcggcgtgaccgcgtttgcccgtttcgccggcctcgccgggctaccgtccgtcttcccggcgttcgcccgcgcggcctggctgaacgtggcgcctgagtttaatccgttcaagtacaactcctttccggtcaaggcggcgagacaatcgtggttattgagccaggcgctgcagcagcagattatccgcgcggcccggcagggcgagctgaaagcgctgccgccgatcctcacctttcagtcggtgatggattccacggtcagcacccgcgcggtggtggagtccctgtatcgctatctgccggataacggcagcgagctggtggtgttcgatattaaccaggcggcggatctccgggtcctgtttcgccctgcgctctatgcggcggtgaatacgctgctgcccccggcgccgcgggcctataccaccacggtggtgaccaacgcgacggcgcacacgctgcagaccgtcgcccggaccacgctggcccaggaacgggaagagcatcgttatcctttacacctggcctggccggcggatatgtactctttgtcgcatgtggcggtgccgtttcccctgagcgactcgctgtatggtcgcgagccggacgagaagaaccgctacggcattagcctgggcaccatttcactgcgcggagagaccgggacgctgagcgtggggctggagacgttaatgcgcgtcacctccaatccattctttccatggatgatgacgcgcgtcgatgagcgcatcgcctgcggcgaacaggcggcggtggcggcctgcctgaaagcgcaggccagagcagaggcgttaaaacaggatcaggtgcagaacggtacgcagcaggatgccgacgatcgccgcgggagccacgaagcggaacaggcggacaaaccgtga

SEQ ID NO: 216010 - DNA, 933 bp, Klebsiella pneumoniae
atggatgtcataagcatcattatggcggcgggcaagtcgtccgttgacgtcgcgctgtatacgctgttgccgatcatggtgatcatgctgatcatcatgaaataccttgaggtccgcggtatcctcgatgtgattgttcgctgggtggccccgctgctgaagcccttcggcttaaccgggatgagcgccttcgccctgatccagattaactttgtcagctttgccgccccgctcgccacgctgtcgattatggataaacgcggcgtctcggaccgacaaatggccgccacgctggccatggtgttcgccatggggcaaggcaacgtcttctatcctcttaccccttttggtctgcactggctggcctcgatcgttatctcggtggtcggcggcctgtgcgcggccgccgtcgcctggcacgtcaccggacggcgcttatcggtcgccgagaacccccgcgcggaagcgctgccgaacgccgagcagaacagccagggaattctggccgtgattaacagcgccggctccgacgccatccgcctggcgctcggcgcggtgccaatgctgatcctgtcgttaaccatcgtcgggctgctgcagggcgccggggctatcgacctgctgcagcagctgctgaagccgcttctcagctggctgcacatcccccagaactttgtgctgccggcgctggtgaagtgcgttgccgggggcaccgcctactttggcgtcatttccgagctgatccagcagggcaaagtcaccgtggaccaggtcaacgcctcggcaggtctactgatccagacctttgatcttcccggtatcggcatttttcttggcatcagctcacggtttgtccgcctgttccgcttcgtggctcccgcggcgatcgtcggcatcctgctgcgtaccgttctgcacctgatcctgttttaa

SEQ ID NO: 216011 - DNA, 1635 bp, Klebsiella pneumoniae
atgtcgctaattgctatcgtgctggtctttatcatggccatcgtggtgaccgtgttcctgtcccatcttctgcccgttaaagtgccgctaccgctgatccaaatcgccgcgggcgccgcgctggccgccagtggctttcaggtcgattttgacccgcatatttttttactgctgtttatcccgccgctgctgttcctcgatggctggcgcatccccaaagacgcttttttccgcgacatgaagccgattttatcgctggcgataggcctggtgatggtgactattctcggtattggcctgtttattcactggctgatcccggctatcaccgtggcggcagggttcgccctcgcggctattctgtcgcctaccgatccggtggcggtatcggcaatgaccgccagctcgccgcttccctcaaggatggcgcatattctcgaaggggagtcgctgttaaacgatgcttcagggctcgtcgcctttaacttcgccatcgccgcggtgctgaccggcagcttctccccgggagacgcggtggtgaaatttttcctgatggccttcgggggcatcctcagtggcctcgtggtggtgtgggtcaccggcaaatgtaataactttctggttcggcgcacccgcgaggagccagccatccagatcctgatcagcctgcttatccctttcgccgcctacctgctggccgaggcgttccatgtctcgggcattcttgccgccgtcgccgccggcattgcgatgcattatgagcagctgtcggggccccggcttccggcgacgcgcatgaaaagcagcgcggtatggtccatgctgcagaccaccctcaacgggatgatctttctgatgctgggcgagcaactgccgcgcatgctcaggacgctgccggcggtagccagccaggccggcgtctcttcgccctggtatctgctgctgtacgccgtggccatcaccctggcgcttggtctgatgcgcttcgcctgggtatggctgtcgatgaagctgacaatttttcgccgcaaacgtcgaggcaaggccatcaccgtccgtccacgattcagtatcctcgccgtcatggcgctggcgggagtgaagggctctgtgaccctcgccggtattctgacgctgccggtggtgctggcagatggttcgccgttcccgggccgtgaactactgatctttctttcgatggcagtgatcctgatgtcgctggtggtggcggctatcggtctgccgtttatgacccgttatcttgccgatgatctaccgcatgacaccggtaaggacgacattggcgccgtgatgaccgaggtggccattaaccgtcttaacgcgctactggacgagccggtggaggatcccagtgagcaggccctgcgggccgatgccggcaatatgctgctcgaaacctatcagcggcggcttcactataacgacaatgacgaggggcaggatgtcgggctggagctggctaagcgcgccaggctggagaaatatatgcaacgagaggtcattatcgcccagcgtcaggagctgttccggctgcgccgcgcccataacatcagcgatatcactttttatgaggtgctgcgggagatagatctgaaggaagagagtttacgctaa

SEQ ID NO: 216012 - DNA, 951 bp, Klebsiella pneumoniae
gtgaacttccagcagctgaaaattatccgtgaggcggcccgtcaggattacaacctgacggaagtcgcgaatatgctctatacctcgcagtcaggcgtcagtcgccatatccgggaactggaagaggagctggggattgagatctttatccgccgcggtaaacgcctgttaggcatgaccgagccgggtaaagcgctgttatcgattgccgagcggatcctcaatgaagccagtaacgttcggcggctggcggatctcttcactaacgatgcgtcaggcgtcttaactatcgccaccacccatactcaggcgcgctacagcctgccgccggtcattaaagctttccgcgagctgttctcagatgttcgcgtcgagctggtgcagggtaccccgcaggaaatcgaagcgctgctgcataacggcggagcggatatcggcatcgccagcgagcgcctgagcaacgatccgacgctggcggctttcccctggttccgctggcatcacagcctgctggtgccgaaggatcatcctttgacgcaggtttctcccctgacgctggaggcgatcgcccgctggccgttaatcacctaccgccaggggatcactggccgttcgcgcattgatgaggcgttcaaccgcaaggggttgatgccggatatcgtgctgagcgcgcaggattccgatgtgatcaagacctacgtggagctggggctgggcgtcgggctggtcgccgagcagtccggtgatgcccgggaagcggacacctttacgcgtcttgatacccgccatctgttcgatgccaataccgtgtggttgggactgaagcggggccagctgcagcggaattacgtttggcgctttatcgaattgtgcaatgccggactgtcgctggatgagattaagcgtcaggcgatggagccggaagaggccgcaatcgactatcagatttaa

SEQ ID NO: 216013 - DNA, 696 bp, Klebsiella pneumoniae
atggaggatgctgaaaacagcctgtccagtgcggcgatgacgcccaggggacggctacgggtggatgtaccgagtccgctggcccgccttattctggtgccggcgctaccggctttccacgcccgctaccctgatatccagatcgacatgggtgtgagcgaccgggtagtggctctgatcggcgacaacgtggattgcgttctgcgcggaggtcaaatcaccgaccagtccctaatcgcacgccatgtcggcgatttgcaaatcggcgtctacgtcgcccccagctatgtggaacgccttggcgctcccgcacacccgcgcgagctgcaaaatactgaccattgcatagtgggattcttgtcctcacgcaccagtaagattgatcctttggtactgtgcagtgagaatgaacgtattgaaatcacgggcaactacgtacttgccgtggatgatggcaatgcttacctcgaagctgggttagttggcttaggcgtgattgcgctgcccaactatatggcggcagcgcatcaggccgttggcgctttgattccattatttacacaatggcggattagcccaatgcctctgtacctggcgtttccaccgaaccgccatgtcaacgccaagctgcgcgtttttattgactggatcgttgaattgatggagcagcatgtccccattgccaacaatcagtga

SEQ ID NO: 216014 - DNA, 708 bp, Klebsiella pneumoniae
atggacctggttgactggcagcaacgatttgagcgctggatactgacgcaccatgcgcaggatgacgccgcacacgatctgtcccattttcgtcgcgtctgggcgaccgccactcagctggccgcgggggaggaagtcgaccggctggtactcctcacggcctgctattttcatgacatcgtcagcttgccaaaaaatcatccggagcgaagtcgatcctcgataatggccgccgagaaaaccctcgccattctgcagtcggcctttgctgattttcctgcggatcgttacccggcggtcagccatgccatcgaggcgcacagcttcagcgcggcgatcccaccgcgcacgctggaggcgaaaatagttcaggatgccgatcgactcgagtcgctgggagccattggtctggcgagggtcttcactgtcgccggcgccctgaataccatcttgtttgatgccgaagatccttttgctgatcggcgggcgctggatgaccgcaaatatgccctcgaccatttccagtgcaaacttctgcgcctgccggaaaccatgcaaactgacaaggggaaagcgatggcgcagcataatgcccgttttctcgtcgaatttatggctaagctcagcgcggagctgcagggggagccgctggcgctggatgaagcggttttgcgccgctttgcaccgcaggcgtcaaccgaccggtga

SEQ ID NO: 216015 - DNA, 1401 bp, Klebsiella pneumoniae
ttgtcgttggctgaacaggccggggaagacgctgaggcgctgctgcgtcagctgatgacgatctacgatgtaaaaacgctggttgccgaactggtgagcgtcggcgaacagcactggagcgcggcgatcctcaagcgcgtggtggcgcttggccgcgtggcggagcgtttgcgcccgcaggaagttgctcatctggcgacgctcctgccttcgccgccggcccatcatccgcactatgggttccgttttatcgatctgtttgccggtattggcgggatccgcagtggttttgaagccatcggcgggcagtgcgttttcaccagcgagtggaacaagcacgcggtacgcacctataaggccaactggtactgtgatccgcagcagcaccgttttaatgaagatatccgcgatattaccctcagccaacgttctgacgttagcgacgaggaggcggcgcggcatattcgtgaatctatccctcagcatgatgtgctgctggctggcttcccctgccagcctttctcgcttgccggcgtctctaagaaaaatgcgatgggccgtgcgcatggctttgcctgcgaaacccagggaacgctgttttttgacgtggtgagaattatcgcggctcgtcagccagcgatttttgtgctggagaatgtcaaaaacctcaaaagccacgatcaggggcgcaccttccgtatcatcatgcagacgctggatgagctgggatatgaagtagctgacgcggggcataccgggccggatgacccgaaggtgattgacgggcgccatttcttgcctcaacaccgggagcgcatcgtgctggtgggtttccgtcgcgatctgcagctgcatgctggatttacgctgcgcgacatcgcggcgcagtacccggcggtgcggccaacatttggcgagctgctggagccgacggtcgatgcgaaatttattcttacgccggtgctgtggaaatatctttatcgttatgcccgcaagcatcaggcgcggggcaatggctttggttatggcctggttgaccccgccaatccccacagcgtggcccggacgctttctgcccgctactataaagatggtgccgaaattctcgtcgatcgcggctgggaccggccgctcggtgagaagcattttgacgatccgctgaatcaacagcggcggcctcgccggttaacgccgcgcgaatgcgcccggctgatgggctttgaatccccgcagggggcgcgttttcgcatcccggtatcggatacgcaggcctatcgtcagtttggcaactcggtggtggttccggtcttcgccgcggtggcgaaactcctggcgccgcgcatcgctcaggcggtggcgcgccgcgaagcggatgataatgatggcggatgttcacgataa

SEQ ID NO: 216016 - DNA, 768 bp, Klebsiella pneumoniae
atgggcgcgatggccgttgttttgatggctggcgtcagcgtgaaaacttttgcggcggaaaacctgctcaatcagattaaagagcgcggcaccctacgcgtgggcctcgaaggcacctaccctccctttagtttccagggggatgacggcaagctgaccgggtttgaagtggaattcgctaacgaactggcgaaacatcttggcgtgaaggccgatctcaaaccgaccaagtgggacggtatgctggcctcgctggactccaagcgtatcgacgtggtgattaaccaggtcactatctctgacgaacgtaagaagaaatacgatttctccaccccatataccgtctccggcgtgcaggcgctggtgaagaagggtaacgaaggcgcgattaaaaccgcggcggatctgaaaggcaagaaagtgggcgtcggactgggcactaactatgaagagtggctgcgtcagaatgtccagggcgtggatgtccgtacctatgatgacgatcccaccaaataccaggatctgcgtgtaggccgtattgacgccattctggtagaccgtctggcggcgttggatctggtgaagaaaaccaacaatacgctggcggtaaccggcgaagccttctctcgtcaggaagctggcgttgcgctgcgtaaaggcaacgacgacctgctgaaagcggtagatggcgcgattgcagacatgcagaaagatggcagcctgaaggcgctgtccgagaaatggtttggcgctgacgtgacgaaataa

SEQ ID NO: 216017 - DNA, 225 bp, Klebsiella pneumoniae; identical to SEQ ID NO: 136369

SEQ ID NO: 216018 - DNA, 657 bp, Klebsiella pneumoniae
ttgatcaacgttcttcttgttgatgaccacgaactggtgcgcgcagggatacgacgcattctggaagatataaaagggattaaagtcgctggcgaagcctgctgcggcgaggacgccgtcaagtggtgccgggctaattccgcagatgtcgtcctgatggacatgaacatgcctgggatcggtggtcttgaagcgacgcgcaaaatcgcgcgctccgtggcgggcaccaaagtgatcatgttgaccgtgcataccgagaatcctttacctgccaaggtcatgcaggcgggcgcggcaggctatctcagtaaaggcgccgcgccgcaggaagtggtgaatgccatccgctgcgtagcgtccgggcagcgctatattgcctccgatattgcccagcaaatggcgttaagtcagattgaacccgaaaagacagaatcgccgtttgccagtttgtctgaacgcgaattgcagattatgctgatgatcaccaaaggtcagaaggtgaatgagatctcagagcagctaaatctgagtcctaaaacggttaacagctaccgctatcggatgttcagtaaattaaacattcatggcgatgtcgagctgacccacctggcaattcgccatggcctgtgtaatgcggagtcgttagcaagccagtga

SEQ ID NO: 216019 - DNA, 1833 bp, Klebsiella pneumoniae
gtgagtgatgtttttgacgcaaaagctttcctgaaaacggtgaccagccagcccggtgtgtatcggatgtatgatgctggcggaaccgtcatctatgttggcaaagccaaagatctgaaaaagcggctcagtagctacttccgcagcaaccttgcgtcgcgtaaaacggaagcgctggtagcgctgatcgcgcaaatcgacgtgaccgtcacccacaccgagacggaagcgctgctgcttgagcacaactatattaagctgtaccagccacgttacaacgtgctgttacgcgacgataaatcgtatccttttatttttctcagcggcgatactcatccgcgtctggcgatgcatcgcggcgccaaacatgcgaagggcgagtattttggtccttttcccaacggctatgccgtgcgcgagaccctggcgctgctgcagaaaatctttcccatccgtcagtgtgaaaacagcgtctaccgcaatcgctcccgcccctgtctgcagtatcagattggtcgctgcctggggccgtgcgtggccgggctggtcagcgaagaagagtatgctcagcaggtagagtatgtgcggctgtttctcgccggcaaggatgaccaggtgctgacccagctcatcgcgcggatggagaaggcgagccagaacctggagttcgaagaggccgcgcgcatccgcgaccagattcaggccgtccgccgcgtgacggagaaacagtttgtctccaacaccggtgacgacctcgacgtgatcggcgtcgccttcgatgccggcatggcctgcgtgcatgtgctgtttatccgtcagggcaaagtgctgggcagccgaagctacttcccgaaagtgccgggcggcaccgagctgggagaggtcgtggagacctttgtcggccagttctacctgcagggcagccaaatgcgcacgctgccgggggagattttgctcgactttaaccttggggataagacgctgctggccgactcgctgtcggagctggcgggtcgtcgaatcaatgtgcagactaagccgcgcggcgacagagcgcgttatcttaagctggcgcggaccaacgccgcgacagcgttaacgaccaaattgtctcagcaatcgaccattcatcagcgtttgcaggcgctggccagcgtactggagctgccggccgtcaagcgaatggagtgttttgacatcagccacaccatgggcgaacagaccgtagcatcctgtgtggtgtttgacagcaatggcccactgcgcgcggagtatcggcgctacaacatcaccggcattacccctggcgatgactatgcggcgatgaatcaggtcctgcgccgtcgctatggtaaagcgattgatgacaacaagatcccggatgtgatcctgatagacggcggcaagggacagctggcccaggcgaaagccgtgtttgctgaactggacgtcccctgggataaacatcatccgctgctgctgggcgtggcgaaaggtagcgatcgaaaagcgggtctggaaacgttattctttgagccggaaggggaagggtttagcctgccgccggattcgccggccctgcatgtgatccagcatattcgcgatgaatcgcacgatcatgcgatctccgggcatcgcaaaaaacgggcgaaagtgaagagcaccagctcgcttgagactatcgagggggtggggccgaagcgtcgtcagatgctgctgaagtatatgggtgggctgcaggggctacagcaggccagcgtcgaagaaattgctaaagtaccgggcatctctcacgctctggcagaaaagatcttctactcgttgaaacattag

SEQ ID NO: 216020 - DNA, 549 bp, Klebsiella pneumoniae
atgcaatttaatatccctacgttgcttactctgtttcgcgtcatcctgatcccgttttttgtgctggcgttttatctgccctttagctgggcgccgtttgcctgcgcgctgatcttctttgttgccgcggtaaccgactggtttgatggtttcctcgctcgtcgctggaatcagagcacccgttttggcgccttcctcgacccggttgccgataaagtcatggtggctatcgccatggtgctggttgccgaacactatcacacctggtgggtcacgctaccggcggcgaccatgattgcccgtgagatcattatctccgcgctgcgtgagtggatggcggagctggggaaacgcagcagcgtggcggtctcatggattggcaaagtgaaaacgaccgcccagatgaccgccctggtatggatgctgtggcgtccttatccgtgggtggagtgggccgggatcgcgcttttcctcgtggcggcggtgctgacgctgtggtcgatgctgcagtatttgaacgcggcgcgcggcgatttgcttgatcagtga

SEQ ID NO: 216021 - DNA, 1017 bp, Klebsiella pneumoniae
atggccggaaagcgtaagaaccccgctgataactggatgccgccccgcgtgtatcgcggcaaggcggcgtatgaattcaggaataaagataacaaggctatcaggctatgtgcgctctccgagcctcaatcagctgtgtggctggcatatgaaaaagccatgggagaagaagtcgagcgcaagacgtttcaggctctggccgatcaattcatgtcttcccctgactggcaggatttagcggcagaaacccgaaaagactacacgaaatacgcaggcaaagtgttgccggtattcgggaaggttaacccggataaaattaaaccagaacacatccggcgctatatggatcagcgtggcatggccagtaaaacgcaggctaaccgggaaaagagtttcctttcgcgggtattccgttggggttatgagcgcggttacgttcagcataatccctgtcagggcgttaagaagttcaaagagacggccagggagcgttacatcaccgacgaagaatacaaagcggtttacgacgttgctccggacgtggttcgcgccaccatggaaatcgcttatttgtgtctggccagacaaagcgatgtgctggctttgactgaagaccagatacgcgaaaccgggatcttcatccgccagggaaaaacaggcgtaaagcaaatcaaagcatggtcgccacgcctgcgcgccgctgtcgccctcgcccgttccctgccgttaaagccgggtatacgtagcctgtttgtcattcaccagaccagcggcagcaaatacacccgcgacggttttaattcacgctggcgcgacgccaaaatcgcagcgcaggaaaagaacccgcacctgcagatagatttcactttccatgatctgaaggcgaaaggtgtttctgatctggaaggaagcctcgaagagaaacaggcgatttctggtcataaaaattcgaggcaaacggcaatttacgacagaaaaactaaaatcgtgccggtggtcggcggtcagaaaaaatga

SEQ ID NO: 216022 - DNA, 246 bp, Klebsiella pneumoniae
atgagacacgatcacgacatcatcaccagagaggaaatgatcgaactgacggggacaccacttaaatcgcggcagtgtgaagcgctacgccgggccggagtctttttcatggaaagggcagacggccatcctaaaacgacgtggggccatttcctgaacccgattaaataccgcaaccagcaggaagagacggtgcgggaggaagaaccagacttcggagctatctttaatggccggaaagcgtaa

SEQ ID NO: 216023 - DNA, 186 bp, Klebsiella pneumoniae
atgctgaaactcacactgaaacgaggcgacgcgcttcacgtcgtttttccggacggtactaacgggataatcgaagcctgcgcgcgttgcgaactggctatgcattttccgcgcagtgccaaaatcacccgcgaaaatggtgcgttccggaataaaccaaacctgattaagcctaatcagaaataa

SEQ ID NO: 216024 - DNA, 567 bp, Klebsiella pneumoniae
atgacttctactactgcaattgctatcgctgccgatatgtcaaaactccaggcgcttctggaaaatgaagatggttctggtctgtctccggaaatgattgccgacacaatggaaggacttgagttgcaactcggcgacaaactggatgcggtgtttgtgcatgttcgcaatctggaaggtctggcaaaaacctgcgatgaagaggccaaacgcctcgccgcccgcaaaaaatcattcgaaggcaagatcacgaacctgaagaagtatgttctccagtgcctactggccgccggtcaggatacggttaaaactgccaaaaatacctttaccgcacgtaagggagctataaacgtcgtgatcgataatgatgaattactgccggatgaattagtgacagttcagacgttagtcactccggacaagaaagccatcaaggaagcgattgaatcagcacaggcagcagcggcccagattagcgctgacggcggagagataccggaagaactgttaaacccagtgccgggcgcacaccttgagattggcgaacgttcactgcaggtgcgctga

SEQ ID NO: 216025 - DNA, 2166 bp, Klebsiella pneumoniae
atgaccatctacaacggcttatttgagccaaagaaatcggcgattaaagactgcggcgccgtgcagctggcgatcgccatcgatgcgccaaacaaaaaagtggccgaaagcattatgaccggcaaactctgggagtcatacccggccaatggtgacaactatttcaaaccaaaactgtgggaacacattgaaggccagccgatgcctacagttggccagttcgatgagtcattcgcccagcagcatacttttgacggtgaaaaatggatttctactgtgcaggatagcgcttccggaagtagtgctggtttacctgccgacgatgaagtgatcgacctgatgaccgtttccgcagaggaacgctttgctgccgtcctgctttttagcaccgctgcgattgatggccatctttattctcaggttgtggattatctggataacctgaaaaaccacgatggggaatttgaagaggaagatcgctttaactttaacgtgctgtgcgccctgcaaaataacttcccggttcaaagcatgcacgtggaaggactgaataatcttgttcagggtattttctcccattttgaaaaccagacgccaggcaaagcggctatctctcagttcgttaaacgctggcttgagaatccgggcaagcgcgacgaactggcccccggcgtatataaaaataccgctctcagcaccagcaccagcaccagcaccagcaccgatgataaaacacccttggtaatttctaagcggggttataaacacacatatgcaacgctggatcaggagatcgctaccgcccttctcccgctggcacctgatgcgccggtactattcggaaaccttctggatgctaagaagatgatttccaatgaccgggaagactttaaacgctggtctgcatcgctgcacctcactccgcagatactcaaatacgaccgtgccagcatcttcggtgtggtgcagaacgtaccggcgaaagatacctatcatttccctgacagcctgcggcgccacatcgattcatggctggaggcaaacggccgctttgaagaaaccgagacaggatccgttaaacaaccagaggcgacgcaaaataccgcctcaaacgtgggcgaaaaagaggaagtgccgccggttgtaaccgataaggaggccaaacaggcgcgtgagacgctcaatgatatgggttatggcgtatatgcctctggtgaaggtgcagagccggaagagaagttaagcgttaaggctgaaaaactggctgatgattccgagcgtttagcaaaacaaatcgctcacgctgaaagcctgcctaacgctgaggatgttgtgcaagctgtcggaaaaccaatcatcggggaagacaatttagacctctggaaacgcgtatttaaaaccgacgaaaggtttactaaggctttcacacagaacggcggtggcacctcgatcaacggtacctacatgaccatgctcgccacccgtgagtttggccctaagggcatcggctggggcgtggatattgttgaagagcgtttcgatattggcgctccgatcactcgccaggttaaaggcaaagataacaacgcatcgtgggagctggttcttgatgggaatggtaataccgtcaacgaacagcaccatgttgtgactgttcggctctggtacatcctgaacggcgtacgaggtgaggaaacagcatacggctgtacaccctacatttacggcagtaaatacgggatcacctgcgacggcgaagcagccaagaaatcactgactgatgcgaccaaaaaagcgttatccggcctcggattcagcggcgatatctttatggggctttacgacaatctggagtaccgccagaggaataaggccgagtttgacctgaagaacgccagcgaatcagccgaagatgcagcacggcttcgccaggagtttgacgacaaattaagccgcgttgctaataccctggcgcatggcgtgacggtgaacgaaatcaatggcgtgttttcccctattgcacgtgagatcgatgtacacattaaagccgcccaggccaacggcgatacgcagcatgaacgctatctgtctggccgactccgccgactcatcaccattaaggatgaccgcattaaagaactgaataaagccgaggagaaagcataa

SEQ ID NO: 216026 - DNA, 324 bp, Klebsiella pneumoniae
atggaagcgcttaccatccccgtaactgtttacgttatggccacaacgaacccatatctaccaacgtcttatcactcattcacctgtgacatgtcaaagcaataccctgatctgtatgtcctcgttactaccaaaacggtagaggttcccattccggctttagagccaatcgacattattggtatgcaggttaatgcccttcgcgcgaagaaagagaaaatctctgccgaagcaaagaaggagctgggtgttattgaagaccagattcagcagctgctgtgcatcgatcactctccgattgaagaaagcgacgtaccgttttaa

SEQ ID NO: 216027 - DNA, 195 bp, Klebsiella pneumoniae
atgttaacaactgatgcgatcaaatattttggtagtaagagaaaactggctgaggccgctggcgttaaggctcctactgtctatgcgtgggggcgtttggttcccgaaggtaaagcagctcgtttgtctctgatgactgatggcgaacttgtttatgacccaaaggcttaccaactgccagccaaatcagcttaa

SEQ ID NO: 216028 - DNA, 447 bp, Klebsiella pneumoniae
gtggaatacctcgaagaacttaaacgagagatctttaactgggcagcggaaagcgggcaggagctggttgctatcgagataagccgcatgtggtttcgtcttggtggtaataccggttcgctgaagctgcaccagatcgaagatgcagatggaaacgccgactggcgggcaatcaacaataaccgccaacaaatttttcgttggttgcgaggcgagaccaaagccgcgagagccaaaactctggcgctggtcaaagcgatggaagcggcgatgccggcagaacgttacgcgcgcttgggtatgtccacccagtatttaatttgtgtggccattcgtgagtttgccgctgcaattatcgcgttgttactcgacgccagagacgggccgcaacaagtcgccagagcattacaagctatgcgagaaacacaacgcctgaccagcgtttaa

SEQ ID NO: 216029 - DNA, 222 bp, Klebsiella pneumoniae; identical to SEQ ID NO: 97641

SEQ ID NO: 216030 - DNA, 984 bp, Klebsiella pneumoniae
atgagtatgacgcttatggccaaagcaatggcaatcaagaccggaaacccgattcgaaaactggtgctgatcaaactggctgataacgccaatgattccggcgaatgctggccgtcttacaaacatattgcggatcactgcgagtgcagcaaaagcgcggtgcgtgaccatatcgatgcgttaatttctatgggcctgctagtgaaagaaaaccgcccgggcgtaaaaaacgggaagggtaacgcgtcgaatttgtactgtatgaaacttgataaccctatgccgccaaaaagcatagcccctatgccgtcaaaaagcacaggtatgccgccaaaaagcatagcccctatgccgtgtggcggcaccagaaccagtcactcttttgaaccagtcatagaacctatagatccccctaacccccagacgggggaaggcgatgaaaaaattaattctgatgctaaaaaagcgctggaattttacaacgagcaaacaggtacccgctgccgtgacctgaaaccgtttgtgctgatgctgacgccgaccaccacccgggcagggtacacgctggacgaattgcagttagttatccgctgggtgctggccacatggcgccgccgtggcgatagcctgccgaagcctgcgaacatctgccgggtaaaccgctttgatggttatctcgccgacgccgaagcatgggcggtgaccgaaaccgatattgatccggaagccgttatgaacggctacaacgaaatttttgctgacgttctgccaactgctgaactggacaccgaccgccgccggatgatcacccgacttgccgcccacatgaaaaacaaaaccacgggcgcatttctgggttatttcgaaaaattccgcgctgacgcctccgatttttactttggggaaaatggcggatggcgcgccagctttgactatctgatgaaaccagagacattgcgtaagaccagggagggcgctttatga

SEQ ID NO: 216031 - DNA, 1407 bp, Klebsiella pneumoniae
atgatgcagatgatgtattccactcaggaactggaatgtctggttcttggctgcctgatgaacggcggcgccacgccggacgcctttgatgtgattgccagcactccgagcgaggctttcagcgtcgcatactacaggcagatttacggtgtgatcaaagcgcaggccttgagcggcggcttaattgacatgatgtacattagcgaagctattggcggacaggggacgctggctaatctcgccgatatttgcaaatttccgacatcgatcgtcaatctcaaaggctacgccaaaaaaatggttaaggcctggcgaagcagaaccatcgcgcaattactgcaggatggtgcggatgggattcgtgatgcaataaaccaggaacagcgcgatcaggttgtcgaaactgccgtggcgcagctgctggacatgactggcgacactggcgacgttcagccggtacacatgagcgaattattgccggtgtacatggaaaccatgcagaagcgtatggacggcgaagagggtacccgaaatctgaaaaccgggatcgaggaactggacgatgcgaccggcggaatcaacctgcaggatttgattgtcgtcgccgggcgtccaggcatgggaaaaacagaatttgcgctgaagattgtcgatggcgttaccgctgctggcggtggtgcgttgatattcagcatggaaatggccgctgcgcaaatcgtagaacgctctctggcgggttctggcaacatgtcagtgtcacgcctgcgtaatcccctcgatatgcaggacgaggactgggcgcgctttacagcggccatggagaccatgaacgggcgagatatctggatcgttgatgctaccgatctgacgattgagcaaatccgcgccgttgccgaaacgcataagcgccggtatccgcatctggcgatgatcgttgtcgattaccttggcctgattaaaaaaccgaaggcagagcgtaacgacctcgcgatcgcccacatatcccgaaacttaaaaactatggctatgcgcctgcatacgccgacgttcgcgcttagccagctttcccgcgctgtggattcccgcccggcgctccagcgccgcccggtcatgtcagacctgcgcgattccggttctattgagcaggacgccgacagcatcatgtttctgtatcgcgatgaggtttacaacccggaaagcccggcggctggcgtcgctgaaattatcctgggtaaaagccgcttcagtgccgcgggcgcaattatttatcaggaatttaaaaacggacactttctgtcaatggatcagcatgttggcaaagagaaaacacgtatccaactggaggccgcgaaaccccggaaacaaccccgtaaatactctgagaaattcaataccgatgcattttaa

SEQ ID NO: 216032 - DNA, 672 bp, Klebsiella pneumoniae
atgaccacgaatttaaattacccaaaaccagtaaaaccggatgatggctgcaactggctccccgttattctctggcgcatgaacgccggcgcgcgcgcccgcagccgttccgtgttcgttgcggcgccacgcccggcacctgtacccggcatcaccccgcaaaaaaaaccgattaaacgtgaaattatcgcccctacggtttccggccgcaggcgtaaaacccacatcggcaccgtgatttattccagaggtgaaaaaaacgttcgcctgagtgaaggcgctaccgtctggtctgctggctctaatgagcatttcgataaaaaaacgggccagcgcgtcggcagtattggccgtcaccgtctggtgctggagagtatccgcccattgcaggccagcgacgaacaacaggatgccgggagcgtcaccgcgcagcagctggtagccgtgatgaaaggcaaaacgctttcttaccagggcatcctggcattaatccagaagcactatccagattgtcaggtgacgattaaagaacttcacgatcgcgtgttcggcatgttcatgtcgaattatgtgggtatcacccgtcacgacgatatgccggtggttcacttcacgcttaacagcgtcgatccccgttattacatcgagtcagcgaagaacaagagggcataa

SEQ ID NO: 216033 - DNA, 234 bp, Klebsiella pneumoniae
atggccgggcaatcagattacttgccgcccggcttaccgcttaatcgcgccaaatggccgcaggagtgccagatcaaagagcactacgatatgcgcgcctcggcactcatacgccagctgttcgagaagaaagttactcgacaggccatcgtagagcagattgcagcgacgccggaaagctaccgggagtttttcaaagcgagattaaatttttggcgggagaagcggacatga

SEQ ID NO: 216034 - DNA, 171 bp, Klebsiella pneumoniae
atgaaattttcaacacctgattttatgcattgcagccgtaggacgctgatgctgttcgtactcagtgcaaacgttgttggatggatagtcattatcgctctgatatgggctggatgtgaggttgcgcagtggacgctggaatatctccgcagtagtggggtgctggcgtga

SEQ ID NO: 216035 - DNA, 591 bp, Klebsiella pneumoniae
gtgaataacaaatacaccttgatttatgcggatccgccctggacgtaccgcgataaagccaaagatggcgagcgtggcgccgggcataaataccagaccatgactgtactcgatatctgccgactcccggtctgggaactggccgctgaaaactgcctgctggctatgtggtgggtaccgactcagccgctggaggcgttgcgagtagtcgaggcgtggggcttccgtctgatgaccatgaaaggctttacgtggaacaaatgctatagccggcagaccgataaactggccctcggaatgggccatatgaccagggcgaacagtgaggattgccttttcgctgtgcaggggaaattacccgcccggctggatgccgggatcgttcagtcattcacggctccgcgtctggagcattctcgcaaaccagatatcgtgcgcgaaaagttggtacagctgctgggcgatgtaccgcgtattgagttattcgcccgccagtcgtcgcatggtttcgatgtgtggggcaatcagtgtgaatcgccagcggtggcgctgctgccgggcatcgcagaatatatcggggaggtaggatag

SEQ ID NO: 216036 - DNA, 879 bp, Klebsiella pneumoniae
atggaagaaaattcgattgacgttttcaatgatatgtattgttctttcaacagtttcgaaatgcaatcatgcatgaaagctgtcgacagtatcttagggttttatttggccgataataatccctatgcagagccatttatttattttcacagctatataacatctccccagcctgaatttattaataatctaagaagtaatcctaaggggggtaaatgggcagactcgatgattaatggtattttgcttgatgtccaaaatacattttgctgcgttttgtatcactatgaaaatttggtggcattagaaagtaatgttacccaagcaatacttaaaacaaattataaatcagttattgggaattctactgttggtcttggaaatacactaaaatgggactttgagtatcagtctttcgttctcgcattgagaaggtgtttagattatcttgcgaaatcagtttcggcttattttaaaaatgacttccattcatttcgacgcctcggtagtttccttgaaaaacagaaagataaccccgtcagttcaaacttaaaagtgatgcatgaaaaatacagttatcttctttcgttcgtactgtcagatggagaaagaaaatctgtcagagataggatttctcactacggctatgtttctgccggaacaatgaatttgacatcgaatggtatctcattatttggaggtggggaggaaattggttttgaacaggatggtgttctgctttcgattataataaggaaacacttggataatttttttgattgtataagtgattttgtccatggctttgtagatggaatgaaagcgcatcagtgtattatatctgatatggacgttaatgaaaataaaaatggaatctag

SEQ ID NO: 216037 - DNA, 597 bp, Klebsiella pneumoniae
atggcgcagtattcttttgtaaaagcacccggcggtgtattaattccggcaacgcctgacgcccgcgattttttagaaaaaaaagtccgcctgggcggtattttgtatgcagattttaagcagacaagaaatccggcatttcaccgtaaatttttcgcactcctgaatctgggatttgattactggcaaccttctggcggcgcaatatcgccagccgataaaaaactggttcgtggttacgtgcagctggtggcccactatgccgggcatgccgacacattgctggaactggcggatcagtatctgcgcgatgaggcagaaaaacgcgccgggaatatcagcgctgtaaaatcgtttgaagcgttccgttcctgggtaactatcgaatctggtttttatactgaataccagatgccggacggcaccacccgcaaggaacccaaatccatatcgttcgcaaaaatggacgatgtagaattctcccagctgtacaaatccgtattagacgtcctctggaattttattttattccgcacattccccaatcagcaggcagcagaaaacgcagcctcgcaattattcagctatgccgcctga

SEQ ID NO: 216038 - DNA, 303 bp, Klebsiella pneumoniae
atgaccaaagacgataaacgctggctggaagacgttgcatcactgggttgcgtcgtatgcagaaatcttggctacggtgctacacctgcagaggttcaccacatccgcaaagggcagggcatagcccagcgcgccgaccacaaagaaaccctcccgctttgccctccacaccacagaaccggcggacacggcgtagctatccatgcagggcaaaaaacatgggaagaaaactacggaacggagactgaattgctcgaacaggtcactaacgaggtaaaggaattacgcttatgcagaatttaa

SEQ ID NO: 216039 - DNA, 297 bp, Klebsiella pneumoniae
atgccgctggtcgccaccttccgtacagactggttcagagtcattaccgacctgacccgaaaaaatctcaccactcagcaaatcgccgatgaacttggcgtttcaaaatccgccgtcctcggctggaaatctggttcagagcctcgccacggtcatggtgaagcgctgattgctctctggtgtctggctaccagctcagaccgtaaaaaactccctactgtgctttaccgccagtggtggacgttccgccgccctgtttttggtcgggaaactgaccagaagggcaacacacaatga

SEQ ID NO: 216040 - DNA, 441 bp, Klebsiella pneumoniae
atggctcgaccgaaaaaaatcgttgagacaccggggcaggaaaaagcggctccggaagaaaaaacgctcgtcacagaggggcagttaattactgctgaacagaacggcgctcagcagcggggtagcgatagcgacgaacagaccgtgcagcaaaaggtttcaaccctgcttgatggtactcagctggcagaacgtaacgccattctcgccacgctcaacgcgcagggcgctgccatcgttgcccgctttgaagagtacgccttcactgacagcctcgatcacccgctgaccaataacctcgatttcctcaatctggtacgcaaagccaccgatgtaagcactggcggtacggcggagcaggtgacaaacgaggaaggcaaaaagcaacccgtacgcagcgcgccggtattaaccgaacacggctggcacgttccgggctaa

SEQ ID NO: 216041 - DNA, 1626 bp, Klebsiella pneumoniae
atggatcaactcgccagccggttaatcaggcgcgctgacacgctgaaagcaaatcgccaggtgcacgaaagcgtctggcgggagtgctacgactacacctatccgctgcgcggggccgggttttcgtctgaggagctggacgcacagagcgcgaagcacaaggttgcaaagctgcttgacggcaccgccaccgacagcgcccgcatgctggcttccgcgctaatgtcagggatgacaccggccaatgctcaatggctgaacctcgacagcgaattacttcctgatgacgctaaggcgtggttgtccacctgtgcaacgctggtatgggaaaatatccacgccgctaactttgacgcggaagggtacgaggccaatctcgatgtggtctgcgccggctggttcgcgctgtatgtcgatgaggacaaggaagagggcggatttacctttcagcagtggccgctggcgcaatgctttgtgacctccacccgccgggacggcattgtagacacgatttatcgctgctatcagctcaccgctgaacaggccgtgaaagaatttggcgcggacaaggtaagcgaaaaaatccgcgatgctgcaaaaaacaaacccgacgataaatttgatttcctgcattgcattttcccgcgcgatacctacgccgtaaatgcgaagctggcgcgtaacatgcgctttgcatcgttcaacgtggaagtgagcggcaagcgtatcgtgcgtgaatccggctatcacgaattccctgtatgcgtcccgcgctggatgaaaatccccggcggctcctacggcatcggcccggtatacgacgcgctgccggattgcaaagaactgaacgaaaccaaacgcatggagaaggccgcgcaggatctggctatctccgggatgtggattgctgaggatgacggcgtgctcaacccgcgcacggtcaaagtcggcccgcgccgcatcatcgtggcgaacagcaccgaaagcatgaaaccgttgctcaccggcgcagatttcaacgtggcgtttaccgctgaagaacgtctgcaggcttccatccgcaaaatcatgatggccgaccagcttcaaccgcaggatggcccggcgatgaccgctaccgaagtgcatgtgcgtgtcgcgctgatccgccagttgctcggcccggtctatggccgcttccaggctgaatacctgcaaccgctggtggagcgctgtttcggtattgcgttccgtgctggcgtttttcctcccgctcccgagagtctccagagcgccaacttcaacgtgcgttatatctccccgctggcccgcgcgcagaagctggaagatgtgaccgccatcgagcgctacggccagaacatcatgcagctggcgcaggcgtatccggatgtactggacaacatggacagcgacgaggcgagcaaggttgtcggcgaggctcttggcgttccagcaaaagttatgcgttccgctgatgcggtcgagcaacttcgacagcagcgccagcagatgcaacagcagcaggcacaacagcagatgctgatgcaggcggggacggaagccgcaggcgcagcagggcagacagcaggcgcaattatgggacaacgactggcgggcaaccaatga

SEQ ID NO: 216042 - DNA, 234 bp, Klebsiella pneumoniae
atgatcaaaaaagacgtaacccctgaagactaccggcgaattttcgaggaaatgcctggcgggccgcaggtgatggaagaactaacgcgccgcttcgggcgtgaggcgtatgtcaaaggcggtaccgaaggcgaccgcgaaacctgttaccgggccggacagcgttccgtgctcgatttcattctgatgcaaatcaacaaagcagacggagtaaacgacgatgtggaagtttaa

SEQ ID NO: 216043 - DNA, 849 bp, Klebsiella pneumoniae
atgtggaagtttaaacatttattcatgaacaccgaaacaggcgcagaagcgccagcaggtaacgtaggaggggatgatgctggcaatggcgatggtactcaaaatccgggcggcggtactactgctggtacttcgctactcagcaccggcgcgggcgaacaaggcgcggatgactggctacctgaaaaataccgcgttatgggcgatgacggaaaactcaacgttgaaggctcagcccgcaaactggcggatgcttacacgcaccttgaaaagcgcatgggcagcggggacacgccgccgaaaactgctgatgagtatgcgccaaaggtagaggtcgagggctttaagtgggacgaattcaaagccgacccgcgcatgcaatccttcatgaaatcggcgcatgccaaaggcatcaccaacgatcagatgggtttcattctgggcgaatatgcacagctggcccccgaactggttaacggtgctgcggcattggattcggaagccgccgccacgcagctgcgtgagacgtggaaaactgacgccgagtttaataaaaacatcggcctggctttccgggcgtttaactctctggcggatgacagcgacaaagggcgtatggatgaaatcggaaataacccgatagtgatccgcatgctggcgaaaatcggcgctgaaatgcaggaagatgcgccggcgggcggcgatgtgaatctcgaagagcagcaatcaatccgtgacctgatgaaatccccggcctatatggatcctaaacacgctgaccatgagaacgtttccgcccgggttcgcgcctattaccagaagcgttacggcgatcaaactgtagcgtga

SEQ ID NO: 216044 - DNA, 906 bp, Klebsiella pneumoniae
atgtcatttgatgcaaacaagaacatgatcaccgctgcgtttgttacgcagtttcatgattctttcgaaattgctgcacagcaaaaggattcgcgcctgcaagcggctgtccatgaccgtggcagcatcaccggtgcgtcgttcaccatcaacgatatgggtaccattgagatgacccagatcaccacgcgtttcggtgataccgtctgggatgttccggaatccggtacccgtaatgcgttgatggccgactacggcgttttcgtgccggttgagaaacgcgacctgcgcaagctgattgccgacccgcaagggccgtatttgcagcttaccttgtccgccgccaaccgcaaaaaagacgatgtgatttaccgcgcgttgctcgatgcggtactgcgtaagaccgagaacaacggcgcgtatgcatccgttaccctcccggcctcgcagaaaatcgttgctggcggtaccggcatgaccaaagccaagctgatcgcagcaaaagccatgttccgccgtaacgagtgtgacgagcagaacggtgaagaactgtacatgacgtacaacgctgacatgctgacacagatcctcagcgataccacgctgaccagcgccgactttatggcggttaaaatgcttcaggaaggtgcggtgtcgtctaaatggctgggctttaactggctggcatacgagaagctggactctgtgaccgccgaaagcgtcaccaccaaaaccgcagcagcctggtgtaaatccgctgtgcatttcggtactggcgccgagtataacgtcgatatcggcccgcgccgcgataaaaataacaccatccagatttccgttgatgcgtcctatggtgctggccgtgccaacgagaaaaaagtcgttgccatcgattttgtagcataa

SEQ ID NO: 216045 - DNA, 564 bp, Klebsiella pneumoniae
atggcttccagtatctctatctgttctaacgcactgctggcgctcggcgcccatcccattaacagcttcgacgaagcgaccgaacacgcccgcctgtgctccaatatttaccctaccgtacgcaatgacctgctgcgaaaacatccgtggaactgcgcggtaaaacgcgttgtgctctcaccgaccagcaccgcgcccgcatttggtttcggctaccagttcccgctaccgggcgatttaatccggatcctttccgttggccgcgaatatgaggatatcgggtaccgcgtcgaaggaaaccgcctgctggcgaaccagaacgtgatttatctgcgctacctgttccgtaacgaggatgaatcaacgtgggattcgtcgctggtcaatctggccgaagcgtttatggccgcaaagctggcgtacgccgtcaccggctccgcgagtctgcgcgacagtctgacgcaggaagctgcataccttcttcgccaggctaaatctatcgacgggcaggaagaaccgccggaaacactggacggctatccaacttatgaatcgaggttctga

SEQ ID NO: 216046 - DNA, 1992 bp, Klebsiella pneumoniae
atgcgtgcgaacctgataaaaaccaattttacagccggggaaatttccccgcggctgatggggcgtgttgatatcgcccgctatgccaacggtgcaaaaattatcgaaaacgcggtatgcgtggtgcagggtggtgtcgttcgccgaccgggtacacgctttgccgctgccgctaaatatggtgaccggacagcacggctgatcccctacgtctttaaccgctcgcaggcgtacatgctcgaattcggcgacggatacctgcgcatttaccagaacggccggcagctggtaaacgacgacaataccccgtacgaaatcgccagcccttacaccgtcgatatgttgtctgaggtgaattacgtgcagggcgctgacacgatgtttttagtgcaccagagcgtcccgccgcaccgcttacagcgtaaggggcaaactgattgggtactggaagccgcgccgtttatcgttgagccattcgatgaaatccgtgacacgccggagaaatggtgtaagccatcggtgaaagaattcgttggctcagaaatcacgctgacgctcagtgatgacgaacccgcagatgatgacgattcccccgcgtttactggctccggctgggtagccgaggacgttggttcgtacgttcgcattaacagcggtctggtgctgattaagagcatcaccagcgcgcaggtcgcagtcggcaccatccgcaccgatttaagcgcgacgcaggcggcatcccccggagcctggacacgtgaggatactgtatggacggaggaatttggctaccccggcgcggtgacgctgtaccagcagcggctggttctggctggttccccacagtacccgcaaacaatctggtggagcgaaaccggcgtttacctgtcgtttgagttgggaacggacgacgacgacgcgatcagctttacgctgtcttctgaccagttaaacccgattgtacatctggcgcagatgaatacgcttatcgcgctgacgtacggcggcgagtttacaatcactgccggcagcgacgcggcgatcaccccgaccaatatttcggtaaaaaatcccagcccgtacggatgcaacagcattcgcccggttcgtgtcggtaccgaaattatgtttatccagcgtgccgggaaaaaactgtatgccgtggcgtatgaccccgacagctacgtttcgtattccgccaatgatttaacggtactggccgaacacattacgtccggcggcgtcctcgatatggcgtatcagcaacagcctgatgcgttcgtgtggctgatccgcgccgatggcgtactggtcacaatggggatcgaccgggcgcaggatgtagtcgcatggtcacgtcaaatcaccgatggcgtttttgaatcggtggcgagtattccctcggaaagcgacgacgtgatttatgttctggtgcgccgggaagttaacggccagaccgttcgctatgttgaagtattcgacagcaccctgaataccgattccgcagtaaccggctccagttcagaaggtgccaccacatggacaggcctttctcatctcaatggaaaaacggttgatgtggtggccgatggttccgtgatgccacaggcaacggtaacagacgggcaaatcactctcagccgcaaagcgaaaaaaattgaagtcggcctgcattatgaaaccaccattcagacactgacgccggaaatctcaacgaccgaaggcaccacgcagaacgcccgcaagcgtaccagcgaagttacgctgcgcttcatggaaaccaccggcgcggagtgcaacggtcaggtgatcccgtttcgtacctttggcccgaaaatccttaaccagcctgcaccgcttttcaccggtgatcattatttcgggaaacttggctgggagcgtggggaagacactttgattattcagcaacgccagccgctgccgtttcacctgctggcgattattttcacgttctccagcaacggggggtaa

SEQ ID NO: 216047 - DNA, 453 bp, Klebsiella pneumoniae
atgatgatccgcaacgcaaccgccggtgacattccggtgcttattgaactgggaacccggatgtatctggaatcccgctattccgaaaactcaccctttgacgcggacaaatgcgcggaactggctgagagcctgatttattcctccgccggctgtgtgctggtggctgaaaagaatggccaggtgattggctggctcggcggcggtatcgcggagcagtttttttcccgccagttgatggcgtttgaatatggcctgttcgtcgctccggagcaccggggcggcagtgctggcccacggttggcccacgcatttatcgaatggtcgaaagaacatggcgccgcagtgatcaacatggggatcaccacgggcgtccatgccgaacgtactggccagctttattcccgcctcggtctgcaacgtacagggctgctttattcgatggaggtttaa

SEQ ID NO: 216048 - DNA, 489 bp, Klebsiella pneumoniae
atgtgtacaggtgttgaaatcgcgctggtggcttcttctgttctcgctgcaggtggtgcagtggccagcggccagcagcaaaagaaaatggcgaactatcaggccgcgcaggctgaagccgacgccgaagctgctaaggcttctgcccgagtggaagcggagcgtattcgtaaagccggtcgccagcaggccgctgcggctaacgctgcaatggcggcttcaggcgttgaaacgggggaaggaacggcgctgcgtgtcacgtcaggtattaccggggatgcggagcaggacgcataccagacgatccttaatggcgtgaattcttctaatcgcctgcaggcgcaggcacaagccgacaggatcagcggcagtaatgcggcgacagcggggaatattagtgctggcagttcattactgagtgctggcggtaccgcatacagcggctggaaaaaagcaaaaacaggcaaatacggtttatatgcggagtaa

SEQ ID NO: 216049 - DNA, 2712 bp, Klebsiella pneumoniae
gtgagaattccaacgggtaattttggtaatgtgacaccgcaggcacagcagacgcgtgtcgctgttagcaatgtaggcactatcggcaatgcggtgtctggttttggggccgctacagggcaggtagcagagcaagtacagcatgagcaggataaagccgatgtggcagccacgcaggcgattctgaccgatctggaagctaaatctaatgaccgctgggaaaacccggagacgggcgccacggtcacgcgtcagggctttaaatcgtccggtgtggtcaccgatatggataaggccgacgctggcgattacgaggaagcgcggaagcgcgtaccgcccaaccagttaaactattttgatgcgcagtggaaagcggggcaggtacgccggacaagcacctatagtggtttcgagcgtgcgcagacggatgaggcccagcgccagcagcttaatgcgacggtgaccacttccgttgaacaggaggccagcgcctacgataacccaatgcaggcagggctgatacgcagcgcccgtaaacactcgatcgagatgtatggccaggcgcgcggctggccgcaggaacgtatcgacgcggcggtatcggaagcgaaccaaaaagcgctggagcagcgcgcgcagaactacgcggtaaccaatcccaccggctggcttaatggtgattttacgctggtcaacagcagcaccggcgaacttgatatgcgcgccgttggcctggtggaatccggcggcaagcaccgcaatgcagatggtagccttgttacatcccccgcgggcgcgcagggtgaatttcagttgatgccggacaccgggaaagagctggcgtctaaacgtggcgtggagtacaacccggacgaccctgtgcagcatgcgcagctggcgcgcgattatgcggggcagctcagtaaaaaatatcagtctgaaacgttagccggcgctgcgtataactgggggatgggtaacgtcgataagctgatcgctaaagtcggcgacccgcgcaaaggcgaaatctcaatggcggatttcgttaagcagctgccagccgaaacgcgtggttggctttcccgctacaacaaaaataaaactggtctcgacccggtagcggttaacaaaatcgacaatatcgccgaatcgcagatccgccagcagcgtacggctctgcgccagcagattgacccgattctcaataatacgatggcgcagctgtataacggcgaggtgccggatgctatgccgaacgcctccaccattttgtttgcgtacggcgagcagggtcagacagcggtcaagcagctggatatcgcgatcgataccgccagaaccttccaggctatccagtacgtcaccccggcagaacagcaggccgaactggcgaaagtgaagccgcaggcaaacgacccggattacgcattgaaacttgatgcgtacggcaaacttagcgcgctggtgcagaagagcaatgccaatattcaggcgcaacgtgatgctacccgctttaacgacgcgctgatctccggcgagaaactcgacccgagcaacaaatccatgcagaaggcggcggacaatacgccatcggcgcttaacttccgcattaacgacgccaccactcacgacgctatcgtgcagcaggttaaccagacgggcattatcccatcgcaagttacatcccaactgaatgcgatcgcccgctccagtagccccgacgtggttaagcagggctcgaccttatttaacgctttgtacgatactgatcctgcctcagtgggcgatatgccaaaggatatgcagagcttctatctgactgttaagcaacttaccgattccggtatggcgtcagacgaagcggtgaaacaggcgcagaacgtgacctacaaccagactgacgccctaaaatcgcaattgtcttctacgcagagcacgaaggaatacaaaaaagagcgtgccagcgcgatggattccgcagtcagcagcatgaaaccatggtacagctttggcggccccgccgcagatgaccagaatcttaacgccgtcaatttccgtaacgactaccagtcgctttatgacatcaattatcgcaactcgggtggtaatgccgatgttgccaaaaagatgaccaatacccagatcgcccgtacctggagtctaagcgatgtaaatggcagcacccagtttatgaaatacgcgcctgaagcgctttataactacgggccgtctggttggcaggctgcgcagtggaaagaagaaaaagagcgtctgacttatggcgaacgtggagaaaaaattgaaaccagtccgacccaactaggaattacatcaggttcagcccctgttattacatcaaatacacctgaatcccgaatcggtggtgaactggaaattacccctgacgttttaaccacgcgtaacggtgattacgccattatggtacgcatgaaagataaagatggtaacgagagcgtacagccatattacgataaatttggtcgcctcatgcgttggaaaccgtcattggaagactgggaaccatataaaaaaatgcagcgggagcgggagcggcaaggcgaagaggaaatatcacgcgggaaagatattcggggctttaaggaaaaacatcgtgcgctcgatgaacagtatcagcgcttgcatgatgagcgtatgaaccgggttaaaaactacttttcatggagcaattaa

SEQ ID NO: 216050 - DNA, 2895 bp, Klebsiella pneumoniae
atgcctatctatccgcaatctgatgtaccgccgagcataatggataatgcccttcaggctccaactggttttgatgtatctctgcctgaaggaactaacccagagccacagcagcaacaaccgtctgtatgggatgccgcttttcgtcagaataacctgctcgccgggatgttccgcccggctaaacaattcgagccagcggaggggtataacccttattctgataaaaacgaaataaagggttacgaacaatggggatccgcctttgcggattcaaaatccccagaggaaaccgcctggattaaaaaccagatagacgatgaaaacgaagaccgccgggtgctgtctgaagcaggtgctgaaggaactttagccagtatagccgccggggttatcgaccccgtcacagtcgcatcgatgtttatccccggtgcgcagggaagcctcgctgcgcgtattggttctcaggttgctattggtgccgccggtaccgcgctcagcgaggtcgcgctcaataacgagcaatatacaagaacggcaagggagagcgccgcccacatcacagctggcgcacttctcagcggtgtatttgctaccgctggcgcgatgatcaccccttcggtaagaaatgcggccacccgtgaagtggcggaggcgctcgataatatgaacgccttgccaacgattaacaacgcagccgatgccctggcggatactttaccgaacggtggcagcgtcggtgctatgcgcattcgcgaagcgacactggaagatctcacgccagtgtctggcggcccactcggcaagctggctaaaaaagccggtagctatctgacgccgatcacccgcctgatggaatccccatcaaaagaagcgcgccggacagcgctggaactggcagagaataacttcacgctggaaggcaacctgcgcggtattgaaacgccggtagcagctgagacgcgcgtacgtggctggcgtcgtgaagaggcggccgtcgttaccgcgaacaagcaggcatacactcagtataaggccgaggggggcgatctgggttatacggctttccgtgaacaggttggcgaggcgctacgcaacggcgacgtgcacgttaatgcgaaagtgcaggaagcggcgcaggcattgcgcacggtcatcaatcgcgtgaagacggcacagcaggaactgggcttacttccaccggatgccgaactgaaagcgatgggacagaccagctatttcccgcgcgtgtacaaggtagggaaaatcgttagcgagcgcgataaattccgcaatatgctggttgactggtggtcacgcggtgagaaaactatgtctcgcgaagatgctgaaatcgccgctgataccacgataaaccgtattgtaggggctaaaattccgcaggagtttgccaacgtctttatggtgaaagcgccgggcagcaccaaatcgcgtacactgagcgttcccgatcgcctgatgaaagattatctggagagcgacgctaactacgtcctgcagcgtcatatccgcgaagcctcagcagaaatcgaattaactcgtacctttggcaacaagtcgatggattcgcagctcgccgccatccaggacgaatacgacgcactgatgcgtttacgcccggcagaacaggaaaagctggcgaaggcgcgggaagccgacctgcgcgatattctggctcttcgcgatcgcctcgttggtacctacggtatgccagatgacccatcatcatttttcgttcgtgctggtgctttcctgcgtagcgccaactttgtaacgaaactcggcggcatgacggtatccgctattccggatctggcgcgcggcatgatggttaacggcttcagcaataccatgcgcggatatggcgcactgatcactcgatcaccggcatatctcgccagccgggcggagcagaagaaaatggccgttgggctggaaaccatactgcatacccgcgcgcgtacgatgggggatctggtcgatagctcttctcgtacgacagctgcagaagctggcatggaacgtattactgatgtgttcggcaagctgaccatgatgggccactttgacgatatgaacaaatcggtgaatggcatgatcacgtcagacggtattctgtccggcgcgttccctgcgaaacgcctggcaaaactcggcatcaacgagaagatggccgaacgcatccagcgagaatttcagaagcacggcgaagttattcagggctggcatatcggcaatttcgaaaaatgggatgatcagtacgctgctggactgctgcaatctgctgtgctgaaggatgtaaacaataccgttatcacgccggggatcggtgatacgccgctgtgggccagtaccccgctggggaaaaccgtattccagtttaagtcttttgctacggcatcctataaccgcgcgacgttgggcggcctgcaagaaggtaccgcacagttctattacggtaccgccttccagattggtctgggctcattgacctatgcacttaagcaggcggccaatggtaaagaagtcgatttgacaccgcagaagatggttcttgagggtatcgaccgttctggtattctcggaccgcttatggagtacaataacatggcggaaaaagcatctggtggcatgttgggacttgggccgctatttggtactggtacacaatcccgctatgccagccgcggctttataggttcggcgctggggccaacgtttggcctgctggataccgttactgatgtgaccgctggcgtgctgaatggtgatgcaggaaaccgagtgctgcataacatgcgtacgctattgccgggtaataacctattctggatcgcccccttgattaatcaggttgatcctgggatgaagtaa

SEQ ID NO: 216051 - DNA, 303 bp, Klebsiella pneumoniae; identical to SEQ ID NO: 206648

SEQ ID NO: 216052 - DNA, 348 bp, Klebsiella pneumoniae
atgcattcagattacaaaactcgcctgaccgctcttagcgataagctcaccgatgtagtgctggaagaagccgatccggataactggccgggggcagggaaggaaatcacaaagcacactaaacaggaacgcggcgaccgctactggcataagaagaacgcggccgcatcgctgacgctgctggtaaaagtccattcgctgattggcatgcatacgcgcggggggacgcctaaacccggcggagaggatccggacgatgaagcgttccagttaggtcagcaggtagcagctgctgaacgtaaagcgctggaagtgatcgagaggctgcaacaaaaaggcaaaaaatga

SEQ ID NO: 216053 - DNA, 1611 bp, Klebsiella pneumoniae
atgatttcgttcctcgcctttttcctgatgtgggcggagcggatgaactgggatgtgccggactgccactataaagcctgccactggctggagcatcgcggaaaccttgcggtgcttcgctgttttcgtggctttggtaaatccactatcctgggcgtttataacgcctggcggtattactgcgatcgccagtaccgtattttgcaccagtcggaatccgatacgaccgccagaaaaaccagccgcgacacacaaaacgttctgcgcaatcaccccctgacgaaaggcatgttgcccgacggcatcggtaccatagagcaatggtgggtaaacggcgcgctggatatgcgtaacgccagcatgttcgcaaaaggcatcttgtcgaacgtcaccggcgcgcgcgctaacgagtgtcagaatgatgatgtggaagtgcctggcaatatccagacgccagaggcgcgcgaaaaactgcgctatcgcctgagcgagcagacacatattttgatacccggaggccgtaagttgtttatcggtacgccgcacactcacgacagcctatacgacgaaaaagaagccgagggcgctgattgcctcacgataaagctattcgataaagaacatcgcatcgaggcgaagaaggcaactaaaaaacggtaccgggtacctttccgtccagagtacgttttcgtcgggatccataaagccgcccggctgctggtcgaggggactgattaccggttgactgaagacggcgtggaattcgccgcaccgcctgaaacggtcgtggatttttatgctggctgtgcgtggccgggccgcttcgatcatgatgaattgctgctgcgccggagagaatgccggacagttaacgaatgggacagccagtaccagctgcacagtaaaccggttggcgaggttcgtctcgatcccgaccgtatccgtgagtataacgtccagcccgaaatccgatacgcgaaccgctcctgctcgatgtggcttggtcagacgcaaatcgttggcgctgtcgcctggtgggatgtggccacaggcaaagtcaaggccgacgcctcggcattctccctgattttcaccgacgcgcgcgggcatctgtactggcatgtttgccaggggcttacgggcgaactggcggaattcgacgacaacgacaaaatcaccggcggccaggtgatgcagattaaagaactggttctgaagtatcagatcccgctggtatgcgttgaggtgaacgggcccggcagctttgccggaaagttgctgattcaggcgctcaagggaaccggctgcggcgtccgtgaagagttcagcgtgaccaataaacaaaagcgcatcctcgatgcattcgaagcgccgctgtcgtcgcggttcctctgggcgcataccgacgtactcgacggcccaatgtacgaccagatgcgagactttaacccggcgctgaccaatcagcccgatgactttatcgattccggctcgggcgctatcagctcaacaccagtgcgcattggtaaattggtcgggattccgaccgcacaggcgcgggaacattggcaaccaaacgatggcgatcacatggtcgccgtagattactag

SEQ ID NO: 216054 - DNA, 2289 bp, Klebsiella pneumoniae
atgtcggtaccgaaccatacaccctataacatctatactgccaacgggctgaccactgtctttgcctatgagttttacctgatcagcgccagcgacattcaggtgactatcaacggtagtgaagtcacctccggctataccgtgtctggtgtgggtaatactggtggcggagagattacttttcttaccgcgccggccaatggttctaccgtcatttttgaacgcgttacgccgacataccggctcaccgattaccaggacaacggcgacctgctggctgacacggttaacaaagatttcgatcgtctatggatggctattcagcgcgcatttatttatctcggtgttgcgcttacgcgccctttgtttggtggcgggccatttaacgctaacggctaccggattgctaatctggctgaccccgttaacgaacaggatgcggctacaaaaaaattcgtggtggaaaatgcaaatattgggttagctcgcgtattacgagtgcctgaggttagcgttgatttaatccctggcactaggattaggagtaactctctgctcggctttaacagcgagggaaatcctgtttctatttttagttggactgacactgctgatctagcaataaaactagcatctagtattggtacgtctctcgtagggtatagtgcaaatgatcaggcagcattaaggactgtttatgcgagattgaaggattttgtgagcctgcatgattactggtacccgaccgatggcactgattatgctccggcactgaacaaagcgctgtctgtttctccgaatgttctgatcccaccaggaaagcattatttaaaatcgaccgtttcccttatctctggcaccaggcttatcggccttgggccgaactgtattttgtcatctccggatgcggtttcggcaagtggagcggaaatgcttaccgtgctcagaactacaggtgcgtctgatattgttttgcaggatttggtaatagaaggtggctgtaacgccggtgtgacctcgaagcggaatatacgtggcgtacggtttattaattgcactgatataaggatgattaactgtgaggtaagtcgtaccggcgactgggctacttcattcgaaaaatgtacagacgtgagcgtggttaattatcggcacagaaaaagcggcggcacactatatggtgggcgggacggtattcattttctggattgcgtgaattttacactaaatggcgctgatattgagtctggtgacgatatggttggctgcacgactgagacgcgagatcagcggaatgccgtgatacgaaacgtcattggctattccatgctcgcatctggcgttatcttcaatgaggagggagctacaaccttttcaaccgtagatattctggttgatggtgtcaccattaaatccggaaatgtcgtccgtgatgtcgtgcgcgtgcaggcgattaatgacgccacaaacgtcacaggagtgacagttcaaaatgtcaaaggaacgggctattcacatggtgttttcatatcaggtaaaaaactgacgcgagtaagcgtgtctgatgttgatgtcgtttcaactcagtctcacggggtctatattaacggtgcccagaacatgcgagcatctggtatgggcgtcagtcaggccgcagcctttgacggatggaacataacgaattgcagctactttgacgcatcgccccgctctttaagctctcaggggtggggagttcaggttctgaactgcgccaacttcacactcaatggcaactgctataacaacggagcaggactttttgcagcagccaacggaggaaacgggcgcataaacggatgttcaaattacaacgccactggcgtttatgccggcggcagtacaacatcttactatggccttttcaatgatgagacccctactggtcgtgttgaccctgctacagtttgcaatggatatatagcaagaaatcgcccacgcaatctgaatgcgttgcgtgacccttatgctgcatgttctttcggacaaactgtaagtgggtctgtctcattgcagggtgttgttaactgctcagtagagcttgtttctgatggccggtacaaaattaattttacaacaccttttgaatcaactttttacaggccggaaattgttgcacaggtaatgaatcaggatctaatcgtccgcccgattgcgaaagacggcagctactacacgtttgaggttcgtaactcatctggccctgtaatggcaaacttcattttatgtgaattcaaaaaggcgatttaa

SEQ ID NO: 216055 - DNA, 225 bp, Klebsiella pneumoniae
atgaagaatttaccggatgtagcggcgggaacgtcgtatataacatccacagttagcggcagctactggctgctgcaacttctcgataaggtaagtcccagccagtgggcggctataggcgttctggccagtattgtttttgggctgcttacctacctcaccaatctgtatttcaaaatcaaagacgaccggcggaaggcacaggactatgagcaacaaagctaa

SEQ ID NO: 216056 - DNA, 537 bp, Klebsiella pneumoniae
atgagcaacaaagctaagttcagtgccgcaatgctggcacttctggccgccggtgcatctgcgccggtgctgttcgatcagtttatcagcgaaaaagaaggtaacgcgctggtggccgttgttgatcctgggggggtgtggtcgttgtgccatggagtaaccgttatagatggtaagcgtgttattaagggccaaagagcaactgaagaacagtgcaggaaggttaatgctattgagcgcgataaggcgctggcgtgggttgaaaagaatgtgcacgttccgcttacgccaccgcagaaggtcgggatcgccagcttctgcccctacaacatcggcccgggaaaatgctttccctcgacgttctaccgcaaactaaatgccggtgaccgcaaaggtgcatgcgcggagatccggcgatgggtgttcgacggtggccgggattgccgactgacaaaaggccagaagaatggctgctacgggcaggttgaccgccgggatcaggaaagtgctttgacgtgctgggggctatacgaatga

SEQ ID NO: 216057 - DNA, 360 bp, Klebsiella pneumoniae
atgaacggaaaaaccaaattggtaattgttggtggcgtgctggcggtatgcgccggcattttctgggcggggtatctgaaaggctggtacgcgcattctgagcaagtaaacagccaggctaaagaaaggctaccgaagcaagaaaaggctgtagctgctggcgagcagaaggcggcgacggcgaacgccgaagccaaagtgatttaccgtaccgtttatcgtgatgtggtgaaatatgtcaatgacccgaatcgtactgtgtgcaagtttgatagcgacgctgtgcagctgcgccaacgagcaatcgacgcggccaactccatccccggatttgatgaaccggccgtgcaagctaagtaa

SEQ ID NO: 216058 - DNA, 180 bp, Klebsiella pneumoniae
atggaagtgcagatagagagagaagagtgggatacgcagcaggtcgaccggcagcagggggacgggcatcgtgagctggcggcgaacgaagaagaaccccaccaccagcatagcggcgacctccgccagcaccagctgagtggactgcccctgggcgaaaccgctcagggaggtgattag

SEQ ID NO: 216059 - DNA, 1746 bp, Klebsiella pneumoniae
gtgctaaagaaaaaaacgaagtccgccgccagtttcaccccgattcgcttcgggttactgtgtgtggccattctcggttgtctggggctgctgctggtccgcgtgggctggctacaaattatctcccccgataacctggtaaaacaagaagatatgcgctccctgcgcgaagaacccgtagcggttgagcgggggatgatcagcgaccgggaaggacggccgctggcggtgagcgttccggtcagtgctatctggatcgacccgcagaccactatggagaagggcggtgtgggctatgggccccgctggcaggcgatggccgaagcgctgcacctcaacctcggagagctggctcagcgggtacagagtcatccccacgctcgctttctctatctggcgcgtcagatcaatcccgagcaggcagagtggattgataaactgcatctgccgggcgtctacctgcgcgatgaatcgcgacggttctacccggcgggccatgtggctgccaatctgctgggctttaccaatgttgataatcagggcatcgaaggggtggagaaaagctttaacgcccagttgaccggtaaacccgggcgacgtctggtgcgtaaagataaacatggcaatgtcattgagaacattaccgaagtgccgccggttccggcgcataatctgcagctgagtattgatgaacgcctgcagacggtgacggaagacgccctcgacaacgccgtccgctggaacaaagcagagtccggggcggcggtattgatcaaaattgataccggcgagatcctggcgatggccagctatccggacttcaatccgaacaatcgcgatagcgcgacgctggatgattttcgcaaccgggccatcagcgacaccttcgagcccgggtcgacggtcaaaccgctggtgatcatgactgcgctacagcaggggattgtccagccagacagcgtggtggatacccatccgttcgtcctcgatggccatcgtattcgcgatgtgggctattatccggagctgagcctgaccgggatcctgcagaaatccagcgataccggcgtgtcccatctctcgctcgccatgccggtgcagcatctgatcgatacctataaagctttcggctttggcgaaccgacggggctggggttgaccggcgaaagcgccgggctgatgccgcatcgccgctactgggggcaactggatcgcgccaccttcgccttcggctatggtttgatggtcaccccgctccagctcgcccacgtctacgccaccatcggcggcttcggcattgcgcgaccactgtcgattacccgcatcgatccgccggtgatgggcacgcgggtgatgccggagagtattgtgcatagcgtggaacatatgatggagagcgtggcgctcccgggcgggggcggtaccaaagcggcggtacgcgactaccgggtggcggtaaaaaccggcacggcgaagaaaattggcccggacggcaaatatatcgataagtatgtggcctataccgccggcgtggcgcccgccagtcgaccacagttcgcgctggtggtggtgatgaacgatccgagcaatggttcctattacggcggcgctgtgtccgcgccggtcttcagccagatcatgggcgatgtcctgcggctggagaacgtcatgccggacggcatgccgcaaggggcggagaatctgatcgtaatgcacgatagccacccacaggggccggcgctgtaa

SEQ ID NO: 216060 - DNA, 858 bp, Klebsiella pneumoniae
atgaaatattttgttttattttattttttgatatcaacacaatttatccatgctagcgatagaaatgatgagatactcttttccaagagtgaccctggaaatctattagatcgagatgcaaacgaaagatatcatgatcaatttattgattttaaaacaactcaaaacaatctcccagatataaagagaaataagtctttattttccaatcagtattggttggtaaataaaaaacaggacttatggattggggtgtttgatgggaaatatgtaaaaatacccgcaggtacttatgttaatattcctggtgaaacgttatttcctgaaagcataattcgaataaaaagaggaggtaaaatatctcaatttttattactaaatagtaattgtacatatccatccgtttgtgtcaatcgaagatatgggatattatttgatgctcatgattatatggttttttatactggatgtgcccgtgatgatagattagcctctaaaaaattaagcgttttttataatatactattttacagtaagacatttgatacaatattgcggcttgatgaattccctgattctgcattgcagggcgaaagtatcaatgttttcaatacatctattgaaaaagttaaagattactatatcgattatagtatcgagtcggcatttaagtttacaggtccagatcaggttatcgttgttgatgaaaaaactggaaaacctcaggagaaggttcaggaaacagatgataatggaaatcctgtcatgaaaaatggtgaaccggttatgattgatgatcccgatggattccaacctgtcattttaaaaagacttcctgaagttactattgccaattaa

SEQ ID NO: 216061 - DNA, 390 bp, Klebsiella pneumoniae
atggtgctgactaaatgttttttccggcgcgagaatttgatggcctcacttttattttgcatcgtttcatatgggttgctatctacctggctttaccttgtgcattcaattaatgaaaaagtagaatcaacattaccctcatctttactgattcgtgttttgataatcattacagcattatcatttattattcagaaaaaacctggggtttttaaaaacttcattgcaataacattcggtctggttttactgtttatacacaccattattgtattacatctgcttttgaatacttttccagatatctatgattttgttttttattatgaattttttttaatggttttcttttgcggactacctttatgtttatgtataagaatggtttga

SEQ ID NO: 216062 - DNA, 909 bp, Klebsiella pneumoniae
atggaacatactgttgcaggcgccatcaaagaatggcgtaaacataataaagtgatcggtcaggtcaaaataagctataaaaaaattttacgaaaatgcagagagctctcgctcgcaggaggtaaatacagagaatatcaaggactttgtgcgaaatatcagtgcgcgcggttgaccgcggtgaccaaaggactggtgccttttgaggataaaccgtttaaagcgtatctcaataaacggctgtcaaaacgacgcaaactggatattgcccatggttcactgaatttcatcgagaaaacgtttcaccctgatatcctgccgcagctctacaatgtcgcggattttggccgcgagatgttttctattcccttgaaaaatggcgataagcttgacgttaagctgctggcctcgccgtttcaggaggaaggggagctgatgctgcagctgtttcttggcgaccggcgcgtctatagcgtctgtttttcctgcaccgacgatggccgcgcttatatcggcggcatccagggcgggaaagatatcaccaatgacgaagtgaaggtgctgactaaagagctgcatggcgcgcggccgaaaaatatcatcatgagcgtgctgtatggtttgctgcgatatttcaacatctccacggtctacgccatcgattctgattaccacgtgaaaagcgatctggtgaaagccagttattcatcgctgtggctggaaatgggcggtgagaaacaggctcgcggctggtataaactgccggcgcaagagatcaaaaagagtattgaagaggtgaaaagtaagcaccggagccagtttattaagcgcgaaggtcttaaagagctgattcagattaatatggcgaatgccctgcagcaaattaccttgcctgcgcgggtgaattaa

SEQ ID NO: 216063 - DNA, 1218 bp, Klebsiella pneumoniae
atgtcgcttcgttctctgcgggctttatgtctgaccagcttttttattgccgacgtgcgcgacggcctcggcccgtttctggggatctttctcacccagcgtcactggcaggcggaggacattggcctgctgatgtccgtcggcggtatcgccggcctgctggcgaccctgcccgccggcttcatcaccgacagctcgcggcataagcgcttgctgctggccggggtctgcctggtgatcaccctcaccaccctgctgctctggtttagtcagaagaccagcgtggtcgccctctcgcaagtcgccagcggcatctgcgcggcctttgtcggaccgctgatcgccgggattaccctcggtcttgccagacagcgcggctttagcgcccagatggggaaaaacgaagccttcaaccacgcgggaaatttcttcaccgcgctaatggccggggctatcgcctggtactggggcatcggcggcattttcattctgatggcctgtaccacgctgcttaccctggtcgccctgctggcgatccgcggcggcgatatcgacgatgatgccgcccgcggcatcgaagcggcatccacgccctccctgccggggtttgccatcctgttccgccatacgccgctgctgatcgccggcgtaaccctgatgctgttccatctcgccaatgccgcactgttgccgatgctgagcatgcggatcgccgccgcgccgggacacctcaatcccggactgtttgccgccgccacggtgattatttcgcaggtggtgatgatcccggtggccatccgggtcgccggcagcatcgacaaatacggttactggcgatgcatcctgctggcgctgctgatcatgcccatccgggcggcgctggcggcgtccagcgacgccccggcgatgatggtcccggtgcaaattcttgatggcctggcggcagggattttgggggtggcggtgcccagctttatcgtctcgctgctgcgcggcagcgggcacgttaacgctggacagagcgtggtgatgctgatgcagggcgccggggcggcaatgagtccggcgttaaccgggtctatcgccgggcactactcctatgccaccgccttcggcgtgctgagcgttatcgcgattgtcgccctgatggtatggtggcgcagcgctccgctgctcaccgtctccgcgtcaccgccagtcggcgagagcgggcagtaa

SEQ ID NO: 216064 - DNA, 462 bp, Klebsiella pneumoniae
atgtcaaaaaataaatcactgccctacctcgacccggcgctgtgcggcctggcggaaggagccaaaatactcggcgaccgctgggtgctgctgatcctccgcgaggcgttttacggcgtgacgcgctttgaaacgatgctgtcgcacacccatattacccgccagacgctcaccacccggttaaaaaccatgaccgaaacgggattgctcagcaaagtgccctaccgggaagccggctcccgcgaacggtatgaatatgttctgactgataaaagccgtagcctggcgctggtgctgttcgccctgatggaatggggccaccagcacgtgctgcacagtgcgccgcatatagcattggtggacagcgccagcggcgaggctgtccatccggggtttattactgccagcggcaccgtggcgagccccgccgccctgcagatcgtcaaggcagacgaacgctaa

SEQ ID NO: 216065 - DNA, 249 bp, Klebsiella pneumoniae
gtgccatttgttaacgtgcaaaccattaaagggatcatgaccgcggaacagaaaagtgaactgctgcgacggatgaccgatctgctggtggagattgaggggcagggcgatccgcagttccgccagtccgtctggatccgcattgacgaacatgacccggagcagtggagtctggggggcgtccagccgacggccgcgatgatcgcggcgaaatttgccgccgcgcgacgcgacggatccccggaataa

SEQ ID NO: 216066 - DNA, 1179 bp, Klebsiella pneumoniae
atgctgccgctggcggtgcagaacaaaaatatccttcgcctggctgccgctcaggcgctggccggcgccaactcggtggtcttctacgccaccggcgccattgtgggtaacgcgattgcccccagcccgtcgctggccacgctgccgatcaccctgtttgtgctggggatggcggcctcgattctgcttttcggcgcgctggcgcgtaagcggggccgcaaagccgcgtttatggccggaaccggcgccggggtggtcaccggtctggcggccgctctggcggtggtgctgggctcttttctgctgttttgcttcgctgcgatgcttggcggcgcctatgccgcggtggcgctcagttttcgctttgccgccaccgacggcgtcgctccggaacgtcgtgcccgcgcgctgtcgctggtgatgggcggcggcgtggccgccgggatcattggcccgatgctggtcaccggcaccatgcacctctggccgactcatacctttgccttcacctttctcgctcaggcgctggtggcggcgctcgccgccattctgctggcaggcgtgacatcggcggagcccgcggcggccagcgtgcgcggagggcggccgctgcgcgagattgtccgccagccgggttttgccactacggtattcagcggcgcggtggcctatatggtgatgaattttctgatgaccgccgcgccgctctccatgcatatgcacggtctttcccagcaggccgccaaccttgggatccagtggcatgtgatggcgatgtacggcccgggatttttcaccggccggctgatccagcgcttcggcgcagtgcgaatggcggcggcgggattgctgatcaccgccgcgtcggtggcggtcggcctgagcggtctcggcgtgtatcattactggctgtcgctgattttgctcggcatcggctggaactttggcttcaccggcgcctcggcgaaaatcatcgatttccaccgcccggaagagaagacccaggttcagtcgctcaacgattttctggtcttcggcgtgatgatcgtggggtcgttttcgtccggggttctgctcaacgccttcggctggaacgccgtgctgtggggctccctggtcccggttgcggtggcgttgttgaccctgctgctgcgccccttatccccatcccgcgcttag

SEQ ID NO: 216067 - DNA, 960 bp, Klebsiella pneumoniae
atgcatctcttgatccttaacctgacaacgtctcaagccacgctgcgcatgcgtgtctggcgaaccctgaagcagagcggggcagcggtcctgcgcgatggggtctatctgctgcccgacgtgcgccagggctatgacactttcctcagcacctgccaggcgatccgcgcggaaggggggaccgggtatgttttcacgattgaggcggcggaagaagaggcgctcaggccgctattcgatcgtcgtgaaaagtacgacgcgctgttgcaggatctgcaggcgctgcaggggacgttatccaacgacgaactggcggctcagctcaaacaactgcgtaaaattcagcgtgactaccggcggatcgaggccattgatttctttccgggggccgcccgggagcaagccgctgagcgactggccactatcgagcaggtcattaatcagcggctatcgccgaacgagccgcagtcggtggcgggcgaactgagcctgctggacagaggcgcctttcgcggccggctgtgggccacccgccgacgcccgtgggtcgatcgtctggccagcgcctggcttatccggcgctttattgacgacgaggcgcggttcctgtggctggccgcgcccgagacctgtccggcgacggcggtcggttttgattttgacggcgcgccattcagccatgtcggcacgctggtgaccttcgaagtactggtccggcgttttgtgctggacgcggtgatccccgacagtctgggacggttgatccacttcctggacgtcggtggggtaccgaccccggaggcggcgggggtaaaaagcattcttgcagggctgcgggaaaccattacggacgatgaccaactgctggcggcagcttgctcgctgttcgacggcttactgaggtcctgtgaaatgaggtctggcaatcatgagcaaaacggtcgttcttccgaagagtga

SEQ ID NO: 216068 - DNA, 1368 bp, Klebsiella pneumoniae
atgagcaaaacggtcgttcttccgaagagtgacagtccttccgtcgtcgcttccgtctccttctggcaggcatttcgcttttggctcaagcttggcttcatcagcttcggcgggcctgccgggcagatcgccatgatgcaccaggagctggtggataaccgacgctggatatcggaagggcgattcctgcatgcgctcaatttttgtatggtcctgcccggcccggaggcccagcagctggcgacctatatcggctggctgatgcataaaacctggggaggcgtcatcgccggggtgctgtttattttgccctcgctggtgttactcatcgccctggcgtggatctatctcgtctggggggatgtcgccgtggtggcggggatcttttatggcatcaaacccgccgtagcggcgatagtattgcaggcggcgcaccgcatcggctcgcgggcgctgaaaaatggcgcctactggaccatcgccgccgctgcctttgtcgctatttttgcgctgaacgttccttttccgctgatcgtcctcgccgcggcactggtgggttttatcggcggacggctggcgccgacgatattcggcaaagcggacgcccaccgtgcgcagagtcaccctggcggagccgccatcattgatgacacgacgccgatcccggcccatgccattttcagctggcggcgtacctctcaggtgctgatcgccgggatgctgctgtggctggtgccgatggccgccctgacgctaatgctgggctgggcgcatccgctgacccagatgagctggttctttaccaaagccgcgctgatgacctttggcggggcatatgccgtcttaccttatgtttaccagggggcggtgacccactatggctggctgacggcagggcagatgatggacggcctcgctcttggggaatcgacccctggaccgttgatcatggtggtgacctttgtcgggtttgtcggcggctacaccaaagcggtgttgggcgtcgatgatgtgctgctggggggcatcgcggcggcgtgcctggtgacatggtttacttttttaccctcgtttatctttattctcgccggcgggccgtttattgaaacgacccataataaggtgggatttaccgcgccgttgaccgccatcaccgccgcggtggtgggcgttatcctgaatctggcgctgttttttatctggcatagcgtctgggggccatccggtttcgacccgtggtccgcagccattgccctgggcgccgccgggctgctgtttcgctataagtggaagctgacctgggtactggccaccgccgccgcggtagggcttatcgtccatatggcgggactgtccggcgcaggataa

SEQ ID NO: 216069 - DNA, 300 bp, Klebsiella pneumoniae
atgactcaacaaatcgacattgagaaaataaaagcggcactcaacgccattgaagaactcgaacagattgcccgttcaacgcagccggccgatattaaaaatttttgtgtggaatataacaaaacatggaaaaagaaagtggataccctgctggcgctgattgatgaacccatcagttcgctgttagttaaactggtgccttacttacccacactgctggtgattattaacatgctaaaggcgggcgttgagcaatattgtcaactgcatctcgcggaggagcctcccgtagataaataa

SEQ ID NO: 216070 - DNA, 429 bp, Klebsiella pneumoniae
atggtatggcgtgtcgcaaagagtctgctgatactcagagatcagattaatcaatatgctccgcatcgcaacacggacagcgatggcaccattggtgatgaacatcatgcccacaccaactcggatcataatccgcaggtgatagatggaaatattggtgtggtaacggctatcgatattacccacgatcctcaacataaatgtgatgctcaggcgattgtcgatgcgttggtcgccagcaaagacaaacgaattaaatatattatctggaacaaacggatcattagcgcttctgtccagccttgggtatggcgggattaccatggcgtcagcccgcacgataaacatttccacttatccgtggtgccggtgaaagcgctgtacgattacaccttaccgtggctgttatttaatccacataaagaatga

SEQ ID NO: 216071 - DNA, 477 bp, Klebsiella pneumoniae
atgagcgatgccatttcttcgcaacttgaaaacatcattacgatgctgatcgccatcagtatcgcctcggaaagactggtagagataatcaaagggtattttccctggcttaatctggaaaatcaggatccggtcatcgaaggacgacgcaaatctgccctgcagatattagcggtggttgccggtattgtgacggcgtttttgacccaacctttcgtcgccggcagtttctcggccattaaacatccggacctgatgacattatgtattggcctgatggcaagcggcggatcggcattctggaacgtcattcttaattatctgttgcaagtgaaaaacctgaaaaagcaacaagtcagcagcgtgaaaacggatccagtagccgatcctgcccccccttctccggttcatcaggacgtggttcatggcgcagagccggtcagctcaaacccctgtttcaatccggagggtaaataa

SEQ ID NO: 216072 - DNA, 1419 bp, Klebsiella pneumoniae
atgactgatgaacagcgtcaacacgcggtcgcggcgatccagcaggcactcccggcgctggagtggaccttacagccggcgaagatcaaacggctctcccgcgattttcactggttcagtccgctactcaccgagcaactggcggggaaacaggcggacgcggtggttcacccgcgcgatgaagaggagctgcgccagctggtctgcgcctgcgcgcagcaccagctgccgctgaccctgcgcggcagcgccaccggcaactatggccaactggtccccctcgaaggcgggctgctggtggatatgaccgggctcaaccagatcgtcgccctcggcaacggcacagtgagggcccaggccggcattcgcctggcggacatcgaaaccgccgcccgccagacgggctgggagctgcgctgtatgccgtcgacctatcgactggcgagcctgggcggtctctacggcggcgggttcggcggcatcggctccatcaactatgggccgctggctgcgcccggcaatgtgctcagcgtcaaagtaatgaccgtcgagcccgtcccccgcgtgctgaccgtcccggctcccgaagcgctgctcctgcatcacgcctacggcaccaacggcattatcctggaggttgagctggcgctggcgcctgcgcaccagtggattgaacgtctggacgtgtttgacgatttcgccgatgcgctgaactatgccaacgcctgcgtccgctcgccggggctggtgaagcgccaggtggcgctgctggccacgccgatcgctgactattttagccacctcaacgatcgttaccgcgccgggcagcatgcggttatcagcctgatcgccgaggagagcgaaggactctgcgccagcctgttaccgcgccatcgcgggagcaacgccatccggcaggccagcgaggaggcccggacgcgcaacggctcgttaatggaatactgctggaaccacaccaccctgcatgcgctcaaggtggacaatacgctgacctatctgcagacggcgtttgatccgctgcgctatccgcagcaaattttacagatggagcagcacttcgccggggaggtgatgtcccatattgaattcctgcgcgatatcgagggcaatctcaccgccagcggtctgcagctggtgcgctataccacgcccgaacgtcttaacgccatcatgcagatatttcgcgacaacgacgtcaagattaacaacccccacgtgctgcaggttgaggacggcaaacagggcgtgattcgtcccgacgtcgtggcggtgaaacagtctctcgacccggcgggattacttaaccccggcaagctgcgcggctgggcgctgcgcgaccagctggaactggacggcaacccgctggcgcgggccacccgcgaaagccccacgacctga

SEQ ID NO: 216073 - DNA, 882 bp, Klebsiella pneumoniae
atgattaacggttacattcctgccgcgcgctttcttccttttctgagctggacggacgtggccgccctgccggataaaagcaatacggttatcgtcctccccaccggggcgatcgaacagcacggcccgcatttgccctgctcggtggacagcgtgatatcttccggcgtggcgggccatgccctcgccaggctgccggcgacgatcccggcctacgccattccgccgatcgtctacggtaagtccgaggagcatctgcattttcccggcaccctgacccttagcggcgatacgctgctgcataccctgctggagatcgccgaatctctctatcgggccggttttcgcaagctgttgatgatcaacggccacggcggccagccgcagatcctgcagatcgcctgccgggaaatgcgcctgcgccacggggatttcatcgccatcccccacgacgtgttcaacgtgcccaactgcgaaaaacagtttctcagcccgcatgaacagcggatggcgatgcacgccgggcatagcgaaacggcgctgatgctggcgctggccccggagtgcgttcatatggagcgggcggtcgccaacttcccgccggaattcccctgcccaaccctgtcgaaaggtcgtccggcggcggcgtgggcgtcgtatgactttggccccagcggggtgattggcgacccgaccccggcgacgcgggagcaaggcgaagggcttctcgactccctcgccgccagctgggcgcaggcgatcatcgagatccaccgcatggcctgggtcgaacgtcgcgaaccgacctggggcaaacagcactggcacggctttgtgcagtccctaccaccttctttcgctgctgaatccagggagccctga

SEQ ID NO: 216074 - DNA, 303 bp, Klebsiella pneumoniae
atgagcgaacgctatgtcattgaagtggatggactgaaaaaatattttccgctacgcgacggcctgtttggtcagcagaccggcgagcttcgcgcggtggacggcatcagctttaatatccgtccgggcaccatttttggcctggtgggcgagtccggcagcggtaaaaccaccgtcggccggaccctgcttggcctgtacgagaagagcgccggcagcgtgaaatttcacggtcaggagctggccgacctgaccgcgcctgccctgcgcgctatccggcccaggatgcagctggtgttttag

SEQ ID NO: 216075 - DNA, 414 bp, Klebsiella pneumoniae
ttgtccagattacaacaaggattaaaaaccagacaaacccgcttcgccctggcgctaaaagtggccctgctcggcggagtggtagcattttcttctgctgtctttgctgagggtctcctgaaagaaggtatcaccccggccactgaagccagccagatcccggccagcgccaaactgcgcacagacacggtggtggccgggatctccgagccgcaggggatctttaacccctactttttcgtcaacggctgggatgagaacgtgactaacgtcattttttcacgcctgatcgactgggacagccagggcaagctggtcccgggactggcggagagctggacggtcagcccgataacaaagtctataccatcaaattgcgccctggtctcacctttagcgacggctcaccgctga

SEQ ID NO: 216076 - DNA, 684 bp, Klebsiella pneumoniae
atggcacattaccggattatcgacaccgcatcctggccccgccgggatcatttcactttttaccgccaattcgccaaccccagctttaatctctgcgtgccgatagcggcgcagcgcctgtacgaatgtgcgaaggaccgtcgggtctcgttttttcagctcgcgctctatgccctgctgcgcgcggccaacggggtaccgcagctacgccagcgcgtgcggaacgatgaggtgattgaatatgacagtctggcagtaatgacgccggtgatgaccgtcggagagggattccgtcaggtgtggtgcgacaacgcccccgagttcaccgccttcagcgccgcggccacgccgaagattgtcgcggcaagagagacatccccggcgccgctcatcgtcgatggcgagcattttatctgcgccagctgtctgccatggctccatttcacctcgatgacccatgcggaatatgccgtcggcgcggcggtccccgcgctcacctggggaaaactgcagaatggcgttgtcccggtggccgggcggtttaaccatgccttcgtcgatggtctccacgccagccgcttttatgcccttgtcgaagagggatttaatgaccccgagcggctctggttgccgctaaccgaaaccgcaccctccctgctgcccccagcggtgaaggagcgttaa

SEQ ID NO: 216077 - DNA, 630 bp, Klebsiella pneumoniae
atgttcctatccagcctgatggccattgccgcggtgctgatcatgggcgtgatcagtcccggcccaagctttatctttgtcgcgcgcaatgccgtcgctcgctcgcgtctgcacggtatggtgaccgccctcggtaccggcgccggtgcggccattttctccattatggcgatgctgggcctgcagaaggtgctcaccgcggtgccggagctgtttattggtttgaaggtggcgggcgggctctatctgctgtggctgggctataaaatttttcgcgggtcggcgcagccgatggatttttccgccagcgggatggccggcaaccgctctttgctgaagaccttccgcgacgggctgtatactcagctcagcaatcccaaaacggcgctggtgttcgcctcaatttttaccgccctgctgccggcgcagatccccaccgccttctattacatcgtgccgctgatgagctttctgatcgacgtcagctggtattcgctggtggcgctggtgctgtctgccgaccgcccgcggcgcgtctacctgcggctgaagcggcggatcgacatcgccacagcgacggtgctgggggcgctgggcctgcggcttatcgccacctccctcacccgctag

SEQ ID NO: 216078 - DNA, 315 bp, Klebsiella pneumoniae
gtgaatgccttcacggagtcgctggcgctggagctccgtgcttttaatatttgcgtcgggctgatcctcccgggacgcgccccgcagacccggttcggggaaaacgcccgccggacgatgggacagctccccgagagctatgcggcgctcggccagcagatcttcgacagcatgcaggataacgccagcgtgacgcaggcgaccgatgtcgctcaggccgtctggcgaatggtgcacgatcctgatgccccttcgcggctgccggcaggggaagacgccctggcgatggcgcaggccagtcatcgccttgtctga

SEQ ID NO: 216079 - DNA, 1371 bp, Klebsiella pneumoniae
atggccgcttttccgcacaatttcttatggggtgccgctaccgcagcgtatcaggttgagggaggacacgacgccgacggtaaaggaccgtcaatctgggatatctactctcatctgccgggtaccacctttgaaggcaccaccggcgatattgccgtcgaccactatcaccgttttcgcgaagacgtggcgttaatggccgagatgggcctgcaaagctatcgattctccatctcctggccccgcctgctgcccgccgggcgcggtaaggtgaatgaagcgggggcccagttttacagcgatctgatcgacgaactgctggcgcacaatattgagccgatgatcaccctctatcactgggatctgccgcaggccctgcaggatgagggcggctgggaagcgcgcactaccgccgaggccttcgccgagtacgcccgcctgtgctatgcgcgctttggttcacgggtgaagctgtgggctaccttcaacgaaaccattgtcttcattgggcacggctacattaacggcctccatcccccggcggtccgcgatccggcgcgtgctattcaggcctgccaccacgtgtttatcgcccatgcgctggcggtgaaggcctttcgcgagatggctgtggccggcgagattggcttcgtcaacgtactgcaaccgcataccccgctcaccgacagcgaggcggacattaaggccaccgaactggctgacgccatccatactcactggctgtacgatccggtgctgaaaggcacctatcctgccgacctgctggcgcagacccaggcgctgtggggggtacctcgctttgctccaggcgacgacgcgctgctccgtgacaaccgctgcgactttatcggtctgaattactatcgccgggaaacggtatctgcccagccgcctgagatcgctaccggcggcgagcctggcgtggagggattattctatttcgtgcgtaatccccagagtacatataccgaatggggctgggaaatctggccgcaggggctaactgacggcattatgatgattaaggcgcgctatggcgatattccgatatatatcaccgagaatggcctcggcgcgaaggacccgattattgacggggaagtggtcgacgacccgcggattgattatctcagcagccatattggcgccctcgaaaaagcgctggcgctgggggcagatgtgcgcggctattacccctggtcatttatcgatctgctgagctggctcaacggctatcaaaagcaatatggttttgtctatgtcgatcaccagcaaaatctggcgcggaaacgaaagaagagtttttattggtacaaatctgttattgccagtcacggcgaacagcgttaa

SEQ ID NO: 216080 - DNA, 393 bp, Klebsiella pneumoniae
atgagcgatgcgatccgggtggggctggtggggttcggttacgccagcaaaacgtttcatgcgccgttgatcggcggcacgccgggtatggcgctgaaggcggtcgccagcagcgacgccgataaggtccatgccgattggcctggcgtgaaggtaatgagtgcgccgggggatctgctggacgacccggatatcgatctggtggtcatcgccaccccgaacgacacccactttccgctggcgaaagcggcgctggaggcgggaaagcatgttgtggtggataagccctttaccgtgacactgtcacaagctcgcgagctggaaagcctggcgaagcactgcggtcggatacttcggtgtttcataaccggcgctgggacagcgatttcttaa

SEQ ID NO: 216081 - DNA, 1002 bp, Klebsiella pneumoniae
atgattgattcctcattgccattaaccgacattcatcgtcatcttgacggtaacatccgggcccaaaccatcctcgatcttggccgcgaatttaatatcgctcttcccgcaaccaccctcgacacgctgcgtcctcatgtccaggtcaccagccttgagcccgatctggttagtttcctcgccaagctcgactggggggtaaaggtcctggcctcgctggaagcctgtcgccgcgtggcgtatgagaacgtcgaagacgcggcgcgaaatggcctgcactacgttgagctgcgcttctctccccgctatatggcgatgacccaccggctgccggtcgacggcgtggtagaggcggtaattgccggggttcaagagggatgccgcgatttccaggtcgacgcccggctgatcggtattctgagccgcaccttcggcgaagccgcctgtcaggaagagctggcggcgctgctcgcccaccgcgagggcatcacagccctcgacctcgccggcgatgagctaggcttcccgggtacgttgttccgcaaccattttaaccaggcccgcgacgccgggtggcatatcaccgtccacgcgggcgaagcggccggcccggaaagtatctggcaggccattcgtgagctgggcgcggagcgcatcggccatggggttaaagcggtagaggatccagccctgatggactacctggccgagcaccgcatcgggattgaatcctgcctgacctcgaacgtgcaaaccagcaccgtggcctccctggcccagcatccgctgaagcagttccttgagcacggcgtgctggcgagcctcaacaccgacgatccggcggtccagggtgtggacatcattcacgagtataccgtggcggcgccggcggcagggctgagccgggagcagatccgtcaggcgcagatcaacggcctgaccctggcgttcctcggcgaacaggaaaaagccgccctcattcagcgggttgccaaaggctga

SEQ ID NO: 216082 - DNA, 363 bp, Klebsiella pneumoniae
atgaaggaaatcggcttaccgttattgcttctgaccgcgctggccagtccggcttttgctgcagactgtcagccaaacggcattggcggctctttttgcattaacgatgacggtacgactaccgacacggtgcctaacgaagtcaacggcatggatacgtactcgaataatggcggctataccagttccctgcccgatcggtcaggggcggatgaagcactggaaggttcatcactgtcgacgcagcaaggcgtcggcagcggacagagcgacagtgcgctggcgggtcgcgactggcattcgcccgccaatctgaatgatggcgccgccacctccagcatgagcctgctggataaaccctga

SEQ ID NO: 216083 - DNA, 1008 bp, Klebsiella pneumoniae
atgttttatcgaatcagtattctggataaaagtccgcttgccgccggggaaaccgccgcgcaggcgctggcgcgtacattaacgctggcgcaacacgccgaagcctggggctaccaccgcttctgggtcgctgaacaccacaataccgatcagctggcgagcccctcgccggagctggttatcgcctggctgctgggccacacccggcggatccgtcttgggtccggcggcgtcatgctccagcactatagcccctataaggtcgcggaaaactttaacctgctggccgccctcgcgccgggccgcatcgatctcggagtcggcaaggcgcctggcggcctgccgctctccacccgcgccctgcagcagggcctgcatcaagaggagaaagggacctttgccgatcagctggcgcagctggataactggctgtctctgactgagcccgggggagaggagagcctacgcgccacgccgatcccgccgcgccgggcagacggttttctgctcggcgccagcctggagagtgctgaactggccgcccgccttgactggaactttgtctttgccgcccatctcaatggcgacagcgcgctgcgccgtgccgtgttcaaccgctggcgcgagctcagcccgcgtgaggcgatggtcgccgtccaggtggtggtcgctgacgatccggccaccgccgccgcgctggcgcagcaggtcgaggtgtggggcgtcgagctggagaacggccagcgggtgaccgtcggcagtgaggcgcaggccgtcgcttttgcccgccaggccggcagccgaccgacgcgcattgcccgccgtgaatcttcgctgatctccggtactcccgaacaggttaaagcccggcttgacgcgctgcaggcggaagaacagttggatgaactcatcattgatacccccattagcgacgggccagcgcgcctgcactctctgcgcctgctggcgcaggctcactacggcaaggaggtgctgaatgtcctttga

SEQ ID NO: 216084 - DNA, 927 bp, Klebsiella pneumoniae
atgcattcatctgaaacgatcaaagtggtgccggcgcgctatccgctgcgggtggtcggggctctggtcgccctgctggtgctggcggtggtgatccagtcggtggcctttaacccgcgctgggagtggggcgtcttcgcccgctggttcttcgacccggtgatcctcgaggggctggggcaaaccctgctcctgaccctgctcggcacggtgctaagcgtgatcttcggcggcctgctggcgctggcccgtttgtcctcatcgtggctgctcagcagtctcgcctggggctatatctggctgtttcgctcgctgccgctgattgtggtgctgatcattctctataacttttcctatctctacgacaccctgtcgctggggatcccgtttaccggcgtcacctgggccagctatcagaccattaacgtgctggggcaattctccacggcggtggtgggcctgaccctggtgcagagcgcctataccgcggagattattcgcggcggctttcttggcgtcgaccacgggcagtatgaagccgccgccgcgctggggctacccgcctggcggcgcacgctgcgcattattctgccgcaggcgctgcgcaccatcctgccatccggcttcaacgagatcatcagtctggctaagggaacggcgatggtgtacgtcctggcgatgccggagctgttctacaccatccagatgatctacaaccgtacccaggaggtgatcccgctgttgatggtcggcgccgcctggtatctggcgatcaccagcgtcctctccgccattcagtatctggtggaacggggcctggcgcgcagcgaacgccgctcggcggtaaacagcgcccgcagcagccgtctgaatcaacccgcacgtcaaccacagccgcaggaggccgttcatgcccagctctcataa

SEQ ID NO: 216085 - DNA, 879 bp, Klebsiella pneumoniae
atgacccttgttctcagcgcttttgtcatgagcgctcacgcggcgctggatctgcgcgccaatgagcagccattgccggtcacccgcgacccgcaggcgatagcgaaaattccgccgggctatcgcttcgtcgagccggggacgctaacggtggcgatctcggcgctcaattcgccgccgctggccctgctggccagcgacaaccgcacgcggatcggtagcgacccggatatagcccgcctgctggccggaagccttggcctgaagctcaggctggtgcccaccgcgtgggaggactggccgctgggcatcgcctccggccgctacgatgtggcgctgatcaatatcgcggtaaccgagaagcgcaaagagaagttcgattttgcgacttaccgggtggactccctggccttctcggtgaaatccaccagcgacatcgccgcggtaaacggacccgccgatctcgcggggcgcaaagtgatcgtcgggtccggcaccaatcaggagcggatcctgctgggctggaacgaggacaaccgcgccgccggacggccgcaggcccagccggtctacctgaccgatgatgcctccggcaatctctatatccagtccgggcgggcggatatctttttcggcccgcagtcggtggcagcctataaagcggcgcttaacggccagacccgggtggtgggcctggggccgaaaaaagcgtgggtggcgacaaccaccaaaaaaggcaacggcctggtctatgccctgcaggcagccctcgacggggcgattgcccgcggtgaatatcagcaggtgctggcgcgttggggggagcagggcgaagcggtggcgcagtcggtggtcaacccgccggggataacctactaa

SEQ ID NO: 216086 - DNA, 297 bp, Klebsiella pneumoniae
atgaaagacgaattgtttgccgatctgctggcgagtgcagaagaaatggtcaggatcgagaaaggtgaacaaatgccgatggagcagcacgttcataccttcagcgaaattgacgtgaaagcgatacgtgaagccacaggtttaaaacagcaggactttgcagcggccgttggcgttagctacgagttggttaaaagctgggaaacgaaacgacgtcacccaaccggtgcagccagaaaactgcttttattgcttcagggtaatccattgattatcaacttgttgaaggttgtttga

SEQ ID NO: 216087 - DNA, 447 bp, Klebsiella pneumoniae
atggaaaccaacgattctattttgaaagaaatcaagaaatacagcgctcatattgataggtttagagcgcgagcaaacactcatggtatctggttgtttattgctacccttggatgctggggggtaactgagcccagtattcggatattagcattcgttatgcttttctttatttttttgtttcttctacacggtagctttccaggtgaaaagcgaacgtttaaaaagattcacgatgatataaaaaataaaatagttgataatttaacaccagaacaacagcaagaaaggtttcacgatcttctcatcgttgagaaaaaacgaaagtcacttgttggaattataaaaacaacctttatctttttagcctgttatggtttttattttatgagtttatattacttcatacagcactggcatagtgacaaagtaacagcgtgtatttaa

SEQ ID NO: 216088 - DNA, 1617 bp, Klebsiella pneumoniae
atgcgtatctctgtgattagcgcagcggtttgctgcgccctttttccgctcatcagcgtcagcgccgccggcttgagcgtggagcaacggctggcgcagctggaagcgcgcctcaatctcgctgaacagcaggccagcgaggccagccgccgcgcgcagcgggcagaacagcaaactgccgccgccgagcagcgcgccgcggcggcggagcagcaggtgcaggcgctcagccagcagaccacggctcgcgaacaaaaacagcaggccactaatcagcaactgagcgagcagctggcgaagcgcgccccggacgatgggtttacctttaacgcctacgcccgttccgggatgttagtcaacagccatggtaaaggcgcccgcggcgggccgggcgtctccccggccagttcgctcaacggcgatgcccatgtcggtcgtctcggtaacgaaaaagataattacgctgagctgagctttggcaaaaagctcaccttcaacgatggttcatgggcgcgctttaagaccatgctcgccgacggggccaccaacccggatccgtgggttcaggataacgacagccaccatctgaacattcgtcagctgtacgtcgagatgggtaactttgccgaattcaccggtccgttaaaacgcgcctcaatttgggccggcaagcgcttcgatcgggataacttcgatatccactttaccgatagcgacatcatgttcctcggcggtaccggcggcgggatcaatgatgtcgactggggaagcggcctgcgcggcgactattcggtgtatgcacgtaacttcggcgaccttggcagcgataattacgcggataatgacatccagaatctgctgttcaccgccaaccatttttacggcaactggcaactgatgaccacggtgatgaccgcccagggcaacgatgatctgaaagataatacctcgaccaccgggagctatgccctgcgcagcgataacaccgccaaaaacggctactacgcgatgctggccctgcacgacaaacaacagttctacggcctggcgccgggggtgtctgaaagcgccctgcaatacggcgtcgggctgggcgccgaagcgcgtcagccggggagcgatggcgatctgaccgagaacgcggcctccctgcgctttgcgtcgtatggcatcctgccgttggggaaaaactggcagctggcgccgtcggtgatagcccagcatagcgaagaccgctatcgcgacggcgaccgctacgactgggcgacgtttaacctgcgggtatcacaggggatctccgctcacttcgccctgctgtatgaggcctcgtggcagtatatggatctcaatccgaacgggcgcagctatcgctataatgacaacgtttatcagtatcaggcggtgcgcggtgatttctacaagctgaccttcgcccccacctttaaagtgggtgatgtgctggatatcaaggcgcggccggaaatccgcttctttgccacctggatgaactgggataaagcgctggatcgctacgcgataaatgacgatttcggcagcaaaggctttaccgccggcgggacatggaacttcggcgtgcagacggagatttggttttaa

SEQ ID NO: 216089 - DNA, 2412 bp, Klebsiella pneumoniae
atgaccaaccactgggtggatatcaaaaacgccaacgtcgtggtggtgatgggcggtaacgccgccgaagcccatccggtgggtttccgctgggcgatggaggcgaaaaacaataacgacgccacgctgatcgtcgtcgacccgcgctttacgcgcaccgcgtcggtggccgatatctatgcgccgattcgttccggtaccgacattaccttcctgtcgggcgtgctgctgtacctgatcgaaaacaataagatcaatgccgagtacgttaagcattacaccaatgccagcctgctggtgcgggatgattttgccttcgaagaggggctgttcagcggctacgatgcggaaaaacgccagtacgataaatcgtcctggaactaccagttcgatgaaaacggctacgccaaacgcgatgaaacgctcacccacccgcgctgcgtgtggaacctgctgaagcagcacgtttcccgttacacgcccgaggtggtcgaaaacatctgcggtacgccgaaagcggacttccttaaagtgtgcgatgtgctggcctcaaccagcgccgcggaccgcaccaccaccttcctgtatgccctgggctggacgcagcacaccgtcggcgcgcagaacatccgcaccatggcgatgatccagctgctgctcggcaatatggggatggccggcggcggcgtcaacgccctgcgcggccactctaatattcaggggctgaccgatttgggcctgctgtcgaccagtctgccgggctatttgacgcttccatcggacaaacagaccgatctgcatagctacctcagcgccaacacgccgaaggcgaccctgcccgagcaggtgaactactggagcaactacccgaaattcttcgttagcctgatgaaatccttctacggcgaggcggcgcaaaaagagaacgactggggctttgagtggttaccgaagtgggaccaggcttacgacgttatcaaatacttcaacatgatggataacggcaacgtcaccggctatatctgccagggctttaacccggttgcctccttcccggacaaaaacaaagtggttcgcagcctcagcaagctgaaatatatggtggttatcgacccgctggtgaccgaaacctcgaccttctggcagaaccacggcgagtctaatgatgtcgacccgtcggcgattcagaccgaagtcttccgtctgccgtcgacctgctttgccgaagaggacggttcgatcgccaactccggccgctggctgcagtggcactggaaaggtcaggatgccccaggtgaagcgcgcaatgatggcgaaatccttgccgggatttaccatcgcctgcgcgaactgtaccgcaccgaaggcgggaagggcgcggaacccctgctgaagatgagctggcgctacaagcagccggaccatccggaatcggaagaggtggcaaaagagaacaacggctacgcgctggcggatctctacgatcaaaatggcactctgctggcgaaaaaaggccaactgctcaatagcttcgcgctgctgcgcgatgacggcagcaccgcgtcgtcttgctggatctataccggcagctggaccgagcagggtaaccagatggcgaatcgtgataacgccgatccttcgggcctgggcaatacgctgggatgggcctgggcgtggccgctcaatcgtcgggtgctgtacaaccgcgcttcggccgatatcaacggcaagccctgggatgcgaagcggatgctgatccagtggaacggcagcaagtgggtcgggaatgatattccggacttcaataccgcgccgccagggagcaacaccgggccgtttatcatgcagcaggaggggctgggtcgcctgtttgcgctcgataaactggcggaagggccgttcccggagcactacgagccgatggaaaccccgcttggcaccaacccgctgcacccgaaagtggtctccagcccggtggtgcggttgtatgaagaggacgccattcgcttaggtaagaaggataaattcccgtatgtcgggaccacctatcgtctgaccgagcatttccacacctggaccaagcatgcgttgctcaattccatcgcgcagccggaacagtttgtcgaaatcagcgaagggctggcgaaaagcaaaggtatcgctaacggcgattgggtgaaagtcagcagcaagcgcggcttcattcgcgcggttgccgtggtgacccgccgactgcgcacgctgaacgtcaacggccagcaggtggagaccgtcgggatcccgctgcactggggttttgaaggcgtggcccgcaaaggctacatcgccaacaccctgacgcctaacgttggcgattccaactcgcaaacgccggaatacaaggcgttcctggtcaacatcgagaaagcgtaa

SEQ ID NO: 216090 - DNA, 186 bp, Klebsiella pneumoniae
atgaaaagtaatacgctacgtaaaagacccactgacgtacccgtccagaaggcgtcagaacagccaggtaaggatttacgagaagcggataaacagcgacagcacaaggaattcattgccgcaatgaatgaatttattgcaaaaggaggcactcttactgatgatgaatttttcagggtgctatga

SEQ ID NO: 216091 - DNA, 819 bp, Klebsiella pneumoniae
atgggcaacaagaaaagcggtaatccggtcgacacggcggcaaaaatcgcgccgctcgacaacaaagcgtacgagaaagcgctgcgcaaactccacgttgagctggtgaaactgcagcgctgggtggtacacaaaggactgaaagtgtgcattgtctttgaaggccgggacggcgccgggaaaggcggcaccattaaggccatcaccgagcgcgtcagcccgcgtatcttccgggtcgtcgccttaccctcgcccaccgagcgcgaaaaaagccagctttactttcagcgctatatcaagcatctcccggcggccggcgaaatcgtgattttcgatcgcagctggtataaccgcgccggcgtcgaacgggtgatgggcttttgtacgccggaggaggtgcagaagttcctcgacggcgcgccgatggtggagcgcggcatggtcgaatcgggcattattctgctcaagtactggctggaggtctctccgcaggagcaggagcgccgtctgcgggatcgcatcgacgacgggcgtaaaatctggaagctctcgccgatggacattaagtctttcaaccgctgggatgaatataccgctgcccgcgacgccatgttcgccgccaccgataccgcctgggcgccgtggttcgtcgcccgctcggaggataaaaagcgcgtgcgtctaaatatcatcacccatctgctgtcgcagatcccctatgaagctttaccggtggagcctgtgacgctgccgaagcgcaaaattggcaaaatgaaacagactaattttcctttccgcttcattccagagaagttttga

SEQ ID NO: 216092 - DNA, 1092 bp, Klebsiella pneumoniae
atgacgctgagtcaggatattctggccgaactggcggagatcgcccccggttccccgctcgatcaggcgcgcgccgtccgcgatgccgccacccgtcacgcccagggaagttatgaagtgctgttccgccagcaggacgctgactttcctcttgatgaacgcttcgcggtggccgcgaaggtggcaaaactgcaccaggcggacgcgctggcggcgcactatgccggtttcggcctcgccgatccgaccaccgatcgtctggtcccggcgctggcctttgcccgcctgctcaccttcacccccgttgaagccactcccggcgcgctgcacaccttaaccggcgcgggctggagcctgcggggcatcgtcaccctggcgcagctggtagcctttgtcagcttccagagccgactgctgctgggcctgcgggcgctcaaccataagcccatcgtcagcgcagatacgccgctggtcgccggatactggcataccaccccgtacgcgcagagcggcaaagcggccccggttcgcttcacccgcgacgagctgcactgggaaccctggctggccgataaaccgctggaggaattcaacgctgaagaacaggcgattctggccaaatatggccatagcgactccccctactttcgcctgctggcgcgcaaccagccggtgctggagcagcggaccctgaccgataggggcattttctataccgcgggaggattgccgcgcgccgaacgcgagctggccgccacggtcgccagtaaaatcaacggctgtatttactgcgcctcggtgcatgcccgcaaagcggcgcagctggcgaaggacgagaccgccgtcgacacgctgctggcggtgacgccgggagaggatctgcgcgacgggcaatcgccgcgctggcaggcggaaatcgacgccgccgccgcgctatcggtgacgccacccgcgttaaacgccgatcatctggcggcgcttgatgagcagggcttagatactctggcccagctggatctgctgcagtccgcggcctttttcgcctgggccaaccgcctgatgctgaccctgggcgaaccctggcgtgagtag

SEQ ID NO: 216093 - DNA, 1107 bp, Klebsiella pneumoniae
atgcgtaaagccttctggctattattcgcgctggcgctgccggcgctggcgcaggatccggtgttacccgccgtgacggcgatccatacggcgcccaccctcggtgagctgccgccgccggagtcgctgcgaccgtgctgcgcttttggttacgacctgcacgtgcgcgcggcgggcattccgatcccgatgtaccagatcggtaatgtgttgactctgggtacgctgggtaagcaccattacaacgacagcgcgttcggtgcggtgaaaaatctgctggggctcagcgaggagcagaacgggcttatctatacccgccgcggcgggtttattgatatcgcccatgtgcgcgatacggcggataacaccttttatctgttcaatcgtattgcgccgacgctgggccaggcggggcggatcttctacagtgaagaactgggcgtgcgccgcgtgcagctgaatgcctttacgccgccggcgggcgtcaggcagcgctatcagctggcggcctggctcgccgggcatctggccttcgaaatcgcccagtggcatgagatcgcccagtggtatggcttccagtcggtccccgggttttccgaagagatttccgctttttcgcccgaggatctctactccaatttactgggcgcgaggctggcgattaatgtcatcctcagcggccacggcggttcgctggaggattataaccaggccatggatgcggcgctgaaacaagtgctgacccggctgctggtggcgacgcgcggagagacggaagcgatgtttcagcagatcgacggcgactggtggaatagtcaccggcgggtgccggataagtttctggtactgaagcgtaactacgatctacaggaaaaccggctgccgacgccggtcccattcgaaaccatgccgccgtatcgcctgaccatgccggagcaggtcgggggattccgcttacgcgacctcggcgaactgcagatctatccagggaacgatatgcaggcattgccggttcccgcgcaatactatggcgccggagcgttccaggggctggcggaccgcgcccatgaggcggataaaacccagctggcgcggacagaaaaatag

SEQ ID NO: 216094 - DNA, 1041 bp, Klebsiella pneumoniae
ttgaaaaaaatcgccactaaaatcacccttgccgacattgcgcgtgaagcgcgcgtcggcgtagccaccgtcgaccgggtgctcaataagcgcgcggcggtgaaagagtccacggcgctgcgcgtgctggaggccgcccgccggctgggttttaccctcgagcagccccactatcgcctggctgccggcaaagcgccggtcacgatcagaatgggctttatcctgctgcaggagagccactccttctacctgccgttggcccgggcgctgacgcgcgaggctgccccatggctaccggcgggccaggcgccggtgatactgcattttgccatcgatgcggtggaagcgatggctcaggccattcaccgactcagcgatgaagtggaggtgctcggcctggtggcgctggatcacccgctgattcgccacgcggtggcccgggccgccgcccgcggcgtgcgcgtgttcaccctgctttccgatctgtcggtcccccagcgcagcgggtatatcggcctcgataatcataaagccgggcgcacagccgcctggtttatcgagcgcttatgccgggggaatggcgaaattggcattatcattggcgataatcgttttacctgccaggaaagctgtgagatcagctttcgctcctgcctgcgagaacagggcaaggggcaacagatccttgagccggttcgcagtcatgaacgggcggatatcgccaggaccgtgacggaacagatgctgactcagtacccggccctgcaggcgatctacgccccctgcggcggcgtcgaagggatcgtcgacgcgctgcgcgacagcggccgtcagcaggagatcgctctggtctgccacggtccgctcagcaacagtgaactggccctgatcgatggcaccatcgacatcatgcttaaccaccggctggatgagtttgccgccgttacgctgcgcgccatggcggacgctgcttcacgcccccatagcgaggtgatttcactccctcagcctttcgatatcatcaccaaagaaaatatgtaa

SEQ ID NO: 216095 - DNA, 252 bp, Klebsiella pneumoniae
atgtcgctcaatgagatgcgtaacggtatttattccacctgtccggaaacgcaactgcagcactaccttcgctatctcgacaccatgagcgagatattcgaagtctggacgttacccaccgccaatgggttgcagtcggtgtattgcaaaaccaccctgattgataccgaagactgtggttgcttgctgctgtttgaagccgtgaagctgctggcgcaaaatcagtcgattcataccggctcccgccgctag

SEQ ID NO: 216096 - DNA, 1311 bp, Klebsiella pneumoniae
atgatggattaccagaccgcggtgcgcggtgcattttttgatatcgccggcgtggcggataccccggatgaggtggccgcccaggcccgctatctcgatgatggcctgttgttcctgcaggaggggaaaattatcgccctgctaccatggcaggagggggaagcctttctgcatcccctgaagggctatgtcgatctgaggggtaagctgctgctgccggggttcgttgatgcccacgttcactatccgcaaacggagatgatcggcgcctttggcgaacagctgctggagtggctcaccacctacaccttcccggtggagagccagtttgccgatgcggagtatgcccaggagatagcgcagttttttgtaaatcagctgataagccatggcaccaccaccgcgctggtgttttgtaccctgcatccggcatcggtggaggcgttattcagcgaagcgctgcgcctcaatatgcgcctgatcgccgggaaagtgatgatggatcgccatgtgcccgactacctgtgcgaaaccgccggggagagctacgagcagacccgggcgttgatccgccgctggcatcagcgcggcaggctgggctatgccatcaccccgcgctttgcccctacctcgacaacggagttgctggaggcggtgcagcgcctgcggactgagtttcccgacacctggctgcagacacatctcagtgaaaaccgggaggagatcgcctgggttaaacagctgtggcctgagcatgcgcgctatctggatgtctatcatcactatcagctcaccggcgaacgcagcgtcttcgctcacgggatccatctcgatgatgccgagtggcagtgcctgcatgacaccgggtccgcagtcgccttctgcccgacgtcgaatctgtttctcggcagcgggctgttccgcctgcccgcctgctggcagcaccaggtgcggatgggcatcggcagcgacgtcggagccgggaccaccttcagcatgctgcggacgctgggcgaggcctacaaggtaggacaactgcagagctatcgcctgcgcgccagcgaggccttctatcacgccaccctcggcggggcgcgcgccctgcggctggaggagaaaattggcaatttccagccgggcaaagaggcggattttgtggtgattgacccggcggtcaccccgctgcagcgcctgcgcataggccgctgccatgacatttatgagcagctgttcgtgctgatgaccctgggtgatgaacgcaatatcagcgagacgtgggtgaatggcgagcgggtgtggtgtcaggactga

SEQ ID NO: 216097 - DNA, 792 bp, Klebsiella pneumoniae
ttgaatgagatcgttattattgcgctggcaggctttactaccggcattaccacggtgctgttcggcttcggcggcggctttgtggtggtgccctttgtctatcaactgatgctccggcagccggcgatcgcgggcaacgccatgcatgtcgcagtggctacctcaacggcggtgatgatatttaacgccggctgggtcagctatcgaaactggcgggcgggcaggcttaccgcgcagacgctgtttccgttgttatggtttattgccattggggcggtggtaggctcctgtctggcggggatattgagcgagaagatcgttcgcgtgctgtttattctctatatgctggcaaccatcagcgattgtttgttgcgcaagggttttttcacgggcagcgctcggcgtcgcctgtccctgcccgtggtcaccggcggcggtgtgattatcggtacgatcgccgcattgctgggcgtgggcggcagcgtcatgacggtgcccctgctacggcgacacgggtatgcaatgcaggagtgcgttagcgcatccaacccgctttctttgcccgtggcgctatgcggggctgtgacctatgccgtcattggctggcacagcatcccgctgagcggatttctggggtttatcagcctgaaaattttaggcctgctcgtcctgaccggctgggccgggatagtgtttagccgccgggcaatccctgcggtacctgatgtatggtatgcgcgcatctatgtgctgctgctgtgcctggtactcctcgccatgcttattcaataa

SEQ ID NO: 216098 - DNA, 768 bp, Klebsiella pneumoniae
gtgcgcaacgtaaaaattgacgaggtcgatcgactcgatcgtgatgtggtggcgttaggtaatgactatgcgcaagggtttatcctgcccccgcaccagcatcgtcgcgcgcagctgctgtatggcgcgaccggactgatgtatgtcactacgcaggacggagaatgggtggttcctccgcaacacgctgtctggatcccccctgaaaccgtgcatgccgtcagatttgcaggggtgaccacgcgcagcttatatattgagccagactgtgtggccgctttcattaaacaccgtcgttgcgaagtgatcagcgtctcgccgctgttgcgccagctactgcttgaggctgtggatttaccaccgttgtacgacagcccacgcgatcgcacgctgatacagttgatgttgctggaactggccgctatgccggtccgcgaatttgacattccgttgccgcagcatccggcgctgctggcgctttgtcaggcttttttgcttaacccctctatccatgatcctgcggcgcgctgggccagggcgctgtttatgagtcctagtacctttcgccgccatttcctgaagcagttgggcctgtcgttttccgcctggcgacagcgagcctgcgtggtgagcgccctggcatggttgatagcaggcaaaccggtgaacgaagtagcattatcccttggatacgacaatgcgtcctctttcgccaccatgttccgccgcgtgaccgggcagccgccgtcgttttatcacccagcctga

SEQ ID NO: 216099 - DNA, 225 bp, Klebsiella pneumoniae
gtgaaccatcttatcgttgaaaaaattatcatcatctttcttctcgtcctgtggggattcgatacattcaggaccaggaaaaggaaacgttccgagcccgccattgaagcggctgatgccagagaacgttatcaatggcgctatctgagatggggatttcgaatcatacaggtggtagcgggagtgtatatcgtcgtgcagctgattcaggttttactgagatag

SEQ ID NO: 216100 - DNA, 696 bp, Klebsiella pneumoniae
atgagtttaaagccgcgtagaatcgttttaattcctgggtttatgctgaatgaaatgctttggcatgaatttgaaacatatctcccgtcaaactgtattgttcatcatgcagctgtaactgaaggacgaaccattcatgatgtagtgcagcatttgattactcttctgcctgagaagttttctttgataggtttttcgatgggaggatatattgcccgacaactggcagcagaattccctgaacgtgtagagtccttagtgcttattgccagttctttacgggaagatacgccgttagaagctgaagcaaagcggaaaagcgtgcagtcattgtcccccacaacctttaaggggctgagcagacatgctattgcccggtcactccaccctctaaacacatcaaatcaggatatgatttcagctatccagaaaatgggatgctctctgggatttgaagccttcatcacgcaatcatccttatccaggcaaggtataccttctgcaacgatacgttgtccaacgctggttatcgccagtgaagatgatgccatccgttcgatgaaggaggcagaagaattggtcgaagccataccttatgcgtcgttaagaatcattctggattgcggccatatgattccgctcgaacagcccagggagttggcaagaattattgttgaatggatccctgctacgtaa

SEQ ID NO: 216101 - DNA, 411 bp, Klebsiella pneumoniae
atggttgaggttgaggaaataaaaaagaaatatcccggcgcagatgcctggcaaatgggtgacagtccgcaactggctaacgagcttgctgacctgatcaaaaaagggatcaaaacggcctcttgcggatcttttgcctcttaccagcaggaagaatccgccccgagaatcgggagttataacattattcttgatggtcagaatgttccagtttgcgtgatcagactgatttcgatgcagctggttcgtttttgtgatgtcactgaagcgttcgcccgcaaagaaggtgaaggcgatttaagccttgaatactggaagaaagagcatcagagatttttcagctctgaaggtcatttttctgaagatatggagttgatcgcagaagaatttgaagtggttgaggtgctttaa

SEQ ID NO: 216102 - DNA, 1398 bp, Klebsiella pneumoniae
atgactcttcaacacttcaccattgccgatctccagcgtgcgctgcacgatggcgaactgagcgcccgggagatcgcccgccagacgctggacgatatcgcccgcgtgaatccgcagatcaacgcctggaccgaggtcaccgcccagcgcatgctggcggaggccgacagcatcgacgccctgcgccgggaaaagcgccccttgccgccgctggcagggattccttacgcagtgaaaaatctctttgatgtcgccgggcataccaccctcgccggcgccgaactgctgagcgaccggccgccagcgaccagcgacagctgggcggtgcgccagctgcacagcgccggcgccctgctcagcgggatgctcaatatggacgcctacgcctacggctttaccaccgaaaacagctactatggcgcgacgcgcaacccgcacgatctgtcgcggatcgccggcggttcttccggcggttcggccgcggcggtggcggccgggctggttcatttcagcctcggcagcgacaccaacggctcgatccgcgtccccgcgtcgctgtgcgggatctttggcctgaaacccactttcgggcgcctgtcgcgctctggcagccatccgtttgtcgccagtctggatcatattggtccttttgcccgcagggtggccgacctcgccgcggtgtatgacgccctgcaggggcgcgacccggccgatgactttcaggctgataaagccagcgagcgcaccggcaacctgctggatcgcggactggaggggctgcgctgcgcgcggctgggcggctatttcaccacctggtgcgatgacgacgcccgggaggccgtggatcgggtcgcccacgcgctgggcgccgacagcgagctacagttcgcggatgccgcgctggcccgctcggcggcctttatcatcagcgccagcgaaggcggcaatcagtacctgacggatcttcgccactcgcccgagcgctttgaacctcactcccgcgagcggctgctggccggcgcgatgatcccctccgcgtggtatctgcaggctcagcgttttcgccgtcatgcccgtcaggcaatgaaatccctgttcagccaggccgacgtgctgatcgccccggccaccccatgcagcgccacgccaataggcgcggaggagatggtgattaacggccagccgctgccggtgcgcgccagcatgggaatgctgacgcagccgatctccttcctcgggctgccggtggtgaccgtgcccctgcgtaccgccagcggtaagccgattggcctgcagctgattgccgcgccgtttaacgaacaagcctgtcttcgcgccgcgcgggcgctggaagcgatgggcattaccgatgcccgagtggcggagagtgcagcatga

SEQ ID NO: 216103 - DNA, 450 bp, Klebsiella pneumoniae
atgggattattaaattttgtgaaagaagcgggcgagaaaatatgggatgccgtctccggcgacagtaaagaagatcgggccgataagctgaaaaaacatatcgatggacttaatctgcctggcgccgaaaaggtcaatattgatgttgcggaagatggcaccgcaacggtcactggtgatgtcgcttcgcaggaggataaggaaaaaattctggttgcggtcgggaatgtcactggcgtaggccaggtcagtgacggcgttaaggtgacgcaaagcggggcggaaagtcgtttttacacggtcaaatccggtgacactctgagcgcaatctcaaaagcgatgtatggctcggccaatgagtatcaacgcatttttgaagccaataaaccgatgctgacccatcccgacaaaatctatccgggtcaggtgctgattatcccggcgaagtag

SEQ ID NO: 216104 - DNA, 1221 bp, Klebsiella pneumoniae
atgctcgcgctgctgctgctgaccgcatggctgagaccctgtgcggcgcaaggcaatgagctggtgatggcgacgacattttctcccagcgccaccgtgtggattatcgatcgctggcagcaagagccggggtcggtgatgataaggacgctcaaccgcaccagcgcctcgctggaacagttgcttgatacggcaaatgccgaaaatgtcgatctgatcctgacttcgtcgccgatgctgctgcagcatcttcaggagcatcaaaaactggcgccgttcagcggtgcgccggcaggcagccaacatctggtgccggaatccattcgctccacctccgtggccgtggcgatctccgggttcggtttgctgatgaatcgctcagcgctgatgacccggcatctgcctgcgccagcggactgggatgacctgaccgatccccgttatcagggggcgctgctgatgagcagtccgtcgcgttcggataccaaccatctgatggtggagtcgctgctgcaacaaaaaggctggattaaaggatgggaaacgctgttgacgacggcgggaaacctcgtgaccatttcatcccgtagctttggggtggcagataagattaaaagcggcctgggcgtggctggtccggtgattgataattacgccaatctgctgctgaacgatccgcacctggcttttacctatttccctcagtcggcggtttcgccgacctatgtcgcagtgcttaaaaacagccagcacgccagcgaagcgcggcggtttattcgctatctgttaagtccggagggccagacgatcctcgccgacgctaataccgggaagtatccggtaacaccgctggcgccaggcaatccacgggcggcgcagcaggcgatgctgatgaatcaaccgccattaaactatcgattgatcctcaaacgtcagcgtttggttcagcggatgtttgatacggcgattagctttcgtcttgcccagctcaaagacgcctggcgagcgctgcatagcgcggaggtccgtcttaagcgtccgctgcccgagatacgggcgctgctcacccgtgtcccggtggatccggccagcagcgaggatgaagcctggctggctcagttcgacaacaaaagttttgcggaacagcagatgatggagtggcagctctggtttctcaacaaccagcggcaggcgattactaaactggaagaactgaaatga

SEQ ID NO: 216105 - DNA, 1995 bp, Klebsiella pneumoniae
atgctgcaacgcctgcggcaaatcagtatcagtagcagtctgcgcggggcatttctgacgggggcgctgcttacgctgattgtcagcagcgtaagcctctattcctggcatgaacaaagttcgcagatccgctattcgctggatgagtattttccgcgcatccatgcggcttttctgattgaagggaatctcaacctggtggtcgatcagctcaatgaatttctgctggcgccaaataccacggtacgactgcagctgcgcaaccagattatccagcatctggacaaaatagaacggctaagtcaggggttgtcgccggcagaacgccagcagttgggggtgatattgcaggacagccgcgcgctgctggcggaactggatcgcgtgctctacaacatgtttctggttcgtgaaaaggtgggagagcttgcggcgcggatcgactggctgcacgatgatttcaccaccgagctgaattcgctggtgcaggattttacctggcaacagggaacgctgctcgatcagattgaagcccgacagggggatgcgaggcagtatctgaaacgcgcccgggaagtgcagaatgaacagcaacaggtctataccctggctcgtattgaaaatcagatcgttgacgacctgcgcgacaggctcaatgaactgaaatccgggaatgatgacggcatgctggtggagacgcatatccgctatcttgaaaacctgaaaaaaacggcggatgaaaatatccgtgcgctggatgactggccgagcaccattaccctgcgacaaacgatagatgagctgctggaaattggcatggtgaaaaataatatgccggataccatgcgcgactatgttagcgcgcaaaaagcgctcgtggaagccagccggtccagagaagcgacgctggggcgcttcagaacgctgctggaagcccagcttggcagcagtcaccagcagatgcagatgtttaatcagcgtatggcgcagattgtccgggtcagcggcgggttaatcctggtggcgaccttgctggcgctgctgctggcatgggggctaaaccattattttattcgctcgcggctggtgaaacgctttaccgcgctgaatcaggcggtggtgcagattggtctgggccggaccgaggcgaccattccggtttacgggcgcgacgagctgggacgtattgccggtttgcttcgtcataccctgggtcagcttaatgcgcaaaaacagcagctggaacaggagattggcgagcgaaaagcgattgaggccgatctgcgcgccacgcaggacgagctgatccagaccgctaaactggcggtggtggggcagacgatgaccaccctggcgcatgagattaatcagccgctgaacgcgctgtcgatgtatctttttacggcgggaagggcgatcgaacagggacaggcggagcaggcgcggacgacgttaagcaaagcagaagggctgatcaaccgcattgacgcgattatccgctccctgcgccagtttacccgccgcgcagaactggaaacgccgctgcatccggtcgatttgcgtcagacgtttaccgtggcgtgggaactgctggcgatgcgtcataagcctcagcaggggacgctggtgataccggatgacactgtctggatcctgggggacgaagtgcgcgtccatcaggtgctggtgaacgtgctgtccaatgccctcgacgcctgcccgcacgccgcgcaaatcaccgtgagctggcaaatccagggcggaaggctgtgcgtgttgattgccgataacggccctggctggcctgcggccttactcccttcgctgttaaagccgttcactaccagtaaaaccgtggggctcggaatagggctttcgatatgtgtttcgctgatgacgcaaatggaaggggcgttgcgcttggcgtcgacgtttacacgcagtgcctgcgtggtgctggaattcaatttgacggatgtaaaagatgttgagtaa

SEQ ID NO: 216106 - DNA, 1251 bp, Klebsiella pneumoniae
atgttgagtaataactgttcgattctgctgattgacgatgatgccgatgtgctggatgcctatacgcagctgcttgagcaagcggggtatcatgtcagtgcctgtaataatccgtttgatgcgcgggagcaggtgccgaaagactggccaggcattgttttaagcgatgtctgtatgcccggctgctccggtatcgatttaatgacgttgtttcatcaggatgacgatctgctgccgattctgcttatcaccggtcacggcgatgtgccgatggcggtggaggcggtgaaaaaaggggcctgggatttcctgcaaaagccgatcgatccgggcaagctgctcacgctggtggacgccgcgctgcgtcagaggcaatcggttatcgcccgtcgccagtattgtcagcaaaaattacaggttgagcttattggccgcagccaatggacggttcggtatcgccagcgccttcagcagctggcagaaacggatattgcggtatggctttacggcgagccgggaaccggccgcatgaccggcgcgcgttacctgcaccagttaggacggcacgctgaaggtccgtttatcgcctgcgagctgactccggctaacgcccatacgcttaatgaactgatcgcccaggcccagggcgggacgctagtcttaagtcaccccgagcatctgactcacgagcaacagcatcagctggtacagctgcagagtcatgagaagcggccttttcgcctgattggtatcggtagcgcttcgctggtggagttggccgccagcagccagatagtggcggaactctattactgctttgcgatgacgcaaattggctgccagcctctgtcaaagcgacctgatgatatcgagccgctgtttcatcactatttgcaaaaaacctgtcaacggctgaatcatcccgtcccggaggtggatgctggtctgttgaaggggatgatgcgccgggtgtggccaaataacgttcgcgaactggcgaacgccgccgagctgtttgcagtaggggtattaccactcgcagaaacggttaatccgctgatgcacattggcgagccgacgccgctggatcagcgggttgaggacgtcgaacggcagatcatcaccgaagcgctgaatatccaccagggacgtattaatgaggtggcggagtatctgctgataccgcgtaaaaaactttatctcagaatgaagaagtatggtctgaataaagagcactacaaaggggtttag

SEQ ID NO: 216107 - DNA, 519 bp, Klebsiella pneumoniae
atgcgaatattgactgtagttgattatgatgagatgtggccgactttatttgagaacgaacgtactctgttgcagatgacgcttggtaaagtgatatcccggattcatcatattggtagcacctcggtgcctggattatcagctaagccagtaatagatatattaatcgaagttgctaatcttgaagaactggacagtctgaatcaggcaatggagggtgtaggatatactgtgcgtggtgaaaacggcattttaaatcgtaggtactttacaaaaggtggaaatcagcgtagtcatcatatccatgcgtttaccactggggatgctcaaatcataaaacacctggcattccgtgattaccttattaaacacaatgacgtagccattcagtacgctttaatgaaaaaaagcgcgatgttattatgtgaaaatgacagccaccgatacagcatttataaagcggatttcattcagaaacatcttcgtatggcgcttattgatgcgggtcacctgggctag

SEQ ID NO: 216108 - DNA, 987 bp, Klebsiella pneumoniae
atgaactatacgcatcttggccgcaccggcctgaaagtcagccgcctttgtctcggaaccatgaattttggtgacgtcaccgacgagaagaccagcgcccgcattctggatgaggcgcttgaggcgggtatcaatttcattgatacagcagacgtgtatggcactgaacaatctcccgatatccagcaaggctcggggctgtccgaggaaattattggtcgctggcttcagcagggtggccgccgtgaacgcatcgttctggcgacaaaagtctatcagcctatgggaccgggcccgaacgatcgccggctttctgcttaccatattcgcaaagcctgcgaggacagtttgcgacggcttaagaccgaccatattgacgtctatcagatgcatcacatcgatcgtcatacgccgtgggaagagatctggcaggccatggaactgcttgttcagcagggaaaggttctttatatcggtagcagcaatttcgcgggctgggacattgcgactgcgcagtcagtcgccacggcccgtcatttcctgggcctggtcgccgagcaaagtctttacaatctgactgcccgaactgttgagctggaggtcattcccgcatgccgccattttggcctggggttgatcccctggagcccgcttgccggagggctgcttggcggcgtactgaaaaagatggcaagcgggcgccgtgcaaggcccgcgtttgcccgccaaattgaacagtatcgtccgcagctggaagcctatgaaggattatgtgaggacctcggcgaaaccccctccgatgtggccctggcctggctcctgcagaatcctgtcgttaccgctccactgattgggcctcgtacggtcgaacaactccagcaggcgcttcacgcaacgacagtcacgctatcagatgacaccatgagctgtcttgacgaaatctggccaggtcccgggggagaagcgcctcaggcttacgcctggtaa

SEQ ID NO: 216109 - DNA, 453 bp, Klebsiella pneumoniae
atgcatattcgtgcttaccgcgacagcgatttgccactgctctgccagatctttctgcgcgcggtgcgggaaaccgccagtcgggactataccccggggcagatcgcggcctgggcgcaggtggatgagacgcgctggcgacaaaagctggccgactcaatcggcctggtggccgtggtcaacagccagccggttggctttatcaccgccatcgggacgcatatcgatttgctgttcgtctcgccggatcgtgcccgccagggtatcggcggcgcgcttatcgaggcgctctgcgttcagtatccagcgcaaatcctgacggtggacgccagcattaccgcaaagccctgttttacggcccatggttttaaggtggtggctgagcaacgggtggcggcgcgcggggagtggtttattaattaccggatggaaaaacgcgtggcgctaaggtga

SEQ ID NO: 216110 - DNA, 522 bp, Klebsiella pneumoniae
atgcctaatgccatcagtcaggtccgccgcgagatcaaacataccggcagtatgaaggcgaaaatcgcgattctgctctatcgcctcgcgacgctgtatcgcagccgcaacccgttttacaagctgctcggcattccattcgttattctcaataaactgattaacgagtgtctgttttgcgtcgaactaccgtggcaaacgcggatcggctacgggctgaagctgtatcatccgcactgcatcgtcctcaaccgcggtaccgttatcggtgaaaactgtatcctgcgccagggagccaccatcggcagcctgacggatagcgaaggccgcgaaggggcaagcccggtgattggcaataacgtcgaattcggcgcccacgtggtggtcatcggcccggtgacgttgggtgataatgtcaaaattggcgcgggtaccgtggtgacgaaagatctggccgccggtcaggtagtggtcggccagccattccgggtgttgcatactcatcgcgagatgcaagaataa

SEQ ID NO: 216111 - DNA, 1416 bp, Klebsiella pneumoniae
atggcgatattgtctctgcccagagctagcctgtttcgctccctgcttttagccagcacgctggcgtcagcatccgttggcgcgcaaaccacggtcatcacccctcctcctttcgacggcctgctcaccaatccgggcatcggcgtcgccagctttcatgatggctatggtgaaaaaccgacccgcgccgagtatcccgataccggttttgaatacgatcgcttctactggagcgagctggaaccacaggaaggggtctataatttcgcgccgatcgataacgcttttagcatcgccgccagccatcagcctgccatgaacgtcggcctgagggtgatggcgctcgacgagccgcaaacgggatcgaaaattcccgactggctgatcgccaaagggatcaaaggccagtgggtcgccgacggcaaaaccttcgtgccggatctcagcgatgcaacttttatcgcctatgcgcagaaactgctgactgccctcggtcagcgctatgacggcaatccggaactggcctttatcgatatcggcatggtcggctcctggggcgaatggcacaactccaactttagcgacattccgccgttaatggagaagtacacgccggagcagctcaatcgctatgttgatatgcatttcgatagtttcccgaaaacgccgaaagtcatgctgattagcggaggcgattcgctggcgtgggccagccgccgcggcgcgggctggcgggcggactgctggggcgactggcataacttctccagcgagtggagccatatgcgcgatgattatccgcagcgtctggccgccgcccaggccgcagcgccaggttttgtcgatagctggaaacgggcgcccgtcagccttgagatctgcggctatatgagcgaatggcagagcgtacagcactacacgcgtgaagaagtgcaggccaccttcgactgggcgctgcagcaacacgccagcagcctgaacctgaaatcgcgaccgattccggcggaataccgcgatattgtcgataaagccttactgcaaatcggctaccgtttccgggtcaacaaactcgccttcgagacgccggttaaggctggtaagccgctagcggtcagtgtcacctggcgtaatgatggcgtcgccccggcttacctgttctacccggtacaatggcgcgtggtcaacgccgccggtgccacggttacccagttaaaaacccaggatgacgtgcgccgctggctgccgggagatatgcaaagcactgtcactctggcgctccccgcctcgctacccgccggcgattacgcgttgcagaccgccattaccgatgcccatggcaagccgcggctgctgctggctaaccaaggcaaaaccgccgacggctggtatcaactaaccaccttttcccttaagtaa

SEQ ID NO: 216112 - DNA, 414 bp, Klebsiella pneumoniae
gtgccgaaatctacagctgaactggtggtcgagcgcttctatgccgcgcttgaccaagaggtggaaacctcattaaccgcggagcagaaacgaggaatcgagcaggcgctggttcgcgccaacctggcgtcacgccatcgtatcgattttcgccacagctttccgttcctgcatcgccgctatttcgtggtatttcttttcggtcgggatctgcgcaaagtttcgcgcgagagcactctgtttgagcgcatcttcacgacccttcttattacgcttggcgtggtgttcgccctgctgtcgatcctgctagcgctctatatgttgaaatcagcattaggcattgatgtatttaaaaatttccacgtcggtatctggacgtggtttgttaatcttcatgaccacatgacaaagtga

SEQ ID NO: 216113 - DNA, 1101 bp, Klebsiella pneumoniae
atgaccatcaacgtcacggtattaggcactcgcgggatccccgatgtgcagggcggtgtcgaaacgcactgccagaatttatacccggaaatctatcgccagggcagcgcggaagtctgcgtgatcgcccgctcgccgtatgtgaactaccgccgcagtgaatatcagggcgttaaactcaagagcctgtgggcgccgaaaagccgtaaattcgaggccattattcactcgacgctggcggcattcagtaccttattcgacggctccaacgtggttcacgttcacgccgttggccccgggctggtggtgccgttgctgcgtttgctgggaaaacgcgtcgtctttacccatcacggcccggattacgatcggcagaaatggggccggatggccaaagagatgctgcgccttggcgaaaaatgggcagtgaaatatgccaatgaagtgatcgtcatttccgaggtcatcaataatctgattaagcacaagcatggccggcataacgcccatgttatctacaatggcgtgcgccaggtcgaattgccgcctgcggatcggcaggcggcgatccttgataaatacggtctaaaaccgggccagtatatcgttgccgtggcccgttttgtcgaagagaaagggctgcacgatctcattgccgcctatgccgccgccggatgttcggtaccgctggtgctcattggcgatgccgaccacgccgatgaatatagcgagcgcctgaagcagcaggccaccggtacgccaaatgtcatcctcaccggctttatcagcggcgcaccgctgcatacgctattctcgcaggccgggctattcgtgttgccctcttatcatgaaggattaccaatcgcgctgctggaagctatgtcgtggtcgcttccggtggtggtcagcgacattccagccaaccttgaaatcggcctgccgactgagaattacttccccgtaggcaacgttccggctctgacgcagaaacttcagcaatggatcaccggagaaaaagcgaattacagtgagtttatgccgaagtaccgctggccggaaattgccgcgcaaaccgcgcaagtctatcagcgcttaacgtaa

SEQ ID NO: 216114 - DNA, 1215 bp, Klebsiella pneumoniae
atgaaaattctcttcgttaacaaattcttctttatcaaaggcggcgcggaaaccgtttattttcaggagcgcgacgcgatgctgcaagccggctaccaggtcgtcgacttcagcatgcagcacgcggaaaataaaccgtcgccgtgggaagattttttcgtccataatatcgattatcacgacagtcatggcctgatgagcaaaatcaaagccggggtggactttatttataatgccgaggcctgcgccaggctcaacacccttttgttgcgcgagcggccggacattgttcattttcataacatttatcaccagcttacgcctgccgttatcggcgtggcgaaacgctttggctgcaaaacggtactcactgcccacgattacaaaatcgtctgcccttcctacaccatgctgcgcgatggtcatgtctgcgaagagtgtctgaccgggtcggtgatcaacgcttttcgtcaccgctgccagcagggcgatactttcaaaagcctgctgctgtcgctggaagcctactggcagaagttcgccaaaaattacgccatgctcgactgtattatcgccccgagcgagtttatgcgccaaactctgctgcgtaagctgcccgacgcccgtattgaggtgatcgtcaacggtatagatgccaacagcaccgtgcccggcgaaaccgcaggcgactattttctctatattggccgtctgagccgggaaaaaggcgtaccgacgcttgcgcaggcgcagcaaaaaatgcaggagacgatgccgcttaagattgtcggtgacggcccattaggcgcagacctgcgcgcgcgtttcagcggcccgcagttcctcggctatatgaaacatggagaggagctgaataaccttattcgcggggctcgcgcagtagtcgtcccctctgaatattatgaaaactgctccatgtcggtgctcgaagccatggcttttggccgcccggtgatcggcggcaatatcggcggtatcccggaacagatccgtgatggcgttgatggctatctggttgagcccggcaatagtgacgcgctggcacaactgatggacaaactggctgcagaccctgagttggcccgcagaatgggcattaacgcccgccagcgactggaagaaaaatacgatctcgcccgccacatgcaagtgctgcaggcgctttatcagcaacttgtcggggagaaaaaatga

SEQ ID NO: 216115 - DNA, 1026 bp, Klebsiella pneumoniae
atgaataaaacgccatccattaccgtcagcatcaagaccctgaacgaagcgcagggcatcgagaaaacgatcgatagcgtgcgcaaacagctgcaaccgtacccgcatcaaatcatcgtcgccgacagcttatcaacggataacacccgcgaactggctatcgcgaaaggcgcgatggtggtgtgtctggataacgccgccgaccgctgctgcggtatcggccaccagctgggctggctgtatagcgaaggcgattatctgctgctgctggatggcgatatggagctggagccgggctttctggataccgcggtcgaattcctcgaaacgcatccggagtacgccggagtcgccggcagcgtcgagatggatgatgcctctaactacgagttcaaatcgcgcaagcaacgcctgcatctgatctacccgcagggcgacaccgatcatctgggcggcggcggcctgtatcgtcgtgcagcgatcgagaaaatcggctatctgaccaacctcaacctgcacggctacgaagaagcggagctgggcattcgtttacaggccgcaggttacaagctgcatcgcctggcggcgccctactttagccacgcctcttacaccatgccgacctttaaaatgctggcctaccgttggaaaaacggtttcctgtgggcgccgggcgagttgctccgaaactgctggggtaaagcccatttcccggcggcgctgcggattgtacgtaatgagctgatcttcaccctctatcttctggtcttactgatctgcctgctgaccttcaatggcaaggttatcgccattgccctgctgccgctgctggcgtttatcgctctgaaggccattaaaaataaatcgctgcgcgatggcgtgcagagcgcgattaacttatcgctattttcagcggggctgctgcgcggggtgattaattcagtgcgcgatccgatgaaacgcccggcggtgaccgtctcgaatccacagcatattgatactgaaaatgaaaattctcttcgttaa

SEQ ID NO: 216116 - DNA, 1383 bp, Klebsiella pneumoniae
atgcagctaaacaccggccggtatctcgaagcctatgccctgatgacgctggtgttctgcggtacggtccagtatttcaccggtatcgcggccgtgctgtggctgccattttttctggtgctggtgatggcggtgctgctcctgatgcaaagccgcccgcagccgctggctctcaccgggcgggaaaagctaatactggcgctgtatctgacctttatcctactcgggctggtctcaacggtactacagtcaggggtcgtcaccgccatcgtcggctttaaaaacgagctggcgctatcgctgctgatgttctgcatgctgctgggcatgtttagtgaatcacagctgtaccgtctgacgcggcttttctactggatctactatgtgcagattccggtcgctatctatcaggtgattttcgtggtgcctaaacgggtggcgtttcgcggtgaagatgagaagtgggactccgtggtcggcactttcggcggcgacccgatgggcggcggcaacaccgcggcgatggggatgttctgtctgctgatcatgctcatgaaagtgtcggagtttaagcacggcatctgctcatttaaatcgctggtgatccacatcgcgctgggtttcttcctctgcgtggtgggggaagtaaaattcgtcattctgctgtcgccgttcctgctggcgctactgtggatcctgcccggctatgtgagcggcgtaagtaaagtcagcctgcgatcgctgctgatcatcgccgccggcatggcgctattaatttttatcgccattaccgtgctggcctccaactattcctcggccttcggcggcgacccgacgaaaagcgcactgtcggtatttatcgattcgctgggctatatttttgataccaactacattatgcccagcggtgaactgggacgttttaccaccgtcttcttctggctgcagcataacgaactgtttggtccgggcggcatgctgtttggttacggccttaacgccaccaacagcggcagtacggtctcaccgggctatatcggcacctggtatcacctgatcctcgattctaccgccttgagcatgctgctgtgggaagtggggattatcggcatcattctgttcattggcaccatcgcctccatcctggtcgccatgcggccgaaagagaccttttcgcgccacgatctcaagcttgaggatctgcaactccttagcgcggcaccggcgttctatgtttttgtcatcggctgtctgctcagcctgccctacagccagatcctgatgatcattcccatgctacagtttttattatggttatcccttggggcgctgattgtcatccaccgcgctgtccgtcttaactccggtacccactatgaataa

SEQ ID NO: 216117 - DNA, 1218 bp, Klebsiella pneumoniae
atgaatctgattaagagtatttcatccatcgccagttcatcggtgctttcgcagctgatcggcgccttttcggtctggcttatctctcatcgctacgggatggcggaggtcggccattacgcgatgatctacagcaatgtgttgatcggcgcgcaggtttgtacctttgcctctcagttgctaatcccccgccaggaggatcacgagcttgggcaaaacgtagtgttctgcctgctgcagagcctggtgatggccctcccctgggccgtcattaccgggcttatcttcgaacttaacattgcgtttctctatttgctgacttttggctatgcgctggtgctggtggcggaaaacctttccctgcgcggcggcaactatcctttcctgactttccagcgcattgcggtgtcgctggtggtggccattgcgctgctggtgatgcccaacccaacactgttttatctggcgtggatggtcgggatcctgctgctattgatcgcctgcctgattcgcctgtttaactttaaaagcttaacgctacgccacttttcgattgcgacgaatgtacgttttttacgcgagcactggcagcatatcagccgcgtcggcagcgccgaggtgctggcgatggccagtaataacctgccgacgatgctgattaacatctggttctcgccgctggtcgccggctacttttcggtggtcagccgtttctgcctgtcgccggtgatgattatcggtaacgccgtgcgcaactccatcttttctaaatggtcgatggattttcgtaaccgcacctttaactatccagaatataaaaaagttcgcctgctgctgctgggcgccgccgcggtgtgcatccttggtatctggattttctatccgctggtgatgcgcctgggctttagcgaggagtggctgaattcgatccccacctcgcgctacatgctgccttatctattcgccgcgctggcggtcagcccgctgacagtgatcgaactgatcttcggctcccgacgctacttcctgcgcattcagattgagcagttgctgattatcgtcatcgccttcatcgccttgccgtactttggcgtcagttatgaaatcgccctgctggccttctcgttcctgaccttcgcgcgttacttgttcattttgctcaaaatgaatcagcgggcgaaaacgctttcgctgcaggagcagaaaatatgcagctaa

SEQ ID NO: 216118 - DNA, 2088 bp, Klebsiella pneumoniae
atggcaatttcattggtcgaaaacgggaaaaagaaagaaggctttatcgacttcacgccttatttcaacaaaattaagcacaagcttgtctggtgcctggcggtagtgattgtcgccgcggtggcatcatttattctgacgcgttttatgtcttcgagctacacagcgacggccaccgtgctgtttaaagcacagtcgcaggacatctctcccctgccgcggctggaaaactacgactccacgcgcagcgattattacgagaccaagtacgcattaatgggttcacgggtggtgcttgatgccgcggtgcgcaaattaaagctgtatcaggacagcgaatttaacggcggtgataatctcgacgaagccacacgcatccacaatgccattcaggcgctggaaagaagcctgacaatttctggggtgcgtaccacccagctggtttccgtatcaatggaagccaaatcaccgcaaaaagccgctgatatcgccaacggcgtcgcccaggccttcattgactacagcctgcaacagaagcaaaacatcttgcttcaggcgcagggttggaatgaaaaaatgatggacgacctgaagagcaaaatggaacatcaaaaggcggacatcgaccactttctcaaagagaatggcctgctgaccttccgcagcatggatggttatgaaaccgaacgcctggggattgtgataaaccacctcgccgacgccacccagcgccgcctgaaagcccagacggtgtgggacaaagtccgccgccagcagggtaaaccggtagaacaaattatctcactgccggaaatctccggacatccgcagattcaggacttacgcattgcgctcatccagacccggcgtaatctctctgaagccgctaagcattacgggccacagcatccgaaatatctgcaagcccaggcgcagttgcaggccgttaacgtgcagctcggccaggtactgggcgagctgtttaacggcctgcgtcagcagtatcaaatcgctctcgacgatgagcagcactatcagaaaatgctcaacgatcagaaggctaatttccaggcgctcggcgccaagcgcgaccagtacaacaccatgaccaccgcgctgaacaaaaccgaagagttatataagtcgctgtaccagcgcgccaacgagcaaaaattgtcggagagcttctcagttccggatgaggtcatttacgacgctgcggtaccgccggatcggccgtctaaaccgcagcgcggcctgctaattatcatggttacgatgctggcgctggcgctctatatcatgtacctgatcgtcagcaccgcgctggataaaacggtgaatagcctcagcgagctgaaagcgaaaaccgccctcgatggcagcggtgaatttccgcagctgacgcatctggagaatgtcaggcagattttccataacgtgctgtatgccgatatgatccacagtctacgtctggcattacttaatcagcgcgataatcccgctaccattctggtcacctcggtacaatcccgttccggcagttcacttattgctgaacttctggcctggtccgccagcaaatcgcgtaaaacgctgctgattgacctcgactacctggccactcagggattatcggcgaaatttccgcaacataaacagggcttcagccaattactgaacggcgagtgcatgccggagcagtccgtcgtcaaactggatgataaactggactttatgccccgcggcaaactcagcgactcttctctgctgttgctcacctccgaacgcctgccggcgctgctggcaacgttgcatcagacttacgatacgctaatcatcgacgctccggcgctcagtcaggcgcaggatagtctgctgctggtagcacaaagcgatatgactctgctggtggtgaaggccggcgagctggccccacggatccgcaaagcagaacaacgtctgcagagtgcgggcaatagccgggtggcaaacgtgcttaaccaggtgcgcgaagaacatctggaaacgcaggaaggtaaacgccttatagagcgccagatgcacgaactcattgctccgaaatag

SEQ ID NO: 216119 - DNA, 555 bp, Klebsiella pneumoniae
atgatccttttcaacagaaaactggcgatgctttcgctgttggcgttgttgctggcgggttgttccactccgccgcagacgatcaaaacgccgccggacgcggtttatcttctggaccagggcgatgaagtgaatattgccgtctccggggaacaggatctcactatgcgggtaaaaatcgacaacagtggcagcattgattatccctacatcggttcgctgttgatgaagggcaaaactcccgaacaggtgagtaatgaaatcgccgataagctgcgcggtaactacctgcaggcaccgatggtcacggtgagcattgccgaataccgcaaagtttacctgctcggcgaagtgaaaaaaccggatggatatgcctgggagccaggtttaacggcggaaaaagccattgccctggctggcggtttcacagaccgcgctgaccgtcacgatattcaaattcgacaggcccgcggcggtaagctgctggaaaatgtcgccgccgactcctccgtgcaggctggagataccattattattggcatgagtttcttctga

SEQ ID NO: 216120 - DNA, 1287 bp, Klebsiella pneumoniae
atgcgttctaaagggatggctctgacggtgctgctttatatcccctgggtccatgcggacctgcaggggaaaccgcataccggtattgccggcatcgatttcgagagccaactgggttatgacattggttacaacgacaacgtgacctggcagcggtatgaccagaaaaaaataggctccagctaccagagcattaaaccgatcgtcaaagccatcggtgaacgctatgaagaccgctacctgctgatgtactccggcgattatcgcaactatgccaacgatagcgcggacaatcgtaataatcattttttcatgttcaatggtaaatggcgcttcggcagcatgcacgggctctcgctggaccttgatgagacgctgggtcacgaagaacgcggtcaggacacgaccgaaggttttttacctgagcagtttaaagagtttggtattaataaacctatcggcacccgttttttcaacagcgagctacgctacagctatggtgccccggagggacgcggcaaagttgaagtcgcgttgctgcataagcagttgcgctttcgcgacctcgaaagcattaaagccgccagcgacgactttgactactacatgcacgaccaggagtggaatgaaaacagcctggtggccgagctgttcgatcagaaagccaaaacgctgcgctaccgctatagctttatcaccaaccagcgccgttacgaactgaatccgctaaaagacagcaatgagtattatctgctgtttgggatgaaaaaccgattgtcgggcaaaaccgagattaatggtaacgttgcctggctgtacaaagactttatccataacccgaactcacagggtttcaacggtctgaactgggatatcactgccgactggaaaccgctggagcagatgaagtttaacttacacagttcccagcgcattaaagatcctaccgactccggcggctatatcctggtttctaatttcggcgttggctatgagcatcactggctggtggatcgattctcaaccctggtcgattattcatatatcactgaagactataagcatcagagcaataagcgcaaagaccagagcaatctactgtcactgacgcttaactacgatttccgaccatcgattaactttaagctgaagctgcaatggaacaccatgcactcgaataaagacacggacacattttatattggcccggactactcgcatgcggttgaccgcaccctgggctacgacgattcggccattatttttatgacgcaggtacagatatga

SEQ ID NO: 216121 - DNA, 1404 bp, Klebsiella pneumoniae
atgacggatagcaaaattaaaatatatagcactcgctatagtaacataatgaaattgcttgattttttctctgtaaacatctttatctatgtctaccttatcgttcttgatcttgtccccaccccttcgtctatattacttgggattatttattcattaatatttatacgtaccaatgagtattttcagctctattcggggcaaatgaaaggaagatacttatccactttcgctaaactgcttattagtgccagcgtggggggggtattatcttatctgttgatcgtcatcgctgaacaactggccagacgccctctgtcgcttcatcacctgacattagccaaaacaattgccctgtgctccgttgccgttttcatcagtatgtttctcatccgtgtcgtaaccagtcgctatttctttaagagcaaacgcagagtcgccattctggggataacgcctgcagggctggcgatccttcaggaactacataaagaattctcagctgagggtatcgatattcgtttcttcgaagaccgcaccgtgcaacgcgacagccgccttatcaatatcgagaagtcgggtaactcaagagatctactggcgctggcgaagaaaggcgaggtggatgaagtgtatattgcactaccgatggttgcccagcagcgtattcgccagttcctgaatgaattttccgataccacagtggatgtctttctggtacccgatctcttctcgtatagcgcacatatttcccagttacgcatgtttggcaacatccaaaccatcagtattttcacctcgccgtttgatggggaaggcgcggtactcaaacgtattgaagacatcattcttggcctcttttttaccttactcagcctgccggcgatgctgattgtggccatagggattaaactcacctcgccgggtcccgtgttgtttaaacaaaaccgctacggtctgaacggtaaacagatacaagtgtggaaatttcgaaccatgcgcgtgatggagaacagcgctgtagtcacgcaagccacgcgtaacgatccacgaatcaccaaattcggcgcttttttgcgtaaaacctcactggatgaactgccacaatttattaatgtcctgcagggacgaatgtctattgtcggcccacgtccgcatgccgtcgcacataatgagcaatatcgcgtactcgtcgaaaactacatgattcgtcataaggtgaagcctggtatcaccgggctggcgcaaatcaatggttttcgcggcgaaacggatacgcttgataagatggaaaaacgtatccagtttgatctgcaatatattcagtcgtggtcactgttactggatttaaaaattatttttctgactttcttccgtggttttgtgggcaaaaatgcgttctaa

SEQ ID NO: 216122 - DNA, 1401 bp, Klebsiella pneumoniae
atggggcaactgtcgcaatcacaggatttaggggcggggctgaagtcgcgccacgtcacgatgttatctatcgccggggtgatcggcgcgagtttatttgtcggctccagcgtcgccattgccgaggcaggcccggcggtgctgctggcctatttgtttgccgggctgctggtggtgatgattatgcgtatgctggccgaaatggcggtcgccacgccggataccggctccttttccacctacgccgataaagccatcggccgctgggcggggtataccatcggctggctgtactggtggttctgggtcctggttattccgctggaagccaatatcgcggcgattattctgcattcgtgggtgccgggcgtcccggtgtggttgttctccctggtcatcactctcgccctcaccggcagtaacctgctgagcgtcaagaactacggcgaattcgagttctggctggcgctgtgcaaagtgatcgctattctggcgtttatcgtactgggcgcggtcgccattaccggcttttacccctatgccgaagtgagcggcatttcgcggctgtgggatcacggcggctttatgcctaacggcttcggcgcggtgctgagcgcaatgctgatcaccatgttctcgtttatgggcgcggagatcgtcaccatcgccgccgccgaatcggataccccggataaacatatcgtgcgcgccaccaactcggtgatctggcgtatctctattttttatctgtgctcgatctttatcgtcgtcgccctcatcccatggaatatgccggggctgaagagcatcggctcctaccgctcggtgctcgagctgctgcatattccctatgccaagctgattatggacggcgtgatcctcctgtcggtcaccagctgtctgaactcggcgctgtataccgcctcgcggatgctctactccctgagccgtcgcggcgatgcgccggccattatgggccggaccaaccgcagcaaaacgccatacgtggcggtgctgctctccaccggcgcggcgttcctcaccgtagtggtgaactactatgcccccgccaaggtgtttaaatttctcatcgacagctctggcgccatcgccctgctggtctatctggtgatcgccgtttcacaactgcggatgcgcaaaatccttcaggcgcaaggcggtgagatccgtctcagaatgtggctctatccgtacctgacctggctggtgatcgcctttatcaccttcgtgctggtggtgatgctgtttcgtccggcgcagcagctggaggtgatctctaccggcctgttagctctgggaattatttgtacggtaccgattatgtcacgctggaaaaagctggtattgtggcaaaaactgccgctgcaaaatacgcgttaa

SEQ ID NO: 216123 - DNA, 1449 bp, Klebsiella pneumoniae
atgcaactcaacgatatgacactgtttcgccagcaggcgctgatcgatggccagtggcgcgatgcgcccaacggcgacgtgattgcggtcaccaacccggccaacggcgagcagctcggcagcgtgccgaaaatgggcgccgatgaaacccgcgaagcgattgaagccgccaatcgcgccctacccgcctggcgcgccctgaccgccaaagagcgggcgaacattctgcgccgctggttcgatctaatgatggagaaccaggacgatctcgctcgcctgatgaccctcgagcagggaaaaccgctggcggaagccaaaggcgaaatcagctacgccgcctcctttattgagtggttcgccgaagaaggtaagcgcatctacggcgacaccattccgggccaccaggccgacaagcgcctgctggtgattaagcagcccatcggcgttaccgccgccatcacgccgtggaacttcccggcggcgatgatcacccgcaaagcgggcccggcgttggccgccggctgcaccatggtcctgaaaccggccagccagacgccgttttccgcgctggcgctggccgaactggcgaatcgcgccgggatccccgccggagtgttcaacgtggtcaccggctccgccggcgcggtcggcggcgaactgaccagcaacccgctggtgcgcaagctctcctttaccggctctaccgagattggccgccagctgatggagcagtgcgcgaaagacatcaaaaaagtctccctggagctgggcggcaacgcgccgtttatcgtctttgacgatgccgacctcgataaagccgtcgagggggcgctggcgtcgaagttccgcaacgccggacagacctgcgtctgcgccaaccgcctgtacgtccaggacggggtgtatgaccgtttcgccgagaagctgcagcaggcggtggaaaaactgcgcattggcgacggcctgcaggacggcgtcaccaccggcccgctgatcgacgagaaagccgtggccaaagttgaagaacacattgccgatgccatcgccaaaggtgcgaaggtggtcaccggcggcaaaccgcacgccctgggcggcaacttcttccagccgaccatcctggtcaacgttcccgacagcgccaaagtggcgaaagaggagaccttcggcccgctggccccgctgttccgctttaaagatgaagccgacgtcattgcccaggccaacgataccgagttcggtctcgccgcctatttctacgcccgcgatctgagccgcgtcttccgcgtcggcgaagcgctggagtacggcatcatcggcatcaataccggcattatctccaccgaagtcgcgccgttcggcggcgttaaggcctccggcctcggccgcgaagggtcgaagtacggcatcgaagattacttagaaatcaaatatatgtgcattggcctttaa

SEQ ID NO: 216124 - DNA, 1269 bp, Klebsiella pneumoniae
atgtatgatttcgtgattatcggcggcggcatcatcggcatgtcgaccgccatgcagttaattgagatttacccggacgcccgcattgcgctgctggaaaaagaggccggcccggcctgccatcagactggccacaacagcggcgtgatccacgccggggtgtattacacgcccggcagcctcaaggcgcagttttgcctcgccggcaaccgcgccaccaaggccttttgcgagcagaacggcatccgctatgacgtctgcggcaaaatgctggtcgccacctcaccgctggagatggagcggatgcgcgccctgtgggatcgcaccgccgccaatggcctgcagcgcgagtggctaagcgccggggagctacgcgagcgcgaaccgaacattaccgggctcggcgggatcttcgtcccttccagtggcatcgtcagctaccgcgaagtggcggcggcaatggcgaagaacttcgaagcgaaaggcggaacgatcgtctacaacgccgaagtcagcgccctgaaagaatatgccagcggcgtggtgatccgcacccgccagggcggagaatatgaggcctcgacgctgatcgcctgttcgggcttgatggccgatcggctggtaaaaatgctcggcgtcgaccccgggtttatcatttgtccgttccgcggcgagtatttccagctggcgccgcagcacaaccagatcgtcaaccatttgatctatccgatccccgatccggcgatgccgttcctcggcgtccacctgacccgcatgatcgacggcagcgtcaccgtcggccccaacgccgtgctggctctgaagcgcgaaggctaccgcaagcgcgatatctcgctggccgataccctggagatcctcacctcgcccggcatccgccgggtactgcaaaacaacctgcgctccggactgggcgaaatgaagaattcgctgtgcagaagcggctatctgcggctggtgcaaaaatactgcccgagcctgacgctgagcgatttacgcccgtggccggccggcgtgcgggcgcaggccgtgtcgccgcagggcaagctgatcgacgattttctcttcgttaccaccgcgcgttcgatacatacctgcaatgcgccatcgccagcggccacctccgctatcccgatcggcgcgcatatcgtcagcaaggtgcagagcctgctggccagccagagcaatcccggacgcacgctgcgtgcggcacgtagcgtggagacactacacgccgcttttacccgttaa

SEQ ID NO: 216125 - DNA, 180 bp, Klebsiella pneumoniae
atgctgaccatctggggccgaaaaacctcctctaacgtgcaggcgctgatgtggtgtgttggcgagcttgggttggactatctccggttcgacgtggggcatcgctatggcggtaccgacagcgaggcgttttatcagctcaatcccaatcgtacggtaccagtgctgcaggatgactaa

SEQ ID NO: 216126 - DNA, 1263 bp, Klebsiella pneumoniae
atggatattatcaacagcattattagtctgggggcatcagtaatgatgccagtaatattctttattatcgcgctttgctttggcgttaaaatcggtacggcatttaaagcagggatgctggtaggcattggttttgaaggggtggggctggtgattggcctgctgctgacaaacctgggcccggcatcgcaggcgatggttgagcgtatcggcctgcagttaacggtcgttgataccggttggcctaccgcatcgaccattggctggggttcgccgctgatgctgcccgtcgtggtgggctttatcgtcatcaacctggccatgcttctgttgaaattaaccaaaacggtgaatatcgatatttttaactactggattttcctgatcatggggtctgtggtctatgccggaacgggaaattactggctttcggtcggtattacattcgctatttttgtgttgacgctattggcggcagatttaacggcgccgtatttacaaaaaaactataatcttaaagggatatcattcccccatcttacctgtatagcttacgtgccgtttggcattgcctgtaattacatcattgataagatcccgcttatcaataaaatcaatttcgacccggaaagtattaataaaaaattcggcgtttttggcgagcctcttaccctggggtttgtgctgggactgctgttggccttcctggctggatatgacgtttccgcggccgtttcactggccattaaggtttcagccgccatgctgctgctgcctaaaatgattgaaattctggtgcagggattgttgattgtccgtgatgccgctgaagcaaaactgaaggctaaattcccggggcgcgatttttacatcgggatggatacggcgttactgatcggtgaaccttcggtactggcgaccggtctgctgttaatccctatggctgtggtgctgtctatcattctgcccggcaaccgcgtactgccctttgtcgatctggcttccttaatgttcctgctggcaatggtcacgccgttctgtaaacgaaatatgttccgcatgttcataaccggaaccctgatcgtgacctgcatcctgtatgtcgggacggacatttcgcaagaatacactcaggcggcggtgaactcgcatattccggtgccggaagggatggccgagatcaccaatatcgtcggcggcgccacgacgcctgtcggctggctggccgtcaaatttggcgagttttttagcgccacaccttag

SEQ ID NO: 216127 - DNA, 1146 bp, Klebsiella pneumoniae
atgtctgtttgcgatcaattaggtgttaataatgactatattagagtaaatcaagtaatacaggactatatttcaagaagtaagtttggcactacaagcgaatatgatactatcctaagtgaacatatcaagaaattcatagaggaatataccgatgataatagagatatatcagactatattttctcgatccaagaagtaatcaaggctggaaaggacgttgataatagagtattagttccgttatattttgtaaagacaataagatctttatacgaaaaaggcggctctgcgaattataaagaagctgtacgattgactgatcagatactttcgaattcccaatacatgcattcgagtgttatcaatcatatattattcatgaagtgtcaatcactcgctagactacatgatagagagttttttaatgcggttagggatgtctccgagcctgaatattcgttcttacatggtttttattacaggatcacgcgacagcgtccaaaagcaattgagagttatatgcgagtattacgccaaaggccaagtgattatcgttcaaaaagtgaattggttttgttgtatttacaaaatgacgagcatgagcttgctttaggattagcaaaagaagtttatgaaagacagaaaaataatccgatcaatgctaataattacttgaattgcctgttttacaaagatgatgctaatattgagcccggtttggtagaggaaattcttgaacggttgcattcgaatcaggctcaacgtgctcaagagatgtattgctcagctaaggcgaaagctcttgcaaaatttgagaataaagttgaagaggcttttgaactcatagagaaaggaattgtggatttcccggatattaaatatccctttctgacactctgtgacttagcaattcagtatagaagaattgataagcttgaatatgctctagatattcttgaaagaacagactcaccaaaatctcaaacatatggaagttttatacgatttaaagctatatggttaactttgacttctagatttgatgatgctgtctgtatttgcaaaaatgagttaacagaacttacatatgcagaagtggagcagtttattgaaaagctaaagcagtaccaagtaaaggtttga

SEQ ID NO: 216128 - DNA, 483 bp, Klebsiella pneumoniae
atgcgccgagtaattttttttgtgttcatacttatcgtcatttctgtctgtctgttcttattttcaatagataataacgcctgggatccatttcgctgcagtacccatttgagtgctgacgttgcaaagaaaaatggcgacaggattgaattcaacataaatataaatgttgttgcatttcataaagaaaacagtgaagttatagtgaaaggtaccctgcaagataaagataaaagttacagcatatacaggaggatttttattcctcaaaaaccatcacctctaaaagattatagtgcaacagtgataacatgtgaaaagcgacatccaaaagataacgttcctgacatactttggcaaaattacgtattgccagaagtgcccggaattatgttctatatggaaataacacatttaaggaaaaacgctttgttttttaatggattagataaaccaatttttatttgtactatgcccgaatga

SEQ ID NO: 216129 - DNA, 798 bp, Klebsiella pneumoniae
atgaaatatataataaattttactatcactttcgatccggacagtagattattaaaacttagaaataaggaccaacttacgattgagttatccaagccagccactcgtttgttaatcgaactcataaaaaacaataaaaatgagatgacacgagagacgctcattaagcacgtctgggaggattacggattctctccctctagtgcaaccttaagcaaccatattagtgagttgagaaaagctttcgaagcacttgggataaataaagatattttgatcacggtgccgagggttggttttaaaatggaggctgaaattcatcctgaaactaaaaacaaagagctagatacatcaactgacggctttggaaaaaatgatattacggaagactcagcagtccagaaaaaaatgataaaaaagactgtgggagcatacggcaaaaaggaactgcatcgtgtgttgaaaccaattctgacgctcatttttatcttgctttcaataattactataataactatattaacccgcgagagaaatgaagaaccaaaaccattaggcacaatgaataaatgcaagatttatgcgttgggagatgactttccggaccctgaattgttttctcatgcgcgaataatgctctctgatatagagatagattgtactcaggaaaatcgtgacatcttctttatggagtcactttctgccaatggattacgaaagacttcttttatggtagtttgtacaaaaaattccgagatgaactataaaacctgtcaaaattataaacggattgattaa

SEQ ID NO: 216130 - DNA, 537 bp, Klebsiella pneumoniae
atgaaactgaataaaattgtgatggcattagttttggcatttagtactgtctctggcgcacaggcagcagaccagggtcatggtaaagttacctttacaggctctattattgatgctccttgttctattactccacaatctattgatcaaactgtggatttagggcagatctcaaaggaagctttactcagtggagggaaatctactcctcgtaatttctccattggcctggaaaactgttctttcggctcacctgcaactaaaaataaggttcaggttacctttacgggtatggagtctgcagctaagaatggtcttctggggattaccggaactgctaaaggtgccagtgttgccattactcaggcagatggtcaaatcatcaagctgggggtaccaactaaagagcaggtattacaggacggtaataacacgttaagttttgctgcttacttacaaggcgatggtgactcaactaacgttgttactgagggagaatttcaggcagtaactgatttcacactggcctataactaa

SEQ ID NO: 216131 - DNA, 537 bp, Klebsiella pneumoniae
atggggctgttcaacgctactttagtaatggtttcttacctgtttatctccctttttggggttgtcctggcaaaagaaaactctttcatattgggacgggtaaacatgcaaggagccattattgacactgcatgcactattagttttggaaatcaaaagcaaaccattgacatgggtatgttatccttgtctgaacttgttcgtcatggaacaagccgcagctggtttttctcaattaaattaactaactgcatgtctggatataataaatctgatagcttaaaaaaattcaatgttacttttgatggtgagcgtgatggaaaatcatttggtattaaaggtgatgccactggcgtggcactccaaattatcgatactcatgggaatgtaatagaaccagggaagtctatgccattaatagattccagtccagaatataatcaattggattatgccatcagattgattactgataggcagacattaaaatctggagttttctggtctcacattaaatttagacttgattatttttag

SEQ ID NO: 216132 - DNA, 2559 bp, Klebsiella pneumoniae
atggtgttttgttctcttggaaaaattgcgaatgtgcattcgttaggattatttatttttgtttcattaagtcctttagttatgaaggtttatgcaacagataatattcaatttaacacagatgtattggatgttcgcgaccgaaagaacattgatttgagccaattttcgcgaagtggttacatcatgcctggaacctacgacatggttgttcatatcaataagaatactctactggagcaagaaattcccttttatgagccggatgatgacccaaatggcagtcgcgcctgcataaatcccaaactggttgaacaacttggactgaaacccggggtactgaaagaccttgcttggtggcataaggggggatgcctggacaagagaagtgtgaagggaatggaaatacgaggcgatcttccaacgacctctctttacctgagtataccgcaggcatatttggaatacaccgacgagaactgggaccctccgtcacggtgggatgaaggcgttgcgggcttgttgctggattacaatctcaacgccagcagtcaacaccagcagagtgagggcagcaatacccaagctctcagtggtaatggaacagcgggaggaaatctaggcagttggcgttttcgagccgactggcaggccaatttagatcatagcaacggttcggaacagtcgacacaaaaacagttcgacttgagtcgttactacgcttaccgggcaataccgggtttgcactcaaagttgacactgggagaaaactaccttgactcgggaatgtttgacagttttcgctttaccggtgtgagtttgatttcagatgacaatatgctgccacctaacttgcgtggttatgctccggaagttacgggaatagcgaagactaatgcaaaagttattatcagtcagcaggggagagtgctttacgagacctcagtggcctcggggccgttccgcattcaggatattaacgaagctgtgagcggcgaactgaacgtccgggtggaagagcaggacggtggtgtgcaggagtttgtagtcaatactgcgaatatcccatacctgacgcggccaggctcggtgcgattcaaattaactatgggaaaaccatcagattggcaacatcatttacgcgatccgatgttcggtaccggcgaattatcctgggggatcagtaacggttggtctttgtatggtggaattctgaagggcggggattataacgctctatcactgggcatcggacgtgatcttatgttcctgggagcgctgtcatttgacgcaacacattcgcgtgttcgtctgcccagggaagatcttacgctcaatggggattcttatcgactgagttattcgaaaaacttcgacgagtacgatagccaggtaacttttgcaggttaccgcttttcagaacaagacttcatgaccatgagtgagtatctggacgcacgatcttatggtacacgcagcaatggcaatggcaaagagatgtacaccgtcaacttaaacaaacattttcgcaaattggaactcagtagctatatcaactttagccgagaaacctattgggaccggccaactacagaccgctataacattaccttatcacattattttgatttaggacggttccgtggtgtgagtatatcgttatcggcttatcgcaaccagtacaatggaaccgaagataatggggcttacgtatccatgtcaattccgtggagtgatagttcgacggttagctacaacgcgatggtcagccataacgacaatacccatcgggttggatattacgaccgtgttgacgaacacaacaactatcaattgagtgcagggaactccagcagaggagtgagcgtgagcggttattacagccatgaaggtgacatggcacgcatgagtgccaatgccagctaccaggatggtcgttacagtgccatcggtttaacaatgcagggcggactcactctcacttccgaaggcggtgcaatgcaccgctctggaatgatgggggggacgaggatgctaattgatactgaaggtgtgccggacgtaccggtccgtggctatggcagtaccagccgtaccaatgcctggggcaaggcggtaattagtgacgttaacagctattaccgaaacaaggcaagcattgatttgaaccagttgggtgacaacattgaagccactgtgtcggtggtacaggctacgctgactgaaggggcgattggttacagaaaatttgatgtaatttctggcgctaaagcgatggcagctataaagctggctgatggcagtgaaccaccgttcggtgcgactgttataaataagcgaaagcaggagacgggtatcgtcaatgatagtggaaacgtttatttaagcggtattaatgccggagaaaccatggtggtgcattggggaggctcagcacagtgtgaagtgaggatgcctgcacttctgcaaccagatatgttgatgaatacattgcgactattgtgtaagccgcttgatgggggcatacctggcgccgacgatattaagccggctgcgtga

SEQ ID NO: 216133 - DNA, 783 bp, Klebsiella pneumoniae
atgcagaacaatttacgaaacacgataattacttctcacagcagcaccttctcgagggcattgtttaccatcgcccttttcggagggatgatagtccagaatacgcaagcggccattgcgctggaccgcactcgagtgatttttgacggcagccagaagtcggtgagcttgaacgtcagcaaccagaataaacagttaccgtatttagcacagggctggattgaagatgagcagggcaataaaatccagagtccgctaacagtacttcctccggtgcaacgcatcgaaccgggtaagccgagccaggtaaaaatccagggaatgccagcgacaaaaaacctgccgcaagaccgtgagacagtctattacttcaacctgcgagaaatcccgccaaagagtaacaagccgaatacgctacaaattgcgttgcaaacgcgcatcaagctgttttaccgcccagcagctattgcgatggtcaaaaacgcaccgccaccgcaggagcaactgaccttgcgtaaggaaaacgacaagtatgtagtcatcaatccgacagcgtattacataactttggtagatgctgccactaaaaaagacggtttgggtatcaaaaacttcgagcctgtgatggtgccgccaaagagcagcctacctctacgggtgagcgtggcggagatgggtaatagtcctgtgctgacctacgttaatgattatggtggtcgaccacaactgaatttcagttgtactggcaacttatgtgcggtgaaggcagtgacgaaagcatga

SEQ ID NO: 216134 - DNA, 669 bp, Klebsiella pneumoniae
atggtcatgacctacaaggttggcataagccaacggaagatatgcggagggattgaactgaagtattactgcatatttgttaggggagtgctgatgatcccgatgatactgggagcaatggtgtttttactgttaccagtatatgccctgggacagggaaacggggatgttgaaggctccagcggtacactatttgtacatggggcgttgacagaaagcgcctgtcgactcgagatggcaagcgcgcatcaggatgtcctgctgggcgagattggaacaggtcgcttgcagaagataggctcccgtggagaacctgtctggattgaattgcatctggaagattgtctgcgcagtccggtcattggtcgcgataaacgtacaggcgctctcacctggtcagaagatcaaccagcagtaacggtgagtttccgagcaatgcgtgatgtcgataacccacaactggtgaaggtggagggagtctctggattgggtctacggcttgtagatgcgcagggagaagatgttcgtctgggaagcaaagggaaaccgcttttcctgaggccagaacaaaacaccctgagttattccgttataccggaacggacattagccaatcttaactcaggcagttatatggcggtagtggattttaatctgagttatgagtga

SEQ ID NO: 216135 - DNA, 498 bp, Klebsiella pneumoniae
atgcgagtgatcacgatacgacgtttggttgtttttgcgttgtgtagcgtattgagtggattgtcgactcaggcaactggagttcctaactccgcttttctggtgagggtcaatatcgtgagtcctccctgcatcatcaacaacaacgaggatattatcgttacgtttggagaaatgatggccactcgtgttgatggaaatcactaccgtgtgccggtgaattatacgctggactgcaaaaatacttcttcccgcgcaatgaagttgcagatgcagggttccagtacgagctttgacggtacattgctcggaaccgataatccggcgctgggcattaaaatactcaacgacgcgactccattatctgtcaatacctggatgaatttcacgtaccccgacaaacccgaactttgggctgtcccagtgaaacatagtggggtaactctctcgacgggagaattctttgcggttgccacattgaaaatagattaccagtaa

SEQ ID NO: 216136 - DNA, 405 bp, Klebsiella pneumoniae
atgttttcttatgcatcaataatgctcgagaaccacttcctgatattttcgatagtttgttctttccaccttgttaacatttactcgttcatcaaagttaatgtctattctatcgatatcactgatggtatacggctgcgatactatatgaatgcagagaaaggtcgcgtctccattatcatccatggcctatgccatcttcttagtccctgccaggccgcaggacagcagctggaactttatcgttctacttatgttatgctcatattactggtaatctattttcaatgtggcaaccgcaaagaattctcccgtcgagagagttaccccactatgtttcactgggacagcccaaagttcgggtttgtcggggtacgtgaaattcatccaggtattgacagataa

SEQ ID NO: 216137 - DNA, 798 bp, Klebsiella pneumoniae
atgaagtggatgactaagtatatattcagaggctggggagcagttctaacgtggggaatagcttgtggtgcgagtgctgaacttccggcatggttgagtacaagtgatataccaacattggctgaaccgatgaatgtgtcaccaccaaacgatattggactaacgcgtacgactcttgatgtttttacctgcagtgccgggaatatgagtgcaaatataataagaaccctatggcgaggtacagtaaagtatttgtacccgaaaaatggccctgctgctatcttaagctcgttgcatatattaacgagtcccatgtcgccgatgcagagaccgtattccgaaaattactgcaacggaagaagagacggggtttatgtcggcatctggataagcatcggagatactaatcctactaaggtcgggaccacctactgggctgagcaagtgcaagcagaacctgttcagtgctggattacggcatcaaatgttgatttaggggactttcaaccggggacacagtcacctgctattgctatcccaactaccctggtatgcgatggagatgcagatttatctgtcacaatacagtcactagaaggtaaagaaatactaaccttcagcccaggggttaccggactgatgactgtgggacgttcttctgtttcgaataccactaaattatctgtcaagcggtatgtatcagtagatcccttggcatcggtgcggttgaccgtactccctggggcaaaacccggtgcttacgaagcctatggcgtgatatatgttacggtgcaataa

SEQ ID NO: 216138 - DNA, 891 bp, Klebsiella pneumoniae
atggatatcatacctaaccgacctatatggaaaaaaatcattcactccatacatgatggtttttgggactcccttggctatccggctacattaagtcggcgagtccattatggcgttttgaaagctaaaaggccacatatacagaatacaatatggctacgttcggtcattaaatggcaaacatggctcaattacgaagaaaatcatatatgctatctgcatcctggtcataatggtgattacgatttgctccatcgccatatacctcagctggatggtctggtcagtaataccgtaataaaaaattatcggtgcgacatttccagtgtcggggggctaagttcgtctaataactctgatataaatattgccacactagatgatttcgcgttggaatttagccgggaattagctacaccgattagtgtcgaccaactcaggaaaaaccttgaccatcatagattacgactatataaaatgtttttcagccaatattcctggatgccaggtcgcctgtactggaacaatattgatggcattcaacactttactgccgtcaggtatttgtcgattcagttaggggttcctgttcaactgaaaggtgaactgaattcttttaatttaaatttaaagaaagtacagcaactgacagatgtgtgggatttatatttgttgcccgataaagaggtgtacggaatattactagactgtttgttgagagtgaaaattcccctcggtatatcaaatgctccagattgggaaaacggggaaaacacaaaatatcggattatctggctagaacgggataaaatcattccagcgcgtgtatcacgttttttgacacaggctggatttgcttcagttaatcagtatttattacagcaaaaataa

SEQ ID NO: 216139 - DNA, 549 bp, Klebsiella pneumoniae
atgttttacatagccactaataatcattatctttttgttggtttggattctttactgaagccctataaaagcaaaaaaattcgcacaattaaacgcaataatccaaaacatctaaattttagtgcaggtgatactatttttttcgatgatagtattgatgttgtttgtttattggaaggtatggtagtgaataacttatcattaaatataatttgcatgcattcttgtgagtcgcctgctaattttattataaaccctatagaaattttaagtaaagatttcacatcaatgaatattaaaaaatttacatttttaataaatgaaaaaaattgcggatattttaaaaaggtggtcctttcccctcgggaggtatgtgttttaaatttatcaataaaaggaactagcgtgaaaaacattgccaaaagattaggcttgcaaataaaaaccgtatatgctcacaggagtaatgcttgtaataaacttggggtggataaggcttgtaatttatttcattgcaggcttttaattaagatgatttatttggaataa

SEQ ID NO: 216140 - DNA, 327 bp, Klebsiella pneumoniae
atggccgagagcgatcagtgcccattaatacggatcagtttggatatggggaattttaagcttgttttgaacgtagcgtccttacagggtgagcgtcaccgctttgcggctccgatggttccatttggggaaaatttgtgcctcttgttcacgatcgtccgctttgtgctaagcagacaattcattaaattgcgcattgacaattttcaggccttgttatgcctaaacatgatcaaaaatcctgcgttacgtgaaaaaaacgctgcaacatatagctacagcatttcttttagtcttttttggggcggtatttatacgctaacttaa

SEQ ID NO: 216141 - DNA, 1182 bp, Klebsiella pneumoniae
atgaagttaaatgcgcggcaggtagatgctgctaaacccaaagagaaagcctacaagctggcagatggtgctggtttgtatcttgaggttgttccctctggctcacgatactggcggatgaaatatcgcttcaatggaaaagagaagcgtatggcttttggagtctatccagcagtgtcccttgcacaagcgagggcactgcgcgatgaagccaagaaaaaactggccgagggtatcgatccatcgtttgccaagaaagaagaaaagctggttcgggatgtgcggctccataatacatttcaggctgtggcgcttgaatggcacggaacaaaggtgagccgatggtcagagggttatgcctccgacattatcgaagctttcaataaagatattttcccctatatcggccagcagccggtgaatgaaatcaagccgctggttctgctgaatgtgctgcgtagaatggaaagccgtggcgcgacagaaaaggctaagaaggttcgccagcgctgcagtgaagtttttcgttatgccatcgttactggacgcgcggaatacaatcctgctgcagatctaaccagtgcgatgtcagggcatgaatcgaagcattatcccttccttaccgttgaggagttaccagacttctttaaagctctctctggctatacaggcagcccgttaattgttcttgccgcacgtttgctgatccttacgggagttcgtaccggcgagcttcgaggtgctttctggagtgagtttgatcttgaaaaagcggtgtgggaaattcccgcggagcgtatgaagatgaaacgccctcaccttgtccccctctcaacccaagcgctggagatcgtacagcagctcaaagtgatgtctgggcaatatcctcttgtgtttccagggaggaatgatccccgcaaaacgatgagcgaagcgagtattaatcaggtgtttaagcggattgggtatacggggaaggtaacggggcatggtttccgtcacaccatgagcacaatcttacatgaggaaggatttaatactgcgtggattgagacccaacttgcgcacgtggacaagaacgcgattcgtgggacgtataaccatgcgttgtatctggaagggaggaaagagatgatgcagtggtatggggattacgtggatagttgcgagagtaacaattaa

SEQ ID NO: 216142 - DNA, 1053 bp, Klebsiella pneumoniae
atgaaaaagagtactctggcattaatgatgatgggctttgtggcttcaacagcgacgcaggcagcggaagtttataataagaacgcgaacaagctggatgtgtacggcaagatcaaagccatgcactatttcagcgactatgacagcaaggatggcgatcagacctacgtgcgtttcggtattaaaggcgaaacgcagattaacgacgacctgaccggctatggccgttgggaatctgaattctccggtaacaaaaccgagagcgactccagccagaaaacccgtctggcgttcgccggcgtgaagctgaagaactacggctccttcgattacggtcgtaaccttggcgccctgtacgacgtggaagcctggaccgatatgttcccggaattcggcggcgattcctctgcccagaccgataactttatgaccaagcgcgccagcggcctggcgacctaccgcaacaccgacttcttcggtctggtggatggcctggatctgaccctgcagtaccagggtaaaaacgaaggccgtgaagcgaagaaacagaacggcgatggcgtcggcacctcgttaagctatgatttcggcggcagcgacttcgccgtcagcgcagcctacaccagctccgaccgtaccaacgatcagaacctgctggcccgcggccagggttcgaaagcggaagcctgggcgaccggcctgaaatatgacgccaacaatatctacctggcgaccatgtactctgaaacccgcaagatgaccccgatcagcggcggctttgccaacaaagcgcagaactttgaagcggtggcgcagtatcagttcgacttcggtctgcgtccgtccctcggctatgtgctgtcgaaagggaaggatatcgaaggggtggggagtgaagatctggttaactacatcgacgtgggcctgacctactacttcaacaaaaacatgaacgccttcgtggattacaaaatcaaccagctgaaaagcgataacaaactcggcatcaacgatgacgacatcgtcgcgctgggtatgacctaccagttctga

SEQ ID NO: 216143 - DNA, 1053 bp, Klebsiella pneumoniae
atgccgggtggcggctacgccttacccggcctactcgtccggctccgactgtctccaggcccggcaagcaacggcgccgccgggcgatggcatcaggcacggagctgcgtttataccggatggcggctgcgccttacccggcctactcgtccggctccgactgtctccaggcccggcaagcaacggcgccgccgggcgatggcatcaggcacggagctgcgtttatgccgggtggcggcttcgccttatccggcctactcgtccggctccgactgtctccaggcccggcaagcaacggcgccgccgggcgatggcatcaggcacggagctgcgtttatgccgggtggcggctacgccttacccggcctacaaccccaaatcaccgctggcgcaggggctgctgaaactgccggtgctggcggcctcaacatcgctgagacgttcccggaaggccggggcagcccgcatggatgcgggctgagggccgtgttttgcagggacgctgcctcggcccgacccgaagcctgcagggataagtcgaagggaccgcgcagcggcgatgttgctggccggagcccgggggtacagggggcggcggcgactggccgccccctgtgcgctcccagcgccatgactgccataacgcagacaattaaccgggagcgcaatcggcccggaagtaacatagaagctgtagccctgctaagcgcagcgcgggcagggacatttccggttgcgccgatatttcgccgggtggcggctggcgtcttacccggcctaccggggcctctcacaggctcacacctcgtaggcccggtaagcgcagcgccaccgggcgatgccatcaggcacggagccgctttattgccgggtggcggctgcgccttacccggcctactcgtccggctccgactgtctgtaggcccggtaagcgcagcgccaccgggcgatagcatcaggcacggagctgcgtttatgccgggtggcggctggcgccttacccgccctacagggtttatccggactgggacgactgaacccacaggcctgtag

SEQ ID NO: 216144 - DNA, 642 bp, Klebsiella pneumoniae; identical to SEQ ID NO: 210364

SEQ ID NO: 216145 - DNA, 963 bp, Klebsiella pneumoniae
atggctattttgtccattggatttgcttgtttcgatcagtttttctttctcaatgaatggccccaggagaataccaaaaacttttgtcatgattttattgaaagcggcggcggtccggcggccaatgcggcctggctgctgggattatggggcgaggaggtttattacattggtcatctgcagcaggacctttacggtcagcgcattatcgatgagtttgccgaggcgggggtggataccagccaggtggttttctctgatgacatgatcaccccgctggcctcggtgctggtcaatcgcttaacgggttcgcggacgattattacccgcaagatgcaaacgccgccttccctgacctacgagcaaaagctcaaactggacgacctcgccgagcgactgattgccagcgaggagccggtcaccattttaattgacggccatgaggcggaaatcagtgaatatttaattaagaaactgcccaacgccagggtcgtgatggacggcgggtcactgcgcgccagcaatattaaactggcggcctggactgactattttgtagtgagcgaacatttcgcccgcgattatatgagctatcgctcgctgagcaccgaagcagaaattaaagcggccctgattgagttgaataaaatttgccgcggtgaagcatttattacccttggcgaaaaaggctgcgcttttttaaaaagcggtatgctgcagatcgtcccgtcctggctgtgcaatgccgttgataccaccggcgccggggatgtatttcacggcgccttcacctatggcgtccattactcatggcatatcgataacattattttatttgccagcctgaccgccgccatttctattgagaaaaaaggggttcgggaatcgatgccggacctggcggtcgtccaccactcgttaaatagctacgagagaaacttaacgcaatattttgaagaataa

SEQ ID NO: 216146 - DNA, 1179 bp, Klebsiella pneumoniae
atgttaaacggcctgaaacccttatcccgttccctgcgctggggcatggtcggcggcgggggaaccagtcagatcggctacagccaccgctgtgcggcgctgcgtgacaatgtttataccctgctggccggcgcgcttgacgtcgatgccgagcgcgggcgcgcgttcggtgagcaactgggcatcgcgccggagcgctgctacgccgactaccagaccctgtttcgcgaagaggcgcagcgccctgacgggatcgaggtcgtctcggtcaccaccccgaacaatacccatttcgccatcaccaaagcggcgctggaggcgggactccacgttatctgcgaaaagccgctctgctttaccgccgaagaggcgcgcgagctggtggatctgagcaaaaaacagaacaaaatcgtcggcgtcacctacggctatgccggctatcagatgatccagcaggcgcggcagatgattgccgatggactgctcggcgagatccgcatcgttaacatgcaattcgcccacggcttccataaccaagccgtcgagctgcaggcagaatccacccgctggcgagtaacgccgaagtttgccgggcccagctatgtgcttggggatctggccacccatccgctgtttgtcgccgaaaccatggcgccgcagctcaatatcaaacggctgatgtgctcccgtcagagctttgttccctcccgcgcgccgctggaagataacgcctttgtcctgatggaatatgacaacggcgcggttggatccatgtggaccagcgcggtcaacagcggcgccatgcactcgcaaaaagtgcgcatcgtcggcgaaaaagcaagcatcgaatggtgggatgagcatcctaaccagctcagctatgaggtgcagggcgagccggcgcgcattctggaacgtggaatgccctacctgtcgccgaacgcgctggcggatgaccgcattggcggcggccatccggaagggctgttcgaagcctgggccaacctctatcgccgctatgcgcaggcgattgacgccacggaccgcgacgatcgcgccttcctgcaagacttctggtatccggacgtcgaagccgggctgcacggcgtctattgggtagagcagtgcgtcaaatcggctgacgctggcagccagtgggttgactttactttaccttaa

SEQ ID NO: 216147 - DNA, 726 bp, Klebsiella pneumoniae
gtgtcccgcgtcactctggccagcggccagcagctaatgtttcctcatctggtggagcgcgccaaacccggggtgatcgccgtcctgcccaacggcaaacgttttgttaacgaggccgactcttaccatgactttatcgccgccctgctggcggccacacccgcgggcgacacgccgcaggcctggctgctggccgatcgtcgcgcgctgcgtcgctacggcctgggccacgccagaccgttcccgttcacccccaccgcctggctgcgtaccggctatctgcagcgaggaaacaccctggcggagctggcgaagcagtgcgctatcgacgccaatgcgctggcggaaaccgttgaacgctttaaccacttcgccagcgctggcgaagacgtcgattttcaccgcggggcatcagcctataaccgcgcccagggtgaccatcaggtgacgctcggaccgctgcgcgaagggccgttctacgcggtgcgcattctgcccggctcgctgggcaccttcagcggattgcaaaccgacgaacacgcccgggtgctggatgaacagcagcagccgataccgggtctgtacgccatcggcaacgacatgtcgagcgtgatgcgcggctattaccccagcggagggatcaccctcgggcccgccatgaccttcggctatctggtgggtaaaaatctggcaaaaaaaacaaatacaaacaataacatagcttga

SEQ ID NO: 216148 - DNA, 1677 bp, Klebsiella pneumoniae
atgaagagctgggatgtgatcgtcatcggcagcggcgcggccggttttgccgccgcggtcaccgcctgctgtaaagggctgtcggtgctgatgctggagaaagccggccagttcggcggcacctcggccatctccggcggcgccgtgtggctgcacgataccgaccaggcgcgcgccgagggcaaaagcggtagcgccgaggcgatgaaaacctacctgcgaaccattatcggcgagggccagtaccgcgaagatcttgccgaagcgtttgtcagcgccgggcgggaggcgctggcctttctcgagcgtgagggggcagtaaagtacagcctgcgtccgctctcgcccgattactatccggatgaacccggcgcagtcgacgtcggtcgtgcgctggaggtggtggagtatgacggccgtgaactgggggacgcgtttcgcgacctgcgttcaccgccgccggggatgctgctgtttggcgggatgatggtcaaccgcgtcgatattcaacattttctcgacatgcgccgctcgctgcgctccctggcccattgcacccggctgctgctgcgctatgcccgcgaccgggtgaagtaccctcgcggtacccgcctggcgatgggcaatgcgctgattgcccgcatggcgactacggcgctgcgtaaaggcatgaacctgcggctgaatgtcaatgttctgacgctgtgcgaagcgcaaggcgcggtccgcggggtggagattgagtatcaggggcaaagagagacgctgcacgcccgacgcggggtggtgctggccgcaggcggcttcgccgcgggcgcgctggcggcgcgctatcggccacatacccgcgaacacttcaccatgtcgccgccggccaacgatggcgccgcgctgcatctcgcggcggcgcttaacgctcgcgagggagccgatcgggcctccaactttttctgggcgccggtatcggtgctgacccgggccgacggcagcgaggagcgcttcccccatctggtaaccgatcgcgcaaaaccgggcgtgattgccgtcaatcagcgggcggtacgcttcgtcaacgagtccagctcctatcaccatttcgccagcgcaatgcaggatgcagcggaaaatgccccctgttttttactctgcgacgcccaggtgatgaagcgttatggcctcggactggcgcgcccggcgccggtcaataatgacgccctggtcgctgctggctatctgcacaaagccgataccctggccgcgctggcgcaacagcttggtctggatacccaaaccctgagcgagacggtagcccgctacaaccgcgacgccgcgcagggcgtggatcgggaatttgctaaaggcggcaacagctataatcgggcgatgggcgatccgggccatcagcctgacgcctgtaatgcccccctgctcagcgcgccgttctatgccatcaaactttataccggcgatctggggacctcacggggcctggtcaccaccgccgatgcccaggtcgtcaataccgaaggacaccccatcccggggctgtacgcggtgggaaacgacatggattcgctgatggccggcacctatccgggccccggcatcaccctcggcccggggctgacgtttggctatctcgccgcctgccatctggcacaacactccacccactaa

SEQ ID NO: 216149 - DNA, 822 bp, Klebsiella pneumoniae
atggtcagtggaactacccaggttgtcgccgtgattggtcatccgatcgcccaggtgaaatcaccggataacttcaaccgctactttgccgaacagcacatggacagcgtcatgatcccggtggatatcgtcccggacgcggtggccgcctacctcaacgccctgcgcggctggcagaacatgaccggcgtgctggtgacggtaccgcataaacaacgcgccgccgcgctggtcgacgacctcacgccgcgcgcccgccgactcaacgccgtcaatgtgatccgcaagctggcggatggccgcctgcagggcgatatgctggacggcgtcggctttcagctcgccgccgaggcgcagggttttcagccggcaggtaagcaggcgctgctctccggttgcggcggcgtcggcagcgccatcgcctggggactgtgcgaggcggggatccgtcggctggccctgcacgatcaaaccccggccacccggcagcgcctgcatgaccttctggccgaggcctttccggcggtgcaactgagcgcgctgccagacaccctttacggcctcgatctactggttaatggctcaccggccggcatgaccggatttgatgagctgcctctaccgcaggcgctgctggatacgctcgacagcaccactcatgtggccgacgttgtcaccgccccggtgatgacgccgttgctcactttcgccgccgcacgtggttgcaaagtacagaccgggccggaaatggcgctggcgcagatgaggctgatgggccagtttatcggcgccatcccgcaggcgcagggagcggcggcatga

SEQ ID NO: 216150 - DNA, 759 bp, Klebsiella pneumoniae
atgcaaaacaccattcatccacgcgatctgatcgtcggtttacaaaaagggctggcgctaattcagcttttttccaaaacctgcccaaagctcaccgtcgcccagacggcgaaaatgagcggtctgacgcaaagcgccgcgcgacgttttctgctgacgctcctgcatgagcgctatctgcaaaccgacgggcgctattactggcttaccctgaagacgctgcggcttggccaggcctatgtcgattcggcgcagtttcctcgcatggtacggccgattgtcgaatacatcgccagccggaccgaagagcacgcctcggtgggggtggtggatgaagatgaactggtctatatcgcccgcagtcggcatacgccgttcaactctacgtcggtgcggcttggggagcgggtgcccattttctgtaccgccggggggcgactgtggctggcttcgctgccggaagcagagtgtgagaccgtcctgcagcgcataacccgggaacaacgtaccccctatacggtgaccgatatcgcgtcgctgatggagaaaatcgcccaggtacggcgccagggatacgccaccattgagcaggagtttgagattggcatgctggtgctggcggtgccgttaaccgacagggaagggacctggtggggggcgctgagtctgaccagtcatcaatcgcgcacttcgctggaagcgttatgccgcgatcacctcgatctgctctacagcgcgcaggcgatgctggtgggttaa

SEQ ID NO: 216151 - DNA, 660 bp, Klebsiella pneumoniae
atgcgcgtgaagtttgatgttggcgaaaaggtgggcatgctcacgctaattgagcctttcaccaaagatgaaaaaggggtttataagggtaaattttactgtgattgcggtagaactaaaattattcgcctttcttacgttaaaagtggtcacacaaaatcatgtgggtgcttgaaggttgaagcaaaaaagactcacggcttgtcgagttcttcagaatataaaatttgggatctcatgatacagagatgcgaaaaccctaacgataagagatacaaggattatggcgggcgaggaataacagtgtgccatcaatggcatgacttcagctcgttttacgctgatatgggctctcgtcctgaagggtttacgctggaccgcatcgataacgacaaggggtattcaccggaaaattgtcgttgggctacaccatctgaacagcagttgaacagaaggaaagtgaagggaagcaaatctcgatttgttggtgtaactaaacgtccatcaggtaggtggtcagcaaggataactgttaattataaaggcatctatcttggcgattacgatacagaagaagcggcttccgaggcttaccagaaagcaaaggaaaaggttcttgaagagtttgagctaatgcgcaaacagagggggatccagtga

SEQ ID NO: 216152 - DNA, 219 bp, Klebsiella pneumoniae
atgccagaaatcatcgatcaggccaacgagctggcagagcgcaggcttgaaatgaccatccagaatatgcgcatcaaccatgcggcagtctcggctactcactgccgcgactgcggggaagagatacccgagcggcgccgggaactgatggctggctgccagcgctgcgttagttgcgccagtgatatcgaactacggttgaaacaggagggcaaatga

SEQ ID NO: 216153 - DNA, 219 bp, Klebsiella pneumoniae
atgacgccagaagaaaagaaaaatgcgctcagaagcatcgcgcgcagggctaacgatgaggttaaggcaaaacggcggtcatcccctgctttaagttgcgacgagatatcacggccgatcctcaacggatgcatgccgctgataaggcagcttgggctaacgccaagccatctctatgtggagatcggcattttgaacggaaagataaaggagcgctga

SEQ ID NO: 216154 - DNA, 528 bp, Klebsiella pneumoniae
atgactgattacggcggatcgaaaactccaaaaaatgaacgtgactactggcaaacaccgattgaaattttcaacgcgctcgaccgcgagtttggcttctggctggatgctgcagcctctgagagtaacgcgctatgcgctcactatctcactgagctggatgactcgctgaacagcgaatggacgtcatatggggctatctggtgtaacccaccctattccgatattgggccgtgggtggaaaaggcagccgagcaatcccggcagcagtctcaggccgtagtgatgctgttacctgctgacatctctaccggctggtttatttcagccagacaatcagctgatgaactcagactcataaccggaggtcgcgttcagtttgttccggcatccgttacaggaaagcgcaagagcaaccctaaaggctcgctcctgtttatctggcgcccgtacatcaccccgcgacatatcatcacgaccgtatcgctggctgagttaaagcggatcgggaatctggaggcagcatga

SEQ ID NO: 216155 - DNA, 306 bp, Klebsiella pneumoniae
atgaataagcagagcatcacaccagagcaattccgcgccgtcgccggaaccatgcctgcctgtctcgcagcggatgcgctggggattagccaggcgaacttctaccgcctggcacagagctattccatcagcacagcgtttgtctacaagccatggaagccagaagagaagcagatcgccgctgaactgcgcgctgccggcgagtctcataaaagcatcgccatgaagatgggccgcagcattgcgtcggtatcaaagactttaagccgcatgagaaaggcagacacgaaaagaggtgcgcaatga

SEQ ID NO: 216156 - DNA, 483 bp, Klebsiella pneumoniae
atgacagctctttatcagatcgccaacgatttcgccaagctgactgactccggtatggagcctgaaatgatagccgacactctggatgggattgagtgggagctggaagcaaaagtggaacagattcttgctatctgcaaaaacgaatctgcttatgcggaagcgttaaaggaagagagtaagtgccttgccgaacgcgctaaagcagctgaaagcaaagtggcaagcatgaaggattatgtcgctaaatcccttgaaatggcaggcaaaaaatcacttaaagctggaattcatcaggttacggtcagggcgccatctaaatcagtagagattacggacgccagcatattgcctcctcaattcgtcgaatacgagacgaatatcaagcctgacaagctggccattaagcatcagatcgaggccgggttagatgtgccaggggcgcaaataaagctcggtaagccgtctctgattattaagtag

SEQ ID NO: 216157 - DNA, 915 bp, Klebsiella pneumoniae
atgagcttcgatcttattcaattcgttaagcagcaagagtcgctgtttaacggcgctcttactgaccagagcctgacgtgggcaaaagaatgccagtttgcgattcagttattccagcgcaatgacaagctggcgcaaacggcaatcagcaacccggtcagtgctcagaacgcgatcattaacgtagctgcggtcggtatcagcttaaatcctgcaagcaaactggcttatctcgtcccgcgtgacggaatggtatgcctcgatatcagctatatgggccttttgcatatagcccaatcagccggggtcattaagtggggtcagtgcaaactggttcatgcatgtgacgcttacgaaaccattggcctcgataaagctccggcccacaaatacaacccttttgccactcctgaagagcgcggagccgttatcggtggctactgcactgttaaaacatcagacggcgactatctgactgaagagatgagcctcgccgagattgaagaaatcagaaaggtaagcaaagccggcacatcaccaaaaggcccatgggtcaatttctggtctgagatggccagaaagacaatcgtgaagcgcgcctataaatactggccgcgcgctgaccggctcgataatgcagtagacatgctcaacgagagcgaaggcatttttaccgagccggttatgcaatacacgcctgaaagtgaagttatccagtcgaaagaaaatgctgagcaagagcttatcaactcagtccactcgctatgtgaagacatgaagcaggcagcaaacatgcatgctctcaaaacccattttcaggcggcatacaagatgactgctggaatgcggctgcagcaagaggttcaggctgtttacgccaagtgtaaagccaaattcgaagaggttacccaatga

SEQ ID NO: 216158 - DNA, 285 bp, Klebsiella pneumoniae
atgaacgcataccgcgcatacgacgtgatcgaagagcgtaagtgggccgagcaaacgctcaccgaagagaagcaaaagtgggttgacgatcgggcgcaggaaattatcgacgcgctgccgaaagagccgtcaggcctgttccgcttctctgtgccgatggacaaaagcccatacgaaggcctccgcagcgattccgccggagaggcatataacgatttcatttcggcagttgcttacgcccaggcggaatacgactgggatcaccgcacgggctgcccgttttaa

SEQ ID NO: 216159 - DNA, 195 bp, Klebsiella pneumoniae
atggctaactcaattcctaacaacggacgcgccgtgatgatgcgcaatcgccgcaccggcgccgcctggctggtcagcttcgactatcgcgacggcagctactggcatgagccgcagggaaatctgcgccacatccgccggccatacgcatcacgcaatatcgagccgaacctagttccagccgggacgcattaa

SEQ ID NO: 216160 - DNA, 204 bp, Klebsiella pneumoniae
atgtcgaatgaggatgagtttttcgcagagatgcacccgcagatagcgcaggttatcgggatagcggttatgcagctgctggttgagaagcgagagccatcaagagaggcgctgatagagatgattcaggtgctgtggcagggtgaccaggtagagctggcagtagagttggcactggacgtgctgatgctgagggaagagtag

SEQ ID NO: 216161 - DNA, 405 bp, Klebsiella pneumoniae
atgaaaattgaactcattaacaaaaaagttgaaagcctagttatgaccccattagagggcgcttcctctgggaaaaagacaatgaaggctactgtcacgttgaataacgaactgtattcaaatgtaaaagatgcaaagctttttagagttagatattttgcatacgtgaccattgaggaaaggcttaaaatggagattacttatgatttcgacttcaggtctgaagaagatttctcggatgacacagcaaagtcgccagaagtgaggtccttagtgccatcaatagcttacccatacattaagggctatgcagagcaaattattcacatgtcaaatcttggaagtttcaatcttccgtattttgattttttcactagtccgatggaaccgaacaatagtaaataa

SEQ ID NO: 216162 - DNA, 669 bp, Klebsiella pneumoniae
atgaatcgaactaactggcgcatcattaaaaatagtgaagaacatgctgcagctatggcaagactcattgaactggcatctggggacttgcagcccggcaccgaagattttgacgaactcgagctgcttggcctgctcatcgagcactatgagtcgcgagagtttcctatggataaacctgacccaatcgaggccataaagtttcgcatggatcagcaggggctctcatatgccgacatgaagcaatacattggctcagcatccaaagtttctgaggtgttaaatcgtaagcgcccattgagtctttcaatgatccgtagactgcatgacggacttggaattcctgcagatatcttaattcaagatatgagcgcaattgaatggagcctcgttgacgcagaggaagaagaaacaaccatgactagcgtcattgttcagtgtgagtccgccaccacatcctctgctccttatttcgctgaaaaggctacagaatcttacttttcaaaaatgttgtccagggctgtaaggggtgccgacaaatgcgaagaaaaacagaacgttatagttagtggtttttctttgataagtggcttgtcatcgagtttctcagcggctaacaacctgaacgatggaatgacttctgacgggaattattcattagtatcatga

SEQ ID NO: 216163 - DNA, 486 bp, Klebsiella pneumoniae
atgagagctgatggtgacgatgataagaagccatcacacataaatcatgatgtgttcagggtcgacattttggatctggccgtcagtgccggcccgggcattgtgaatcaggagttcgtggagattctccactccgttgaatatgcgacagcggaagcgcgccacatgttcgatgggcgtaaggctgagaacatccggatcatcaacgtccggggtgacagcatgtccggcacgattgagccgggtgatctgctgttcgtcgacatcagcgttaagagcttcgacggcgacgggatatacgcgttcctgtacgacgacactgctcacgtgaagcgcctgcagaagatgaaggacaagctgctggttatctcagataacaagagctatgcagcctgggacccgatcgagaaagacgagatgaacagggtgttcgtgttcggcaaggtgatcggcagcatgccgcagacgtacaggaagcatgggtaa

SEQ ID NO: 216164 - DNA, 222 bp, Klebsiella pneumoniae
atggagagttcaacgacacgcaacaaagtggaggctcgcaggatagaaagctggttacacagccagatagctgaactgggaaccacgaatatcgccaaagtggccggagtgaataagtcgacggtgagtcgctggcgggaaagtctgctgccgaacatgtcgctattgctggccatcctgatttctaacaggccgggagagaaaggtgactttgaagcatga

SEQ ID NO: 216165 - DNA, 207 bp, Klebsiella pneumoniae
atgagcaaccgcatccctaacttcggctggaatcgcctgaaactggcaaagctcacttatgcgcaactggctcaactggaagagcaagtgaaggccgagcacgcctgtaaaaacggtattcacctcttcgacaaagccggacagcgcaaactcgatgcccttagctgggccgtatacaacaagcagaaggcggagcgtgcagcatga

SEQ ID NO: 216166 - DNA, 567 bp, Klebsiella pneumoniae
atgacaactggtatcaccgaactggcgcagagcctgaaagcggcagcagatagagagatgatttgccgagatggcgccgaaacttctgaaatctgggaaagaactgtaacgccggaaaacatcctcgcgctggtagaggcgctggagaaggcgcagcaggagcgggacaactggcgtaccagctttgataacgagcggttccgcgctgataagctcaaagcgcacatcgatgagatgaccgaagaacgaaccgccagcatcaatgaattaagccggattatccagaaagaggtgaaagcgaaacgcgaagcggagaagcgcatcgccgaacttgaagcgcagaataccgtagccagtttgcccggcggcttcagcatagaagaatcccgcagccttcaagccgatttagtacgcagccatattagcaaagctttaagtggcgaaaaaatgaagtcagcagataaaaacgccgatttgcaatggattcatagcgtcattgtcagggcagcatggttcgtcaaggcatcggtagaagcaactgctggcatcaaggtggaggctgagtga

SEQ ID NO: 216167 - DNA, 1167 bp, Klebsiella pneumoniae
atggcggcctactacaacgagatagacccattcgcggcgcagtggctgcgtaacctcatagccgccgggcatattgcccctggcgtagttgacgaacggagtattgaagatgtcacacctgacgacctcagaggatttacccagtgccactttttcgccggtatcggcgtctggtcacatgctctgcgtttggccgggtggccggataacaaaccgatatggacaggaagttgcccatgccagcctttctccgcgactggcaaaggctctgggtttgatgacgacaggcatctgtggcctgcgtttggttggcttatcaagcagtgtcggcctgagcgcgtctttggcgagcaggttgcaggaggtcgtgcggacccatggttcgaccttgtacaaaatgacgtggaaagaatgggttacgccttcgggcttacgccgttcccggctgcgggtgtcgggtcgccgaacgagcgagagcgggcctactgggtggccgacgccaacctgcaatacgaatccacagccagaaacgaagcgcggactgcagaacctgtccggagcggtgaaattatctggctggcaaactccgctcgcgaacgacgcgacggggtcgacccattgctacagcggaaagaacccggacggtactcccaaagtctgcctgaaattaccgggaaccgttctactgacgggttgggtaactccaacgtcacgcgactggaaggattcggcgggaatgacggcgcagcgggacgggaaagagcgactggaccagatgccgcgccaggctttcatgacaggttggccaacaccgacgacgagcaacactcgatcggcattagtggatgcggccatgaacatgtatcgacaggacgggagcaagacccagcagcgtctgcaggacttcgcgggaattaccggccccttgaggttaacggtttttggcgagatgcggactggctcttttgtcgagatggaaaatggcgtccagttgaacccggcacattcccgctggttgatggggctgccgcacgaatgggacgagtcgagcccggggtggcaagagtggcaagcagcaaccgcgtcggcagactcaaaggctacggaaacgccataaacgctcaggcagctgctgaatttattcgttcttacatcgagattaattaa

SEQ ID NO: 216168 - DNA, 786 bp, Klebsiella pneumoniae
atgaccaataaccagttaacagaaaagcgtgcccgcctgcgcaaggcagcacaagactatcaatcgtcactgtcgtggtatcaagaaaatctcgatagtccaaacgctgaacaggattgtgatgagtcttcggcggcgtttaagcgcgaaatcggctatcgggaaatggatattattgctgatctgctggatgagatagacgatctgcaggagcggcgcaagccactgcaagacaaagacctgcagggcgtgatcgacgcactggagcatcctgcagggattaacacagcaggtaaacaggttgtgcgcctcgccatggtagagctacaggaacgccgcaaggccgaccgcgagccggtggcgcttcaacctgagctggcaaaagttatctatcacttccgtgactggaatgaaggatttccggttgagcggttcaaggccgactacgtcattagttggatgctggcaaattatccgccagcgcaaccagcaaaggaccgagagcaggtacgcagcgagcacgcagagtggtcacaggcaactttcggcaatgtcggcccggttggcccgctgaagcacctcagcaaagaagcactggaagccgctgccgagcctggcgacctgtcggagtgggctgatatgcagttcctgctgtgggacgcccagcgccgggctggtattacagatgagcagattactcaggcgatgatcgaaaagctggcggtaaacaaacagcgtgagtggccggagccgaaagacggagagccaagactgcatttgaaataa

SEQ ID NO: 216169 - DNA, 531 bp, Klebsiella pneumoniae
atggataacagtttcataacgaaagaattgggtgagcgtaacccatatcctaaagaactttatgaaatatctatgaagtttactatggcattttattattgcgaagatcatttcttttctaggcgttgcagtattcgccaaagtgatacatacagcaatcgcatcctgagtatagttgaagacgaatgcagcccagtgatcaccgagacttttaaatttttccaaggaagatacatggaaggggaaatggctcgacatcgattgtatgccttaaccatgcaagaggaagggggcgatcttactggattagctgaagctatttatagaaatttggaaaactctgatggagatattcatgcaatgttgtcagtgtgtttaaaggttattatcagattgcgacataatcttttacacgctaacaagtatgaagcaatgattggcgagcctgaagagcaaaagatattgatcaatagaggatatatgttgctgtcaagtctactattcgcaagaaatacaaagcttgctgtttga

SEQ ID NO: 216170 - DNA, 582 bp, Klebsiella pneumoniae
atgcttaaacgtactcagcgccggtgcaaaatctgccgggccaaattcaccccggcattcgaaaaccatcgttggtgctgccctgagcatggcgctgaatttgccatgcaggaactggagaagaagcgcgataagcaggctcaggcgaaagcgaagaaagagcgcgcagcctggcgcaaacgcaaagccgcagtgaagcctctccgacactgggaagacatgacccagcgcgtcgttaacgactatatccgcgagcgtgaccacgatctgccgtgcatcagctgcggcacgttcgaaacggttcagtgggaggccgggcattaccgatcccgcggtaaagcatctcacctgcgctacaacgaggacaacattcacaagcagtgccatcactgcaacgtgcagatgtcagggaaccagcagcagtaccgcgtcgctctggtagagaaaatcggcgctgagcgcgtcgaggcgctcgaaaacaacaacacccctcaccgatacaccatcgaagaactggaaggcatcaggcgccattacagcgcgctacgccgtgcgctcataaaacaacgggaggccgcatga

SEQ ID NO: 216171 - DNA, 141 bp, Klebsiella pneumoniae
atgagccgtgacgttatcgaacgcatccgcgaccgctggcaaaagctgcgtctatgccggcaccgtggcaccgtactggttgactaccgaattttgaagaatttcgtccgcatctatcaggcttcaggagagaaagcatga

SEQ ID NO: 216172 - DNA, 690 bp, Klebsiella pneumoniae
atgaatacccagtaccttgagtatgttcgccagcagctgatagtggccaccgcggatctgagcggtgcgacgaaaggacagttggttgcttttgcagagaacgcacaattcaccgctacggcgcgcagccggggaaggaagaaagtagccgatccggtaacaggccgcatggtaaacccatccagcccgccaatccccgggcagcagtcgcgcgcaaaaggttcatcaatcgctctcgttctgcccgttgagtactcgacggcaagctggcgccgggctctgctgtcgctggaagagcatcagaaagcctggctgctgtggaactacagcgacaatatccgctttgagtatcaggtagcgataacacagtgggcatgggaagaattccgtgatcaactcggcgctaagaaagtggccggcaagacgatgcagcggctgaagaaactgatatggctggcagcgcaggacgtgaaagcagagctggcgggtaagtatgtataccagcaccaggatcttgcagccctgtgtggcgttaaacctgataactggtgccataactacgctgattactggcggactatgtgcgccatttttaagcggcttgatagcgactctcttctctgtgccgtgagaacacgatcacaacaaaaagcgactttttcgcagcagggtcttgcaaaagtcaattaa

SEQ ID NO: 216173 - DNA, 225 bp, Klebsiella pneumoniae
atgtatcgcatggaaaagataaccactggtgctgcctatggcgcttcagccgggagcatccttaacggcatgctaaatgcctatagccccgagcagtggaatgccatcggcgtactggtgggcattgtcatcgccgtacttacgtatctgacgaatttgtatttcaagattcgcgaagacaaccgacgtagcaggagccgagatgaacccgacgctgaggaataa

SEQ ID NO: 216174 - DNA, 495 bp, Klebsiella pneumoniae
atgaacccgacgctgaggaataagctgattggtgcgatcgccggcggttcgggcgcgatcgcaattgcttctgtcatgcttggtaatgccgacggcctggaaggaaggcgttattacgcctatcaggatattgtcggcgtatggactgtttgtgatggccacactggagccgatattcgccgcggacatcgttacaccgacagggaatgcgataacctgctgaaggcggatctgcggaaggtggcaagcgccattgacccgctcatcaaagtccgcattcctgatcctacccgcgccgcgctttactcattcacctacaacgttggttcaggtgctttcgccagttccacgatgttgaagaaattgaatgctggagacgtgccgggcgcatgcaaggaactgcagcgctggacgtatgccggtggcaagcagtggaaggggctgatcaccaggcgcgagattgagcgtgaagtctgcgagtggggccagaaatga

SEQ ID NO: 216175 - DNA, 351 bp, Klebsiella pneumoniae
atgagccgattaaccgcaatcatcagcgctgtagtcatcctgctactttcctgctttttctcctggcgttctggctggaattctcacgctgaccatatcaacgccctcgcggcgaagaggaaagagaaagccgaaaagactatccagccagttgaggaaaaggccgctgccgctacagaagagggcaaggtcatctaccgaaccataacccgcgacgtggtgaaatatgtccagtctccgaatcgtactgtgtgccggtttgacgatgatgctgtgcagctgcgccagcgagctatcgacgctgccaacgccatccccggatttgatgacggcgccgtgcaaagcaagtga

SEQ ID NO: 216176 - DNA, 201 bp, Klebsiella pneumoniae; identical to SEQ ID NO: 194624

SEQ ID NO: 216177 - DNA, 1356 bp, Klebsiella pneumoniae
gtgaagctatccagcatccacgttaaatccctcgccatcaacgcctccaacatctcaacgacaaccatcaacggccaggagcattacgtcattcgtggtgcggttccgatcgtcgatgacattgttatgaatggcggcctgtacccggcggaggagattaacaacagctaccagacgatggaaggcaagctgatgcctcttccgcacccgatggtagatggcaaatatgtcagcgccaatgacccgcgggccattaacagctatcacgtcggagcctgggcgcagaacgtcagcaagtcaggcgaccaggtcgtcatggacgtttatatcaataaggcggtcgccgagacaaagcctgacggtaagcgtctgattaatcgcctcgatgagatgatcgctggcaccaacaccgacccgatccacctgtctaccggcttactcacgaacaaagagagaaagtcaggcgagtcgaagcagaagaagtactcatggatcgctcgcaatatgcagttcgaccatatcgctatcctgctcgatgagccgggcgccggcactccagaagaaggcgtcggcatgttcgtgaatgccgatggtcaggaaggcgaagtcgagactgcaagcctcgttgaagccgcaaatagcctcaaagatgggctgctgaacaaagtgaagttcttcctcacccataactcagatgcctcattcgatgaaatctaccagatgctgcgtgaagccattcgcgcaccgtcaggcagcgatgtttatcgctatgtcgtgaccgtatggcccgacaaattcattttcgaagagggcaataagctcttccagcaaaaatacctcatcgacgacagcacggtcacgctggtcggcgatccagtagaggtcgtgcgcaaacccactgagtacgaagtcaaaaccaacggagaaacaaacccgatgaaagagaagatgatcgccgcgctcaatgccgcaggcgttaaaaccgaggggctgaccgacgatcaggtctgggatgcctataaccagcaggtacagaagaaagcaggcgaccagccgggtactcagattaactctgacgcgattactgcggcagtaaatctggcaattaagccgctgactgacgagatcagcacgctgaaaactcagctgcaggccaacgctgaaaatgacctcaagaccaagcgtgaagcggtcaaagcgaaattcccgttcatgaccgaagcggcgatcaactcgctggccggcgaagcgctgaacgacatgtatgcgcagtgccagaccagcaccggtctgaacccggcattccaggggaatggcgctcagagtgaaatcctttctatggaggctcctgaataa

SEQ ID NO: 216178 - DNA, 462 bp, Klebsiella pneumoniae
atggctctcgcacctcgtttccataccgtaatcgcgggcccggcccgcaagaatgacccgcaggtcattgaagcaatcatggcggcagcagtgaagccaggctctctggtaatgctggatagcacagggaaactggctgttcacaatgtggccggtggtgcaggagtagccctggcgctccagcacaattatatcggcggcggtgatatccgcgatgcagtgccggccggtgatactggcgcggccatcatgtgcgaagacgatgtcgattaccacatgctggtaaaggctggcgaagtgttgctggaaaacgaaggtctggtttctgccggtgacggcacactggccaagtcgaccactccagccaccgaccaggtcctcttcttttcacgcgaaaaaatcaccgttggcgctgaagcccaactcgtgaaagttcgcaaatcagggaaagctaccgcatga

SEQ ID NO: 216179 - DNA, 1056 bp, Klebsiella pneumoniae
atgagcatgatcgtatttaacaaaaagctggttacagaacataaccagatcaagaaggcatggaatcagctgctgatgcagcgcgaatccttcaacgttaaccagaacaacatttccgcccagtacggcggcgcgctggaagttaaccaggctgcgctgatctctaaagactactggcgtgaagtggacaacatcaccactcgagtcttccgcaacgacgaaggcaacggcctgcttgatgacctgctcggtctcggtacgccgatctctatcggcaagacggctgcgctgtaccgcgtttccagtgacgctggcaaggttcatcgctcactgactggccatgttccggaagagctggataaagtcatctacgacgaagctggcgacccaatcccgattttcaacactggctacggccgtgaatggcgtgaatggaacggcatgcagtcggaaaacctcgacgcgatggctgacgatcaggaagcgcacgttgccgctatccgtgaagacatggctgactacatgctttatggtgacgggaaagtgaaggtgaagggttatgtcggtgctggtatcaccaaccacgccaacaccaaccaggtggatctgagtgcatctggtctgaatattgacctgaccacctctactcctgatgaatcagtggcattcttcaccggcccgttcgccaagcttctggatgataactacgtgcaggagaaggttaagttgtgggcgtctccggacatcatgcgcaacctgaaccgaccgtattccgatgccgcgggcttcaaagaaggcactgttctggaatacatcctgcgctatggtcgcatcgagtccttcaaccagacctttaagctgaccggtaaccacttcattgcgtacgttcgcaactcgcagtacatcaagacgcgcatcgccgcgccggtgggtactttcatgatcccgcgacagaatccgttcgataactacaacactctggtctggagtgcagttggtctgcagattaagcgtgatttcaacggtcgctctaaagtcttcaacgcacagggttaa

SEQ ID NO: 216180 - DNA, 267 bp, Klebsiella pneumoniae
atgaaaacgttaaaggtcgagaaaaccggctgctggggcatgattgatggcgtctttcagcaacttcctgttggccacgaattcgtcgcggcggacattcccgcagcctttgctgggcgcgtgtcggtagtgggagaagtggaagataaaaagctggaagtggctacgcctggtaatgatgctgcagagcaggcagagcaggcagagcaggcagagcaggcagagcagcaggaagaatctgccagcaaatcgaagaaggcgaaataa

SEQ ID NO: 216181 - DNA, 384 bp, Klebsiella pneumoniae; identical to SEQ ID NO: 192304

SEQ ID NO: 216182 - DNA, 546 bp, Klebsiella pneumoniae
atgaattcatcaaaacaaattgatgtcaattttctccatgaatgcttctcctatgacgccgacacggggaatatatattggaagttccgcccgagcagtcatttcaaaaatgagtcagcctgtcaaaactggaataacaggtacgcgggtaataaggctggtactgttgacgcgaaagggtatcgagttattaagctactaggaacgccacataaggcccatagaataatttgggcattatcgcacggccagtaccctgaaggttttatcgatcacatcaacggaatgactgatgacaatcggcttggcaacctccgcgtagtagattttgtcaccaatgcgcaaaactcgaaaaccgcaaaaaacaacacaagcggctctcaaggtgtttggctggataaagaaactggcaagtggagggcttccattgtccacttaggtaaaagagtcagccttgggtcgcatttgacgcgcgaagatgccgatgaggcgagaaagaaggctgagcgagattattgttaccatccaaatcacggccgaatgtaa

SEQ ID NO: 216183 - DNA, 699 bp, Klebsiella pneumoniae
atggcggtcctgaaagacataggagagctcggcataagcgatagtcgcgaaggcgggagggattatgtgttgcgcccatcattcgaagcgatggccaggcttggggagcctgaagaaatagtaaagatatatgcagtaattaacggagtcgatgcacagcaccttttttatggctgcatggaggttttctgtggcattcccaactggatgacaccggtactaaatagccttttagataaagtattgtccgcctcaatgctagttttgcaggcgtgctgcgaagatgatttgactggtgcgattggcgaatggtgtgagagggagggtaaaatagtgtacctgccgggcatcatgcccaaagaggatatcgttactctcgctaaagagttaatgctgcacggcattgtagggaacgccaaagtaaggcgcctacaacgacatgaagcaaaggaaactacaaccgagtttaatgcggctgagtacatcgcagccgctcagacccatttcaacattggcctgagagaagcttctcaactgacgatgacggccttccagttgctgctagcggcaaaatatcctgatcaaaaaggcttcactcgcgatgaatatgatgcgatcgccaacgaatatcttgccagacaggcaaccaggagagggaaagcaaaggcgatcagacaatcatcggcggctgaaagttag

SEQ ID NO: 216184 - DNA, 303 bp, Klebsiella pneumoniae
atgtcagacaaaccagtccgcgaatacgataaattcatgctccgctttccagatggtatgcgtgatgccatagccgagagggcaaagcgtaacggtagatccatgaactcggagataattcaaattattgaggatgtgcttaaaaccgataagaacaatgaaattgttattaatgaatcagatatcagcgaactttcacgtgtaaagccagaaacaatggaggcactggtcgatgctatcgagaaaaatgaacaattgataaaacagatgaaagcagtgctgaaaaaggcattccatggctga

SEQ ID NO: 216185 - DNA, 180 bp, Klebsiella pneumoniae
atgaaagtagcaatcgaaattaatggcgaggttatctggtaccgcgacagcgataaacaggagggggtggcgtcgttgggctacttgaaggacggcacacagcagaaaatcattgccgcccttgaggaggctttattccaggcgaaagggcagatgctattgcctgattacgttgattga

SEQ ID NO: 216186 - DNA, 267 bp, Klebsiella pneumoniae
atgtcttacacgcacagcagggattacatggagggcggatcaatcgtttccgttcagtgctcccaccaaatcaacgtccttgttatggatgacgctgcttataaccgatacaagagaggtgaaagctgcaaagtctatggcggattctataagcagtttcccgccaacattgcagtgccgcactccggtaactggaatgtcgttctggctctccctgccgggcatcgcgctacatacagatattcaatcaacgtaatcaggcaatag

SEQ ID NO: 216187 - DNA, 3204 bp, Klebsiella pneumoniae
atggcagaagtaccgttaccaactccaaccgacaacccggtgcccagcactgatatccgggacgcagtttatgctggcgccatgctggataaggttgtcaccagtaccgaaccgacatacatcgatcgtctcggcggagagcactacaccgtagatggaatgaaggtggaaggggataaagttgtcgaagagacgcggcagaacctgatccctctcagccggcagtatatgacactggctgcggcgcaggcggatatcgcgaatataccagtgaactccacaacctacgtgcgtagcccggacggaagcgcgctggctgacgagtacatgaatgtagctggcactctcacggctacaggtcgtaaaatgccatcgcagaccacagtcgatgccaatacctcagtaattacagggttggatcttgaccgtgtcgacgtctctcccgcttcgctaggaacggggcaatattatcagatctcaacagggactattgcgactactacggataccaactgggcggcgagcgcccccgtttcagtggctgggtataaacgcttaattttgtctggttcgtttttgtatcgtgctgccgtcgcaccgcttttgtttgttgactcggcagggaccgtgatttctgttcagagtctgggcattcccatgtcctcggataatgtctggtcatctcgttcagaagttcaggtcgatattcccgccgcagcagtcagcgctctgatatctacttatgccgaatcagctgtggctgtctatgcagccgcgcaggcgttccgggagtcaggcgttgcactgtcggccagtaaaacgaaaaaacgggttctgaactggatacccaacacatacatgaatattgcgactggcgttctgacatccagctcagacactttcgcggcagcccgtgtgccggtggcaccaggtgatgtattcacgctcagttgttcgctgaagggggcaccaaaccagattcgcctgctcggtttctttgacagtaacgagaccctcatcggtacgttctacccagggacagggagcggcacggtatccacgatcaccaacctgactttccgtgtgccaaaaaacacggcgtctatggtgatcaccgcgtattccccgaactcgtcaacggtgctgatgcaggcttccgtcttcgaccgtgcggcgcttgatatccagaccgctgctgacacagccggaaacctcgcgaagtcgtcagtgctgcctttctatagcgggcgttactggaaaaacaccaatggtgcattgaccgttgtgaacgacgcgcagttttgcgccttctacccagtacaggtaaccgccggtgatgtgtaccgcatcaagtctaacctgacgacggggaacccgtctctggtatcgatggtggttttcaagggcgccaacggtgagctggtaggcactgctcagcccgcgcccgggtccggggcctttgctgcagccgatatcacggtgaccgtcccttctggcgcggttcttatgcttttgactgcatacagcccatatatagacatcgtctatcagggtagcgctgtagaaaaaatcggatcgtcggtggcgggtatcgctgcaagttttactcagcaactcagcattaatttttcgaaagggtattactggaacccaacatccggcgccttaacgggcactaccgatcctaactggcgggcatttgacgctatacccgtttcgcctggtgagtcgtatcgtgtcattgcgactgagtttagcggtagcatttacgtcgtagttttcaaaaatgcgagtggtgcggtcgtaagcaagtctcagctcggccctggtgggtcttcgatcgtcgctgtcgatgtccccgttaccgtgccggctggcgctacgtccatgtgcgttacggcctatacggataacgtgaccatcacaaaaatggtcaactacaaggcagatttacggaaggatattattcagcgcgactttgataccgggttgcgtctgctttctcctaaagggctggacggctactactggcaccagactacaggcgtcaggacgctgattaccagcgactgggcttatttctcagttgacccaatcacggtatctcccggggaagtgtaccggataatctgtgctgagttttctggcaacccggcaaacgtatatctcgcgcttttcaaagactcctccggggccattgtgggacgcagctatgcaggacctggttccggcgtccttcaggctgttgataccaacgttaccgtgccggccagcgcggcaactatgtgtattaccggccacagcaggaatttgcagatcattaaatctggagggatgattagcaaacttccggggaactctcaaacccaggcgagcagcccgcttgactactggaaggggaaaaaaatagtctggctgggaacctcaattcctgcaggaagcggaacaaactcctacccgtatatgctggcccagcgcctgggggcgaacatagttaaccagtccgtcggctcatctcctattcgtggtggactggatgccttcgttaccactgacgatccatatggatggacgggaagctcatatacccgcgtcacgcgtgccttgtcgcattctgtcgatattaagcagtcatttatcgacaactacgattcgaaatggaaggcgttagtgacaggtggcccggcatccctgtcggatactgataaggcaaatatcctgagttattcctatgccaaccggctgtcgggtaacctggattcggacctgtttgttatcgatcacgggattaacgactatctgtggattcaggagcgagggggagatgtagcaagtctgctgacacccgcagtagatactcgcaacatcaacacgttctatggcggtgtgaacactgtcattgactacatcctgagccagaacccacgggcccgcattcttgttatcggcttttatgaaaatgagttgaggccgcaggtttcacagatacagttaaaatccgcgcagctgtgggagtatcagatcgtgaagctgtgggagaagacaggctggagccagcaggtattaaccgggacagatggcgcagggaagaccataacccagtactggatgccggacaatctgcaccctcactctgatacgacaggaaaggcaaacacattgctggctaacatactggaaatggaaatcagatcagttcgttaa

SEQ ID NO: 216188 - DNA, 444 bp, Klebsiella pneumoniae
atgcaactagatggcgaatggatttatgtttttatgagtggttcagacactgaacgatttaaagttggaaaaacgaaaaataacccactgattcgtcttaataatttgcgtacaggtgatcctacactggatttccgagttgcctatttcattccttcatctttaaattggcgtttatacggattagaaaagcacatacatgaccagcttgagaaaggtttccccagaattagtttttataatgacaaacgttctgaatggttcatgggtgatgcaatcgatatttggcgtgaaatggatatcattttcgaaaacttagaagttgatgttacagactacttcgaccctgaaggaacaaaagtcgtaagattttgggaagagaacctaaaatctatatatgggccggggttaccgctagatgatgacggttttccagttttttga

SEQ ID NO: 216189 - DNA, 1173 bp, Klebsiella pneumoniae
atgtcgagtacacctctcactgataatgcgctttcccggcccgccgggctggtggtgtccctgcgtttgctggcggcgatcgttatttttgccgctattgcgccgggtattctgatgaccgcgccggcggtggcggcgcagctggccagcgaatggcagctaaaacccgggcagatcggctggctgttctcagcggagctgggggcgatgagtctggcgacgctcccggcgtggtggtggatgagccgcctcgactggcggcgggtcgctctgatggccggggtggtgtttctgaccgccaacctcgcctcggcggtggtcacccagtacgagacgctgctggcggcgcgctttatcgcctcgctggcgggcggcacgttgatgattttgtgcatcagctgcgcggccggaacgccgaacccgtcgcgggtctacgccttctgggtgctcgggcaactgctgttagggatgcttggcctgctggcgctgcccggcctgttcgcgacctttggcctgaaggttgtgtatctgatcctcgccgccatcatgctctgctgtttgccgctggtatccgctttccctccgcgctttcaaccgctttcagtctcccgccagcagccgtcgacgacgctgtggcgtcaggcgctggcggtgctggcggtgctcactttctatatcagccttagcgccgtgtggacctttatcggcaccatcggcagcgcggcggggctgagcccgacgcaggtcggtctggtgctggcggcggcgacggtttgcggcattatcggcgccggcggcgcggccctgcgcggcacccggcgggccgatcgtttaccggtgtggctgggctacggcctgttgatcgtcagcgttgggctgctgatcggccagccgctgctggtgcgttacgccatcgcggcgctgctgtttaagttcacctggaccttcgtgctgccctttattctcgcccgcgtggccgggctcgataacagcggtcggctgatgaacagcatcaatctggtgatcggcggcggcatggcggctggcccggcgcttgcgggggccttactgcaacacttcgccagcgccgacccgctgctggcggcggcaggcgtctgcgcgctgctgtcactgattttaattgtggcggcatccgccgccgggaaggcttag

SEQ ID NO: 216190 - DNA, 1500 bp, Klebsiella pneumoniae
atgtttagtaacagactcgccagccatcttgagcgcggcgtcgtcggcttcccgaccaccctcgccagctccgtcgggctgatcatggccagcccggtgatcctgacggtcaccagcggcttcggcatgggcggcgataccttcgcgctggcggtgctgctggcctttattatgatgcaggcgcaggtcaccacctttgccgaggcggcgacgctcattcccaccaccggttcggtgtacgactatatctcctgcggcatgggccgcttcttcgctatcaccggcgcgctgtgcgcctatctgatcgtccatatcttcgccgggacggcggagacgatcctggcgggcattatggcgctggtgaacttcgagtcgattaacgcccagatggccgctcaccagaacacctggatggtgggcgtcggcatggtggtgattttcggcttgctcaacgccatcggcgtggaaatcttcggcaaggtcgaagtggtgctgaccttcggcatgtggaccacgctgaccattttcggcctgtgcggcatttttatggcgccggtgactcatctttccggctggttcggcacgccgctgaacgttagcgatatcaacggcctgttcggctatatcggcatggcgatgtttatgttcgtcggttgcgaactggtgacgccgatggcgccggagatcaaacaggcccaccgcaccataccgcgggcgatggcgctgggcctgctgggggtcgccagctgcatgtttatctacggcgcggcgatcaaccgccaggtggagaataccgtgctcgacgcggccaacaacgtccatctgctggatacaccgatggcgatcccggccttcgccgaacgggtgatgggccacgccggccagtactggctgggggtcgggctgctgttggccggctgcgccaccatcaatacgctgatggccgccgtgccgcgtattatctacggcatggcgctggacggcgcgctgccccgtttcctgacctggctgcatccgcgctttaagacaccggtgatcgccattgccatcggggtggcgatcccttgcctgcacgcctggtatctgaacggcgatctggaccgcatcgtgccgctgatcctcgccgcggtctgcgcctggggcgtcgcctatctgctggttactctgtcggtggtgatgctgcgcattcgccgcccggacctgccgcgcgcctaccgctcgccgtggttcccgctgccgcagattatctccagcgtcgggatcatcatcgctatcgtcaatatcacgccgcccgggatggacagccgccaggtgctggtgcctttcggcataatgctcggcctgaccgccgcttacgccctgttctggacggtgtgcgtgcagcgcgtcaatccgttcaagccgctggtagtggaagaggtggtggagcgcgccatcaacaattatgaaaaacagacccgcggggagatgacgccagatgtcctccgtcccctggtttga

SEQ ID NO: 216191 - DNA, 219 bp, Klebsiella pneumoniae
atgaccccgaaaaccggggccatccgtctggccacgttgcgcctgtttctgccggatggcggctgcgccttatccggcctacggtccgtgcggcctgcctttaatttattcaccatgctgactgaaactgccggtgttggcggcctcaaaccccccggtggcgctgccgcttaccggggctacagcgctgcgcgatttggtagcccggagaaggcgtaa

SEQ ID NO: 216192 - DNA, 513 bp, Klebsiella pneumoniae
atgaccggcctgcactactccgcgcaaaccggtcgcgtgtacgccgctaacggcagcggtgaaattctggtgatcaacccgcgtaaccaacgcattgaacagcgctggaagccgctgggcgacaagccggcgctgctgcttaatatggccgaagatagcgacaccggccgtctgttcgtgaccgacaactcgaaagcgaaaaccactctggtgctggatatccacagcggcaagctgcttaaacagctcgacgtcggcgattcgctggcggtgcagttcaataagaaacgccacgaaatttatatttcacagcgtgaatccggcaaggtcatcagccttgacgccagccgctacacgctgaagaaaagctgggcgctgccggccaatcccaacagcttgctgctttccgccgatggtcagacgctgtttgtcaccgtcaaacagcccttcaataaagaccactccactaaaggcccggacagcgtcgtacgtatcgacctgaacgcgcaataa

SEQ ID NO: 216193 - DNA, 1242 bp, Klebsiella pneumoniae; identical to SEQ ID NO: 137784

SEQ ID NO: 216194 - DNA, 1023 bp, Klebsiella pneumoniae
atgaaaacgattaagggaccgggcatttttctggcgcagtttatcgggccccaggcgccgttcaacaccctggcggggatagcgcagtgggccgccggcctggggtacaaggcattgcagatcccctgcaaccacccggcgatttttgatgtcgagcgggcggcggcgagccagacctactgcgacgaggtcagcggcatcctggcggagcatgggctggtgatcagcgagctgtccactcaccttgaaggacagctggtggcggtgcatccagcgtatgacgcggcgttagacgcctttgccccggcggcgctgcatggcgatccgcaggcgcgccagcgctgggcggtggagaaagtgcaccaggcggcggtagcctccggccgcctggggctgcaggcgcacgcgaccttttccggggcgctggcatggccctttttttatccgtggccgccgcacaatcagccgcttctggatgaggcctttgccgagctggcccggcgctggcggccgctgctggacctattcgacgagcagggagtcgatgtctgctatgagatccatcccggcgaagacctgcacgatggcgtgacctttgagcgttttcttacgctggtggataaccatccgcgctgcaatatgctctatgacccgagccacctgcatctgcagcagatggactacctgacctatatcgatatctatcatgcgcgtattaaagcgtttcacgtcaaggacgccgaatttcgccgcaacgggcgcaatggcgtctacggtggataccagccctggcagcagcgggccgggcgtttccgctctcccggcgacggacagatcgacttcaaaggggtgttcagtaagctgaccgaatatgattttgccggctgggcggtgctggagtgggagtgctgcctgaaggatagtgagaccggcgcgcgcgagggcagcgagtttatccgccgccatatcattcccgttgccggacgggccttcgatgactttgccgccggcgggagggaataa

SEQ ID NO: 216195 - DNA, 765 bp, Klebsiella pneumoniae
atggcaacgagcaacgtagtgtttatcaccggggcgacctcgggttttggcgaagcggcagcgcaggtgtttgccgacgcgggctggtcgctggtgctgagcgggcgccgctatccgcgactgaaggccttgcaggacagactcgccgccagggtgccggtgcatattattgagcttgacgttcgtgacagcgaggcggtggctgccgccgtggcgtcgctgcccgccgatttcgccgatatcaccaccctgatcaacaacgccgggctggcgctgtcgccgctgccggcgcaggaggtggcgctggaggactggaaaacgatgatcgacaccaacgtcaccggtctggtgacagtcactcacgccctgctgccgacgctgatccgccatggcgccggggcgagtattatcaatatcggctcgatcgccgggcagtggccctatcccggcagccatgtgtatggcgccagcaaggcgtttgtgaagcagttcagctataacctgcgctgcgatctgcttggcaccggcgtgcgggtcaccgatctggcgccggggattgccgagaccgaatttaccctggtgcgaaccaaaggcgaccaggcggcatcggataagctctatcgcggcaccacgccgctgagcgcgcgcgatatcgccgagcagatgttttatatcgccacgctgccggcgcatatgaacattaaccgggtggaggtgatgccggtgcgtcaggcgtggcagccgttcgctatcgaccgggattaa

SEQ ID NO: 216196 - DNA, 936 bp, Klebsiella pneumoniae
atgaaattacgtataacccttttaaccgctgctaccctgaccgccttctcctttgccgcgcacgccgcggagaaaggcaccattatgatcatggtcaactcgctggataacccgtattacgcctcggaagccaaaggtgccagcgaaaaagcgcaagctctcggctacaaaaccaccgtgctgtcccatggcgaagatgtcaaaaagcagaatgagcttatcgacaccgcgattggtaaaaaagtgcagggcattattctcgataacgctgactccaccgccagcgtcgccgccattgaaaaagccaaaaaagcgggcattccggtagtcttaattaaccgcgaaattccggttgatgatgtggcactggaacaaattacccacaataacttccaggccggctctgaggtcgccaacgtcttcgtcgagaaaatggcggagaaaggcaaatacgccgagctgacctgcaacctcgccgataataactgcgtcacccgttctaaatctttccatcaggtcattgaccagtatccggatatggtcagcgtggcgaaacaggatgccaaaggcaccctgatcgacggcaaacgcatcatggacagcattctgcaggcgcacccggacgtgaaaggcgtcatctgtggcaacgggccggtagcccttggcgcgattgcggcgctgaaagcggccaaccgtagcgatgtgattgtcgtcggcatcgacggcagcaacgatgagcgcgacgccgtgaaagccggcaccctgcaggcaaccgtgatgctgcaggcgcaggccatcgccgctcagggcgtcaccgatctggataactacctgcaaaaaggcgagaagccggcgaagcagcgcgtgatgttccgcggcattctgataactcaggataacgccgataaagtccaggatttcaacattaagtcctga

SEQ ID NO: 216197 - DNA, 630 bp, Klebsiella pneumoniae
atgcgccaccatcgcaccgttttgcctctggccggctataccatccagcagatcgacttcgacccggcgactttccagcctgaagatctgttctggctgccttatcacgccagcctgaccgggtggggccgcaagcggcaggcggagcacctggccggacgcatcgccgcggcatacgccctgcgcgaggtgggggagaaacggcttcccgccatcggcgaccagcgccagccgctgtggcccacgccctggttcggcagcataagtcattgcggccagcgcgcgctggcggtgatcgccgatcggccggtgggcgtcgatatcgagcgccggtttaccccacagctggccgcggagctggagagcagcattatcagcccggcggaaaaaacggcgctgctgcacagcggcctgcccttcccgctggcgctgacgctggcgttttcggcgaaagagagtgggtttaaggcgacgcctgcggcaaatcagcgcgcgctggggttcgccgattttcagatcgtggaaataacggcaagcaccttagcgcttatgtttgcggagcagcgctatctcttgcactggatagcgtcggaggagcaggtcattacactttgcgtattgcagcagtaa

SEQ ID NO: 216198 - DNA, 756 bp, Klebsiella pneumoniae
atggcggcgctggattttcgcggtcagaccgtgtgggtgaccggcgcaggtaaagggattggctatgccaccgcgctggctttcgtcgaggccggggctaacgtcaccgggttcgacctcgcctttgacggcgaaagctacccgtttgccaccgaaacgctggacgtcgccgatgccgaccaggtacgcgaggcatgcagccggctgttggcgaacaccgagcgtttagatgtgctggtgaacgccgccgggatcctgcgtatgggcgctaccgaccagctgagcgcggaagactggcagcagaccttcgcggtcaacgtcggcggggcgttcaacctgtttcagcagacgatggcccagttccgtcgccagcggggcggggcgatcgtcaccgtcgcctccgatgctgcgcacacgccgcgcatcggcatgagcgcctatggcgcctcgaaggcggcgctgaaaagcctggcgctgaccgtaggccttgagctggcgggcagcggggtgcgctgtaatctggtgtcgccgggctccaccgataccgatatgcagcgcaccctgtgggtcagcgacgatgcagagcagcagcggatccgcggcttcggcgagcagtttaagctcggcatcccgctgggtaaaatcgcccgcccgcaggagatcgccaataccattctgttcctcgcctcttctcacgccagccatatcaccctgcaggatatcgtggttgatggcggctcgacgctgggggcgtaa

SEQ ID NO: 216199 - DNA, 1338 bp, Klebsiella pneumoniae
atgaaactatcaatcggggaaaagatcggctttggtgctggcgatatggctatcgctatcgtcatgatgtcgatggcgatgattattacctatttctatacggacgtttacggcctgactcctggcgatttggggattctgctgattggcgtacgctttatcgatgcggtgatcgacccgttgattggcatgatgaccgacaaaacagagagtcgctggggaagataccgtccgtatctgctttttttctctatccccttcggaataaccatctggatgatgttcaccacgccaaactttgactacaccggcaagctaatctgggcctggggctcctacatcgcgctgacgctaacctatacgtttatctcaatcccttacgtttcactcatcggcgtcatcaccaacgatcctaaagaacgtctgagtgccaacagctatcgctttgtgatgaccaaaatcgccatgtttttagtcaccatcatcgtaccgatggcggcgctgtactttggcaaaaaaaacttggccagcggctaccagctggcgatgggctccatggggattgtgtcgacgctgttgtgtatttgctgtttcttcagcgtaaaagagcgcattacgcataaaaccgagcacatccactttccaactcagttcaagaatctgatgaagaatgaccagtggttgatcctcggcgtatcgatagcgttaatcatgtttggcggcatcgtacgtaactcggttgcggcttattacgccaagtactatctgcacggcggcaacgagctgatttcgccattcctgaccaccggcgtcgtggcgtccgttatggcgatgctgctggccgggaccattacccgctactacgacaaaatcaaaatgttccgttacacccagctgctgaccttcgtcgcaggagttgccatgtacttcgtcgttggcgagcagaacatttatctggcatttgttttctttttcatcattacgctattgggcgacatgcagcttccggtgtactgggcatcaattgcggaagcagtggactatggtgaggtgaaaaccggtacccgcgtttccgggctagcgtttggtgggatcctcttcttccagaagctagggatggggctggcaggtggctttatgggcttttcgctgagcttcttcggctaccaggcggacgtcaagcagtcgccgtcatcgctgctgggcattacgttgatgatgacgcttatcccttccgtatttaacctgatagtcggcctgtttatgaaaaaatacgtgatcaacgataagtactacgaaggcatcaaacagcagctggcgcagggtgaaacggcgtaa

SEQ ID NO: 216200 - DNA, 1080 bp, Klebsiella pneumoniae
atggcttcagttggatgtgattcggtggtttataacaaaattctgggagcgctggcgtgtgccggtatgggagatgcgcttggggcatcaacggagctgtacagtatcgatgagattaagcagaaatggggcggttggttagacaagtttgtagaaccgccggaagacacctttgctggctcattaaaaggcgttgctggtttaatcaccgatgattcaagccagatgtatgtttttgcggaagccctgattactgcggggtacgggcaatttaccaacgaaaactggaaaacagctttgctgcgctgggcagatatgatgccttacgccatgtacaaaggaccgacgacggaacaggtcgttaaagcgctgcgcgagggttacccgaccaacaccatcggtcgcattggcacctccacccgtcaggcgccgaacgtggggaccactaacggcgcgggaatgcgcgtggctcccgctggattgatctatccgggtcagctcactaaagcctgtgagctggcgctgctgacctgcttaccctcccatgatacgaatatcgctattgccagcgcctgtgcgattgccggagcgacatcccaggccatggtggttgataccacgctggatgaaattatcgccgccagtcttgaaggcgctcgctacggagaatcattagcgaaaaaacatgcacgttgcgttgccgggccttcaattgagatgcgtacccgactggcggtaaaaatcgcccgtgaagcggactctctggaaaaatgtctgtatgaaatcgaaggctatatcggtaattccgtggcagcgcatgaatctatcccggcagcgattggactgcttgccttctgtgaggggcgtccgtgggagaccatcgtcgccgcaagcaatgtcggtaacgacaccgacagtattgcgacgatggccggagcgattgcgggggcctggaagggattcgacgcattgccaaaagagcagtatgcgttttttaactccgttaatagccatgactttaatttaccagagatggcgactggcctgacaaagctggccatggaatcgctgaaaggttaa

SEQ ID NO: 216201 - DNA, 1023 bp, Klebsiella pneumoniae
atgagagcggatagggaagagaaggtcatcatgccattgttccacacccggcaagaaattgccgggatctccggtctgctttccgccatgcagcttctgcctgatagcctggcggcgctggcggatattgattttgcttcgctggaacggctgtacctggtgggctccggtgattcgtacgccattgcgctgatggttgaggagtatctgaatcgttgcgggacgattcagtgccgcgcggtacagtcattggcgtttctgggcatacccgtggagcgctttagcgccacttctctggtagttgtcatcagcgccagcggcagaccttctccggttcttgatgcgcttgcccatgcgctcacgacgaaagccagcgtagtagggatgaccaattcgccgggcagcccgtttgctaacctatcgtcgcgcatgctgtttaccctggcatctaaaaagggcatgccgacccaaagtagctcagcaacgctgtttttattaatgcgtctggtagaacggattcttcaggcgaaaacggccgtaccagagatgaagggggtggatatcccttgtttgtctcaggattgggagaacgcgcaatggcaggcgtggctggcggaatacgctgaggcattttcctcccggcgggtggtttttctgggcaacgggataacctggggaatggcgtatctggcgtcgaacctgatggcctgcgggccgcaaatcgaggccagttttttccctattgaagagtattgccacgcgttaaggctcaatcaggctaatcaacgacacctcgtgttgatgtttcctgaaaaaaatgaagaccagatattgtgcgcatctattcagcgccgtttaacccgccagggggcattgtcatattgttttgcgcctcctgagaattttagagtacacgattatttacagcgaaatatgctgctgcttttccaactctctttgaaactggcggagcgttacgtcgctatgggtggtgaacgcgtaacattcgaggatgtaaaatga

SEQ ID NO: 216202 - DNA, 927 bp, Klebsiella pneumoniae
atgattaaaaaatatgatgtcgttgcggtcggaagtggcaacattgatctggtctttcgggtgcccagattgcctggtaatgatgataaagtcgttggcaaaaaaatatccgaaaatgtgggcggtaccgtagcgaatagcgcctgtatgatgtcaacgctgggcttgaaggttgtctcgttatccagtgcgggcgacgatcgttatggtcaactgattgttgatgatttcaatcgtcacggtgttgatacccgctatatcaagatcaatcccggccaggatcctaatatggcgattattattctcgatgagagtggggaaaaatcgttaatttatgcgccgggagataattgtgagtgggatcagcagacggcttttaccgcgattgctgaaagtaaaattatgtacaccatgcctggcgaccttgaaaagtatacggttcaggcgcagtacgcacgttcgcagaataccctggtcgccgtcgacattgagccgcatattgccagtgataaagaacagctggcaaaaatactaaaccttgccgatattgctatttttaatcaggacggtttcaccgccagtagtcattgcgatcctgaatttccggtactgcatgcgttgcgtcggaaatattcgttatctgctttggtggtgacctgcggcgccgatggcgttatcgcggtcagcgcgcaggaagaggcgcgccattctggctttaagatcccggttattgataccaccggcgctggcgacacctttaacgcatcctttatttatacttacgctaatcattatagcctcgctccggcgattgagttcgccagcgccgcggctgcactaaatattatgcaaattggcgccagggggcatttagccagcattgaagaaatcacccattttatttcatccgcaaagggaagggagtag

SEQ ID NO: 216203 - DNA, 1134 bp, Klebsiella pneumoniae
gtgaatattaaaagtattttattatccggtactgcactttcaatcgtattgggcttttcaacaaacgtcgttgccagtgaatcagggcttaaatatattggcgaatatacaatacccacctcatttgcctggaagaatgtgccttttggcggactgtcagctattcgctggcatgaaggcgagcagcgcttttacgctatttctgacagcaggaatactccggcggaaggtaagccacgtttctataaattgaaaatagatctctcttcttctggcattaaagatgtcatcgttgaacagcagtacgatctgctggatgccgatggcgaagcgtttaaaaagggatttgttgacgctgaagggctggtcattacgccggaaaatcagctgctttggtcatctgaggccggaagtccgttacgaaaaagtacgctaaccggcaagttcgttgaagatctgagcgccattttccccgagggctattcggttgatagtaaaaaagaggatcccgaagggtttcgcagcggcatttcctgggaaggactttcgtttacgccggataaccactatttgtatgtagccgctgaaggggcattaaaacaagatgggccgctggcttcgccggtgaactctagtccagcgcggatcctgaagttccgctataacggcggtgataagaaaccccagctggaaaaatctttcctctacaacgttgaccctgtttcacatatttcaaagtttgctatcaacgataacggcgtgtcggaagtgttagcgcttaatgaaaataaactgctggtggttgagcgttccgggcgcaatgcctcggaagggtttaacgattgggatttcaccgtcaaggtgtggctggctgacactgcggcaagcacgaatatcaaagaaattaaatcgctggcgcaggttgagaagcggagcatcattcaacccgtggtaaagaagttgctcattgatttttctgatgtgacgaatgcaccggactgtatcgaaggcgtcaccttcggtccgatgattgatggtaaaaaaacgttaatatttgtctcggataataattttcagccgtatcaaaatacgaaattctatctattccaggatgtgaatgatgtactgaagtag

SEQ ID NO: 216204 - DNA, 765 bp, Klebsiella pneumoniae
atgtcaggcctgtcttccccttcaagcaatgattcacagtcattaaaatatctggatctgttcactatcattaaagaaaaaatcgataactatgaatggccagaaaatgaaaccattcccacagaacgcgagctagccgaacgttatcaaaccagccgtaccaccgtgcgtaaagctatcgaacatttacgccagaaaggctatctgcatagtgaacatggccgcggaacctttgttcttcctgagcttagccgccgttcccagcgccagcttcatgggttcaccgatgatatcctcgcgcgtaaaggaacgccaaagcagcagatccttgaatttggcttcgtttccgtcaatgaacctattcgtaatgcattacagctttccggtcacacccgcgttttgcgaattaagagagttcgtttcgacaacacgaccccaatgggcattcaaacaacctatctccctatcgatgaaaataatgcctttaccgaagaagagctgcttgaatttggttccctgtataagctactggcacaaaaaatgggacttgaactacttgaagcttatgaaacgattagcgctcgccaaccctcttccgctgaagcttcactgctcgaactctccgttcatgatgtcgttctgacctgcaccagagtcacgctatccgttaacagaaaaccgatggagtacgtcgaaatgatctatcctgccagccgttactcctacgaaattaaaatcactaaagacagcttcaaccacaaataa

SEQ ID NO: 216205 - DNA, 168 bp, Klebsiella pneumoniae
atgtctgaggtgtttattgcgcttttggtaggtattgtcaccgggcttatctttagcattttcaaacttccaatacctgcgccaccggtgctaccgggaattattggtattgttggcgtctatcttggcagtaagggttatcacgttattatgcaaattattagctaa

SEQ ID NO: 216206 - DNA, 1128 bp, Klebsiella pneumoniae
gtgttttcaataccaaaggtcattttgcatgaacatttggaaggatcggtgacggcaaatttagcggtgcacttatcacgaaaaaatgggatcgtaatttcagatgaatatattagacgttgtgcggttcctggtgattatgattatgcgtgggataaatcagactttgcacactttataaaaatttatgattttatttcatcattgattaaaacgccggaagattattatctggtgacggcggattttatctcacgcaatgcgcaagcaggcatgatctattgtgaactgcttatttcaccggaccatatgatgagggtcggcgatggcaacggtgagagcaattatcttgcctgtttgtatgaggtgactcgggcaataaaagacgctgaggaacaatatggtacgatcacacgcctgcatgttgttcttatcaggcatgatggaatagagcgagcggctgcggttgttgatctttttatgaaccatcctgacccttatattgttggcgttaatgttgccggccatgaaggtatgcatcgttttagtgactatgttccttctctcagcatgctctatcagcaaggtctgcgtggctccttacatgccggagagatctgtggtgctgaaagtgtcaaagaggctttagccgccggcgcttcacgtataggtcacggtattcgcgccattgagtgtccggagcttatcgcggaactcgtcgagcaagaggtattacttgaagtctcattaaccagtaaccatttgctgattaatgacatccaacaggggaatagtactcatccaataagagcgctttatgatagcggcgtgaggctaaatcttaatactgacgatgctggtatttgttcaacggatatattaaaagaatatcaatttgccattaatgcatttggttttcagcgtgcagaactgattgatatttcgatgatggctattgaagcctcatttgttgcaaaggatattcaaaaaaggcttctggaaaaaatatacacagcagttatcagtgatgatgttgatttttttgctattgcacagaagtccgttcattctccagcgcttcgcgcgagatttgccagaagatacgaacaacttacatcaaccagataa

SEQ ID NO: 216207 - DNA, 726 bp, Klebsiella pneumoniae
atgaaaaggataattccagttgcatccattgtattgaccggtctggcggcgcatagcgtttacgctgaacagccgcacggttttatcgattatcgtcacgaatatttagataagaaaagaacccatgctgaccgcgttgagttcgggaccttctttagtaacggtattgggttaatgggtgaactgcgctataacactcaggaaggaaataaggataaatgggatccttctcagtttaataacaacggttctggtctttctattgtgtatcggtttaagccgctggatgataaaaatttctggctggagccgatgttctggttagattctaccgaatactggactacctacgaatatggtttatccgctggatataacttcagcaaagaatggcgcgtttccggtcgtttccgttatgacatggataaagccaccagtaaatcaaaaggctatggtaacgatgaccgcaataaccggcgttacgacctgtgggttgattatcgcccgggtaatagtaatttccagtaccagctgaatcttgtttattataacaacggttatatcacatgggataatggtaacgaaaactataccgcctcatttaaagtcggttacaaatttggttcatgggtaccttacgtcagtattgccgattatcgtggtaccgataaaaccaccgatgaacgtcagggccgttatcgtatgggtttaacttatactttctaa

SEQ ID NO: 216208 - DNA, 876 bp, Klebsiella pneumoniae
atgattaaagtctaccggtacgctattgctttatctttattaagctatattcctctctctttggcggaggtgacaacggttgaatcagattcgtatgaaaccgtcgggaatattattaaaaagaaagacgctcgctatcatccagaaaatgtcttactggtctttgatatcgataatacggttctgacaggccagctcgaagtgggtagcgatatctggtatcaatggcaaaccaataaactaccgttgaaacccagccctgagcagaaggtttcctgtttgtatgaggactctattgcgctgctttataacatcggcactatgacgttaaccgaacccggactcgctgagcagatcaaatcatggcaggagaagcatagcgtttttgcgctgacctctcgtgcgcctgatacccgttatgctaccgagcgtgaactgaaaaagaatggcataaactttagcgtttcaccgcttaagctgctgaatgaaagcgatgcgcctctttatgaaggacggcttaaacgctcttatatttatggcaacggtattatgctgtcatccgggcaggataaaggtgtgattcttgatttcttactcgataaaacacagcgtaaatttaattctatagtatttgttgatgatagtatcgctaatatcaatgcaatgaagaatatgctggcgagcgataaatataaaaacgtcgattccgttctggttcattacacgaaagtggaatcagacctgattaagaagcagggcgcagtattaaccgctgaacaggcacagcggatgagcagcgagtggactaaactctccagcacgttgcagtcgattttcccggacagagtgcagagctgtcgttctgataagaaataa

SEQ ID NO: 216209 - DNA, 405 bp, Klebsiella pneumoniae
atgactattcagtacatcaaggatgaagaaggaaaagaccagtatgtcgtcattccttacagcgattactttcgtatgcgcctggctctgctggagtacgacgacgaggatgaaagcgactgggaagatattccttatgaatcagatatctatgatgacgtcatgctgccgggcgaagtatgcgacgtgatgcataaagaaaacgtcagcctgcaggccgcgtggcgcatcctgcgcgggatgtcccagcaggaggtagccgaaaagcttggcatcagccagtccgcggtgtcacagctggaagcgctggactcccgtccgcaaaagcgcacccgcgagaagctggcggcgatttacggctgtactcaggagcagatcagcctctatctgccgaaagaggggtaa

SEQ ID NO: 216210 - DNA, 744 bp, Klebsiella pneumoniae
atgcagatcgatttaacaggtaagaaggcgctggttaccggcgccagccgtgggttgggtcgcgccatcgcgctgtcgctggcgcgcgccggcgccgatgtggttattacgtatgaaaaatcggtcgataaagcccaggcggtcgccgatgaaataaaggccctgggtcggtacggcgaagcggtacaggccgacagcgccagcgcgcaggcgattcaggatgccgtcacccatgcggcccggtccctcggcgggctggacattctggtcaacaacgccggaatagcccgcggcggtccactggaatccatgacgctggcggacattgacgcgcttatcaacgtcaatatccgtggggtggtcatcgccacccaggaagcgctggtgcatatggccgatggcggacggatcatcaatatcggcagctgtctggctaaccgcgtggccatgccgggcatctcggtttacgccatgaccaagtccgccctcaacgccctgacccgtggcctggcgcgtgatttaggccctcgcgggatcaccgttaaccttgtccatccagggccgaccaacagcgatatgaacccggaagacggagaacaggcggaagcccagcgccagatgattgcggtcggtcactacggccagccggaagacatcgccgcggcggtcaccttcctcgccagcccggccgccgggcagatctccggtacggggctggacgtggatggcggattgaacgcctga

SEQ ID NO: 216211 - DNA, 1089 bp, Klebsiella pneumoniae
atgagcaacagcgatatccgcgtcgtgcccggcccggccaactatttctcccatcctggcagccttgcgcggctgagcgatttttttaacgccgaccagctctcgcgagcggtgtgggtctatggcgagcgcgctctggccggcgccgaaccttttctgccggcggccttccacctgccggaggcgaaaaagatccgctttaccggccactgcagcgaacgcgacgtggcggggctggtgcaggcctccggtgacgatcgggcggtagtgattggcgtcggcggcggcgcgctgctcgacagcgcgaaagtgctggcccgccgcctgggggtaccgctggtggccatcccgactatcgccgccacctgcgcggcgtggacgccgctgtcggtgtggtatagcgacgccggacaggccctgaattttgagatcttcgatgacgccaacttcctggtgctggtcgaaccgcgcattattctcaacgccccggcggagtacctgctggcgggcattggcgacaccttagccaaatggtatgaggccgtggtgctggcgccgcagccggaggcgctgccgctcaccgtgcggctggggattaacggcgcgcaggcgatccgcgatgtgctgctggccagcagcgaaacggcgctggcggaccagcgccgcggcgatctgacccaggcgtttcgcgatgtggtggaggcgattatcgccggtggcgggatggttggcgggctgggggaacgttacacccgggtcgccgccgcccatgcggtgcacaacggactgacggtgctgccgcagacggataaatttctccacggtaccaaagtggcctacggcattctggtacagagcgccctgcttggtcaggacgatgtgctggcgcagttagtgcaggcgtatcagcgctttaacctgccgaccaccctggcggcgctggaagtcgatatcaataaccgcgcagagctggaccgggtcattgcccataccctgcgcccgggcgagtcgattcactatttaccggtgacgttaacccctgaggttctgcgcgcggcgtttgagaaggtggaatacttcagccgttaa

SEQ ID NO: 216212 - DNA, 789 bp, Klebsiella pneumoniae
atgcgggtagcggcaggacaatttgccgtcacgccagtatggcggacgaatgcgcaaacctgtgtggcgatgatgcagcaggcggagcgagaaggggcggcgctgctggtgctgccggaggcgttgctggcgcgggatgacaacgacccggatctgtcagttaaatcggcccagccgctggatggcgcatttttgcagccgctgttggccgagagcaggcgtaacagcctgaccacggtcctgacgctccatgtgccgtcaggggaggggagagcgaccaacacgttggtggtgttacgggaaggcgcagtgatcgcccattatcataaacttcatctatatgacgccttcgcgatgcaggagtcccggcgggtggatcccggtcagcagatcccgccggtgattgaggtggcgggattacgcgttggcctgatgacctgctacgatcttcgctttccggaactggcgctttcgttggccctgaatggggcacagctgctggtgctgcccgctgcatgggtgaaagggccgcagaaagagcatcactgggcgacgctgctggcggcacgcgctctcgatactacctgctatatcgtggcggcaggcgaatgcggaacgcgcaatatcgggctgagccgcatcgtcgatccgctggggaccactctggcgggggccgggagcgagccgcagctgatctttgccgatctctcagcggatgaccttgcgcgcgttcgcgagcgtttgccagtgctgcggaaccgacgatttgcgccaccgcaattattatga

SEQ ID NO: 216213 - DNA, 663 bp, Klebsiella pneumoniae
atggaagctttcctcagcgcgctggatatcaccggtagcccgcaccagcagcgggtgatcactatcgccactacgccagcgatgggagcgctgctgatgcctggcctggccagcgcgctgaagccgacctttccgcagatcctgttgcacaatatcgccatcgtcgacgccgcgcggcagcttgaccagcgccaggtggatctgctcattgatacccacctgcacagcggccaggcgataagccatcatgtgctgtatcaggatcgggtacagatgtactgccgcgcagggcatcccgcgctggacggtccgcaggatgaaacgaccctcgcggagtacgaatttgcgctgctgctgccggaaggccagcgctaccccaccctccatcgccgactacaggaagagatgggcgagcgccgctgcggctttagcacctttaacctgatgacccaggcggcgatgatcgccgggagcgatatgctgggtctgaccaccgaacgcctgttcgccatggtgtcccgtctctggccgctgcagaccctggatttcccttccctcggtgaagagcagattgacgttgcgctgcactttaataagctgagcgggaaagagccattgctgaaagagatcatcgagacggtgatccgctcgtttaaggcgtag

SEQ ID NO: 216214 - DNA, 570 bp, Klebsiella pneumoniae
atgggcgcctctggcacccttcccgcacacgcccctggggtgactttcctcatccccgctttgtccggagagttgatatggaacttcgccagcggggcgatctctgatcggatcggtcgtcgtccggtgctgatgggcattaccgtgctggccctgctcaccacctggccggtgatgcactggctcaccgtcgcgcccgatttcacccgtatgacgctggtcctgctatggttctcgttcttctttggcatgcataacggcgcgatggtcgcggcgcttaccgaagtgatgccggtacacgtccgcaccgtgggcttttcgctggcctttagtctcgctactgccattttcggcgacctgacgccagctatttccaccgccctggtcgagctcaccggcgataaaagcccgccgggctggtggctaatgtgcgccgcgctgtgcggattcattgccaccgcgctactgttcgtgcggctgagccgcggctatcagccggcggagagtcagcgcaaaaaaacaaacgggcggagatatgccccgcccgtttgccgctgtcgtctgatttaa

SEQ ID NO: 216215 - DNA, 1017 bp, Klebsiella pneumoniae; identical to SEQ ID NO: 138177

SEQ ID NO: 216216 - DNA, 918 bp, Klebsiella pneumoniae
atgaataatctttgtattgatgtaaaaaatctcaataaacattttggcgagcatcacgtcgtaaaggatttctctttacaggtggcaaaaggcgagatctatggttttctcggtccgaacggtagcggaaaaacgacatcgattcgaatgatgtgtggtttgattacgccggatgccggtgaaggtacttgtttgggtatggatatctttacgcagcgggaaaaaataaaaaaaaagataggctacatgacccagtatttctcaatgtggggaaatttaactattcgggaaaacttactttttattgcgcggttatatagcctcgatcggcgtagagagcgggttgaacgtgcgctttctgagttaggcctcactgcccgacagcaccagctggctaaggagctttctgggggctggaagcaaagaatggccctcgccgcctgtatgttgcatgaacctgttttgctatttctggatgagccgactgctggcgtggatcccaaggcgcggcgagagttctggcaaatgctgcaccagctctctgaccgggggatctcgatactggtgagcacgcattatatggatgaggctgagcgctgccataaggttgcctatctctcatatggtcggctgctggcgaatggcactattgcgtcgattatagcctcccagaatttgatcaccatgcgaaccagcggcgccggtctgacgctgcttgaaagccagctacagcgcttgccggatattgagcaaacggtcatttttggcaatcagctttatattacatccagagatgaagcgaagttaaaatccgcgctttttgcctttacgcaacagggttatgagttctgtaaggtggataccaatctggaagatgcatttacctacttgatgaaaaataattgtgaaaaaaattaa

SEQ ID NO: 216217 - DNA, 864 bp, Klebsiella pneumoniae
atgatccgcagtatgaccgcctatgcccgccgtgaaatcaagggtgactggggtagcgccgcatgggagctgcgctcggtaaaccagcgctatctggaaacgtacttccgcctgccggagcagttccgtagtctagagcccgtggtacgcgagcgcattcgcgcccgcctgactcgcggtaaagtcgaatgcaccttgcgttttgaacaagatcccagcgctcagggtgaactcatcctcaacgaaaagctggctaaacagctggtaaacgctgccaactgggtgaaaatgcagagcgatgaaggggaaatcaacccggttgatatcctgcgctggccgggcgtgatggccgccaaagagcaggatctcgacgccatcgccgccgacattctggccgctcttgacggcgcgctggacgacttcatcgtcgcccgcgaaacggaaggccaggccctgaaagcgcttatcgagcagcggcttgaaggcgtgagcggcgaagtggcgaaagttcgcgctcatatgccggaaattctccagtggcagcgcgagcgcctggtcgccaagctggaagatgcggaagtacagctggaaaataaccgccttgagcaagagctggtgctgatggcgcagcgtatcgacgttgccgaagaactggaccgtctcgaagcgcacgttaaagagacctataacattctgaagaagaaagaagctgtgggtcgccgtctcgactttatgatgcaggagttcaaccgtgaatcgaacaccctggcgtcaaaatcgattaacgccgaggtgaccaactccgcgattgagctgaaggtactcatcgagcaaatgcgcgagcaaatccagaatatcgagtaa

SEQ ID NO: 216218 - DNA, 2319 bp, Klebsiella pneumoniae
atgaaaatcagtgatggaaactggctcattcaaccagggctcaacctgatccaacccgtacaggtttacgaggtggagcagcaggggaatgaaatggtggtctatgccgcgccgcgcgatgtccgcgaacgcgcctggcagctggatacgccattgttcaccctgcgctttttctcgccgcaggaagggataatcggcgtgcgcatggagcacttccagggcgcgctggataacggcccgcactatccgctgaacgtgcagaaagacgtccatgtcgaaatggaaaatacggccgggttcgccgagctgaaaagcggcagcctcagcgtgcgggtgactaaaggcgaattctgggcgctggattttctgcgcgacggcgtgcgtatcaccggtagccagctaaaaaacaacggctacgtgcaggatagtaagacccagcgcaactacatgtttgagcgcctcgacctcggcgtcggcgaaaccgtctacggcctcggcgagcgctttaccgccctggtgcgcaacggccagacggtagaaacctggaacgaagacggcggcaccagcaccgagcaatcctacaaaaatatcccgttctatctgaccaaccgcggctacggcgtgctggtcaaccatccgcagcgcgtctccttcgaggtgggctcggagaaagtctctaaagtccagttcagcgttgaaggcgaataccttgagtacttcgtgatcgacggcccgacgccgaaagcggtgcttaaccgctatacgcagttcaccggccgcccggcgctgccgccggcatggtcgtttggtctgtggctgacgacctcgttcaccaccaactatgacgaagcgacggtgaatagcttcatcgacggtatggctgagcgccatctgccgctgcacgtcttccacttcgactgtttctggatgaaggccttccagtggtgcgattttgaatgggatccgcagaccttcccggacccggaagggatgatcaagcgcctgaaggcgaaagggctgaaggtctgcgtgtggatcaacccgtacatcggtcagcgctcgccggtgttcaaggagctgaaagagaagggttatctgctgaagcgcccggacggttcgctgtggcagtgggataagtggcagccggggctggcgatttatgacttcaccaatccggaagcccgccagtggtatgccgacaaactaaaaggcctcgtggcgatgggggtcgattgcttcaagaccgactttggcgagcgtatcccgaccgacgtccagtggtttgatggttccgatccgcagaaaatgcacaaccactacgccttcatctataacgagctggtgtggaaggtgctgaaagagaccgtcggcgagcaggaggcggtgctgttcgcccgctccgcctcggtgggcgcgcagcagttcccggtgcactggggcggcgactgctacgccaactacgaatcgatggcggaaagcctgcgcggcgggctgtcgatcggcatgtccggcttcggtttctggagtcacgatatcggcggtttcgaaaacaccgcgccggcccacgtctacaagcgctggtgcgccttcggcctgctctccagccacagccggctgcacggcagcaaatcctatcgggtgccatgggcctacgatgacgagtcctgcgacgtggtgcgccacttcacgcagctgaaatgccgcatgatgccgtatctctatcgtcaggcggcgctggccaacgagtgcggcacgccgatgctgcgcgcgatgctgctcgagttcccggacgatccggcctgcgactatctcgaccgccagtatatgctgggcgattcggtcctggtggcgccggtgttctccgaggccggcgaagtgcagttttatctgccggaagggcactggacgcatctgtggcataacgatgaattgccgggtagccgctggcataagcagcatcacgatgcgctgagcctgccggtctacgttcgcgacaacaccctgctggcgctgggccacaatgaccagaagccggattacgcctggcatgagggcaccgccttccagctgttccaccttgaggatggacgcgaggcacgctgtgacgttccggcggcagacggctcgacgatcttcaccctgaaggccaggcgccagggtaacgccatcgccgtgagcggcgaaggcgaggcccgcggctggacgttatgtctgcgcaatatcccgcaggtcgcgggcgtgcagggcggtacgcagaccggtagcgaactgggcgtggtggtgagcgccgagggcaatacgctgacgattacgttgtaa

SEQ ID NO: 216219 - DNA, 795 bp, Klebsiella pneumoniae
atggcactgacagacatacaaatcaaacgagcaaagcctcaagacaagccatacaaattgaacgatgggcaaggcctgtcattgcttatcaatccggatggctcgaagggctggcgcttccgctttcgctttgccggaaaagcgcggttaatgtcatttggttgctatgaccttgtgagtctcgcggaaacacgtgagaaacgcgatacagctcgtaagcaggtagcaagcggcatagacccattagaagaacgtaaagcccaaaagctggcacagcaaatctcaatagagagctcattcgaagccatatgtcgagaatggcacgccaacaaagctgacggctggacagtggcctatcgcgaagaaatcataactggccgcgctgaatacaatcctgcgcctgatttagccatcgctctggccgttcctaagcaaaagcatcatccttttttatccgctgaagagctacctcattttattcgggatcttgagaagtataccggcagcatcatcactaaaaatgcgactaagattgttatgttaactggtgtaagaacgcaggaaatgcgttttgctacgtgggatgaagttgaccttaagaaagggatatgggaaatccctttagaaaggatgaaaatgcgcagacctcacattgttccgctatctgctcaggtgattgaccttttcaagcagctcaaacctattactggccattatccctacatttttattggtagaaataatcgtaataaacctatatcccaagaaatgtgtcacaggttattgaattactag

SEQ ID NO: 216220 - DNA, 642 bp, Klebsiella pneumoniae
atgaaagattttttggatagcctaagcaaatccgcctgggaaacatcatgcgcaagatacaatgcatcccgtaggttaaaggttagagagattttttcgactatcagtctcgctttaattggcctttccggtatcatactctcattaattcaatatttttggattacagatataaatcctaagctcaatatattaataactgcattttccattatcttaagcatgctattaataataattagtcttattgaatggggagtcgcatcaggagctaaatctgaggctctctttagaaatgctgagttgcttaatgagcatgaaaggaagatttctttattcaaaaactgcttaaaagaagaaataatggatgacgattacaaatatatagataatcttcgcgatgagtatgaaaaaataaaatcaacatgtactttcaaccatagccctgttgactacgagtatcataaaatagtaaaaagtagatattatattgcccatacttctgaaagctttagtttttggcgagtgttaaaaggtagagttaactattccattagtagtatttgggggtacttaattatctggtcaattgttgccatattcttcttcaaagttttaaaggtaatagcatccctatattga

SEQ ID NO: 216221 - DNA, 1410 bp, Klebsiella pneumoniae
atggatgtacgagcacaagaaaagttatttaaaaagctcttctctccaaaatctttatttgatgtatataccgagagatttagtaagtccgcagcaaaaggcctcgatagaatcaacggcatgcaatattcaaacagagccagaaaggaattaaagaaagtctctgaaaaatgtcttaacggttcttttagatttactccttacttagagaagttgaaaagcaaagggagagggaaaaaacccagggttatttctataccaacgattagagatcgcgttgtattaaaacagctcaatgtttttctttgtgaggtttttcctaattgtgtaccgaagagcatagcttcaacttatattagaagtatatcagatgatttaaaaggtgtgacccctgacgatatttatgtttgtagttgtgatatcgaaggtttttatgacaacataaacaaacatcgacttaaaaaaatcttatcaaaagaaataagaagtaaaagggcgctggatctcatagttcattctcttttaactccaacaactagtgataatgttaataaaaaaatgaggaagatattttttgataatgaaaagggagtacctcaaggattgtcaatatctaacattttagcttcgatttatctgcaaggtgtagataatgaaatgctaaaatttgatgtgacttactatagatatgttgatgatgtactaatgtatggtaattatgatgacgtaaactcagcttaccattcattaaggcgcaggcttaaatatagggggttaaacactcatccgccatcatcaccaaaaacacatttaggttttcttaatgagtcctttagttttttaggatatgtgtttaaagaaaatgttataacagtgcgagattcgactgttgaatcatttatgaaatcaattgcatctaggttcagtgattatcttcacaataaaaacaaaaggttaaacaaatatacacatttaacctctgatgatctaaaagacatttttctggaagagctaaatgataagttaacaggagctattagtgagaaaaaaagatacgggtgggtggcttattattcaaatattaacgacctttctcttcttcataaaatagattttataataagtgaaatgtttaagcgcttggatgattttgataattgtgcaccagaaggattgaaaaaggtagcgcgtgcttattatgaaatgaagtttagcccacatagaggttatatacgagattatgaccagattaaaactataaaacaaaaaactgaattcttgcaccgacgtggaaggattgctgaaggcgagaggttaactaaagaacaggttgaagagcgttatgaaagatataaagctaaaaatttagctagcatgcaagcagatgaaggtgaagtgtatcctaagtaa

SEQ ID NO: 216222 - DNA, 180 bp, Klebsiella pneumoniae
gtgaccacactgacgctacagaaagccttggaggcctgtcaggcaaataaatccgcctggctgcaacgcagcgatgaacttacgcagaccgaacatgtataccgcgaacagcttgccggcagaggccacagcggccagagcctgcaaacgctgcgtgagattatcgacgtgaaaaagtag

SEQ ID NO: 216223 - DNA, 252 bp, Klebsiella pneumoniae
atgactgacaatgccgtcctgttaggcgaaggcttcaccctgatgtttctcggcatgggctttgtgctggtgttcctgctgctgctcattttcgccatccggggaatgtccctcgccgtcaaccgcctgttttccgagccgcccgccgcccccaaaccggcgccggccgccgtcgcgcccgccgacgatttcgcccgcctgaagccggcgattgtcgccgccattcaccaccatcgccgtcttcacccttaa

SEQ ID NO: 216224 - DNA, 210 bp, Klebsiella pneumoniae
atgaccgttgccattaccgatgtcgtcctgcgcgacgcccaccagtccctgttcgccacccgtctgcgccttgacgatatgctccccgtcgccgctcagctggactggacgacgtcggctaccgctcgctggagtgctggggcggcgccacctttgacgcctgcatccgctttctcggcgaggacccgtgggtccgcctgcgcgagctga

SEQ ID NO: 216225 - DNA, 1302 bp, Klebsiella pneumoniae
atggaaagtctgaacgccctgattcagggcatggggctgatgcacctcggcgccggccaggccatcatgctgctggtcagcctgctgctgctctggctggcgattgcgaagaagttcgagccgttactgctgctgccgattggcttcggcggcctgctctccaatatcccggaggccgggctggcgctcaccgccctggagagcctgctggctcaccacgacccggcgcagctggcggtgattgccgcgaagctccactgcgcgccggacgtccacgccattaaggcggcgctggcgctggccctgccgtcggtacaggggcagatggagagcctcgcggtggacatgggctactccgccggggtgctggccatcttctataaggtggcgattggctcgggcatcgcgccgctggtcatctttatgggcgtcggggcgatgaccgatttcggcccgctgctggccaacccgcgcaccctgctgctgggggcggcggcgcagttcgggatcttcgccaccgtgctcggggcgctgacgctgaactacttcggcatcatcagcttcaccctgccgcaggcggcggccatcggcatcatcggcggcgccgacggcccgacggcgatttacctgtcgggcaagctggcgccggagctgctgggggccattgcggtggcggcgtactcctatatggcgctggtgccgctgatccagccgcctatcatgaaggcgctgaccacggataaggagcggaaaattcgcatggtgcagctgcgcacggtaagtaagcgggagaagatcctcttcccggcggtgctgttgctgctggtggcgctcctgctgccggacgccgcgccgctgctgggtatgttctgcttcggcaacctgatgcgcgagagcggcgtggtggagcggctgagcgatacggtgcagaacgcgctgatcaacatcgtcaccatcttcctcgggctgtcggtgggggccaagctggtggcggacaagttcctgcagccgcagacgctggggatcctggtgctgggggtgatcgccttctgcgtggggaccgcagccggggtgctgatggcgaagctgatgaacgtgttcagccggcacaaaatcaacccgctgattggttccgcgggggtgtcggcggtgccgatggcggcgcgggtgtcgaacaaggtgggtctggaagcggacgggcagaacttcctgctgatgcacgccatgggcccgaacgtggcgggggtgatcggctcggcgatcgccgccggggtgatgctcaagtacgtgctggcgatgtag

SEQ ID NO: 216226 - DNA, 873 bp, Klebsiella pneumoniae
atgaacgagtatattgccgtcgattggggctccacccagctgcgggcatggcggatgcgtgatggcgaatgcatcgacaagctgaaactgccctgcggcgtcacgcgtctgaacgggcagcgcgccgaaacggtatttcagcagcagctagcgccgtggcgcggcgaccccgcgctgccggtggtgatggcgggcatgatcggcagcgatgccggttggcaaccggtgccttatctggcctgcccgctggcgctggaggcactcaacggtcagttatatgaggtggcggaaaaagtgtggatcgtgccggggctgaaagtggcgcaggctgcagattacgacgtaatgcgcggtgaagaaacgcagctgctgggcgcctggcaactgatgcccgcggagtgttacgtgatgcccggcacccactgcaaatgggtgcaggtgcaaaacggcgtggtgcgccagttcgccacggcgatgaccggcgaactgcatcacctgctgcttaaccattcgctgctcggccagcaactgcctgcgcagttcccggatgaagcctctttcgccctcggtatagaaaaagggttaaatcagccggcgttattgtccgggctttttagcgcccgcgccgcgcgggtgttaggcgcgctggcggcgacttcggtgagcgattatctctccgggctgttgattggcgcggaggtggcgacattcagcgaacgctatcgcgccagccgcgtggtgctggttggtgagcactcgctcaacgcccgttatcagcaggcgatggcggcgcgtgggttagccgtttcctgttgctccggcgaggcggcgtttctttcgggtatagcgaggatgattgatggacaagattaa

SEQ ID NO: 216227 - DNA, 1065 bp, Klebsiella pneumoniae
atgtctattaataccctggcgcatgtctttaccccgcacggcaatatcgtctacacggcgaatgattttcgccagacggtgcgtatcgccgtggccgggaccattgcgctcagcatctccaccttctacgacgtacagtacggcgtatttttcgtcgtttatccgctgatgctgatgtcgctggtaccgatgttcaacctgcacgtcgcccgccagtttatatttagcgcggcggtaaactgtgtcgaaatggtgctaattgtcggctatttgtcgcagtggccggtgatcatgaccctggtggtgtttgccctgtacgtgatgcgtttccgctttatgagccagggaccgctgttcctgttgggatcaatgggggtggtgtgccagagcacgatgctcaactttatgagctatcccaccagcaactggcacaccctgatgttctccaatatggaagcctgcgtgatggccgtggcgctgagcgcgctgctgcattacctgatcccggacgtcgaaccgcgcaagccgccgccgcggattgagaaagacgccgcccgcatccgtcatgagtcgctgctctccggtacggtagcgacgatcatctttgtggtgtttcagatctgcgatctcagcgactcgctgtcggcgctgatggccgggatcctgatcctgttcccgatgcactatcgcggggcggtgatcagctcgatctggcgcgtcgtcggggtggtgctggcctgtctctatatactggtggtgcagctgattatctatgatttcagcaaccacatgatcctgatgatgccgctgattggcctcgggctggccttcagcgcccgcctacacgtgatggagaaagtgggcgccggggtgggcttcgccagcatcactaccatcggcattatgttcggccagaatctgcatccgtatcaggatctggtgttcagcgatctgtaccgcatcacctcggtgacggtctcgctggtggtgacgctgaccctggtttttctcatgcaccgcctgctgaactgtttcgcggcgacgcgttttgtggtgagcgattaa

SEQ ID NO: 216228 - DNA, 1167 bp, Klebsiella pneumoniae
atgcgaaattacaaagtcattactccgttattcccgacctacgaccagacccgagcgatgatgaaagccgtagcaggatgctcagtaaaatcggtccgtaatatgatctccgccattcaggaacagactggcaccccgcaaaacccggtagactggtcagagccggaccactggattaaggaacgactgagcggagaagatgccaaaatagcctggcaaatctggaataccgataaccatatactcaacccccgccacagctatggttgttatatgtttatcaacaacccgctattcgatttgatgcagaccgatgaggatggcggctggcatcccagtgaacagggacgtttattcctcgctcacgatgaagcgacgctgcgtaaactggacgatatcgaaggcatgctgcagctactggaattgctcgccggtcgcgaacaggcccggcgcgccgatctgcttccggaatggcaggctttcttgcatcagcactctaaattcgcctctccaagttcagttaaaacaacgctctatgcccggctttacaatctggtcgagcgcgaacttattactcgtgaagggatgagctacaaaatcaccgaagcaggaagaaagtggcttggcaaagcgctgccagaacggcaaaccgacccgcgcaaagagctgctggatgcggttaaacgctataaccagcagcaaaaggaattactgcgcgagcaaatatccaccatgaatccctacaagtttgagcatctggtcggccagttgctggaagcaatgggctatgagcaagtcgaagtgaccaaagcctccggcgataaaggcgtggatgtggtcggcaaagtgcaggttggcatcaccaccattaccgaagtggtgcaggtgaagcggatgcaaaacactattacccgcccgtttatcgatcagctgcgcggcgcattgccctaccacaaagccattcgcggcacgcttatcaccaccggaaaatttgcagcgaaatgtgcagaggcggcactatttcccggagccgcgccgattacgctaattgatggcgatcgcctgctggagctgctaatagaaaacaacgttgggatcagacgcagcaatgcggtcgaattattagacgtggatctacagctgtttgatgagctggatctcgactaa

SEQ ID NO: 216229 - DNA, 1620 bp, Klebsiella pneumoniae
atggccaaagcaccaactaaaaaagccaaagcaaagaaaggctttgaagacacattatgggataccgcgaaccagcttcgcggcagcgttgaatcctccgagtacaagcacgtggtgctgagcctcgtgttcctcaaatttattagcgataagtttgaagcccgccgtcaaaagatgaaagacgagggacagggcgatttccttgagatggaagtcttctatcagcaggacaacatcttctatctgccggaagaggcgcgctggtcgttcatcaagcaaaatgcaaagcaggacgatatcgccgtacgcattgatactgcgctctccaccattgagaagcgcaacccgacgctgaaaggcgcgctgccggacaactacttcagccgtcagaatctggaaaccaagaagctggcgtcgcttatcgacaccatcgataacattgaaacgctggctcacgaaaccgacgtcgaagcgctgtcgaaagaagacctggtcggtcgcgtgtacgaatacttcctcggcaagtttgccgccaccgagggcaaaggcggcggcgagttctatacgccaaaatgcgtggtgacgctgctgaccgaaatgctcgaaccgttccagggtaaaatttatgacccgtgctgcggctcagcggggatgtttgtccagtcggtgaagtttgtcgaaagtcatcaggggaaaagccgcgatatcgccctgtacggtcaggagctgacggccaccacctacaagctggcgaagatgaaccttgccattcgcggcctctccgccaacctcggcgaacgcccggcggacaccttcttcagcgaccagcacccggacctgaaagccgactatattctggccaacccgccgtttaacctgaaagactggcgcaacgatgccgagctgaccaaagatccgcgctttgccggctaccgcacgccgccaaccggtaacgccaactacggctggattctgcatatgctttccaagctgtcggccaacggcaccgccggttttgtgctggcgaacggctcgatgagttccaacaccagcggcgaaggcgagatccgcgcgcagatgatcgaaaacgatctgatcgactgcatgattgccctgcccggccagctgttcttcaccacccagatcccggtgtgcctgtggtttatgaccaagtcgaaagcggccgatccggctaaaggctatcgcaaccgtcagggtgagacgctgtttatcgatgcgcgtaaccttggcaccatgatcaaccgcaccaccaaagagctgacggcggatgatatcgccaccatcgccgacacctatcatgcctggcgcagcacgccggaagagctggacgagcgcgtgaagcgcggcgacagtaaactggcgcaatacgaagaccaggccgggttctgcaaggtcgcgactattgcagagatcaaggctaacgactatgtgctgaccccgggccgcttcgtcggcgccgccgagcaggaagacgacggtgtggcgtttgaaaccaaaatgcgcgagttgtcacagacgttgtttgcgcagatgaagcaggcgcaagaactggataaagcaattcgccagaacctggaggtgttgggttatggggagtaa

SEQ ID NO: 216230 - DNA, 1323 bp, Klebsiella pneumoniae
atggggagtaagtggaaacgggtaatagtagcagatgtctgcacttcaatagtagattgtgtgaataagaccgcaccagttgtggaatacccaactgattataagatgattcggacgcctaatatccgcgctggaaaagtaacacttgatggatgccgctatgtagaaaaagaagtttatgaaacctggacaaggcgctcaaagccccaaaaaggagatgtgttacttactcgtgaagctcctcttggagaggttggaattataacaactgacgagaatatctttttgggccaaagaatcatgcagtatagagcggataaaaataaaattgatccgtactttttattgtattcatttttatcaccagatcttcagcaacaattttcaatgcatgagggttctggatctgtcgttagccatattagagtcggtgattgttctaaatttgagattaatatccctccgttagaaatacaaagatcaatcgtagaaatattgaaatctcttgatgaccatattgacgttaatataaaaatcaaccaaaccctggaacaaatgtcccaaactctgttcaagtcctggtttgtggatttcgacccggtgattgataacgcgctggatgcgggaaatcccattccggaagcgctgcaatctcgcgctgagctgcgtcaaaaagtacgcaatagtgaaaatttcaaaccacttccggcggatattcgtgtgctgttcccggctgaatttgaagaaacagagttgggctacgcaccaaaaggttggatgacaaatcggctggaaaatattttagagttggcttacggaaaagcacttaaaaagacagaaagaaccaacggtaattatcctgtttatggttctggtggtgtcgatggcacccataatgagtatcttgttaaagggccaggggttattgttgggaggaaaggtactgttggttcattacattgggaaaacaaaaatttttaccccatcgatacggtatttttcgtaaaacccaaagaatactactcccttgtttactgctatcaactgttgaaaacactgggattagagaatatgaatactgatgcagcagtcccagggttgaacagaaacaatgcttatcgtcttgaggtcgttacaccaacacaatccatcattgccaaattcacaaatataatccagacaatccagcataaaatggattcaaatcataatgaaacagagaatctaaccgccctccgcgacaccctgctccccaaacttatctcaggcgagctgtccctggagaatcaaccagatttagtaacccaaaccgaacccgcttaa

SEQ ID NO: 216231 - DNA, 3264 bp, Klebsiella pneumoniae
atgcatctctcattcagtgaagcgaagttagaacaagccattatcgaactgctacaggaacagggctatccgcacctgatcggcgatgatgtgccgcgttcaagcctcgatcaggtgattatcgaagacgatcttcgccactatctcgccgcccgctatcaggccgacggcatcaccgaagcggaaatacagcggctgattaagcagctcaccacgctgcccgcctctgacctctacgaaagcaataaaaccttctgcgcctggctggcgaatggtttcttgtttaaacgcgacgatcgtcagcagaaagatctctatatcgaactgctcgataccaggcatctttctgcggcacttcgtgaattattcaatgccgaagaggttccgctgcaacaggcagcggaaccgtcggcgacctatcttgtcaagccgctgaaccgtcttaaggtcgtcaatcaactgaccatctccggcaaagaaaaccagccgcgtatcccggatgccattttgtatatcaacggcctgccgttagtggtctttgagtttaaaagcgcagtgcgcgagcaggaagccaatattggcgatgcgtataagcagctctgtacccgctatcgccgcgatattccgcagctgtttgtctataacgcgctgtgtattatcagcgacggtgttaataaccgcatgggtaacctttttgcgccgtacgagtatttctactcctggcgtaaagtcaccggcaatgaaaaccgcgagcaggacggcatcccctccttgcattcgatgattcaggggctgtttcacccggtccgcctgctggatgtgattaaaaactttatctgcttcccggataaagccaaacacgaagtaaaaatttgctgccgctacccgcagtactatgcggcgcgcaagctgtactacagcatcgaacgggcgcgtaaaccctacggtaacggcaagggcggcacctactttggtgcaacgggctgcggtaagagctacaccatgcagtttttaacccgcctgctgatgaaaagcgtcgagttcgccagcccgacgatcgtactgatcaccgaccgcaccgatctcgacgatcaactctcggcgcagatgtgcaatgccaaaaactatatcggcgacgacaccgtggtccccgtcaccagccgtgacgatctgcgggaaaagctggccggtcgcaacagcggcggcgttttcctgaccaccatccataaatttaccgaagacactgaactgctctccgagcgcagcaatatcatctgtatttccgacgaagcgcaccgcagccaggtcaacctcgatcaaaaagtgatcgtcgataaagaaaacggcaaagtgcggaagacatggggcttcgccaaatatctgcacgactcgctgccgcaggccacatacgtcggttttaccggcacccctatcgacgccacgatggaagtctttggcaacatcatcgacagctacaccatgaccgaatccgttcaggatgagatcaccgtgcgcatcgtctacgaaggccgcgccgcaaaagtcatccttgataccggtaagctggaagaggtggaaaagtactatgaagagtgcgctaacgccggtaccaacgagtggcaaatcgacgagagcaaaaaagccagcgccaccatgaatgccattctcggcgatgaagatcgcctgaaagcgctggcggaagacttcgcgaaacactatgaaaagcgtgtcgccgaaggctcaacggtgaaaggcaaggcgatgtttgtctgcgccagccgggagattgcctgggatttctatcgtcaattaaaagactttcgtccggcatggtttgagatgaaacaagcgccggatggtatagagcttaccgagcaggagcagaaggaactgccgccgtccgaaatggtcaagatggtaatgacccgcggcaaagacgatagcgtacaactgtacgatttgctgggcagtaaagagtaccgcaaggagctggataagcagttcaaaaacgacaaatcaaatttcaaaatcgccatcgtggtggacatgtggctgaccggttttgacgtaccggagctggacactatttatatcgataagccgctgcaaaagcataacctgattcagaccatctctcgcgttaaccgcaagctggaaggcaaaagtaaagggctggtcgtcgactatatcggcattaagcgccagatgaaccaggcgctggcgatgtattcccgcattgacgccactaactttgaagatatccagcagtcagtgattgaggtgaaaaaccatctcgaactgctggcgcaggttttgcacgacttcgacagccgggcttacttcacaggagaaccgcaggcgcagctggcctgcctgaatcaggcggcagagtttgtcatgcgcactcagaagacagagcgccgctttatggggctggtgaagcgcctgaaagcggcctacgacgtctgctgcggcagcgaagcgctttcgcaggccgagcgcgactacatccacttttatattgccgtacgctccatcgtcttcaagctgaccaaaggcgacgcaccggatgtcacgcagatgaacgctcgcgtacgcgagatgattgccgatgcgttaaaggccgacggcgtggaagagttgtttttccttggcgacaagaaagcagagtcgatcgatattttcgacgacgattatctggcgcgcattaataagataaaactgccggcaaccaaaattcagctgctgcaaaagctgctggaaaaagccatcagcgactttaaaaagatcaaccagcttcaggggatcaatttcacccgtcgttttcagtcgattatggataaatataacgaacgccgggaagatgatgttctcaacggtgaagagtttgattctttcagtcaggagatgaccgatattatctacgatattaaaaccgaaatgggtacctacgccgaaatggggattgatatcgaagagaaagccttctacgacattctggcgcatatgcgcgataagtatcagttcacctatgaggacgacaagatgctggcgctggcgaaagagatgaaggcggtggtcgataacacttcgaagtatccggactggagcaagcgtgatgacattaaagcgaagctgaaagtggaactcattctgttactgcataagcataagttcccaccggtggcgaatgatgatgtgtatatgggcgtactggcgcaggcggagaattttaagcagcatcatattaacacgctgcactaa

SEQ ID NO: 216232 - DNA, 204 bp, Klebsiella pneumoniae
atggcgggtgataagccgctgctggcgaaggtacgcctgcgactaaaaatacctacatcccccctgcatgtggcgctgatatctctggtttccagcctccgattcgacggcaatagtaataatctcagccgtctgatgaacttgtgcgcgctgatgggcttcctggtgttcaagcgcaatgtcgaactaaacctcgaaggttaa

SEQ ID NO: 216233 - DNA, 783 bp, Klebsiella pneumoniae
atgaaagtactgctgatttacgcccatccggaaccgcgctcgctcaatggcgcgctgaaaaatttcgccatccgccatctgcagcaggccgggcatgaagtgcaggtttccgatctctatgccatgcgctggaaggccgggtatgacgccgacgacagcggcgcgccgccggtcggcgagttctggcggccgaccctcgattccaaacaggcctttgcccagggcacccaaagtgcggatatcgtagccgagcaggaaaagctgctgtgggccgatacggtgattttccagttcccgctatggtggttctcaatgcccgccatcatgaagggctggatcgacagggtgtacgcctggggctttgcctatggcgtcggcgagcacagcgaccgccactggggcgatcgctacggggaaggcactttcgtcggcaagcgggcgatgctgatcgtcaccgccggcggctgggcggaacactattcaccgcgcgggatcaatggccccatcgacgacatcctgttccccattcagcacggtatgctgttctatcccggctttgaggtgcttccgccgctggtgttctaccgcacggataaaaccgatgccgggcagttcgccgatcagtgcgccgccctggccgagcggctggacacgctgtggcaaaccgagcccattccattccgccggcagaatcatggcgattatctgatcccgtcgctgacgctgcgcccgtcgctggcgccagggcaaagcggcctggcggtgcatttgcgtagcgaataa

SEQ ID NO: 216234 - DNA, 759 bp, Klebsiella pneumoniae
atgaaaattcgctcaaccgtacttgctcttgggatcgcagcaaccctcaccggatgtcagaacatggactccaacggtctgctcagctcaggcgccgaagccttccaggcatactctctcagcgacgcgcaggtgaaaaccttaagcgaccaggcctgtaaagagatggacgccaaagcgaaaatcgccccggccaacagtgaatacagccagcggctgaacaaaatcgcggctgcgctgggcgataacatcaatggtcagcccgtgaactacaaggtctatgagaccaaggatgtcaacgccttcgccatggccaacggctgcatccgcgtctacagcgggctgatggatctgatgaacgataatgaagtcgaagcggtgatcggccacgaaatgggccacgtcgcgctgggccacgtgaagaaaggcatgcaggtcgccctgggtaccaacgccgtgcgtgcggcggcggcctccgcgggcggtatcgtcggtagcctgtcgcagtctcagttgggcgatctgggcgaaaaactggtgaactcgcagttctcccagcgtcaggaatcggaagcggatgactactcttacgacctgctgcgtaagcgcggtatcaatccgtcgggactggccaccagcttcgagaaactggccaagctggaagccggccgtcagagctctatgtttgacgatcacccggcctcagaagcgcgcgcccagcatattcgcgatcgcatgaaggccgacggcattaaataa

SEQ ID NO: 216235 - DNA, 1254 bp, Klebsiella pneumoniae
atgaatcttaagctgcagctcaaaatactgtcgttcctgcagttctgcctttgggggagctggctcaccacgcttggctcgtacatgtttgtcacgctgaagtttgacggcgcggcaatcggcgcagtgtatagctcgctcggtatcgccgcggtgttgatgccgacgctgctcggcatcgtcgccgataagtggatcagcgccaaatgggtatacgccatctgccacctggtcggcgcgttaacgctgtacctcgcggcgcaggtcaccacgccgggcgagatgttcctcgtgatcctgcttaactcgctggcctatatgccgacgcttggcttgatcaataccatctcctactaccgcctgcagtcggcggggctggatattgtcaccgatttcccgccaattcgtatctggggcaccatcggctttatcctcgccatgtggggcgtgagcttctccggctttgaactgagccatatgcagctgtacattggcgcgacgctgtcggtcctgctgactctgttcaccctgacgctgccgcatattccggtcgccaacgcccagcgcaatcaaagctggacggagatgctcggcctgaacgcttttgcgctgtttaaaaacaagcgtatggctatcttctttatcttctcgatgatgctcggcgccgagctgcaaatcactaacatgttcggtaacaccttcctgcacagcttcgataaagatccgctgtttgccggcagctttatcgtcgagcacgcgtcagtgctgatgtcgatttcgcaggtttccgaaacgctgtttatcctgaccatcccattcttccttagccgctacggcattaagaacgtgatgcttatcagtattgtggcgtggatgctgcgcttcggcctgttcgcctttggcgacccgacgccgttcggcactgtactgctggtgctgtcgatgatcgtctacggctgcgccttcgacttctttaacatctccggttcggtgttcgttgagaaagaggtgcgcccggaaatccgcgccagcgctcaggggatgttcctgatgatgaccaacggcttcggctgtattctcggcgggatggtgagcggcaaagtcgtcgaacactttaccgtcgaggggatcactgactggcagagcgtgtggctgattttcgccggctattcgctggtgctagcctttgccttcgtggcgctgttcaaatacaaacacgtcagacaaccgaccgccgcccagcagagcgtgtga

SEQ ID NO: 216236 - DNA, 1377 bp, Klebsiella pneumoniae
atggttatgtcactgtttcattccgtgagcgacctgatcggtcatactcccctgctccagttgcacaaactggataccgggccctgcagtctgtttttaaaactggaaaatcagaaccccggcgggtcaattaaagatcgggttgcgctgtcgatgattaatgaagccgagcgccagggaaaactggcgcccgggggaacgattatcgaagccaccgccggcaacaccggtctcggcctggcgctgatcgcggcgcagaaaaattaccgcctgatcctggtgatgccggacaaaatgagccgcgagaaaatctttcaccttcgggcgctgggcgcgacggtgctgctcacccgctccgacgtcaataaaggccacccggcctactaccaggattatgcccgccgccttgccgatgaaacgccgggcgccttttatatcgaccagtttaataacgacgccaatccgctggcccatgccacctccactgcgccggagctttatcagcagctggagggcgacatcgacgccatcgtcgtcggcgtcggctccggcggcacgctgggtgggcttcaggcctggtttgctgagcactcgccgaaaacggaatttattctcgccgatccggcgggttccatccttgccgatcaggtcgataccggacgctacggcgaaacgggatcctggctggtcgaagggatcggcgaagattttatcccgccgctggccaggctggagggggtacataccgcgtatcgcgtcagcgaccgcgaagcgttccacaccgcgcgccagctgctgcaggttgagggcgtgctggccggctcttccaccggcaccctgctcagcgccgcgctgcgctactgccgggcacaaagccgtccgaaacgggtagtaaccttcgcctgcgacagcggcaataaatacctgtccaaaatgttcaacgacgactggatgcgccagcaaggactgatcgcccgccccgaacagggcgatctcagtgattttatcgccctgcgccatgacgaaggcgctaccgtcacggccgcgccggacgacaccctggccgcggtctttacccgcatgcggctgtatgacatctcccagctgccggttctggaggatggccgcgtggtcggcatcgtcgatgagtgggatttgatccgccacgtacagggcgatcgccaacgcttctccctaccggttagcgaagcgatgagtcgccatgttgaaaccctcgataagcatgcgcccgagagcgaactgcaggccattctcgatcgcggtctggtggcggtgatcgctgacaacgcgcgttttcttggcctggtcacccgcagcgatgtattgaccgcctggcgtaaccgagtcgcacaataa

SEQ ID NO: 216237 - DNA, 408 bp, Klebsiella pneumoniae
atgacagttatcaaatctttatttttaagcaccgcacttttagtttcttttagtgcgttggctagtgatgctgatatcagcacgttgaaaaaggaattaaaggtctttcaacctacagatattaccaagaaaaataatgacataactgtagttataccagcaaaaaacatcactcgtgaagcctatgaagcgctcataactaatgggttatgcacaccgatatggacaaaagataccccttcttcattccttaatggtatcaatacctttaccgttgttaaccaatttaaagcttttggctataaattagattccccattgtcaacttgcaaagaaatgggcaatcttatgccagagccagcaaaagtattaatgtattcaaaaacaaaaagttacactagtagctag

SEQ ID NO: 216238 - DNA, 516 bp, Klebsiella pneumoniae
atggcaatgccgcgcaagctcaaatacctgaacacgtttctggatggcgtcagctatctcggcgttatcgagtccgtcaccctgccaaagctgacccgtaagctggaaaactaccggggcggcgggatgtcaggctcggcccctgtcgatttcggtctcgacgatgacgcgctggcgatggagatttccctcggcggcttccctgatgatgcgatctggtcgctttatggtgccgtcggtaccgggacgcttctgcgctatgcaggttcttaccagcgggacgataccggcgaaaccgtggcggtggaagttgagacccgtttcaaggtgaaggaagtcgataacggcgagagcaaacagggcgaggataccagcagcaaattatcgctggtctgcacgtactacaggctgaccatgaacggtaaagagctggtagaaatcgacgtcctcaacatgattgagaaggtgaacggcgtcgaccgactcgaccagcaccgccgcaatatcggcctgtaa

SEQ ID NO: 216239 - DNA, 1158 bp, Klebsiella pneumoniae
atgagcaaaatgtttaaatcactgataacagtcgcaggtagagaaaaaattgccgaagccattgttaacggggacaaggttattttttctcaaatgtcagtgggcgatggcggcgggagtgcgacagagcccaacgatgagcagactacattagttaacgaacgttttcgtacccagttgaacagtctgaaattgtctgacaccgacaatattattgttgccgagatgattatcccgcccgaaactggcgggtttaccatcagagaggcggcgctgtttgatgacgacggtgtgtgcatggcggtcgccaatgtcccggaaacctataaacctgcactggctgaaggttcagggcgttttaccatcctccgcatctggctggcggtcagtagcacagaagcggttgagctcattgtggatccgggtatcgtactggcaaccgtcgaagatgtgattaatgccagtaacagcaccaaagactatgccgacgagcaactgagtgagcatgcaggttcacggaatcacccggatgcaacgctggatgataaaggtttcacccgactgagtaacgaaacagacagcgacaggcaggacagagcagccacaccggcggctataaaagcggctattgctgctgccacgcgtgctgcgtgggaactggataacccggtcggtaccacccgtttttttattgagaatgtgaaccctaatgaatactggccatggtctcaatgggtttacaccggcgaaaataaaacgatccgcatcggaaaagctgatggttccaatgtagggactaccggcggtaatgataccgtcacgctccagagtgctaatctgccagccgtacagattgatgttaccggcgaaaccagcgagcagccagagcagacgctgacgaccacgcgcggtggtgttcacaatcatggtggtgtagccggtaaagatgacccgtgggaaatcggcggcgatgtacgtcagctctttaaccctaaagagctgggtgtgacggatgacgctggagagcacgaccacgaagttacggttccgccacataaacatacaacaaacggcaaaacagccaacctcggcaagggtaagtcgttcagtgtagttgaggcccacaccctgctgatgtgctggagtcgtgtcgcctga

SEQ ID NO: 216240 - DNA, 252 bp, Klebsiella pneumoniae
atgcccccatatttcgccattaaataccttcccgtccggatcatcgccagggggcacagtagtcgtattcgcaaatacgagatatttaggctcaaccgagtaccgatagcctatccacaccgctctctcatcatccccgacagctggcggagacggcggattgccatctgcatcgtaataacctttgtcgatgggttcatcgggacaattaaacataggattgattacaggctccatttcaccgagatatag

SEQ ID NO: 216241 - DNA, 2046 bp, Klebsiella pneumoniae
atgaccagacttccagaatcctcattgtgggaagaagagattgagcttatttccagaagcgagcgtgtttctggggggctggacggcgtagcaaacaggcctctgaaaggactggcaaaccgcacgcgatatcttaaggatatggctgacgagtcagatgcgcttgtcgcgcaaaaagtcagtgcagttaagacgttcgctgaaggcgcgacacttgaatctccccgggaagaaatcctgtacggcgcgtatcgactggtctggacagggcaattcccaaagacagtacccactggaagtaccccctcgggaaccggtggagtaaaggcgggcggttgggcgtatacatcggatgccatgattcgagaaaacctgagctcaggtgatgaggagcagggagcgtggctggttgcctatcttgccggtgattcagctgtaaccagagctgtcgcggccaggttgcgtgattttgtgagcctgcatgattactggtccccgaccgatggtactgattatgctccggcactgaacaaagcgctgtctgtttctccgcatgttctgctcccgccaggaaggcattatttagaatcgaccgtttcacttatctctggcaccaggctaatcggccttgggccgaactgtattttgtcatctccggatgcggtttcggcaagtggggcggaaatgcttaccgtgctcagaactacaggtgcttcaaatattgttcttcaagacctggtcgttgaaggtggatgtaatgacaatgtgacctcaaagcgagccgttcgcggtgtaaggtttattaattgttcagatgttcgcgtaattaattgcgaggtcaaccgagctggtgactgggctttatcatttgagcacagtgaacgtttaacggtgactacatacaaacaccgtggagcactggcggataaccttaatggtggtcgggatggcttgcacttccttgactgtcgcgatgtttctgccgctgatttagatattatttctggtgacgatatggtcggctgtaccagtgaaagcagagaccagcgcaatattagtatcaaaggtgtccgtgggtattctgtgattggctctgctgtaatcgccaacgaagaaggcaccacaacaaactcaacggtaaatattctgattgaggacgtaaaaatcaattacggctacaacgtgcgtaacgttgtcagggtgcagtctatcaatggcgcaaatgtgaccggcgtaattattcggggtatacgtggcaccggccgtaatcatggaatacaggtaacgtcggcggcaacgatgacaaacgtggatatctccgacgttaacgttacgtccgttaaccagcatggcgtctacctcaacagaattaacaacctgagagcctccgggcgtgctaccgcgcagaacagcagtttcgatggctggaatatcgcttcatgtagttattttgacgtgcaaccagcggcgttgagttctccgggctggggtgtgcaggtgctgaacagcgcctatttcacgatgaacggcaattgctataacaatggagctggtctttttgcagtagccaatggaggaaacggacgcattaacgggtgctcgaattacaacgtaaacggggtttatgccggaggtgtgtccacatcttattacgggctcctggttgatgaggtgggcggaggcagagttgatccggcaacggtgtgtgccggatacattgcccgtaatcgtccgcgtaatctgaacgccctgcgggatgcctatgccgcctgctcattcggccaaagtaccagtggtgcgatttcttctcagggggcggttaattgttctgtcgagcttgtttctgatggcagatacaggattaattttaccacgccctttgaatccacattttacaggccggaaattgttgcacaggcaatgaatcaggatctgatagtccgcccgattgcgaaagaagtcagctactacacgtttgaggttcgtaactcatctggtgtggcactggcaaacttcattttatgtgaattcaaaaaggcgatttaa

SEQ ID NO: 216242 - DNA, 246 bp, Klebsiella pneumoniae
gtgaatgaaattggtataaccctccgaattctggatgaattgacccggctgataaacgatgcaaagccggtaagtcgtcatatggcgcaattcaatatatccacaaaggtgcgtgggaatattaatgtcagttcaatgctgtgcggaggcgacattatcagtatttatccggtcgattttgaggctgaagacaacattttctacaacggcgtgatttttcacgatggcaattttaattacgggtaa

SEQ ID NO: 216243 - DNA, 1224 bp, Klebsiella pneumoniae
atggactttttcgaaattgatgaagatacagatttaaacctccttcatttcaaatttaacgatctaaacaagctgttagggtacgctggtgctaaagaagttgtttccagttggggaaatgacttttatgatcgtgataaaaaggctaaaaaagaatttcaaacatcgtttcactctactttttgggagctctatcttcacgcggcactgaaagaaatgaacttcaaggttagcgaaaagcacaatcgaccagactttatcgttgaatcccccacagaaatgtacattgaagcagtggtgtcagagattaaaaaagatggaacccctgaaaaactacgaactatagaggacgtggaggctaacctacggccgatcacaaccaggcgtgagttttcagatattatcgatgaggcaatatcgcgtcactctaactctctagaatcaaagctaaaaaaatacaccggccatataaaaaaagataacacccccgttaaaggatacgtcgattgcaattgggtttcacctaaggctccatatataatagccctatcctctcatgaccaaattgcctatggaagagaatttatttattcaatgtttgctttattgtatggacagtattacgacccagaaaataaaatatacaccaaaaaaaataaaataaaaaaacccggaaccaactcggatttagatcttggtattttcttgaacccatccttcaaagaagtttcagcagttttattttgtaacacactgacattaggcaaagtctcttcgctacataaatcagaaaacataaacttcgatacagttataaatattagatacttgcaggatgaaccgcattttcgtgtgcatgaagtaacaccagaaaacccagagaaattactcgatggcctatatatattccacaatccatttgcaaaaaataaattagagctcggtatgtttaataagttggcacaattttccatggatgaatatgggccacatcaaattggaagtcaccccctgcttgtttctaggtttcacaccaacatgttgccaagttcaataatcccaagtataaaggctgatattttttcaagctacaactcagagtactgcatgcgagggaaccaaaatgagcgcagtcttttaaaaccagctaaaagcgaaagcaccagaaaaaagaaaaaaagaaaaaataaaatttcgaagtcttctcgcagaaagaatagataa

SEQ ID NO: 216244 - DNA, 498 bp, Klebsiella pneumoniae
atgccaagcttagacaatattcgcaggctactaaggaagcaatgtcctatatctgcaggcgaggatggcgaggattatgctcgcaaatggttggagaatgaacagtgggattttgtttatatagaacaagggaaaacagacctatctgaaagactgaaagcatatggagggaaacgccccgattttattattgaagctgatagtaattcttttattctcctagatgcaaagtatcactcaacagaggactgtacctcctttactcttacagattgtgaaatagggaaatatcgcgcgctcaagcagtttttaattaatgagaatatcggctatacgttcgaagtaattttcatggtattcccaaaagaaaaggatggcaaaaggtttgtatttgttagcttggatgagtttgataaaggggagtgtgtgactttagcatcagaaaatgcaacaaaaattagcttgctcaatagagatggtttatggtttgatagttaa

SEQ ID NO: 216245 - DNA, 450 bp, Klebsiella pneumoniae
atgaatgacttcaaaccctttgaggacaagctcgccggattgatagcggccctttcccccgcggggcggcgtcggatgaccgccgacattgcgaagaaactgcgccagcggcaacagcagcgcattaaatcgcagaaagcgccggacggttcgccctttgccccgcgtaagcgccagcccgtcagggcgaagcaaggccggattaagcgcgagatgttcgcgaaactgcgaaccaaccgctatatgaaagggagcggtaacgaaagcgcggcgatggtggaatttaccgggaaagtgcagcgcatcgcccgcgtgcatcaactcggacttaaagataagccatcccccaaaagcaccgccgtcgagtacccacagcgccagctcctgggctttaccgaagatgaccggcagcttgtggaaagtgtcattatcgactacctctctgattga

SEQ ID NO: 216246 - DNA, 291 bp, Klebsiella pneumoniae
atgacggaaggtgaaaaaagcgtcctgtcactctttgtgatcggcgtgctgattgtcgttggtaaagtgctggccggtggtgagcccattactgcccggctttttattggtcgcatgttgctgggtggctttgtctcaatggtggccggggtggcactggtgcagtttcccgacctgccgcccgctgccgtgtgcggatttggctccatgctgggtatcgccggttatcaggcggtggaaattgcgattcagcgcaggattaaaaaaggggaaagcgatggcggtcattaa

SEQ ID NO: 216247 - DNA, 1770 bp, Klebsiella pneumoniae
atgaccatcaccaccgacaccactttgttaaacgacccgcgacgccaggcggctttgctgtactggcaggggttttccgtgccgcagattgccgaaatgttgcagaccaaacgcccgacggtgcagagctggaaacagcgcgaccagtgggaggaaaccgcaccgctgaaccgggtcgaaagcaccttagaggcccggctgattcagctctacgcaaagcccaacctgacaccccacgatttcaaggtggcggattttctggcccgacagatggagcgctttgcgcgcattaatcgctatggccagaccggaaatgaggttgaccttaatcccaatgtggccaaccgcaacaaaggcgaccgcaaaaagccgacaaagaactttttcagcgacgaggctatcgagaaactggaagagattttctttgcagagtctttcgagtatcagctccgctggcaccgcgccgggcttgagcaccgtattcgcgacattctgaaatcgcgccagattggggcgacgttctacttttcccgcgaggcgctgctgcatgcgctgaaaaccggccataaccagattttcctgtcagcgagtaagacgcaggcgtatgtattccgcgagtacatcattcagtttgcccgccgggtcgatgtcgacctgaccggcgacccgattgtcatcggcaacaacggcgcaaagctgatatttctcggcaccaactcaaacaccgcgcagagccataacggcgacctgtatgtcgacgaaattttctggatccctaacttccagaaactgcgcaaagtgtcgtcgggcatggcctcacaaagccacctgcgcagcacctatttttcgacgccttccaccctggcgcacggcgcttatccgttctggtcgggggaattgttcaaccgtggccgcgcccgcgccagcgagcgggtcgacatcgatatcagtcatgacgcgctcgccgctggcgtggcgtgtcctgatggtcagtggcggcagattgtcaccattgaggatgcgctcgccgggggctgtacgctgttcaatctggagcaactccagcgcgaaaacagcgtcgacgacttccgcaatctgtttatgtgcgagttcgttgacgacaaggcgtcggtgttcccgttcgaggatttgcagcgctgcatggtcgacagtctggaagagtgggaagactttgcgccgttcgccgacaacccgttcggctcccgcccggtatgggtgggatacgacccctctcacagcggcgacagcgccgggtgcgtggtactcgcgccgccggttgtcgccggtggcaagttccgcattctggagcgtcaccagtggaaagggatggactttgcgacgcaggccgaatccattcgccagctcaccgaaaaatacaatgtcgagtacatcggtatcgatgcgaccggcctcggtattggcgtcttccagctggttcgctcgttttatcccgccgcccgcgatatccgctacacgccggaaatgaaaaccgcgatggtgctgaaggcaaaagacgtgattcgccgcggctgtctcgaatacgacgtcagcgccaccgacatcacaacctcgtttatggcaatccgcaagacgatgaccagcagcgggcgcagcgccacctatgaggctagccgcaccgaggaggccagccacgcggacgtcgcctgggcgaccatgcacgcgctgttaaacgaaccgcttaccgctggcagcagccaggcaacatcttccattctggagttcaactga

SEQ ID NO: 216248 - DNA, 1038 bp, Klebsiella pneumoniae
atgagtaaatacaaaggccgcaaaccacagccacaaaagcgcccgcgcaacatgaaagacagcgcgccccaaaaaatggaggcgtttacctttggtgaaccgagcgccgtgctcgaccgccgagatattctggattacgtggaatgcgtcaataatggccgctggttcgaaccgccggtcagctttaacgggctggcgaaaagcctgcgcgccgccgttcatcacagctcgccaatttacgttaagcgcaacattctggcctctacgtttattccgcacccgctactgtcacaacaggacttcagccgcttcgcacttgattttctggtgtttggcaacgcgtttttagagctccgaaagagtgtcaccggtcgtccgctgaagctggaagcgtcaccggcgaaatacacgcggcgtggtattgaggatgatgtctactggtgggtgccgtcattcgaccagccgcacccgttcgcgccgggatccgtattccacctgctggagcctgacatcaaccaggaactgtacggcatgccggaatatctcagcgctctaaactccgcctggctgaatgaagcggcgacgctgttccgtcgtaagtattaccagaacggggcgcatgcgggttacatcatgtatgtgacggacgccgcgcaaagcggtaccgatgttgaggcgctgcgcgatgcgatgcgcagctcaaaggggctcggcaacttcaaaaacctgtttttctacgcaccgcacggaaaaccggacggcataaaaattgtgccactcagcgaggtggcaacaaaagatgattttttcaatatcaagaaagtcagcgctgccgacctgctcgacgcacaccgcatcccgttccagctaatgggcggcaagcccgagaatatcggttcaatgggtgatattgagaaagtggctcgggtatttgtgcgtaacgagctgatgccgttgcaggagcacattaaagaaattaacgactggcttggatttgaggtagtcaaatttatagattacaatcttagttccgtctaa

SEQ ID NO: 216249 - DNA, 1005 bp, Klebsiella pneumoniae
atgagtctgatagagagagatgagccagataatcatgagggtggtgttgtgctttcttcttcgcgagatatggatatcaagctcaaaatgtatcaagaggcatatcattccataaccggtaaaacggaaaaaatttcatttaagtcttctgctgatttactcatagacgttgacgagttaaaccaaattcatcacaaaatatatcaattgtgtgatgtccatcatatcatagcaagatctgaatccatcactatttatcatactaaagagcgtaaagaaaacttcacctcttttgaacgattcaagatttataatacaagtatcaccagcccaaccattacagttttaatggagtataatttttctatactacccgccgggagtgttaatccacagcaatacaaagtggctatccgtttaaactcccgtgtttcattgatgaagcagatgaaggatgaagccccggcttttatgcgaggtagacttttggggtttatgtacggcccaaccgctgacatttcagttgaatatgctgattatgtagttgcaaggagttttgtacaggcgatgcaggagtgggtggatggctgtaaaaagagtgacagtaaacttaaagccctggagttaatgcaaagtgtctcccattatatacctggcgtggtatcgtttttaaatggtattatcctgacttacttttttattaaaaatgtgcccgtagttttgaatcttaactctagctatctagaagttatacagtatggatttttattcttcgcttcgttcatgttgacatcaaaaatcgccaccttcttaggtggtgggattgaaacttcaattgatcggtacactcccctttcatatttattattgaataaaggagatgaaagagtcattgataattataaaagtgaaaagtcgaggaatattttcagctttatgttttcgtccgtgctaacaattatcctaggcattgcttcatctttaatagcaaactttttttcataa

SEQ ID NO: 216250 - DNA, 2229 bp, Klebsiella pneumoniae
atgcatagctctacggttgcttatgcttatccgtggaatgctccacggtcggcaatagccagcccatatcttacctatgaccaacagcatcgccgcgaccgtatgttctcggctttgctgcatgcgcgaaaagtgctttctctccagcccgagtgcgtacgctttgatgtttatcgcaccgctgcggtgctggagcaaaatcagggtagtcaacgagccaatgcctttttaatcagcttctgcaaaaaggcattgccacgtcttgaactggtcgcaaaaaaatatgagtgcgtgggtatcaaaagcaacgtatcagccgctgtttttggtggtcattttgatacccagcttatgcaatatctggcgtcacgcatggtcaatatggtcgccagatttaaccgcctccctgatatgtcgcgcgccgatattgacctgcttgctgctgatatcgctaatttcattcgtgctgaactggccgacattgatgacacaggatttagcgagcttaaaacgttgtacacctggtacatgcgcgccggtttaatttccctgcaattcaacgttaccccgccgcattgggagcgggtgacaaagaaatatgtcggtgaggatgaaatcgccccatccatcactcgtatgtttaatgaggtttggtggcgtggccgtttgcgtcgtcttgctgctgcatggcgcgaacacttgcaaattgccgttggcaacgtcagcaagaaaagacacgcctacgcgagtaaaaactgcgtgactgactggcgcgagcagaagcgccgcacgcgtgaatttctcaagggactggatctcgaagacgaagacggcaatcgcatcagccttatagaaaaatatgacggttcagtcgctaacccttcgatacgccgctgtgagctgatgacccgcatccgtgggtttgaaaatatctgcaatgaactcggttatgtaggggagttttacaccctgaccgcgccgtctaaataccacgccaccaccaaagcgggctaccgtaacagcaaatggaacggctccagcccgtcggacacgcagagttaccttactggcttatgggcgcgcatccgcgcgaagctgcaccgtgaagagattcgtattttcgggatccgcgtagcagaaccacaccacgatggaaccccccactggcacatgcttatgttcatgttgccggaagatgtcgagcgcgtgcgcctcatcatccgtgattatgcgtgggaggaagaccgccacgaactgagaagcgataaagccaaaaaagcacgctttcatgccgaggccatcgacccggaaaagggcagcgctaccggctatgtcgctaaatacatttccaaaaacatcgacggctatgcacttgatggcgagctcgactacgaaagcggagaactgttgaaagagactgcgcccgccgtttctgcctgggccgcgcgctggcatattcgtcagtttcaatttgtcggtggtgcgcctgtgacggtctatcgcgaactacgccgccttgctgatactgagaccgcacatggtctgagtgttgagtttgctgctgtgcatgatgcagctgacgccggtgattgggctggttacgttaacgcccagggcgggccatttgttcgccgcgacgatttgcaggtgcgcacgttgtacgaaccacgtaccgagtttaatcagtacggcgaggagacggtctgcattcgtggcgtttacgactctgccatcggtgccgataccccgattatgacccgtctcactcagtggaagattgtgccgaagcgtgccgttgatttggccgttgaccttcagggcgctcctgcgccctctcggagttctgtcaataactgtacgggaagcgaaagcgatccaccggagctggatttatccaaaccgttgagtcgaagtgaaaggcggaagctaacggccagactcagggacaaaaaacgggtcgacaggcgtgattatgtccacggaacggataaacaacgcgcagccattgacagaacaatagacgagattcagctcacgaccggcgaaaccatcagtcagggggaggccttgcacctgatagccggtggcaaaagttgcataaacggcaaatggtgccgtggttccgcaaccggtgaaattttcccggcagcaccgtcaaatcgggctcgaggcagacaaatcctaaatcgagtcgcggggttagcgtcagttagtaagttgagactgtaa

SEQ ID NO: 216251 - DNA, 282 bp, Klebsiella pneumoniae
atgggtattcgcatcgaagtcggcgacaaatgggttattaccagcgaccaatatcaattcatcctgaatgaaaagaaagtagttaagtcaggaaataaagctggtgaagaatggctcgacactatcggctattatccgaagattaaccagcttatttccggcctgatacaccatcagattcatggctcggatattactgccattgacgctatggcggaagaaattaagcgggtagggcaactatgcatagcagccattcaaggggctagcgttgatgcatag

SEQ ID NO: 216252 - DNA, 222 bp, Klebsiella pneumoniae
atggccgatgcaatggatatcgcacaacagcgtgaacaggcagaacgtgagcgccttatcaacaacgcgcgcagccgtatagctgctccttctcgttttacctgcgaggtatgtgacacaccaatcccggaagctcgccgcattgcgattccgggagtggccttttgtgtaacctgccagcaaatcgccgagctcaaatccaaacattaccggggggtataa

SEQ ID NO: 216253 - DNA, 228 bp, Klebsiella pneumoniae
atgcaaaatatcgaaccccgtcaattcaaagtcgataaagaggcgctggccgtattgctggaagaggcaaaatctgaagagcgcaaagggagcgcactggctgtatctatccgccttgaggcactggcaacccatatcgctaacaaaggtatgagcgccatggaagcggctgaactgctgcgccgtgaagccacccgctacgaaaacgaatctcaggagctgcactaa

SEQ ID NO: 216254 - DNA, 339 bp, Klebsiella pneumoniae
atggctatcgaagctgtttccgcgactgttccgctaaaagcgggtgaacgtctggctggcctcaatcatgtggctcaattgcgcgctagatattggggcgattgctggaaagaggtagaacgttttgtcgatgatatgcgcgataaacgtgatccacaatttgaagaaaataatcgggcgctggccgctattttctttctggcaaaaataccggcggctcgtcatgagctccaattaagtgagctgactactgacgagaaaaaagcgcttattacggcgatgaatcattttcgcgcagtggtgagcttatttccaaagcggcttacaatgccgaattaa

SEQ ID NO: 216255 - DNA, 201 bp, Klebsiella pneumoniae
atgttgaatactgaaccgtcattcgcttctctgctcgttaagcaaagccccggcatgcactacggacacggctggatcacaggtaaggacggcaagcgctggcacccgagccgatcacaggctgatttactggctgatctctctacacaaaaacagggggaatcatggctatcgaagctgtttccgcgactgttccgctaa

SEQ ID NO: 216256 - DNA, 1038 bp, Klebsiella pneumoniae
atgaccgttcgaaaattaagtgatgggcaatgggtcgctgacttttatacagtcaatcgcagcgatggaaagcagggtaaaagagtccgtaaaaaattctctactaaaggggaagctcttgcattcgaaaacttcacaatgcaaaaggttgataactccccctggctaggtgatggcaaagatcgccgtcgtctttccgacctcgttcacctttggtttgaccgtcacggaattaccctaaaagatggcgagaaaagaaagaaatccatgctatgggcggcggagtgcatgggctccccacgtgctagcgaatttagcgcccagctatttaccgcataccgcgcaaaaaggcttgaagggcatttcgctcgcacaaagagaattagccaagtatcgccacggacgatgaaccttgaacacgcttactttttagctgtctttaatgaacttaaacgattaggtgagtgggcaccacccaaccccctagaaaatgtcaggcaatttcgtactgaagaaagcgagatgtcatatctcacagctgagcagattgaatcgctgttaaaagagtgccgcaacagttctgctgaagacctagagataatcgttaaaatttgcctggcaactggagcgagatggagtgaagcagaaagcctaaagcgttctcaggtttcctcggggaagatcacttatatcaagactaagggtaaaaagaatcgaacaatacccatatcggccgagctaatgggggaacttcccaaaaagaatggtgcgctatttaccccgtgctactacgcctttagaaatgccctggatcgcgcagggatagagcttcctccaggccagttaactcatgtcttgcggcatacgttcgccagccactttatgatgaacggcgggaacatcctcgtattgcaaaagatactggggcacaccgatataaaaatgacaatgagatatgcacacttcgcccccaaccatcttgaggatgcagtcagactcaaccctttagattgtcgcaaaagtgtcgcatcaacttag

SEQ ID NO: 216257 - DNA, 879 bp, Klebsiella pneumoniae
atgagccaaccaactgcccgtgctatgtggatcggcgagtgcttattaaaagcgctgttaatggaggtctccgcctggcctaaacctggccttgttacacctcattcacaaggggcgcataaagatatggatatctggttatttattaccagttcatcggctattgccccctgttttagcgcctgcgcccatgcaggggaaaatcatcaaggatcgccgtgggaactctttacaaaaatacgtgccattggcattcattatgaaaatacgctgctgcgggcaacacagcaggttaatacccagcgcggcattcttttttccggcacggttctggcgacagcggcaggatggctttccgggcgcggagaaaccctctcatataacgccttaagccagtgcgtcgctgaactctgccgcgatctctgccgtagggattttgccgccctggccgaacgcccggcgcaaacccacggtgagaaattgtatgtcggattcggcattaccggcgtgcgcggagaggcagagcaaggtttcccactagtttgccagattggcttacccgcgctgcatcaggcgctggacaacgggctggcctggcgggaagcgcttattcatacgttgctcaccttaatggcccattgcgatgacactaccgtgctgtttcgcggcggccagcaggcgctggcggaaatgaagcagtatgcccggcgtcttgtgacgcagggcggaatgtttaaccctgcgatcgagcagcaactggctgattttaattcatggtgcatggataagtgggtcagccctggcggttcggccgatttattagcgctgtgtctggcgatgtattttctttgccgccagccgcaaggagatatgacataa

SEQ ID NO: 216258 - DNA, 123 bp, Klebsiella pneumoniae
atgaacatctatttttatactttattaacgtatggcttaacgattgtaatttcattttcggttgtcggcatcatcgttggcgtcaacaagatgatgaataagttaaatatcaccgacgattaa

SEQ ID NO: 216259 - DNA, 1209 bp, Klebsiella pneumoniae
atggatatctttgttaagctcttttcgggcattggcactttttttattgaagacccgaaaatagccattgcacgttttctgttaattgttctcggctttatattggcctggatgggattccgccggaagcttgaaccgttaattatggtgccgatgggccttggtatgattgcagttaacgccggggtactgtttctggcaggcggacaaaccgggaccttaattctcgacccgatggtcagcgaacctaacgagctggtaaacctaatgcaggtaaacttcctgcagccggtctataatttcacctttagcaatggcctcatcgcctgtatcgttttcttcggcattggcgcaatgagcgacatcagctttattttgctccgcccctgggccagcattgttgtcgctctgttcgccgaggcgggaaccttcgccgcgctgctgctgggtattgaagtattcggcctgcccgccaacgaagccgcgtcgattgccactatcggcggcgcagatgggccgatggtgctctttgcctcccttatcctggcaccgaacctgttcgtccccatcgccattatcgcttatctctacctgagcctgacatatgccggttatccgtacctggtgcgtctgctggtgccgaaaaaataccgtggcatggaagttgaaattgactaccccaccgtatcgaagaaagcgaaattcatctttaccgtctgcgcctgcctgctgttgtgcctgctgctgccggtcgccgcgccactgatcctctcgttcttcctcggcatcgctattaaagaggcggagatcgaaccgtttcagaaattactggaatccacgctgacctataccgcaacgctgtttctcggcctgctgctgggcacgctgtgtgaagcgcaaactattctcgacccgaaagttgccatcatcctgatccttggtatcggcgcgctggccatttccgccgtcggcgctctgctgggcggctggtttatctggtttatctcgaaggggcgttataacccggctatcggtattgcgggcgtctcctgcctgccgacgacggcaaaaatcgcgcagaaagaggttaaccatgagaacccctacgccatcatcctgccgctagcgatgggtgcgggcgtgagcggtctgatcgtctcggctatcgccaccgggatctttatctccacgctattcctgctgaattaa

SEQ ID NO: 216260 - DNA, 1668 bp, Klebsiella pneumoniae
atgctaaaagagcacaactggcatcaactcaaggacgatacggcgcagcgcctgaatcagctggccccgtattttcgtgacggcaaaattatcgacgccaaagatactgtcgccgcgctggaagccgttattcgaagcttcgatcgcgtcaatatcgagggtaataaccagaaacaggcggattttctctccgaatgcctgtgccagcttgatccgcaaaagatctccggcctgcatatggtgcagtcatccgtaccgttgtccagccatctggatttgtttgaaaagggcatcgctgaaaagctcgatttcgcctatgccgggccgcaggatggacgtctggcgaagctgatccaggacggtaagatcaagctcggggccatccacacctatctggagctgttcagccgctactttgtcgacctcacgccgcgcgtgtcgctaatcaccgcctttgaagcggataaagacggcaatctctacaccggctttaacaccgaagatactcctgttattaccgaagccacccacttccgccagggaattgtgatcgcgcaggtcaacaagattgtcgataaagtgccgcgcgtggatatccccggcgactgggtaaatgcggtgattgaagcgccgcgtccgttctatgtcgagccgctgtttacccgcgatccgggacttattactgacacccatgtgctgatggcaatgatggcgctgaaaggtatatatgccgaatacggcgttgagcgcattaaccacggtattggcttcttcaccgccgccattgagctactgctacccacctacggcgacgagcttgggctgaaaggcaaagtctgtacccatatggtactcaacccgcatccgacgctgatcccggcgatcgaaagcggctggatccagtcggtgcactgcttcggcggcgaactgggcatggaaaaatatgtcgccgaacgcccggatatcttttatatcggccaggacggcacgctgcgctccaaccgcgccttcgcccaggctgcgggtcactacgcgctggacatgtttatcggcggcactttgcagatcgataagtacggaaacagtagcaccgccaccgccagccgcgtttcgggctttggcggcgcgccgaatatgggctgcgacgccaaaggccgccgtcatgcaacgcaatcctggctgaaatgcggcgaagagtttaacgccacccaaaagcagctaattggcgatatgccgcggggcaaacgtctggtggtgcagatgcaggaaaccttccgcgagaagcgccagcccgctttcgtcgacaagctggacgcctgggaactggcggaaaaagccaacctcgccctgccgccggtgatggtctacgccgatgacgtcacccacgtactgaccgaagagggcatcgcctatctgcagcgctgcgaagggctggaacagcgcatggcggccattcgcgccgtggcgggctacaccggaattggccttgccgccgatccggaacagaccgcacagctgcgggaggcaggcattgtcaaaacgccggaagatttaggcattgaccgtcgccgtgccaaccgtcagatgctggcggcgaaaagcattcgcgatctggttgactggtctggcggactctataacccgcccactcgattccgtaactggtag

SEQ ID NO: 216261 - DNA, 333 bp, Klebsiella pneumoniae
atggctctacatcaaatatcacatcatttcagcggcacccacgaaagagcatctctgcagcaaaccgtgcactgcggcgttgttggctccggcgatctggagatcctgctggagccgaaagcgctggcgggcgggattgaagtcagcatctgcacgccggtgaccggtttcgatcatatctgggaaatcgtactgaaacgatttctggacagcggccccctgggcaacatgcaggtcagcatcaatgacaacaacgccacgcctacggtcgtcgcgttaagaattcagcaagcgttacagcaggctatgccgggagaaacccatcatgaatga

SEQ ID NO: 216262 - DNA, 930 bp, Klebsiella pneumoniae
atgaatgatctgcgttttctggaagccagcgcccgcgttcgcgccagctcgctggtggataaaggcacctttactgaactgatcggcccggcggacaaacgaaccagcccgcacctgcccgtgctgaatgaagcggtggagtttgacgacggcatcgttaccggcatcggcctgctcggccagcacccggccattgtcatctcccaggaaggacgctttatcggcggtgcggtgggcgaggtgggcggcgcaaaaatggtcggcgcgctgatgctggcggacgaactggcggcgcagaccaccgacccggcccgccgcccgatcgttctcatctcctttgaaaccggcggcgtgcgcctgcatgaggctaacgccgggctactggcccacgccgagtgtatggacatgctgcaaaccctgcgcggtcgcgtcccggtcgtggcgatgatcggcagcaagatcggctgctttggcgggatgggttttgtcgccgccgccaccgacatcatcgtgatgagtgaatcgggccgcctggggctgaccgggccggaggtcatcgaacaggagatgggccgcagcgagtttgacgcctcggaccgcgcgctggtgttccgcaccaccggcggtaagcataagtacatcgtcggagactgtaactacctgattgccgactcgctaacggctttccaccagcaggccgcgctgattgccgacctgccctggccgcagattgaagccatgcgccgcatcggcagcgaagcgaaagtacgcgcccagatggcgctcacgaaaaaaatcagcgagtcagagccatcagatgcacgggatgtctgggctatggcaggcaataccgcgccccagtcgctggtggatatggatctcgagacgttcctgagcaacgttaaacgcctgccggtggaggaagcataa

SEQ ID NO: 216263 - DNA, 882 bp, Klebsiella pneumoniae
atggaaaatttactcggccagggccgcgccgctatcgatctgcttgttgacgaaaatagcttcgaagagaacgcgttggcggatctcaagctgccttatgaagattatggaccgggagccgtcgtcggcagcgcccgcattaacggtgaaatctgcaccgttattgctaacgacgccatgacctttaacccgcgttttccggtggtgtacgccggagttatcgggctggaagagggatataaaatggcgctggcggtgtatcgcacgctggcgatggataaagacaagcccgtcggcgagaaacgtccgctggtgctgattgttgacactcccggcaacggaccgggcaaactggaagagataattggtatgaataaagcgaccggtgcctatcagctggcgctggctgaggcgcgccatgccgggcatccgattatcgcgatggtcatcggccgcgccattagcggcgcgttcctctgccacggtttgcaagccgaccatatcctgagcctgacatcggaatttggcaccatgatccacgtaatgccgctgagcagcatcgcgcgcattacccgccaggacgtggagcgtctgagcgagctttcccgcactaatccggtcttcgcggccggaccggagttcttctggcaactgggcggggtggaagaactgatcaaggcgatcccggagatgaaagaggcgatcgttcgccatatcgcagaggtgcgccaacagaaacaagcggctggcgtgacgtcgacaggcccgcaggggcgtgggagcgcaggcgaagatcgcggcggcagaaaaatgcgcaatgtgattctggcgcagatgcgcgaggagtatcgggcggtcgcggcgcgttacttgccggcctga

SEQ ID NO: 216264 - DNA, 1104 bp, Klebsiella pneumoniae
atgaacgatcccattgcaatgctcgaatggctggttgacgcccagcagggtatccccacgttagcggaaatgccgcgccgtacgcttagcgataaaggtatcgctggccccacggcggctcacgttatcgaggagattcacacgccgttaaatcttgcgctggttacctttaccaccggcagtagcgcatttcagaacatcgtcggcgtaacgcagaacgaactgctgttgcgttccgcggcgggtaagcgtgtgctggcggaatgcggcgtaaccgctgggcagcatatggtggtgacctacgcgccgctggtgaatgtgttcacgcgtcaggcgctggatgagagtggtctgcactggtcgtttttatcccgctcatgccgggacgcgctgctcattgccctgtgtcgccagcagccggatgtggtggtgggagagtcctcatttttacgcgccacgctggaacaggcgctaaagatgaacctgcaggcgtatttaccaaaaacgctgatgctgattaccgcaggcaccccccttgatgaagcgctggttccgctgtgcgcttcactgggatatgggctgcatgatgtctacggttgccaggagttcggttggctgatcctggacggccttccgctgcgggaagatatctcgctggtcgccgcgccgcagggcggtgactggcgggaagttatcgtcggcggcctgccaaccggcgacagctttcccgtggcaacgaacggccacctgtgtaatttgcagggcaaaatccagacctggaagcgtcggcgcaccacgccggaatatgacatggtggtgatggcgactaccgcccatcaccgggaaattgtggagcggacggcacggacgattttacgtatcaaggggcgagtttgccgggtcagtacgcagctacaaacccaagccagcgccacccatatccgcctctaccccgttactgttccaggggaggaagcggcaaaagccgcgccggtcgatattatcggtccgcaggccacctcgcagtttgacgccctgcttgcagcacagcgggatttacagcaacaagcgaaaaacgatccggcatggagcaaacagcgatga

SEQ ID NO: 216265 - DNA, 705 bp, Klebsiella pneumoniae
atgagcgccctgcaacgccatactttgtgctggctggagagcgctgaactgcggctgattgcgaggcagttgaacggcgcgtttagtgccctacccgcctcattgcgggaagagttgcgggactatctgctttccggatatctccccggcatcgtgcgcaggggcatccgtgatgaagcgagtatttccctgggcttttgctttccgcagcgctggcaagggcagcgtctacggctggcgacggttgcttcattacaggccgtcacgcgcgtgtcaacaccggaacaaacggccatcctgcctgccgtcaaccgtaccagcgcgatacgcgcctttagcgccctgcgtcaggcgtggcgtgggccggaaaccgggcttggcgtgtgggggtcggtggcgctggagatgacgacgccctggctatggacggacagtcgctccgatttagatattcgcataacgccctggcacgaaatggcgttaagcgattgttactctgttctgacagatattgcccagcaatattcagtacgtattgatggagaaattaatttaccaaacggtttttctatcaatatcaaagagtggtttagcaggagtctgaccctgctggctaaaggtgagaccgatgtcgaattaatgacgcgacaagacgtcgacgggttaataaaacatctttcaatgatatatattaaaggaaattaa

SEQ ID NO: 216266 - DNA, 219 bp, Klebsiella pneumoniae
atgtctgaagttaaatcaaaagtaccgggtgtggtcgatgaagttaaagccgccgtaggcgacaaaattgaaaaaggccagccgattgttattcttgaagccatgaaaatgaaaatgcctgtcgcctcaccggaggctggcgtattaaagtcattggcggtgaacgcaggcgatcgcgtaaacccaggcatggtcttattcgaaattgccgctgagtag

SEQ ID NO: 216267 - DNA, 381 bp, Klebsiella pneumoniae
atgattatttacggattgatgttaatgggattgtgcatgttcgccgggttaattgtcggcgatcttttgggtttgctgcttggaatttccgccaatatcggcggcgtcggctttgccatgctgtttttagtcgttatttcccagaagttgacggaaaaggggctgttgtctaaacccgccgaacagggggttggattctggaatgcgatgtatatccctattgttgtcgccatgtccgcgaaccagaacgttgtggccgcgctcaaaggaggcccggtggcgcttattgcaggccttggcgcagtcgtgattggttttctgctgattaaaccactgagcaaaatcggcagcaaaagcacgatgacacgttcagcagactaa

SEQ ID NO: 216268 - DNA, 771 bp, Klebsiella pneumoniae
atggaacaacttacaaagattcttaccagtaacttcaccagcaatgccctgatcaccgcttttgtggtggttggcattgtctgctgggtcgcggcttggatctcgacccacgtctttcgcggtaaaattcacagttcggcgatcgccattgccgcaggcctgctgctggcctggctcggcggcgaactcaccggcggcaaaaaagggctttccgacatcacgctttttagcggtattgcgctgatgggcggcggcatgttccgtgattttgccattatcgccaccgcctttggcgtgaagcttgacgagctgaaaaaagcgggcctcgcgggcgcgctggcgctggtcgtctccaccgtgctctccttttacctgggagcgattgtcgcctgggccttcggctataccgatgcggtcagcatggcgactatcggcggcggcgcggtgacctttatcgtcggcccggttaccggtgcggcgcttggcgcaagttccgatgttatcgcgctcagtatcgctgccggggtgattaaatctatcgccatcatgattgtcacgccgctggtggcgaaagccgccggactgaactctcccgctgcagccattgtatatggcgggctgatgggatctactagcggcgtggcggcagggctggcggcgactgacccgaaacttgtaccttatggcgcaatgacagccaccttctataccggcctgggctgcctgttggcgccgtctgcgctctatatctctttagccccgttcttttaa

SEQ ID NO: 216269 - DNA, 432 bp, Klebsiella pneumoniae
atgtattcatttcaacgtatgaagcccgggcaaatcgcgatacaggcctcactatgcacccaggaggaagaggaggttttccggcaaaagctactgggtgataaacccgaacaccgaatcggctttgcgtttatcagcggcacctctgacgaactgcgaaacaagctgcagcgctgcgtcatcggatgtgcgttgaagaatcagatcatcactaggcaggagtcggccattttcaccttatgctcacttagccgccaggctctgacccacgcgttaaccaacaccatcaccggcgatcatatccgtctgaaaatcgccttagttagtacctcccgatggctcgccgtcgccatgtacggcgaagctcaggtttatcagcggattactcaggaaatcatgggactttgtctacatcgttatcctcccgcataa

SEQ ID NO: 216270 - DNA, 942 bp, Klebsiella pneumoniae
atgcctgagcaggacataactttgcgcaaactggagatttttctgggatatatggataccatgaatatttctaagacggcagaaatcatgcatatttctccggttagcgtacatcgtgccttgcattctttggaggataatttacgctgcgatcttttcacacacaatggccggaatttacatcccctccccggcgcatgggtaatgcaaaagcaggcccgcgaggtgatcaatgcaatggaacgctgtatttatctgacgcgtgaggcttcaggataccattctcctgcattacgcttaggcctactctattcactagtattaaaaacggcaccgcagatagtacagggattgaagaagcggcgccctgagctttcaattgagtttatcatgaactctaataagaaattattagaagcgctaaatgaaggcaatatcgatgcggcattaatctctacgcccgatgagtataattcaaatttatttgaaacctggacgatattttcggattcgatttatttagcggttcctgtacaggatgcggatacgctacaaacccccgttgatctctctcgtttacagagtaaaaaatttattgccttgagtgaagggttcgcaacctggagaggttttcagcaggccttccgtatcgctggctttgagccggatattgcggttcgggtacacgatattttttcgttaatgagcatggttaatgctggagtggggtacactctcatacccggacgcatgcgcgggctttttcggagtgggatacgcctgctacctttgcaggaagcctatcgcatggaacaagaaatttcgctcgtttttccccgtagtcaggaaaatcatcctggactgctatctcttctcgcagaatgccgtatgtatgccaggcagcttatgcgggaggataacgatgtagacaaagtcccatga

SEQ ID NO: 216271 - DNA, 1932 bp, Klebsiella pneumoniae
atggctgaattcgaaaccacttttgcagatctgggcctgaaggctcctatccttgaagcgctcaccgatctgggttacgaaaaaccatctccgatccaggctgagtgcattccgcatctgctggacggccgcgacgttctgggtatggcccagaccggtagcggtaaaaccgcagcattctctttaccgctgctgaacaacatcgatcctgagctgagagcaccgcagattctggtgctggcgccgacccgcgagctggcggtacaggttgctgaagcaatgacggaattctctaaacatatgcgcggcgtgaacgtggttgccctgtacggcggccagcgttatgacgtgcagctgcgcgccctgcgtcagggtccgcagatcgtcgtcggtaccccgggccgtctgctggaccacctgaagcgcggcaccctggacctctccaaactgagcggcctggtactggatgaagcagatgaaatgctgcgcatgggctttatcgaagacgtagaaaccattatggcgcagatccctgaagggcatcagaccgcgctgttctccgccaccatgccggaagctatccgtcgcattacccgtcgctttatgaaagagccgcaggaagtgcgcattcagtccagcgtaacgactcgcccggatatcagccagagctactggactgcctacggcatgcgtaaaaacgaagcgctggtgcgtttcctggaagcggaagactttgatgcggcgattatcttcgtccgtaccaaaaacgcgaccctggaagtagctgaagcgctggagcgtaatggctacaacagcgcggcgctgaacggcgacatgaaccaggcgctgcgtgagcagactctggaacgcctgaaagatggtcgtctggatatcctgattgcgactgacgttgcggcccgtggcctggacgttgagcgtatcagcctggtggtgaactacgacatcccaatggattctgaatcctacgttcaccgtatcggccgtactggtcgtgccggtcgtgctggccgcgcgctgctgttcgttgagaaccgcgagcgtcgtctgctgcgcaacatcgaacgcaccatgaagctgaccattcctgaagtggaactgcctaacgcggagctgctgagcaagcgtcgtctggaaaaattcgccgcgaaagttcagcagcagctggaaagcagcgatctggatcagtaccgtgcactgctggcgaaaatccagccgacggcggaaggtgaagagctggacgtggaaacgctggctgctgcgctgctgaagatggctcagggcgaacgttcgctgatcgttccgccggacgcgccgatgcgtccacgtcgtgaattccgcgatcgtgacgatcgtttcgaccgtcgtggcgaccgtaatgatcgcggcccgcgcggcgatcgcgaagatcgtccgaagcgtgagcgtcgtgacgtgggtgacatggagctgtatcgcattgaagtgggtcgcgatgacggcgttgaagtgcgtcatatcgttggcgcgatcgccaatgaaggcgatatcagcagccgttacatcggtaacatcaagctgttcgcttctcactccaccattgagctgccgaaagggatgccgggcgaagtgctgcagcactttactcgtacccgtatcctgaacaagccgatgaacatgcagctgctgggcgatgcgcagccgcgcaccgaacgtcgtggcggcggtgagcgtcgcgaaggcggccgtggctttggcggcgagcgtcgtgaaggcggccgtggcttcggtggcgaacgtcgtgaaggcggtcgtggtgaaggacgtcgtttcagcggcgaacgtcgtgaaggccgtgcgccgcgtcgtgacgatgcatccgcgccgcgccgcgatgactcagccggtcgccgtcgcttcggtggcgatgcgtaa

SEQ ID NO: 216272 - DNA, 690 bp, Klebsiella pneumoniae
atgtcgatatctaaacgcaattttctcaaggcagtatcatgtgcttattttttttatagctttaaagcattaacaaaagttaaccaaccgatagaagactatatttctaccaaagataaaaacacatggccaagtaaggtccatagagttgaggagttttatactagcactgatcgtgactattccgatgcaattctgaggggtattaactattgctccttaaataattgtgttttgtttttttcggataaatacaaaatcagccgatcgattattttaccagataatacctatatcatgggaaaagagggagcattactatactgtgacactgataagccgataagtatattttcggcaacttcaaaaaaaaacatcaacattaaaggcttaagtgttgatggaggagtaacagaaaaaacaggaaagaattatacacggttagttaggtttatcaagtgtgttgatattaccattaattcatttaaagctcgtaatagcgctgactggtgcatatcatttgaagcatgtaaaataataagactcgaagatattattgtttcaggcggagggcaccttaagcctggaggaagagatggtattcattttcttgattgttcatatttctatattgatagagcggatataacctctggagatgattgcataggcataacgaggctttgttga

SEQ ID NO: 216273 - DNA, 1131 bp, Klebsiella pneumoniae
atgtatattacacgaaaaaactttactccagccgcgatatttataattactaatggattttctatattatcttggctgtttcccgactttggtttccttcgtaaaggctttacaactcagtttcctattttagatgaagatacacttggttatatatctgtcatgctacttctactgagtttcctatggttaggttataatttgtttccaaaaagtagagggcttgaaagatttgagacgataatcgttaatgatagaatgtatttcttcagtatatgtatttcgatgttgggattgtgcgcaagttttttagcaataatgaaaactatgtctattggtgatattctgtttgttgttcagggaggacaggccaatgcattaaaacaagcattatacgaagactattcattcggcattgttagtctaagatatggtgtaatattatcaggaagttttgtcatatacaggcgattgattggggtcaaaaatctttggatggacttattggcagtactgtcattattgtttgtttcaatgatgtctagtcgtttaactcttatcgctgcgatatttggaggcttgtatttatttatatattggaaaggaaaggtcaagtttaaattcttacctgtttcagttgcaataatggtggggtttcttttattatcggcgatgaattggagtagaaatgctaatttttacgagtctaaagggttaggttttttttctgctggtgtatctgaaattctggcctataccggaactcctgtccagggggcactttatgcagtaagtaatccttctgtaggggatgaaagtactgctgtgttttatagcagaactacgatagaaccttcactgacaacaaactcagcaatattagatgtaataaggttatatggactctgggggctactgttatcagctgtagttttgtttgcgtcgggattatatatttcattttttgaaagctatagatatggtaagtatatttatatgaacatcccaatattctattcaatcgttgagttttggcggatatttttattttttcaggggattattattacactcattttttcttgtgtatttttaacagttagcttaatgctgaggtttggcaggaaatag

SEQ ID NO: 216274 - DNA, 1089 bp, Klebsiella pneumoniae
ttgaaaaaaatattgatactaagtcatactcgcgcattttcagacttcaagattggaagtcatcattatgcaaacaaattggcagatttaggctttcaagtttcatactctggtgtgccagaaacaattttccataaacttttaaaaaaagaaattagaggcccttataagttagatgcaaatgtaaaaaacacacaacttagaactttgttcccaataactcttccttcatctatatttacagagacattaaactgtcggttactacctttttataagggcaactcaaaaattttagatgagtattatgatgttattatttgtgactatccatatttctatccactgataaagcacctgaaatatttttcattaatatatcgtcctacagatgattacttggctatggggggggataaggtaagagcatatgaatcaaggatctgtatagaagcaactaaaatagtaccaacctctgaagtagtatcaaatgtgatcattaacagatattctatctccaaaaacaggatagagactataacaaatgggtttgatgcagataaattttttataaaaaataatagtaaagatcgtaaaggagccgtatatattggttcattagatgaccgttttgattttgatgcactaaaaatacttgctcaaaaaaacaaacaagaaattttcgatatttttggtccaataaacaaaagtgcacagcaaagagttgatgaattaaaatcattcaataatattaaattccatggtagtgttaattatgatgatacaaataatgtattaaataattataaggtaggattgctattgcttaaaaatgatccttcgaataaaggaaggagtcctatgaaattatgggagtatattgcatgtggtttaaatgttctatattctaatattgataatattgctcatgtaaaaaatacgtatcaatacagtaatggaagtgatatttcggttgtatttaataaagcaattgatactccatgctctatattagacactcatgatagcttaaaaataaattcttgggaacataaagtgaaattactgactgcctttttccccgaatag

SEQ ID NO: 216275 - DNA, 1428 bp, Klebsiella pneumoniae
atgacacttctcggcaggaattttattgtcagtatgatgctggcattatcagattttgtaagctttatagcttctatttatttcgctttaggtattttatcgatattcgttggacctcaacaatatgatttactagacccggcattaggtcaatggatagtattacactggcttttagcactatgctgtatagcttggttttcaatgcgtttgaggcattatttttatcgtaaaacattttggtttgagttaaaagaaatacttcgtacattgcttattttttcaattatcgaaattgcggttgtggcattcgcaacttggccattccctcgttatttgtggggaggaacttggttatttgcaatgatacttgtacctttttcaaggatgttaacgaagtatattttagataagtgtaatctttggcaaagggatacatggattattggaagcggttcaaatgcgcatgaagcatacaaagctataagtagtgaaagaaatcttggtttaaatattgttggtttcatatatacagatgttggaacacttcctggcgatacgatagaaaatataaaagttgaagcagttgataaaaattggcttcttactaaaaataagaaaacacaatttatcgttgcagtcgaatcatttcaaggcgaaatcagaaacgcctggttgagaaattttatgattaaagggtatcgttatgtatccgttataccgacgttgcgtggtatgcctttggatagtactgatatgtcatttatatttagtcatgaggttatgattttccgggtgcaacaaaacttagctaaatggtcttcaagggtactaaaacgtgtttttgatattataggggcattggctattattgttatcctatctcctgctttattatatattagtctaaaagttcggaaggatggcgggccatctatttatggtcatgagagaataggcaaagatggtaaaccatttaaatgtttaaaatttagatccatggttgttaattctaaggaagttttagagaaggtacttgctactgatcctgaggctaaggctgaatgggatgcaacattcaaactcaaaaacgatccacgtataacccaaataggacaattcctacgaagaacaagcttagatgaattgcctcagttattcaatgtgctacgtggggaaatgagtttagtagggcctcgacccataatcaccgctgaattagaacgatataatgaggaagttgattattacctattaagtaagccaggtatgactgggttatggcaagtaagtggaagaagtgatgttgattatgaaacccgagtatacctcgatgcatggtatgttaaaaattggtcaatgtggaacgatatagcaattttgtttaaaacaataagtgttgtattaagaaaagatggtgcgtattag

SEQ ID NO: 216276 - DNA, 2163 bp, Klebsiella pneumoniae
atgtcagtaaataaaaaaaccacagttacagagtctgatgatatcgatcttggaaaactggtcggggaattaattgatcatagaaaattaattatttctataaccgccttgtttacactcattgcaattatttatgctttattcgctacgccagtatatcaagctgatgcaatggtacaagtcgaagaaaaacaggcaaatgctatactaagtaatttaagtcaaatgctacctgatagtcaaccgcagtctgcacctgaaattgccttgctgcagtctcgaatgattctaggtaaaacagttgatgatctaaatctgcaaacgcttgtttctgagaagtattttcctttgtttggggaaggttgggcaaaattaacaggccagaaaccccattctatttctgtctcaagattttatgtaggagagaaagataataacgacgaaactgatgctatattgaaggtcttagattcaaagaattataccattactggtgaaaactttgagttgaaaggcaccgttggcgaactggtagaaggaaatggcgtatcagtcaaaataaacgagatagatgcccccattggtacagaatttaaaatttcctcaataactaagttaaaagccattagtgatctgcagaaaatattttctgtagcggatcaaggaaaagatacaggaatattgagtctcactatcactggtgaggacccagttcttattaagaaaattttaaatagcataagcgagaattatttagcacaaaatatagctcgtcaggctgcacaggaccaaaaaagtttagaatttttaaaccaacaactccctaaggtcagaagtgacttagataatgcagaagatcggttgaatgcgtatagacggcagaatgattcagttgatttatccttagaagcaaaatcagttctagatcaaattgtcaatgttgataaccaattgaatgagttaacattccgagagtcagaaatatcacagctttatacaaaagaacatccaacttataaggcattattagagaaaagaaaaactctgcaggatgagaaagggaaactaaataaacgtgtttctagcatgccagaaacacaacaagagatactacgcctaagcagggatgtcgagtccggtagagctgtatatatgcagctacttaaccgtcagcaagaattgaatattgcaaagtctagtgcgataggaaacgtcagaattattgataacgcagtgacgcaaccaaaaccagtcaaaccaaaaaaagtcttgatcgttattgtcggacttgtattggggggctttgtatcaattggttttgtattatttagagtcttcctaagaagaggaattgaaagcccggaacaacttgaagagttaggaattaacgtttatgcaagtattccagttgcagaagctgttgctgaaaaagctctgcagaaatcaagttggaaaaggaaatcggtagaagaatacagtagttttcttgcaattgataacccagctgacttagccattgaggcaataagaggtttaagaaccagtttacattttgcaatgatggaagccagaaacaatgttctaatgatatcgggtgccagcccaaatgctggtaagacattcgtaagtacaaacttggctgctgtcatagcacaaactggcaagaaagtactgctcattgatacggatatgcgaaaaggttatacgcatcggttattcaatgtctcaaacgataatggtttatcagatgttctgtcaggcaaaatcaaaattgaaaatgctgtaaaaccagtcaaggatataggattggattttatttctagaggaatggttcctccaaatccagctgaacttctgatgcacagacgatttggggaacttatcgaatgggcaagcaaaaattatgatattattgtcttagatacaccaccaatattagctgtaacagacgctgctgtaattggcaactatgcaggtacaacccttttagttgcgcgtttcgagcagaatacagttaaagaaattgaagtcagtttcaaaagatttgatcaaagtggtgtggctgtaaaaggttgtattctaaatggagttgtcaaaaaagctagcagctattatggatatggatataaccactatggttattcatataacaatgacaagtaa

SEQ ID NO: 216277 - DNA, 135 bp, Klebsiella pneumoniae
atgctattcggtcactggatcggtaaaaaagatattccggatccttatcgcaaaagtgaggaggcattcttatcagtctatgccttaattgaacaggctgggatcctctgggcggaaaaacttggggccaaataa

SEQ ID NO: 216278 - DNA, 1386 bp, Klebsiella pneumoniae
atgagtaccctgcaagagccccctctgacagagcaaacgggtggattacgccgtaacttaaaaaagcgccatttactgatgatgtcgctaggcggaacgataggaacgggcttatttatcgggattgccgaacccctgtacagcgttgggcctgctggcactcttctggcttatttattagccggtgggataatgctggcgacgatgatgtgtcttggcgaattatcgtgcgcgtttccccactctggctcatttcagcattatgcattgatgtttattccaaacccgatctggagctataccatcgggtggctatactggtttagttgggtattttccctggctgctgatttaaccgctgcaggttttatcgcccaccattatttcaccaccatacctgtctatgaattctgtctttatattctcattgcattaacgctcgttaatcttttttcagcgaagagttttggtgagtgtgaatactggctatcggccattaaagtttttgctatcgtgttatttattgcggcaggaggtgtcatgatctattcgttatcaggacatgccggctggcacccgacattaaaaacgtcggggggctggtttcctcatggctggtggcaaattctggtttgcatgaccatcgttatctattcttttcagggagttgaactggtcggaaatgcggctggggaaaccgaatcgccccatacaattttaccgaaagttatcctgggaattggtgttcggatcattttattttatggcctggcgattgctattctcgcgctggtttatccacgtgatcgactgcctgacgggcaaagtccttttgtttgggtcttttcccatgtgggcatcccgggggcggataccttgatgacgttggtgatcttttctgcggcggtgtcggctgcgaattcggcaatttatgccagttcgcgaatgttatggtcgatggcgggcgaccatttcgcaccggcacgttttagccgggtaagccgcaatggcgtcccggtgaatgcgattttgctgactgccgttttggcactggtatcgatgcttacccgttatatttccgcacagcagttatatctctatttgatcgccagcaccgggcaggtagggtgtctggcctggattgtgattggctggtgtcagtatcgtttccggcgtgcggtggaccggggcgaatatccaaatagcctgctgcgctatcgctcccctttgtttccgtgggtggcggcaattgtgatagtcaccaatatcgccatcatcatcggcacctggttcagtcaatccggaatgttgattatgctgatagaattgttatttatgacctgcattttcgcgtcatggtttatattcaggcccatcctgaaatag

SEQ ID NO: 216279 - DNA, 1104 bp, Klebsiella pneumoniae
atgtatatgccaacgctcaaaatcaatttacgcaaactggaagaaaatgcgcgaactgagaaagctttgttagccagtagcggtattgacgttatggcggttaataaagtctttgatggctgtgtggaaactgcacaggcagtttttgatggcggaattcatgttattgccgaatcaagaacttataacttgaaaaaaatccgtgagatcggttgcacgacttgtttacttcgtagcccttgcctgagtgaaattgaagatgtcgttcgctatgcagacattagcctaaatagcgagccagtggtattgcgcgcattatcagaagaggctcgtcgccaggggaaaactcaccaggttctactgatgatagacatgggcgatttacgggaaggcatttggtttagcgaatatcaaaaaattctcgatactattaaccttatcaaaacattgccttgtctcgatctgtatggtcttggcactaatttcaactgctatggcaccgttctgccaacggtaaaaaacggcgaggatttcctggctctggcttctcgactggaacgagacagcggattgacgattcgtcgcttatctgccggtaattgtaccagctatcacctgctggataagggcatttggccgaaagggctgaaccatctgcgcattggtgggttacatgaatttggtatcgaatatgtagagatgaaatatctcaatgaatttcaccactccgcaaagcctgtagagaaagcgtgctcggatatgtatgtgctggaggccgagattatcgagttaaacagcaaaccgacagtcccggttggtgagttgggggtggatgcattcttgcagagtaaaacctttaccgataacggcatccgtaagcgtgcattactggcatttggtcgccaggatgtcccgtctgataactgtgtgccatgtcatgacagtatcaccattctggggcagaccagcgatcataccctggtggatattgaggattgcccattaccactgcaggtgggtgatgtgattagctttgaacttgattacaccgggctattgatggcttgccagaccaaaggcgttgctatccgatttattcgataa

SEQ ID NO: 216280 - DNA, 1422 bp, Klebsiella pneumoniae
atgagtaacaatagttctggcttacttggtattaaagacattgtttttatgaatgtcattgccattcttagtttacgacaaatacccaacgttgcgccttatggggcttctgcgatgctgttatgggtaattgccgcattttgtttgttctttcctctggcaatggtatgtggcgagctgtccaccggctggccgaaagacggtggtatttttgtctggattaaggaggcgtttgggaaacgtatcgcctggattgtggtggtttgtttcctgttttcatgtgtgctgtttttcccgctgatgctgcaattcggttttaccgctctgggatatatgattggtaatggtctggcagaaaataaggcattcatcggcattggttcggcagtcatcttctggctactgacgctaatgaatattcgcggtatggaatggacgaaaatcatcaacagcgtcagcgcctggtgtggtgtgtttattccttcggcgattttaattattctggcgattgtctggctgctcaccggtcatccgatgcagacgaactatacgagcgcatcaaactgggtgcccgatcttggacactgggataccattgtatttctgtccagtatgatgttcgcttttgccggtctggaggtcgcaccaatgattgccgggcgcacccgtaacccgcagcgtgatttcccgcgggcgatggctgtttctgccgccgtcattgtcgggatatatatggttggcacctgggcactgattacgctattaccagcaggaaaaaccgatattgttgctggtgtcatgcaggctatgcacgctgcagccgatactctccatatgccatggctgattccggtgatggctatctgcatgtttttcggcgcgttgggccagattaactcatggctggttggccctatctacatgcttcaggaagcttctcgtgaggataacctgttaggcgataaaattgcgcaattgcatcctgtctggaaaacgcctgcttttgcgctaatggttcaggcgattattgttacggtattgtgcttctcaacctttatctcgccaagcgttgcggcggcctactggatgctgactgcgctcaccacgataacctattttatcccctacctggtgatgttccccgcgttctggcgcctgcgcaaaacgcagcctgacacaccacgaagtttcaaaattccggggaaagtgctacctgccgtactacctgcattaggttttatttctatcgcctttgccgttgtgttgctgtttattccgccatcacaaatcgatatgggcgggtatttccagtatgccggcaagattattggtggggcattactggcgattgttgtcgctgaatggatttaccatcgcgctttaaaacgcaatacacgtctgggtatggtgaaggggaaataa

SEQ ID NO: 216281 - DNA, 1398 bp, Klebsiella pneumoniae
atgactgactccattatcgaaaattacaatcaattacggcagaaagttgtcgaggacgatcgacgcttccagcagaaggacggccacctgtgttttgaaggtgtagatctcgatgctttagcgcgtaagtacccgacgccgttttatgttttctctgaaccagaaattattcgtaatatcaaagagatcgaacaggcatttgccgcacataaaaatacaaaaactttttttgcatcaaaaacctgttccgtcatgggggtactgaaagccattcgggatgctggaatctgcgccgaagcgaattcgcagtatgaagtccgtaaatgccttgagattggttttcgcggggatcagatcgtgttcaacggtgtggtgaagaagcccgccgacctggagtttgcaattgccaacgatctgtatttgatcaacgtcgatagcctgtatgaactggaccatatcgacgcgatctctcgtaagcttaagaaagtggctaacgtttgtgtgcgcgtagaacctaatgttccttcagccacacatgctgaactggtcactgctttccacgctaaatccggtctcgacctggaacaggcagaagagacctgtcgtcggatcctggagatgccttatgtccatctgcgcggattgcatatgcacgtaggtgatcaggtacctgaatcagaaccctttgccaaagccacgaaagttctggtggacgaatctcgtcgtctggaagaagtgttaggcattaagtttgatttgatcaacgtgggtggcggcattccggttccttataaatacgatgaagaaaacggcgacccgctcaaagacaatatgtatgccgggatcaccgcgcaggatttcgcggatgcagtgatccgcgaggtgcataaatggcgtactgacgttgaaatctgtattgagccagggcgcaaagtcactggctccgctgcggtattgctaacagaagtcgcctgtgaaaagcgtaaaacaaactatgaccttgatggcaatgtggagtgccacgttgaatggaagtttgttgatgcggggtacagcattctgtccgatagccagcatttcgactggttcttctatgtttacaatgcctcccgaatgaccgaggctcatgatgcatggatcaagcttgccggccctctgtgtgatggtggtgactatttccatatgggcgttaaaggagaagaattcctgatgccgaaatccaccgcgcccggcgatattgtcgcgtttcttgatgccggggcgtataccattgaaagccaaactgtctataacaaccgcccgcgttctgccgtggtgatgattgataaaaacggacatgaccgtttaattcgtcgggaagatagttacgaagatatggtcaagtacgacctttattaa

SEQ ID NO: 216282 - DNA, 1428 bp, Klebsiella pneumoniae
atggcatccaccaatgaagagctcgcttcagcacttaaaatgttctctcgttttttcgatctgatacatcaaccgctggccgtgattaatgaacgaggcgaatacgtgtattacaaccaggaaagcgcggatctggacgggtacagtattgaacaagcgatgggtaaacatatgctggatgtctaccccagtatgaaagaaaaccaaagtacgatgctttcttcactaaaagacggggttgagtatattggccattaccagatttactacaatgcccgaggccaggcggtggattatcagcataccaccgccccgctctactccagcaagggcaatatggtcggtgtcatcgagatcggcaggaatatgtccggcgtccggcgattacaggaacaggttgttgagctcaaccatctgctttacgctcagggccatgaaaagcaccatgcaatcattactgaaaacgcggaaatgcttgccaatattgcaaaagctaaacgtctggcggtgagtaatattcccgtgacaattgttggcgaaacgggtactggcaaggagcttttttcccgtcttatccaccaatgcagtaaccgcgctaacaaacctttcattgccctgaattgtggagcactgccgccaaccctggtggaaagtacgctttttggcaccatgcgcggcgcttacactggcgcagagaacagtcagggctatctggagttggcgaacgggggaacacttttccttgatgaactgaacgcaatgccaatcgagatgcaaagtaagttgcttcgcttcttgcaagataaaacattctggaggctaggcggtcagcaacccatccattccgatgtgcggattattgccgcgatgaatgaagcccccgcgcgattaatccagcaagagcgactgcgcccggacctattttaccggcttaacgtcggaatgctcatgctgccaccactacgcactcgcccggaagatattcctctgttggctaattatttcattgataaatatcgcagtgaagttccgcaagatatccatggtctcagcgaggcggcacgcattgcgctactgagccatacctggccgggcaatgtcaggatgcttgaaaacgcgattgtccgcagcatgatcatgcaggagacagatggcatgctgaaaaagatcgtttttgaaaatgaagaactgagtttaggcggcccggaaaacccaacacagcacccctctctcccggcagcagaaccggataacgaaagttctctcgaggcgcgggtagcaagctatgaaagggggctaatagaaaccgcgctggatacttaccagggaaatattgcggcggcggcgcgcagtctcaacgtctcccgaacgacgctgaactataaggtacagaaatacggcattcgttttggtgtcgtacaccgttaa

SEQ ID NO: 216283 - DNA, 1269 bp, Klebsiella pneumoniae
atggaaaaagatcctattcctcaggccacgtcgcccctggctacgtggctttcttatctggaacatctgcacagtaaaaccatcgaccttgggctggcgcgcgtcagcgaggtcgccgggcagatggatatcgttaaaccggcgccgttcgtttttaccgtcgcgggcaccaatggtaaaggcaccacctgccgcacgctggaaaccatcctgatggcggccggttataaagtgggggtctacagctctccgcatctggtgcgctacaccgaacgcgtgcgcattcagggggctgaactgccggaggcggcgcatacggcttcgtttgctgaaatcgaagcggcgcggggtgacatctcgctgacctattttgaatacggcacgctctcggcgctgtggctgtttaagcaggcgcagctggatgtggtgatccttgaggtcgggctcggcgggcgtctcgacgccaccaacatcgttgatgccgacgtcgcggtggtcaccagcatcgccctcgatcataccgactggctgggcccggatcgcgaaagtatcggccgggaaaaagcgggcatctttcgcgccggtaaaccggcggtggtgggggagccggatatgccgctcaccatcgcggaagtggctagcgagaagggcgcgctgctccagcgccgcggcgtcgactggcgctatgaggtggaaggcgaaacatggtccttccgcgatacggcaggggcgataagccacctgcctctgcctcaggtgccgttgccgaatgcggcgacggccgtggcggcgctgcgcgccagcgggcttgccgtggatgacgctatcctgcgcgcagggatccgcgatgcgatgctcccgggacgctttcagataatcagcgacgccccgcgagtgatcctcgatgtggcgcacaacccgcacgcggcggcctatctcgccgggcgtctcaaaacgttagcgaaaacgggacgcgtgctggcggttattggtatgctgcatgataaggacatcgccggcacgttggccaatctggctccggaagtcgatgcctggtactgcgcgccgctggaaggcccgcgcggcgcgacggcagagcagctggtggaacatttgcgctgcggtacagtctatagcagcgtggcgcaggcgtggcgtgcggccatggctgacgctaaagtggaagataccgtgctggtgtgtggttcgtttcacaccgtagcgcaggttatggaagagatagacgcggggagaatcggtggcgagtaa

SEQ ID NO: 216284 - DNA, 1128 bp, Klebsiella pneumoniae
atggctgccagaccacgtaaaaataatatatctattccaaatttatacccgctcttcagtagaaaggttaataaagtatactggcgttataagcacccgataactggtaagtttcatagtctaggaacagacgaagcagaggccacggcaatagctattgaagcaaataaaagactggcggaacaacaaacccgccagataatggcaatcactgacagaatttccaccagctcaggaaaatcaatatcaactaacacttggcttgaacgttactggaagattcagcaggaaagattaaagtccggagatattaaagaaaatactgtcaaacaaaaagcaaaaccagtatctctgcttaaggaacgggtaggaatgaaattaatatccgctgtcaatgttcgagatgttgcgcaaattcttgatgaatatttagcggagggacaacccagaatggctcaagtcattcgctctgtcctaatagatgtttttaaagaagctcagcatgcgggagaagtacctcctggttataaccctgcactagcaactaaacaacctcgtagaaagatcactcgccagcgcctcactcttgaggaatggcaaaagatttttgatatagccgatgaaaatcacaaatacatggggaacgccatgcttttagccatagtaacagggcagcgactaggtgatatatcccgtatgaaattctcggacatctgggacgatcatctacacgttgagcaagagaaaaccggaagcaaaatcgctataccattagctctgcgttgcaacgcaatcaactggagcctccgagatgtaatcagtcgttgccgggattatgcagtaagcccttatttggttcatttctttagaaccacctcacaggctgagcgaggagcacaggtgaaacccagaacactgaccatgaatttcagcaaggcaagagacagtgcagatattgactggggacaaggtacaccggcaactttccatgaacaaagatcgctttccgagcggttatataaagcccaaggtataaacacgaaagatttacttggacataaaactcaacaacaaacggataggtaccatgatgatcgtgggaaggggtggacaacggtggccttatga

SEQ ID NO: 216285 - DNA, 2139 bp, Klebsiella pneumoniae
atgaacaactacccgtatctcattaaagctaaggcaaaagcaaacgaagcgaaaagcctcttctgctggttctctgctaaatccgattctcgcgccgagcgcaaaatcctggacatcctggaagacgctgaaattaacgttggccgtggcgccagccatcagctgccgatccgcaccaactggctcatcgttgatgacttaccggaagaaggtgtactggatgacacctggtgcgatcgctacgagcttggtggtgaagacgggctgacatggcaaaaaatcgttgcgccagcggctgctgaaccacagccctctagtaaaccagaaaacgatatctctcctgcaaatagtgatgaagaagactattcgaacaatgaagaagcactcttcaacctggcggaaatgtcattccgcacgcagctgcttgcccagtatatggccgacgaacgtcacgtgtatcacattagcattcctcatcgtaaccgcctttcagcgatggaaatggatacggataatcacggtgtgcagaatctgctgctgacggcagaaaatattccggagcttaaaaaatatgatatgcctggcctgtggaaatttaccagcgcatttaagagcgtatttcctgtggggaaacgccatgagctcggcaagcaaattcagttcgccaaattgtggcttgaaacgtcgcacattgaccgcgggatccttacaaaggaatggactgctggaaactatatcacctcaataaacaaaacagataccggcgccaatgctggtggcggtaacaaaactgaccgcaatccggattatcagcattcgctggatactctggacatagagatcgcccttgcgacgatgcctatggattttgatatctataattttccggcatcagtccaccgccgcgcgaaggaaatagtacagaagaaagaaagtccatttaaagaatggtctgcagcattacggagcacaccaggcatccttgattattcccgtgcagcgatttttgcactgatcagggaagcatccagtggaataactccttttccagatcggttgcgtggctacatcaacgcgaatctgactgaacataagcatgataccccaagcgctgaaacgcttgccaaggcggggcatattccatctgctgcagtcactctggatgcaataaaccaagcaatcgccggagaggatagcagcgcaaagctggaaacactctcctccgactttaaagcagttggtaccgaactggtaaaagaggctcaaaagcaacgtccagacgctaatcaggttctggcctccgagcgcggcgaatatgttgaagggattagcgaccctacggatccgaagtgggtaaccgaagaccttaccaagaccaggcagcctgaagtttcaaaaattggggacggagtattttccattgacggtcttgttgacgttacgggcaaggttaaccaaaaagaaaaaacagatgaagttgttcatcaaacagatgctgtagatattgaatccggtcctcataataaggaggaagatcagccaattgattatgttcacgttatggttgatctggaaaccatgggtaaaaaacataacgcccctatcgtcgctattggtgcggttgtttttgacccggcaaccggctctattggagaaagtttctataaagtcgtatgccttgaatcctctgtgaactggggcgccgtaatcgatccatctactgttatctggtggcttaagcagtcctccgaagcacgctctgcaatcgtaaatgatgatgctatcccgttgctggatgcattactccagttcagagaatttgtttctgataatgtcgctggtgggagcaaaaaggcgcaggtatggggtaacggtgcgtcattcgacaactctattctgcgttcttcttacgattgcattgctgaagattatccgtgggaatactggaacgatcgggacgtacgaacaatggtagagatcggccaggccattagcttcgaccccaaaacaacgatcccgtttgaagggtctcgtcacaatgccctcgctgatgctattcatcaggcccgctatatatcagcgatctggcagcgaataattgccggcaatcaggtgctgcaaaaattgatgcaaaactga

SEQ ID NO: 216286 - DNA, 345 bp, Klebsiella pneumoniae
atggaatttggaatgaaacgcgttctggcatctgtccaggccgcagccactttgaataagctctatgacggctcgcccgtttcactgacggccatcagtaaagagtcaaagctgtctacttcataccttgagcagatcttcaaaaagctgcgggcgggtaacctggttatttcacagcgtggcccaggtggtggttatagcccccgcggcaatgacatcaccgttacagaagtgatcactgcggtatctaaactgccagcccataaaacttttgagcctatcctgcgagcgcttgacgacgttcgcgtatcacagctgctgcggggcgattcgccagccccataa

SEQ ID NO: 216287 - DNA, 195 bp, Klebsiella pneumoniae
atgaataccctgtttgcccttgtcatcagcgtttgtgctctcactggtgaatgctctgatgttctgatcggtgtttatccatcagaggccagttgcaacagcaacgccgatgaacaaaaagtacagggccagtgcctcccctaccgaaatgcacaaaacatggctgacgaccaacagcctgcagtgagtttttga

SEQ ID NO: 216288 - DNA, 123 bp, Klebsiella pneumoniae
atgaaggattttgcccgagtacctaccgggaaccaggcgacccgcctgaattggttcgaggtgagactacgccagctgtgttacttgctggcgcagaaaggaaaccctgaggctgaggcatga

SEQ ID NO: 216289 - DNA, 315 bp, Klebsiella pneumoniae
atgtctcgtagccctatacctgtcttctggtacgaaaatcccgctcactacgaagaattccaaaaaatcctttcagatgcttacgtccttccctttgactaccacgactggcgtatccgcaccgatagcatggtggagcgctacgaaaacagcggtatccaggctgtgaaggtggtagccagcacttacgatttcatcacctggtgccaggcccatggacgtgatatcagtaccaaaagctgcaatgattacgcggtctccgaatcgggcctccaaatcctgcgcgacagagagtttgattggggagacgagtaa

SEQ ID NO: 216290 - DNA, 255 bp, Klebsiella pneumoniae
atgcttgagcaacttcctgatataacaggaaaacctttgtattggtttttcatgacagatgaagacgaagagacgctgcagccgccaagatcggaagatatctatgtccttaccccggagaccaaaaagctcatagaaatttacgatcagcttcctcaagtggagcaagaacgattcgtcgggttaatgcagttaaggctggaagaactcgatgctttcatgaacgaatatttaatgaaacgaaagaaagactag

SEQ ID NO: 216291 - DNA, 555 bp, Klebsiella pneumoniae
atgcaaaccatctcttttaaaaatcataacccggtaatgggcctgcaactgaactcagaaaatcagttttccggtctacgccgggctcggatgaagagtagagcaatttttgctgccgttcaggaatgggagtcgactttacctggacgtgcacaggaccacatcgcgcagctggtggatgagcaatggagaaaacaaaagggtcgcggaataaacgtcaataaacagaatctgtaccgctacctgaaaaacgaatctggatcagagaagtacaccagctacgtcatgcagctttcaggagcgatcgctgatgcgatgcctattgagattgcgcgcaaacacggattgaaacgtggattgactgaaagcgagctggtggctcaagcaatcaaagagtgtagcgaagcgcaccaggcaaaattgcttggtgctccgttgcagaagttagagcgtgaaattcgggaggcagcaattgcactttttaacatgcttcctgcagatgcggcgggaccacttctggctagcatcagcaccgtagcgccgcagtttttctaa

SEQ ID NO: 216292 - DNA, 984 bp, Klebsiella pneumoniae; identical to SEQ ID NO: 194777

SEQ ID NO: 216293 - DNA, 441 bp, Klebsiella pneumoniae
atgaccaaacaatcaaaaaccaaagtaaccaaagcacagatggtgcttgccatcgttagccggacgccagaatgcgtcctgcaggatgtctgcgatgcgctggacttgcaagccagtacagcaggtaacttgctgcggcagctacatgccgcgggaaaactccatcgtacccataacggctgccagtacgtctatcgagtgggggcaggcgttgaggttcccgatgttgccctgccgcaggctgcaacacaattatctgaagaagatgtgaaaaaagtccaggacgcactgtcactggcgaagatgctggaagacaaaaagctgtggcgccgggctgcgactgtttacacctcgatgcttgggatggctacaacagcaaacgaactctggttgcttgccagaatgcgtaaccgctgcctgcgcaatgtggcgaggtggtga

SEQ ID NO: 216294 - DNA, 1500 bp, Klebsiella pneumoniae
atggcgacttctgtattggctaattggcacggtcatgattaccaggctcggtatttctggattgaggcatcccggcttaaaaatccccaacaagatttcgtcgtagaagtttcctatgaagccgatggccctaaagcctttgatgacgtgattacgcgttataaccccccccgccgcagcaccgggcccgatcggattcaggccgattactatcaaatcaagtttcacgttacacaagccgctagcttcggattcgaggacctgattgaccccgcattcatcggtgctgaaaccttctcgatccttgaaaggctaaaacaggcaaaaggaactgagcctgtcaactctgcttttcatcttgtcacgacagatcgaattatcgatgaggacccgcttggtgaaataatcagcaatgtggatggctcaatacgactcgataagttgtttgatggcacgaccgacaggagccgtaagggaaaggttcgcaagctctggcgccaacatcttaagctttccacagaccaggagctggagcaggtgctttctggttttcacattcagcagtcacagcccacgcttgaagcgatgcgtgaaaaagttaatacctgcttccagatcattggtttgataacctgcgaaacaagttcggacttccgtttcgatggcgctgcgcgtgccttacgcagtcaggaacgttatcgctttacccgagagcaattcacagccctttgcgaggaagagaactggatcagatcggaagcacctgaaagcttcagaaatgttgcgctacgctctttcagcgatgggccactggacatcatggatgcgcttccggaacacacactctccctgctttctctcttcgaaggtcgatttccctccccgggcattgaatggaataatgttattaagccccaagtagaaaccttcctcacaggtataaggcagacggagcgtaaagttcggctgtatctaaatacccacagctccattgcaatgcttgccggcaaatgtcttggtcacaagtcaggcgtagaaatcgaactggtccagaaagggagaatgggcgactccatctggtctgagaacgaatcgcaggatgaacctgatgcgattatcgaaaccgagactgtcggaaccggaagcgatgtcgctgtagtgctcagcatcgcgagaaatgcgctgccaaaagcgcgcgcatacatactcgaaaatcagcctgacataggacgtatcattcacttaacccccgcaaacgggcacgggcaacgatctgtgaaaaacggttcacatgccgtagcgcttgccgaacaggtgtccgatgtagtcacggatgcagatttaccggttgaggcaagcttgcatattttcagcgctgcgccaaatgccgttaatttttatcttggccagcacacggattttctggggacatgtgtcttttatgagtttgactttcaacgccaacgagatggctcctaccttccttcatttaaggtttaa

SEQ ID NO: 216295 - DNA, 1146 bp, Klebsiella pneumoniae; identical to SEQ ID NO: 194775

SEQ ID NO: 216296 - DNA, 1803 bp, Klebsiella pneumoniae; identical to SEQ ID NO: 194774

SEQ ID NO: 216297 - DNA, 234 bp, Klebsiella pneumoniae
atgaaagtggaaatcacaattgatcgccaaaaaaaattgccggatggcgctgtgcctgctctggagaaggagctactgcggcgattggatcaaaactttaataactgcagtcttgtgattcgtcggaccagctctgatgggttgaccgtgcttggaggaatggacggagataaaaaacgtattgaggaaatcctgcaggacacctgggaaagtgctgatgactggttctgttaa

SEQ ID NO: 216298 - DNA, 393 bp, Klebsiella pneumoniae
atgacgcaaacaactgaagtatcaaaatcccaccagactggtgctccttcaacgagcgccggtttactctcgtcttcgaaactcacttttcgacagcaggaagttttcgatctgctggtcgcctacatcaatcagcatggctacccacctacgctatctgagctggccgatatgctcggcgttagctcgtctaatgctgtcctgttgcatctgcgtgcgttagagagaaaaaatttcataaaactctctcgccgtgtctccagaggaatttccatcgtcgggcgaaaggagcctatgctcgccgtgcagctgctgcaggaaatgatagctgaagaacccggcgcgcgtgaaagagcgattgagtttttgcgactgttcggtgatcagccatga

SEQ ID NO: 216299 - DNA, 204 bp, Klebsiella pneumoniae
atgaagaaaagttggtttttacacgagcagctttcagaggctgaggctacagagctggtggagcgataccgtaaaaataactgtgtggttgagaagagcttatccagagactttgcatcgtgggagatccgcgtgttgttgccggaatcgaagaagccgccacggattgacaggacctacatacagaagatgtggagggactga

SEQ ID NO: 216300 - DNA, 1032 bp, Klebsiella pneumoniae
atgcgagctttgcttaacgtggatattgcacgccatcttggaattgtgctgcttaagccgggtagtgaattaatgccgttattcggtgccggccgggttcttgtggaaataccgccggcaagcatgaaaaagatacccagtggacgtcttcctgatgcccggcagccgttgcgggatgatatggggatcagaccttttttcatgaagaaggcagttatcactgcagctggtggggttagtgccctcgagtcatggttgcgtaggcaggttaaaaactgtcagtggacacattccgattaccatcaccatgagctcgtcccgtttcgccattcgacgggtgtaataatcgcatgctggcactgtgataatgagctgaaaaaccaaacgggacaaaccctcgatcaactggtaggtgttaacaacgctgactgggtaatcgacactgcccgcatcgcgcttgggctggacgcccagcgatcactgtcactggcggagctatgctggtgggcggtaggcgccgggattggcgatgaaattacagaagaaatggcgcgccgatccctgcgtattaaagacgatggcattaaatcggtttacagggagagtgagatcgttccgtcggtaccggccaccagcattctttctccccgtatcgaaaaagcaatcaggtcaacggcaaaaacaacgccgggcaaacctctggttcctgtgaacgtcgatcctgttgcaccggcgacactattcgcgagacctaagcggagccgatggttatcagctgactttatctcatgggttaaaaaacagccgtgtatgtgctgcgggcagcctgcagatgatgcacatcatcttattggctgggggcagggcggcgtaggcaccaaggcccacgatatttttacgatcccattatgccgcaagcaccaccgtgctttgcaccatgaccctgccgcttttgagcgtgaatacggcacccagccggtattgattattaaattgctggaccgggcatacgcgctcggcgttctggcgtag

SEQ ID NO: 216301 - DNA, 603 bp, Klebsiella pneumoniae
atgacaccgcgtcaacgccgtctacaccgtgcaggattagaaactgtggccgccgccccgcgcaaaagctggctgggccgattcactccccttaatggcattcagtccgcctggataaaatctctgcttactgtttggggggaagggatgagaggaggtgctgccccgcgtaaaccatcaggacattcatgctggcgaggcatgaagggtgatcactggtcagataaagcattagaacgctttacggcagcaattgagcaggcaagaagtgaagggtatcgcgggcggcaggcattaagcagggcgcatgccattttgtggccgaagcctgcaacggtcgccattgacgctgcgatcactgaggatgatgttgaatttgttgaacgatgtgtactggcgatatttgaaacgggtgatcctgtttatctcgttggcgttaactattacaccacccgcaaaaaaatctcagacataacacgggaaatacagctggtggctccatggttaacagacagtgaggcccggaaaagagtgcgctggtgccttgaaatattcagagcaaaagctttcctttctgtccataaggcgattcatgcggattag

SEQ ID NO: 216302 - DNA, 351 bp, Klebsiella pneumoniae; identical to SEQ ID NO: 106611

SEQ ID NO: 216303 - DNA, 279 bp, Klebsiella pneumoniae
atgaagaatttcaaaattgaatacgttgatggcgctttgaccgttctggagacggatggtcagtcacggatgaatgaagccgtacatggcatccattttgagcatgttcagggcggccgccccctgcttaaactgacgattgcacatgatattgctccggcccctgcctcatcaagtgcactggatcaggagcctttagagggtgagctggtaacggaacaacagacgaaggcttccgttggtcgccgctcacgtcatcgtcgtggaggtaagcaatga

SEQ ID NO: 216304 - DNA, 432 bp, Klebsiella pneumoniae
atgatgtatcagcgcacggatctgacactctcaatgttctatgcatccagcgctgatgcagagggaaacaaagtggctactttgacgatgcaggttatcgctgcagaggctggctccgtccagaccagccagttgcgctgtattaccgatagcgcgaagaaaaaaacgtatagcgtaggcgaacaatctgtcagtaatggttccgatccgttgctggtcgcgattgagaattactggcgtcagagtacagatgtcgtcgttaaaggattgatcgccgaagtgaccgacttcatcgcagggaacatcaactcagtcagcacctggatcggccagtttgggatgaaggtgttcgagaaccagccattggctgaacggctaccagaaagcgtactgcaggccgatggaggctccgctacagcgacagggtcctga

SEQ ID NO: 216305 - DNA, 435 bp, Klebsiella pneumoniae
atggccggaggaattcgatcgtccggtggtggccgaaaacccactttacccaccgggcaaaaaagcaaattaacacgtattgcgcctcccgctgagttaatgggggaggcggcaataagaatgtggaaaacgcaaagcaaaatactcatcgaccgaggggtgtttgagctggaggacgcacctttgttgctggcttactgcaatgcttttcatctgatgctcgaagccgaaaaaatgctggccagcggactgacctcagaaagtgaaatggggggcctgaaaaaacaccctgcagttaatgtccggaatgactcggtttcccagcttgcccgcctgggctctctgttggggttagatccgctcagtcgtcttcgcatgaccagcggacaaaaggatccggatgatgacgggaatgaattcgatgagtttgactga

SEQ ID NO: 216306 - DNA, 1722 bp, Klebsiella pneumoniae
atggcaacctatccgaacgtcaatgcagcgaaccagtatgcgcgggatatcgttggcgggaagattctggcgtgtcagttaacgatacttgcctgtcagcgacatctggacgacctcgaacgagcaaaggatccccactggccctaccgcttcgataaaaacaaagcagaacgatttcttcgttttgcccagaaaatgcctcatacctcaggggaatgggcccggcgtaaactccggattgaatttgaagcctggcagaagttcgctcttggcgtaccgtttggatgggtacacaagaagacaggcctgcgtcgtttctctgaaatctatatcgaggtgcccaggaagaacgggaaatccgctattgccgctgctgtaggaaattatatgttttgtgcagatggcgagcatggtgcagaagtctattgcggcgccacgactgaaaaacaggcatggaaggtattttctccggcgctgcaaatggtgaaaaagctgccggcattgcggcaaaaattctcgataaaaccctgggcaaaaaaaatgacgcgccctgatggttcggtttttgcgcctgtgatcggtgacccgggggatggtgattcgccatcatgcgccatcattgatgaatatcacgaacatactactgatgcgctttacaccaccatgaccaccggtatgggggctcgtgaacaaccgatgacactgatcatcaccaccgccggctatgacattacatccccttgctatgaaaagcgtactcaggttgtcgagatcctgcggagaacccgtaatggtgaggaaaatgaaaccatatttgggctgatttatggccttgatgacgatgatgactggacgactcctgaggcattaatcaaggcaaaccccaactatggcatttcggtaaaagcagattttctccgggctaaacaattattgggtatgtcgacgcccgggcagacaaacaagattctgaccaagcatttcaatcgctgggtaagcgcaaaatcagcttattacgacctgaggaaatggatggatgcagccgataaaaatcttaagttgtcagattttgaaggggaagaatgctggctgggtatcgatctggcctcgaaagttgacctcaatgctgtggttccagtttttcgtcgtgaaatagacggaataacacatttttactgtgtttctcctctgttttgggcaccagaagaaaccatttactcgcaggagaccgcgctgaaaagtaccgcagaacgttatcagtcctttgtccggcagggtaagttgatcccgaccgatggtggcgaagttgattacaggctgatatttgaaacgatcctgaagctgcggaataccgtaaaaattgcccaatgccccattgatccttatggcgcgacttcattacgtcacatgcttgaggaagaggggcttgagcctgtcgagataagacaaaattttacccacatgagtgatcctatgagagagattgaggctgcgctcatctcggggagattccatcatgacggacaccccgtcatgaactggtgtatttccaatatcgtcggccagtaccttcccggaagtgacgatattgtgcgtcccgggaaggaagggcggcagaacaagatagatggtgcggttggtttaatgatggggctggggcgcgccatgcttaacagttcagtgatgacatccgtatacgatgaggaagatatagcatgctaa

SEQ ID NO: 216307 - DNA, 1260 bp, Klebsiella pneumoniae
atgttccttccccagatgttcaggggccgacaatattcgggtaatagcttctgggaagccatgctgggtggggttcgttcaagccagagcaaaactggcatcataatcacgccggaaaccgctctgggactttcagcggtccgggcctgtgtcaccctcctggcggagtccgtcgcgcagctgccgtgcgaactttaccggcgggataaaaatggcgggcgacagcgtgcgacggaccacccggtttatgacctgattcactcccagcccaacaggaaagacacctcattcgagtatttcgagcagcagcaggggttgctggggctggagggaaattgctactcgatcatcgaacgggacggaaaaggctacccgaaagagctgatccccattaacccgaaaaaggtcattgtgctgaaagggccggacggtatgccgtattaccaactcccggaagtcggcgaaattctgccgatgcgcatgatgcaccatgtgaaggtcttttctctggatggctatatcggcagttcccccattcagacgaacgccgatgttcttggactgaatttggccgttgaggagcatgcggccgcgacattccggcgcgggacaacgatgagcggggtgatagagcgtccgaaagaggccgcgaccattaaaagccaggatgctattgatcgcctgctggcgaaatggaccgagcgccattccggtattcacaatatgttctctgtggcattgctgcaggagggcatgagctacaaacaactgtcgcaggataacgaaaaggcgcagctgctacagtcgcggcagtggggcgtggaagaggtctgccggctctataaaatcccgccacatatggtgcagatgctggcgaaagcgaccaacaacaacattgaacaccagggcctgcagttcgtgatgtacacgctgctggcatggctgaaacgccatgagggtgcgttgcagcgcgatctgctcctgcccagcgaacgccgcgatttgtacatcgagttcaacgtttccgggctgctgcgaggcgatcagaaatcacgctatgaatcttatgcgctgggccgccagtggggatggctatccactaacgatatccggcgtatggagaatctgccgccaattgctggcggggacaaatacctgacgccgctcaatatggtcgacagcgcgaagatccttcctggcgataagtcgccgacagcaaaacagctggccgaaattgaaacccttctggccagagcctga

SEQ ID NO: 216308 - DNA, 921 bp, Klebsiella pneumoniae
atgacaacgaaattaattaacctgccgcacctggcagatatggtctttggtgtgccgcattacgtgacgcggcaaacaatggactccgtgaaagcggtgctcatcccccgtattcaggggatcaccgaagatgccgtcattcagatggcgctgaatccgggtaaatcccctgcagctgagcaggtccagcccaccggcggggtggcggtgatccccgttcacggcattcttgttccacgccgggggcagattacggcgatgtgctccgagctgaccagctacgagcggatccgcgggcagctgcaggcggcgttaaacgacccctcaatcagcgaaatcgttctggatattaactccggcggcggcgcagcggtggggtgcaaggaactggccgattacatttatcagtctcgcgacacgaaacccatcacggcgattgtgaactacagcgcgtattccgccgcgtatttcatcgcatcggcctgcagcaaaatcatcgtcagccagaccagtggcgtggggtcgattggtgtgatcatggagcacctcgatacgtcgaagatggaagaaaaaatggggctgacgttcaccaccatttaccggggagataacaaaaataacggcacccaacatgaaccactgagtgaagagtcgctgggtatgttccagggcatgatcgacgaaatgtacgagacgtttacggggtcggtggccgaatatcgcggcctgaatcagcaggccgtcattgatacgcaggcggggctgtattttggccctggcgctgtgtccgccggcctggcggatgaagtctctgacccccaggcggcgatcaatgctatcgcggcaaagtatcagcaatcccgtcaaaaaacctccattcagatgcaggcagccgcgatggatctgcaaaccaaaatgtaa

SEQ ID NO: 216309 - DNA, 1287 bp, Klebsiella pneumoniae
atgccacatattgaagaattgcgtcgtcagcgtgcgggtatcaacgaacaggttcaggccctggcaaccattgaagccagcggcagcacgctgactgcggagcagctgacggagtttgcgaacctgcagcagcagttcactgatatcagcgccaaaattgaacgcctggaagccgccgaacgtgctgcggcgctggtcgcaaaacccgtgaaagcgactcagcaggcccccggcattattgttaagcaggagccgaaacagtacaccggtgctggcatgacccgactggtgatgtctgtcgccgcaggcgcagggaatctgcaggacgcggcaaaattcgcttcagaagagctgaatgaccagtccgtatcgatggccatttccaccgctgcgggttccggtggagcgctcatcccggagaacatgcaaaacgaagtcatcgagctgctgagcgaccgtaccattgtccgtaagctgggtgcccgctccgttccactgcctaacggcaatctgacgttaccgcgttcggctggcggtgcaacggccagctacaccggcgaaggaaaggatgccaagacgtctgagtcaaaattcgacgacgtaaaactgagtgccaaaaccatgatcgccctggtcccgatgtcgaaccagctgattggtcgcgccggttttaacgttgagcagctggtcctgcaggatattctgaccgccatcgctgttcgtgaggataaagcgtttatgcgcgatgacggtaccggcgatacaccgattggtatgaagtcgcgtgcgacgcagtggaaccgtctgctgccgtgggaagcgggttccacgatcaacctgaacacggttgatgagtacctggacaagattattctgatggcgatggatggcaacagcctgatgatccgttgcggctggggtatgtcgaaccgtacctatatgaagctgtttggcctgcgtgacggcaacggcaacaaagtctacccggaaatggcacagggtatgctcaagggctatccgattcagtataccagcgcgatccctgttaacctgggcgaaagtggtaaggaaacggaaatttatttcgccgacttcaatgatgttgtcatcggtgaagatggttccatgaaggtcgatttctccagagaagccacctatctcgatgcagaaggtaacccagtttccgcgttctcgcgtaaccagtcgctgatccgcgtcgtcctcgaacacgatatcggcttccgtcatccggaaggcctggtgctgggtaccggcgtcctgttctaa

SEQ ID NO: 216310 - DNA, 288 bp, Klebsiella pneumoniae
atggctgcgaaaaataaagcagtggagccggaagaaacggtcgtacaggacaaccatgcgactgagaccgcacaggataaccgtgcgaccgtggtcgcacaggcagaacgtaaatccgttgtgttcctcggtccgcatagccgttattcccgtggtgatatcgcgtggtttgaaggatcgcacgccgaagagctggttaagcgccgtatcgcggtatggccgaaggatgccgaacgcgcgctgaaaccgaagccgggagacagcgattttgatactgacattggatga

SEQ ID NO: 216311 - DNA, 318 bp, Klebsiella pneumoniae
ttgatactgacattggatgatgtgaaaacccagctacgcctggaactggatttcacggagcatgacgccatgctcacgcaaatggtgaacgccgcacagcggagcatcgagcgtgattattactgcaagctggtcaccagtgatgaagagctgcaggcactcccggagaccgtccgcggatttatcgcggatgaagatatccggctggccattcagtttctggtcagcgatgcgtatctgaatggccataccggacagtggctggaaaccgctgcggtgaggcatcttcttttccccctgcaggagcatacgctatga

SEQ ID NO: 216312 - DNA, 339 bp, Klebsiella pneumoniae
atgaacctgaaaccgggtgatatgaactgtcgcattgcgattagctacgttcagtccggtcgggggccgctgggcgaaccgctaccggaaaagcaggttgaatcgggaaaagcgtgggcaaaacgggagctggtatcggggcgaaaagtccgcacactggatcagcagcaggtggtggaaacctgcctgtttacggtctatccgggtgtgctggttgatattgactggaaaatcacgacgaaaaatctggtttataccgtccggaatatcgaccgcaaaacggaccggatcattatcacgggggaggctgacgggcggcatgatagagctggcgattaa

SEQ ID NO: 216313 - DNA, 390 bp, Klebsiella pneumoniae
atgatagagctggcgattaagggtgcgctggagcgcatcaccggcatgaatgcgtatccgcttttactgccggacacggtccaggaaggagcgacctttcagcgtatctctgacccggagatggtctcgggaatgttgcgaacggggatcgtctctgcccgtatccaggtgaatctgtaccgtctcgatgattacacctcactgctgcagctggataaaaaaatctggacggaactgaagtccgtcgttcatggccagctggagggtatcccggttcagtatgtggagcgaggcggtatccatcaggataaaaaccagctgacgaatcgtcgcattcagtatcgcctgacccgcgatttcatcattcactacgtggaggactcctcgtga

SEQ ID NO: 216314 - DNA, 402 bp, Klebsiella pneumoniae
gtgatccgaatggaagttaaagggctggatgagctggagcggcagttaatggccctgggcgaaaaagtggcgacgaaggtattgcgggatgccgggcgcgaagcgctaaaggtcgtcgaggaagatatgaagcagcatgccggctttgacgaaacgtctgccgggccgcacatgcgggactcaatcaaaatccgctcttccacccgcaagggtaaagggaacgcggttgtaacgctccgtgttggccccagcaagcaacaccatatgaaggcgctggcgcaggagcttggcacggttaaacaggttgcagacccctttatccgacccgccctggattacaacctccagaccgttttgcgcgtgttaaccgtggaaatccgaaacggcattgaaaacaggtag

SEQ ID NO: 216315 - DNA, 462 bp, Klebsiella pneumoniae
atggctgataaaacttcgcctgaatatgcgatgttgccggcgggcaccattgtgaaatacggggagcctggcgctgccacgtcagcgctgaaaccgctgattaactgtaaagcgctgggtgcaatggggcagacggggggctttgtcgactgcaccacgttactggataagcagaaacagtccatcagcgatctgcctgacgggcctgaaaagtcgctgggcttcattgatgatccgggcaataccgattttgccgcgctgctgaatgcagcagaggcccgcaagaccatccagttatacgtcgaattacccaacaagcgaacagcgacgatgctcctggcgctgtccggctggcagatgaatgaaatcgccgctccggcgaatgaggtcatccagatcactgttcagggtaagcagaacaagatcacctggggaaccgtcgctgtctccggcggcgcctga

SEQ ID NO: 216316 - DNA, 366 bp, Klebsiella pneumoniae
gtgaaagataaagattacctgtccacgctgaaatccgcgttgcttaaatcggagccaaccgtcattaaaaccgagttgtttggcgccaccgtattcatccgccgcctgaccggggattacctcatcagctacgaagagaaaatggctgaaaccgcaaaagctggcgcagcgcgcgaggcatcggagcaagtcatccagatcgtcatcgatgcactggttcagccggatggaacggccattccggatgagtttaaacccacggcagccgagctgctgaaggcccatgaaaaccccgaactgctggccgcagtggaaaaagtgaagcaacacgcaatcggcaagctggaggaagcggaaaaaaactga

SEQ ID NO: 216317 - DNA, 3336 bp, Klebsiella pneumoniae
atggcagacgtcgcatctttagcggttgggctgcacctgaacgcagccagttttaaatcccagctgctgggagcgtatggcgatgcggagaaccagtcacgacggtttaaccgtaatgcccaggcggacgcgaaaaagacggaagacgcctataagaaggtcggtctgtcgatatccgggatggccagccggctggcggggctggcaggagccagcctttccatcggtacgatcgttaccacgtccagacaatatggacaggcgttatcagatctgcaggccatcaccggtgcgactgcagctgaaatgaaagcgctggatctggctgcgcaggaaatggggcgcacgacagagtacagcgccagccaggccgccgaagcgttaaagctgatggcgtcggctaaaccggagcttttaaaaacgtccgatggactgcagaaggctacgaacagcgcgcttatcctggcgcaggccgccggcacaacgctgcccgatgcgaccagaacgctggcgctctccttaaaccagtacggggcgagcgcgcaggaagcggatcgttatatcaacgtgctggccgccggtgcgaagtacgggtcgtcggagattgtggatacagcggccgccattaaaaatggtggcgtcgcagccgcacaggccggcgttggttttgagcagctgaatgccgcgattcaggtgctggcagagcgtgaaattaaaggcggtgaagccggcacggcgctgcgtaacgtcatcctgaatctggaaaagggcacggacaagagcctcaagccgtccgtggttggtctcagccaggcgctgaccaatctttccgggaaaaatctctccacggcccaggccgtaaaactgtttggcgtggagaacctgaatgcggcgtctatcctggtccagaaccgttcaaagcttgatgagctaaccgcttccctgaccggtaccaaaacggcgcatgagcaggcatccatcagggttaacaacctgaacggcgatttgctggggctgagcagtgcgtttgaagggatggtcattaagatcggccagagcagtaacgggccactccgcagcgggattcaggttgccacggaggcactgaacagcctggcagacaatttcaacaccgtctccagcgtggcgctttacagcctgatccccgtgttatccacgaaactgactgcagggctgcgggagaatatcgcggcctggcgggaaagccaggcggcggtaaaagcgcgggcgcaggctgatgcggatattgcccgcaaaacgctggattcgacagcggccatcctgaaacagaacgacgctgagtttggccactaccggcagatggagcggacggctaaacagtacgggatgaatatcagttaccaggatgagtttacccggcttatccggcaggaaactgagcaaacgaacctggccagccaggcgaaactgaaactggcagcggcaaaccggcaattgtcgatatcagcccgtgcggcctccgttgcggtgggcctggcaagaggcgccctggcttttgttggtggtccggttggcgcggcgacgctggctggctctgcattactgtatttccatcaacaagcaaaagaagcccggcaatcggccattgatttaaaagatgccgtagtggaaaccagtgaagcgctgatgcgcctctcgcttaaccagttaaatgtgaagcagttcgacctggaggataagtacgaaaaccaggtcgtgcagcgtaaccagctgataaaagagattcaggatgccgacagtcgtatcgacagcctgaaagggtttgaccccttcggccagctggaagcggtgacaaaagaccagacgcgggcgcgggcggatctcgatagcgttaacgagggactccgcaaaaccgaggaaaacattaagcgtgtcagtgatgcaaaaacactggctcagctgggtttatcgggaaaaataacctcccttacggacgatctgaaaggagcgttaagcacgccccccaaagagaccggagatggaaatccctggggcggcgatggcggtaccggcacggggaaaggcagtaagtcccaggtcgaccagttcaaaacgctgcggcagcaaattgaagaagcccatgcatccagcctggccagaattaacctgcaggaaaaggacagcaccagggagctgcaggaagcggcgaagaaaaatggcgccagtgatgctgacctgcagcgcgtgctgttaatgaaagcagagaactaccagaaacagcgactggatctggccgcgcagtattcccccgcccaggaaactctgcgaaaagagcaggaagccagccgggacctggctgagcttttcaaagcccgccttcttgatgaaaaagagtaccaggccgcacgaataacgctggccagagatactgcgaaagagctgctgcaggcgcatgccgatgaaatcgctgcgccggcactggatatcgccggcgaagttgatccactggtctcgctgcgcaatcagcttgcgcagcggcaggcattgctgcaggcgtactaccagggcagcgcgatcagcaaagaacagtacgaaatgctgatgcagaaggcgacgaaagaatccgccgatgcgcagtatcagacgtcactggagttataccgatcacagggagaattccagagcctggccgtcgggttatttgaaacggcccatgagcgctcgggcaacttcctgacgagcatgctgacgcggacgagaagctttaaggagaacatggctgacctgttttcctcactcacgcagtcggtcataaaaaacctcgttgatatggccgctcaggcgctggtcaccagtaccgtcatgcaaaccattatgggcgtggtgggcgtcgggaccagcgttgtcacgggcgctgcgggcgcaggctcggggacggcgatccagaatgccgccagtaacttccagttcaacgccaaaggcggcgtttatgactcaccgtcgctaagcgcatacagcaaccaggtgtatgactctccgcagttcttcgccttcgcaaaaggggccggcgtatttggcgaggccgggccggaggccatcatgccgctgacgcgtgccggcgatggttcgctgggtgtacgcgctgtcggtggtggtcagaacgccggcgcgtcggaagggccaaaagtctatatcacgattgaaggcggaaacacctcatcgcaggcgccgtctggttttgagcagtttggccagcagatcggctcgtttgtggagaaaaaatacagggagctgatggcgcaggatatgcgccctggcggaatggtctggaatgcagttaaagggcaacgctaa

SEQ ID NO: 216318 - DNA, 339 bp, Klebsiella pneumoniae
atggctattgagatattcacctggagtccgcgggttaatccccagcagaccgttaactttcgtgtccggaaggcgcagttcggtgacgggtatgcgcaggtatccggcgatggtattaacacccgatcacaggattgggagctgagttttgtcggtacggaggactatatccgtccgattaagcagttcctcgaccgtcatgccggcacccgcgcgtttcagtggaccccgcctctggaagaggtggggctttaccgctgcgaacaatataaaccggtgccgctgggcggcggaaattactcactttcagccacttttattcaggcatttaaaccatga

SEQ ID NO: 216319 - DNA, 756 bp, Klebsiella pneumoniae
atgagccttaacgcgaattatcagaagttagagccaggcgatgaggttcgtctcctggagatcgatggccaggcgtttggcctggatgaggttttgtatttccacggctataacgttccccatactgcagccgaaatcctcgccgctggcggcgacctggataagctgccggcgaaaagcatctggtggcaggggcgggagtataaagcctggccatgtgaaatcgaagggatcgagtcctccaccacgggcagtgacgcgcagccaacgctgcgggtagggaacatcgacgggaagatatccgctctctgtcttcattacgacgatctggctctggcgcgggttgtcatccacgacacgcaaaaacagtatctcgatgcgaagaactttccggacgggaatgcctcagctgatccgacgcaggagaaacggcgccttttcttcattgacgtaaagcattatgaagacgatgagaaggtggaatttactctctccagcccgtttgccctgcaggggatgatgatcccgactcgccagctgcacgcgatttgcacctggtgtatccgcaatcagtaccgcagcggtaacgggtgcgactatgccggcacccggtattttgacaggaacaatcagccagttgatgacccgtcgcaggatgtctgcaacggaacgctcacggcctgcaaattacgtcatggtgagaatagtgaactgccgtttggcgggttccccggcacctcattaatcaggagctga

SEQ ID NO: 216320 - DNA, 711 bp, Klebsiella pneumoniae
atgcgtcagaaaacgattaaggccatccaggaacatgcggccgcagaatatccgcgcgaggcctgcggcctcgtcgcccagaggggccgagcggagcgttatttcccctgccggaacctggccacagagtcgaaagataattttgtgctggcgccggaggattatgcggaggttgaggaatggggaacgatcaccggtattgttcacagccatcctgatgccaccacccacccgagcgaactggataaagcgcaatgcgacgcgacccttcttccctggcatattatcagctggccagaaggcgatctccgtaccatccacccgcgcggtgagttgccgctcctcgagcggcccttcgtgctgggccactacgattgctggggcctggtgatgagctattttcggcaaacccacggcatcgagttgcacgattaccgcgtcgattatccgtggtgggaaaaggagtatccggacaatttttatcaggactgctggtatgaatgcgggttccgtgagtttgatggcccaccacaaccgggtgatatggtgatcatgcaggtgcaggcggataagtggaaccacgccgggattctgctggaagggaacctgctgctgcatcacctctatggccatctcagcaagcgcgtgccgtatggtgggtactggatggaaaggacaatgaaggtcgttcggtataagtctctatgttaa

SEQ ID NO: 216321 - DNA, 567 bp, Klebsiella pneumoniae
ttgggtaaaatttttgggaagtatcatcaaagacttgtttcaaactcatctgaagctgttagagccttatgttgtaccttagagggttttgaaaaatttcttaataaaagcaaggaaaaagggataacgtttgcagtatttaagggcaaaaaaaatattggtgaacgtgatttatcatttcctcttacaggagaggttttacgcataattccggttgtcattggtagtaaaaaagcaggtgttttacaaacaattatgggcgcggcgttggttgcagttggggttatcgttggatatgtttctgggtggaccggtgtaggttgggctgttggttctaagatggcaatgatgggcggtgccatgatgctcggtggcgtcgttcagatgctttccccacagccagctggcctggcacgaaaagaatccgctgacaataaagcgtcctacgcctttgggggagtgacgaacactgcctctcagggatacccggtccctttgctttatggcagacgccgaattggcggcgccattatatctgccggtatttacgtagaagaccagcaataa

SEQ ID NO: 216322 - DNA, 11334 bp, Klebsiella pneumoniae
atggcaaataacataattaaagggcgcaagggtggcggctcaaagcagcgtacaccgacggaacagccggatgatttacagtccgttgcgaaagccaaaattctgctcgcattaggtgagggtgaatttgcaggtggtttaaccggtaaagatatttatcttgatggcaccccgcttgaaaatgctgatggttcgcaaaacttcagtggcgtgtcctgggaatttcgacccggcacgcaggctcagacttatattcagggtattcccggcactgaaaatgaaatcagtgtgggaacggaagtttccagcaagacagcctggacccatacctttactaatacccagctttctgccgttcgtgtccgcctgaaatggccgtccctgatgaaacaggaagatgacggcgacgtggtgggcaataccgtcaagtatgcgattgacctgcagaccgacggcggcgcctggcaaacggtgctggaaaccgctgtcacgggtaaaaccacctccggttatgagcggagccatcgtattgatctgccccaggccggcagtacctggacgctacgcctgcgtaaaatctctccggatgcaaacagtgtcaaagttggcgacgtgatgacgctgcagagctataccgaagtgattgacgcgaagctgcgttatcccaacaccgcgctgctttatatcgagttcgactccagccagtttaatggctccattccgcaaatttcctgtgagccgcgtgggcgcgtgattcgtgtgccggataactacaatccggaaacccgcgaatataccggcgtctggaccggcgggtttaaatgggcctggacggataacccggcctggatctattacgacattgttatagctgaccgttttggtctcggtaatcgtctgagcagcgccaatatttcgaaatggacgttgtaccagattgcacagtactgcgatcagctggttcctgacgggcgcggtggtgacggcatggagccgcgctatacctgtaacgtctatgtccaggaacgcaacgatgcttacaccgtgctgcgagactttgccgccattttccggggcatgacctgctggaacggtgagcagattgttgtgcaggctgatatgccgcgtgatgtcgattttacctatacgcgcgccaatattatcggcaaaccccgttattcgagcagcagcagccaggttcggtacaccaacgccctggtttcctggtctgatccggataatgcttatgctgatgcaatggagccggcatttatcccggaactggtttcccgctacagttttaaccagctcgaaatgacggcgattggctgtacgcgccagagcgaagcccaccgtaaggggctgtggggcatactgaccaacaataaggaccgcatggtcgaaattgatgtcgggctggacggtcgcattcctcaacccggttatatcattgccctggcggatgagttgctggccggacgggtcaacggcgggcgaatcagcgcggtgaatggccgggtgattacgctggatcgtgatgtggatgccaaacctggagaccgcctccagctaaacctgccatccgggatctcacagagccggacaattcaggctgttaacggacgccggcagattacggtcacaacggcgtacagtgagacaccagaacgggaatgcgtctgggccattgaatccgatgacctcttcctgcagcagtaccgggttacaggggtaaaagagaacagcgatgccaccctcacgatcaccggcgtggcacatgacccggataaattcccccgcatcgataccggcgctattatcgaccagcgcccggttagcgtattgccggcgggcaaccagtcacctcctgacgatattgtcatcacatcccgctcggtcgtgaatcaggggatcagcgtcgaaacgatgcaggttaactggtcagcggtcagcggcgctattgcctacgaggcgcagtggcgccgtaacgacgggaactggattaatgtgccgcgcagctcgaccacctcgtttgaggtcagcggcatttatgccggtcgttacctggttcgcgtccgcgcgatcaatgcggcggagatctcgagcggctgggcgtattccgaagagaaaaccctgaccggcaaggtcggcgagccgctggcaccgctggcgctggcaacccgttcgctggttcatggggtccaggttagctgggagttcccgaccggctccggagatacgctgcgcacggaactgcagtacagcaaaaatcaggacggcagtgcgccgatgccgttatcagacgtggcctatccggggaaaagctatcagcagatgggcctcagtatgggcgcagaattctggtatcgggcgcgccttgtggatcgtcttggcaatgaaagcccgtggaccggctgggtccaggggatggccagcgataactttgatgactactacgaaaacctgaccgatgcgatcaaggatacggatgcctgggaggaaacgcagcgcaccattagcgaaacgcaggaaggtatccgcaatacgcagcaggaactggagcagaccgctgaagagctgcgtcaggaagccgcagatcaggcgaagcaagtcagccaggatattgatgcatcggcgaaaagcatcactgctgatgttgacgggaaaatctccgccgtgaataaaaccatcacggatgagcttacctcggtaaatgagtctctcgattctggtctggctcaggcaaacaaggggattcaggaggcaaaatccgccgtcgctgatgcgaatcagcagatagcaattttgagcaagtcgctggccgacggcgatgccgcattgaatgcgcagattaaaactgccgagaatggcctgaagcagtcgttgtctcaggtcaacaccacgttaaccaatgcggttaagcaggaaactgcggatcgtatcgcagatgttaacgcgaaggcggcacaggctgctgatgaactgctggcggcaacgcaggggattgaggcgagtatcgagagcctgactcaggtaatgaagagtgccgatgaaaatctggcgcgggaaatgtccagcctcgctgccggcgctaatatccagttcgattcgcaggttatctggcatttcaacaatcagacgaccgagggctggaccggaagcgccggcgtaccgggagtgtcccaggatggctggttacgcccggcggacagcgccaccgatccgtacattacctctcctggcggtttggctgtcgatggtgcggcgtaccgcttcatcatgctgcgctttcgtaaaaccggcaaaccagtctgggcgggtgagatccgttgggtgtctgccggcgaaaacttcaataacacgaagcgatacattgttgctgagccagaatatgccgatggggtggcaaccctgacggtgcgtgatattccttggacagggaacattgatcgtattcgtctggacctgacgaaccagcaggatgccagcaactttatcgaattcgactggatcgccgttggccggccagcacccggcgccagtacggcggctctgcaggatgtgcgcagtacgctgagtaacgcgctgaccgccgaagcgcaggcacgcagcacgctggcggcgcagatgcgtggctcctatgagggcagcgatctggagaaagtcacctccgggctgctgtaccaggaaaaaacggcgcgcgttaccgccatctcagcggaagttaaggccagagagtccctgcagacgcagtttaacgacaacaaagctgctgtttctggtgaactgagttctctgacgacagagcagagtgcgcaggcgagtcgtatcggaggcctggaaaccagcctcgggaaaaaagccgatgcgaccgcgctgacgtccctgacgcagaaagttgagcaacagggtgccacgctgacatcgcagggagccgcgttaagatcactcactaaccgggtgggccagacggaaacgggcctggctggtacgaatgaggcgttgagcgggctggagtctactgttacccagcagggcgacaggataaccagccagggtcagtccatcacgaaactgacgagcgatttgggcacgacaaatgccgcgctggcgaagaaagcggaggcgagcgcggtcaccgcgttaacacagcaggtagagcaaaacggccaggatattcgcagcaatactgacagcatcaccagtctgtcgaatcagctggtcaatggccagccgaatagctggtcccgtcggatctatcctgtgcagctggctaacgccgggacagtcccgtcattcagcgatattcgcgccgtggcgccagtggtcgtggatgaggtggccgacgcggccaaactggactttacgtcctccggtagctatctgatcgcgctgtattcctgccaggtaaaagtggccgccgataccaccatcacaatggcgcccggtaacagggtttttgatgataccggtgctgtatttgtaaatggcgttcaggttgcctgggggaatgccagctggattaccgtcagttttgatctgaaagccggctggaacaccgttgagtttctggtgaatcagtggaccggccaggcgtatatcaacctgggcctgaagctgtcagacaaggttgctgagatgtactccggtctcggtgtttccgcgctggcaaacgcagccggcgtactcagctcgaatgtcagccagattggtaacgatgtggtcagcaattcgcagagcatcacccagctccggaatgcgctgacgcagacagacgcgaacgtggccagcaaagcggatcagacggcgatgaactcgctaaccggacgagtggagaagacggaatccgggttgacggctgctaacgccaacattacctcgctgaaatccgctgtacgggccggaaacgcatcaggcggggatttaattcccaacccgacatttgacccaacttacgaccagatggggttcagtgtggtatccacgacggctgaggatgttccgtcgggatgcccgtatggttatgcggccagaattgccagccgggatcaccatcctaactttgccgcgttcccggccacgcttaacgatgtgattgagatcagcgcactggttgcctgcggcgccggcacagcgaattttaatctgtatgttggtaccgccgttcggccagatacgagcaccggtgcgccactcatggcgggtggcggaaaatcaccctccgcgacctggcagagaaccacctggcgcttcagggtcacgcaggcgatggtggacaggggttatatccgcccgttcctgcagatctcgcagaacagcccgtatggcaccgtatggttcgttacggactggcatatgcgaaatgtgacagcggcgcaaaaggttcaggatactgcggacgccacggcggcggcggttgactccctgaccaccaccgtgactcaacagggtaatctgctgacctcgaccggcaaccggacaacccagctggaaaacgggctggcaaccaccaatgccgcagtggccaaaaaggctgatgcgacagcggtgcaggatttgaccaataccgtcaaacagctgggcaatgacctgacggctgcgaacagcgccatcacgaagctgaccggaaatctggcgaataccgataaagcgctggcgcagaaagccgatgcgactgcgctggccacgctcgacacgaaagtgacgcagcagggcaaaacgctggagagccagagcaattcgctgacgaacctgtcgaacagcctctcgcaggtcgcggcagatatcgatgccagcgggcagataccgggtaacctggtcgtgaatccctcgtttgaacgcgggctggatggttataccgggcggtcaaccgcgaccagtgtggtggaggtttccgctcctcacagcgggacgcgggcgctgaaggttgatccgggaagcgtgtctccggggcaatacatcccgtttgttcaggggcgaacctatgaaatcggggtgtgggtcaaggaacccggagcgacgacggataatggcgcggggaacaacaagctgcggatcggtaactctgccggccagccggtttttgagcgtccatataacagcggtacggtggggacaaactggagcctgatttccggtcgctggaaagcgacggagacagccagcctgccggtgacgatgagcaactatctgattagcggaagccgctacttcgatgatttttacgtcactgacgttaccgaccgggtggacatcgatgccaccgccggcgccgttaccggactaacgaaccgggtcagtacagcggaagggcatatcacctcgcaaagccagcagctgacgaacctgcagaacagcctgaacacgacaaatgccgcgctggcgaagaaagcggaggcgagcgcggtcaccgcgttaacacagcaggtagagcaaaacggccaggatattcgcagcaatactgacagcatcaccagtctgtcgaatcagctggtcaatggccagccgaatagctggtcccgtcggatctatcctgtgcagctggctaacgccgggacagtcccgtcattcagcgatattcgcgccgtggcgccagtggtcgtggatgaggtggccgacgcggccaaactggactttacgtccgccggcagctatctgatcgcgctgtattcctgccaggtgaaagtggccgccgataccaccatcacaatggcgcccggtaacaggatttttgatgataccggcgctgtatttgtaaatggcgttcaggttgcctgggggaatgccagctggactaccggcagttttgaactgaaagtcggctggaataccgttgagtttctggtgaatcagtggaccggccaggcgtatatcaacctgggcctgaagctgtcagacaaggttgctgagatgtactccggtctcggtgtttccgcgctggcaaacgcagccggcgtactcagctcgaatgtcagccagattggcaacgatgtggtcagcaattcgcagagcatcacccagctccggaatgcgctgacgcagacagacgcgaatgtggccagcaaagcggatcagacggcgatgaactcgctaaccggacgagtggagaagacggagtccggtctgacggcggcgaacagcaacattacgtcgctcagcagctctctgagccagcaatccaaacgcggcgctaatctgcttcctgatggcacttttgaaagctacgcggttggccacaatctggcgaataaccgtgccatcgtgaccactgacgactcgcatggcggcaataaatgcattcgtgtgacgcgtccgaatgactacaatgccaatgcaactgacaacactgatacccacattttcagcggattccaggttcgcgataacgcagtcttctatatggaatgctgggttaagctggatgccaagagtaccgctatggccgagaacgtgcagatttccgtcggcttatcgctccagtatcaggacaactcctggcagtggccggcagttaccaaagcggcaaaggatctctcttcaactcaatggacgaaggtttctggttacctgaaatcaacgaagagcggtattaagcaggcaatggtcaggatttctattcctaacgttagcagcgttaaggcgggtaactcattcctcattgatgacctggtcattaccgaagtgactgatgcctacaatgcgcaaagtacagcagatgctaacgctaatgcgatttcgacactgaactcgaccgtatcccaacagggcgaccagatcaccagtcagggtaacagcatcactaaactgacaaatgacctggcgacgactaataacaacgtcagcaataaagcagacgctaatgctctgacggcactgaccaaccgtgttacccagaccgaaaaagacattaactcaacgagttcgtctgtcacgaatctgaacaacaaggttgattctatttctgtcggtggaacaaacctgatcaagaactccggcgatatgaccggctggtcgaacgttaccagcgagacgtatcgtggtaacgcggtaattggtgcaacggtaaaagccggctccggttacaaggatctgcgcgaaatcacgcttgagtcgcctgtcgatgcaggtgagtacgtttacagcttctatgcgaaaggcggtgttgccggccagacgatgacggcgttcttctacaatccgaacaccacaacgtctatcgagaccagccagggtgcgaaaggtaataacaccgatggccgtgcgtacttcacgctgaccacttcatgggctcgctattgggttaagtggaaacagacacctaccacgggtaccaagcgcctgattctgtgccgtatcgagagtaatacctccaaagaccagacggtgtacatcaacagtccgaagtttgaggtaggtaacgttgtttccgactggaacgactctccggctgatagcgccagcgcgtcggctgtggacttgttgacaacgacagtgaatcagcagggcacttccataagctctatcggtaatcgcaccacatcgctggaaaacgggctgtcgacagctcagaacaacattgccaggaaggctgatgcttctgcattgcaggatctccggaacacggtgacatctcaggggggcgatttaactgcggcgaacagtagcattaccagcctgcaggcctcgatgaaccgtcgcactgtgtttactgtcactgcacggggaaatggcaacagcgtaactcctggggtttttgatgaaagcggcaaaaacctgtttacccctggtcgcagctgggcactggtcacttttgcaaaacacagcgacggatcaacggtgattgcgacatccaaaacatacgatgtctttggcagcgcgaataatggtgccacgatgtcggctgatatcgaggcgttggccagtggcacttacgtttgcgtcctgacattcgatgagccatctggcaaccgaggtaagatattgtctgctctggaatctcttggtggtacatccgaagtcgtcaactccctgccgtatcgtggtgcctatattctccttggccgcaaaggcatgaggtcgggcgatggtctggaactgcgtgcgccaaccggtggtgacgccaccgctcacatttcgacctcagtcgaatttgtgaacgggataatgatggggctgggtgcagccggcggtgtgatgatgaaggctgatgcgaacgcgtcggcaattaccacgctccagaacacagtgaagacccaggggggtaatattgactccctgagttcctcgataacggcgctggagaacagcctcaggtcgacaaacgatacggtgagtaaaaaggctgacacgactgcagtgagttcactgactggtcgcgtaagccaggtggaaaacactatcaccagccagtcgcagagtatcacgtcgctgaccagcagcatcaataccatcagtactcagggagctaatccgtgggttgacggtacgttcgaaagctacggagatggtcatgtgctgggcgggggcggcaccgccgttgtggtggcgtctcagaaattcaccggcaataagagcctgcaggtgagtcgaggagcgaacaacaacggcaacagcgataaacagcttgggagctggcagtcagtccgtgaggatgcgaagttccggtttgagttctgggctatgatgccggcggatcaggcgccatcctccgggtggacaacgctggtcggcattaactcactgaatgctgccggtcaaaactcttggcagtcggcggtcactgtcagcgaagccgctcttggtgcgcgtgataagtgggtgaaatttacgggtattgccagtaacaacgggggtgggagaacacgcgcagtggtctggatctctacccgtggcgcctccggcagcggcacccccggttattcgctgtatatcgacgatctggttatcacggatgttaccgatgcgaaagctgcacaggatgcctctgacgcgacggcgagtgccgtgagcggtctgacggctcgcgtaacggatgccgaagggaaaatcaccgcccaggcgcagcagcagacggcactggccacgaaagtggataatgccaactcccgcgtcgataacatggcgaagacgctaagcgacagccagagcacacaggccagcctgaatacctcgcttcagtcgcagattgacgcgcaggcggccgccaacatcaaaaaccagacgacgctggacaacacgattaaatcggtggccagtatcaccagtacccagcagacgcatgcaacggcactggaggcgctggcaacgcagcagacgaccctgacatccagtgtcggggatctcagcgcttccgttcagaacaccgccaaaactgtggcggatgtgaatggtacggtgagttcgctgtggtcgatgaaggttgagacggttaacgggaagaatgttggcgcggggattacgctgggcagcaatggtgaaacgagcgatatgatcctctacgctgaccgcttctcgctgtttaaccgtaataatgcgacggctgttccggtgatggttgccgaaggcaatgagctgtatatcgatacggcacgtattaaaaacagttccctgacctcaaccaaaatcgcggacggttccatcacgaacgcgaagatcggcaacgagatccgctcgaatgactttgttgacgggtcacgcggctggcgtatcgctaaggatggctcttcgcagttcaacaacgtgatcgttcgcggtgcggtttatgcgactgacggctggttccagggtacggtatatgcgaaccacatcgagggcgacatcgggtcatttgcgatcaacatcgctcagcaccgcacgcgcaaggtgccgaaggctacatggcagtggtttgagctggcccgattccggcggcagaatttcgaccaggtgatcaatattcgcggtggactcctccagacggatagcatcactatcgacggcggcgcgaaactcagagcggggatgtcctacgcgccaggggctgacggcggactgaatcctggctatctgtcgtatgcaatgcttcttcgtggcacaggcgctacgtctggtggcggcagtatggagctaggcattgagcttatgtatgaaacaggtggagcaacacgcctgttaacggcgcaagagtcaatgaacgtagacaacatgtcatttgtcgtccctgccggtactggcgacgctgttctgcgatatggctgttacctggaccgtaacggacagatggtattaaccatcctctcaagattcgacgccttcgccgcgcgcaataacaacgtaattcgcggttcatcaacctga

SEQ ID NO: 216323 - DNA, 1497 bp, Klebsiella pneumoniae
atggcgatgtatgaagtcggtaccgtcacgggtgccgcgtcgcaggcacgggtgacaggtgcgacaacaaaatggtcacaggaggcgctggggatactgcccgggtcgattctagtggtctaccgcagcggtagtgctgacctgtatgcgatcaaatccgtggacagcgacacgcaactgacgctgacccggaatatcaccaccgcattttccggtgccagttacggcattattaccgctgaaaccgccagcacctcgtcgtttgctaaccagctggccagcgcgtttgcattctggcgtagtgtagtggagggctggtcgatggccctgaccggcagcggcaatatcaccctgactgacccgatcacaggaaagcaggtgaccgtgccggcgatagccgggatggcgaaagcatcggatcttaacgcgctggcaaaactcaccggaggaaacaaactcgacggctcgcaggttataaccagcgataatgccggttttattctcggtaagaattcagatctggctctgctcaaaaaacaggggcaaggcgggacgattgccgttggctcgggaacaccgttcagggttcagcgttcaagagcgaccactatatcaccggcagacacctttgatgacatcctcgttattggcaccaataaccagacgacgttgcccggagatttggttgtcggtggtggtttcgataatacggcaaagggcaagctgtattcccaggcgttagagctgtcgatgggcactccgtacatcgattttcatcataacaaaagtgctaacgactataccgcacgcatcatcactacagccgcagatcaacttagtgttcagggaagtcatctacgggtagacagagacctgcgggtggggcaagcggccgacatcggcagctggatgcagtgtcgctatgactgtgtgtcccagcagaccgacttcggttcccctgccattggcgcgttagtttccggtggcagagtacggtcccgcatgacagggcgtggaggaaacggcgacacgtctggagcgtggggtggtttctaccttgaagaatacgttgggtacaaccaccgggtggtactgtatatggacggtttcggccaaaaagatgcctggctcttttacaccggagggacaatctccacccctaaaggcgatgttatgaccactggctcagacgtgcggctgaaaaaggattttacggaatcccaggaaggggcctccaggcgtattaacgcgctgggggtatgtgagttcaacatgaaaggcgaaacacgccgtaggcgtggatttattgctcaacaagctgaaaaagttgacccgatttacacctttcaaagcggcgatgtagaaattgatggcgagaagatcaatatccttaacgtagaccatacggccatcatcgcggatcttgttcttacggtgcaggagttaacaaaacaagtgcgtgatttgaacaagcaggttcaaacaaaagagtactga

SEQ ID NO: 216324 - DNA, 633 bp, Klebsiella pneumoniae
gtggccgggagaattgattacgatattgaaaaataccagtttaccgaagccggtgagacgccacggctccgggagcagtggcgtgaagtatacctggagtgtcgtcagctgcgggccggggcagaggagcgcctgcgcattgcgttactgaacgtcgactatgtcaccagcttcgagctgccttttcgcctgctgctggtgcgcgcgccgcagctaatcgccgatgttcgcgagacgttgcagcttagccgtaaagccgccgttttcaacggcaaacgttacggctgcgtctatagtttgaaacaggatttacaggctgtcccggaagcctttcattaccgcctggcaaaccgcattcgtcgcgtcgatgcaaccgggctgacggcggccccgtaccagcagattgcccgggagataaagccggcccgggagcggctccgccaggcgctgaacgccggcctgccggtcaccgctctcgacgccttgttctggttcggcagtcagcgagtggcggcggacatcgcgcagttgcgccggtccggcatggcgattgtcacgacggaggtggaggtcagcgacaatttgttcaataccacccgacgagtgcccgtttaccgcctggccagcgagtga

SEQ ID NO: 216325 - DNA, 729 bp, Klebsiella pneumoniae
gtgcagggcgagcccgatatcacctgctatcatctgccggagacgcacgccggccagtcgctctgcgtaccgctcatcgcccagggcgaagccattggcctgctgactttccagaacgtcaccgccagtgacgctccttcccgggcctatctcgagctgatggcggaagcgttgggcctggcgctggccaatcagcgtttgcgcagcgccctgctggaaaaagcgctgttcgattccctgaccggcctgcgtaaccgccatcatcttgacgaagcgctgcattcgcagatggcgctggcggtccatacccatactccgctgagctgtctgatgatcgacatcgatcattttaaaaccatcaatgatcgctatggccatgaggctggggatctggtgattaagagcgttgcgaccattgtgcagcgcgcggtgcgcgatatcggcatggctttccgctacgggggcgaggagtttttagtgctgctccccgggattgacgaagccggggcgcaccagtgcgccagcgagatctacacccaggtgcgcaatatgacgctgcgcgatggtctgaccgagataggccaggtggatgtgtcgattggcatcgccagctacccgcagcacacccaaagcgatagtctgctgcgcgcggcggatgccgcgctgtaccgggcgaaagagctgggccgctcaaggattgtcagctttggccgcctgaagaccagctaa

SEQ ID NO: 216326 - DNA, 1026 bp, Klebsiella pneumoniae
gtgagaatcgccaccatcactaactgggcttacgggatcaccgttggcctgacgctggcttccgggagcgctatgctcatggcctccagcgccgaccgcgtcgaacgccaggcggtacagcagcgccaggtctttgatacgctctccgacgaggtggaaaacgacgcctgggcgctgtctgacctcgcccggctgtacgtgataaagccttcaccggagacgcttacgcaatatcagcagctgcagcagaccgacaagagcatagagcagcggctgggcggcctgaaagataacggcgccagccgcgaggagctggcgctgctccaggatggcctgcggatcgccgatgagctacaggatgaacagcaggcggccctggcgcatgtcgctcgcggcgatgcgccagcggccatcgcggtgctgtacggcaccgcgtacgagaccgaactggagcgcatgcagacgcagatcgatcgcttccgccagatgcttgagcatcgcgccgccgtcgctatcgaccaggccaccgagcgctcgcggatctggcgtacgctgtcggaaatcatggtcggcctgaccgccctgatgtttttgttcgtcctcggcttcattctcaaacgccgggtgctctacccggtggttcgcctgagcgacgtggtccagcgtctcgcctcccaggattatgcggtagagacgccgcactttacccaggtggatgagattggtgacatggctcaggcgatccgcatttttcgcgagaacggcctggcccgtcagcggctggagcagcagcgcgacgccgactgggcgatccgcgagctgctggcgcgtatgactcagcggctgcagggctgtgaaaccattgaggatgtgattaaggtggcggagcggtttgcgccgaatatcgccccgacgatccccggtaaactgtatgttctggataccgacccctggcagatgcgctgcgtagcgcagtggctgtcgcccgccggtgagacgacccccttttctcccgacgactgctag

SEQ ID NO: 216327 - DNA, 1044 bp, Klebsiella pneumoniae
atgaattttagagcattacttgccattgcgttattgacgatgagcagcctggcgtttagcgagacgcgtcttccgcatattgttattttagccaccggcggaacgattgctggttcggcggccagcaatacccaaacaaccggctataaagccggggcgattggggtgcagacgctgattaacgccgtgccggaaatgagtaaaatcgctcacgtcgagggcgagcaggtggccaatattggcagtgagaatatgaccagcgatattattctccagctctcgaagcgggtgaatgcgctattggctcgggacgatgtcgatggcgtggtgatcacccatggcacggacacgctggatgaaaccccgtatttcctcaatctgacggtgaaaagcaacaagccggtggtctttaccgcggcgatgcgcccggcgacggcgatcagcgccgacgggccgatgaacctgctggaagcggtcacggtcgccgccgatcctgatgcccggggacgcggggtaatggtggtgcttaacgaccgcatcggcgcggcgcgctttgtcaccaaaactaatgccacttcgctggataccttccgggcgcccgaggagggctatcttggtgtcgtggtgggcggaaaaccccagttcgagacgcgggtggataaaattcacacgctgcgctcggtgttcgatgtgcgtcagctgaaggttctgccgaaggtggtgattatttatggttaccaggacgatccggagtatatgtacgatgcggcgatcgcccatcatgccgacggtattatctacgccggaaccggggcggggtcggtgtcggtacgtagcgccgccggtatcaaaaaagcgcagcaggcgggcatcgtggtggtgcgagcctcccgtaccggcagcggcgtcgtaccgccggatgacagccagcccgggctggtggccgactccctcaacccggcaaaagcgcgtatactgctgatgaccgcgctgacgcagactaaagatccgcagctgattcagcaatatttccatacctactga

SEQ ID NO: 216328 - DNA, 639 bp, Klebsiella pneumoniae
gtgttcgctgagtttggtgttctgaattatttaacctatctggtcggggcggtgtttatcatcctcgttcctggccctaatacgtttttcgtgctgaaaacgggcattgcccacggggtgaagaaaggctatctggcggcggcgggtgtctttattggcgacgcagtgctgatgtttctggccttcgccggggtggcgacgctgattaaaaccacgccggtgttgtttaacgtcgtgcgctacctcggggcaatttacctgctgtggctcgggggcaaaatgctctatgcggtgctgacccagcgcgacggccagtccgacgccagcgcggagccggcgagcgcgatcctcaagcgctccctgaccctgagcctgaccaatccgaaagcgattctgttctatgtgtcgtttttcgtgcagtttatcgatgtcaacgccaaaacccccggcgtggcgttctttatcctggcgctgaccctcgaggtgattagcttctgctatatgagctttttgatcctctccggctcgtttgtcacccgctacgtcaaaacccgcaagaagctggctaaacttggcaacagcctgattggtctggttttcgtcgggttcgccgcgcgcctggctaccctgcagtcctga

SEQ ID NO: 216329 - DNA, 906 bp, Klebsiella pneumoniae; identical to SEQ ID NO: 214274

SEQ ID NO: 216330 - DNA, 2220 bp, Klebsiella pneumoniae
atgggagcctcgccggcagcaggcatcgcagcggaaaattcggtcaaaaatagtgaagagacgctggtagtggaagccgctccgccttcactctactcccccggcgcttccgccgatcccaagttcaataaaccgctggtcgataccacccgcaccatcaccgtgatcccggaacaggtgattaaagatcagggcgtcaccaacctgactaacgccctcaaaaacgttcccggcgtgggggcgttttatgccggggagaatggcagctcaaccaccggggatgccatctttatgcgcggcgtggatacctctaacagcatctatgtggacggcattcgcgacatcggcagcgtgacgcgcgataccttcaatacccagcaggtggaagtcatcaaagggcccgccggcacggactatggccgcagcgcgccctccggctcgatcaatatgatcagcaagcagccgcgccttgactccgggatcgacggctcggccagcatcggcagcgcctggtcgcgccggggcactctcgacctgaaccaggcgtttagcgacaacgctgcgttccgtctgaacctgatgggggaaaaaacccatgacgctggtcgggaccgcattgaaaacgaacgctatggcatcgcaccgtcgctggccttcggccttgataccccaactcgtctgtatctgaactatctgcacgtccggcagaacaacaccccggatggcgggatccctaccgtcggcctgccgggctattcggcgccttcgccgaagtatgccgcactcaactccgccgggaaggtcgataccagcaatttctatggcaccgactccgattacgataaatctactaccgacagcggtaccctgcgcttcgaacacgatctgacggagaataccaccgtgcgcaataccacccgctggtcgcgagtgaaacaggagtatcttttgaccgcggtgatgggcggcgcgaacaatatcaccgcccccgatatcaatgacgtcaacacctggagctggtcgcgtctggttaataccaaagatgtcagcaaccgcattctgaccaaccagaccaatatcacctcgaccttcgatactggctcgataggccatgacgtcagcgccggcgtggagtttacccgggaaaaccagaccaactatggcgttaacgccaggaccgcgccggcggtgaatctctaccatccggtgagcaacctgtcgattggcgggctggacagaaacggggcgaacgccaacggccagaccgataccttcgggatttatgcctttgatacgctgacgctgaccgagcggattgagatcaacggcgggctgcgtctcgacaattaccataccaaatatgacagcgccaccgcctgcggcggcagcggacgcggggctatcgcctgcccgcccggacagtcgaccggcagcccggtcaccactgtcgataccgctaaatccggcaatctggttaactggaaagccggggcgctgtaccgcttaaccgagcagggcaatgtctacgtcaactacgccatctcacagcagccgccgggaggcagcagcttcgccctggccgccagcggcagcggcaacagcgctaaccgaaccgactttaagccgcagaaggcaaaatccagcgagctgggcaccaagtggcaaatcttcgacaaccgtctgctgctcagcgcggcattattccgcaccgatattgaaaacgaagtggccgccaacgatgacggaacctggtcgcagtacggcaaaaagcgcgtggaggggtatgaactctccgcgaccggaaacctgaccccggactggacgattatcgccggctacactcagcagcatgcgacagtgacggagggacagaacgttgcacaggatggatcttccgccctggcctacaccccgaaacatgcctttacgctgtggacgcagtatcaggccaccagcgatctgtccgtcggcggcggtgtgcgctatgtcggaagcctgcgccggggcagcgatggtgcggtcggtaccccggatcacaccgagggctactgggttgccgacgccaaactgggctatcgggtcaacagaaacctcgatctgcagctcaatatgtataacctgtttgataccgattacgtggcctccatcaacaagagcggctatcgctatcatccgggcgaaccccggacctttatgctgacggcgaacgtccatttctga

SEQ ID NO: 216331 - DNA, 948 bp, Klebsiella pneumoniae
atgaaagcagccgtggtttttgatctcgcagaaggcccggtttgggccgattttatcgacccgcagcccgcgcccggccagacgctcattgacgtccgcgccgccgcgataagccatgtggttaaggcccgggcatccggacgccattacagcttcgacggcaatctgccctttgtgcctggtatcgatggcgtcggcaccacacctcagggccagcgcgtctacttcgccttccccaccgcccccttcggcagtatggcgcagcgggcgccggtcgccctgcagaattgtctgccgctgccggatgcgctcgatgatatccaggcggcggcaatggccaaccccggtatgtccgcgtgggcatcgctggtgacacgcgcccagcttcaggccggcgaaacggtgctgattaatggcgccaccggcagcgccggtcagttggcggtacagattgcccgctatctgggggcgaaaaaaatcattgcaaccgggcgcaatgcgcagtcgctcgcggcgctggacgccgatgagtgtattcagttaaccgctgatgataaaaccttgagcgggcaattttcagcggtcagcgccgcgcagatcgatgtggtcatcgattacctgtggggacacagcgcggaattattattgccggcactggcgaaatatacccctgccggcagtccggtgcgctatgtgcaggtgggttccctggctggcgccgatatcgcgttaaatggcgcagtgctgcgttccgccccgctcctgctgatgggcagcgggatcggtagcctgtcggtatcgcaactgctggcggcgaccggcgaaatgctgcaggcggcggtgccggggaaattgaccgtcgccaccaccccgcggccgctgcaggagatcgcggcggcctggccacaggacgacagccagaagcgcacggttttcaccctcggataa

SEQ ID NO: 216332 - DNA, 810 bp, Klebsiella pneumoniae
atggaacgctatgagacgctgtttgcccaactgaaaaatcgccaggaaggcgccttcgtcccctttgtcacccttggcgatccgggaccggagcagtcgctgaaaattatcgatgcgctgatcgaaggcggcgccgatgcccttgaactggggatccctttctccgacccgctggcggacggcccgaccatccagggcgcggccctgcgcgccttcgccgcgggagtgaccccggcgcagtgctttgagatgctggcggcgatccgccagaagcatccgaccatcccaatcggcctgctgatgtatgccaacctcgtcttcagcccgggcatcgatgcgttctatgcccagtgcgcccgcgtcggcgtcgactcggtgctggtggccgacgtgccggtggaagagtccgccccgttccgccaggcggcgatgcgccataacatcgcgccgattttcatctgcccgcccaatgcggatgacgacttactgcgccagattgcctcttatggccgcggctacacctatctgctgtcgcgcgccggagtgacgggtgcggaaaatcgcgccgcgctgccgctgcaccacctggtggagaagctggcggaatatcacgccgcgccgccgctgcagggctttggtatctccgcgccggagcaggtgagcgccgctattgacgccggagccgccggggctatctccggttccgccatcgtcaaaatcatcgaacgccacctcgatgagccgcagaccatgctcgacgagctgaaagccttcgtccagagcctgaaggcagcgaccaaaaccgcctga

SEQ ID NO: 216333 - DNA, 1194 bp, Klebsiella pneumoniae
atgagcactttactgaacccctacttcggcgaattcggcggcatgtatgtgccgcagatcctgatgcccgccctgcgccagctggaagaagcctttgtcagcgcgcagaaggacccggcctttcaggcggaattcaccgacctgctgaaaaactacgccggtcgtccgacggccctgaccaaatgccggaatctgaccgatggcacccgcaccaccctgtacctgaaacgcgaagatctgctgcacggcggcgcgcacaaaaccaaccaggtgctgggccaggctctgctggccaaacggatgggcaaaaccgaaattatcgccgagaccggcgccggccagcacggcgtcgcctcagcgctggccagcgccctgctcggcctgaaatgccgtatctacatgggggccaaggacgtcgagcgccagtcgccgaacgtcttccgtatgcgcctgatgggcgccgaggtgatcccggtgcacagcggctccgccacgctgaaagatgcctgtaacgaggcgctgcgtgactggtccggcagctacgaaaaggcgcactatatgctgggcaccgccgccggtccgcacccgttcccgacgattgtgcgtgaattccagcgcatgattggcgaagagaccaaagcgcagatccttgaaaaagagggccgcctgccggacgcggtgatcgcctgcgtcggcggcggatcaaacgccatcggcatgttcgctgattttatcgaggaaaccaacgtcggcctgatcggcgtggagcccgccggacacggtatcgagagcggcgagcacggcgcgccgctgaagcatggccgcgttgggatctacttcggtatgaagtcgccgatgatgcagaccgccgacggccagatcgaagagtcttactccatttccgccgggctggacttcccgtccgttgggccgcagcacgcgtttctgaacagcaccggtcgcgctgactatgtgtcgatcaccgacgacgaagcgctggacgcgtttaaagcgctttcccgccacgaagggattatcccggcgctggagtcctctcacgctctggcccacgcgctgaagatgatgcgcgagaacccggaaaaagagcagctgctggtggttaatctctccggccgcggcgacaaagacattttcaccgtacatgacatcctgaaagcgcgaggggaaatctga

SEQ ID NO: 216334 - DNA, 1359 bp, Klebsiella pneumoniae
atgcaaaccgttttagcaaaaatcgttgccgacaaagcgatttgggtggaagcccgcaaacaacaacaaccgttagccagttttcaaaatgagatcgttccgacgcagcgcaatttctatgacgcactggccggcacccgcaccgcgtttattctcgagtgcaagaaggcctcgccgtcgaaggggttgattcgcgaggatttcgatccggcagcgatcgccagcatctacaagcactacgcctcggcgatctcggtgctgtgtgatgagaaatatttccagggcagcttcgatttcctgccgatcgtcagccaggtcgcgccgcagccgatcctgtgtaaggacttcaccatcgacccttaccagatctacctggcgcgctactatcaggccgacgcctgcctgctgatgctctcggtgctcgacgatgaacagtatcgtcagctctcggcggtggctcacagcctgaatatgggcgtgctcaccgaagtcagcaatgaagaggaactggagcgcgccatcgccctgaaggcgaaggtggtgggcattaacaaccgcgacctgcgcgatatgtcgattgaccttaaccgcacccgtcagctggcggcgcgtctcggcccggatgtcacggtgatcagcgaatccggcatccatacctatgccgaagtgcgcgagctgagccacttcgccaacggcttcctgatcggctccgccctgatggagcaggcggatctggaaacggcggttaaacgcgtgctgctcggcgagaacaaagtgtgcggcctgacgcgcccgcaggatgcccaggtggcctgggagtccggcgccgtttacggtgggctgatcttcgtcccgacctcgccgcgagcggtgaatgacgcccaggccaaagcggtgatcgccgctgcgccgctgcagtacgtcggcgtcttccgcaatgcgccgctggaggaggtggtcgcccgcgcgcaggctctggggctggccgccgtgcagctgcacggtgatgaagaccaggcctatatcgacgcgctgcgcgacgccctcgcggacaacgtccgcatctggaaagcgctgagcgtcggcgaaaccttcccggcccgtacgctccaccatgtcgacaagtacctgctcgacaacggccagggcggcagcggccagcgctttgactggagcctgctgcagggccaggatctgcgcaacgtcatgctggcgggcggcctcggcgccgataactgtgtggaagcggccaaaagcggctgtgccggactcgatttcaattcaggcgtagagtcgcaacccgggattaaagacgccagcaagctggcctccgtattccagacgctgcgcgcatattaa

SEQ ID NO: 216335 - DNA, 1596 bp, Klebsiella pneumoniae
atggctgacattctgctgctcgataatatcgattcctttacctataacctggcagaccagctgcgcgccaacggccataacgtagtgatttatcgcaactccgttccggcgcaggcgctgattgagcgtctgggcaccatggacaacccggtgctgatgctctccccgggcccgggtacgccaagcgaagccggctgcatgccggagctactgacccgtatgcgcggcaagctgccgatcatcggcatctgcctcggccaccaggccattgtcgaagcctacggcggctatgtcggccaggcgggggagatcctccatggcaaagcctccagcattgagcacgacggccaggcgatgtttgccggtctggctaacccgctgccggtggcgcgctaccactcgctggtcggcagcaatattcccgccgggctgacgattaacgccaatttcaacggtatggtgatggcggtgcgtcacgatgcggaccgggtgtgcggcttccagttccatccggaatcgatccttaccacccagggcgcacggctgctggagcagaccctggcctgggcgctgcagaagctggagcataccaacaccctccagccgatcctcgagaagctgtaccaggcggaaaccctgagccagcaggagagccaccagctgttctccgccgtcgtgcgcggcgaagtgaagcctgagcaactggccgccgcgctggtcagcatgaaagtgcgcggcgagcagccgcaggaaattgccggcgccgctaccgcgctgctggaaaacgccgcgccgttcccgcgcccggactacctgtttgccgacatcgtcggcaccggtggcgacggcagcaacagcatcaatatctccaccgccagcgcctttgtcgctgcggcctgcgggttgaaagtggcgaaacacggcaaccgcagcgtctccagcaaatcaggctcttctgacctgctggcggccttcggcattaatctcgatatgaacgccgataaatcccgcgccgcgcttgatgagctgggcgtctgcttcctgttcgcgccgaagtaccacaccggtttccgccacgcgatgccggtccgtcagcagctgaagacccgcaccctgttcaacgtgctgggcccgctgatcaacccggcgcatccgccgctggcgctgattggcgtctacagcccggaactggtgctgccgatcgccgagaccctgcgcgtgctgggttatcagcgcgcggcggtggtgcacagcggtgggatggatgaagtttcactgcatgcgcctacggtggtggccgaactgcataacggggaaattaaaagctatcagctgaccgccgacgacttcggcctgacgccttaccatcaggcgcagctggcgggcggcaccccggaagaaaaccgtgacattctgacgcgcttgctacaaggtaaaggtgaagccgctcacgaagccgccgtcgccgccaacgtcgccatgttgatgcgtttacacgggcatgaagatctgaaagctaacgctcagcaggtactggatgtgctgcacagcggcgcggcctatgacagagtgaccgccttagcggcaagagggtaa

SEQ ID NO: 216336 - DNA, 864 bp, Klebsiella pneumoniae
ttgagcgacagccaatacgcagtgatttacgatctgcacagccataccaccgcctctgacgggcggctgactccgcaggaactggtccatcgcgcccatgagatgcgcgtcggcaccctggcgatcaccgaccatgacagcgtggcggcgatcccggcggcccgggaggagatcgcccgcgccggattacccttgaccctggtgaacggcgtcgagatttccaccctctgggagaatcacgagattcatattgtgggtctgaatattgatattgcgcacccaacgatgaccgccctgctggaggagcagaaagcgcggcgccagcagcgcggtcagatgattgccgagcgcctggagaaggcgcggatccccggcgcctgggaaggggcgctgcgactggcggacggtggcgccgtcacccgcggccattttgcccgttttctggtggaggccggccatgcgaaaaacatggcggaagtcttcaaaaaataccttgcccgcgggaaaaccggttacgtgccgccgcagtggtgtacaataaaacaagcgattgatgtgattcatcattctggcggcaaggcggtgattgcccatcccgggcgctacgatctctccgccaagtggttgaagcggctgttggcccactttagcgagcagggcggtgatgccatggaagtggcccagtgtcagcaggcgccccatgaacgcgcccagctggccaccctggccgtgcagtttggtcttctggcgtcgcagggatccgattttcatcagccctgcgcgtggatcgaacttggccgtaagctctggcttcctgccggcgtggaaggcgtctggcacagttgggaagcggccgccgaataa

SEQ ID NO: 216337 - DNA, 543 bp, Klebsiella pneumoniae
atgatggtcccttttcaactttcgacgctccccgtcacgccgtggaaaaacggcggcggagagacgcgcgaaatcatctgcgtacccgctccagatgccccttttctctggcgagcgagtattgccaccctgcaggcggatggccctttctccccctttcctggcgtcgaccgggtcattactctgctggcggggcagccgctacggctgtgtggcgagaatatcgaccaaccgctggcgctctggcagccgtgggctttccccggcgaatgggcgctgtccagcgtcgggatcgttgcgccagggctggacttcaatatcatgactcagcgcgggcgcgcgtcggcgacagttcaggtcgttagcgacctgcaatgccctgccagcgagggggtcgcttatgttctacaaggcgagtgggatctggccgggcgacgctgcgcggccggcagcggcctctgctggcgcggtggatccccgcggaatctgcgtcccgtgggcagcaatggacgcctgctgctggcggagatcgcgctcaaataa

SEQ ID NO: 216338 - DNA, 1188 bp, Klebsiella pneumoniae
ttgcttaccgacacaaaattaagaaaagctcttggcaaaaagagagaccagatcaaggtcatatcggacgctcatggtctgaatgtccggttgtctacttccggcagtataacattcttttaccgctacagatggaacgggaaagccgctcagctaacgattggcgattatcccaccacctccttatctcaagctcgcgaacgtagacagcagttcagggcctggttgacagaaggactcgatccgagacggcaaacagttctggagaaacagaaaaaagtcgaagcgctcaccgttaaagaggctttcgattactgggaaaagtattactgcatccctgaaggtcttgtgaaaatcaaggttaaccggcgggacttcaataaccatatagcgcctgtgctggggaacatgattgttgatcagaccactaaagcgcactggcttaacctttttgatggcatggggcgaagagttgtcactggtcagatgcttgggctgatgcagcgtacgttccgtttttgctccaatcgaggggtaattaatgtgaacccaattgagagccttaggcgctctgacgtaggtctcacagcatccgtaaaagatcgcagattgagtgatgaggaaatcaaaacagtttggaacatccttcctgaattgaaatacagacaacagctgataatgaagtttctcatcatgactggctgccggagtacggagatcaggacagcaagatgggagtggttcgatttccatgagcaaacgtggaccattccggcaagcgattataaaaccgggaaatcggtcagaagggcacttcccgaggcagtagtaagaatgatgttagcagagaaggaaacgtcagtttcaaaacacgttgtgacactgtcacgctacagggggccagaagatgacagaccgccactacaaccaaacgtcgctctgttttctgctcagattatagctaaaacaggcatgaagccctggtctctccatgacctcagacgaacagtggcgacacgcctttctgaattaggtgcgccgccacatgttgtggaaaaactgcttggccatcatatggcaggtgtcatggcgaggtataacctgcatgactacattgatgatcagcgccattggcttgcggtatggcagaaccatttggagaaactggttggtcatcctctggtttga

SEQ ID NO: 216339 - DNA, 198 bp, Klebsiella pneumoniae; identical to SEQ ID NO: 123805

SEQ ID NO: 216340 - DNA, 240 bp, Klebsiella pneumoniae; identical to SEQ ID NO: 123806

SEQ ID NO: 216341 - DNA, 1110 bp, Klebsiella pneumoniae; identical to SEQ ID NO: 123807

SEQ ID NO: 216342 - DNA, 3135 bp, Klebsiella pneumoniae; identical to SEQ ID NO: 205551

SEQ ID NO: 216343 - DNA, 774 bp, Klebsiella pneumoniae; identical to SEQ ID NO: 205552

SEQ ID NO: 216344 - DNA, 294 bp, Klebsiella pneumoniae; identical to SEQ ID NO: 205553

SEQ ID NO: 216345 - DNA, 468 bp, Klebsiella pneumoniae; identical to SEQ ID NO: 205554

SEQ ID NO: 216346 - DNA, 552 bp, Klebsiella pneumoniae
atgcatactgtttcatttcaacagagtagcagagcttcctctaatccaatgatattcccgtgtcatcaaagcgaatcggcagcgcagggtattgctcatcgagatatttgttctgcagtccgggcgtgggcggcagcagaagggcgcgtagcagtagcacttcaaatccaggaagcggcggaagaacttcaacttgatggcgtggatttgtcaggccaggcagatgtctggaacgtgaagctgttccgatggctggacaacaaagaagactccgcatcgtaccgaaagaacgtcgaacagctggtgcccgcgatcatgtctgtattaccgattcgatatcgcgaccgtgtagtaaagaacgactcgttcgcttatcgcatggccaggttggaaaaggaagtgagtgaggcgaagcaagctctgatgctcgatgcaccgaagaaggaaaagctgaaggagttaggcgaggggatttttgagatgttccgtgtcgatccggaccttactgcgccgctgctggcgatggtgacaaccatgctgggggcaatgtga

SEQ ID NO: 216347 - DNA, 861 bp, Klebsiella pneumoniae
atggccgacctgtcgaacgggtataccaaggtcgctaacgaaatccaacagctcaagcctcgtctgagaatgtcaggccgggagtggcagtgttttgaggcggtgatctggcttacctacggctggaacaagaaacaggaccgcgttacgaacacggtgatcgctgagcttacagggctgagtgattcgcatgtttctgatgcgctcaaatcgctcgcagaacgcaaaattatcttcagtcaaaagcagggagtgatgaaaactgtcggtataaatactgacctttccgcctgggttttagacaaaccgaaaacgggaaaagtcttcccgaaatcgggaaaagtgttaccgaaaacgggaaaacctttcccggaaacgggagacacccaatacaagaacaagaacaatagtaaaagatcttcttcgtctcggaattctaaagaatcccgaaacgaggaaactttgaagtttctctctcgtcatccagaagcggccgatgggatttatacccctgcaggtaaatcctggggaacagctgacgacctcaaagccgcgcgatggattttcgataaagccctcaccgtgaacgcctccctctcagagcccaactgggttgaatgggcgaataccatccgcctgatgcgtctgcaggacaagcgcactcactatgaaatctgcgaactgttcaagtgggcgaatgaaaatgatttctggcaagaaaacattctctgcccatcaaaactacgcaaacagtgggatcaactcacgacaaaacgacttcgtagccatggcccatcaaaaaacaaatcaggcgccagtatgctggataacaccgactggatcgacggggtactcgaatga

SEQ ID NO: 216348 - DNA, 738 bp, Klebsiella pneumoniae
atgaaatctatcgcagaaagcatgcataacttcgaccgggacaacttccagcgagtagctgccgggcttcctgaaatgcaagaccagcaggcagtaaagcgccaggcggcaaagactgcggagatcttcaacgagctgttccgccagttgctcgctgtgttcccggcgctggccagcaaaacacccgaggagatgaacgagatgcgccggcagtggcttctggcgttcaaggaaaacgggattgtctccatggagcaaatcaacgctggcatgcgcgttgcccgcaaacaggatcgtccattcatgccatcgccgggtcagtttgtcgcctggtgcaaatcggaatcagccgtatccgccggactgccggatgcagtggagctggtcgatatggtttaccagtactgccggacccgcgggcaatacccggatgctgagtcctatccgtggccagagcacaacgtcacgccggtaacgctgaagcacaaggcctgctactggatggttactggactgtacgcagacatgcgcgcaaacggcctcagcgacgctgagctgcgccgcaaggctcaggatgagctgatgcgtatggtgcgtcgtttaaacgcaggagaagcgattccagagccggttaagcagattccaaaacttggtggccggccattaagtcaggagcaggggttaaacaaaatcgcagaaattcgggcgaaatttggactggggagagggcggtcatga

SEQ ID NO: 216349 - DNA, 303 bp, Klebsiella pneumoniae
atgaaaaagaactcgggcaaacaagccgttattaacttcatcggccagcatcctggctgcagctttcaggatatccgccgcggtaccgggcttgactcttcagtggtcaactcctccctgtggcagatgcaccgtgacggccaggttaagcgtgaaggtgagtgcaggagctaccgctacaccttgatcgacacaacagccgtaaccgaaagcgatccgtctgttcagtatcgccagcgtcctggcggcgtaaacccaatgaccaacctttttaaccagtgcctggcgggagtaagaaaatga

SEQ ID NO: 216350 - DNA, 411 bp, Klebsiella pneumoniae; identical to SEQ ID NO: 205557

SEQ ID NO: 216351 - DNA, 483 bp, Klebsiella pneumoniae
atgaccgagcaaaccattctcgacatgtgctgtggctcccgcatgttctggttcgacaaacaggacccgcgtgcagtgttcgccgacattcgctccgagcagcacaccctgtgcgacgggcgccgtctggttatcagtcctgacctcgttgctgacttccgtgcgctgccgttcgctgatgcctcatttccggttgttgtgtttgacccgccacatcttgagcgcgtcggccagaccgcgtggatgggcaaaaagtacgggcgcctgaacaaaaaaacatggcgtgccgacattcgcgcaggattcaaagaggcgcttcgcgtactgcggccacatggtgtgctcatattcaaatggaatgaaacccaaatccccgttagccaaattatagctttaacagacgagaaaccggcgatcggccagcgcaccgggaagaacgataaaacccactggatcatcttcgtgaagggagctgcggtatga

SEQ ID NO: 216352 - DNA, 225 bp, Klebsiella pneumoniae
atgaaaattaaatgcatcaaagacacagagggatactggactgaaggtgaaatgtatccggcccgtgtagttgctggaggttttgttcaagttggcgacgatgacgatcctaatggcgaaggttggagcgctgcaccaatggaatatcgtgaagatggttcgatcgtttatcaggtcggtgggattgagagtgatgtgttgttcgaggaggccagccatgactga

SEQ ID NO: 216353 - DNA, 318 bp, Klebsiella pneumoniae
atgactgatgccactgtcgtcgcagaatatcgaaaggcaaaattacgtgctgcggcaagtgcaattgagttcgtcatcatcgcccggcattcgaaaggtcgggcggtgacagagaaattctacgcactggctaaccttaacaatgtcatcgtgctggtagaagcgttggagaaggtgcagaccatcttccatgaccttaaggccaaaggtatcttgggtctgaagacttgtctaaagagaaggtttaagaggaaacaaaaaggatttcaaaaattgagtttttatacaatactaaagctcaatgttgagaaaaaataa

SEQ ID NO: 216354 - DNA, 675 bp, Klebsiella pneumoniae
atgaacgtatatatcttagttgagggaaagcagactgagagaaaggtttatccagcttggctgtcacaacttgcttcccatatgaagaaagtagaatcacccgctgacgtagaagaaaattcatatttcttgataagcggtgaaggttaccctcgtcttctcgacgtatctctgaaagatagtcttaccgacatttgtgaatctggtaaattcgatgccttttggattgtattagactctgatggtgaagatgttcgagtaagaattgaggacatacatagccgaattgcttcattaggcatagagattggtagatgtaaaattgaaaccattctgcaaaatccatgcattgaaacatggggattgggtaataagtcagtaattagcgtaaatcaattacatggcgattttaataattgctttcatttttatgatgttgccacaaatgatccagaattaatgactaagcctgaagatttcattggtaccatagctaattatcatgaatattatattaaaaatatgtataaacaagtccgattaagctatagcaaaaatagacctattgcattgattgatccaactactttagaacaaatagtgagaagattagatgatacaccaggtcatctatcatcttttaaaacatttttttcacttgcaactaaattatag

SEQ ID NO: 216355 - DNA, 882 bp, Klebsiella pneumoniae
atgggtcgcttttatggcatcgaaaatgatgaaaataaaccagacatcctgaatgaaaccatcaaaaaagataatgaaaccattatcaagcgagtgggtcttgatattatttataaaggtgaaaagaccgtaaaattatcagccaaagaaagcgtcgttaattccctaaaggaagaagatgatattagaaaaatacatagcgctttctcttgcgtgcttaattctgtggatacaggatatccgcggaggccaaggtttttccctgtatctaaaaataagcccatgttttttgaggatttcgtatctctcagaaactcaaataggccatttgttcaaaagctatttatatgtcaagaacaatttcctgaacagtttgaagaaataaagaattcttacatggatattttcccgtttgttgaggaagtggaaattgatcggcttccgatggggcattcagatgaggaaaatgaatacttccaatattttgtaaaaattcgagaaaggggcattgatgactggattgttcagagtgatatgtcatctggcatgttcaaaagtttgcatcagattggatgtatttaccttgcggcagatggttctgtttttttgattgatgagtttgaaaatggatttggggtaaattgcattgatgatgtcacaaaggctctgatatcttgtggtaggaatattcagtttataattacaagccatcatccatacattataaataatatccctgtatctaaatggaaaataatttctcgtaaaggtagagaggtttcagcacacgacccttctgagttttctcttatgaaatcaaatcatgagtcattcactaagcttattaatctgagtatctatcaggatggtgcagacagatga

SEQ ID NO: 216356 - DNA, 174 bp, Klebsiella pneumoniae
gtgttggcgttcctgcagcaatactgcggggaggatagtaccgggctggtggatatcggcggagtgacttaccgcattgtcgacatcggcatgcgcatgcttcagccgcatgaactctaccgcgcgcagggcttccctgaatggtacatcatcgaccaggataccgcggtgtga

SEQ ID NO: 216357 - DNA, 234 bp, Klebsiella pneumoniae
atgaaagttgaagtcacaattgataaacataaaaaactccctgatggtgccatacctgcgcttgagcaagaattgctgcgccgcttgtcccagtcttatgatgactgcaaattaaccattcgacgcacaagcaacgatggtcttagcgttttgggcggcgctgatggcgataaaaagcacgttgagcaaatcgtgcaggagacctgggaaagcgccgacgagtggttttattaa

SEQ ID NO: 216358 - DNA, 600 bp, Klebsiella pneumoniae
atggcgctagaattacaacttatcaaacaccattcaggaatactgatcccggctacgcccgagaccagcgatatcctgcaatccaaaacccggctcggcgatgttcttgttgccgagttcaggcgggtacgaaacccggcatttcaccggcgctttttcgcgcttctcaatctcggttttgaatattgggaacctaccggcggggcgatttcgtctaatgagcgcaggcttatcacaggttacgccaaataccttgctgcatatggcgggagtgaatcggcgttacttgatgccgccgggcaatatctcgaccgtatagccgagaagcgatccggttcaatcagtatttgcaaatctttcgatgcttaccgggcgtgggtcatcgtagaagcaggccactatgacgccatacagctgccggacggtacgctgaaaaaacaccctcgcagcatttctttcgccagcatggacgaatgcgaattccaggaactgtacaaagcatcgctcgatgttctctggcgatggatcctctctcgttcgttcaacagcctgcaggaagctgagaacgccgccaaccagcttttaagtttcgcggggtga

SEQ ID NO: 216359 - DNA, 297 bp, Klebsiella pneumoniae
atggcaaaccttcgtaaagcggcccgaggccgcgaatgcacagtacggatccccgggtattgcaatggcaatccggaaaccagtgttctggcgcattaccgcctggcgggtacctgcggaactggatgcaagccggacgatactcagggagcaattgcctgcagtgcttgccacgatctcattgatggcagaaagaaaaccaccgattacacccgctacgaactgcgcctgatgcatgcggagggggtaatgcgcaccctggaaatctggcggaaagagggactcattaaatcatga

SEQ ID NO: 216360 - DNA, 369 bp, Klebsiella pneumoniae
atgaaaatctacgatatcacgcccatcggcaaacccaggatgaccagagctgataagtggaagcagcgtccggcggtaatgcgctaccgggcattctgcgatgaggtccgtctgaagaacgttgctatgccggagcagggcggacacataaccttcgtggttcccatgccaaagagctggagccagaagaagcgagtaacgatgaacggacaggcacaccagcagaaaccagacgccgataacatgatcaaagcgctgatggatgatctgtttactgatgacgcacatatctgggactttcgtgtaacaaaagtctggggtgaatccggacaaattttaatttctgatatcggagaagtggccgcatga

SEQ ID NO: 216361 - DNA, 783 bp, Klebsiella pneumoniae
atgaaactggaagcatcgttaaagcatttcagcccgaaggggatgcatatcagcgacgacgtgaaaagcacatcgccgaatcgactgaccggaacagatgttatggcggccatcggtaccaccagcagtcgtgcgcgcttcggccttgccgctttcctcggaaaggctggtatcagcaaaacggacgaacagcttgcaattcaggcgctggcgcagtttgccatcaaaaacgctcctaaaaatgtccgcaaagccgctggtgacaagctcggcgcctgcatgttgacgctggcgcaatttgcctttgcggaatactcacgttcggcggccaccagagcaacgtgtcaaagctgcagcggtactggctttatttcccgccatgaagatgtaattaagcaccccggtattttcgatgctgacggtgtcgaagtgaaggccccaaagattagaaatgaactggtgaaaagggtctgtggagtctgcggaggaaagaaagtgatccatgcgcgatgcaggtgtagtggtaaaggggaggtcttagatcgcaaagcgaccaaagaacttggcgcaccggttttcaaaacatgtgaacgctgctctggtaatggcttctctgttgtaccctctgcgacggtacaccgcgccattctgaagcgtctcccggatctccatcagtcttcgtggtcacgcaactggaagccgttctatgaagggctggtggatatgcttcacaaaggagagagacaggcagcggctgaatttgagaaggcgaccatttattga

SEQ ID NO: 216362 - DNA, 312 bp, Klebsiella pneumoniae
atggctaaacgtatgcaagacaaagagagcattgccgggatctcctggctggttctgctgatcattgcttgctggggtggacttgtccgctacctgatagatgtgaagcagagcaaggcaacatggagcttgatcaatgctcttgcccaaatggtggtttcagggtttaccggcgttattgctggcctggtgagcattgaaagcggactgagcatttacatgatactggccacttccggaattagcggggcaatgggttctgttgctttgacctatttatgggaacgcattaccggagttaaggcgccatga

SEQ ID NO: 216363 - DNA, 540 bp, Klebsiella pneumoniae; identical to SEQ ID NO: 95796

SEQ ID NO: 216364 - DNA, 345 bp, Klebsiella pneumoniae
gtgaagatgatcattttcgctttgcttgtgctggtggctgtgctcgttctgttacttctgcgcaaatatacccggctggagttcgtagggcatgccagcttgctgctgaaaacgtggtctgtaaagctgggagctatcggcgcgctggttggtgtatgggcgcagtcgttcccggatgctgcgctgcacgcctgggcggtgctgccgccggatatcaaaaacatcctgccgccaaacatcgttgcgttgattagccctgcgctggtggtgctggccgtactatcgcaatacgtacgccagccagcattgaaagaaaaggccgacgaactgaaggagcagcaatga

SEQ ID NO: 216365 - DNA, 276 bp, Klebsiella pneumoniae
atgagctttgaaattatcgcgggactggtggtcgtcatcctgggtgctattgctggcgcgttcggcattggtcatgctcgcggggccagtaaggcgaaagccaaagctgatcagcaacgtaccgaagagaacgccgctgcaactgtcgccgcggcagaacgccgtgctgaagtcacgaaaggggccagcgatgtacaggaagacgttaagcgtatgggcgatgacgatgttgatcgggagttgcgcgaaaagtttacccgccccggtagtagttga

SEQ ID NO: 216366 - DNA, 246 bp, Klebsiella pneumoniae
atgtcagagatcactgcatccgagcaaatccgtctggatataatcaagaaagttaattatgacaccgcagcggccaagctggccattgactgggtaggcgacagctatctgaagtctgagctattcgctgactctttcgatcgtgttttcacggaaagtgagatagtctcgaagacccgcaaggcaatccaggaagcgaccgaagcgctggcgctgtttgagaccgctacggaacaatccagctaa

SEQ ID NO: 216367 - DNA, 252 bp, Klebsiella pneumoniae; identical to SEQ ID NO: 205560

SEQ ID NO: 216368 - DNA, 1005 bp, Klebsiella pneumoniae
atggcaaaaccggactggggcgagcttcagcgacggttcctgtccgatcatgccgcaaccggcgtatcaccgaaggattggtgtgaagcgcagggactgaattacgctactgcccgccgatacatcaagaaacccactgcgcaaactgcgcaaaaacctgcgcagaagaaactgcgcactgcgcaaaaggaaaagtgcgcagaagagctggtggatgatgatggcctcaccgatcagcaacgtttatttgtcgcagaatacctgaaggaccacaacgccacgcaggccgctatccgtgccgggtacagcaagaagactgctgaacaaattggctatcagctgcttcagaaaacttcagttgcgcaggccattgcgcagcagcagaaagcatccattgtgcgcacgcttggcagcgcggatgaagtgcttgagcagatgtggcggctggcaacattcgacgccaaccaactttctcagtatcgccgcgggagctgccgttactgctggggcttcggtcaccagtatcaatggcgcgatgcggttgagttcgaagagaagctggctgaggctttagcgaagaaagggaaagagccaaacgacagaggcggctacggttacgaccataccagctcgcctaacccgaaatgtcctcgctgtaatggtgatggcgtcggccagccattcttcgccgatacgcgcaagctggcgcctgatgctgcgtttgcctattccggcgttaagctcgggaagaatggcgtggagataaccgctatcagccgcgagcgaatgtacgaggcggtgatgaaacgtctcggcctggctgacagtgagttcacccagcgtctacagcagattgaaatcgagcgccggcagctggagatcgacaagctccgtaaagagctggccgctgacccggaagatgacgaaccaacgccagttgcgatcaatatcaacgtagtcgatgcgcgagtgagggaagaggatggcgatagctccgacgcttaa

SEQ ID NO: 216369 - DNA, 1308 bp, Klebsiella pneumoniae
atggcgatagctccgacgcttaacgttccccaggctcgttttctggctatgcagcagaagttcaaagcctatgtagctggttttggatccggaaagacatgggttggctgcggtggaatatgcaaagggttttgggagttccccaaaataaaccagggctactttgccccgacctatcctcagatccgcgatatcttctaccccacggtggaagaagttgctcacgactggggactgaaagtcaaaatcgttgaaagcaacaaagaggtccatttctacagtgggcgccagtaccgcggcacgacaatttgtcggtcgatggaaaagcccgacacgatagtaggctttaaaatcggcaatgcgctggtggatgaactcgacgttctgaaagcggataaggcgcgtcaggcgtggcgaaaaataatcgcgcgtatgcgttataaggttgatggtctgcgtaatggcattgacgtgaccaccacacctgaaggatttaagttcgtctataaccagtttgttaaggctgtgagggaaaagcctgaactgaggtcgatgtatggtctggtacaggcttcgacattcgacaacgaaaagaacctgccggatgactatattccttcgctcctggcgagttacccgccggaattgatcaaggcatatctgaatggccagtttactaacctgaccagcggcaccatttatcatcagttcgacagggtgctgaataattccagtgaggaagagcagccaggtgaagcgctgtatatcgggatggatttcaacgtcgggaagatggcagggatcgtccatgtattgcggctcggcttaccgcacgcggtaaccgagattatcaacgcttacgatacgcccgacatgatacgcatcatcaaggagcgtttctggctgtatgccgacggagactaccgcaaggtccgcgagatttatatttatccggatgcctctggtgattccaggaagtcaaacaacgccagcaaaacagatattgagcagctccggcaggccggatttaacgtcatcgttgatgatgctaacccgccggtaaaggaccgcatcaactccatgaacgccatgttctgtaatggtaatggtgatcgtcggtacaaggtgaatgtggcccgttgcccggtctatgccgactgcctggaacaacaggtgtgggataaaaacggcgagccggataaaaagagcgataacgatcaccccaacgatggcgccggttacttcattgtgaagcaattcccaatcgttcgacctgcattctctatttcactggacacgacattctga

SEQ ID NO: 216370 - DNA, 1401 bp, Klebsiella pneumoniae
atggccaataacgatattacttatgttcgccctgaggtcagggcggcgatgcccgtgtggaaaaaaattcgtgacgtgtgcaaaggggctgatgctgtaaaggccgccgggaatgaatacctcccttttctggatccgtccgataagtctgcacgcaataaaaagcgcaatgctgattacattcagcgcgccgttttctacgcgataacgggcaatacaaaagtgggtctactggggctggcattcagaaaagacccgaccatgaccgcgccggataaactgaattatcttcgtgacaacgccgatggtgctggtgccagcatttatcagcagtcccagcaggttacagaaaatattctggaggccgcgcgcgaggggctttatacggattatgcagctgagaccgacgaggcgatcatccttcgttatcaggcggaaagcatcattaactggcgcaccaaacgcatcaatggacgtgatcaactggtgctggtggttttacgcgaatgcatggaaaaggaagatggttttgcgtacgaggatgaaatccagtatcgcgaactggctctggagaacggaaagtttgtctgccgggtatggcgaaagtcagctgacgcaggctctttttccgtcacttccgagtatcatcctaagccaaaaggtgaggatttctgggatgagatcccctttaccttcgttggtgcgcagaataatgatcccaccatcgacgagtcgcctttagccgccctcgttgaaattaaccttggccattatcgtaattcggcagattacgaagacagcgtatttttctgcggtcaggttcagccggtgatttccggtcttgataccgcctggcgtgactggctgcaggataagggaattcgtgtcggttctcgttctccattcctgctgccgaaggaggggagttttacctatgctcaggcgcaaccaaacaccctggctaaagaggcgatggacagtaagcgtgattattctgttcagcttggcgcccggcttatcgagcagaacggcgcggttaaaaccgccacgcaatccagcggcgagcaaaccgcatccacatcggtgctcggcatttgcgtttccaatgtctcggaggcctatacgctggcgctcggctggtgcgccagatatctcggcattaaaggcgaggaatatcgttacagcatcaatcaggagtttatcgccaaagtcgcagaatccggcatggtaacggcaatcgtcaatgcctggcagtacggtgcgattcgcgacactgatatggtcagagctctgcagaggcttgacctgatagatcctgctgacgaccctgaaactgtcattgacgctattcgtaacggcgcgcctaacctgattggtggcaataatggcaacggcgaatga

SEQ ID NO: 216371 - DNA, 1113 bp, Klebsiella pneumoniae
atggcaacggcgaatgacaaactgcaggatgaatccatagcccacgctatatgggttagtcgctacagcaccggcgttgccaacaggatgataaaagttctgaatgacagcgacgccgaacttaccgccaggctgctggtggctatcgatacgctggatcccgagagctttaccgtttcgcgtctggaagcgttactggtcagtgtcagggcgataaacaaggatgcgattcagtcgatgtatgcagctcttactgccgagttgcaggaactggcgaagcacgaagccacttttcagatgagcctcttccagtttgctattcccgacgatgttcttgctcttcatcctctggtgggcatctccccggatgcggtttatgccgcggcgatggggcgtccattccagggacgtttgctgagtgaatgggccagcaacctcgaagctgatcggatggcgcggatatccaatacggtgcggcagggattcctgctgggcgatacgcaggagcaaatcgcaaaaaaggtccgtggccatgctaatcgtggttaccaggatggtgcgctgcagatgagccgggccaatgcagccagcattgcaaaaacggcagtagggcatcttgcatcgacagccagacaaagctttgcgtcggcgaacgacgacattctgaagggtaagcagtggttatctactttggataaccggacatcaaaggattgtcgaatccgcgaccgactcaagtacacgctggataacaaaccgatagggcacaaggtgccttatttgcagggacctgggaaaatccacttttgctgtcggagcaccgaaacttacatcctgaaatcgtccgaggaattgggtatcaaagtcggcgaaatcaaggacagctcgcgcgccagtatggatggacaggttccggctgatacgacttaccaggactggttctcccggcagtcgttcacgcgacaagctgagattgtcggagaaacgcgcgccaggctgattcgtgatggcggcatgtctcccgatgagttctacaacgacaggggcgagtggctgacgctggaccagttgcgctcaaaggatgagcaggcattcagaaacgccaggctttaa

SEQ ID NO: 216372 - DNA, 786 bp, Klebsiella pneumoniae
atgcttattcgtaacatgctcattaaatattattcggcagctggtggtgaaggtggtgatggcggtggctccggtagtggtgcgcccgagattacgccggaaatccaaaagctgatcgatgagcaggtcagtgctcaggtttcaggcctgaaaaataaaaatagtgagttactcggtaagctcaaagagtccactgagtcgcttaagcgttttgatggtatcgatcctgacgcggtgaaaaccattctccagcgtttctctgatgatgaagaggcgcaactgatcgccgccgggaaaattgacgaggtactggataaacgcactgagcggctacgtgctgatgttgataagcaaatcaaagccgctaatgaacgcgctgaaaaggcggaagcgttctccaacaaattccgtgatcgtgtcctgggtgatgctatccgcagcgcagcgcttaaggcaggcgcgctgccagaagcatccgacgatctgattcttcgtgctaaaggcacattccagctcaacgacgaaggcgaggccgtagcagttgatgcaaatggcgatgttctgttcggtaaagacggcaaaactccgctcaccccggttgagtgggctgaatctctgaaagagacggccccgcacctgttcccgcgcgccgaaggctccggggctggtggtcataaacccggtggcggtggcggtagtctgaaacgttcagaaatgagctcaagcgacaaagcggactacatccgcaaacatggccagcaggcctatctcaaattgcctaagtaa

SEQ ID NO: 216373 - DNA, 954 bp, Klebsiella pneumoniae
atgcctacgaccgtaaacagtgacctgattatctatgacgacctcgcgcagactgcgtttcttgagcgtcgccaggataatctggaagtcttcaacgccgcttcaaacggcgcaatcattctcgacaacgaactgatcgagggtgattttcgcaagcgcaccttctataaagttggtggttctatcgaatcgcgcaacgttaactccaccgacccggtaacgggtaaaaaaatcggtgccggtgaatctgtcagtgttaaggcgccgtggaaatacggcccgtatgaaaccactgaagaagcgtttaaacgtcgtggtcgcgatgtaatcgaattctccgaagtgatcggcgtcgacgtcgctgatgcaacgcttgaaggttatatcaagtatgcacttcaggggcttgtggcagccattggcgcaaatgctgatatgacggtttcagcggatattgccactgatggtaagaaaaccctgtcccgcggcctgcgtaaatacggcgataaatttaaccgtgttgcgctgttcgttatgcattccacgacctatttcgacattgttgatcaggctatcgacaacaaaatttacgaagaagctggcgtggtggtttatggcggacagccaggtacgctgggtaaaccggtgctggtaactgacaccatgccagttgatgcgattctggggctggtggccggcgcggtatccgtaacggaatcacaggctccgggcttccgttcctacgatatcaacgaccaggaaaaccttgccattggctatcgcgcagagggcacggttaacgttgaactgctgggttacagctgggatgagacgaagggcgctaaccctgacctgaccaaaatcggcaccggcgcgaactggaagaaacatttcaccagtaacaaatccactgcaggcgtactgattaagctggaagcccctgcgggggagtaa

SEQ ID NO: 216374 - DNA, 396 bp, Klebsiella pneumoniae
atgaccgtttatataacaatccaggacgttgacgagttgctgggggatacctgggctgccgccgacaaaaagggtaaagccgtgctccaggcaaacacctggatgacggcgcttaaccttcaggatatcgacccggagcatattcctgaagaagttaagcaagccggagcgtttatcgcttccgtagccgctgcaggcaatctgtatcagcaaaaaacagattccggcgtggtgacgagcaaaagcgttgaggccgacgatgtgaaggtttcccgcacttttgccgagctttcaaccaccagcactgaattactcgatcctgatttgcagctggcgctggatatgctcaaaccgtggatgattaaccctttccagacgttctttgtgagggcgtga

SEQ ID NO: 216375 - DNA, 255 bp, Klebsiella pneumoniae
atgtccgatttgaaggtggtcccatttcaaaagcccagccatcacaacctcgataacgaccaggttattcgcctgctgaaacaggctctggagagagccgaaaacggcggctgccacagtgtcgcagtgatactgcttgatgatgagggtaacgcgattgattgctggcataacggtggacgtccctatgtgatggttggcgctatggagtcgcttaaaaccgactttatccatgctcatattgagcggcggtaa

SEQ ID NO: 216376 - DNA, 234 bp, Klebsiella pneumoniae
atgcaaaatccatatgtgcattatgccggcgacgggctcggtccccgcgatgtgtttgtgaatggaaacccgatcagacatgtcgtttacgcaaatcaggcaaagggtgttgtagagtttgctccgctcccgctgcgggttaagcgcaatggcgaaatttatacccgcaaactccacggtacagtgatcgttaaacctcagcagcgtattggtgggtgcaatgggcattcgtga

SEQ ID NO: 216377 - DNA, 384 bp, Klebsiella pneumoniae
atgggcattcgtgacgagctgcaaaccgaagtcgccgcggcattcgataccgacctgcaggatgccgttaaggatttcactgggtcatataccgttcggggtgcctgggacccggtgacggaaaccggcactgaaacgcaggtgacttactcggggcgtggagtactggcgcgctataagctgcgccgtatcgatggcgttaacattctgcatggtgatgtgaagctaaccgcactggttaacgaggtgactgataagccggccgtcgggcatatcatcaccgcaccggatccggttacgggtgagcttcagcgctacgaggtcatcaccgcttctgccgactctgctggcgctgcgtactccattcaactgcggagggcgtga

SEQ ID NO: 216378 - DNA, 552 bp, Klebsiella pneumoniae
atggctaagggctggaacattgacccggcggcattcgccgggctggtggcagaagatgtcaaactacgccagcggacaatcgccattcaactgctgaatgaaatcgttcagcggtcgccggtaggaaacccggagctgtgggccattaacgcgactgcggttcagtacaacaaagctgttggggaatggaacgaatctctttatgccgatcctgccaacctgacaaagacaggccgtctcagaaagaaagtccgtgttaatgacagcatggatatcaggcggccggctgagtatcgcgcaggaaccttcagggcatcgcatttcgtcagcatcggcgaacctaatcattccgtcccgaccgaaccggatgcgcgcgggacaatgacgtttcttaatggcaaaaatatcattgaccaggcgccagcctactcggtgatttacatccagtcgaacctgccttactccgtgcctctggagaatggccactcaacacaggcgccgacaggcgtctatgccgtctcgtttaatggtgttattcaggcctacaaatga

SEQ ID NO: 216379 - DNA, 393 bp, Klebsiella pneumoniae
atgacccttacagaaatcagaaacgctgtcatttcccgaatggcggcacagaccgctattgcctctgatgcggtggattatcccaatggcccggtatttgaccccagtaaccgcgatatctgggcccgactaaccaacattgctgggcaggctggcgcaaccgagatcggggacgggccggtagtccacaggacgggcttactcatcattcagctttttgttccggtcggttccgggacgttgcttatctcccgaacggccgatcagctaacggagctattcgagtttaaggatgacggaaagctgagttatttcgctgtttctgctgtgccggcgggtgagaccgatggctggttacagctcaatcttcaaattccttatcgcgctctgtag

SEQ ID NO: 216380 - DNA, 1173 bp, Klebsiella pneumoniae
gtgagctcaggtgcaaaagtagtagccgcgtttattcgcgagacaacgccaggaatcacgcctacagcaggggcgtggaacctgctgcgtcgttcttcatttggtctgaaaccaacgcagaacaccaacgacaatgacgaaatcgctggtgaccgcatggcgcaaggtgttttacgcggcacagtggatgtcggcggcgatgtcggcacgcggtttcgctggaaccagcatgatgattttcttgccagctgcttcggttccgaatggctaaataacgtgctaacgatgggtaatggtcgcattacgttctccgtggcgacttttgccagtgatgtggggatcgcccagattgcccgcggttgccaggttggcaccttccagatggaaatcccggccgatggtgatatcactgcaaccattacgtttgcagggctggactgggagacgaagggggacgataccagctatttcaccgcgccggtggatttagcgggggcgctgcgttactccttcaaagaggtcacgaacatccggctaaatggtgttgatggcgggacaggtttctgcgtcgacaccttcaacatccagttcaacaacaatatgcagactcagcgctgcatcggtaccggttcggcattcgccggcgcaaacattccgacaacctttaccccgtcaggtcaaatcacgctgtcatggtcaaaggctgcctgggaggtttacaaaaaaacgttcaccggcgaaacggtgccgtttagcttcacgctggagaatgctgaaggcgcctataccttcgatttcccggaagtgcagatctccggcgactggccggatgcggggagcactgacattgttcaggttcagctggatatcaccgcggccaatactccgccgacgattacgcgcgtgcctaaagtgccggcgacggcaatcagtgttgcgccagccacttcaactggggccgtgggatccacggtgacgttaaccgccacgcatacgccagctgattcaactgataccgtccagtggacgtcatcggatccgactatcgccagcgtggtttctaccgggcagaaaacagcgaaagtcacacgtaacgcagccggtactgcaaccatcaccggtaaggcccgcacctttaccgcaacgtctgaaatcaccgttaccgcgccttaa

SEQ ID NO: 216381 - DNA, 483 bp, Klebsiella pneumoniae
atgctgattatttcttctcaaattgatttgaacggagaacgctggttttacccttacaaaaagccagcaggaagtaaaaagaaattcacgccggaagacgaggcgctatttaaactccgtctgctggtggccagtagcgagaatccacaataccgctcacgcaatgcgctggtgcggcgccatatcgacaaaatggacgcgagctaccaggtcggtacggatgctttcgatctcgccagtgtgggcgagatcgactctgttgatgacctgctgatcgataacgccgctcggttcctgctgaaaggttgggagggggtgggccaattggtggatggctcagaggttgctctcgactataccccagagctcgggatcgccatgctgaaacagtacccggatttgtactggcggatactggccgaggccgcaagcattgctcagggtaaggagcagcagactcaggaaaccgtaaaaaagccatag

SEQ ID NO: 216382 - DNA, 177 bp, Klebsiella pneumoniae
atggccggagtgccgctccctctatccctgaacgatattgagctttacctggcatcgcgcaccatcctgatcgaccgcattgagtttgacgcagccatactggctctcgatgatgcctggagggctgagtgggcagaggcacagaaacgtgcagcggataagaaaggaagcaactga

SEQ ID NO: 216383 - DNA, 357 bp, Klebsiella pneumoniae
atgaaaaaagtcatcgctttggcgcttggagcgctgttactttctggttgtacagtacgtgttgcagatttgactgtggcgagtactaaaaattacaacctcaatgggggtaagttctataaagggaaacgtgtaacagcagaagatagctatccggttatcatcttccctcttggcatcccgaacgttaaaacagccgctgatcgagcgattgaaaaagatcgctgtgcagttggtctgtctgacgtagttgtcactcaacttaaccactccttcctgttcggtaagattggtctgcgtgttgagggtaatcttgtgattgaccgcagcctgccgggttgtgagaacgcaagctga

SEQ ID NO: 216384 - DNA, 2898 bp, Klebsiella pneumoniae
gtgacagaacaaacctcccgcctggccattattattgacagctctggggcagaaaagcaggctgacaatctcgcaactgcacttgtaaaaatgacgcaggcaggtgaacgtgctgccaccagtgcagggaaagtgacaaaggccactgatgaagaaaaacagtccctttctgaacttttagatcgtatcgacccggtaaacgccgccctgaacaaactggataaacaacagcaggatcttgcgaaattcaaatccaaggggatggtagataccgatacattcgatctttattcaaagaaaatcgaggaaacacgaaacaggctaacaggatttcgcgacgaccttggtaaaaccggccaatccgccgcccagaccgcctatgccatgcgcatgatcccggctcagatgacagatattgttgtcggcttatccaccggtcagtctccgtttatggtgctgatgcagcagggcgggcagttaaaagatatgtttggtggtattggtccggcaattaagggtgtgggcacctatgttatggggttggttaaccctttaactcttgcagctgcggcggtcggatttcttggtctggcctattacaaaggcactcaggagcaggacgaattttataagtctctcgttctcactggtaatctggtaggcaaaacttccggtcaactggcagatatggcggcccgtgtatcggtcgcagctaactccacaaccggtgcagcagcttcaacgctgaatcagttggtgttatccggtaaagtagctggcgactcattggagcgcgtgacaaccgccattgttaagaccagcgaggcgacgggcattgctaccgataagctggttggtgatttcaacgacattactgctgacccggttgcggccattaccaaacttaacgaccagtaccactttctgacactggcaacctacaaccagattaaagcgctacaggatgaaggtaatcagcaggatgctgcacgggtggctactgatgcttacgccaatgccatgcagcagcgtgcgaatgatattcatcagaatcttggtcttcttgaaagtgcatgggactcgctgggtaaaacggccaaaggcgcctgggatgcgatgctcaatattgggcgtgaacaaacactaacggataaacttgccaccttaaacgaaaatattgctgaagcccaaaaagggcaaaaagatggtgggttctggaacagttttagcgcgaggtttaccaacctcccggagatgataaaacagagagatttgctcgaatcagttgccaatcttcagggggatgtaaccaaaggacaggcgaaggctaaggaagccgaacagcaaagaattaaaacgcagcaggaagcagatcgcgttaaccagcaatatctgagcaatgcggataagcgcaataaagctattaagcagcaaagcgaattcctgaaggctggtgcaattactgcagagcaatatgcaaaaaatgtttctcgcattaacgagatgtacaaagatccgaaaccacccaagacgccaaagggtaaagcatataccgaggacgcagcaaccaggttgcttgatcagataaaccagcagaccgctgccatgcagtcccagcttgacgccagtgacaagcttaacagcgcaactcaggcgcgggttaagttcgaacagcaaattactgacctcaagtctaaaacgcagctcaccgctgaccagaaatcgatcctttcccgttcagatgaaatcctccaggcgtataagcagcaggaggcactgcaaaactccgtaaaaaccctggacgattaccagaagatgcaggaacaggtaaagacgaaggatgagcggaccaacgatctgcttaaaacccgccttgaactactggagaaggccaaagcaaccgggcaactcaaacccggtgaatatgaaaaaacgcgggcagatatttatcaaaataccgatatgcaactgccctcgacggttcgtaatgttgtaggaaacctgacacccacaggagggcgactctctggaacttttgaggggatgcaggggcaaatcaacgaatatgaccaggctcagcaagagctccagcgctggctggcagctcaggaggaagcttatgcgaaggccggcgaaataactgccgagggtgaggccagaatgacctcgattcgtcagcgtgcagcggatgcaaatcaggtcatagaggctcagaaaaacaccatcatatctgcggccacgcagtccttgtttgacagtaccgccgacatcatgcgaacggggtttggtgagcaatcggcaatctacaaggtcgcttttgctgcgagcaaggcattcgctatcgcggactcaatggtgaaaatccagcaggctatagcaagcggtgcagttagcgcgccttatccggccaacatcatcgctatggcctcaatcgctgcgcagaccgccagtatcgtctcaaatatccaggctgtttcaggagttggattcgcctccggcggttacaccggccccggtggtaagtatcagccagcgggtattgttcacaaaggagagtacgtcttcgatcaggcatcaacgaaccggatcggcgtgtctcagcttgaggcacttcgaaatggcaaaccgcttgatgcaactctggggcgtacagggtttggtactggtgttcagaacgttaacagcgataaccgtaggcaaacaactgtacacgcgccgattaatcaggagtttcatctccagggtattactccggagcagttgagcgctacactcaatcagaataatcgactgctttccaggcagttaaaaggtgaactcacaaaggaggttaccatgccacaaggggcttttggcaacgctctaaaaggaaactatacacgacacggtcctaggtaa

SEQ ID NO: 216385 - DNA, 336 bp, Klebsiella pneumoniae
atggaagcgttgttaacatttacatttaaagactttatagcttttatgattcctctttttattggcgggcttatcttcaataggagacgtaaacgtaaggaggtccgagtgaagttttcatttctttggcttgttttgatagttggtggaactcttgaaatatgtgatgagatttacacaacttattcctataggcataatcacttatataataatgatacgcttacaaccgtgtttaactatgattttgcaaaaattgttttttgtggggttttgatctttgtttctattgcgcttcttcttcaggagttgcttttaaacaagcagtcacattga

SEQ ID NO: 216386 - DNA, 474 bp, Klebsiella pneumoniae
atgactgatatcaactacccacatgacagcctccctatgccattacaggaaggatacggatttcagcctgtaagcccgttaaaacgaacccagttaaccaccggtcgcgcgaggcaaaggcgagcttttacgtccacgccgacgcaggccagcatcacctggtttatggaaaccgatgcgcagggcctggcgtttgagtcctggttccgtgatacgttatctgacggggctgcatggttcatgatgaagctgcagacgccggcaggcattaagttttacaaatgccgctttacagatatttatcagggaccggtactggtggccccgatttactggaagtacacagcgacgcttgaattatgggaacgcccccttgctcctgccccatggggtaattacccggaatgggtcgtcggcagctcactgctggatattgcgctgaataaggagtggccgaagcatgactcagattaa

SEQ ID NO: 216387 - DNA, 483 bp, Klebsiella pneumoniae
atgactcagattaaacgcctctacgccagcagcgggccggaggtgatcattgagacgctgcagatcaccattggttctgacgtccattatctgtgccagggctacgagggtattacggcaacgacggagaacggcgataccgtaacgtttaccgcctgtgcgatagacattgcgctgccggcgcgcaatgcggacggtacgcaagatttgaaatttgccctgtgcaatatcgatggtgttgtgtccacggcgatccgcaatgccctggctaacagattgcctgcatcgctgacgtaccggcgttatatctccacggatttagcggcccctgcggaagtgccgtatacgctgaaaatcaagtctggttactggacggcgacagaggtgcagatcactgcgggctacatgaatatcctcgataccgcctggccgcgataccgctacacgctccctgtattccccggactgcgttatatcagctaa

SEQ ID NO: 216388 - DNA, 381 bp, Klebsiella pneumoniae
atgtttaaccctgataaataccgttcagtcacctggctgaagggcgggcgcgtatacccgcaactcgactgtttcggcattgtgaacgagatacgccgcgacctgaatttacccgtctggcccgattttgcaggggtcaccaaagacgacggcggcctcgaccgggaagcgcgcaggatgatgcttacccttgagcgctgcgaaccctgcgaaggggccggggtggcctgttattccgggtcgaccgtcacccacgtagggatcgtggtcagtatcggtggtctgttgcatgtggcggaatgcaacccgggtacgaacgtcacctttctgccgttgccgcggtttaagcggcgatttgtcaaagtggagttctggcaatga

SEQ ID NO: 216389 - DNA, 3069 bp, Klebsiella pneumoniae
atgaccattcgtttttacccgtcccggcttcccggtgaaccactcgaaacgcatgagcatggtgtaaccagtattcgcagctggctggtggcaaatgttgaaggctacgaggatcgggatgtcccaccgctgaccgttgaggttgaggggctgttaattccgccaggcgagtgggctaagtgtgtgattcgccctgatagtgatgtcaggctttatccggttcccttcgggctggaggccgccacaatcgcgtggatcggcgtcggtatctccgttgccgctgcagcctattcgctttttatgatgagcaccatcgatacgggcggctatacctcatccacagggcgcagtctcgacctgaacccagcgcgggccaacaccgcaaaactcggtgatgccattcgtgaggtgtttggccgggtgcgtatctacccggattatgtggtccagcccgttaccaggttcgatgccgccgatcctacgaaaatgcgcgtccagatgctgctgtgtctcggtgtcggtgaactgatttataccactggcgatatccgggtaggcagcactcctgcatcgacgctgccgggtttcaacatcacctattttccaccaggcgcggacgtttccggtgatgagcgcagtgaaaactgggtcaacagtacggaggtcggagggacatcatccggcaccgggctggatatggcccagacgtcgccggacgcagatgacattatcgcagacagcatgaccgtatccggttcgagcgtaacgtttaccgggctggacacggatgacggcgatgacgacgacgagaacgaaaacgcgctaccgcccagctgggtcgctggcgccgtggtcgaactgaaagccccggctaactaccagatcacttcggcggctggatacagcgttatcgccagcccgctgctgacggagatcgcgccggtagtaggtatgccggtaaccctggggtttaactcagtcgattacgatctgtttatcgcgtcatatacccccggtcaggctgcagtgcccggcgccggggggagtgcggcaaaactccaggccagtgcggccccgaccacctacgacttttcgtccagctccagcacgttcacgatcacctggcagggggttacctacccggtgtcgctggtggctaactacgtctcgatgtcgggactgctggcggccattaccgagggactcactggctccggcctggttgcgcaggacaacggcggcaccgtactgataaccgagtcggccagcccgttcgcgggtggggagatcacgtcctcttcgctgcctgcagctgttttcggtgatgccccggtttacacctccggcacggcatcaaccggcggcagcccggcggtaacggcgaatgtgacactcgcctataactctgccacgggaacggccttttccggcatgccggagggggtgcaacggctttcacttgctcaccgcgggaatgagtaccgcattgtctctgccgacggcacgacggcgacggtggcgcgcctggttaacggtgccgttgatgagtcatggccgggtttcaccgccaggacgatgattgactatgaggccactggccttaacgacacgctgagctggctggggccgttcctcgtatgccctgaaaatgaagtagtggatgcgttcgaggtgaatttctccttcccgaacggcatctgtggctttgacagtaagggcaaaaaacggatccgccacgttgagtgggagatacagtatcgcgtctacggttccggatcggggtgggtgagtcaccagggcgagtatgcgctgaaaaacgtcaatgggttaggtttcactgagcggatcaccctcagctcaccagggctggtagaggttcgctgccgtcggcgcaatgagcagggctcaaacaacgccagggattcgatgtactggcaggcactgcgcgggcgactgctgacgcgcccttcatcctatcccggcgtgtcgctgatggcggtgagcgttgagacggggggcaaattggcggcgcagtcggaccgccgcgtaaacgttgtggccacgcgggcctatgactcaggaacggccagaaccatttctggggcgctgctgcatgtcgggaactcgctggggctggagatggatgccgacaccatcaacgcgctggagtccgcgtactggacgccacggggcgagtatttcgatttcgccacgggcgacagtatctcagcgctggaaatgctgcagaagatagccaacgccgggaagtcacgttttctgctgagtgatggcctggcgacggtcaaccgcgaggggattaagccctggaccggcatgatcactccgcatgagatggtggaggagctgcagagcggatttaccgtaccgtccgacgatgattttgatggcgtcgacgtgacgtacatcaacgggactacctgggcagaggagaccgttaaatgccggacgccggacaatccgacgccagtgaaaatcgagaattataaactcgatggggtactcaatcaggaccacgcctatcagatcggcatgcgtcgcctgatgaaatacctgctgcagcgggtgacgttccagaccactaccgagctggacgcgctgtgctacaacacgggcgatcgcattgtgctcacggatgatattccgggtaacaacacgatttcctgtctggtggaggcgatgacaacggctggtggcgtgacaacgttcaccgttacggagccgctggactggtctttcgaaaacccccgagcgctgatccgctatcaggatggctctgcatccgggctgatggtggcaagcagggtgggtgattttcagctgtcagtcccgcacctgagtgagtttgatgatccgatgaaggttgacctgtcgtcggcaaccattgagccgatccgcctggtgttctgcggctcaacgcgccatgtctacgacgccattgtagaggagatcgccccgcagtctgacggaacctgtcaggtcaccgctaaagaatacctcgaatcgttctaccagtacgacgacgccacataccccggcgatgtcgcttaa

SEQ ID NO: 216390 - DNA, 3183 bp, Klebsiella pneumoniae
atgacctttaacccggagctggggagcacgtctcccgctgtgttgctcgataacgccgagcgtctggataagctggtcaatggacccgagctgactgagccggatcgcgctggcgttgagctggatacctggcgcggaatgatggcgaaaaatgaagcccttacagaggagacacgacagaatttaattcctctaagccggcagtatatgactcttgctgatgctcaggctgatatcgcgaacataccagagggcagcacaacttatgtacgtagtgcagacggtaattcgctggcagacgagtacatcaacaacggtggaacgctgaggtccacagggcgcaaaatgccttcgcagactacagtcgatgccaacacctcagtaatcacagggttggatcttgaccgcgttgatttatctcccacgtcactgggaacggggaaatattatcagatcaccacagggacaatcacgaccaatacggataccaactggagcgcatgcgctccagtaaatgttgttggttttaaaagattaattattaccgggacatttttacgcagggaaaaggctgctccaatattatttatcgatgaaaataacaccattatttctgttgagtctatggggcttccactgtccgaagacaataattttatgtctttagcagaatatcaggtaagcattcctgcaaaagccgttagcgcactgatctcaacctacgccgagaagtccgtaatggtttatggaacaaactcggatttcaaacagtctgctgttgcaatgtctgcgggtcgcgtcagaagccgtcttgttaactggataaaaaatacttatatgagcgcgacaaccggcgcggttgtgacaaactcagacgactactacaccactcagattccggtttcacctggcgacacgtttattctttcctgcaaactgaaagggcaatcaagtacggtaagactagtggggtttcttgatgcagcagataacttgatagggtctttttaccctggccctggtagcgcggccgttgcaaccattagtaatctttcattccgggtgccagccaatgcggtggctatgataatcaccgtctatgctgtggacgcctcaacggtattacaacaggcaacttttttcgaccgtaccatgacagatactcagatggcgatcgacgcggcaagtagcatcgcaaagcacacctcattgccatattacccaggccggtactggagaaaaatggacggggcactgatatccatcgatgatgctccgtattgcgcattccatcccatcaaggtcaaccctggtgaaaaatatagaataaagaccaatacgtttacgggcaatccttcactagttgcgttaatcgttttcaaaggcgccaatggtgaatatattggaaattcagaagtagcgccgggttcatcagtattcgtttccgtggatatcacggtaacggtgcctgcaggagccgcgcttatgcttttgactgcttacagcccgtacattgatatcgcctttcaagggagcgcggtggaaaagcttgggtcctctgtagcggggatcgccgctaatttcgctcagcagctcagtatcggtttcactaagggctattactggcacccaacatccggagcgctaaccagcactacggacattaactggcgcgcattcgatgcaatcccggttaacgccggagaagcgtaccgtataaccgttaccgagttcagcggcagcatttatgttgtggtcttcaaaaacgcgagcggcgctgtcgtaagcaaataccagcctggccccggtgggacttcgatcgtagccgttgacgtaccggtcacggtaccagatggcgcaacgttaatgtgtgtcacggcctacacagataacgtgactatcacgaaaaacatcaactataaggctgacctgcgtaaagatatcatccagagagactttgagagtagcttacgccttttgtcgcctaaaggattggacggatattactggcgtcaggaaacaggtgtaagaacactaattaccgcagactggtcatatttttcggcagacccgttgaacgtcaaagaaggtgaaacataccgaattatctgcgataaattttcgggaaatccttcgcttgtatatcttgcactcttcaaggacgcaactggagttgtcattggcaggagcaatgccgggccagggtctggcgtggtgcagtcagtcgatgtcaacgtaaccgtgccatctggcgcggttacaatgtgcataactagttacagcagaaatctccaggtaatcaagtctggcagcattctaagcaaaataccgggtaatagcccggcacaagacaacagcccgctggattactggaaagggaagaaaatagtctggctgggaacgtccattcctgcgggaagcggttcgaatgcctacccgtatatgctggctcagcgcctgggggcgaacatagttaaccggtctgtggggtcgtcaccaatccgtgggggacttgacacgtttgccacaaccgatgacccgtatggatggacaggaagtctgtatacgcgcgtcactcgagcgctgtcccactccaacgctataaagcaggagttcatagataattacgattcaaaatggaaaagtcgggttaatggcgggccagcaaccttatctgattcagataaagcagccattttgagcaattcgtatgaaaaccgcttagcgggtaatcttgatgccgatttgttcgtgatagatcacggcattaatgattatctctggcttgaggagcgtggaggcgatctctccagcttgctgacgccgccagtcgaaacgcgggatatcaacactttctacggtggaatgaatgtagttattgactatattctaagccagaatccacgcgccagaattttgctgatcggtttttatgagaataacctgcggccacagattgcgcagattcaggagaaatcagcgcagttatgggaatatccgctggtaagaatgtgggaaaaaacaggatggagccagcaagttttaaccggttctagtggtgcaggtaaaaccattacagagttttggttgccggacaatttacatccgcataaagattccaccggtcaggcaaacacattgctggcgaacattctggaaatggaaatcagatctaccaggtag

SEQ ID NO: 216391 - DNA, 420 bp, Klebsiella pneumoniae; identical to SEQ ID NO: 177079

SEQ ID NO: 216392 - DNA, 1266 bp, Klebsiella pneumoniae
atgtttgcactttgcgatgtgaactcattttacgcatcgtgcgagaccgtatttcgtcctgacctgaaggggcggccggtggtcgtcctgtcaaacaacgacggctgcgtgatcgcccgttcgcaagaggcgaagcccttcgtcaaaatgggtgagccttatttcaagcaaaaggacatgtttcgccggcacggtattatcgcgtttagcagcaactatgagctttatgccgatatgtccaaccgagtgatgacaacgctggaggaactatctccacgctgcgaaatttacagtattgatgaggcattttgcgatctgactggtgttcgtaactgtcgcgatcttaccgattttggcagggaaattcgcgagacggttctgcgcaggacgcacctcacggtcggcgtcggcatagcccagactaaaaccctggcgaagctggccaatcatgctgcgaaacagtggcagcgacagaccggaggagtggtggatctgtctaatctggaaaggcagaggaagttgatggctttgcttccggtggatgaggtctggggagtcgggcgccgcatcagtaaaaaactggaggaaatgggcattaaaacggttcttcaactggcggataccgatatccgttttatccggaagcattttaatgtggttctggagcgaactgtgcgggagctgcgaggcgaaacatgcctcgggctggaggagttcgcaccggtaaagcaggaaatcgtgtgcagccgttcattcggcggtcgtatcacggaataccatgagatgaggcaggctatatgcagctatgcgtcccgcgcagcggagaaactacgtggcgagcatcaatattgtcggttcatctcagcgttcgtcaaaaccagcccctttgcgcttaacgagccatactacggaaacagcgcatcagtaaagctgctaactccgacccaggacagccgggatataatcaccgcagcgacgaaatgcctcgacgcaatctggcgagacgggcatcgctaccagaaagcaggagtaatgctgggggatttctacagccagggcgtagcgcagctcaacctcttcgacgataacgcgccacggaagaacagtgaaaagctcatggaagtactcgatcatctcaatgcgaaggatggcaggggtacgctgtattttgctgggcaggggatccagactgcctggcagatgaagcgagaaatgctatcacctcgatacaccacgagatatagtgacttgattaaaatcagataa

SEQ ID NO: 216393 - DNA, 1860 bp, Klebsiella pneumoniae
gtgtcgcaaactcacgaaaccgatacctgcgaagtgctggtggtgcgcaacctgaacgtggcgttccgccagcaggatgcgccggaggtgcaggccgtgcgtcagctttccttcagcctgcgccgcggcgagacgctggcgatagtgggtgagtccggttcgggaaaatcggtgaccgcgctggcgctgatgcgtctgctagacgcggccagcagcgaggtgaacagcgaggggctgtggttgcggcggcgtaaccggcaggtgatcgcgctcaatgagcaaacggacgctgagatgcgccgggtgcgcggcgcggatctggccatgatttttcaggagccgatgacctcgctgaatccggtttttaccatcggcgagcagattgccgaatccctgcgcctgcaccaggggctggggcgcgaagaggcgctgcgcgcggcgaaaaagatgctcgatcaggtgcgtattccccaggcggaagagatgctctcgcgctatccgcaccagctctccggcggcatgcgccagagggtgatgatcgccatggcgctctcctgtcggccggcggtgttgatagccgatgagccaaccacggcgctggatgtcaccatccaggcgcaaattctgcaactcattgccgtcctgcaaaaggagatggcgatgggggtgatctttatcacccacgatatgggcgtcgtggccgatatcgccgatcgggtgctggtgatgtatcgcggtgaggcggtagagaccggcagcgttgaggagatctttcgttcgccgcagcacccgtatacgcagtcgctgctggcggcggtcccgcggctgggggagatgcgtggccaggatctgccgcgccgttttccgctgccgggccagccgctggcggagagcgaaacgcccgatacggtagtcgccggcgagccgatcctgcaggtgcgtgacctggtggcccgttttccggtgcgcggcgggctgctcaatcgcgtgacgcgcgaagtgcatgcggtggagaaggtcagttttgatctctggccgggagagaccctgtcgctggtgggcgagtccggctgcggcaagtcgaccaccggccgggcgctgctgaggctggtagagacccagggaggcaccattaccttcgacggtcagcggatcgataccctcgccggcggcaagctgcaggctctgcggcgcaatattcagtttatttttcaggatccttacgcctcgcttgatccgcgtcagacggtcggcgattcgattatggagccgctgcgggtgcatggcctgctgcgtggggaagcagcgcgtgagcgggtcgcctggctgctgaagcgcgtggggttgcagccggagcatgcctggcgctatccccatgccttttccggcggccagcggcagcggatctgcattgcccgcgcgctggcgctgaatccgaaggtggtgatagccgacgagtcggtgtcggccctggatgtctccattcgggcgcagattatcaacctgatgctcgacctgcagcgcgagatgggcatcgcgtttctgtttatttcccatgatatggcggtggtggagcgcatcagccaccgcgtggcggtgatgtatcgcggtcgcattgtcgaaataggcccgcgccgcgcggtgtttgaaaacccgcagcacccctatacccgtaagctcatggccgccgtaccggtggccgacccgggccaccgtcatccgcagcgggttctgctgtctgatgacgtcccgggcaatatttataagcggggcgaggagatcgccagcgtgccgttgcagcaggtcgggccgggccacttcgtcgcccgcgaatccgccgatgtgctgggcagaacataa

SEQ ID NO: 216394 - DNA, 627 bp, Klebsiella pneumoniae
atgattacactgtggggacgtaataactcgaccaacgtgaagaaagtacgctgggtgctggaggagctggatctgccttatcagcagatcctcgccgggctggagtttggtctcaatcatgacccggaatatctggcgatgaacccgaacgggctggtgccgttgttaaaggacgatgccaccggggtggtattgtgggaatcaaatacgattattcgctacctggcggcccagtatggcgttgaccgtctgtggctggccgcgccggcgcagcgcgcgcaaggggaaaagtggatggattggtccaacggcaccctctcacccgcccatcgcccggtattaatgggcctggtgagaacgccaccggagcagcgcgacccggcggccatcgccgcggggatcagcgcctgcgaagcgctgttcgccatgctggatgacgaactggccaaaatgccgtggctctccggcgagcagttcggccttggcgatattgccgtcgctcccttcgtctacaatctgttgtcgatcctcgacagctggcaaccgcggccccatctgcagcgctggtatcagcagattagccaacgtcctgcctggcgcgaagtagtgcagatcccggtgacctga

SEQ ID NO: 216395 - DNA, 1677 bp, Klebsiella pneumoniae
atgaattcattttccatcgttatattcttattagcatttctcgcccctgttctagctataatattatttaagcaaagtaaagaacacaaagccgccatagataacctgacggctaacaacatagccctttccagccaactgagtgaaaatcaagaaaagttagcacagactgcacgagatctatcagagcttgaagggcgagcagcaccattatggcaatacgaagaattgcacagcgcagtgatggaggcagagaataagataaaaaatgcagactcaattgctaggcaaaaaatagaagaagcccaaataaaggcagctaagacagtaaacgaagcaagttatcaagctcagataacaataagcaacgctaatagcgaagctatagcaatcaccaaagacgctcgcgacgcacgcctgaaagccaaagaacgtcttgataatgccaacagtaaagcaaatgagctgatctcaaatgctaatgacaacgcagtaaaaattatttccgatgcagaagaaagagcaaaagagattgctggttcagcatatgaagctaaagagtttgcagaaaaatatgaagcagttgccaaatcaatgaaaaataaaattgaaggttatggcgatgaatggatcatccctaaccgtagtgtacttgatgaattggcagaaaattatgagtttacagatgcaggcaaggaattacaaaaagccagggagttaacaaaatcattaataaaaactaataaagcagcttcgtgtgattatgttgagcaaaacaggcgtaatactgctatcaactttgttttggatgccttcaatggaagagttgacagtattttatcaaaagtcaaacacaacaattttggaaaactttcccaagaaataaaagatgcatttcaacttgtaaattataatggatctgcttttagatccgcaaaaataagtgacatctatcttcaggcacgactcaacgagctaaaatggggagttgcagttaatgaaattatactcgaagaaaaagaggagcaaagaaggattaaagaacagcttcgtgaagaggaaagagctcgtagagagtatgaaaaagcgataaaagaagccgaaaaagaagagaaagctattcagcaagctataaataaagcgacgaaagagcttatgcttgcaaatgaagaacaacgcttagctttagagcaaaaaatagctgaactacagttaaaatatgaagaagctgaagctaaaaaccaacgagctatttctatggctcaacaaactagatcaggccatgtttatataattagcaatattggctcatttggcgaagatgtatataaaattggaatgacacgccgccttgaaccacttgatcgtgttcgtgaacttggggatgctagtgttcctttttcgttcgatgttcatgcgatgatttatagtgatgatgcaccgtcattagaaaatcatctgcataaagtcttcaacgaaaagcaggtcaataaaattaactcacgaaaagagttttttaacgtaaatattaaagaaattaaatcggttattgaagatatgaacttcaatgcccactggacaatgtttgcagaggcgaaagaatatagagagtcactagctattgaacaggaacgcaaagcagccacttccgccaacgatgaactacatgttgcttag

SEQ ID NO: 216396 - DNA, 597 bp, Klebsiella pneumoniae
atgtcaacatcaaagtacccaagtgagatcaaaataaatcccaataaaggtggtaaggctgcgattgagcgattagtcgaagcttatggctttacgacacgacaggctttagctgatcacttggaagtatcaaaaagcactctggcgaacaggtatttgcgggatacgtttcctgcagactggataatccaatgtgctcttgaaacaggaacctcactgaaatggttaaccaccgggcaaggacttaagcaaagctcgctgacagtagccacagaagagcttcccaagtttcgccttaccgcaggcaaaatgattgaagatggttcatatgtattcgattcatcatttcttcctgcaaatctttcatcaccaattgttattcaggatgggcttgtcacatacatttgtgatcaaaaattttctgaagtacttgatggacactggttaatcaacatcgacggaacctattccattcgaaaaatcacaaagcttccaaaaggtatgattaaaattacaactacagagaatagctttgaatgtgcattttctgatattgaagtggttgcttgtataagaagtacaatagtttcaaattga

SEQ ID NO: 216397 - DNA, 1119 bp, Klebsiella pneumoniae
atgtatcttttcaagtattaccgtccggacttcttcttcgagaaagctattcgttataatgaattatatttttccgctcctgcgcaattgaatgatcctaatgatctcaatatagattatcgtttcgataataaattgaatttatgggatattttattgcgttctccttgcgatgaatcctataaaaatttgagtcacatattggatttgagtaatttgaagatacataagggattgaatcgtatttttagaggaaaaaaaataaaaagtagcattgagtcattagatagcctgtttgactcacacgttgatgagatacgtaagatcataaatgatggtttactacctatcaatgtgattaattccgctatttatggggatattcctgaaccacaccaatttttggtctcactttgcgagaacagtatcaaagaaaggttgtataggaaaatagttcctgcagtattcagtgtgtcattttcagctaatgcgttagatcgtatgatgtgggcgcattatgctgcaggctttagtggttgtgttgtgatttatgaaacgcaggattttaatattaatggcgtaccacatcctggaatgaaactaagagataatttattttcatcagataagttcaattttcctgttaagccaataaagtatatcaatcaggctaaagaggtttcacttctagacccaagtgcagatatttcagagttatttttaactaaaaatagattttggaagtatgaatctgaatttcgaatgtttattccggaagcaaatgcaggcatagggagtgagcggcatgttcaaagacgcgtaaatcgaaatgttggacatatttttcatcatgatgctaatgttgttagagggatcatttttggccctagaatgtgtgaaatgaaaaaagaaagcatatggaattgtatcaagtcaaatatggagaattcaaattcaacaatatgttatttttttgactctgagttatcagcatcaggaaagattactatttcaaaagggcaacgagcgaaaaaaatggaaaatttctctttgttcaggaacgagttaagtcagacggaaatggctaaagttttgaaggaaattggcattacgaactaa

SEQ ID NO: 216398 - DNA, 1152 bp, Klebsiella pneumoniae
atgtttgtaaaaaataactttaatacaaataatttcgatgcggaattagttgaagcgattggtaataggctggaaaacaaccaattttcggatgcaatacttgcaggaaccaaatatctaacaactttgctgcgtgaaaaagggcaatgtgaaggggatggggctcagcttgttggtactgttttgggtggacaatcacctagaatccaaattaatagtcttcaatctgtatcagagcaggacgaacagcgcggatttgaagcactattaagaggctactatcagtgtataagaaatccaaggacacatgacaatttccctgatacagaagattcctgcatgagaatattgatcatgttggatacttttattaagtatttaaaaagagatgttgctgagttcgattacacagcaattcttgaaagaatttatgaggttcactttgtaaataattctgattatgcagaagctttaatatcacaaattccagaaaaaaaactactagattttttccaaagtttaatttctcgctttaatgaaaggccaaccaaggaaattgattctatattcaaagcaataaaccaacgcttttcaggagaggaagaaaaagccgcaatgcggttgctaggtgatgagttacgcaaggctagcaataatgttgagtttgctaatgtatttagaataattaagccgagcgcatggagaaatcttcctgatgatgttttaattagaatggaaaatataatcatcgaagagtgcaaaaaaggatatttggatttctattctgatgcgaccaaaggagctataggaacatggggtaataaatttggtagcaaatttaaaagaagaggtgatcttggtgatgctttaattggattgttatatgatagttggtatacgcaaaattatgttgcgaaatattacgttttttcaatcccttctatcattactgatgatgtgaaagttaaggagttagctgatgctttagcttatgccaccattgtaaatggtgctaagcttttacgaacaaaattgattgatgcatgtaaaaattatcctgataagttgaaagagcatcttagggatgctgttcagcaacggatggatagtgataaaaaatatgcggaagaattattaggtcaaataagctga

SEQ ID NO: 216399 - DNA, 651 bp, Klebsiella pneumoniae
atgagcctgagtcccgcacggcagcatcgcctgcgcgttcaggctgaacaggccgcccgtgagggcggcagtgttcgccacgcgtcgggctatgacctgatgctgctgcaactggcggaagaccgccgccgtctcaagggcgttcagtccacggtcaaaaaagcggaaatcaaggtggagctgctgccgaagtacgccgcctgggccgagggtgtcctgactgccggaggcgtacagcaggatgacgtgctgatgtacgtgatgctgtggcgcattgatgccggagattatgccggggcgctagagatcgggcgtcatgccctgcgtcatggctgggtgatgccgctgggtaatcgcaatgtgcagaccgtgctggcagaggaaatggcagacgcggcgcagagcgcaatgcttgccgccaccggctttgatgccgatctgttgctgcagacgctggagctgacagacggtctggatatgccggaccagtcacgggcgcgtctgcataaagcgattggcgctgtcctgagtgaaagcaatccggcttccgcccttaaccatctcaaccatgcgttgcagctcgatccccgctgtggcgtgaaaaaagacaaacagcagctggagcgcagactgcgcaatgacagccgctga

SEQ ID NO: 216400 - DNA, 216 bp, Klebsiella pneumoniae
atgacgcttgagcgaatcagcgcctttatcacgtattgcatcgccgtcgtgctggcctggctgggcgatttgtccatcaaggatgcctcaacgctgggcggcctgatgattggtgtgctgatgctggctatcaactggtactacaaacacaaagcctaccagcttctgcgcgacgggcagatctcgcgggaggattatgaatccatcaatcgttaa

SEQ ID NO: 216401 - DNA, 513 bp, Klebsiella pneumoniae
atgaatccatcaatcgttaaacgctgccttgtcgggaccgtgctggctattgctgccacgctgccgggttttcagcagcttcacacctccgtggaggggctgaaactgattgccgattacgaaggctgtcgtctgcagccgtatcagtgcagcgcgggtgtctggaccgatggcattggtaatacatcgggcgtcattcccggcaaaaccatcacggaacgacaggcagcggaagggctgatctccaacgtgctgcgtgtggagcgggcgctgaaaaggtgtgtgaagcaacagccgccgcagaaggtgtatgacgctacggtgtcgtttgccttcaacgtggggacgggcaatgcctgtagttccacgctggtgaaattgctcaatcagcggcgctgggcggatgcgtgccgacagttgccgcgctgggtttatgtgaaaggtgtttttaatcaggggctggataaccgccgtgcgcgggagatggcctggtgcttacagggagcaaactga

SEQ ID NO: 216402 - DNA, 378 bp, Klebsiella pneumoniae
atgaaaaagaaattaatcagcggactgtttctgatgttatggatggcgctgttaatcgcagcaatggtgtatccgcaggggatttttccggtactgtcagcgtccggcgtttgggtagcctgtttgctgacatgggcggtaattccggtagcactggctgcgttaattaagaatggaccgctctggcaggagttgagggcatctttgctgaagacaattacccgaaaagaaaacgtatttatcagctgggtgatgcgattgctgattgtcgtaagtctcgcctggacggggtgggctattaccctggtcttttatctgctgaccgttattgccttctggatgacccgtaatcagatggcgcaacaggtatcagcatga

SEQ ID NO: 216403 - DNA, 429 bp, Klebsiella pneumoniae
atgaatcggttgctgctggttgtgctggcgttattactggcggcgctgggctggcagacgtggcggctggctgatgccagccagaccatcagcacgcaggcagacgagctgcagagcaaaagccaggcactggcaaagagcaacagccagcttatcagcctgtccattctgactgaaaccaataaccgggagcaggcgcggctctatgccgaagcagaacagaccagtgtactgctgagacaacgacaacaccggattgaggaactgaaacgtgagaacgaggatttacgccgctgggctgatactcctttgcctgctgatattatccggctgcgggaacgccccacactcaccggaggtgcagcttaccgtcagtggttgtccgcgagtgacgccgtgtcggctggggcaggcagcaccgcgcactaa

SEQ ID NO: 216404 - DNA, 432 bp, Klebsiella pneumoniae
gtgaacaaaccacaatccctgcgccacgccctcaataaagcggtgccttatgtccgcaataacccggacaaactgcatctgtttgtggataacggttcgctggttgccacgggggccagctccatgtcatgggagtaccgctataccctgaacgtggtgatagaggatttcagtggcgaccagaatctgctgatggccccggttttactgtggcttcgggataaccagcccgatgccatcaataacccggcgttacgggaaaagctattcacctttgatgtggatattttgcgcaacgatgtctgtgatatcagccttaacctgcaactgacggaacgtgtgctggtcagcactgacggcagtgtgtcgagcgttgaagctgtagcagaacccgatgaacctgaagaaatgtggacggtgaaacgtggctga

SEQ ID NO: 216405 - DNA, 447 bp, Klebsiella pneumoniae
gtggctgaactgcagaaggtggacgactggctgagtgccttgctggcgaatctggaaccagccacgagaagccgcatgatgcgccagctggcgcaggaactgcgccggacacagcagcagaatatcaggatgcagcgcaatcctgatggcagcagttatgaaccgcgcagggtaacagcacgcagcaagaaggggcgcatcaaacgtcagatgtttgcaaagctgcgcaccacaaaatacctgaaaactgccgccagcgccgactctgccagcgtacagtttgaaggcaaggtgcagcgtattgcccgtgttcaccattacggcctgcgtgatcgcgtcagtcgcaaaggaccggaggtccgttacgcagagcgccgcctgctgggtgtaaatgatgatgttgaggcaatgacccgcgacatgattctgcaatggctggcggggtga

SEQ ID NO: 216406 - DNA, 579 bp, Klebsiella pneumoniae
atgaacgcacaactaaccgaaatcatgcgcctcatcaccaacctgatccgcacaggggtagtcaccgaagtggacagggaaaactggctttgtcgggtgaaaacgggcgaccttgaaaccaactggattaactggctgacgctgcgcgcgggtaatgcccgcacatggtggaaaccatcggaaggtgagcaggtggtgctgttgagtctgggcggcaatctggagactgcctttgcgctgccggcagtctattcgaatcagttcgcaccaccgtcgaagtcggcggacgcctgcgtgacagaacatcctgacggtggttggtttgaatacgaacccgccaccgggcgctggtatgtcaggggcatcaaatcaatggtcattgaggccgctgacaacatcaccatgaaaaccagtgagtttgtactggaggctgaccgcacgcgcattaacagcgaagtggtgatcaatggtggcgttacccagggcggcggagcgatgagttctaacgggatcgtggttgatgcgcatcagcatactggcgtcctgaaaggcggcgacacaaccggaggcccggtatga

SEQ ID NO: 216407 - DNA, 360 bp, Klebsiella pneumoniae
atgacgctttatagcgggatgaacaataccagcggtaaagccattactgatattgaccatctgcgccagtcggtgcgggacattctgctgacgccgcagggtagccgcattgctcgtcgggaatatggttccctgctgtcggcactgatagatcagccacaaaatccggcgttacgcctgcaggttatgtcggctgtgtatgtggcactgagtcgctgggagccacggctgacgctggattccatcactattaacagcaattttgacggttcaatggtggtggcgctgaacgggcggcgtaataacggtgtgcctgtttccctttccgtatcaacaggagcagagaatggcagtgattga

SEQ ID NO: 216408 - DNA, 909 bp, Klebsiella pneumoniae
atggcagtgattgacctttcgcagttgcctgcgccgcagattgtggatgtgccggactttgagacgctgcttgccgaacgcaaggcagaatttgtggcgcttcatccgaaagatgagcaggaagcagtgatccgcacgctggaactggaatctgaacccgtcaccaaattgctgcaggagaacgcttaccgtgagttgcttctgcgccagcgcattaacgaagccgcgcaggctgtgatggtggcttacgcgatgggcagcgatcttgaccagctcgctgccaactacaacgtgaaacgcctgacggtgacgcctgctgataatgacgctgtgccgcccgttgcagctgtgatggaaagcgatgaagcgttacgcctgcgtgtgcctgcagcctttgaagggctttcagttgcggggccaactgcagcttatgaatttcatgcccgaagcgccgacggtcgggtggcggatgccagtgcaaccagcccggcacctgcagaggtggtgctgactgtccttagccgcgaaggcgatggaactgcagaaaaagacctgctggacgtggtggaaaaagctctgaacagtgagaacgtccgcccggtggctgaccgtcttacggttcgcagcgcagaaatcatcccgtatcgcgtggaagccaccatttttctctatccgggaccggaagcagagccggtaatggcagcggcaaaagccagcctgcagaagtacatcgccagtcagacacgtcttggtcgggatattcgccgtagcgccatctttgccgccctgcatgttgagggtgtgcagcgtgtggagctggcttctcctctggcggatgtggtcctgaacaaaacacaggcggcatcatgtacgcagtggagcgtaaccaacggaggaacggatgaatag

SEQ ID NO: 216409 - DNA, 606 bp, Klebsiella pneumoniae
atgaatagtctgctgccgccgggttcaacaccactggagcgccgactggcgcaaacctgcagcgggatttctgatctgcaggtgccgcttcgtgacttgtggaatccggcaacctgtccggtcagtttcctgccttatctcgcctgggcgttctctgtggatcgctgggacgagggctggacagaaagcgtcaagcgccaggtggtgaaggatgctttttatattcatcagcataaaggaaccaccagtgccgtgcggcgggtggtggagccgttcggctttctgatccgcattattgagtggtggcagaccggagaggcaccgggcacgtttcgcctggatatcggcgtgcaggaccagggcatcactgaagatacctatctggaacttgagaggctgataagcgatgccaaaccatgtagccgtcacatgatcggcatgtccatcaatctgcagaccagcgctccgcattgggtaggggccgccagctatcttggcgaagaaatcacgatctatccgtatatcaacgaaacaattatttctggcggcaccgcgcatgaaggcggggcggtccatgttattgacacaatgagagtgaatccatga

SEQ ID NO: 216410 - DNA, 1422 bp, Klebsiella pneumoniae
atgagcacaaaattttataccctgctgacggatattggcgcggcgaaacttgccagcgtcgccgcgctcggtgtgcctttaaaaattacccatatggcggtcggcgatggcggcggaacattaccaacgccggacgcaaagcagacagcactggtaaatgagaaacgccgggctgcgctgaatatgctctatatcgacccgcagaacagcagccagattattgctgagcaggtgatccctgaaaacgagggcggttggtggatacgtgaagtgggcctgtttgatgagtccggggcattgattgccgtgggcaactgcccggaaagctataagccgcaactggctgaaggcagcgggcgtacccagaccgtgcgtatggtgttgattaccagcagcacggacaatatcaccctgaaaatcgatcctgccgtagtgctggcaacccgcaagtatgtggatgataaggtactggagctgaaggtgtacgcggatgatcagatggcaaaacatcttgccgcaccggacccgcattcacagtatgcacagaaagaaagtcctacgtttaccgggacacccaaagcgccaacgccagcggcggggaataacaccacgcaggttgcgaccaccgcgtttgttcaggaggcactgacggctcttattaatggtgcgccagccacgctggacacgctgaaagaaatagccgtagccattaacaatgatccgaaattcagtaccaccattaacaatgcgctggcactgaaagcgccgctgtcgagtccggcactcaccggaacgccaacagcccccacggcggcgcagtcggtcaacaatacacagattgccactacggcttttgtgaaatcggcgattgcggcaatggtgggttctgcacctgcggaactggatacactgaacgaactggcggcggcgctggggaatgacccgaactttgccacgacaatgcttaatgcgctggcaggtaaacaaccgttggacaatacgctgactaatttgagtggaaaggatgtgactggtcttctcgcataccttggtttaggggaattgtctgctgctggggttagcggtggcgctgcatctgcttcaggatacatcaccattccgatgattatcagtggagcacggcgggtcttatacattcaatggggaggatttactggagctacaggtagctccggctctgacggggtatatgaaacctcaaatatcaccgtcacctggccagttgctttccccaatgcggttttccaggtgataacaggcggttcatctgatgttagtggtgtcgggcagcaagagatggcatggagtctgggcaagacaaaaacttatgggatttttggttttcaatgccgtaccccaaacgcatcgatgaatggctcatatcttgcaattggctattaa

SEQ ID NO: 216411 - DNA, 477 bp, Klebsiella pneumoniae
atgagattttcagttagcacccaatcattctacgatgataattatgaggaaaacgcaatagtcgacgatttaccctcagatgttcaggcgatagataatgagcaatatgcccgtttttttaatgcaataaatagtgaccgggtggtttatctggttgccgataaatacaacatttctcaaccgcgccctgataaataccattcatgggatgcagctggcaatacctgggttatgacagatgcagccgtaacgcgaaagtcggcagatctaatagctgatgctgagctacggagatctacgttgttatccgaagcaggtaccgcgatatctccgctgcaggatgctgttgaactggatatggcaacagacgaagaaaagagccgctatgatgcctggcgaaaataccgcgtattgctgatgcgggtggatacatcgctggcacctgatattaactggcctgagccgcccaaagattaa

SEQ ID NO: 216412 - DNA, 1173 bp, Klebsiella pneumoniae
atggcccaggattaccaccacggggtgcgcgttgttgaagtcaacgatggcacccgatccattaccacggtgagcaccgctatcgtgggcatggtctgcaccggcgatgatgctgatgcgtccatgtttccgctcaataagccggtcctgctgaccgatgtgctgaccgccagcggtaaggcgggcgagtccggcacactggctcgttcgctggatgcaattgctgatcaggcaaaacccgtgaccgttgttgtgcgtgtgccgcagggtgaaacggaagaagaaaccacaactaatatcatcggcgcagtgactgatgaaggtaaaaaaacaggcatgaaagctctgttatctgcccagtcacagctcggcgttaaaccgcgcattctcggcgtgccaggccacgataacaaagccgttgcgactgagttgctgagcgtggcgcaaagcctgcgtgggtttgcttacctgtcagcgtatggctgcaagacagtgcaggaggcgatcacttaccgtgaaaacttcagtcagcgtgaaggaatgctgatctggcccgactttactggctgggacacggtgctgaatgccgaagcaacggcttatgccaccgcccgtgcgcttggtctgcgcgctaaaattgacgagcagaccggatggcacaaaagcctgtccaacgtgggcgttaacggtgtcaccggaatttctgctgatgtgttctgggatctgcaggacacggcaacagatgcgggactgctgaaccagaacgacgttaccacccttatccgcaaagacggtttccgcttctggggttcccgctgcctgagtgatgacccgctctttgccttcgaaaactacacccgcacggcgcaggtacttatggacacaatggcagaagcgcatatgtgggcggtggacaaaccgctgaacccgtcgttggcccgcgacattatcgaaggtatccgcgccaaaatgcgcagcctggtcagtcagggctatctcattggtggtgattgctggctggatgagtcggtgaacgacaaagatactctgaaagccgggaagctcaccatcgactacgactacacgccagtgccgccacttgaaaacctgatgctgcgtcagcgcatcaccgatcagtacctggtgaatttctccagccaggtcagcgcgtaa

SEQ ID NO: 216413 - DNA, 516 bp, Klebsiella pneumoniae
atggctttaccacgcaaattaaaacacctgaacctgtttaacgacgggaacaactggcaggggatcgttgagtcgctgacgctgccgaaattcacccgcaaatatgagaagtatcgcggcggcggaatgccgggggcggtggatgtggatctggggcttgatgacagtgctctggacacagaattttccattggtggtactgaactgctgctgtttaagcagatgggcaaatccacggtggatggcatccaactgcgctttaccggctctatccagcgtgacgataccggggaagtgcaggcagtggagcttgtcgtgcgtgggcgtcacaaagaagtggattccggcgagtggaagacgggcgaaagcaacaccaccaaagtgaccagtaccaacagctacgcgaagctgaccatcaatggtgaggtgctctatgaagtggaccttatcaacatggtggaaattgtggacggtgtggacctgatggaagcgcaccgcaacgccctcggcctctga

SEQ ID NO: 216414 - DNA, 303 bp, Klebsiella pneumoniae
atgagcgataagcagactgaaaagaccattcaactggatacccccatcaagcgtggtaaaactgaaatcaccgaaattgtgctgcgtaaaccgcagtccggtgcgctgcgcggtacacgcctgcaggccattatggatatggatgtgaacgcgatgatgaccgtgatcccccgcatctccagcccggcactgaccgcacaggaaattgcagagatggacccggcagatctcactgccatgtcggttgaggttgtcacttttttgttgaagaagtcggtgcttgccggtttaccgacagcctga

SEQ ID NO: 216415 - DNA, 3078 bp, Klebsiella pneumoniae
atgagtgacaataacctgcgtctgcaggtcattcttaatgcggttgacaagctcacccgcccatttcgatctgcgcaggccagctcaagagaactggctgctgctgtcaaaaaatcccgcgatgcaataaagcagcttgatcaggccgggagcagtctggacagcttccgaaagctgcaggcagaaaatcagaaattaggcgacaggctgagctatgcccgtcagcgtgcaaatttgctcagtcaggaactgggagcgatggggccgccttcgcaacgtcaggttgttgctctgggccgtcaacggctggctgttcagcgcctggaagaacgccagaaaaagctgcagcagcagacggcgcttgtgcgtgcagaactttatcgtgctggtatttcagctaatgatggtgccagtgcgacggcccgcattacccgtgaaacgatgcgttataacaggcagctttctgagcaggaagcgaggttacgacgtgtcggggagcaacagcgaaaaatgcacgccgcccgaggggcttacgccaggcgtcttgaagtaagggatcggattgcaggtgccggagccaccaccacggctgcagggctggcaatgggcgcaccagtgatggcggcagtaaaaagctataccagcatggaagatgccatgaaaggtgtggcaaagcaggtcaatggtctgcgtgacgataatggcaaccgcactgcacgtttttatgaaatgcaggatgccatcaaggctgccagcgaacagttgccgatggaaaacggtgcggtggatttcgctgcactggttgaaggtggtgcgcgcatgaacgtcgcaaaccctgacgacagctgggaagaccagaaacgtgacctgctggccttcgccagtacggcagcaaaggcggcaacagcctttgagctgccagcggatgaactgtcagaaagtctggggaaaatcgcccagctctacaaaatccctacccgcaatattgaacagctcggtgatgcgctgaattatctggatgataacgccatgtcgaaaggtgcagacatcattgatgtcatgcaacgcctgggcggtgtggctgatcgtctggattatcgtaaagcggcggcgctgggttccaccttcctgacactgggcgctgcgccagaggttgcagccagtgcagcaaacgcgatggtgcgtgaattgtccattgccaccatgcaaagcaagagtttctttgaagggatgaatctgctgaaactcaatcctgaagtgattgaaaagcagatgacgaaggatgcgatgggaaccatccagcgcgtgctggagaaggtgaacgcactgccgcaggacaagcgtctgtctgccatgaccatgttgtttggtaaagagtttggtgatgacgcggcgaaactggcaaacaaccttccggaactgcagcgccagctaaaactgacagcgggcaatgatgcgctcggttccatgcagaaagaatccgacatcaacaaagactcactttctgctcagtggttgctggtcaaaaccggagcgcagaacaccttcagcagcctgggcgaaacgctgcgccagccgctgatggatattctgtacacggtgaaaagcatcacgggggcgttgcgccgctgggtggaagctaacccggaactgacaggtacactgatgaaagcagcggctgttgtggctgcggttactgtcggcctcggcaccttagcggtggcgctggctgcagtgctggggccgctggcagtgatccgtctgggattctctgtgctgggtatcaaaacgttaccttccgttacggcagcagtaactcgaaccagcagcgcgttgtcctggttagctggcgcaccactgatactgctgcgacgcgggcttgcttcatcgggcaacgctgcgggtttacttactgcaccgttgtcatctttgcgccgcacggcatcactgacgggaaatgtcatgaaaactgtagcaggtgcgccggttgcacttttgcggtctggattatccggtttacgtgctgttgctgtgatgtttatgaatcctctggcggtactgcgcggtggactggtcgccgcaggcacggtgctgcgagtactggcatctggtccactggcgatgctgcgcgttgccctgtatgccgtatctggtctgttaggtgctctgctcagtccgataggtcttgtggttactgcactggcgggcgtggcgctggttgtctggaaatactggcaacccatcaccgcatttcttggtggcgtggtggaaggattcaaagcggcggcaggtcccgtcagtacagcattcgaaccacttaagcctgtgtttcagtggattggcgacaaagtgcaggcgctctggggctggtttactgatctgctgacgcccgttaagtcgacctctgccgaactgcagagtgcagcggcaatggggcggcgattcggggaggcactggcggaagggctgaatatggtcatgcatccgctggactccctgaaatccggcgtttcctggttgctggagaaactcggcgttgtcagtaaagaggccgcaaaggcaaaactgccggaaagcgtgacgcgtcagcaaccagcgacggtgaatgcagacggtaaagtgatgatgccatcgggtggttttccatcatggggatatggctttgcggggatgtatgacagcggcgggtatatcccgcgcgggcagtttggcatcgtcggtgaaaacgggccggaaattgttaacggcccggcaaatgtgaccagccggagaaatacagctgcactggctgccgttgttgccggaatgatgggcgttgctgccgcgccagcagagcttccaccgttgcaccctttggcacttcccgcgaaaggtggagaagcggtggtgggtcgcgcagccactgtgccgcccgtttacaggattgaggcaccgacgcagatcatcatccagacgcagcctggacaaagtgcgcaggatattgcgcgggaggtggcccgccagcttgatgaacgtgaacgcaggctgaaggcaaaagtcaggagtaactacagcgatcaggggggatacgacgcatga

SEQ ID NO: 216416 - DNA, 1101 bp, Klebsiella pneumoniae
gtgaatttcagctctgaactgcttaacaaaggcaacaaaactcccgcattcagcatcagtattgagggcagggatatcaccactgtgctggataaccgcctgatgagtttgacgctgacggacaatcggggctttgaagcggaccagcttgatctggagctggacgacgccgacggaaaaatcgtgctgccgcgccgtggtgcggttattacgctggcgctgggctggaaggggcagccgcttttcccgaaaggggcattcacggtggacgagattgaacacactggcgcaccggaccgcctgactatccgggcgcgaagtgctgattttcgtgaaacgctgaatacccgccgtgaaaaatcgtggcacaagaccactgtcggggaagtggtgaaggaaatagccgcgcgtcataagctgaagatggcactgggtaaagacctgtcggataagcccgtggagcatatagaccagactaatgagagtgacggcagttttctgatgcggctggcgcgccagtacggtgccatcgcgtcggtgaaaaatggcaatctgttattcatccggcagggacagggcaaaagcgccagcggtaaaccactgccggtgatctcaatcacacgtaaggacggcgacagtcaccgctttaccctggcagatcgcggagcctacacgggcgtaattgccagttggttgcatacccgcgaacccgcgaagaaagaaagcaccacggtgaagcgtaagcgcaggactaagaagcagaagaaagagccggaagcgaagcagggcgattacctggtgggtacggatgaaaacgtgctggtacttaatcgcacttatgccaaccggagcaacgccgaacgggcagcgaaaatgcagtgggaacgcctgcaacgcggcgttgcatcattctcgctacaactggcggaagggcgggcagatctctacacagaaatgcctgtgaaggtcagtggctttaaacagccgatagatgatgcggaatggaccattacgactctgacgcataccgtcagccccgataacggttttacaaccagtctggagcttgaagtgaggattgatgatttcgaaatggaatga

SEQ ID NO: 216417 - DNA, 1014 bp, Klebsiella pneumoniae
atgaaggtactggttaccggtgcgaccagcggattaggccgcaacgcagtggaatatctgcgcaacaagggcatcagcgtgcgagcgaccgggcgcaacgaagcgatgggcaagcttctgagcaaaatgggggcggaattcatcccggcagatttaaccgagctggtctcttcgcaggctaaagtgatgctcgccggtatcgataccctatggcactgctccagctttacctcgccatggggcactcagcaggctttcgatctcgctaacgtccgcgccacccgtcgtctgggcgaatggtcagtggcatggggagtgcgcaatttcatccatatctcttcgccatcgctctattttgattatcaccatcatcgtgatatccaggaagatttccgtccacaccgcttcgccaacgagtttgcccgcagcaaggcggccagcgaggaggtgatcaacctgctggcgcaggctaacccgcatacccgttttaccattctgcggccgcagagcctgtttgggccgcacgacaaagtctttatcccccggctggcgcaaatgatgcagcattatggcagcgtcctgctcccgcgcggcggcagcgcgctggtcgacatgacctattatgaaaacgccgtacatgcgatgtggctggcgagccagccggcctgcgatcatcttccctccgcccgcgcgtggaatatcagcaacggcgaaccgcgcaccttgcggagcatcgtgcagaaattgatcgacgagctcggcatcaaatgccggatccgctcagttccctatccgatgctggatattatcgcccgcagcatggagcgctttggcgataaaaccgccaaagaacccgcgtttacccactacggcgtctccaagcttaactttgattttacgctcgatatcacccgcgcgcaggacgagctgggctatcagccggtggtgacgcttgacgacggcatcgtgcgcaccgccgcctggcttcgcgaccacggtaaactacaccgctaa

SEQ ID NO: 216418 - DNA, 1002 bp, Klebsiella pneumoniae
gtgatcgatttacgcagtgataccgttacccgtcccgagcgcgccatgctggaggccatgatggccgccccggtcggggacgatgtgtatggcgacgaccctaccgtcaatgaactgcagcgctatgccgccgacctggccggcaaagaagcggcgctatttctacccaccggcacccaggccaacctcgttggcctgctcagccattgccagcgcggcgaagagtatatcgtcggccagggggcgcataactatctgtacgaagccggcggcgcggcggtcctcggcagtattcagccgcagccgatcgacgccgcggcggatggttcgctgccgctggataaagtggcagcgaaaatcaaacccgacgatatccattttgcccccacccgcctgctgagcctggaaaacacccataacggtaaggtgctgccgcgcgactatctgcaggaagcctgggcgtttacccgccagcgcaatctggcgctgcacgtcgacggcgcacgcatctttaacgccgtggtggcctacggctgcgagttacgcgatatcgcccaatactgcgactccttcaccatctgcctgtcaaaggggcttggcgctccggtaggctcgctgctgctcggcagcgaggcgtacattcgccgcgccgtccgctggcggaaaatggtcggcggcgggatgcgccaggcgggcatcctggccgccgccgggctgtacgcgctgaaaaataacgtgcagcgcctgcaggaggatcatgacaacgccgcgtggatggcggagcagctgcgcgctatcggcgccgacgtcacccgtcacgataccaacatgctgttcgttcgcgtcggcgaagagcaggccccggcgctcggcaagtttatgcaggcgcagggggtattgattaacgcctcgcctgttgtccgtctggtcactcacctggatgtcaaccgtcagcagctgagcgaggtggtcgcccactggcaggcttttttacaacgctaa

SEQ ID NO: 216419 - DNA, 1653 bp, Klebsiella pneumoniae
atgttttgtgtgcaatgtgaacaaaccattcgtaccccagccggcaacggctgctcttacgcgcaggggatgtgcggtaaaacagcggaaacctcggacctgcaggatctgctgattgcgtcactgcaaggcctgtccgcctgggcgcttaaagcgcgcgaatatggcattatcgatcatcaggtcgacagctttgccccccgcgccttcttctccaccctgactaacgttaacttcgattccccgcgcatcgtcggctacgcccgccaggcaattgccctgcgtgaggcgctgaaagcgcaatgcctggcgatcgatgccagcgccgcggtcgacagcccggtcgccgacctgcagctggtcagcgacgatctgggcgacctgcagcgtcaggcggcggactataccccgaataaagataaagccgccatcggcgaaaatattctcggtctgcgcctgctgtgcctgtacggtctgaagggtgcggcggcctatatggagcacgcccacgtgctcggccagtacgacaacgctatctatgcccagtaccataaaatcatggcatggctgggcacctggcctgcggatatgaatgcgctgctcgaatgttcgatggaaatcggccagatgaacttcaaagtgatgagcatcctcgacgccggtgaaacgaccaaatacggccatccgacgccgactcaggtcaacgttaaagccaccgaagggaagtgcatcctgatctccggccacgatctgaaggatctgtataacctgctggagcagacggaaggcaccggcgtcaacgtctatactcatggcgaaatgctgccggctcacggctatccggagctgcgtaaattcaaacatctgattggcaactacggcagcggctggcaaaaccagcaggtggagttcgcccgcttcccgggccccatcgtgatgacctctaactgcatcatcgacccgaccgtcggcgcctacgacgatcgcatctggactcgcagcatcgtcggctggccgggtgtgaaccatctggaaggcgaagacttctccccggtcattgcccaggcgcagcagatggctggcttcccgtacagcgaaatcccgcatctgatcaccgtcggctttggccgtcagaccctgcttggcgcggcggatacgctgatcgatctggtcagtcgtgaaaaactgcgccatatcttcctcgtcggcggctgcgacggcgcccgcggggagcgtaactacttcaccgatttcgccaccagcgtgccggatgactgcctgatcctgaccctggcctgtggtaaataccgcttcaacaaactggactttggcgatatcgaagggctgccgcgcctggtcgacgccgggcagtgtaatgacgcttactcggcgattattctggcggtcacgctggcggagaaactgggctgtggcgtcaacgatctgccgctgtcgctggtgctctcctggttcgaacagaaagcgatcgtcatcctgctgacgctgctgtcgctgggtgtgaaaaacatcgtcaccggtccgacggcgcctggtttcttcaccccggatctgctggcggtcctcaatgagaagtttggtctgcgttccgtgaccaccgtggaacaagatatgcagcagctgctgagcgcttaa

SEQ ID NO: 216420 - DNA, 1284 bp, Klebsiella pneumoniae
atggcacagcagaaaccccacgacgtgaacgagccgtcacgtcgtcgcttactgaaagggatcggcgcgcttggcggcgcgctggccatcaccggtggctgcccggtagcgcatgcggcaaaagcggaaagttccccggggacgctcacacccgacgcgcgtcaggaaaagcagccattctatggccggcatcaggcgggcattctgacgccgcagcaggcttcgatgatgctggtggccttcgatgtgctggcggctgataaagccgacctcgagcggctgtttcgactgctgacccagcgtatcgcctttttaacccagggcggcccggcgccggacacgccgaatccgcggctgccgccgatggattccggcatcctggggccgtggattgcgccagataacctgaccatcaccgtctcggtcggccattcgctatttgatgagcgctttggcctggcggataaagcaccgaaaaagctgcagccgatgacccgcttccccaacgattcgctggatgccgcgctgtgccatggcgacctgctgctgcagatctgcgccaatactcaggatacggtgatccacgccctgcgtgatgtcatcaaacatacgccggatctgctgagcgtgcgctggaaacgggaagggtttatctccgacagcgcggcgcgcagcaaaggcaaagagacccctatcaacctgttggggtttaaggacggcaccgctaacccggcgagccacgacagcgcgttgatggataaggtagtgtgggtgacagccgatcaggacgagccggcctggaccgtgggcggcagctatcaggcggcgcgaattatccagtttcacgtggagttctgggatcggacgccgctcaaggagcagcagacgatctttggtcgcgacaagcacaccggtgcgccgctggggatgaaaaacgaacacgataccccggattacagtaaagatcctaacggcgaagtcattgcgctggatagccatattcgtctggccaatccccgcacgccggaaacccagtccagcctgatgatgcgccgcggctacagctattcgctgggggttactaacgccggacaactggatatggggctgttattcgtttgctatcagcacgatctggaaaagggttttctgacggtgcagaaacgacttaacggcgaggcgctggaggagtatgtcaaaccgatcggcgggggctacttctttgttttacccggcgtagtggatgataaacactatctgggagagtcgctgctgcaggcctga

SEQ ID NO: 216421 - DNA, 1755 bp, Klebsiella pneumoniae
atggacgatttaaccttgcgttattacgacgctgaaatgcgctacctgctggaagcgggtgaagagtttgcccgcgctcatcctgagcaggcggcaatgctcaatctcgacaaagcgggcgctcgcgacccctttgtcgagcgtctgtttgaaggttttgccttcctgatgggccgcatgcgcgagaaactcgatgacgatctgcctgagctgaccgaaggcgtggtcagtctgctgtggccacattatttacgtaccattccctcgatgtcggtcgtcgaattcacccccgactggccggaaatgaaagaatcgatgacgataggcaaaggttttgaagtgctttcccggccgatcggtgaaaagggcacgcgctgccggtacaccaccaccaaagcgatcgctctgcagccgttatccctggaacgcgtccagctggccaccgatacggatggccggtcggtgatcacgctgcgctttacctgcagccagctgacggactggcgccgggtcgatctcagtcatatcccgctgtactgcaacgccgatgcgccgctggcctgcgccatgcacgaggcctttaccctcaatgtggcccggatgtggctgcgcatccccgatgaggtggacagaaggccgctggacgggtatttcagcgcgctgggatttggcgaggatgacggcctctggcctgaagatggccgcagttttcgcggttaccagctgctgctggagtattttaccttccgcgaaaagttcatgttcatcgatctgcgcgggctggagacggtggcttttccggccggactggcgtggtttgaaatcgacgtcgtgctggcggaacgctgggaacatgacttccgcttcagcgaaaagcagctgcgcctgcactgcgtgccagtgatcaacctgtttccgctggagtccgatccgctgaccatcaattccctgcagaccgaatacccgctgcgcccgatgcgcgtgcaggacggccacaccgaaatttacaccgtcgattccgtgatctcctcacaccagcaggtttacgcgccgttctcaagttttcgccacaaaggcggcatgatgcgtcatgacgcggcggactattactatcatacccgggtgcgccgtggcccctccgggctgtacaacacctggcttatcgtcggcggagaagcctttgataatcataccgtaccggaagatgaaagcctgtcgctgaccctcaccggaaccaacggccagctgccgcgtcgcgcgctgcagagcaccgtgctcgatacggtgatgaaaaccacttccgccagtattgcagtgcgtaacctctgcgcgccgacgctgccgtgctatccccccgcccaggaccgttttcactggcgggtgctgagccatctgggcagcagttttctttccctgatggataacgcggaggtcctgcgtggcaccctggcgctgtatgaatggaccgacagcgagatgaatcgtcggcgtctggaagccatcctcgacgtgaagcaccgcgcaacagagcgctttgcacagggccatctggtgcgcggtgtgcagattgaagtcaccctcgacagtcacggctttgccggacgaggcgatatatgcctgtttggcgagatgcttagccgcttcttcgcgctctacaccgacatctacttgttcaaccgcctgattatcattctgcaaccaaccggagaacgactggaatgggaagagaagcacagccgccgcattcccggctga

SEQ ID NO: 216422 - DNA, 2406 bp, Klebsiella pneumoniae
atgtccaaaataaacccagacttaacatggtatccacctcactttccaaaacaagggcgtttaccaacagatacagcggcatccaagcgaaactgtaaacagcaggacagccatgagctggtataccggaatgagctctgtcaggctgcggataaagtcgtagagccgccctgctgtaagactctgcatatcagtttattttttgacggtacaggaaataaccttaataacgatctgtatatttccagccctaaacatccaacaaatattgctcgtttgtttcgtgcaactatcggtcagggttatgccggtggcgttcagggacatactgaagagctggttgatttagcaggaacgtcaggcaacaaatattataaatatcatatccctggggtaggcacaccttttccagaagttaatgaccttgattacagtatgccaggtctggcttttgcgacctacggtgaagagcgcgtcaactgggggctgctacggattattgacgcactcagaagaacgtcgggtttaaccgagatttctgacgccgagtgttatgccgccgtcaacagaatgacatcaaatctgggatcggacgggccagacaggcgttataccgtttttaatgaacttttaaaggcagcagatcttgcacctaaactgaaacaggcagttacacaaccagaaccaggaaaacctaagctattaggcattaagttatatgtctatggtttctcccgcggtgcagcaagtgcgcgagcatttgtgaactggctatctgagttgctgccagggggcaggagaaagggaagtaaacctgagctttgtctgaagtcgggtgacgtaaaaatccccttaagtattgaatttcttggcctgctcgacactgtggcatccgttggcatagcaaatattgcgccattcgcagaagggcatatgggctgggctgatgacaccatggaattaccggataatgggctgatcaaaaaatgtacccacttggtgtcctctcatgaacaaagactttgtttcccgctggattcaatatgccgcagtgacggaacttacccaagttatgctacggaagtggtttatcctggaatgcactccgatattggtggggggtatcctccgggagatcagggaaaggctgttggagatgatgatggtaatttattatcgcaaattgttttgcatgatatgtatatttctgcatttaatgcaggagcgcctttgaaagtaaaaagagaatcattaccgaatgatttacgaaaagacacatggaggatgttgggtgcagatcaattacttgaatttgaagtttcaactgatttaatttcacgattcaatgcctggcgagagcttactcttaatttatcttcaaataatgtagaagactcagctgatgcattgaaattcaatcccatccaagcaagttcaaatattattacagcgttagaagatcaactcggctggattacggcctggcgtatcgggcgatacgcaaatggtgcttataaatctcaggggttttacaaatcttcaggtgtcgcgtggcaaaataaagactctgacccggccactctggctgaatctagggctgagcaagaacagaaacaaaaagatgtggatgatgcgcgcctgagagcaatcgtgaataataggttcaaaaataaaaagttcataccattacctcctggcccaaaagattttgacccggctatcgctcaggttcagctaagacaggcggcagaagaattcaatgctgattaccagtctaagccacgccccgttacggggaactggaaatatacggtgtctcagaaattatctaatgtgatgtatgccttcagtgagaatgatttctctgttgagtatgatcgcatcagaagttcaggtggcagtaaatttaacaaactgtttccgaagcaatctgctggagaaaccgctcaatcgccagaaagtctggtcagatcattatttgacgatcaggttcatgactcacgcgcctggtttatgcacgcaacctttggtgacagagaaccctggggaagttacttcctttatcggatgattttctttggggagttaatgagtaaaaatgttccattgatcgctaaatatggccggtttgttgaaggccaacttaaatcagcgataaaaggagccagtctcatttttgataacacgactatcaacagtaatatttcagatgaaatcacatctggtattaaacaagtgatctctatcatccctgcttcggcaagtgggcctgaagttattaatgcagaatctattattcaacctgcaatgacaaatggaattgcgccattgggtagccagacacgtaaagccctggatgctgcgaaactggccgaaaccaaagctgatattcttaaaatatggtga

SEQ ID NO: 216423 - DNA, 531 bp, Klebsiella pneumoniae
atgaaatctccctttctctttttagttacagcgttattgctgttaacgggctgtaaccagcctgctgaagctgactcagtcagtggcggtggcggaaccatcgaagccatcaaccatactcactgggcaatcaatcactttagtgtcgacgggcagtccggtgtcgatactatcggcccgtggcaaggcggaggcggtgcgggttactttggtgtgcctccaaaatgggtaccgggaatgaccgtcaaaattgactgggaaaccggtgttggcgatatggatggctttcctggctttggtgacgatgaaaaatatttgacgtggtataaaaagaaggaagcgttaaatagggagcatagtcgaatagttcccgtacctgattataacggccaaaaaacctgtggcatcaaaatacactttctcccgtgcgacaaagtaaaagtgacaaccagttgttacgattacggcaatccgaattacccgattaaggatccgattaagatggaggagcatgaagtatgtccaaaataa

SEQ ID NO: 216424 - DNA, 210 bp, Klebsiella pneumoniae
atggaaaaaaaaataaaagcaagtcataaagagcacagtgcattagtacccgttcctgattataacggccaaaaaacctgtggcatcaaaatacacttccttccgtgcgacaaggtaaaagtgacaaccagttgttacgattacggcaatccgaattacccgattaaggatccgattaagatggaggagcctgaagtatgtgcaaaataa

SEQ ID NO: 216425 - DNA, 336 bp, Klebsiella pneumoniae
atgaaatctccctttctctttttggttacagcggtattgctgttaacgggctgtaaccagcctgctgaagctgactcagtcagcggcggtggcggaaccatcgaggccatcaaccatactcactgggccatcaaccactttagtgtcaacgggcagtccggtgtcgatattatcggcccgtggcaaggcggcggcggtgctggttactttggtgtgcctccaaaatgggaaccgggaatgacagtaaaagtcgagtgggaaacaggagaagcttcaacagatggctttccaggatacgatcattgggatgaatatcttgaatggaaaaaaaaataa

SEQ ID NO: 216426 - DNA, 1353 bp, Klebsiella pneumoniae
atggaagcaattaacctcccgctttatcagcgtatcgcccgccagttgaaatcggcgattgaacgtggcgaactgaccccgggcagccgtttgcccgccagccgggtgtacgctcaggagcagggcgtctcccgggcgaccatcgaaaacgcctggggagagctggtcgcccagggatggctcgagcggcgtgggcaggcggggacctttgtcagcgagcggctcagcccgcgccagctggcgccggtaccgccagtgcaaccggccgcgccgacggagccgctgccgtttcagatggggctgccggcgctggatctctttccgcgcgggcagtgggcgcgggtgatggggcgtcggctgcggacgcagtcgcggttcgatcttgcacccggcgatcccggcggcgatccgcttctgcgccaggctatcgtcgattatctacgcctgtcgcgtagtatcgactgtcagccggatcaggtgttgatcaccggcggctatgccgcctccatgaaccttatcctgcgtaccctagcgcagccgggacagcatatgtggatggaagatccggggtatccctttatccggccggtcgtcgaggctgggcagctggcggtggatgcgattcccgtggacgacgaagggatggacgtcggctggggccagcgtcatcacccgcaggcgcgatttgccctgctcacaccagcccatcagagtccgctgggggtcgcgctgtcgcttccccgacgccgccagctgctggcgtgggccgcggagcgcgacgcgtggatcattgaggacgattacgatagcgagtttcgctatcacggcaaaccgctgccgccgctgaaaagccttgatgcgccgcagagggtcatctacgcgggcaccttcagtaagtcgatgttcccggcgctgcgcaccgcctggctggtggtgccgaccccgctggtggcgcgttttcaccagaccgcggagcgccagtcctgcaccgttcccaccctgtggcagcagacgctggcggattttatccagcagggacatttttggcgtcatttgaagaaaatgcgtgccagctatagccagcgtagacagtggctggagtcggctctgcaggcgcagggctttcaggtcacgccgcagctgggggggattcaactggttatgtcggtcagcggcgacgatcggctgctcgcgcggcgggcggttgtggccgggctggcggtgcaggcgctgagcgactggcggattcgccacgcgggcgaggggggattactgatgagttttaccaatatacgttcgccggcgatggctgacggacttgcccgacggctgagagaggcgattgcgatttga

SEQ ID NO: 216427 - DNA, 363 bp, Klebsiella pneumoniae; identical to SEQ ID NO: 137654

SEQ ID NO: 216428 - DNA, 1080 bp, Klebsiella pneumoniae
atgcagattggttttatcggcctcggcgcggtggtggaaaccgcctatttaccggcgctgcgtcgcctgggggacgtcatcgaccgctgccagggctatgacctggactgcagcagagcgctgccggggatccagcgctgtagttcgctgtcggcgctgctggccgaacccctggatacgctcttcattaccacctcatcacttcagcatctgcccgtactggagagggcgttagccagcggcatttcccgcatcgtggtggaaaagccgatcgtggccaaccttgagcaggccgcccggctgcgggcgctgctggcgccgactgagcaggccgcgcgggtgctggctcttgaccactggatggcgcgaggcgttgcgctgaacgctcctggcccgctgtggcgggcggaaggggaggccagcggcctgcctccgccgcacctgtcagcgcaggatatcgtctggctcgaaggctctttgcaggagccaagcggctttaacagcgctggtgagccggtcgcactcaattttgccaccggggagctggatacccggcagctgcgtcaccctgatggggtgatcctcgatatcggcacccatgtcctggcgatgctccgcgaaaccctgcacgccagcggaagcgatacggcgctgagccttttccttcgggtggcgaaagaccgcctcggccatgacattgctccaggggataccagcactgccgagggggtggcgcatctgcagggaaccctgggcactatcccgctcaatatctggctcaacaaatacgcgggtcccgcgggcgggcaaaagggaatgcgaataggactgcgggacgggcgagtaatcaccctcgatcgcgcccctgagggcgaagtggtgacgctacaggacggcgagcgggtgcagcgctggacccggcccggggcgatctatacgcactgtcttgatgagcagatcctcggcgcggataatctgtttatccgggcgccggacagcgtggccgggctaacgcagcgtaggcttgaggaagtggaatggctgctcaggttgcagcagcaattacgcggcccgcattaa

SEQ ID NO: 216429 - DNA, 2121 bp, Klebsiella pneumoniae
atgaataacaaactctttgaaacgattattgcaaagttaaatttttcgctaattaagaaaacaccggtaattttacaatcagaatcagcggaatgtggtatcgccagcctggcaatgatctgcggacactatggattagatatagacttattcaatttccgccaacgcttcggcagtccatcgcaaggtgcttcactgctgcatttgagcaaaaccgccgagcgtgctggccttaaaaatcgcgcgctttcattagatttagatgaaataaaacagcttaagctcccttgtattatccactggggaatgaatcattatgtcgttctaacgaaagtacgaaaatctagctatgttgtgcatgaccctgctttgggtaaacgtataattggtttgcaggagatgtctaataatttcaccggcgtggctctggaactttggcccgatcagaactttcagcaagaaaaggcaaaagcacgcttacgtttattagacctgatgcgaaacattgtcggattaaagtctgcattaattaaaatcttcgcattctctgtcgtaatcgaagccattggccttttactccccattggtacacaactggtcacagaccatgtcatcatggcccatgaccagagtctgttatccgtcatttgtataggactggtctttttcactctcttccgtacctttgtcagtatgctaagggcatggacctcactgactctcaatactctgactaatattcaatggaaaacgacattgtttgatcacttgacaagcttgccgttatccttttttgaaaaacggcatcttggtgatatccagtcacgttttacttcattggatactatccgctcaacgttcactaatagtattgtcagtggcatcattgactcgatcatgacaattggtctgttaattatgttaaccctttacggcggctggctagtatgggtggtcgtaggatttacgctttgctacgccattatgcgcctggcgacataccgtttttaccgtcgggtagcagaagagcaagtcattaaaggagcccgctcgagcgctcatttcatggagtcactttatggaatatcaacgattaaagctcttaatttaaaagagcgccgttcgcagcattggcttaatattaacattgatgcatgtaatgcaggaattaaacaaactcgctttgatatgatgttcagtggcataaacaccttcatatcatctatagatcaagttgctatcctatggttaggcgccattatggtgattgataacaacatgacgttaggtatgtttatggcgtttaactcttatcgtggccagttttctcaaagagcatctaatttgatcgatctctttatgcaactgcggatgttatcattacataacgagagactatctgagattgttttcagcgaacccgagaaagagctcccggcacgtcgagttttcgatgagaatagtggagtgaagctggagattaaaaatctcagttatcaatatgacccgttctcgcaacctattttttctaactttaacctgcaggttgagccaggagaatctattgcgcttgttggaccttcaggggtcggtaaaacgactttactgaaagtgatgtgtggtttgttatctccaacttcaggtgaggtaattgccgataatcttgacatttataaaatagggcttaataactaccgactggggacagcatgtgtcctgcaagaagatcgtcttttttcagggtcaattagcgataatatcagcggatttgaagataatgcggatgaagaattaattgttgagtgtgctcgacgcagtaatattcatgatgaaattatgaaaatgccaatgggttatgaaacaatgataggtgagttagggctgggtatttcaggtgggcaaaaacaaagactcttaattgccagagcgctttaccgcaagccgagcattttgtttatggatgaagcaacaagtcatcttgatttgaagaatgagtctgccataaaccaatctattgccagtttaagtataactcgaatcattgtcgcgcatcgtccttcaacgatagcgtctgcagaccggataattgatctttctcaatatggaaagcaagcatcataa

SEQ ID NO: 216430 - DNA, 2571 bp, Klebsiella pneumoniae
atgattacaaaattcaaattatctccatgctgtttagctcttataagtatcggtgtgttaaccatatcttccgagctatatgcaagagaattttttaacccagcatttcttaccgatctaaacggttcagacgtgagtccggacctttcggcttttgaggtagcaaattctcaggcccctgggaaatatcgggttgacatcatcatcaatggtaccgttgtcgataccaaagacgtcgattttttttctacggcagaacaaaaagcaagctatcttaacgaggcgggagaagagcttaaactatacccatgcttatcaacagaggaattaagtggttatggtattaaggtaaaagcaatctcttcattaaaaacaaacgctaatggttgcgtcattatcagttccattccagaagcctctgttgattttaactttaacttacagaaacttgagttgagtgttccgcaggccgcagtatcctcgacggttcgtgggtatgtttcacctgatgaatttgacaatggtattaacgcgttctatttaaattatagatataatggaaccagtagctacgcacgagataacggattatcagatcaagagaaccatagtgtcaatttactaccaggcttaaatatcgggccatggcgtattaaaaactacactacgtggaataaagatagttatgataatgatagcaatggtaaatgggatactatctatacctatgctgaacgaaatattatttcactgaaaagcatgttgacattgggtgaaagcacttcggatgctgatatttttgatagtgtgccatatcgtggtgcgcaattaaactcagacgattacatggatgcggaaagtatccagggatatgcacctgtagttcgaggaattgcgaaaagtaacgcaaaagttattattaaacaaagtggatatgttatttatcaatctttcgttcctccaggggcctttgagatcactgatctgtattcgacaggtggcaatggggacctcaatgtcacgatcgaagaagctgacggcactcaacaaaattttgttgtagcttatgcttcacttccagtattacgtcgtgaaggtagcctaaaatacagcattacatccggccaataccgctcctccgacggtagcgttgattatactccgttttcacaagcaacggccagctatggtttaccatacaacaccaccctatacgggggattccaggctgcttcgaaatatcaatcagtggccattggcgtcggtaacaacctgggcgtacttggcgctgtttctttagacgtaacacaggcctggtcgacgaagcaagatcaagataagatatcgggtcaatccgtgcgtatacgctacagcaaaaacctgaacgatataggcacaaatatagctattgcaggctatcgttactcaacgagcggctttaacaccctttcagatgttcttgaaacatatcgtgatgactataaatactactacaacgatcgcgttaaaaatagaactgaaattaccgtaagtcaaagcctcggtgataagttaggctattttaacatcggcggtgtaatggaggattactggaatcagcgtcgcaggaataactcacttaacgtaggttacagcaatagctggagcggtattacatataatttaaactattcccactcccgctcctcaactgactatgagggttacggtagaaactattctactgataatatcttttcgttcaatatcaatgtgccattgaatttctggatgcctaacacctgggctacttatggtttaaataccagcgatcctggttcgacaagcaacagtgttgggctttcaggtcttgcattggccgataataatttaagctggaaccttcagcaacaatacgataatcgagattatagtagcggaaccgctggtgttgattataaaggcacctatggagagatttttggtagttataattatgatcataactggcagcgccttaattatggtataaacggtggaattgtcgctcatcgtgatggtatcaccgcagggcaatcattcagcgataccagtgctctcgttaaagcccctggtgttaatggtactcgagtagtgggtaacaccggcgtaaaaactgactatcgtggctacgctatcgtacctaatattacaatgtatcgtagaaatgatgtggtattagatactgaaacgatgcctaatgatgttgaccttgacactacggtagccaccgttgtcccaacccgaggtgcgatcgtacgagcagaatattcagggaaaaaagggatacgcgcgctgctgcagctagtggatacacataataggtttataccttttggtgcaatggtaaatcttgcttccgaaaattcgacgaataataacagcgggatcgttagcgacaatggtcaagtttatctggctgggttaccgacaacgggagtactgcttgtcaaatggggaaatagtatatctaaacagtgtacggtaaattatcagttccctgggtctgaaaaggtcaatggtatcaaacagggccagtttatctgccgctaa

SEQ ID NO: 216431 - DNA, 231 bp, Klebsiella pneumoniae
atgagcaatagcagtgtcctgctggcgttgagcttatttgttcaggatgcatctctaaaatatgcgacagaaaataacctgagcgaggcgcagaattacatgcaattatggcgacaaaatggagaaaaaatggatattaaagcatctttaaaaatatatttaatgatggaactttttctgaagcgcattgttctaatggccaacaccagtactatatttagatttgcctga

SEQ ID NO: 216432 - DNA, 1761 bp, Klebsiella pneumoniae
atgacacgcttactcaagacaatcttgcccatcatcctctgcgccctcttcgggttatcgttcgcttcacccacgcaggctgtcgccagtctgccgatcgttcttcccgcgctgacatgcgatgcgctaagcgctaccgacttcagcgcggccgttggcgcaaaggtcactatcaatcacactgaaatgcagacctccgcgcagggaagctggtgcaaggagagcgccactatcgcccctgagattggcgtgcagattgccctgccgactcaacgctggagtcaacgttttttgcaggtcggctgtggcggactgtgcgggagtattaacctgagtctgtcgaatgccagcggctgcctgccggcaatgaacggcgagtttgtggtggcagcaaccgatatggggcaccatggcagtatgatggatgcgtcatgggccgaagatccgcaaaagcgcatcgattttgcctggcgcgccaaccacctgaccgccgtgctggccaaagcggtgatgcagacgctttaccgccagccgccaaagtatgcctactttatgggctgctcagacggcggtcgcgaagcattgatggaagcgcagcgctttccgcaggattttgacggtatcagcgctggcgcgccagcggcctttttccagtttcagaactccttcttccacggctggaatgtggccgccaatcagcgcccggacggtaccgctatcctgctgaaaaatcgccttcctctgattcaccaggccgtgctggctcactgcccgacgctttccggcgtgcaggatggtgtcctgcaaaatccgtatgcctgtcagttctctgagtcatggctcccccgctgtcctgccgatgctcgggaccgttctacctgcctgacgcaggaagagatcgaggtggtgaaaaagctctaccgcggcgcttacgacagccacggcgcccagttcgtcgcgggcggtctgccgctgggttccgagctacgctggccggtgcccgagacgccgaccggccactcaatgtcggaaatgatggtactaccggctctgcaatccgtgctcctgccaggagaaaaacagaagatccaatcgatgcgggatttcccgcttaaccagcagaattttgacgccgtcgcccaactggcgccgctctataacgcggcaaataccaatcttcatgcctatcaacagcgcggcggcaagcttatcctctggcacggtctggccgatgactccgtcagcccggccttttctatcgcctattatcgcggcgtagaagcagagatgggccatgccgcaacggataccttcctgcggttattcctgctgcctggggtagcccattgcggtaatggcgaaggttacgatcaaattgatctccttaccccgctgatgcgctggaccgaggaaggcatcgcgccgcaggagatcatggccggcaaacgggcaacagccgctgccgacctgccgccgatgacagaaaaaccagatgcgcaaacgcagtttcacggcgtgcagaaagtcagtcagccttacgctgacgccgctccagcggttatcgcgactcgtccggtgtatcccttcccggccattgcccgttataacgggcgcggcgacgtgaatgacggcgaaaattatcatgcagagcaaacaaccgcctttggtcatctgcagctggcaaaacccgccagcgactatattggccctgataatcaaaaaaattatcaggttcgccacggcacactcactgttcaataa

SEQ ID NO: 216433 - DNA, 780 bp, Klebsiella pneumoniae
atgaaatacacgtctcacttcccgctggggatcgtcattcctttgctcgcctgtagcgtgccgctgcaggcggcagagaacatgaccgaacaatcgacgcctgacgagagcgccgccactgccgaaaatcacgaggagacgatggtcataaccgccgccaggcagaacctgcaggcgccgggcgtgtcgaccatcaccgcagaagagatccgcaaacatccccccgcccgcgatgtgtcggagttaattcgtacgcagcccggggtaaacctgaccggcaactctaccagcgggcagcgcggcaacaaccggcaaattgatatccgtggcatggggcccgagaatacgttggtgctggtcgatggtaaaccggtgaccagccgtaactcggtgcggtatggctggcgcggcgatcgtgactcccgcggcgataccagttgggtgccagcggagatgatcgatcatatcgatgtgatccgcggcccggcggcggcgcgctatggtaatggcgcgatgggtggggtcgtcaacatcgtgaccaaaccgaccacaccagaatggcacgggtcgtggaatacctatatgaacgctccgcagcaccgtaaagaaggggcgacgaaacgtactaactttagcctcaatggtccgctgtcggacagtgtcagcttcaatctctggggtaatctgagtaaaacccaggccgatgcgcaggatattaacgccgggcatgaagcggaacgtaccggttcctacgccggttcttatcccgccggacgttaa

SEQ ID NO: 216434 - DNA, 876 bp, Klebsiella pneumoniae
atgctgcccgactcatcaacccgattaaacaaatacatcagtgaaagcggcatctgctcgcgtcgcgaagcggaccgctttattgaacaaggcaacgtctttatcaatggcaagcgcgccacgattggcgatcaggtgaagcctggcgatttagtcaaagtgaacggacggttgattgagccgcgcgaagcggatgatctggtactgattgcgctgaataagccggtcggcattgtgagcaccaccgaagatggcgagcgcgacaacattgtcgatttcgtcaatcacagcaagcgtatctttcctatcggccgtctggataaagattctcaggggctgatcttcctcaccaaccatggcgatctggtgaacaagatcctgcgcgccggcaacgaccatgaaaaagagtatctggtcacggtcgataagccggtaaccgatgagttcattcgcggcatgggcgcgggggtaccgattctcgggaccgtgacgaaaaaatgtaaagtgaagaaagaggcgccgttcgttttccgcatcacccttgtgcaggggttaaaccgccagatccgtcgcatgtgcgagcactttggctatgaagtgacgaagcttgagcgtacgcggattatgaacgtcagcctgacggggatcccgctgggagagtggcgcgatctgaccgatgacgagctgatcgacctgttcaagctgattgaaaactcctcttccgaagcgaagccgaaagccaggccgaagcctaaagcggcgacccccggcatcaagcgcccggtagtgaaaatggaaaatagcaacgataagggccgcccggctggcaacgggaaacgtttcacccagccgggacgtaaaaagaaaggtcgttaa

SEQ ID NO: 216435 - DNA, 690 bp, Klebsiella pneumoniae
atggaactgctgttactcagtaactccacgctgccggggaaagcctggctggaacacgccctgccgctgattgccggtcaggtcaaaggccgccgtaaggcggtattcatccccttcgctggcgtgacgcaatcctgggatgattatacggccaaagtggctgcggttatggcgcccatggcggtcagcgtaaccggtatccacagcgtcgacgaccctatcgccgccattgaaagcaccgagatggtgatcgtcggcggcgggaacaccttccagctgttgaaagagtgccgcagtcgcggtttgttggcgccgattgtcgatgtcgtcaaacgcggggcgctgtatatcggctggagtgcaggttcaaaccttgcctgcccgaccattcgcaccaccaacgatatgccgattgtcgatccgcagggatttgatgcgctggggctgttcccgctacagattaacccgcacttcaccaacgcgttgccgaccgggcatcagggcgaaacccgcgaacagcgtatccgcgaactgctggtcgtggcgccggaattaacggtgattggtttgccggaaggaaactggatccaggtcaccgatggtcacgcgacgctcggtggcccgaacccgacgctgttgttcaaagcgggggaagaagcgataaccctgcctgcgggccaccgcttctga

SEQ ID NO: 216436 - DNA, 1785 bp, Klebsiella pneumoniae
atgacgcgtggtcttgaattactgattgcccaaacgatattgcagggatttgacgcgcagtatgggcgttttcttgaagtcacttccggcgcgcagcagcgctttgaacaggctgactggcacgccgtgcagcaggcgatgaagcagcggatccatctctacgatcaccacgtgggcctggtagtagagcagctgcgctgcatcaccgaagggaaaagcaccgacgtcgattttcttctgcgggtgaaacagcagtacacccaacttttaccggattaccctcgctttgaaattgctgagagctttttcaattcggtctactgccgcctgtttgaccaccgctcgctgacccccgagcggctctttattttcagctcgcagcccgagcgaccctttcgtaccctcccgcgaccgctggcgaaagatttctttccggaacgcggttggtcgcacctgctgggtaaagtactgtccgatctgccgctgcggctaccgtggcaaaacaaagcgcgggatatcggctatatcattgccagtctgcaggaggcgctgggggaggaactgctcgccacctgtcatctgcaggtcgccaatgagctgttctaccgcaataaagccgcctggctggtgggcaaactggtcatgccgatggcgacgctgccttttttgctgccgatccaccgcagcgaagagggtgagctgtttgttgacacctgcctcacaacccatgccgaagcgagtatcgtttttggcttcgcgcgttcctattttatggtttatgcgccgttgcccggcgcgctggtggaatggctgcgcgagatcttgccgggtaaaacgacggccgagctgtacatggcgattggctgtcagaagcacgccaaaaccgaaagctatcgcgaatatctacactacattactcgctgcgatgagcagtttattgaagcgccgggtattcgcgggatggtgatgctggtgtttaccctgccgggctttgaccgggtgtttaaggtgatcaaggaccgcttcgcgccgcagaaagagatgaccgccgcccatgtgcgggcttgctatcagctggtaaaggagcatgaccgcgtcgggcggatggcggacacccaggagtttgaaaatttcgtgctggataaacggcaaatcgcgccggcgctgctggcgctgctgcaggcggaagcggggaacaaactcaccgatctcggcgaccgcatcgtcatcagccatctctatattgaacggcgaatggtgccgctcaacctgtggctggagcaggttaacggccaggcattgcgtgatgcggtagaagagtatggcaatgctatccgccagctggccgccgccaacatctttcccggcgatatgttatttaaaaacttcggcgtcacccgccatggccgggtggtgttctacgactatgatgaaatctgctatatgacggaagtgaattttcgcgagatcccgccgccgcgctatccggaggatgagctggccagcgagccgtggtacagcgtttcgcctggcgatgtgtttccggaggagttccgccactggctgtgcgccgacccgcgcattgggccactgtttgaagagatgcatgccgacctgctgcgcgccgactactggcgcgcactgcagatgcggattaaaaacggccatgtggaagatgtctacgcctaccggcgcaagcagcgttttagcgtgcgctatggcgccgacagtagaccggataaggtgtttacgccgccatccggcaaggtgcgccgatctgcctga

SEQ ID NO: 216437 - DNA, 309 bp, Klebsiella pneumoniae
atgcgaattttatgtctggatatccctgcccccggcgcgacgctggaacactatgcgccgcaccttaccgcagaagccctgcacgcctggggactgtacaagtcaggttttattcgcgacatctatttccgtcaggatcgacccggcgtcgctattttcctcgagtgcgacaccgtggaagaggcgaataatgtcatggccgaatttccgctggcaaaagcgggtctattaaccttcgagtgtattccactcggctcgtttattagctgggaaaatctcttctccgctgaatttaaacatcaggagtaa

SEQ ID NO: 216438 - DNA, 876 bp, Klebsiella pneumoniae
atggaattgcgtcaatgccgctacttcatctcagtagcgaagctaggtagcattagtcaagctgcgttagaacttcatattgctcaacccgctctgacacgccagatgcaaaaactggaagaagatcttagagtaacgctcttcaatcgaacagggcgcggggtgcaacttactgatgcaggaagccagttcctcgttgacgcggaaatattgatcaacaatgtaaccgtcataaaggagcgcgctgtacgagcctcccgtggagaatgtggtaatatttcgctagcgcttcctgtaatacaaaatgcggcaccaccgatcacaacattattaaaaaaattcaagaaggcatcaccgctcgtcggtattacgcttcatcacctcatatctgaagtgcaactttcaaagatcgctgagggagagctggatgctggttttttattgtttagacctcttaatgatccgctttttgcaggaatccccgttttcaaagaaaaaatgttattagcttatccgactgagtggaagtggcctgataataaagaacctcgttacttaagagaattgcagaatcttgactttatatggcttcctcgtaccgcggcaccggcgtggcatgatcgacttattcattgcttttacgatgcaggttttacgccacgttccgttatgcacggcgttgatgcagtatcgatgcttacattagttagcgcaggcatgggatgtaccatcgttgcagaagggatgagacatcttgctccgtcaaacgtgtcgtttgtggttttagaagatttaaacattgtacaggaatgggagttagtatggcgcaaggacaggtgctctgaggttttaaaaagtttaataaatttgatttga

SEQ ID NO: 216439 - DNA, 711 bp, Klebsiella pneumoniae
atgtcatctaagtatagaacaactcttaatgtgaagaggctcacagaatttaggcatgatttacatatgcatccagaattaaaatttatggagcatcgtacatccgataaaatcgcagcttttcttactgagctggatatcccttacaagagagggctagcgtctacgggtatcgttggtagtatatatggtaaaaaccgtagtgctaatgatcctggaccagcattaggcataagagctgatattgatgccctgccattagaagaagcaaataaattcactcatgctagtaagcataaagggtgtatgcatggatgcggacatgacgggcacaccgctatgttacttggcgcagccgaactgctttcagcaaatagagattttgatgggaccatacatctaatttttcagccaggggaagaaggcggtgccggggcgcgtgttatgatgaacgaaggactgtttaagctttttccctgtcaggctgtatttgctttgcataactggcctcaccttccgcaaggacaaatggggacaaaaattggccctataatggcatcgggagtcacttttgagatcaccgtttttggcaaaggtggacatgcagctctcccccagtcaactattgatcctgtgccgatcgcctgctttattgtgtcgcatttacagactttaatatcacgtcgaatacttggcttccaacatatttaa

SEQ ID NO: 216440 - DNA, 525 bp, Klebsiella pneumoniae
atgtatagaatgcgagatattgcaagaaagggcctggctccgccagtgcttttactgctttgtttattgatcaatatatgggcgcgttggcctatacttatgcatattgatgaggtattcactatttcatggagagtatgcaccgccctggtcactggaggcattagtcttgtcctgtctctgacgggactggtaacgttgataagtaatcaaacaaccctcaacgcactgcatccggaacgaaccagtatgctggtgaccagaggatgttttcgtttttctcgcaaccccgtctaccttggatttatagggctacatatcgctttggccctattgttaagtagtgtaattggcttaatgattacaccgtttctcattttacttctgagcatcttgcatatacaggttgaagaggctggaatgcagcaactgtttggccgacaatgggaagaatattgcaacaatacacctcgctggttctctctagcatcgttatatgcggtcattaaggggcgcgccaagtga

SEQ ID NO: 216441 - DNA, 912 bp, Klebsiella pneumoniae
atggatattccgatagaacttaagcacttacaaactcttttagcattgcgtaaaacaggaagtctgacgcgcgcggccgcagctatgcaactgactcaatcggcactatcgcaccagatcaaacaactggaagagcactataacgttactctgtttatgcgaaaaacatcgcccgtaaagtttaccctggcgggtgagcgtttgttacaccttgctgaaaccgtgcttaatgcaatggaggaagccaacagggatctttataagttagcgctcggaaaacagggcgcgctccggataacccttgagtgtcacacctgttatggctggttactaccggtgatggatgagtttcgtaagaaatggtctgaggttgaaattgatatattgcctggttttcagccggatccaataggtcttctgttgcaagacagagctgatgttgccatcgtggatgaaaccgagcagacagatctggtgaggtacagctctttatttaaatatgaaatggttgctattttggcaaatgaacatcctttaacgcgaaagccttggcttgaagcggaagattttcgtggtgaatcgctcatcacctatgcagtaccggatgagcgcatcgatctttgtcgaaaagtacttaaacctgccggcattccaattaggagaaaaaccactgaactcaccatggctatcattcaacaggttgcctgccagcggggtattgccgcattgcctatctgggcagtatcagaatatcttgaaaaaaaatacgtcacagcaaagtcaatcacggaaaataaactaatttcagaagtttggcttgccacactaacagagaacatcgacaagggctatgttaatgactttattggctttaccagacagcgctgcttgcgcttattagatgaaatctaa

SEQ ID NO: 216442 - DNA, 1206 bp, Klebsiella pneumoniae
atgactaatcatagttttgataaccagatgtctccagaaacgtatctgtgccatggcccattcgatcctgaggtatttggtggcgtggttaacccgcctgtatatcacgcctctacggtcatcttcaaaaactgcaaagagctaaacgagcgtcaccaggctctgtttgaagatgcggaagatgaagtgatgtattacggtcgatttggaacgccaatcaccttcgccgtgcagaaagctctggccgaactggagggggggtaccgatctttactggtgcctacagggctggcagcatgcaccagtgcattactggctctggtaaaaagtggcgatcatattcttgtcagtagcagcgtttacggcccgacgcgtgggttcgtaaataatgtgctggccaaaatgggcgtttcggcaacctttttcgaccctactatcggcgatggcattggtcaactgttccaggaaaacactaccgtggtgtttacagaatctccaggctcccaaacatttgatatccaggatattccggcaataactcgcgtggcgcatgcccacaacgctaaagtgataattgacaatacctgggcaacgccactatttttcaaaccatttgagcatggcgtggatgtctccgtgcatgccgccactaaatatatcgttgggcactctgatgcgcagatgggcttgatcacgacgaataaagaaacctggcttgccattcgtcgctttatctatctatttggtcttcatgctgcgccggatgatgtttatctcgcacaacgtggattacgcacgatgtctttgcgtctcggacgccatcaggattcagcgcttaaaattgctaaatggtttgaagaacgtgaagaagtggagcaggtgctacacccggcattgccttcatgtccggggcacgaaatttggaaacgtgacttcaccggttccagcggtttgtttagcgtggtgcttaaaccgcactactcaaaagagtctgtggagaagtttattgatagcctgcagtatttcggcattggtttttcgtggggcggttttgaaagcctggccattccatttaacccgcgtaaagatcgtccggaatatcactggccgtacgaagggcactccttccgtttacaaatcggcttagaagatccaatagatttagtaagagacctggatcaggcgctgcgtcatctgaaggggtaa

SEQ ID NO: 216443 - DNA, 1185 bp, Klebsiella pneumoniae
atgtcgcatactaaaatcgcaaataagttacaaaatcttaaatcatctgcaattagagaattattgaaacacagcaaaatggacggtgttatttccctgggcggaggaataccagatccaaacttgtttgatcgggaaggcttacagattgctatggatcacatcttgacccacggttgggaagacgcgtttcagtatggactgagtgagggtaatcctgaactgcgggcagccatctgccagatcatgcttgaccggggaattcactgcggcgtagaggatgttgttgtgacctccggctcccagcaatctctggatattcttgctcgggctctgattaatcctggcgatgtagtggtgttagaacggcctacttacctggcggcgctgcaggtatttcagcttgctgaagcgaacctgttgtcggtaggaactgacgctgagggcatgattgtcgatgagctggaaacgctgcttctaacgacccggataaaagcagtgtatatcgtgcccacgtttggcaatccaggaggcgttagcctcgcggagcaacggcgtaaacagctggtggaactctcactacgctacgattttatcatcatcgaagacgacccttacggcgaaattaattttacggattcgtcattcatcccgctcagagcatggtctgcggaaaggggtaacaatgataacgttgtttacacatcaaccttttcgaagatcctcgcgccaggcgctcgggtagggtggctcgtgctaccggattggctgaaaagagcggtagtcaatatcaagcaaaccacagatttacatacaagtgcactctcacagtcgctgacctctcactatttacacagtggccgcttgccgggacagatcgcactcatccggaaggcttatgagctcaaatgtcgagttctaagccaccatctgctgaacgaactaggtgaccacctcacttttcatcagccgatgggcggcatgtttttatgggcgaagtttaaatatgcgatggataccacgcaatggcttcagaaaacaatacgcaacggcgtggtgttcgtgcctggtgaatttttctactgcgaagaacctgatcattgcactctgcgaatgtcgtatgtcagcaccacggaagagaatctgatagaagcggttaagcgcctgaaaatttcgcttaattaa

SEQ ID NO: 216444 - DNA, 1281 bp, Klebsiella pneumoniae
atgaccgtaggaattaataccgaagcaattaatcataagaatattccctttaccatgtatgatttagggtgggtggtgctttgcatcggagctgccattggctccggaatcgtctttttcccattacaggttggattaaaaggggtgtgggtctttgccctggccgttatcctgggctatccggcagtttattacatgcagaagctgttcatcgaaacgatggcgcgcagcgatgagcaagattcctacctgagtattattaccagctacgttggcagccgctggggcgtactgcttggcgcgctttactccttcaccatgctgaagtcgatggtggagtatgctcttgccattaccaacgacagcgtctcgtatctgaaaacctttggccttactaaccagacgttatccgaacactggtggtggtctctgctgttaatcgccgggctctctctggtcgcgtcgaaaggagaaaagctgctcttcaaagtttcaggcagcatgatcgccgtaaagctggtgatcatcgtagcgattggtttcgtggtgatccctttctgggatgtgagcaatattggtgcattcccaaccgttagccaccttgtcgtaggtacgttcccgacgcttccgttcgctatcttctccattatgtttgttgggatactaaatccgatgaacatcgcctataaaaaacgtgaagaagataaggacgtggcaaaatataaaattttacgcgtacacaaagtggcttatttagttcttgtcgctaccgtgctgttgtttgtcatgtccatcgtactttctatcagcgaagccgatgcgctacgagcctatcaggataatatctcggccctggcgctggccgccaaggtcattcctggggccacggtgaagtatatgagcgttattctcaatgtgttttccattgtgacggcattcctggcgctctatctggccgtacatgaatcttttgtaggtctgatcaaagtcactgttgaaaaaatagttaagcctcaggaaaacaatagtaaggcgatctcagttgccgcttttgtcatggttgtgctggtgctgtggctgatagtactaacgaactttcccattctgaaggtgtttgtgtttggtggcgtgacttacggacttattagctgcatcattcctggttttattattcttaagaatgacaagttttctgaccttcgtggcgtctcggtttactatgtgattttaatcggcatgctcatgtgcattggaccttttgtcatgctgttttcacaataa

SEQ ID NO: 216445 - DNA, 939 bp, Klebsiella pneumoniae
atgaccattccattgacgatcaaacaaattgaaatgctggtaaaaataagtgaagggaagggactgtcagaagcggcgcgcttgcttaatttatcgccatccgccgtgagtaaggggctggcggtgatggaagaaaacctgggtgttccgctcatccaaagaacaacccgctcatttcagttgactgaagccggggagtacttcgtttccagagcatcggatctgctcaaagagttcgacgatatcgttaacacgacctgtggctatttcaaccatccacatggggccttgaagatcacctgttctgtggcgtttggatacgcacatttgatcgatatttttgaagaatatcgtaaaaaaaatcatgatgttgaacttatactggatctcgacgatcacctgacgaatctgaatgaaaacaatgttgatatcgcattgaggattaccgccacgcccccgcagaactacgccgccagaaaactttcaaaaatcagctggctatactgtgcttcccctgattatcttgcacggaagggctccccgactaaacgcaccgagcttgcaagccatgagtgtctgatctatccaggattaacgccagcccttcgctataacgatatcgcatccccgcatccgcagtgcgcaataaaacccagaacaccggttcaggccaatagtagcctgttgctcttgaaggcggctctttcagggcagggtattgcctggcttccctcttatctcatcagccagcacatcgatgcaggggcgcttgttcctttaaagcttgacggtaaatacgcttacccgacgcatagcctctatgcactctatttccccagcaagtttcgtaatccaaaggtaagatcatttattgattttttggtggaagaaaaccagccatggaatcgttgggaaaaagcgataggtaatttgctctaa

SEQ ID NO: 216446 - DNA, 144 bp, Klebsiella pneumoniae
atgatgcatgctgacaataaaccccccgtgctgctgaaaaagctcgtgtggttgatcgtcatctggacggtcagtgttctcgctttagggggagtttcaatgatttttagggccttaatgactgctgcaggcctgaaagcataa

SEQ ID NO: 216447 - DNA, 1005 bp, Klebsiella pneumoniae
atgattgatcttccgttaatttggttcggcatcatcatcttctctatcctgatgtatatcgtgatggacggtttcgatctgggtatagggattatatttccgtttaacagaaatgcagaagagcgcgatgttatggttaactcggtagcgcctgtatgggatggcaacgaaacctggctggtgatgggaggcgcgagtttgtatggtgcgtttccgttggcctatgctgttattactgatgcactagcggcgcccttgacgttaatgcttattggtctgattttccgtggcgtcgcatttgaatttcgcttcaaagcgactccagcccataaaccattttgggataaagctttcatttcaggttctatactggccgcgttctgtcagggtatcgttgttggcgctgtgattaatggcttaccggtaagtgggcgagcatatgcagggtcggcatttatctggctcgatccttttgcgctgttttgtggactggggctgctaattgcctatgcactactgggtagcacttggctgatggtcaaaacagaggggcatctgcagcataaaatggcaaaactaaccctcccattgttgctggccttaatggtcgctatgggaatcattagtctttggacgccattagcacatcctcatattgccaaccgttggtttagtttgccaaacctgttctggtttctgcctgttccggtattagtgctgttcagctcatgggggatcgtccgggctgttaaccgctgcgcgcactacaccccctttttcttaacgctgatgctggtgtttcttggtttttcaggactaggaataagcatctggccaactatcattcctccatcggtttcgcttcgccaggccgctgctccagtaatgagtcagtcgttcatgctggccggtagcctggtgattatccccgtcattcttgtttacaccttctggagctattacgtctttcgaggaaaggtcagaacggatgatggataccattaa

SEQ ID NO: 216448 - DNA, 1419 bp, Klebsiella pneumoniae
atgtttggtttagatgcttttcatctggcacggatccagtttgcattcacagtttcgtttcatattatctttccggcgataactatcggtcttgcaagctatctggtcgtactcgaaggcctctggttaaaaaaacgcagcgcagtttacctggatctctatcatttctggtcgaaagtctttgccgttaactttgggatgggcgttgtttccggactggtaatggcctatcagtttgggaccaactggagcggtttttctcaattcgcaggtagcatcacgggccccttacttacttatgaagtattaacggcctttttccttgaagcaggtttcctgggcgttatgctgtttggtcgcgacaaagtaggacccggcctgcatttctttgctacctgcatggtggctctcggaacattaatatcaaccttttggatcctggcttccaacagctggatgcacacgcctcagggatacagtatcgagaatggtgtagtcgagcctcaggactggataaaaattgttttcaacccatcattcccatggcgtttggtgcatatgacgacagccgctttccttgcaagtgcgttcttcgttggggcatctggcgcatggcatctgcttaagggcagggacacgccagcaatccgcaaaatgttctctatggcgttatggatggcagccattattgcgccgattcaggtatttctgggcgatgggcacgggctaaacacgttagagcatcagcctgcaaaaattgcggcgattgaagggcactgggaaaacaggcctggtgtagccacgccgctcattctgtttggcattccagatatggagcaggaacgaactaaatttgcacttgaagtaccttaccttggcagcctgatcctgactcacagtctgaaccaacagatccccgcgctaaaaagctttccgcctgctgacaggcccaactctaccgtggtgttctggtcatttcgtatcatggttggtctgggactattaatgattacccaaggtattttaagcctatggctacgttacaaaaaaaaactgtacgcctctcgaccgttcctctggttcgtcttgctaatgggaccgtccgggttgattgccatcctggcagggtggtttaccaccgaaataggaagacagccctggactgtttatggccttcaacggacccgtgaggcggtatccgcacacggcgagctgcatatgagtatgagtctcatggcctttattatcgtttacagtgcggtgttcggtgtgggttatatctatatgatgcagctcattaagaaggggccgcaaaccggtgaaggtcagtatctacaggaggggggcccggggaagttgcgcacaccagccaggccactttcagctggcaattgtactgaggacggcaatcatgattga

SEQ ID NO: 216449 - DNA, 522 bp, Klebsiella pneumoniae
atgagcaagacacgtgtgacaccgtggcaggataaagatcctgttcccgctgatttgctgagagctatgcaggcgcgtcgtcccaacggtgaactcattggcatcgacagggtattactgaaaagcgttccgctggccaccggttggaatgagctactaagccgagttcgcgctgattttagcctggagctgatttatctggaattgatcatgctgcgcgtcgccgttctgaatggtgcccaatttgagtggagggtgcactatccagcctatctgcaggcaggggggacagaagaaaaggctcaagcgctaaaaaacgctgtgccgaaacgtgaaatgttcgatgaccaggagtggatgctcattacgttgaccgatcaatccaccataaacgttaatgtcgatgccgcagttattgcatcattgaaaaatctcttcggtgaaaccaaaactgttgaggccgtcgcgaccgtggcagcttacaacatggtttcgcgttttctggtggcgctggatatctag

SEQ ID NO: 216450 - DNA, 324 bp, Klebsiella pneumoniae
atgacaattaaagaaatctcaactacggaatttactgcagacgtgctggaatccgcgattcctgtactcgtcgatttctgggccccctggtgcaatccctgtcgtactgtcgcccccatcatcgatgcccttgctctggagcatgccggcaaactgaaggtgtacaaggtaaatgtggataagcaccccgatctggcatcacagcatggcattcggaccatcccattttttaagatctttgtgaaggggaagtccgtcatcgaattttccggcgccagaccgaaaagtgacttcgatgcgctactgaccagcgttatcaactaa

SEQ ID NO: 216451 - DNA, 1026 bp, Klebsiella pneumoniae
atgaagcagacttataaagcaatgcaagtttctcgtcctggtcaactggaatgtgtggaaaaagaacttccggttcccggcccaggtgaagtgctgataaaagtggaggcctgtggaatttgcggagcagattctggcgtcgttgaaggtctggaaaagagtgttgagtatccgcgtgtaccgggtcatgaagtggtcggtacgatctgcaaaacatcggggccgctcccggcctggctcaagcctggtcaacgtgtcggcgttgggcgactaggtggtcattgcaacgcctgcgagcaatgccgtcttggacactttaacctctgtcagaatcaaccggttactggcagcacaagagacgggggttatgcagaatacatgctggcgcgtgagacggggctggtcgcaataccggatgatttgtcctccgttgacgccgcacccttactttgcgccggagtagcgacttttaacgccttaaaaaaatctcaagcgcaggctggcgatacggttgttattcaggggatcggggggttaggacatttagctttgcaatatgcacgcaaaatgggttttcgcgttatcgccgttggcaggggtgatgatattgcacgcgaagtcattgcgctcggtgcccattactacatcgataccaacaaagaagaggctgttgaagtcattaaggcgtttggcggcgccaaagttattttgtcgaccatcactgacagccatgccgttgccactctgctacccgcgctgcttccccagggaaggctgatggtcgttggtgtgggtaaagcgccattgagctttaccccgggtctcatggtcggacgggagttacagataaacggagccatgaccgggacggcaattgaattagaaaaaacgcttaatttcagcctgctggtagctgtgcgcgcgcagattgaaacgcgttctctggcacaagcacaagaggcgtatgaaaaaatgcgtagcggaaaggcgtctttccgcatggttctcaccatggggcaccgttga

SEQ ID NO: 216452 - DNA, 1074 bp, Klebsiella pneumoniae
atgatgaatattgaggtcatcattgtgggagggggactcagcgggttatacgcggccaggttgctggagaaagcgggtattaactacctacttctcgaaggccgtgagcgtatgggggggcgtatcttgcaggcgaataccgttgaggctgatttaggcgcgacctggttctggccaacgatacaacctgcattgaagcagttattcagagaactgaacattgagtcattcagtcatcaggagaggggggacatgctttttgagcgttccaaagatgccccttctcgccatcctggatttgtctcttcgcctgccgccgcccgtgtaagtggtgggatgtcacgattgcccgatgcattacttgcgaagttaaagcctgaacgcattcagaccggactgcaggttaaacacatcgaacagcaaaatggcaccctgaatatttgcggatcgtatgccgatggacgtccgtttagccggcaggcgcaacatgtactgctggcattgccccccatgctggctgcagggatcaattttttccccccgctgcccacgacgttattgcaggcatggcgtaacaccagaacctggatggccccccatgcaaagtatgtcgctgtgtatccctataatttttggcacaggaagggattatccggagaggtaagaagcaacattgggcctatggttgaaattcacgatgtttcagaacctgacaggatgtttgcgctgttcggatttattggcgtgccttttcacgagcgtcagaagataggtgacgcggtcctgagagatttatgccgagcccagttgataagactgttaggcgaggaagccgcctatccccatgctgagtttcttaaagactgggcggcggatccctttacctcaacctcgcgcgacctggccctacccgcagggcattctgtaccacccgccagcgcaaataacggctcgtggcgtaactgtcttaccggtatcgctagcgaatggtccaccgtctttcctggctacctggcaggagcgattgatgccgctgcggcaggcgtacaacacataatcgagaacaaaagatga

SEQ ID NO: 216453 - DNA, 582 bp, Klebsiella pneumoniae
atgttggatcgcatcggtggtgagcaggcccgcgccaccagcctggttcgttatttacctcagacatcatttccggaacatcagcatcccggtggagaagagatccttgttctggaggggcaattctcggaaggcaaccgtgattatcccgctggctggtatttgcgtaaccctccgggctcctctcaccagcctcacagcaacaaaggcacgcagctattcgtcaagcttggtcagatgacaaaacgagaaactgttccgctacgtatcgatagccgtgcgcctgaaaactggcgtgaggatggcggaatgtcaatttgtccgttgtttgagagcgcagaagaacgagtttgtctgctgcgtatggattctggttcgctgctggttgccccctctttgaagggaggggctgagttgctcatcgtcgaaggtaacctaattgagggcaacagcatccatgctaaagggagctggatacgcatcccgtccgggcatggaatggcgtttattgccgggatcgacaaaagcctggtgtatctcaaagaaggccatctcgatgttgagcaggtaacgctaccatga

SEQ ID NO: 216454 - DNA, 339 bp, Klebsiella pneumoniae
atggttcactggactgaaatgcggaaagaactccgggcagcgatcgggaaattcgcaggtctgcaacccgatgtgatgcaaggcatcgataagatgcaaaatgcggctgtcgtaacaggccacctggacgccaaaacacatgagctcatcgcgttggcagtggcggtcacgacccgttgtgatggatgtctgtccgtccatgctgaagctgctgcaaaacagggggcgacgcgcgaagaaatcgccgaggctttaggtgtggcaatcacactgaacactggcgctgcgttggtctattccagccgtgcactggacgccttcgataacctacctaagtaa

SEQ ID NO: 216455 - DNA, 282 bp, Klebsiella pneumoniae
atggcttatttgcagatcaccctggatatcagcgaaaagaacagagcagccgctgcagcggtatatcaaaaatacaaagcaccattcctctcaacgatcgacggcgctgtttcaaaagaactgttggtacgtgccgaagatgtgcaggttctgcatagtttccacacggctaaacaggctgaagcgtatctcggatctcagttatttaccgcagatgtggttgaggcgctcaaaccctatctgaaccgcgcgcctgacgtgcgtatctacgacgttgcctga

SEQ ID NO: 216456 - DNA, 963 bp, Klebsiella pneumoniae
atgaagacacccgttcatctcaatgcactacgtgcatttgaagccagcgcgcgccaccagagcttttctcttgcagccgaggagttaaacgtcaccccagcagccgtcggacaactggtgcgttcacttgaagaagtgatcggttttccgctgtttcaccgcagcaataatcgtcgcgccgccctcgttttaacggagcctgcgctccgtgcgctccccgatatacgcatgggttttcaaagcctaaacctggggatgacgctcctgcgggagggcgcgacaaacggtattctgaacgtaaccgtcagccctgcctttgcagctaagtggttattgccacgcattgaagattttcagcataaatggcctgatatcgatgttcgcctggaaactagcctgaagttaatggacttcactgcacagggtatggatgtgggtattcgctatggtctgggacaatgggaaggattgaaggcagaatgcttgatgtcggaggaggttttcccggtgtgcgccccctccctcatatcggtgaatcctgcgattaactgtctaacgggagtcactgagcaaacgcttattcacgatctgtcgatggagcaacacaaagattttatcacctgggatcgctggttacggcgttttaacgttcagtcgatagcacgtaaacccgccttgcggataaataactccgcagcagtacttcaggcagctattgatggccacggtatcgctctggcacggagcataatggttgatgatgacatcaaaagtgggcgccttattcgcttatgtcccgatgtttcgctgacaagcccgctatcttattatctggtatacaggcccggatgcgatagtctgccgaaaattgccaattttcgagcgtggataattgagcaagctcaggcgtttaatcacgccataaatcccggcaacctctccagcaaaatcgaaccactgtaa

SEQ ID NO: 216457 - DNA, 1557 bp, Klebsiella pneumoniae
atgaacagcacctccgccgacttccagaatctgtaccaggccctgagccacagcgccgcccgcagcccggatgccctggcgctggcgtttgaggatcggcgctatctgtaccgcgattttcatctgcgggtacagcgggcgatggcgcagcttgatcgcggctggtcgctgcgcaaaggcgaccgtattctgctggcctggggcaatcaccccgctttttgcgaagtcctttttgccgcgctgggtttgggcatcgaagtggtgccgttcagcaccaagcttaagcaggccgaaagcgaggcgctggtaggccatatcgctccccaggttgtcctgttcgatgcgaccgtacaggactggctgaaaaacacccctgacgcgcgtgcggtttcactcagcgaatggcaggcgctctgccttcccgaaccgctgacccgcccgccggtcccggttaaccgcgacgatacggcggtgatgatgttcacctccggcaccaccggagagcctaaaggggcgattatcacccacaataacctgctctgcgcgattgacgcctatacgcaaaaactgaatctcaccgccgcggatagcaccattctggcggtgcctatctatcacatcaccggcctgtcggcgctgctggcgctgtttattagcctcggcgcgagcatctggctgcagcatcggttcaatgccccgcaggtgatcaccaccctgcgcgagcagaacattacctttctgcacggctcgcccaccatttttatccttctttgccaggctgcgcgtgagcagagcgtcaaccatcccagcgattttccggcattgcgcacgattgcctgcggcgctggccacctgagcgatggactgatcaaggagttaaaaaccctgttcccgcataccgcgattcagccgatctacggcctcaccgaaacgacctcgcctgcgacgatttttccgggcgacgtctggggcagcgataaatgcggcagttcaggtcaggcgatcccgggtctcgccattaccatccgcaacgatcgccagcagcccctccccgccggacaaatcggccatatctggctaaaaggcgatgtggtgatccgcgaatactggcagcacagcgagcgacgcccgagctgcgatgcgcagggctggttttgtaccggcgatctgggctatctcgacgacgaaggctggctgtacatcaaagaccgcagcaaggacatgatcaatcgcggcggcgagaaaatttactcactggagctggaaaacattctctctacctatcggggagtacgggaagttgccgtcatcccgacccccagcccggtctacggcgaagagcccgtggcgtttatcgtgccggatggccagcatcacctgaccagcgaagagatcctcgactggctgaaggtcaaaatcgcccgctttaagctaccggcgcgcattattttcacccgtgctttaccgcgtacccacaacggcaaagtgagcaaacagcagctcaaaacgcgtctcgcagaatccatcatcacgctatcaacggaggataaaaagtga

SEQ ID NO: 216458 - DNA, 1338 bp, Klebsiella pneumoniae
atgtccgcaataaatgaaaaggcggtaaacgggacgcagctgcaacgcacccataaaaaaatctaccgccatttgatgccgctgcttatcgtggcgtacatcatcagctttattgatcgtaccaatattggcatggcgaaagcgaccatgtcggtggatatcggcctttccgcaaccgcattcggcctcggggccgggttgttttttctcacctacgcagtgctggagatccccagtaacctgtttctcacccggattggcgcacggcgctggatagctcgcatcatgattacctggggcatcctctcctgcggtatggcatttgtcaccgggcctacgtccttttacgtgatgcgccttctgctcggcgccgccgaagcgggactctatccgggcattatttactacctcaccctctggtttggccgcgaagagcgcgcaaaagccaccggcctgttcctgctgggggtctgtctggccaatattatcggcgcgccgctgggcggattgttattaagccttgatggcatgtccggctggcacggctggcagtggatgttctttatcgaagggctgcctgcgatagcgctggcgttcgtcgtctggcgcagactgccggataaaccagccgacgcccgctggctggacagcgacgatgtgcaagccattaacgcggtactggcgaaagaagccgaggaaacgcgccatacgccgagccgtttctccctgaaaaccgcgctgtccacccgagtgtttttgttgctggtgctgatttactttacccaccagttttcggtttacggcctgagttatttcctgccggggatcatcggtagctggggccagcttactccgctgcagattggtctgctgaccgccatcccgtggattgccgccgccgcgggtgggatcctgctgccgcgattcgcccgcacggaacagcgttcccgcagcatgctgatggccggatatctggtcatggcgaccggcatggcgattggcgccattgccggccacggtgtggcgctgcttggcttctcgctggccgctttcatgttcttcgctatgcaatccatcatctttaactggctcccgtccatcatgagcgggcatatgctggcgggcagcttcggcctgctcaactgcctcgggctgtgcgggggctttctcgggccgtttattctcggcgcgtttgaggaccgcaccggtgcggcaacgtccggcttatggttcgctgtcgcgctactgattatcggcgcgctggtgtccctgtttctcaaaagttcctcatccccaggctccgtatcggcgaaacaggcccacggtgaaaaagtgtaa

SEQ ID NO: 216459 - DNA, 1398 bp, Klebsiella pneumoniae
atgagcggaaaaaaagggcgcagcatggctggcctgccgtggatcgcggcgatggccttctttatgcaggcgctggatgccaccattcttaacaccgccctcccggctatcgcccacagtcttaatcgttctcccttagcgatgcagtcggccattatcagctatacgctgacggtggcgatgctgatcccggtcagcggctggctggccgatcgcttcggcacgcgccgggtctttatcatcgccgttagcttgttcaccctcggttccctcgcctgcgccctctccagttccttaacggaactggtcatttttcgcgtaattcaggggatcggtggggcgatgatgatgccggtggcgaggctggccctgctgcgtgcctacccccgcagcgaactgttgccggtcctgaactttgtcaccatgccgggattggtggggccgattctgggcccggtactcggcggggtatttgtgacctgggccagctggcattggattttcctgataaacattccgatcggcgtaattggcattctgtacgcccgtaaatacatgccaaatttcacaacgccgcgccgacgcttcgatataggcggttttctgttatttggcttaagtctggtgttattttccagcggtattgaactgtttggggaaaaaatcgtggcgacatggcaggcgctggccgtgattgccgtcagtctgttactgctcgtggcctatgtgcgtcacgcgcgtcgccatccgacgccgcttatctcgctctctttatttaagacccatacgttctcggtcggcattgccggcaacctcgccacgcggttgggtaccggctgcgtaccgtttctgatgccgctgatgctgcaggttggtttcggctatccggccattatcgccggctgtatgatcgcccccaccgctatcggctcgattattgcgaaatccaccgttacccaggtgctgcgctggtttggctatcgtaagaccctggtggggatcaccgtgtttattggccttatgatcgcccagttctcgctgcagtcgccagagatgccgctgtggatgcttcttctgccgctgttcgtgctggggatggcgatgtccacgcagtttaccgccatgaataccattaccctggccgatctgaccgatgataatgccagcagcggcaacagcctgctggccgtcacccagcagctttcaattagtctcggggtggccatcagcgctgcggtgctacgcttctatgaaggttttgataatgcaagcacggtacagcagtttcactacacctttataaccatgggcgtgataaccattatatcggcgctgatgtttatgctgttaagagcgaaggatggccgcaacctgattagcgagcggcataaacgctaa

SEQ ID NO: 216460 - DNA, 327 bp, Klebsiella pneumoniae
ttgttaactcccagtcatttcactttcgtcttccagcagccacaacgggctggcacgccgcaaatcaccatcctcggccgcctgaattcgctggggcatccccgcatcggtctcaccgtcgccaagaaaaacgtgaaacgcgcacatgaacgcaatcggattaaacgtctgacgcgtgaaagttttcgtttgcgtcaacatgaactcccgccaatggatttcgtggtggtggcgaaaagaggggttgccgacctcgataaccgtgctctctcggaagcgttggaaaaattatggcgccgccattgtcgcctggctcgcgggtcctga

SEQ ID NO: 216461 - DNA, 1293 bp, Klebsiella pneumoniae
atggaattagcgggttgccaggtgatggcgaaaccgacgggatcggtgtgtaatatcgattgtacctactgtttttatctggaaaaagaagcactgtatccggaacgaaacaaaaactggcggatgtcggatgagacactggagtgttacattcgccagcatattgaggcccagatgggagagacggtgaccttcgcctggcaggggggcgaaccgactatgatggggttgccatttttccgccgggtggttgcactaagtaaccaatatgccaggggcaagaagatagaacacgcgctgcaaaccaacggtatgctcgttgatgaagagtgggcacgtttctttgccgaggagcattttctggttggcatctccattgatgggccagcacatctccataatcagtaccgtgttaatcgtgccggtaaaggtactcacgataaagtgatggcggcgattgcacttctcaaaaagcatcgcgttgagttcaatacgttgaccgtagtgggtaaacataatgtggggcacccgcgggaagtctatgatttcttgcttgccacgggttcacgtcatattcagtttatccccctggttgaacgcgtcagtagcgacgaatcatcactcctgcagctggttatgccgggagaaagcgccgccaggcttgcttcctggaccgtgccatcatggcagtttggcgatttcctgaatcagatattcgatatctggatccggcgcgatgtcgagcgcgttattgtgcagatgtttgaggtcgccctggcggcgtggatgggccagcccccggttttgtgtgttcattcgccaacgtgcggccacgcttttgccctggagtcgaatggcgatctctacaactgcgaccactatgtttatcccgagcataagctgggtaacattcatcattcggacattaagacgctcaataacagcgaacaggcgatagcctttggtcaggcgaaaagggagacgctaacggcggagtgccgaagctgcgaatttcgctttgtttgccacggtggctgtcccaaacatcgttttgcggtttcgccgagcggccatccagggcacaactatctgtgtgccggttataaacactttttccagcacatcacgcggtatatgaatgtctgtcagcagttgctggaagcagggtatccgctggcggcaataatgccatggcttgctgacgaggagcgaaagccgtcgaagacgcgttctcgaaacgaaccatgcccctgcggcagcggtaaaaaatataaaaagtgctgcggcggataa

SEQ ID NO: 216462 - DNA, 348 bp, Klebsiella pneumoniae
atgacgttgtctctccgcacacgtgatcctggcctgcaaccggagcgtaccgcgcttgcctggcagcggactctgttttcggtttttgttctggcactagcctcgacgcgttttggtttcgcccgcggcgacctggtttccggggggattgccggtatcgctctcgggctaaccgttatactggcgatcgtcgtgcgaaatcagcagcgtcaggttggcggaaacacagcattaacgacatttgcttccgtcatgataaaacgcttgttgagtgtcgtactcggcttagaagctatttcgttggtgctatccgcggtcttgagcctgttaagggaaggagtcgtttag

SEQ ID NO: 216463 - DNA, 345 bp, Klebsiella pneumoniae
atgagctggctgacacagggaaaggatcccgactatcgtttctctcttgcgaatgaacgtacgtttctggcatggatccgcaccgcgctggcctttatggctgccgcgataggcatcgatcagctcgcggaaaatctggcgccctcaatggttaaggaattactggtgtgcgcgttgggcatcacggcggcgattctcgcgtggtacgcctatcttcgctggtccgggaatgaacgcgccatgcgcgatgacgcggcgctgacctaccctcgtctattgatttggttaagtgcaggtttagcggcggtgatgatgatgacattgggagtgatgcttctgctatga

SEQ ID NO: 216464 - DNA, 729 bp, Klebsiella pneumoniae
atgaaagaagaactggattattcgccaggagccaaaccgctctatgctcagttgcacgatattttgctgggaaaactgaaagccggagaatacaaaaagaacgatgtgctgcccactgaggctgagtttgaagagatctttggcgtcagccgtatcactgcccgtcgtgcgctcgccgagctggccgccaaagggttggtaaaacgacaggccggcattggcaccatggtgatcagcacttcagagaagcaggaggtgaaggcccggatacggctggttgatgggcaacagcagcatcccattgaacgtaacaatctcaagctggagcaacttgtgccgccagggggagttgctcaggcgtttgaacttaatgacgataagacaccgctgtggttgttaacccgcaccatctaccgacaaaacgagcagcctgcgcaagtgaactacatctggctaacgacgcgtctgcaacatcttacgcttgatgcactgaagaatggcctttacagcatgctggaaaataataatgaaaatattgaaagtttccaggatgttattaccgccgagatgcccacggaagacgattgtcgcatcttgcatattgatactcgtgagccgctgttggtgaaaacccgaaagggttacaacgatcgtggggaattggtggaattcagcatcgcgaagcatattgcaagttgctatcaatatattgttgagaatagtcgatga

SEQ ID NO: 216465 - DNA, 1746 bp, Klebsiella pneumoniae
atgaaagcaattatgttgatgtttgattcgcttaacaaacgtctgttgtcagcttatggaagcgatcgcgctatcacgccgaatttccagcgcttaaaagaacgcacggtacgctttgataatttttatgttggcagtatgccctgtatgcctgcccgcagagagttacataccgggcgctacaactttctccatcggggctggtcgccgctggaaccgtttgatgattccatgccggaaatactgaagaaaaacgggattcacacccacctggtgaccgatcataagcactattggcgggatggcggagcaacctaccactctcgctacagtacctatgagtttattcgcgggcaggaaggggatgcctggaaaggtgtcgttgataaacctgaatatcgctacgagtcaggggaacctgaggagatcaagcagcgccgtatcaccagccgggtccagcatcagattaacgtacagtttatgcagaatgaggaggatcaccatctggcgcggacaatcaataaaggtctggagtttattgataccaaccatgccagcgataactggttcctgcagttagagtgttttgatcctcacgagcccttcttcgtaccggaaaaatatctgcggatgtacgggattgatgatccctcacagttcgacgggtggccaccttactatttcgtgacggaaagcccggagcggaaaagcgtcatccagaaatactatatggccctgctgacgatggtggacgcctacgtgggtaaagtgctggactatatggatcattacgatctatggcaggacacgatgcttatcgtcaatacggatcatgggttcctgcttggcgagcatgaatggtgggggaaaaacatcatgccactgtataacgaagtggccaatataccctgctttatctggcatccacagcatggttgcgcgggagagtcacggcaggcgctggcgcagacgattgatataccggcgacgctgcttgatagctttgggctgcccaaaccgcaagatatgcagggggtatctttactgccggtactgcgtgatgacacgccggtccgaaattacgcgctgtttggctatcatggctgccacatcaatattaccgatggccgctacgtctatatgcgcgccccagtcactcaaggtgtgagcggtttgtacgaatataccttgatgcctactcgtattaatcgacgctttacgccgagcgaattacagggcatgacgctgcatcccccattcggttttaccaagggatgcaaggtactgaagatccctgcggagtctgtaatgacgcgcggggcagatcgatttggtcatcgtctttacgacctgcacgacgatccgctgcagcaaacgcaaagccgtgatactgccgcagcagaacgtctctgcagcagcatgaaagcgatgatggcgcagagcgacgcgccatcggagctgtacccacgctatggcctggaggatgctggagggccattgttagggttggatccgtatctgttgcctgaactggccgcctttgcgccagttgtccgctacggtctctttgcgctattgcaacatctggaaggaagtggccagacagaactgatggcgcagctccagtccaccagccagccaggctggacgacagaaaatttgtgggccttcgtccagaacgaggttccgcaggagcagcatcaaagcgtgtactataaaatggcgttagaaatgaggcttgattaa

SEQ ID NO: 216466 - DNA, 1416 bp, Klebsiella pneumoniae
atgaactacaacatggtgggggacgccatcgttaagcactgtggcgggctcgctaattttattcatgtcaccaactgtatgacccgggtaagaatgaccatcgccgatacatccctggtggatatgactgccttgaaagcgatcgagggggtattaggcgttgtcgaagacgataccctgcaggtgatcgttggtccggggaaatcgacaaaagtggctggggttattaatgctcgtttaaagggtcagccagacagcggagaggcgttaagcgccgttgagcaaaaagcgaaaacagcacgtgaaaaagccaaaaaacagacccggactaaagtcatactcaaacatatcgccaatatttttgttcccattctgcccgcgctgattgcagccgggattttaatgggactgaacaatgtgatattcaactcggcagcgtcctgggcgttaacccatcatgttgcttcagtgggcgatctttccccgactcaggtggtactcgatcagcgccatcttttgggtctaagccagtttcttgatatcgtctcgaaagcgctatttggctttttagccatctatgcgggggtaacgtcggcacgagagtttgaaggtaacctgattctgggtggcctgctgggcgccattaccatcatgccgcaggtgacgaccttcggactgatccccgggcagggtggccttatcggtgtgatctttgccgtctggttaatgtgcctgctggagaaaccagtacgtcgatttgttcctgatattgtcgatgttgtcgtcacgccaacgctggtgctgttggtcatggcggcagccctcctttttattattatgcccgcggccggtattgtgtctaacgggatactcagcggtctgaacggcctactggagcatggcggtattgtcgctggctttgtgctttcggcgctgttccccttcctgatatcgctaggtttgcatcatggtttgttcccgatccacctcgagatgattaacgccactggccatgcccctctgtttgctattcaaatcatgtctaatgccgggatggtcggcgcggcgacagcggttctcttgctgacgcgcgatccggtgatgaagaagattgccaggggggcgatcccaacctccattctggcggtgggtgaaccgacaatatttggcgtcaatatccccgcaggatttgcgtttattaccggctctattggcgccggtttcggtggggtaatggtggtactgcttggcgtatccacaaacggggtcggcgcggcggggctgtcagcacttccgctgattgctgatgggaaatatcttcagtacatcctggcatggctggttggctgtgcagcggcttttgctttgacttacatcgtcggcaaagttcgcggttacgataaagaaacggtgtga

SEQ ID NO: 216467 - DNA, 801 bp, Klebsiella pneumoniae; identical to SEQ ID NO: 213762

SEQ ID NO: 216468 - DNA, 996 bp, Klebsiella pneumoniae; identical to SEQ ID NO: 15684

SEQ ID NO: 216469 - DNA, 1089 bp, Klebsiella pneumoniae; identical to SEQ ID NO: 15683

SEQ ID NO: 216470 - DNA, 495 bp, Klebsiella pneumoniae; identical to SEQ ID NO: 15682

SEQ ID NO: 216471 - DNA, 1881 bp, Klebsiella pneumoniae; identical to SEQ ID NO: 15681

SEQ ID NO: 216472 - DNA, 1020 bp, Klebsiella pneumoniae; identical to SEQ ID NO: 15680

SEQ ID NO: 216473 - DNA, 2247 bp, Klebsiella pneumoniae
atgggaataaaaagtatacggattaaaaacatactctcctttgatgacgtatatattgatagctttgaagattttaatttgattattggtagaaataactctggaaaatcaaatcttttaaaagtatttaaatacttttatgaaaaattagacgagcaacggagcattcctcttactctaaattcgaattacacgccctctggaataataacaattacatatgatacaacccggataaagaaaatagtaaccagcactaataataactctcgatttcataaacatatatacaacactctttttaaagaaccaaataaaaataaattcaccgcacttttcgcacccgaaagaaaaaaacaaaatagcgaatattccttaacacttacaatatcaaatgatgactcaatatcatggtctacgaaagataaaaaacttttatccctaattaaaattatcttcccttttttttatatagacacacgtagaatggatttatacaactgggaagacatatggagaataataagtagcattaactccttcaactttcagaaaataagcgaagatgaaatcctgaaatttttagatgaaaatatttcatctagagatggcgactacaaaaaatacatcactcgcattactgatgtaattgacacaaaaccatacacctataaagagaaagtaattaattatattaagatagcattgaaaggtcatgttttcacgaactcaggtgaagatatccttcatcagtctgatggaacaaattcacataaatatattgaaacaattattaagttgctcatttcgttatcacgaaccgagttcataacacctaccatatatatagacgaacccgagataggactacatccaaaacttggcgagcaatttattacaacaattcacacaacttataatagatataaaaaaagcgttcccgaaaaggaatcaggaaaatactcaacaccttatccttgtttaattttcagcacccatgcaccaaatattttaaagcaaactattaaacttttttcaacagatcagcagattttgcatttttctaaaaagaataaacactccacaaagatatctaaattaaaatcacaatatagtgatttgcgttttataaatatgtttagcgataatgaagctagactttttttcagtgagtatattcttttcgtagaaggttccactgaaatggaagtcttccaaaatagttctttagctagaatttatcctgatttaggcaggattgacatatacgccagtgatgatgttatgttgagaaatataaacccaacttattctcaagcagcaattccttttttaattgttaaagatatagacaaggtgattaagcttgactataaaaatgaaatattaagtctggatggtgatgtttctctagttaataaactaatacgaaaaggcagtttaaagttttataatccatccttaataaaaaaaattgacagcgcaaaggaaataataagagcggataagtctaagaaggaaatgtcggttgatggcttgtttttcaaaacatttaaaattgaaaattttgtgagggatttcaataaactgttaaaatcatttaaccttaattatatgacaactacaatagagggtgcattaataaatgagcattctttaaaatacttttacagatggatttgtcatatcgtttttaaccagctagacgtcaataatgaaaaccctaaaaaaatgtttgctggcttaatgagaacgtacaatcttaaagatggagctataagtatattaaattcggcttttgttctctcaactcatttaagtatattagatccagtggagcaaaagctggtattcaaggttaaaaaaagggctctttttttaattaaaaaaagcattaaaggagattttaaaaacaataaagaaattacaaccctatttagacttctttttggaggaaaaactgccacacttataagtttagaaatgaatctgaaaaaaagctgtcaaagaatagacccatctattacagccacaataaagaaatataaaagcaatgagcttaaattcttactcccctataccacaaaaactagtggctgggttaccagttttttggattttacgatagctaagttagagcaagaaaatgctgataagatagccgagaatttacgcttccttttccctgaaattatatctataatagagcaagcttcttcttcgatagatataggggagtttcactga

SEQ ID NO: 216474 - DNA, 1101 bp, Klebsiella pneumoniae
atgaaagaaaaaataagcaagattgataaaaatttctatactgacatttttattaaaacatcatttcaaaatgaattcgaggcagggggagttataccaccaattgccaagaatcaagtatcaacaatcagtaacaaaaataaaacattctattctctagctcactcatccccacactactctattcaaaccagaattgaaaaattcttacttaaaaatatacctttaagtgcatcgagttttgcattcagaaaagagcgctcatacttgcattatttagagcctcatacccaaaatgtcaaatattgtcatcttgacattgtttcattctttcatagcatagacgtaaatattgtacgtgatactttttcggtatacttttccgatgagtttttggtaaaagagaaacaatccttattagatgcattcatggctagtgtgactctgactgcggagttagacggggtcgaaaaaacattcattccgatgggatttaaatcttccccatcaatatctaatattatttttagaaaaattgacattttaatacaaaaattttgtgataagaataaaattacttatacacgatatgcagatgatcttttgttctcaacaaaaaaagaaaacaatatattaagcagcactttttttataaatgagatttcatccattctctccattaataaattcaagttaaataaatcgaagtatttatataaagaagggactatttctttaggtggatacgtcattgaaaatattttaaaagataacagcagtggaaatattagattgtcgtcttcaaaattaaaccccttatataaagcactatatgaaatcaagaaaggtagctcttcaaagcatatatgcattaaagtatttaacctaaaactcaaaagatttatatataaaaaaaataaagaaaaatttgaagccaagttctactcatcgcaactgaaaaataaactcttgggatatcgttcttatctgctttccttcgtaatattccataaaaaatacaaatgcattaatcctatttttttagagaaatgcgtatttcttataagtgaaattgaatctataatgaacaggaagttttaa

SEQ ID NO: 216475 - DNA, 870 bp, Klebsiella pneumoniae; identical to SEQ ID NO: 15677

SEQ ID NO: 216476 - DNA, 252 bp, Klebsiella pneumoniae; identical to SEQ ID NO: 15676

SEQ ID NO: 216477 - DNA, 477 bp, Klebsiella pneumoniae; identical to SEQ ID NO: 15675

SEQ ID NO: 216478 - DNA, 2103 bp, Klebsiella pneumoniae
atgccccgacccatccctctcgaacgttatcgcaacatcggtatctccgcgcatatcgatgccggtaaaaccaccaccaccgagcgcatcctgttttataccgggatgagccataagctgggtgaagtacacgatggcgcggcaaccaccgactggatggcccaggagcaggagcgcgggatcaccattacctcggcggcggtaagctgcttctggccggggatggaccgcagcttcgagccgcaccggatcaatatcatcgacaccccggggcacgtggatttcaccattgaggtggaacgttctatgcgcgtgctcgacggcgcggtgatggtgtacgactccgtcggcggggtgcagccccagtcggagaccgtctggcgccaggcgaataaataccacgttccgcggctggccttcgtcaacaagatggaccgccccggcgcggacttcttccgcgtggtgcagatgatgatcgaccgtctgaaggctaacccggtgccgattgtgatacctattggcgctgaagagcatttcaccggcgtcgtcgacctggtgaaaatgcgcgccatcctgtgggatgacgccacccagggcatgacctttagctatgggccagtcccagacgatctgctggcgacggcgcagcagtggcgggagaaaatggtctcggcggcggcggaagccagcgatgagctgatggataaatacctggaaaccggtgagctggacgaggcggagatcgtcgccggcctgcgccagcgcacggtgaagggggagatccaggcggtgctctgcgggagcgcctttaaaaacaaaggcgtgcagcgcatgctcgatgcggtggtggagctgatgccatcgccgctggatattccggcgatacagggcgtcgatgagcaaggccagccggcggaacgccatccgagcgacgatgagccgttgtcggcgctggcgttcaaactgatgaccgacccctacgtcggccagctgacctttatccgcgtctactccgggacgctgaagaaaggcgatgcggtgtggaacccggtgaagggtaagaaagagcgcatcgggcgtatcgtgctgatgcaggccaacgaccgtcacgaagttgacgaactgcacgccggggatatcgcggcctgcgtcggtctgaaggatgtgaccaccggcgatacgttatgcgacccggatgcgatcattaccctcgaacggatggagtttccggagccggtgatttcgctggccatcgagccgaagaccaaagcggaccaggagaaaatgggcatcgcgctgcagcggctggcggcggaagatccgtcgttccgtctgcataccgatgaagagtccggccagacgattatctccggcatgggtgagctgcatctggagatcattgtcgaccggatgaagcgcgagtttggcgtcgaggccaacattggccgtccgcaggtcacctaccgcgaaaccctgcgcaagaaagtgacggatgtggaaggcaaatttgtgcgccagtccggcggcaaagggcagtatggccacgtcgtactgaccctggagccgctggagccgggcagcggtttcgtcttcgaggacgccaccaaaggcggcgtggtgccgcgcgagtacatcccttccgtggagaaagggctgcgcgaagcgatgggcaccggcgtgctggcgggttatccggtggttgacgtgaaagcgaccctgaccttcgggtcgtaccacgacgtggactcctcggagatggcgttccgcatggcggcgatcttcggcttccgggagggcgcgcgcaaagcggacccggtgatccttgagccggtgatgcacgtcgaggtggagacgccggaagagtacgccgggaatattatgggcgatctctcttcccgtcgcgggatggtgcaggggatggaagagcgcttcggcagccagatcatccgcgccgacgtgccgctggcggagatgtttggttattccaccacgctgcgctcgatgtcgcagggacgggcaacctacagcatggagttccaccattacgcggaagcgccgcgtaatgtggcggatgaaatcatcgccagccgcgcgaaaagctaa

SEQ ID NO: 216479 - DNA, 891 bp, Klebsiella pneumoniae
atgaaaccactgctggatgtcctcgtgatcctggatgccctggaaaaagaggggagctttgccgcggcgtcggcaaagctctttaaaacgccctcggcgctgagctacaccattcaccgcctggaaagcgatctcaatattcagctgctcgaccgcagcggccatcgcgcgcgctttacccccagcggacagatgctgctggagaaagggcgggaggtgctgcatatcgcccgcgaactggagatccgggcggttaagctgcagcaggggtgggagaatagccttcgtctggcggtggacagcacctttcccgtggcgctgctctcgccgccaatcgctgcattttatcaacaacagccgctgacccggctgcacttcacgctgaacccctccctgctggactggcggccgctgactgacgggcaggccgatctgctgctgggggcgctcggcgagccgccgccgctgagcggttatgactatctccccctcggcgagctggagctgctgctggtcgttgccccacagcatccgctggcgcgacaccgcgcaccgttgagctggcgaaccctgcgccgttatcgggcggtggccaccggcgagggcggggcgctactcagcgatcaggagaccctgacggtgtgtgacgccgcggggcagctggcgctgctgcgcctggggctgggctgggggtgcctgccgcgctatcaggtgcagggtctactggacagcggcgagctggtctgcatgaccgtgcgcgggctgtcgcctcgtcaacgcgcatggattgcctggaatgacgccacctgcggtttggctggcaaatggtggcgggaaacgctattagcaaatagtgctatttttacaatttatcatacggaaaccgtatag

SEQ ID NO: 216480 - DNA, 591 bp, Klebsiella pneumoniae
atgaatgtggtgatccttgataccggctgcgccaacctcaattcggtgaaatcggcgattggccgccacggctatgagccggtggtcagccgcgatccggaagtggtattgcgtgccgataaactgtttcttcccggcgtcggcaccgcccaggcggcgatggatcagctgcgcgaccgggagctgatcgacctgatcaaagcctgtacccagccggtgctggggatttgcctgggcatgcagctgctcggcaagcgcagcgaggagaacaacggcgtcgatctgctgggcattatcgaagaagcggtgccgaagatgaccgaccacggtctgccattgccgcacatgggctggaaccgggtgtatgccaaagctggcgatcggctgttccgcggcattgaagaaggcgcgtatttctacttcgtgcacagctacgccatgccggtcaacccgtacaccatcgcccagtgcaattacggcgaggcgttcaccgccgcggtgcagaaagataacttctttggcgtgcagtttcacccggagcgctccgggagcgccggggcacagctgctaaaaaacttcctggagatgtga

SEQ ID NO: 216481 - DNA, 1317 bp, Klebsiella pneumoniae
atgtctgaaagatcttcaagtgcactggtctctgttgtgatacctgtgcacgatgctgcagaatatatatctgatacgctaagtaccattttatcgcaatcgttacaggatattgaagtcatcattattgatgacaattcagctgatgatacgttaaagctactgcagtcctttgccgctaatgactcgcgaatacgtcttttgaataattcgcagaatatcggtgcaggtgcatcacgtaacatggggttaaaaatagcaagtggcgaatatatcatttttcttgatgatgacgattatgccgatgctaatatgctcaaacggatgtatgatcatgctgcattgctgcaagccgatgtggttatctgccgatgccagtctttagatctacaaacccattcatatgcaccaatgccatggtctgtgcgcgtagatttactcccccaaaaagaactattttcatcagatgaaattactcataatttctttgatgcatttatctggtggccctgggataagcttttccgtcgccaggctatactggatactgggttacaattccaggatttaagaacgactaatgatttattttttgttagcgcttttatgctacttaccaaaagaatggcgttcctggatgagatcttgatttctcattccattaaccgcagtggttcattatcggtgaccagagagaaatcatggcattgtgctcttgatgcgttacgtgccctctattcctttattgactcaaagcacttgttgccttcacgtggtagagactttaataattatgcagtgacttttcttgagtggaatttaaatacgatttctggtccggcgtttgattctttattcactgcttcacgcgaattcatcgcttcattggatattgatgaaagtgatttttatgatgattttatcaaagcggcacactatcgcctgattcggttaacgccggaagagtatcttttctcgttaaaagatcgggtattacatgagcttgaatcctctaatttatcttcagagaagttgcaagccagtattgcttctcaggatcaagttcttaaagccagggaagaagaaattgatgagctaagagcgtccgttgcagagaaaaaagaacgtattgataggttggtccagcgaaatgcatatttagagactgagtatcagaaacagcaagatcaattaactaaactacaaaatgaattaaataacgctgctcaacgttattcagcccttatttcatcattgtcatggaaagttacaagacctttaaggttaatcaaagcgttaatcacgaggaaaatgtaa

SEQ ID NO: 216482 - DNA, 1134 bp, Klebsiella pneumoniae
atgagaaaactgtgttatttcataaattcggattggtacttcgatttacactggatcgatcgtgccatcgcctcccgtgatgcaggttatgagattcacatcatcagccattttattgatgacaacataataaataaattcaaaacattcggttttatttgccataatgttactcttgatgctcaatcttttaatgcattagttttcgttcgtacttaccatgatgtgcaaaaaattattaaaaatataaaaccggatctcttgcattgcatcactatcaagccatgtttgattggtggtgtgctcgcgaagaaatttaatctgccggtcatcgtaagttttgttgggcttggaagagtattttcttcagacagcatgcctttaaaattattgcggcagtttactattgctgcatataaatatattgccagtaataagcgctgtatatttatgtttgaacatgaccgtgacagaaaaaaactggctaagttggttggactcgaagaacaacagactattgttattgatggtgcaggcattaatccagagatatacaaatattctcttgaacagaatcacgatgtccctgttgtattgtttgccagccgtatgttgtggagtaaaggactgggcgacttaatcgaagcgaagaaaatattacgcagtaagaatattcactttactttgaatgttgctggaattctggtcgaaaatgataaagatgcaatttcccttcaggtcattgaaaattggcatcagcaaggattaattaactggttaggtcgttcgaataatgtttgcgatcttattgagcaatcaaatatcgttgctttgccgtcagtttattctgaaggtgttccgcgaattcttctggaagcatcttctgtgggtcgcgcttgtattgcttatgatgttggtggttgtgatagccttattattgataacgataatggaattattgttaaaagcaattcacctgaagagctggctgataaacttgcctttttgcttagcaatcctaaagcacgcgttgaaatgggtattaaaggacgtaagcgtattcaggataaattctcgagcgggatgattattagtaaaacgctaaagacttatcatgatgtggttgagggatag

SEQ ID NO: 216483 - DNA, 894 bp, Klebsiella pneumoniae
atgaaatatacggcattgatagtgacattcaatcggctcggtaaactgaaaaaaaccgttgaagagaccctcaaacttgaattcactaatattgttattgtcaataacgggtccacggatgggacccaagcctggctttcgtcaattgttgatacgcgagtcattgtattaaccctcaccgagaataccggtggggcggggggctttaaaaccggtagtcagtatatctgtgaacagctggcaagtgattgggtatttttctacgatgacgatgcttacccctatccagacacgttgaagtccttttcacagctggataagcggggatgtcgggtatttagtggactggtgaaagatccgcaaggaaaaccgtgtccgatgaatatgccgttctcgcgtgtgccaacttcccttggcgacactgtacgctatttacgctaccctggagagtttatcccggcagctaatcgttctatgttcgtacaaacggtttcatttgttgggatggtcatacatcgtgatctgctcgcgaccagtcttgactacattcgcgaacagctctttatctactttgatgatctttactttggctatcagctatcattagctggtgagcaaattatgtatagcccggagttgcttttttatcatgatgtgagtattcagggcaaacttattgcacctgaatggaaggtttactatctatgccgtaatttgatcctgtccaagaaaatattccagaaaaatggcgtgtatagcaattcagcgatagcgatacgcatcctaaaatatatattaatcctgccatggcaacgtaaaaaatattcctatatgaaatttattcttcgtggaatttcacatggcataaaaggtattagtggtaagtatcattaa

SEQ ID NO: 216484 - DNA, 1155 bp, Klebsiella pneumoniae
atgaaaagtaaaaaaatattgatcgtaggtgctggcttctctggtgcagttatcggtcgccaacttgctgagaagggacatcaagtccatattatcgatcagcgtgatcatattggggggaattcctatgatgcacgcgactctgaaacgaatgtgatggtacatgtttatggaccccatattttccatactgacaatgaaacagtgtggaactatgtcaacaagcatgcagagatgatgccctatgtgaaccgggttaaagcgacagttaatggtcaggtattttccctgcctattaatttgcatactatcaatcagtttttctcaaaaacttgttcgcctgatgaggccagagcgctcattgctgagaaaggggacagcactattgctgatccacaaacttttgaagagcaagcgttacgctttattggtaaagagttatatgaggccttttttaaaggatatacgattaaacagtgggggatgcaaccctccgaactgcccgcatctattcttaaacgtcttcctgttcgttttaactatgatgataattattttaatcacaaatttcagggcatgccgaaatgtggttatacgcagatgattaagtccattctcaatcatgagaatatcaaagttgacttacagcgggaatttatcgttgacgagcgagctcattacgatcacgtattctatagcggtccattagatgcgttttatggctaccaatatggccgtctgggctatcgaacattagattttaaaaagtttatctatcagggtgattaccagggatgcgcagtgatgaactattgttctgtggatgtgccctatactcgcatcactgaacataaatatttttctccctgggaacaacatgacgggtctgtttgttataaagagtatagccgtgcttgtgaagaaaatgatataccttactatcctattcgccagatgggagagatggcccttcttgaaaaatatttgtcactggccgagaatgaaaccaacatcacttttgtcggtcgtcttggaacctaccgttaccttgatatggatgtgaccatcgctgaagcattgaaaacggcagaagtctatttaaattcactcactgaaaatcagccaatgcctgtgtttacggtttctgtacgatga

SEQ ID NO: 216485 - DNA, 1896 bp, Klebsiella pneumoniae
atgaacaatagcgttaaaatctataccagccaccataagcctagtgcttttcttaatgctgcaattatcaaacctctgcatgtcggcaaagcaaattcttataatgaaattggttgcccaggagatgacactggcgataatatttcctttaagaatccgttttattgcgaactaactgcgcattattgggtttggaaaaacgaagagctagccgactatgtcggttttatgcactatcgccgtcatcttaatttttccgaaaaacaaactttttctgaggatacctggggggtagtgaaccatccatgcattgatgaagaatatgagaagatctttggattaaacgaagaaacaattcaacggtgtgtcgaaggttttgatatcttgctgcccaaaaaatggtctgtcactgcggcgggaagtaaaaataattacgatcactatgaacggggtgaatacttacacattcgagattatcaggctgccattgccatcgttgaaaaactatatccagaatatagtacagcaataaaaacgtttaatgatgccagtgatggctattacacaaatatgtttgttatgcgcaaagatatttttgttgattattctgagtggctcttttccattctggataatctcgaagatgccatctcgatgaacaattataatgcccaggaaaaacgcgttattgggcatatagctgaacggctgtttaatatttacataattaagttgcaacaagatggtgagcttaaggtaaaagaattacagcgtacctttgtaagtaatgaaacattcaatggtgcactgaatccagtttttgattctgcggttccagttgttatcagtttcgatgataattacgcaatcagcggtggcgcattaattaattccattgtccggcatgcggataaaaataaaaattatgatatcgtcgtactcgaaaacaaagtaagctatttgaataaaacacggttagtaaatctaacctctgctcatccgaatatttctcttcgtttttttgacgttaatgccttcactgaaataaatggtgtgcatacccgagcgcattttagcgcatcaacttatgcccgtctttttattcctcaactgttcagacgatacgataaagtcgtatttattgattcggataccgttgtaaaggctgacctgggtgaactgcttgatgtccctctgggcaacaatttagttgcagcggttaaggatatcgtcatggaaggttttgtaaaattttctgcaatgtcggcatcagatgatggcgttatgccggcaggcgaatatttacaaaaaaccttaaacatgaataaccctgatgaatattttcaggcagggattattgtttttaatatcaaacaaatggtcgaagaaaatacttttgctgaattgatgcgggtattaaaggcaaaaaaatactggttcctcgaccaggatatcatgaataaagtattctactctcgagtcacatttctgccattagagtggaacgtttatcatggtaatggcaacacggatgatttcttccctaatcttaagtttgcaacgtatatgaaatttttagcagctcgcaagaagcctaaaatgattcattatgcgggtgagaacaaaccatggaataccgaaaaagtcgatttttacgacgactttattgaaaacatcgctaacactccatgggagatggaaatctataaacgtcagatgtcgttagcggcttcgattggtttaacccatagcgagccgcaacaacaaatcttgttccagaccaaaatcaagaacgtattgatgccttatgttaataaatatgcaccaataggcacgtcaagaagaaacatgatgactaaatattattataaagtacgccgtgctattcttggataa

SEQ ID NO: 216486 - DNA, 873 bp, Klebsiella pneumoniae
atgaataagttaacatcaatctatcttgatctaattcgttttacggcggccttagtggtcgtattatcacatgctgccgggtttacctcactaaaaatccccataatctcagggctaggaactgaagctgtagtggttttttttgtattatccggttatgtaattgcatatgtctctagcaataaagaaaataattacattgctttttttaaagctcgggccatacgtatatactccgtgcttgttccagctgttttaattactttaatctttgaccatattggtcttaaatataacccttcttattatttttcacattccaactttcactatgattactctatttttacattcataaaattaaattttttcttgggggaaggttttaatcaacatttggtttttggttcaaatgagcctatttggtcaattggttttgaatgtatttattatattttgtttggctcgttgctgttttgcaggaaaaaaccaatcttaatattaatattctttatatttatttttatatctttgccgaaagtgattgtttatttcccgttatggcttatgggagtggttgtatacaaaatatccaatgtaaatttcaagtattctcatttcttatttattttgacattcccgcttttctatttagcaataaaattaccattggctcatgtcccaatgtataaaccattcgtttggaatttacatcagttttcttcaattgtttatttttatttattttctctagtagtttcaattaacatttttaccgctagggctttttttgaatttactggctttaaaaaaatattaacatcatgtgagtattatatcagatatctttctggtaaaacttttacattataa

SEQ ID NO: 216487 - DNA, 1440 bp, Klebsiella pneumoniae
atgagtttatttaataatgctagatgggtagccatctctcaggtcgtcaaaatctttgttcagttaattaatattgtttacttggctaggttaatacctccaagtgaatacggtattatggctatggctttagtcattattaatttcggaatgttgattcgagatcttggtaccgctgccgcaattattcaaagaaaagatattgataatacgattataaactctattttttggctcaatttgtatatggggctaggaattgcaatatgtatcgttttgttctctcctttgatatcatattttttccgtgaaccaaagctaatcatggttttagtatgtattgctattatatttccattatcgagtagttcttcagcccatttagctttgttggaaagagactctaaatttaaaaaaatagcttcaatagaaatcacttcttcagttattggtgtctttatcgcattgtttttggcatataaaagtttcggtgtttacagtttggtttggcagacaattatattcaatgcattgtctacaattcagttttggaaagcctcaaaatggcgtccgacatttaacaaaatgttcgatttttcagggctgaaagaaatttttggttttagtgctaatttatctatctttaatttaataaattatttctctcgaaatgcagatagttttataattggcaggtacatggcatcttcagtgctcggtgcgtatagtcttgcatatagaataatgttatttcctatagcgagtttgacttttgttgcaactagagctctcttccctatactgagtaaaaaccaggatgatcatgagactcttaaaaagacgtatttaaattgtgttttttctattttgttcatcgttgtacctttgatgagcggtttagcatttcttagcaaaccgttcgtcattctagtttttggaaaagagtggctgctgacatcaagtatactactatggttagctcctactgcaataattcagtctgtgttaagtacaagtggcacagtgtttatggcaaagggtcgtacagatattttaatgaaactgggtattttgggcatgttactttatatgtctgcatttattatcggagtgcaatataatatcattacttttgctaagttctattttttggctaacatcattaacttctttccagcgatgtacttacttatgaaaattataaatggtaaccttttcgagcttttcaaaaaggcattgccaatattttgtatgggattaattatgattgctgtcatgttcattgttagaaaaccaatcaattcattatttgatgagatttctttctcatatttgcttacaatgacatttattggtgccattacttattttattctgacaattgttttattaaaacctgttaggtcttttataattaatagagtaccatttataggatga

SEQ ID NO: 216488 - DNA, 996 bp, Klebsiella pneumoniae
atgaaaaaaaaattagtttattttcctaaaagtggtggcgcaaatgcatatccgcttaggatgcaaaaaattctagcgtctttttcggatgttgaaggacttaatctcaaaggtacaatgcaagagattttaaagcttaatttttctaagaaagatgtgctggttttaaattggattgagtcagatataataggaaaaactgggagggtgtctctaactggtatttcaaagatcttgctcaagatatttatttttaaattaaagtttaagaagataatttttgtaagacataatatttatcctcataaggcaaataaggaaaacagtaacaaggcaacgaagttagtagataaacttgagggtttatttgatcataaagtcgttcattctccagtttatacgaaagatggatatgaatatataccccatcctttatacacataccctcttgtaattgataataaaaatctggttgagtgtgacaataataagtttattatatttggtaggattttagaatataaaaaatttgaagttataattgagagttttcccgctgagcaagagttattaattgttggccattgtgaggattatggctatctagataaaataaaaactcttatccgtgaaaagaaaaacatcactattttcccatcttatcttgatgataaagaagcaaaagaattaataaattctacaggtgggctgatcattagtcatgctgatgaagatatgattgtcagcggttctttcttttatggcttaactattggagttaagatgtatgcagtatcaactccttttttgaaatgggctgaagagcaatttggcaatgacataattgaaacttttcctgatgttgtaagtctgtgtaaacgaattgaaagaaggccaattcgtgaacatatcagcaatggaacaattagtgacatcaatagttctttttcagatgaagctattgcaagttcttttagtcgattatgccaaaaatga

SEQ ID NO: 216489 - DNA, 1155 bp, Klebsiella pneumoniae
atgacgaatgattttagtattggaataattgcagactggcttataacatatgcaggttcagaaaaggttatcgcggaatttattaaattatatcctgaagctgaactgtattcagtggttgatttcttatcagatgagaagcgtattcactttaataataaaatagcacaaacaacatttatacaaaatctgcctaaagccgccagtaaatataaaaattaccttcctttgatgcccctagcgattgaacaattggacgtatccaaacatgacattatactttccagctgtcatgctgtttctaaaggagttttaacggggccggatcaactgcatataagttatgttcattcacctattcgttatgcgtgggatttacaacatcaatacctaaaagaggcaggtctcgaccgcggactgaagggtatgatggctaaatggctacttcataaaatgagattatgggattatcgtacttccaatggtgttgaccattttatagctaattctcatttcatcgcaagacggataaaaaaggtttatggtagagatgcagatgttatttatcctcctgttgatgttgaacgatttactttatgcacaaataaagaagattactatttaacagcttcccggatggtcccttataagcgtattgatctgattgttgaagcattttctaaaatgccggataaaaagctagttgttattggtgatggtcctgagatgaagaaaataaaatcaaaagcaacaaaaaacattgatatattagggtatcaatctgatcagataatgcaagaacatatgcaaaaagctaaagcttttgtgtttgctgctgaagaagacttcggtattacacccgtagaagcacaagcatgtggtactccggtcattgctttcggaaaaggcggagcattggagacaatacaacccttaggtaatgcaaatccaacagggttattctttaaagaacaaagccttcaagatttagttgatgcagttaattcatttgaagctaatgagtcaatgtttgattatgaaaactgtagaagtcatgctttaaagttttctgttcaaagatttaacgatgaaattgcaagttttatttctacaaaatatcgtgattttttgaataataaaaatatcaaatattaa

SEQ ID NO: 216490 - DNA, 993 bp, Klebsiella pneumoniae
ttggacaagacaattatttttgattcaagatggattggcgaccacggaataggtcgctttgcaagagagatttttgaacgtatagactgtcttgaaaaaattggtataacagggaaaccctctggaaagttagattttttatggttgactttatatttagctcgtaagaaaaaaaattttttcagccccggttataatgcaccagttttattcttgaagagaagtgttataacggtacatgatttgaatcatgtagatgttgagcataatacttctctattgaaaaaaatatattatagattaatattgaagcgtgcgtgcaagagatgtcataaggttttaaccgtttctgaattttcaaaacaacggattgcggagtgggctggtatttctaaggataaaattgttgttgttggtaatggtgtttccgatgctttcaataatagtgttcctccttatgaacatgaaaagccatttatctttattgctggtaataggaaactccataaaaacgaacacgctgctcttagggcattcgcgaaatcttcccttcgcaattctcattcagtaattatgaccggtagtataactgaagaactttcatcccttattaaagagttagatattaatgatgatatatttttttgtggaagagtgaccgacaaggaactggcgtcaatttataaaggggcatctgttttatttttcccatcactatatgaaggtttcggcctgcctgttatagaagctatgtcttgtggaactcctgtaattacatctaatacaacctctttaggtgaagtttctggagatgctgcattgttagtagatccaacaaatattaatgaaatgacatatgccttggagtctgtctgtagcgatgaacgtttacgcgagacactaatcagtaaggggttcgaaagatgcaaacgttacacttgggaaaataccatcaacataataaaaagagaagtcattgaaaaaaaattataa

SEQ ID NO: 216491 - DNA, 231 bp, Klebsiella pneumoniae
atgagttacggctggctcttcgaaaatccggatgatgacatttcgggtggtaatcatatcaatctggaacacctccctccggagctaaaacatgttgttctccagatagtacagaatcagattaaccgtgatactgcagagaaaaaactggcagaattaatcaggcaactcgagtttgatataactgcagcagaactgtcagcatatctttttaaaccgggccatgcctga

SEQ ID NO: 216492 - DNA, 204 bp, Klebsiella pneumoniae
atgacgaaacaggaatggattttacgactacggcgctgtacatcgaaggaaaccctggaaagggtaatagaaaaaaataaatattctctgtcagatgatgagcttgagcatttcaatgccgcggttgatcaccggctggcggagatgacgatgggaaagttgtatgaccgggtaccgacaggtgtctggaaatttgtgaaatag

SEQ ID NO: 216493 - DNA, 495 bp, Klebsiella pneumoniae
atgaaagtcactgaacccgggctgaataagctgatcgataacctgaacaccctgatttgcgaggacagcctgctcacgcgccaggagcgtgaaacgctggtactggccgtcgccgctatcggcgccatgaaagcgcgcgtcggcttgaaaaaaggcgatgcgccgaccgttgccagacgggaaaaaagggagaaaaaagaccgccagcctgatccgcgttttccgcgagccggtcatccctggcaggaagacgaaaaaaccttactgagtgatgcgctcgattcggtaccggacgaagagattggcaagcatcttttctggctttccgagaaactgggcagaacgcctttcagtgttgctttccagatcgcggcaatccgggagctgcaggacggctgggaggagcagttcagggagatttcggataacattcgcttgtccggtctgagcatcagtgattatcttacacagaacggcacgggccataacgcctga

SEQ ID NO: 216494 - DNA, 573 bp, Klebsiella pneumoniae
atgatgcgggaaaaagcccgacgtccgtcgccgctgcagcggcgggtgctgattgtgctggccgccctcgatgcaaaacgtccggggccggtggcgacgcgggatatcgagcgggtgctggagcagggcggggatgccccggtgtacgggccgaaccttcgcgcctcctgccggcgcatggaagccgcgggctggctgcgcaccctgcgcgccccgaacctgcagctggccgtcgagctgacggaggccggtcgcggcattgcagaaccgctcttccaggcagaacgcgaggctgaaacggcacgacaacgactgacagacgtccggcgtctgccgttacgccagacggctgccggtgacgcggtggagctgcagctgggtgacggtcattactccctgcgggaagcggcctacgtgatccgtctggacggtaccacctgcctgcagctgacggatgccggcggcatacgccggataaaagagggcgatccccttcaggtggccagctggtatcagacctgttttgatgcaggcctgccggtcaccgtccaggtgaatgagagccgggactga

SEQ ID NO: 216495 - DNA, 249 bp, Klebsiella pneumoniae
atggatgaagaaatgttgttttcgctcagctatgagcagatgacgcagatggcagaagaggaaataaagcaatgcgattttcgcagggatggcacccattatgtctgggaagtgaacaaggctcatgacatcctccgcttctggtatctcctggcgctgcgtggacacactggcctggccacaacacgggtcgaagcagactataaacggcttaaaacgctcatttcccagaggaatgagggacaatga

SEQ ID NO: 216496 - DNA, 501 bp, Klebsiella pneumoniae
atgggaaattattcagattttgagaccgattttgttcagcgaacactggcgcttatcgatcaatataacgaaatgattgaggtgcagggcaagccattcagggagcagtacaactacacgttgaccctgaattgccttctgggtcttattgtgttaccgaaagagagggcgctatctttcctgcctgccgaccgtttaacgctgcaacttaaagctgaaatgggattacatgagtcacagctgcccggaccggaaatgactctgcgtactcttatccttaaaatgaggaattctgtggctcatttcagcgtccaagttatatcagtcagcgacgagcatcttgtcgatctgattgctttcagggatgatcctgaggatgagaatgcctacgccactttcagcgccccggaacttttaccctttctgaaatattacgcagcgcagctgctcgggaatatggcccgccgtcgagcccctgctgttaactcagtggatttgtaa

SEQ ID NO: 216497 - DNA, 765 bp, Klebsiella pneumoniae
atgttaatcctcgattgctcctcacgctctcaggcgttgaatacactgtctgccgggtttggatgtccccctgaaaagcttaaaaaggtgcttctgtcgctcgatctggagcatatctacgaaacagatcaaagcattatggtggatgcaaatcagtatctgaaagattatgtcagcgcggaactgggcgaaccaggtcccttctcccgggctttctggtttcatggcacccggacttttgccgggaatactttcccgagggggttacttgcgctgaatcattcgaaatcgcttgcggcaaagatgctggtagacctggccccggatgagttagtccgtaaacgcctgcggcagtgggttgaaacgggagatgttccggatgcgctgtttcagctcagaaccggcgacagcatgcactgggggccttatggccatctggttcgggaattgcattttcatgcccgagaaaacggactacacgattatctccacttgcctgagttggtagaggatgtctgtaacgcctacctgaagcagtatggtcacgatcttacggcctattatcttaaggtgctgcatccctgcattatctggttcgaggcggatatctcttatgaaaaaggagcgattgaaacggccctggcatatgcatatacgtcagtccgggcgcttccgccggactgccatgcaactatcggcatcgactgtaaaggaaaatcggtgtccaggtcgtcgattgctaaaatcgagtttctgccgccctag

SEQ ID NO: 216498 - DNA, 1134 bp, Klebsiella pneumoniae
atgcacttttatgtggatgaaaccggtcataccggtccgaatctttttgaccgcacccagccagtactttcttatggcgtcctgtcttcacccgatgacctagacaaggttgcagaaactgaactggccagtttgcgaaaaaaactgggtgtacaacgtcttcatgccgctgaactgggcatgtaccgccttgatgatgtggtcgataccctgcttgttctgcagaagaaacaccggatacggtttgatatctggcaggtggttaaacgggatcacgccattatttcattcttcgatcaggtatttgaccagggactgaatccggttgtgccctggactgcctactggaccccgctgcgctatccgttgttgctgaatctggccattctttttgatgaagagctggctgaaaaggcatggcgtgcccgtcttgaggcacatgatgaacgttcttcctgcttattcaatgaggtgtgtggtgagctgcttcagcgcgttcacattctgagcgatgcccgttcagttgaactcattacagatgccctgtcctgggcgatggtcaacttcgatgagctggggtacaactgcaaaaccaacaaggaaaagctgcagatcatgcccaacatgatcggattccaatccgttctgcacgggatctgcgcccgtctgggggcaccgaaccggaaagccaatatcattgttgaccagcagtcgcagttcaataccactcagcgggagctgaacgagttttactaccagatacgcgaacagccgtgggaacttggcccgggtttacccgtcatggacatgaagaacatgccggcaaaaccgctagtcttccagtcgggtacgaaaagtgcagggctggagctggtcgatatttatctctggatcttcaaacgctacttggaacagaaggaactgaccaaaccccttacccgccttctctacaccaacctcaataccgccagaactgacagtgtttccctgcagtctgtcgccaaacgatttaaggagttttttgaaacactgcctgaacccactgcagaaatgacgcaaaaagggcgcgaatacaaggagcgggaagaagcccgtcgcctgcagcaccgaattcctggcctcagtggctcctga

SEQ ID NO: 216499 - DNA, 291 bp, Klebsiella pneumoniae
atgagcaatcaagcacacctgacgctgatccactcgctggtcaaaaccaatgcgtttaacctgtacaccctggccagcacagagagctggcagaggccttcggtccgggacatcgccgtggtccgggggctgattccactgaccgacgtcgagctggcccacaggctggatgtggacgaacgcaccatccgcaagtggaaaatccggccagacatggatggtgtacaccgcctggtgctgtctgtgctggctagccggactggggatgccgttcgatcacgttatcaatga

SEQ ID NO: 216500 - DNA, 324 bp, Klebsiella pneumoniae
atggcaaaaattagcgaaaggaaatttttttcagttattttttcactaaccggccttaaaggccgccccgcgaacagtaaatacctgcacatcaaccaagacattaaggagaacattatgtctacatttttagctgcagtatttgctgtaatctttaccctaatcggcatcggccacttcatctggacaatcgttgtggcttaccgtgatctaacctggtttttgaccaattttgacgaccttccatatatctggaagcgaaacgggcgatactatcgctgtttcatactccgtcgcatctggaagcatatcttcagtcattga

SEQ ID NO: 216501 - DNA, 1002 bp, Klebsiella pneumoniae
atggccgagccaataaatctgcagacagacgtggtcaggcagcatacggttcctcgttttttactgaagcacttcagtacgccgggaaagggtaagcgcctacgtttatacgcctttgataaggccgccgggcgcgcttatgccaccacgccggatgacgccaccgtccggaatacgttctacaatctcgatgatcaccctcagcggctcagtcttgagccgctgctgggaatttacgaacatgaagcagcgccggtcattgccgaccttctgaggcataaggacattcgccagctaactgcagacgatcgctacaagctagccgtgtttgttgccgtgcagcgtgcacgaaccttcggtgagctggagcgtatttcaggcatgatttcagtgctctttagtaagatggcggcaatgggcgcgactgaggagcaggcaggagaaaccctggggttatcgcccgggggagataacagagatgtttttcttcggcagcttgtccagcagatatcacatattgatcacctgctgaataaggactggtacctgctggaaacaaagccagaacatcccttctacgtgtcagacaatccggtggtactggagaaccgcaacgacttcggtccgtacggcaatattggtctggccgtgctcggaatacaaatctaccttcccctgtcatcgacgctgatgctggccatgtattgcccttccatccgtgaacagaagattcgtgataagcaggatcttcatcatctccttgccagagcgccacacctgatcccgcgtcacatgcgcccgtttgaaatgctcagacatctcagcaggtttacggactatcatctcatgccgcttactgcggatcatgtgacgcattacaacgcactgcaggtggagtatgcggaacagtatgtgttctgtggtgaaaacgatttttctctggttgagagaatgctggcagatgatgaccgttaccggacaggcccgaggtttatgttttag

SEQ ID NO: 216502 - DNA, 345 bp, Klebsiella pneumoniae
atgaaaaatacgtccgacatcgtgggaacatccgtattcccgttccagactgaaatcgcttttattatcgcgattttcaccactactcaacgcctggtcgtcagtgccagggaccacatcagccagaagcaatactggagcgcctgtctctgcgtcctgcttcttgtggcttacgtggggcttacggccggagtggtgtgggctgtaatgccctggcttaagactttttttctggtgaaacttgccatttcaccattctgggtcatgccgttaaggggtttgctactctggggtatcggtaagatggttggggccatctgccgaaagtttactctaagcaagtaa

SEQ ID NO: 216503 - DNA, 291 bp, Klebsiella pneumoniae
atgagtaacagcagaaacagtcgatatgtctgtggcaacgtttccttttccgcgattgcaaagatggctcacgggcaggtcgtctgcctggcgctgaacccggatgaaaacgatgcccggagtgaagtatcaaaatccctgaaagctgccttttccagagccgggcgcagatgccgcctgacgtcgggaaccgcagcgggagaatttacccgtcgccgggctggaacggccacacacctctatgtcagagtttacgagacagcaccggcggggcagggagcaaataactga

SEQ ID NO: 216504 - DNA, 924 bp, Klebsiella pneumoniae
atgattattgacaacaggcaggacagtgaagccgatgatggtacggtttcgtataccatcagaaatatttcagcttcgctggatgcgaatattaccagtcaggcggccagcgccggtaagcccaaggcaacctggctgcgcgaaatgttggcagatattttcagcgatcacattcagaattttgtccgtaaaaacggtctggtggcttccctggatgcagagcttttggagtacctgcgagccagtgcagaccctaacgggtactcaggactgctgcctggcatcaacgagggttacatcagttttctgaacctgaagaacgatgatgatctcaagcgcatcctttttaataatgcgccttatctgcgggatatggcaagagtaggaatggccggggtcggttacttcaggcgtgggttgtcgcttgaactggctctgtttgcagagctggccgctcaggatgaggcggttatcaggatggcctgggaaaaggctttttactcacctcagcctgatgctgaaaatcagttctataaacacatcgactccgtcagattgctcaaaaaactgcctccactcgtacccggttttgtgactgaaggttcgttcgtgactttatacagttaccgtccggtgagttacggcgaatcaggatggcgggtgcaggccatgctgaaagacggccataacgggaaacagcccgttccggtccccaggtttcccggatgggtcatcgttgcagatccggggtacaccacgtcgctcagttcgccagacggtactggcccggcctatttcttccgcaataaccggtgtgaatttcatgtctatgcctggcatgcaggggagtttgtcacagacggagctgttgagaacaacctgacacaacagctgctggcctgcattgaaaatcagatggtgtga

SEQ ID NO: 216505 - DNA, 219 bp, Klebsiella pneumoniae; identical to SEQ ID NO: 182264

SEQ ID NO: 216506 - DNA, 306 bp, Klebsiella pneumoniae
atgcagtttaaggtttatgcctataaaagagagagccgctatcgtctgttcgtggatgtgcagagtgacatcatcgatacccccgggcgacggatggtgatcccgctggccagcgcccggctgctgtcggataaggtctcccgtgaactctatccggtggtgcacatcggggacgacagctaccgcctgatgaccacggacatggccagcgtcacggcctccgtcaccggggaggaagtggccgatctcagccaccgggaaaatgacatcaaaaatgcgataaacctgatgttctggggaatttga

SEQ ID NO: 216507 - DNA, 312 bp, Klebsiella pneumoniae
atgggtaaaccaacatttagatcatttaacgatgtggtccgggagcttgaggatgtatatggccaccaggagctgtggctttactctggccttaatgaggactgccccgtcgagacagcccggcggcgtcaggaatggcgatctcccaaaattctcaaacgaaacggcagaatggtggcagaacaatcaggccagcctgatttctgggtgctcaccggagactaccatctgtcgcagtctgaacacagcggtccgccgtggaaagcctgcctcatcgataaggtctttaaactgtattgttcactgttctga

SEQ ID NO: 216508 - DNA, 336 bp, Klebsiella pneumoniae; identical to SEQ ID NO: 182261

SEQ ID NO: 216509 - DNA, 780 bp, Klebsiella pneumoniae; identical to SEQ ID NO: 182258

SEQ ID NO: 216510 - DNA, 258 bp, Klebsiella pneumoniae
atgaaacttcaagatatacagatagataataccgtaaggagttgccttaattctttcactggtggggtgattattcgtgatacaaaggtattgatcacgctcaatctcccggatggacagaaaaccactattgagggggaatggcggcatatgtcagacgccaacagattgtcagaacgtattacgatgcttcagcatgcgatctatgagcagtatgaggaatacagagcagatattcccgtcagctggtccagataa

SEQ ID NO: 216511 - DNA, 867 bp, Klebsiella pneumoniae
atgggaaagaggtcaagttcagttctcaattatccacttgtggataaagtgcagatttttccggtggataagtatcgcgatagcttgcaatttctgttttcactgtcattatgggtgggtaaaaatttacccataggcattgaaatggatactcaagcactcttgccagctactaaaacgtttaaaaaacgcgccagtataaagcaatctaacgaattgaccgaagctgcatattacctgcctcttcaggcaaaacgtgtgctgtggttatgcctcatgcaggcctattttaatgacagccaggaagatgactctgacgtattgccgctcttcaaaatcagcgtttccgattacgtcaaatacttcaatgtcgctacgtctgtcgccagtcgtgatgtgaaggctggggtaaatgctctgggcgaatcaacggttaccttttatccaaaagaaggtgagtttgaagaagttaaacgtccgtggctggctgaagcaggaatgaagcgaggccggggttcctggcagattgaatttaactacaaggtcatgccattcctggtaggcttaacctcccagttcactacctattctctctatgactgtggccagcttaatagtgttcgtgtcatccggctttatgaaagcctgtgtcagttccggagcactggtgtctggatcaccacacatgactggttatgtgaaaggtttatgctccctgcttcgcagaaaaacaatattgctgaaatgaagcgtaccttcctggaacctgctctgaagaaaattaatgagaagacgccattaaaggtaacatataccactgaagaagatggtcgcttgctgtttaattttcttgataaaaaacaatag

SEQ ID NO: 216512 - DNA, 546 bp, Klebsiella pneumoniae
atggacgctccggactatgggaaacaggtcaacttcgcgggcggccgggactatgggaaacaggtcaacttcacgggcggccgggagtgtggggaacaggtcaacttcgcgggcggccgggactgtgggaaacaggtcaactttgcagacggcccggactgtgggaaacaggtcaacttcgcgggcggccgggagtgtggggaacaggtcaacttcgcggacggcccggactatgggaaacaggtcaacttctcggacgatcgggagtgtgggaaacaggtcaactccgcgtacggcccggactgtgggaaacaggtcaactttgcagacgaccgggactgtgggaaactgtgggaaacaggtcaactttgcagacgaccgggactgtgggaaacaggtcaactttgcagacgaccgggactgtgggaaacaggtcaactccgcagacggcccggactgtgggaaacaggtcaactacgcagacagccgcgattgcgggaaacaggtcaagttaggcaagcactatgggaaatacagcaagtttag

SEQ ID NO: 216513 - DNA, 702 bp, Klebsiella pneumoniae
atgtccagattcattctcgggaactgtattgatgtgatgcgcggattccccgaccgtgccgtggaccttattgtgaccgatccgccttacctcgtcggttttaaggaccgccagggcagacagattgccggggatgtgacggacgaatggctgcaaccggccacgctggagatgtatcgcgtccttaaaaaagacgcgcttatggtgagcttctacggctggaaccgtgtggaccgctttatggccgcgtggaaggcggcaggattctatgccgtgggccagcttgtgttcaccaaaaactatgcctccaaccgtcgtaacgccagggcccgacgcggatttgtggactactgccatgaaggggcttatgtccttgccaaaggccgccccgtgccgccccttaaaccgctgccggatgtgctgcccttcccgtataccggtaataccctgcatccgacgcagaaaccggtggaggcgctacagccgctgattgagtcattcagcgccccgggcgcgattgttctcgacccgtttgccggaagcggttcgacctgcgtcgctgcataccgtgccggacgccgctatatcggcatcgaaatgctggcgcagtaccaccgggccggaaccgaacgactggccgccatgcaccgggccgtcaataccccggcggcgaacgatgaatggctcccggaggccgcgtaa

SEQ ID NO: 216514 - DNA, 222 bp, Klebsiella pneumoniae
atgaattacgacggacacgaagccctgcgccgcgatatggccgggctggcgaacaatctttgcgacctgaaaaccaccctgaaagtgctggaagacacgtaccactaccggtacgacggactggcggaacggcttgccggtatcagtctgcgacgtctcagcgtcctgatggatgaggcgttcaatattgcactgatgctcgatgaaagctttcaggactga

SEQ ID NO: 216515 - DNA, 420 bp, Klebsiella pneumoniae
atgtacggaacccgtgaagacctttgcaggatgctgagtgagcaatatcccgcagaaaccccgctgaacctgattatctggaccccggcggatattgaagcgctggctgacgggatggaatattccttttcagaacaggacgtaagggccgtgctggaacgcatggacgctataccggaagaacaacggcttgagtcgggcgtgtcagccggcctggtgatggcactgatagaccaggtgaaagagagcgggcagagggtgactgtgccagttgacctgcttgaaaccctgctgattaccgccgaacaggcattgtgggacagggaatggaccgcacgggatcgcaatcaaccggtgccggaaagcgtcatgcgccgcctggcagatacagcgaaagtgcgggcattactgaaaagctga

SEQ ID NO: 216516 - DNA, 768 bp, Klebsiella pneumoniae
atgatgaaaaatgaaacccttaacacgcttattctgcgtcacggcgaccggatgctgcgccaggctggctggcccgacgctgttgatatggcgcccgtcgcacccgaaaccgtacccggctggctcgccgcctgcggctctctcagcggcgtggaaatcctcacgcttacggaacagctttgtcagccgctgacgtatggccgggcagcgttgttgctcgccagcgcccggcggctggcgggaaccccggctcgtctgcatctctttccggtgcaggcatatccgcatccggagcggctggctgactgtcaggttatccgcctgccttacgctcaggagtggctgacggcggcggaatgtgacgatctgctggccttcctgaaagcctccctcacgcagatatcggaaatcgtccaccgggatacgaagtgcatcgccgccgcgctgaagccgtccgtcaatccccgtctgatggacaggcggatctgtgactggcgcttgctggccgtggagtatgatcatgataactgcctggacgaagacgaaaccgacaggctggatcaggtcctcgatgccattctgattcgcgatgcgcgattctgcccggttctgctcaccctggttaacgagcgggaggaaactatcaggagcgcaggggttatcgctgatcagctgcgttttacggacactccggtccggcgctggtttgatcgccgggttttaagggaaatggtgagagaggcccgcgccagcagaactcaggagtga

SEQ ID NO: 216517 - DNA, 429 bp, Klebsiella pneumoniae
atgcagtatgtgacaacacgccccgtcctgaatgttgaagagtgtgaccgcctgtcttttatgccctacctgttcggcacggatttcatgctcgcagaattgcaggtgtatgcgctggcgaaacaatggatgcctgaatacagcagtgagttctggcatttcatccggctgccagagggcggcggttacatgatgccggattgtggccgggttcatctggtcaacagtgaaaactggtttgatcgcccggtcagcgccgacgcggcgggcattattctgaccagcctggcgatcaatcgccgtctggcggcccatcatgacagcagtaacccggcactgacccgcctttatatgctgcgtgatgcccagctctggaatcacattacccttcacccggaatgcaacgccatttacgccgcgctggactga

SEQ ID NO: 216518 - DNA, 507 bp, Klebsiella pneumoniae
atgaattcatccatcaccactccggccatctacgtgggcacgtatcaccagtacaacagcggcagtatttttggcaaatggtttgatttaaccgatttcgacgacgaagacgaattttatgacgcctgccgggcgttgcatgccgccgaggatgaccccgagtttatgtttcaggactgggaagggatcccgtctcagtttgcctctgaatcctctgttaagtgggcgtttatcgaggcattccggcaggcgcaggacgaaggacgcgccgccgcgtttgtggcctgggcggaatataccggcgagtgcgactatgacgcctttgatgatgcgtattgtggcgaggctgaaagcgaggaggattttgcttatggctttgtggaggatcacggcctgttaaacgaggtgcctgaatccctgcgcgtctatttcgattatgaggcttacgcgcgggatctgttcagcagcggctatgtcttccatgaaggctatgtattcagcaactga

SEQ ID NO: 216519 - DNA, 318 bp, Klebsiella pneumoniae
atgaaacttgcaccacaaagcggcgatatcctgcgacagtacaaagccctgattaatgcccgccgccgcgatgccgggcaggggggaacctctgccgcttccggcagcgcgaaaaccctggcaggctgcgcctgccggagagagacgtcgccgcgcctccggcgccacgcactctcctcttcgttgtcagtcgctgttgcccgggaatacgcgtattatcagggatatcttcctgtaaagcagaccggtgatgcatatgtcaaagtggaatatcgcagcttttccaaaagagaagcaggacaaagtagccgtcgataa

SEQ ID NO: 216520 - DNA, 159 bp, Klebsiella pneumoniae
atggaaatattcgcgcaggtgttcaggctgttcccgttcaacaagctcaggcacaacaggcttgttcatcctttcctgccaggcaacggcagcggccaccttatcgacggctactttgtcctgcttctcttttggaaaagctgcgatattccactttga

SEQ ID NO: 216521 - DNA, 321 bp, Klebsiella pneumoniae
atgcgtatgtctctgatgtttgcagctgtgacgcttttaaccggtattaacctgttttttattccgtttcagcctgttccggctctgtggggggctatcctggccgttgcttttgttctgattaatgtcgtggcggataagctgcgcctctggagtggcattgtgtggattatcgttgccggcatcatcataacgctgatgctgaaggggaaagagccgggcgacgaattacgcgggttgatcaccgtttttgctttcctggcttcggcctggtactgcgttgttcagtacagaaaagagaagggcgaatctcagtcctga

SEQ ID NO: 216522 - DNA, 543 bp, Klebsiella pneumoniae
atggcagcacgtggcgttaacaaagtcattctggttggacatctgggacaggatccggaagtgcgttacatgcccaacgggggcgcagtggccaatctgacgctggccacgtctgaaacatggcgtgacaagcagacgggagagatgcgcgaaaacaccgagtggcaccgtgttgtcatgttcggcaagctcgcggaagtggcgggcgaatacctgcgtaaaggcgcacaggtctacatcgagggccagctgcgcacccgcaactggcaggacgatgccggagtcacgcgctacgtcaccgaggtgctggtcgggcagaacggcaccctgcagatgctcggcggccgccgtgaatccggtgtgcctgagagcgccgcgcagccgcagaatcctgccaccccggcacaacctgctcaggccgcagctaaatccccgaaagcgaagggcggtaagaaaggccgtcaggatgccgccccgtctcagcaaccgcctcagcctctcccggatgatttcccaccaatggatgatgacgcgcccttttaa

SEQ ID NO: 216523 - DNA, 249 bp, Klebsiella pneumoniae
atggaccataacgttttgtccccgcttgaatccctgccggatggcacgtttacccgcgagcaggctcagattgtcgcagcgcagtatcagaatgtggcgattgaagatgatcaggggacccattttcgccttgtcgtccgtcatcaggatgacggcagcatgatctggcgcgtctggaattttgaaccgggcggcgaggacatgatgaaccgctacatccgggactacggagtacgcaaaacgaagtaa

SEQ ID NO: 216524 - DNA, 2058 bp, Klebsiella pneumoniae
atgtctgcaacagagtctaaggtaaaaactgcaccgaaaaccagcaaaaaaacgcttaagtctgccgaagctgaggcgcttaaagtggctctcgatgccgcacaggtcgagtatgtcccggtgacggcactggtgaagtctcccctgaacgtcaggaccattccctatccggcggagaaagtctgttcaatggcagattccattgaagccattggcctgttgcagaatctggtcgtgcataacctcccggatggtcgctgtggtgtggctgccggtggtcgtcgcctgaaagcgctgcagctcctgcagagtgaaaaccgtatcgatgccggatatcaggtgatggtgaaaaaggtacctgatgaactggctgttgcggcatcaatggcagaaaacgaacagcagatggcaatgcatccgtctgaacagatcgccgggttccgcacactggcagagcaggggaaaacccccgcgcagattggcgatttactggggttcggtacgcgtcatgttcagcgcatgttgaaactgaccgaactggctcccgaaattctggcggcgctggcgaaggatgaaatcaccaccgaacactgccaggcactggcgctcgaaagcgatcagaaacgccaggtggaagtgctggaatccgcccgcaaacggtcctggaataatgaagtatcagtttcctcgatccgtaacctcattatctcagaagaggtttccacaaacggcgacaaattccgctttgtgggagaggccgcattcagtccggatgaaatccgggttgatctcttcagcagcgaaaacggcggctatgtcaaaagtgcatcgctcgataccgccctgctggaaaaactgcagaacatcgcggagcacctccgcgaagcggaaggctggtcatggtgtgatggtcgtcttgacccgatttcacactacgggaaggacactaaaatctggcgcctgcatgctgtcccgcctgtggaatataccgaagccgaatcagaacgtcttgcggaactggaagctctggaagctaagtatgaagacgagaaccccggcgtgaatgatgacgtcttggccggggctctggaagccgtctgggaagaacagcagaccatcgcgcaccgggcaaaacaccgggcatggacggatgaaatgaagcaatctgccggagtggtggtttcctggactggccaggaggtgaaagtacagcgcggtgtggtgctgtgcgccgatgaaaaaatggaggagaaggatgcatccaccgatcaggcccctgaaaaagtcgatccgctggacgccgtcagtgtcccgttgctgacccgcctttcttctgaacgcacactggcggttcaggcggccctgttgcagcagccgcagaaagccgtcgcgctgatggtctggaaaatgtgtaactcggttttccataccacaacgtccgtcaaagagccgttctgcattagcgtgagtgtgtcgcattacgcgctgacccgtgaagcacctgacggtgaaaacagcgttgcgtttcaggccatccagtcagaaaaagaacgtcttgaagccctgctgccggaaaactggcgaaaggatatgaccaccttctttacgctcgatggcgcaaccctgatggcactgatggctttctgcaccgcctgctccatagatggtgtacagggcaaggatgaatttggtcgtaaacaccagagttcgctggatggggtggaaaacgccattcagtttgaccttcgtgactggtggaaaccgacggctgataaccttttctcgcacatgaagctgccacacattgtacaggcactctctcaggccggactggctggcgcagcacaggacgccgcgaagatgaagaaaaaggatgccgctgaacatgcagagcacttcctctcaaaaatccgttgggttccggaatggatgaccagtgctgacaatcagaaacagcttgccgcaaagtctgaactcagtctggcaacaagtcagaacgataccgacgctgatgccggcgacgtcaccgaccataacaacccggcctgcgccgcctga

SEQ ID NO: 216525 - DNA, 432 bp, Klebsiella pneumoniae
atgaaaacgttactgactctggatgtcctgaaaaccatgtcttctgatgagctggaagactaccgcgccgccggtgaagactttcgccgggagctgagtcacgctgtcatgcgcgatctgacctcaccgtccggctggtccgtgaatgccgaataccggtgcgaatttggcggcttctttcctgtccagatccgttttaccccctctcatggtcactttgatgtggcggtatgcagtccgggggagctgaatcctcgctggatagtggtctttgttacccgtgacggtcagccgttctctgtcgttcgcgtgatggatgcattcaaccctgaactcatcacccatactctggatctcatcgagtgtcttgacgccggtggctactcgtttgccagcatcatcagcacgctgtcacaggagggcgcacaatga

SEQ ID NO: 216526 - DNA, 729 bp, Klebsiella pneumoniae
atgatcccgtcatccagtgctcttgtatccctgaaaccagcccgtcaggcagcgctgcaggccatcatgacggtggaagaggctcgccagcgcggcgcacgtctgccatcgatgccacacgtccggacattcctgcgcctgctgacaggctgtagccggattaacagtgatgttgcccgccgtattcctggccttcaccgtgatccaaaagaccgcctttccagcctgaaacaggtggaagaggcgctggatatgcttatctccagccacggggaatactgtccgctgccgctgacaatggatgtgcaggctgaactttttccggaagtccttcatacccgaacagtacgcaggctaaaacgtcaggactttgccttcacccgaaaaatgcgccgtgaagcccgtcaggtcgagcagtcctggttactgcgtcagaacctgctgggacaggctgtcacagaactgaattttcagtcaccggaaaccgtctgcacctggtacacccggtggagcgacgagtttgacgcggcagagcttgcagcaccgttctggcgctggcagtcgcgattcacatcgctgaaggaactggactggcttcgcatcagcggtgagccgctgtatgcagtgatgtacgaaattccgttaattgtccgggaaacacctgaacatattcgtgttgctgaacgctggcaggtgccaaataagctggctgatcggagtggtgtatga

SEQ ID NO: 216527 - DNA, 327 bp, Klebsiella pneumoniae
atgaagtggcgctattctctgcgctggaaactgccgcacaggccctgcccgggtccacgggaactgatttccgttgtcgtggaggcagggcaggcggcacctgaagaggtgatgtcacgctgggtggctggctcaggttacgctgtatgcgtggattttctcggccagaaacagatccaacgctggagcgatgaacggaaagctgcggtgagaaggcgcaacatgcaggcacgtattcatcgtgttgcccctttgtttgccgacgagttaatcgagcgtgaactggctgcgcgtccggagtatttcaatggcaagtccgcccgatga

SEQ ID NO: 216528 - DNA, 375 bp, Klebsiella pneumoniae
atgaggtactggttgctcgtaatcttaatgaacgtgctgttctggttgatcgtgaagcatgttgctccggaatggtatggttcccctggttattatgcaggccaaatcatctgcacactaatagctgcggtcatcacatggcgtgatccgcctgactggttagatggaatcctgctcggcgttatagaattcggcgttctgattgccgggattatattctttgtctggggcatcgggtacaagctggcattctgggggcaacatgatccgaataccatatatgcaagtgcaaacgatgttattttgcctaatcttgcgctgggcacgggcgtcgtgatcgcgggatgggtatacattagatatttaaagcgctaa

SEQ ID NO: 216529 - DNA, 186 bp, Klebsiella pneumoniae; identical to SEQ ID NO: 183405

SEQ ID NO: 216530 - DNA, 273 bp, Klebsiella pneumoniae
atgaacttcacgataaaatcccgtaaaaccggcgaaattttcagtttttacgcacccgacagtggtggctatgttcacctggagtctcagggacactctggtaactcaggtgctcagatttgccgtgggggagggtttatgggcagtacgctgtactgtgacgcttctgaggacgatcttgccagtgttgcccgtaaatggtaccgacagttcgtgagggagcggcgcaaattcttaattatgtcgggccagtattctgaggataaccagtga

SEQ ID NO: 216531 - DNA, 351 bp, Klebsiella pneumoniae
gtgaaaaaagagatctcccgcaacccctctttcacaccttcgcctaatctgcgagcacatctgaactcccacagggaaggggtgactgaacggctgaataatatctttgatcgttatgcgcatctggttcgtgcctgtgcccttcctctcgataaagacgaaacacaggttctgcttaatgtgctgaatggctccgttgtcgaacccgcctttattgaatatctggctcaggaaattcgggactcggatgattatctggaagggatacccgcagctaaatcactgtacgaaaagtgtcagtcagcgacctatccgcaattgctggccaccgtcgaacgcctggaacgataa

SEQ ID NO: 216532 - DNA, 543 bp, Klebsiella pneumoniae; identical to SEQ ID NO: 216522

SEQ ID NO: 216533 - DNA, 249 bp, Klebsiella pneumoniae; identical to SEQ ID NO: 216523

SEQ ID NO: 216534 - DNA, 2058 bp, Klebsiella pneumoniae; identical to SEQ ID NO: 216524

SEQ ID NO: 216535 - DNA, 432 bp, Klebsiella pneumoniae; identical to SEQ ID NO: 216525

SEQ ID NO: 216536 - DNA, 729 bp, Klebsiella pneumoniae; identical to SEQ ID NO: 216526

SEQ ID NO: 216537 - DNA, 327 bp, Klebsiella pneumoniae; identical to SEQ ID NO: 216527

SEQ ID NO: 216538 - DNA, 375 bp, Klebsiella pneumoniae; identical to SEQ ID NO: 216528

SEQ ID NO: 216539 - DNA, 186 bp, Klebsiella pneumoniae; identical to SEQ ID NO: 183405

SEQ ID NO: 216540 - DNA, 273 bp, Klebsiella pneumoniae; identical to SEQ ID NO: 216530

SEQ ID NO: 216541 - DNA, 351 bp, Klebsiella pneumoniae; identical to SEQ ID NO: 216531

SEQ ID NO: 216542 - DNA, 486 bp, Klebsiella pneumoniae; identical to SEQ ID NO: 95267

SEQ ID NO: 216543 - DNA, 1425 bp, Klebsiella pneumoniae
atggccaacttcaacacgctgatcaaacgtaagcaatatatctggctgggactcattctggcgggcggcgcggcagcagtcggaggcgggctgtatctgtcagatctgaacatgagctctgatgaggaagccccggctcagggcgaacccgcaccggatatgaccggggtggtcgacagcagcttcaacagtaaggtggagcagcacgcgacaacagaaatgcaggcgactgccgctgatctcaacaagcgttttgactccctgcagggggaagtggaactactgagtaaggcgcgaaccgctgaccagatacgtatcgacaaactcagcagtgacaatgaagccatgcagaatcagctgaagtcgctgggcgtgaaaccggctgtctctggtggcgagcccgcgccgactcctccgtcaccgccacccggtccggaaggggagccgcagccagccagttatccgccgcaaaccggcgccgcggtaccgcctccgacggcattctatccggggaatggtatgacaccgccgccgcaggtcagctaccagtctgtaccggtaccaaaccagatacagcgtaaaacgttcagttacgacaaaggaaaaaaaacgaagtcattgccgtacattccgtcggggagctttgcaaaaagcatgcttatcgagggggcagatgccaacgcgtctgttaccgggaatgaatcaactgtaccgatgcagttgcgtatcaccggtcgcgtggaaatgccaaacagcaaaacctacgacctgacagggtgttttgtgggccttgaagcctggggcgatgtctccagcgaacgcgccattgtccgtacccgcaatatcagctgtatcaaaggtgataaaaccatcgatcagcccattaacggccacgtttcctttatggggaaaaacggggttaagggagaggtggtgatgcgtaacggaaaaatcctcggctgggcatggggggccggttttgttgacgggattggtcagggcatggaacgggcttcacagccggctgttggcctgggggcaaccgcatctgttggcgccggtgacgttctgaaaatggggggcggcggtggtgcatctaaagctgcgcagacgctgagcgagtactacatcaaaagggccgagcagtatcacccggtcattccgattggtgccggcaacgaagtgaccgtcgtgttccaggatggattccagctgaaaacgattgaagaactggaagcggaaaagaacgggcaacagcaggctcagaatcaggaggcggagccggcacagcaggctgatgcacatcatcagtcaggcggcggtatgaacggattcaatactgacgagatgctgaagaagctgggcaaacttgatccgcgtgagttctctccgggcgcagcgccgcagggggaaaataatggctag

SEQ ID NO: 216544 - DNA, 585 bp, Klebsiella pneumoniae
atgaaggaattaatgctgttaattcctctgggcagcgctttgctcttaaccgggtgcgcgggcacagagactgaatttcaatgtaatgccacgacgtcggatacctgtatgacgatggagcaggcaaatgaaaaagcgaagctgaaggaggaacgcagtgatgcaaagccggctgcggccgggttgccacaactggctgagggtaatttcagaaccacgtcagttaatccgtacccgttgccgcctcaacccaacctgaaccgggccagagtggcagcggagagagaacgagcacgtgcagtgtacctaaataatccaacggcaaagaatgaggcaatatatttcgaaaccgggaaaaggctccagtctttgccggtagtgaaaatgtctttaccagtagtggcgtcaacgtttacgtcaccgtcaacaccgccaggtaattatccccggccattaagaaaaggggaggagacaacgtcattgtggatagcgccgtatgtggattcagatgatgtatatcaccagccggcaacggttctttttgtcgtaaaaccatcggcgtggggacaacctcgccttaattga

SEQ ID NO: 216545 - DNA, 219 bp, Klebsiella pneumoniae
atgcatgcctttatttttctggtgctgatgacgccgagtagtggcggtgggatttgggatattactcccatgcctaatacagatgtctgcataaaaatgctacgggtactcgaagcacgtgggggcagaggttacggaagtaatacaggagagtgcattgaaattaaaacccgcgagcctttgagcagcgtgatagaaacattgaatgagggtgggtaa

SEQ ID NO: 216546 - DNA, 312 bp, Klebsiella pneumoniae
atggctgaataccagttaggttttgatggttttgttcgacttttttttgcaatggcaatcattatctgcggttacggctatgtaattattggtgtttttataagagatacgctttcctgtattttaatgttgtttgggcttacaggtctcagtgctttattttcattaatggtattcatggataaaaacatgtgggccggctctcctgatttgacgctgtcagtaataacgggattttttacagccacagtggttttttatatgttttatgtcttgatttattactttgatcggatgggggtaggtgaatag

SEQ ID NO: 216547 - DNA, 402 bp, Klebsiella pneumoniae; identical to SEQ ID NO: 92387

SEQ ID NO: 216548 - DNA, 531 bp, Klebsiella pneumoniae; identical to SEQ ID NO: 152527

SEQ ID NO: 216549 - DNA, 147 bp, Klebsiella pneumoniae; identical to SEQ ID NO: 92401

SEQ ID NO: 216550 - DNA, 225 bp, Klebsiella pneumoniae
atgagcgaaacaatctggctggaaccttcaaataataagacggtttatctgcaaatcaaaaatacctccgataaggatatgagtggcctgcaggcaaaaattgccagcgctgtcacttcaaagggatatcaggtcgtcagtaaccccgatacggcgggctactggatccaggcgaatgtgctcaaggccgataaaatggaccttcgtgagggctttgttgaataa

SEQ ID NO: 216551 - DNA, 1344 bp, Klebsiella pneumoniae
atgatgaaaacggaacgtccgttgtggggccggggcattatggtgtcgcctcagcattttcaacagcaggctgcgtatgcagcctggactgcggaagtgattgcccggatgggtcttaaccacccctggggagtggttgaggcgaccttcgaaccagagatgctcaaactgggccgcctgcaggctcacaggctgcaggtccggttccaggatggcacgatgattgatacggacaatgccgatgcgctgccgtccgcgctgtcgctggacggcgcgtccggcgaggcggtgatcgtgctggcgctgcccctgatgcaggcgaatggcggcaactgtctgaagccggaggaggtggccgaaaggccggtgcgcttccgccagcgctggcgcgatgtccgtaaccagtttggggatgatacccggcagattgccgtcatacagccggagctgaccctccgcttcgcccaccaggacaacagcgattacctgacctgtccgcttgttcgcctgcagcgggaatcgcagggggcctggcttatcgacgagacgtttctcccgccgctgctgcagatccagggcagccgctggctggcgacgcagcttgaacagctgctcgtccagctccgggctcgtctgacgcgcctgatggccatgcgtcgcgaaagcaatgaacggatggctgattttgccgtagccgatgtctctctgttctggttgctgaatgcgctgaacagcgccgaaccggtgctggggtactttctgcgttaccggcaaagcccgccggaacgcctctacccggagctggcgcgcctggctggtagcctgctgaccttttcgctcacccatcaggcgaatgccgtcccgatctatcagcatgaccagctgaacgcggtttttccgccgctgtttgatttactgagcgacctgctggaggcgagcctgccatcgcgggtggtggcgattgccctggagcatgatgtccggctgcacttctggcaggcgcgtctgcacgatgcccggctgcgggaaggggctgattactacctgtcggttcgttcgtcggtaccggtcgcccaactgcaggagcagtttccgcgccagtgcaaagtgggcagtccggatcatgtcaaagccatcgtcaactcctcgcggacaggggtgcccctcacgccattgcgtcatgtgccggcggcgatcccgctgcgtctggaaaatcagtatttcagcctcgatgtgtcccaccctctggcaacggaaatgctgcagagcggcacctgtatgttttacgtcccggggatgctcggtgagcctgaacttgaactttttgcggtactacgaacgtga

SEQ ID NO: 216552 - DNA, 1233 bp, Klebsiella pneumoniae
atgtctgttaccacagaaaacgcccctgttcaggggcaaaccacgctgcaggaaaacagcgcgggcgagggcgtttacgcctcgctgtttgaaaaaattaatctcaccccggcgtctcgcctcggggatatcaacgactttctggacgatgccgcgctctccgagacgccggcggcggagcgtcttaccgcggcgatgcaggtgtttatggaacgcatccgtcagtccggccagcgggtggaaaagctcgacaaaacgctgatcgaccaccatatcgccgagctggatttccagataagccgtcagctggacgcggtgatgcaccatcaggagtttcagcaggtcgaatccctgtggcgcggcctcaaacagctggtggacaacaccgactatcggcagaacgtcaaaacggagatcctcgacgtcgccaaagacgatctgcgccaggactttgaggacgcgccggagcttatccagagcggcctgtactggcacacctataccgcggagtatgacactcccggcggcgagccgatcggctcggtgatctcggcctatgagttcgacgccagcccgcaggatgtgtcgctgctgcgcaatatctcccgggtttctgcggccgcccatatgccgtttatcggcgccgtcggcccggccttcttcctgaaagagaccatggaagaggtggctgctattaaggatatcggcaactacatcgatcgcgcggaatatattcgctggaaatcatttcgtgaaaccgacgatgcccgctacatcggcctggtgatgccgcgcgtgctgggtcgtctgccgtacggcccggacaccgtgccggtgcgcagcttcaactatgtcgagcaggtgaagggcccggatcacgaaaaatatctctggaccagcgcggcgttctccttcgcttccaatatggtgaagagctttgttaacaacggctggtgcgtgcaaattcgcggtccgcaggcgggcggcgcggtgaaagatttgcctatccatctgtacgatctgggcaccggcaaccaggtgaagatcccttccgaggtgatgatcccggaaacgcgggagtttgagttcgccagcctgggctttatcccgctgtcgtactacaaaaatcgcgattacgcctgcttcttctcggccaactccgcgcagaaaccggcgctgtacgataccgccgacgccaccgccaacagccgtatcaacgcgcgtctgccttaa

SEQ ID NO: 216553 - DNA, 492 bp, Klebsiella pneumoniae
atggctgatacgttccagaatgaagtccccagggcgcgcattaatctcaaattatctcttcataccggcggcgcgcaaaagaaggtcgagctgccgctgaagctgcttaccattggcgattttagtcatgggaaggaaaaccggcctttatcggaaagagaaaaaatcaacgtcaataaaaataattttaacagcgtactttcggaatttagcccggaagttaacctctcggtgccgaatacgctggccggcaatggcgaagaggagaacgtcagactgcgttttaccgacatcaaagattttgaaccggagcaggttgcccggcaaattccgcaactccgtgccatgctggcgatgcgtaatttattacgcgatctcaaatccaatctgcttgataacgccactttcagaaaagagcttgaggcaatcctgaaagatccggcgctgtcccaggaattacgcgacgaaatgagtgcgcttgccccgaaataa

SEQ ID NO: 216554 - DNA, 915 bp, Klebsiella pneumoniae
atggataaactggatactctgaccttgtttgtgcgcatcgtcgaacggggctcattcagtgccgccgccgcggatctgggggtttcccggccagtagcgaccgcggctattaaagcgttggaggtcagtctcggggcgcggctgctacatcgtaccacccggcacgtacggccgacggcagaaggctcgctgtattatcagcgctgcgtgtccattctggcggcccttgaggaggccaaccgcagcgccggggggagcatctccggcaccattcgggtagacgtggcgggcaacctggcgcggaccctgctgctgcccgcgctgccgcagtttctcgcccgctacccggacattacgctgcagatcggcgaaagcgagcgtgacgtcgatctggttcgcgagggagtcgactgcgtcattcgcggcggccatctccccgacagcgagatgatctgccggccgctcgccgggttgcaggagatcacctgcgccagcccgacctatctcgcccggtacggcaccccgcatacgattgaaggactgacgggccacgtgatgatcgggtttgtttcatcgcgcacgcaacgtaccttgccgctgagctttacccaggatggccgtcagagcgaggtcagtttgccctgtcggttgctgacttccgatgccgacgttggcgccgaagcggcaaggcttggctttggcctgtatcaggcccccttgccccgccttgaggccgatctggcgtcgggcgcgttaacggaagtgctggccgattttcgccctgcgccgctcccgctctccctgctctatcccagtaatcggcagctctctgcccgggtacaggtatttatcgactgggtgacggcgctgatgaagcctcccctggcgcagcaggcatccggaaggctaaaataa

SEQ ID NO: 216555 - DNA, 291 bp, Klebsiella pneumoniae
gtggcctttaaagcggcagtctcccgggaaatattcgctaccaatgaccgcgtgacgctgcgctttatcgatgcgggagagatctttcctgccgaacgcctggcgctggcgcgtaacgatgagcactttgatgtcgatccgttagcggaaagcggcagaggtttgcggcttattctgcgcgcggtggactattttaatgtggaaacccgcgccggggagaatgtgacgaccctgataaaagcgttgccggatgccgttcttcgccattccaccgacgatcgcgtcaggtga

SEQ ID NO: 216556 - DNA, 2310 bp, Klebsiella pneumoniae
gtggagcaccattcaggcgactttagcgtcaccgtacgcgatgtgcgtcagctgacccagccggaaagcgatctgctgacgctgctgtgggtactggagggaagcgtaaatctggcggtggcggaaggtgcgtcgcagccgctcgccgccgacgggctggcgatcgttaaccgcaaccgtcgctggagcctgcgcagcgccggggccaacgccgtgatgatcctcaccctctccgccagctggctggcccgcctcgataatgccttttttgccgtcgattaccagataacgccgcgcacccgggatgccgatgacggcctgcgccgcctgatgcgccagctgctggtgagcggcctggtcaatcatcctggccattaccgactggaggccaaccgctggctgagtgagatagcgctgctgctggccacgcgctttagccagcccatcgcctccacgccccggcgcgataccgaaaaatggagccggagaatagccagcgtggtggcgcggatcgacgctaactatcagcgtcgcctctcgttgcaggaggtggcggccgcggaatttgtctccgaggcctggctgtcacgcttatttcgcaaagaggtcggggtaagttttgtccagtacctcaccgcgctgcgcctgcgccacgccgccgaccagctattaaccacccgcaaaaccgtccagcaaatcgcccgcgaacagggattcgccagtacgcgaatgatgagcgatttgtttaagcgccagcacggcgtgacgccgcgccagtatcgtgaacagcatcctctggagcttgcccgaccgcgcccgccgcaggccgatcgctggcagccggtggcggccgaccggctgtatgcgcgactcaatgagccggaaccacgcgaccgggaaagtccccccctgccgatcaacccaccgcaaacccgagagatcaatctgcgcgatcgtccagcgcgccccgcagcgctgcgccatacccggatggtggtgaccgtgcgcgaactggacgatctgctgcgcgaagatgtgcgccgggaactcgaacagctgcaccacgccctgccggtgtatgccatcgatatcaacgatccctttctcagcagtcggctgttcggcaccggctgggacgatccgcagatggccggctacgcctgctggtacaacctgcagcagatttttagctggctggcggcgatgggctggcaggtgatcctgcacaccggcgtcaccacccgcagtgacctgctgcagcgcttcctgcagctcgccgccaaccattttccgccagccacgctcaacagctggcgctttgtctggcactggtcgccgcaggccagcgaagctgcgcgccaggccgcctggcggcagcagcgcggggttcttcatcgcctgctgccgcagccgcagctggggatctggcaccgctttgctcccagcgatcccgggaacgatccgctgttccactcgccgctgctggcagaggcggattttctcgcctgccaggcagatgccaacgaacagctggatctggcccaggcagacagcagccgcctggcctccagcgaacattacccgctgcacaagctgcggcagatccacagcgccctgcgccagcgtcagctcaacctgccgctgtggctgctctcctggaatacgctgaccggcgatacgcgggataccaacggccgcttttttcgcggcgcgctgctgatggataatctgctgggggtggcggaccaggtctggctggcgggcttctggttaaattcaggcctccagggcgaagctcgcgccaacggcaagctcgatacctccagcctggcgctgcactatctgcacggcctgccgcgcccggtttactgggtactctggctctggcggcggctgcgcggcgagatcctggttcacgataaaaacctgctgctgctccaccaccagggtcactaccagctgctgctgcgcaatacggtggtctacaatccctggctctccagcgaagcggcctttatccagcgcttcagccagccctacagcgtgcggctgcagggcctggatggcagctggcgcatcaaacagcacctgttcgatcagcaccacggcgcgttgttcccgctggtggacgcctttcgcagccgcagcggccctgacgccgaggattatcagtggctgatgcatcaggcccgtccggcgctcagcgtggatgaagccaggctcgatggctattggctgcggatcgactcgctgcagagcaatgcgctggtgctgtacgagtttacgcctcagtcgcccacaggcccctga

SEQ ID NO: 216557 - DNA, 831 bp, Klebsiella pneumoniae
atgaacacttctgacaaccatgctttaggcgattttctccgcgcccgccgccagcgtctcgatccggcaacgtttggcttcccggcgggacgccggcgcaccccggggctgcgccgcgaagaggtcgcgcagctcgccagcatcagcccgacctggtatacctggcttgaacaggggcgcggtggggcgccttcccgcgaggtgctggagcggatcgcccgcggtctgcggctgaccaccccggagcgcgagcatctgtttattctcgcctttggccatccgccgcagacgcgtctgacggtgacggatgatatgacgccgcggctgcagcgggtgcttgacgctttcaccattccggcgattatccgcaccgccagctgggacgtcatcgcctggaacgcgccggcggccagggtgctgaccgactacagccaactgccgctggctgagcgcaacgtgctgcgccgcctgtttacccggccggaggcccgctgcactctggaggactggcagagggtggggcagcttatcgtcaacgccttccgcgccgacgtcacgcggatgggcgccacgaaagaaactgaccagttgatcgcggagctcagccagcagagcgtcgagttcgcccgtttctggcaaagccatgacgtcgccggccacggcgagggctataagcgcattaaccacccgcagatggggccgctcgacctggaatttacctcctttgccgtggaaggccgtcccgatctttccctgctggtctttaatccggcaacgacggagagccagcggaaaattcacggtttacttcaggggcctgtgggcgactga

SEQ ID NO: 216558 - DNA, 1644 bp, Klebsiella pneumoniae
atgcgcctgaaattgtcatctctcctggcagccgtttccctgctgtgtgggccagcttttgccgcccctgcgctccccgaccgcgccgatatccgcgatagcggtttcgtctattgcgtcagcggccaggttaatacctttaacccgcagaaagtcagcagcggcctgattgtcgatacgctggccgctcagatctacgatcgtctgcttgacgtcgatccctatacctaccggctggtccccgagctggcggagagctgggaagttctcgataacggcgccacctaccgctttcacctgcgccgccacgtcccgtttcaacgcacggcgtggtttaccccgacgcgggactttaatgccgatgacgtcatttttacctttggccgtatttttaaccgcgaccatccgtggcacaacgtcaacggcagcagcttcccctacttcgacagtctgcagtttgctgacagcgtggagagcgtccgcaagctggataatcagaccgtggagtttcgcctcaagcggccggacgcctcgttcctctggcatctggccacccactatgcgtcaattacctctgccgaatatgccgcccgcttaacgcaggacgaccgccaggagcaactggatcgccagccggttggcaccggcccgttccagctatccgattaccgctccggacaatatgttcgcctgcagcgccaccccggctactggcgcggcaaaccgttgatgccccaggtggtggtcgaccttggctccggcggcaccggccgcctgtcgaaactgctgaccggagaatgcgacgtgctggcctggccggccgccagccagttgacgatcctgcgtgacgacccgcgcctgcgcctgacgctgcgcccgggaatgaacatcgcctggctggccttcaacaccgccaagccgccgctggataaccctgaggtgcgccatgcgctggcgctggcgattaacaaccagcgcctgatgcagtccatctactatggcaccgcggagacggcggcgtccatgctgccgcgggcctcgtgggcctacgataatgacgctaaaattaccgaatataatccgcaggaggcccgcgcccgcctgaaagccctggggctggaaaacctgaccctcaagctgtgggtgcccaccagctcgcaggcgtggaatcccagcccgctgaaaacggcggagcttatccaggcggatatggcgcagattggcgttaaggtgattattgtgccggtagagggacgtttccaggaggcgcgcctgatggacatgagccacgacctgacgctctccggctgggcgacggacagtaacgatccggacagtttcttccgaccgctgctgagctgcgcggccatcgcctcgcaaaccaactttgcccactggtgtaaccgggagtttgacgacgtgctgcaaaaagcgctgctctcgcagcagctctcctcgcggatggacgcttacaaagaggcgcagcggatcctcgcccgcgaactgccggtcctgccgctggcctcgtcgctgcggctgcaggcctaccgctatgatatgaaaggcctggtgctcagccctttcggtaacgcttcgttcgctggcgtatcgagggaaaataccgaagaggtgaaaaagccatga

SEQ ID NO: 216559 - DNA, 927 bp, Klebsiella pneumoniae
atgttgaaagtgccgctggtacacgaacactggagcttagtgtgttccggaaggaaaattgaaaaagcaaaataccttgcaggtgatttccagtcgatcacgtatgatgaaacctgtcagcgattaggtgatgtgcttcaaaatcccttaccgaaagaaaccatcgctgtattcaaaaaagttaaggaccaccgcaaccgtgtagttcatttttatcattctgatttcaccgatactcaagtgaagacaattcttgatgaacaggctgatgcttggtttgcgctaaaccgttttatgcgtgatcagtggttctacctttttggagaaccgctaaactcaaagctggcatcagatgaggaccgtatgctccggagttcgttattttatgctgatgcaaaatttcgttatctccagcctattcttgataatctcagaaataagggaagcacgatttcaacctgtcgtgcctgcagcaaagaagctctcgttgacatgcctatcaatgaggaaagtgggaatactcttcacgaggcagattgcttagtgtgcggttgcagggctgatccatatgtcgaagttacatgccctgattgcggggcaaagcaggatatgggtgctaccggtggaacgcaattcaattgcagtaactgtaattattcttcatcacggtacgacttgctggatgagtggattggcaaaccggaagaatttagttattcgggtcttccagcaagttgttccgattgcgaaggctatgagacggtatgtgagtacggaggtggatatctgtgtacgaactgccttgtttttcatcagtcaataggtacttgtggttactgcggaggaagctctacatcagttagtgaaatgagcgggctggttggttgcggattttgtgacggaaatactaagtatcttgatgactga

SEQ ID NO: 216560 - DNA, 1185 bp, Klebsiella pneumoniae
atgaagctgacagctcgtcaggttgaaactgcaaaacctaaagagaagccctacaaactggctgatggtggtggtctttacctgctggttaatcccaatggcaaaaaatactggcgtctcaagtaccgttcactaggtaaagagaaactgctcgctattggcgtttaccccgatgtttctttagctgaagccagaagcaagcgagaggatgctaaaaggacattagcggctggcaacgatccttctcttgaacggaaaattgagaaactaagtcgtcaacaagacgcagaaaactcttttgaggctatcacgcgggagtggtatcagcgtcgctatgaccgctggtctgtctcctaccgcgaagagatgctgagaacctttgaaaaggatgtgttcccttatatcggtcaccggccaatcaaagatatcaagccgatggagttgcttgcagttctttcaaagatagaagcaagaggggcaactgagaaggtccgtaaggttcgccagcgctgtggagaagtctggaagtatgctgttgtgactggcagggccgagtacaatccagcaccagatctagccagcgccgtgactcctcatgagaaagagcactatgcttttttaacccaggatgaattgccagagtttcttcggactctgaacacctatgccggtagtgtgcttgttaagattgcgatgcaattacttattctgacaggagtaaggcctggggagttgaggcaagcggagtggcaggaatttgattttgagcggaaggtttggaacgtgccagcagagcgaatgaaaatgcgccgacctcatctggttccgttatcaagccaggcaattgacctgcttaatcagcttaaacccatgactggagcaggagcgttgctgttcccaggacgtaataatcctaagaaaccaatgagtgatatggcattaactgtgttggtaaggcgtatcggctatgccgggcgcgttacagggcatggattccgccacacgatgagtaccattttgcatgagcagggattcaactctgcctggattgagttacaactggctcacgtcgataagaactcaattcgtggaacgtataaccatgctcaatatctggaggggaggaaggagatgatgcagtggtatggggattatgtcgaagcgtgtttaactaagtttgtataa

SEQ ID NO: 216561 - DNA, 1110 bp, Klebsiella pneumoniae
gtggctaaaaataaagcggtaaatgctggggtagatgccttaactggtttcgagtttcaaagaaactgtgcattatatcttttgttagataattttaattctttcattgacaaaaacttctttatttgtattgaacatcatgatgattttcttttttgctataaaactgactgtttagcttatattaacgagatatatgcctaccaagcaaaaaaacttagcggaaaaatatggactatcgatgctagattttctgagatgatatctaaaattctattagttggggataatcttaaaaatgattctttcgaaaaaagtgaggattataggcatcagttaacatttatatcaaatacagaaatagagttaaaatactcgcctctgaagaagttaaaagctgaaggtgctactgagcagatagtaaagataaatgagcaaaactccacctgtgtttataatgatttacatgaaagtattaaagttaaaatcgaaaatagaataacagaagtttgcaatgaagaatcttcggtttttcatcggcaagagttagataacttacatattcagtgggtcgatttcccaagaactgctgcgaaacaaaaagaatctcttattggactcatggttagaaaattccctcatatagctgatccgaaagcagctattgatgtaatacttactctatttagggatgtagagactgtatataaccaagggcaggaaatatgcctgcttgatccaacaaaaagggttgaaggcgaagatataaaaaaagtcatgaatattattgattcacagcaaaaggcattcgactattggcgtgccgaagcaaagcaattctcaatgaaatttagaataccacttagcatacagaaaaatcatgaaaactatatacttaactcttttgaactactcaaggatatgagtaattacgattatcaaattattaaagactttgttagaaataatgattacacaactcaatatatttctctgcaagatgcattaactgcatatgttgataatattagaaaatctcattctataaacctggataatattgatacattttttgcagttctgtgttcttacgttgagtgctacgattaa

SEQ ID NO: 216562 - DNA, 1764 bp, Klebsiella pneumoniae
atgaagacaattataaagtttgatagattgttcgttgtctctgaaagtcataatttatatttcgaccaaaagttttcaaataaaataaacataataagtgggtgtaatacctcgggtaaaagtactttaatacagagcattttatttacctttggaattaatgatgttaaagatggtttgagcgaaattattcgatacaaacctacgttcagattggatttcagcatcactaaaggaggtgtagataaaaaatatataatagtaagagagctcggtagcatatatttaaaagaggatgggggggatctttttagttttcatggtattgactctgatggtcgagttgaacatgtgaaacttaaggaaatgttatctcaattatttgattttaatatgcttttagaacagaagggggagctaaaaaaagcatcgatagaatgtatgttcctgccttactatatttctcaatctgtagggtgggtttatttaagagagtcattctctaaccttggtttttataaggactttaaagacacgtatcttgattattatcttggcatagaaaattcttttgataaagaatatttttataagttaacaaaagagcgggcgcaacttcagtcgaagatctcctcattgagtaaatatagcactgagcctcactttgttgtttctaaattactggatgaagaattcggcgatgaggcacagaagtatattgatggttatataaatttagttgcatcattagacgaagaacgtgatgtatatacgagtttgtgtaataaattatccttgactaaaaatcatgtcaagatcctaagaagaactaaaagaaatatcaaaaaccaaaactataacaatattgaccgttgtcctgcatgtacgcaaatacttccttattccctagaggggttatatggttattatcaaaacatcaatgatactgataaactatcagagcaaataaataataaaatacaaaagatacagtctgatattaatagttcacttgcgaagattaaaaagttagaaattgatatatcttcaaactattcatattttcttgagaaaaaatcacaaaatatatctgttaatacatggatcgataataaagcaaacatacgtctgttaagcaatattcatgaagagatagaagaacatacaaaaaggtctgatgaaattaaagggttgattgatgggatgggagaggagcagtctctttttgtcgagcggtttaacaaagaaaaagatttcaaggggatatttaaaaaatatcttaatgacatgcagttattcaatgtaacagaacctagatatacagatctttataaaataaactcgttcccttttcaaggcgttgagcttcacaaaactgtaatgtcatatcattttgcattaaattctttaataagagaaacagacaatatacatcgacttccatttatgcttgatgcgattctaaaagaagatatcgacgacagaaattttgatctcatactttcgtttgttggaagaaatcttccgacagatactcaatcatttatatcgatatctgagtattctgaagataacctcttgaaagatggtaaagatgtaaatgcattccgaagagccaaggtgaaagatattaagaatcgatactttcctgatggtacgaatttattctttattggtgatgggaagcatgagagagcatttttatcaaaacctttggatttaaacctcgatatttttgtcgatacttgtcggcttactgaatga

SEQ ID NO: 216563 - DNA, 351 bp, Klebsiella pneumoniae
atgatttttacagcattacaactcttcaaaaacctctccgatgaaacccgcctaggcattgtgttgctgctcagagagatgggagagctgtgcgtgtgtgatctctgtacagcgctggatcagtcacagcccaagatctcacgccatctggcgatgctcagggagagtggtctattactggatcgcaaacagggcaagtgggttcactaccgtttatccccgcatattccttcctgggccgctcaggtgattgagcaggcttggttaagccaacaggacgacatacaggccatcgcccgtaagctagcatcggcaaactgctctggtagcggtaaggctgtttgcatctaa

SEQ ID NO: 216564 - DNA, 348 bp, Klebsiella pneumoniae; identical to SEQ ID NO: 112796

SEQ ID NO: 216565 - DNA, 171 bp, Klebsiella pneumoniae
atggtttttgtttgccttttttttgataattatagtttcaatactaatgtgaactttaatcagtttaattatctttttctgacaatctcggtctcaggtctcgcaggcaatagaagtttttcctacacctcccttaccgataaaaaacaggtaatgcgggatattctgtaa

SEQ ID NO: 216566 - DNA, 636 bp, Klebsiella pneumoniae
atgaaactgcaacttgcactggacggactgggattgtcagaatcccttattcttcttgataaagtaaaagattcaatcgatatcattgaaattggcacctctttcattattcgtgaggggcttagggcagtttccgagataaagagatgttttccacacttcgaaattctggcagacctaaaaatcatggatgacggttatttcaaagcgggaaaagcgtatcgcgccggcgctgattatgtcacggtactcggtgtcaccgatccgctgacgatcaaaggctgccttgacattgcgggtcaattagggaaaaaagtggtggcaaatctgatgtgtgttaacgacctgccgacacgtatcacagaacttgaaaatatgggagttcatgtcctgtccgttcataccggtgttgatcaacaggccgtaggtcgggagccaatagaagatttacagttgttggtcgcccacacgaagagggctgagattgctgtcgcgggagggatcaacagtcgtcgcgtctggaagtacattgatctgcgtccggaaatcatcattgtcggcgcaggtctgattcatcacccggcccccgcagacgaagcggcagccatcaaacaacaaatgcgtgaagcccgttaa

SEQ ID NO: 216567 - DNA, 1521 bp, Klebsiella pneumoniae
atgcgttatgcacatcctggccagcccggcgccgtggtttcatttaaatcggcttacggcaactttattgacggtagatttgtcgagccgctgagcggtgaattctttatgaatacttcgccggtcgacggcagcaacattgcgcagtttccccgctcggatgccagagacattgacttagccctcgacgccgcccatcgcgcggcgccggcgtggggtaaaacctcagtgcaacagcgctccaggctgctgctgcaggtcgccgatcgtattgaacagcatctggaatatctggcggtggcggagagctgggacaatgggaaaccgatccgcgaaacgctgaacgccgacctgccgctggcggtggaccattttcgctacttcgccggctgcctgcgcgcccaggagggtagtaccgccgaaattgacgaaaccacggtggcctatcatttccatgaaccgctgggggtggtcgggcagattatcccgtggaacttcccgctgctgatggccgcgtggaagctggccccggccctggcggcggggaactgcgtggtgctcaaaccggcggaacagacgccgctaagcattaccctgctgctggagctgatcggcgatctgttcccggccggggtgcttaacgtggtgcagggtttcggcaaagaggcgggcgaggcgctggccaccagcaagcgtatcgccaagctggcgtttaccggctccacgccggtcgggcggcatattctcgcctgcgcggcggaaaatattatcccctgcaccgtcgagctgggggggaaatcgcccaacatctacttcgccgacgtgatggacggagaagaggaatttattgagaaggcggtggaggggctggtgctcggcttcttcaaccagggtgaggtctgtacctgcccgtcgcgggcgctgatccatgaatccatctatgagccctttatggcacgggtcatggagaaggtggcgcagatccgccgcggcgatccgttagataccgacaccatgatcggcgctcaggcttcccgccagcagttcgacaagatcctctcctatattcagattgcccgggaagagggtgggcaaattctgaccggcggcgagcgggcggctatcgcgccggcgctggataatggcttttatattcagcctacgctgattaaaggtcgcaacgatatgcgctccttccaggaggagatctttgggccggtgatcggggtgaccacctttaaggacgaagcggaagcgctggctatcgccaatgagacccagtttggtctcggcgccggggtgtggacgcgggataccaacctcgcctatcgcatgggtcgcggcattaaagccggtcgcgtgtggaccaactgctatcatgtctacccggcgcatgcggcgttcggcggctataaacagtccggcgtcgggcgggaaacgcacaagatggcgctggatgcctatcagcaaaccaaaaacctgctggtgagctacggcaccgcgccgctgggcctgttctga

SEQ ID NO: 216568 - DNA, 1095 bp, Klebsiella pneumoniae
atgaagggtatgcagaagatcaaaaggggtaagaacttctcaggtgttgttcattatgcattgaaaccgggagcacaccacaaaagtgatccagtcgtcattggcgggaacatgttaagtgattcagccgttgaattgatcgctgaattcgatagcaccaagcatcttcgcctggatgtcgcaaaaccagtttggcacaactcacttcgcttacccgacggtgaaacactaacgaatgaacagtggtccattatcgcagatgattacatgaagaggatggggttcagtgatactcaccttcgttgctatgtgcttcatgacgacgatggccagcacatacacattatcgcaagtcgcatagatctcaatggtgggaagctctacttgggtaggaacgaaaacctcatcagcacacagatcatcagtaaactcgaaatcgctcatggcctgacagtgaccaaaactgcatctcccccctcgcaagcacaaccgaagcggaagagagtgtcccgtaatgagaaaatgctatcggaacgaaccggggtgctttcaccaagagaagctctgcagcagatacttgataaaagtttatctgataagccggaccttctaacttttatcaagaggctggaagaagctgaagtatcttggaaggccaatattgcctctaccggtaaaatgaacggcttctctttcgaatacacaggcatagctttcaaagcttcacaattgggcaagagctactcctgggcaaatctcagtaatcggcttaactacaaccccgaccacttagaagctctgcgaagcgacatatcgataaaagaccaacctgctgctcctgctcctgctcctgctcctgctcctgctcctgctcctgctcctgctcctgaaacagtgttgaaaaccactgagagaaaggaaagtatcgttgaaaaaattgcagaactggaattacggcttagagaagacaaacgaaacgaaatcgtaggaaagattcttcaaaaaaatgcagtacaacggcaaaagcatctcagattcgtagagtggcttgcccaccaaaattctccatcggtgattaccagagtcatccgatga

SEQ ID NO: 216569 - DNA, 369 bp, Klebsiella pneumoniae
atgattaaaccaaagaaattattgagaacttactgtgtcagtgttcgtcttaacgatgatgaattgaacaagcttaaccatttaaggaaaaatcattcaaaaggggaatggcttcgtatggcttcccttcaaaagttacctcctgttatacctgcgattaataccaaagcctggaaagctttaactgatatatcgcaaaagctaaatcgaattgcgacccatatagattgtaaaagcaaggacagtcagcttacccatactgaattgttcgctgttaagcgacaacttgaagagcttcgccagaacctgttaaatgcagatgtatggagcaaacccgatgaagggtatgcagaagatcaaaaggggtaa

SEQ ID NO: 216570 - DNA, 876 bp, Klebsiella pneumoniae
atgaaaataaaaaaaccaaatgatgttgtttttgttgataatataactcaaagagcacttcttgaagcagtgtgctcgaacagaagtggtgcattaaaaactttcttttcgcaaaataaggacatcttcctcgacgacaatgatagattttatacagaattttccaattccaacttttacagaaatagtcaattagattataaaccagtacagaaatcacttaataatttatataaaagtgcagcagatgataacgagcgtgaatatataggaaagatgagaagactgcatcgtcaattattatgcccatattgcttacgttcaaattgtagaacactagaccattactttgataaggtttcctattcagaattatccctaaacatatggaatttagtacctacatgtggtgattgtaactttaaaaaacttagtgctcgtattaccagttcttctcaaaggtttatccatccttattttgatgaattttatgataaaaatgatagctattttttaaaattaataaccattgagactgatgatgcaattttggttaattttgacttcaccgccaatcccaggttggctaacccaagtgttagaagtgtgataaactggcacattcaggaacttgaaatcaccattgataatgcagatatgtttagaaaagatttcgagtattacattaacaaaacaagaaaaaagaatctgcaaaacaatcaagaaattcaagatttcatcaatgaagaaatgagttatgaacgcgaattttcatggcgaggagttatgctaaattcgctaagtagtgaccaagaaaactttcgaattttcatcgaactagtttacagtgtaaaatacattttaaatgttgagtga

SEQ ID NO: 216571 - DNA, 1068 bp, Klebsiella pneumoniae
ttgagctgcgaaatacagcaccctattgaaaactatactatcgctcttaattttaataacaatgcactaggcagaaccccaataaatgttttcatcgggaagaatgctacgggaaaaagctttgcactgaaacatatttcgcatgaatttatttctggacacagttcttcagatgtcataaataaagttatagtcatttcaaatacaattcaagatcaatatgttaaaaatcaaaagcaattcaaaaaaataagcaaaggtattcctgttgattatgaatattactcagcagtaagcaagaaatcttttaatgaagaagacggtattacctcacctaaactacaaacgttaataagcaaagtaatcgataggtcaaacactgagaagttaccctttgatccgttaatcattttagacaaacacataaaaaaagttcttaatcaggtagattccagatttacactcgatagtggagtttctctttcctctctatgggacttaaagctttttgcattaaacggctctgtaagacttgacgaagtttggtttattgaaaaaataaatgggctcagagaaatcatttatagttcaggccaatattatgctctttttttgatggcttatatattatcttctattcagaataatagtattatccttatagatgaaatagaaaattttctacatcctaatctaatcatttcattgatatcaagtttatctgatttattgattagcactaattctatttgcttgattgcgacacattctctgtatgtagcacgagagatacctcgttctggtgtccacatttttgaaaaggatattgataattcaatttacactttcaatcctaatattgaaacttatggtgaggaccttcaaaagctgagtgcatatgtattcttcagtaaggacagagagtcaaaatataatgaaaaaatcaaaaacattgccaaaagatataatactaaaaaagatttaattgatgaccttcatggagatctttcttatagtttattaagcaggatagcggataaaatcgatgaaaataaaaaaaccaaatga

SEQ ID NO: 216572 - DNA, 720 bp, Klebsiella pneumoniae; identical to SEQ ID NO: 97227

SEQ ID NO: 216573 - DNA, 342 bp, Klebsiella pneumoniae; identical to SEQ ID NO: 16817

SEQ ID NO: 216574 - DNA, 792 bp, Klebsiella pneumoniae; identical to SEQ ID NO: 97225

SEQ ID NO: 216575 - DNA, 1266 bp, Klebsiella pneumoniae; identical to SEQ ID NO: 97224

SEQ ID NO: 216576 - DNA, 441 bp, Klebsiella pneumoniae; identical to SEQ ID NO: 97223

SEQ ID NO: 216577 - DNA, 426 bp, Klebsiella pneumoniae; identical to SEQ ID NO: 16821

SEQ ID NO: 216578 - DNA, 336 bp, Klebsiella pneumoniae; identical to SEQ ID NO: 133262

SEQ ID NO: 216579 - DNA, 240 bp, Klebsiella pneumoniae; identical to SEQ ID NO: 16823

SEQ ID NO: 216580 - DNA, 546 bp, Klebsiella pneumoniae; identical to SEQ ID NO: 97148

SEQ ID NO: 216581 - DNA, 297 bp, Klebsiella pneumoniae; identical to SEQ ID NO: 97149

SEQ ID NO: 216582 - DNA, 360 bp, Klebsiella pneumoniae; identical to SEQ ID NO: 97150

SEQ ID NO: 216583 - DNA, 285 bp, Klebsiella pneumoniae; identical to SEQ ID NO: 97151

SEQ ID NO: 216584 - DNA, 333 bp, Klebsiella pneumoniae; identical to SEQ ID NO: 16829

SEQ ID NO: 216585 - DNA, 180 bp, Klebsiella pneumoniae; identical to SEQ ID NO: 97153

SEQ ID NO: 216586 - DNA, 321 bp, Klebsiella pneumoniae; identical to SEQ ID NO: 97154

SEQ ID NO: 216587 - DNA, 345 bp, Klebsiella pneumoniae; identical to SEQ ID NO: 97155

SEQ ID NO: 216588 - DNA, 369 bp, Klebsiella pneumoniae; identical to SEQ ID NO: 97156

SEQ ID NO: 216589 - DNA, 717 bp, Klebsiella pneumoniae; identical to SEQ ID NO: 97157

SEQ ID NO: 216590 - DNA, 420 bp, Klebsiella pneumoniae; identical to SEQ ID NO: 22854

SEQ ID NO: 216591 - DNA, 417 bp, Klebsiella pneumoniae; identical to SEQ ID NO: 16834

SEQ ID NO: 216592 - DNA, 1530 bp, Klebsiella pneumoniae
atggacgatagagaaagaggcttagcatttttatttgcaattactttgcctccagtgatggtatggtttctagttgcaaaatttacctacggtattgatccatccacggctaaatacctgattccgtatctggttaagaatactttttcgctatggcctttatggtcagctttaattgctggctggtttattggtgttggcggtctgatcgcttttatcatttatgataaatcacgcgtgtttaaaggcgaaagattcaaaaagatttatcgtggtacagagcttgttagcgccagaacactcgctgataaaacacgcgaaagaggtgtcaaccagttaaccgtggctaatatccccatacctacatacgctgagaacttgcatttttcgattgccggtacaaccggtactggtaaaaccacaattttcaatgaactgttatttaagagcatcattagaggcggcaaaaatattgctttagatccaaatggggggttcttaaagaatttctatcgtcccggcgatgttattttaaacgcctatgataaacgcactgaaggctgggtgtttttcaatgaaattcgccgttcatatgattacgagcgcttagtgaactctattgttcaggaaagccctgatatggctactgaagaatggttcggctatggccgtcttatttttagtgaagtttcgaaaaaacttcacagcctatacagcacagtaactatggaagaagttattcactgggcctgtaacgttgaccagaaaaaattaaaagaatttttaatggggacgcctgccgaagctattttttccgggtctgaaaaagcagttggaagcgcgcgatttgttctcagtaagaatcttgccccacatttgaaaatgccggaaggtaatttttccctgcgtgactggcttgatgatggaaagccgggaaccttgtttatcacctggcaggaagaaatgaaaaggtcacttaatccgctaatttcctgctggctggattcgattttttctatcgtgctgggtatgggtgaaaaagaaagccgcattaatgtatttattgacgagctggaatcactccagtttctgccaaacctcaacgatgcactgaccaaagggcgtaaaagcggtctgtgtgtttatgctggctatcaaacctattctcagctggttaaggtttatggtcgggatatggctcagacaattctggctaacatgcgttctaacatcgtgctgggcggcagccgtctcggtgatgaaacgttggatcaaatgtcgcgctcactcggtgagatagaaggcgaagttgagcgtaaagaatccgatcctcagaagccctggattgtccgtaaacgccgcgacgttaaagttgttcgtgccgtaacgcctaccgaaatatcaatgttgccaaacctcaccggctatctggcgttgcctggtgatatgcccgtcgctaagttcaaggctaaacacgttaaataccatcgcaaaaaccctgttcctggcattgaactgagggatatctga

SEQ ID NO: 216593 - DNA, 3243 bp, Klebsiella pneumoniae
atgcttgatataaccacgattacccgccagaacgtcactagcgttgtgggctactactctgatgcaaaggatgattactacagtaaggattcatcattcacgtcctggcagggaaccggagctgaagccctcggcttatccggggacgttgaatcagcccggtttaaagagctgcttgtcggtgagatagataccttcacgcatatgcagcgacacgtgggtgatgccaaaaaagagcgtctgggctacgacctgacgttttcagcgcctaaaggggtatccatgcaggcgctgatacacggcgataaaaccattatcgaggctcatgaaaaagctgttgccgctgctgtgcgtgaagctgaaaaactcgcgcaggcccggacgactcgccaggggaaatcagtaacccagaataccaataaccttgtcgtcgctactttccgccacgaaacgtccagggcgctagatcctgatttgcacacacacgcttttgtcatgaacatgacccagcgcgaggacggccagtggcgcgcgctcaaaaatgatgagctgatgcgtaataaaatgcacctgggcgatgtttacaaacaggagctggcgttggagttgaccaaagccggttatgagctgcgttacaacagcaaaaataacacgttcgatatggcccatttttcagatgaacagattcgcgctttttcccgccggtcggagcaaattgaaaagggactcgctgcaatggggctgacgcgggaaaccgccgatgctcagacgaaaagccgcgtctcgatggctacgcgtgaaaagaaaacagagcattcccgtgaagaaattcaccaggaatgggccagccgcgccaaaacgctcggcattgattttgataaccgtgaatggcagggacacggtaaacctctggaggctgatatagcgcgcaacatggccccggattttaccagcccggaggttaaagctgaccgggctatccagtttgcagttaagtcgctgtcagagcgcgatgccagctttgaacgccagaagctgattcaaatcgctaataagcaggtgctgggccatgccacaatagccgatgttgaaaaagcgtacctgaaggcggtacagaagggcgccatcatcgagggcgaagcccggtatcaatcaactctgaaggtcggtgcttcagttatggccgaaactctgacgcgcaaagagtggatcgactcgctgacgaatagcgggatgcgtgcggataaagcccgttttgcggtagatgatggtattaaaaacggcaggcttaaaaagaccagccaccgcgtcactaccgtggagggtattcgccttgagcgttccattctgactatcgaatcacgcggccgggggcagatgccgcgacagctgaccgcagagattgcaggccagctgcttgccgggaaaaccctcaagaaggagcagatgcgcgcggttacagaaattgtgacgagcaaagatcggtttgtggccgcacatggttacgccggtaccggtaaaagctatatgacgatggccgctaaagagctgctggagtcacaagggctgaaggtcacggcgctggccccctatgggacacagaaaaaagcgcttgaagatgatggattaccggcccgcaccgttgccgctttcctcaaagcgaaggataaaaagctggatgaaaaatcagtcgtattcattgatgaagccggggttatacccgcccgacagatgaaacagctgatggaggtgatcgagaagcataacgctcgcgcggtattcctgggggatacgtcacagacgaaagcggtagaagccggtaagccttttgagcagctgattaaagcaggtatgcagaccagctacatgaaagacattcagcgacagaagaatgaagttttgcttgaggcggttaagtatgccgctgaaggtaatgccgcgcgcgccctgaaaaatatcaccggcgtgaacgaactgaaggaagaagcgccccgactctctcaactagccgatcgctacctgtctctgtcctcagaacaacaggatgccaccctgataatctctggtacgaacgcctcacgcaaaaccctcaatgactacatccggggcaatctggggcttgccggaaccggcgaaacgttcacgctacttgaccgcgtggattcgacacaggcggaacgccgcgacagccgttatttcagtaaagggcaaatcattatccccgaacaggattacaaaaatggtatgaagcggggcgagtcttaccaggttcttgataccgggccgggcaacaaattgacggttgaaagcagcagcggtgagcagatcgctttcagcccgcgtacacacaccaagctgtctgtataccaggcagtcagcgccgaactggcgccgggcgataaggttatggtaacgcgtaacgataaaacgctggacgttgccaacggcgaccgcttcacggtgaaaaccgtggagggtgaaaaactgacgcttgaggacaaaaaagggcgcacggttgagctggacaaaaaacaggcttcttatctttcctatgcttatgcaaccaccgtccacaaatcccaggggcttacctgtgatcgcgtgttgttcaacatagataccaaatcgcttaccacttctaaggacgttttttatgttggtatttcgcgtgcgcgtcatgaggtggaaatttttaccgacgataaaaaatctttggcatcgagcgtgagccgcgacagcccgaaaaccacggccgcagaaattgaccgtttctttgggcttgaggccaggtttaaggatattggccgcgataccagtttagaaacccgatcagctgaaaaaggtctgccagaagccacgggggaaagcatggcgtttaaccagaaacccgatgaacataacatgacaaccggcactgattatcagccggtgagcaacgcagaggacgcctttcatcttaagcagaaccctatggatgattccgttggcctgcggcgtcatgaagcacagcaaaatgatgcagaactggcccatgattatgctgctgccgacgatcagcagtggagcgcgcaggagtatgccgattacgagcattatgccgaagcatcagactacgactttgacagcagcatttacgacgattacgccatgccgcagacgtctcaggcggaacagagccataccggaaaagaacacacccatgagcatgagcatgagcatgaagaagggggccatgaaatctga

SEQ ID NO: 216594 - DNA, 627 bp, Klebsiella pneumoniae
atggagcagaccgacaagcgcaagcaggataaactgaagttcgaccgggtaattaatctggcgcgcagactgccgcaaccggcgatccatgacttactacgcgcgctgatactgccaattcaggccgattacttgctggccgttggcacggagggccaggacgcgcgcccggacatgaacgagcgcgagttcttcttcacaaaaatcatctgggcgatggattacacgcacatgaaatcactcaggcttgcagctgaagattttcccctggcgcttgcgacggccaagatcctgccgtggccgtgggatgaatcaagctaccggagtgctttagccgatataggcagcgctaagggcaatccgtgggtacaggatattaaccaccgcgttactttgtggttgccctggcggataggctttgtacgaggagggaaccattctattgccagcggcgttctggccggtgagggtgaggtaatacccgatacggtttatgatatgcggtatttgctcgatattgtcagcactgacgggtattactggtacatgagcgggaagatctgcgagagagtcagtgactaccgtacagccgccttttttgaaataggccgcctgcttacactgtga

SEQ ID NO: 216595 - DNA, 534 bp, Klebsiella pneumoniae
atgaaaaacttagcaacctggcttctggccgcagcatttacgacagccgccctgcccgcctttgcggtggaaccatccgttcaggttggctactcgcctgaaggaagcgcccgcgttctcgtcctgagcgccattgactccgcaaaaacctcgatacggatgatggcttattcttttaccgccccggatattatgaaggcgctggtagcagccaaaaaacggggagttgatgtgaaaatcgtaattgatgaaaggggcaatacggggcgcgccagcattgcggccatgaactacatagcgaacagcggcatccctttgcgtactgacagtgatttccctatccagcatgacaaggtgatcatcgtggataatgtgaccgttgaaactggcagctttaatttcaccaaagcggccgaaacgaaaaactcggagaatgcggtggtgatctggaacatgcctaagctcgctgaatcattcctcgaacactggcaagaccgctggaatcgggggagagactaccgttccagctactga

SEQ ID NO: 216596 - DNA, 996 bp, Klebsiella pneumoniae; identical to SEQ ID NO: 97196

SEQ ID NO: 216597 - DNA, 1161 bp, Klebsiella pneumoniae; identical to SEQ ID NO: 97197

SEQ ID NO: 216598 - DNA, 885 bp, Klebsiella pneumoniae; identical to SEQ ID NO: 97198

SEQ ID NO: 216599 - DNA, 699 bp, Klebsiella pneumoniae
atgaaagctaataaaaaaacagggcttacacgtgaagccattaaagagttcaacgaaagccgtaaagggcttgaagttgatctgatggatgaagtgctgaagtcccggcgtaccgcctggatggttgccaccggttcagcggtggtaactgtttttgcactctctttagttggttacgtggtgcataagtacagccagccaatccccgcacatctgctaacgctcaacgaggccactcacgaagtacagcaggtcaagctgacccgcgaccagacctcttatggtgacgaaattgataagttctggctgacacaatatgtcattcaccgtgagagctatgacttctattcagttcaggtcgactatacggccgttggcttaatgtccacgccgaacgtggcagagtcttaccagagcaagttcaagggccgcaacggtcttgataaggttctgggcgacagtgaaacgacccacgtgaagattaactctgtgatcctcgataaaccgcacggcgtagcaacgatacgctttactacggttcgccgcgtgcgcagcaatcccgttgatgatcagccgcagcgctggattgccattatggggtatgaatataaatcgctggcgatgaatgctgagcagcgttatgtcaacccgctgggtttccgcgtgacgagttatcgcgtcaaccctgaagttaactga

SEQ ID NO: 216600 - DNA, 1041 bp, Klebsiella pneumoniae; identical to SEQ ID NO: 97200

SEQ ID NO: 216601 - DNA, 228 bp, Klebsiella pneumoniae; identical to SEQ ID NO: 16848

SEQ ID NO: 216602 - DNA, 714 bp, Klebsiella pneumoniae; identical to SEQ ID NO: 133280

SEQ ID NO: 216603 - DNA, 2601 bp, Klebsiella pneumoniae; identical to SEQ ID NO: 97186

SEQ ID NO: 216604 - DNA, 318 bp, Klebsiella pneumoniae; identical to SEQ ID NO: 97185

SEQ ID NO: 216605 - DNA, 294 bp, Klebsiella pneumoniae; identical to SEQ ID NO: 16852

SEQ ID NO: 216606 - DNA, 282 bp, Klebsiella pneumoniae; identical to SEQ ID NO: 97183

SEQ ID NO: 216607 - DNA, 735 bp, Klebsiella pneumoniae
atgagtaaacatccaaaactcctggttctcgctctggcctgccttgcttgtgctggccgtgccagtgctgcgcctgcctccgatgaagttgccaggcttgcgcagagatgtgcgcctgatgtttcacccttaacgatggcgtacatcgtcggccatgagtcctcaaatgggccgtacaggatcaatattaacggtagtattcagttaaaacagcaaccgcgtactgaagctgaggccgtcagcgttgcgaaagttctgctgaaggataataaaagttttgatatgggccttgcacaaattaactcaaataatttagtgggcctgggtctttcggttgacgatattttcaaaccctgcatcaacctgcgggcgagccagaccatccttaaagcctgttatgatagcgccctgaaatcctacccagccgggcaggttgcgctgagacacgcgctttcctgctacaacaccggctcactcacaaacgggatttctaacgggtatgtcacgaaagttatcaacgtggcgcgtcaatcaactgatttgaaaatccctacgctgctacctgacggccagaccagtgaggacagcaccgcgactgagcctcagcaggcaaaaagtacggcgccgcagtatgacggtgaacaagatgtttttggttcgggtgatggcgatgccttcagccgaaataatacggatgcctttttaaccagacaggaaacagcgaagggggaatga

SEQ ID NO: 216608 - DNA, 552 bp, Klebsiella pneumoniae
atgctggcgagtaacctgatcgcatggacacgaaattttctaaaaatgggcggaatggaagatgcctttttcttccttctgcttttttgcctttccgcaaaatcaataagttcgcccatttttataccctccggttatatcttcagatcatcaagtgataaaccactatcaagcagctctttgagccatgtgggtcggcggccagtcccggaccaggtattttctgcgttcctggggtcgcggtattttgctggtctatgttctctggggttggctacgccctgcatcttcatggcttccaggctaatgccagcgtccaattttgcagttagccaggccgggcgcttccctataccagtccacgtattaaaagggttatccgggtcacgatacacgggttcgccttttggtcgtttttctgatttcaggggaaccagcatcaccttccttccttcagcggttttcttttcgtttcttcttgacacgatctcattagcccttatcataaacaaaagtcgtcgaaattacaattacgcggtgaaacataaatga

SEQ ID NO: 216609 - DNA, 315 bp, Klebsiella pneumoniae; identical to SEQ ID NO: 97179

SEQ ID NO: 216610 - DNA, 648 bp, Klebsiella pneumoniae
atgaccatgatccccttccccactacagaaaaccttattctatgggcttgcagcgccatcgcactgcttgccgttgtattcttccggcgttcagtacggcacaggcgacacaaaaggaagcagcaaagtgcgcggcgggtgctggagcgcataaagacgttgccgggcttcccacaaaaaattaactacctgaggaaaattgatccttttgtgtttgaagaactgttgctggaaggatttgaagcgcatggcttcagaaccatcagaaacaaacgctataccggcgatggaggcattgacggccaggtaataataggaaaatatcgctatcttattcaggctaaacgctatcgcggccatattgctttacagcacgtacaggagttcgagaagttgcttaaacgtcataactgtcgcggtctgttttgccataccgggaaaaccggcgcaggttcaaaatctgtcagtattgccagtgaacggatggagattatcagcggccagcgcctgatagatttgctcacgcccggcagctccttcactatcgcaaccgccccgcagacgatgatgaagcgtaccgcagcaacactagaaacgagcaccattgttaaagatgccggtaaagaaaatcgataccatgagagttaa

SEQ ID NO: 216611 - DNA, 1230 bp, Klebsiella pneumoniae
atggcaaaaatcgctaagaagctcactgacactgaaatcaaaagcacgaagccagccgataaagaaatcaacttgtttgacggtgatggtttgatcctgcgaatcgctcctctcacaaaaggagggaagaagaattggtatttcagatatgcggtcccagtgagtaagaaaagaaccaaaatgagccttgggacctatcctcaccttacactggcaagagccagaaccttacgagatgaatacctttccttgcttgccaatggcattgatccccaagtccataacagcaataaagctaatgccttaaagaatgctactgaacacactctccaagccgtggcaaggaaatggttagatgagaaggtaaagacctcaggtatctcacaagaccatgcagaagatatctggcgaagcctggagagaaatatctttccaggattgggtaatgttcctgtcaatgagatccgacccaaactcttaaagcaacaccttgaccctattgagcaacggggagtcctcgaaaccttacggcgaatcatttcccgattaaatgaaattttccgctatgcagcaacagaagaactcatagaattcaatcctgctgacaaccttggtcaacggttcagtaggcctaaaaaacagaatatgccagcattacccccttccgaactcccccgcttcctggttgctctaatcaatgcttctatccgtttagaaacaaggctactgattgagtggcaacttctcacatgggttcgccctggtgaagctgttcgcacaagatgggctgatatagatatcgataattcaatgtggaacatcccggctgagtttatgaaaatgaagaagcctcacaaagttccactaagtaaagaagctttgagagtcctggagtcaatgaaagggattagtgggcatcgtggatgggtgtttccaagcataaaggctcctcttaaccatatgcatgaacaaacagctaatgcggccataatccgtatgggcttcggaggtgagcttgtagctcatggaatgagatctattgcacgaacggccgcagaggagtcgggtaagttcaggacagatgtcttagaagcggcccttgcacactcgaagacagatgaaataattgcagcctataaccgagcagaatacatagttgaacgagtggctctcatgcagtggtggggtgattatgtccaagctcaaaggctaaaagtcattgctgcttga

SEQ ID NO: 216612 - DNA, 1293 bp, Klebsiella pneumoniae
atggcttctttaaagataaaatatgctgcaataattatcagcagcctcatagcaggagggctgatatcggttactgcctggcagtatgtaaactcatcacaaaaaacagtacaaaccgaacaaaaggcaccggagcgaaaggtacttttctggtatgacccgatgaaaccggataccaaatttgataaacccggaaaatcgccctttatggatatggacctggtgccaaaatatgctgatgaaagcggcgataaaagcagtggcgggatccgtatcgatccaacgcaggttcagaatctgggattaaaaacgcaaaaagtcacgcgaggaatgctgaattattctcagacaatcccggctaatgtcagttacaacgagtatcagtttgtcattgtgcaggcgcgctctgacggtttcgtcgaaaaagtgtatcccctgacgattggcgatcatgtgaagaaaggcactccgcttatcgatatcaccattcctgaatgggttgaggcacaaagtgagttcctgctgttatccggtacaggcggtacgtcaacccagataaaaggggttctggagcgacttcgtctggctggtatgccggaagaggatattcaaaggctgcgttcaacccgcacaatccagacccgttttaccattaaagcacctattgatggtgtcattactgcgtttgacctgcgcaccggcatgaatatttcgaaagataaagtagtggctcagattcaggggatggacccggtctggatcagcgctgcagtgccagaatctatcgcatatctgctgaaagatacgtcgcagtttgaaatttcggtaccggcttatccggataaaacattccatgtcgaaaaatggaacattcttcccagcgtggatcagacaacccgtacgcttcaggtccgtctccaggtttctaataaggatgagtttctcaagccgggcatgaatgcctatctgaaactgaataccaagagccaggagatgctgctgataccaagccaggccgttatcgataccggcaaagaacagcgcgtgattactgttgatgatgaaggcaagtttgtgccgaaacagatccacgttctgcatgaatcacagcaacagtccggcatcggttccggcctgaatgaaggcgataccgtggtggtcagtggcctgttcctcattgactccgaagccaatattacgggcgcgctggaacgtatgcgccaccctgaaaaaacagaaagcagtatgccagcaatgtctgaccagcctgtaaatatgcattcagggcactga

SEQ ID NO: 216613 - DNA, 681 bp, Klebsiella pneumoniae; identical to SEQ ID NO: 19863

SEQ ID NO: 216614 - DNA, 1476 bp, Klebsiella pneumoniae
atgcatagcaaaccttccagacgccctttctcactcgctctgcggctgaccttttttatcagcctgtccacgatactggcttttatcgccttcacctggtttatgctgcattctgttgaaaatcattttgccgagcaggatgtcagcgatcttcaacaaatcagcaccacactgaaccgtatactgcagtccccggtggatccggatgataaaaaaataagcaaaataaaggaatcaattgccagctaccgcaacgttgcccttttgctcctcaatcccaggggtgaagtgctctttagctcagctcagggggcggcactacgcccggcagtgaattcagcagattttagcgagcacagccgcgcacgggatgtctttctctggacggtggaggatcctgcgggaccgatggataccgggtccgaaatgaagatggaaacatacaggattatcgcctcctctggtcaggcgatatttcagggcaaacagcagaactatgtcatgctgactggcctatccattaatttccatctccattacctcgatgcgctgaaaaagaacctgattgcgattgccgtcgtgataagcctgttgattgttctgatcattcgaatcgctgtccgtcaggggcacctgccccttcgtaatgtcagcaatgccattaaaaacatcacctccgagaatcttgatgcgcgactggaaccgacacgcgttcccattgagctggagcaactggttatctcgttcaatcatatgattggaaagattgaggatgtctttacccgccaggccaatttctctgccgatatcgcgcatgagatcagaacgcccatcaccaatctggtgacgcagactgaaatcgcactgagtcaggatcgaacacagagggaacttgaggatgtcctctattccagtcttgaagagtataaccggatgaccaaaatggtcagcgatatgctgttcctggcacaggcagataataatcagctgatacctgacagggtcatgtttgacctcagagcggaagtcatgaaagtcttcgagtttttcgaagcctgggccgaagaacgcaatatcacgctcaaatttaacgggatgccctgcctggttgagggagatccacaaatgttcagaagggcgatcaataatctgttatccaatgccctgcgttataccccggagggacaggcaatcaccgtctcaataagagagcaggagagcttttttgaccttgtgattgaaaatccggggaaaccgatccctgaagaacatttatcaaggctgtttgaccgtttttatcgggtggatccatccagacaacgaaaaggagaaggcagcggcatcggccttgcgattgtgaagtcaatcgtggaagcacatcacggaagagtgcaggtggaatcagacgtacgctccacgcgttttatcttatccgtgcccagactggagaaaatgatcccggaaacccaatgctga

SEQ ID NO: 216615 - DNA, 432 bp, Klebsiella pneumoniae
atgaaaaatatcgtattagcatctttgctgggctttggtttaatttcatcggcctgggccactgaaaccgtgaatatccatgatcgcgtcaacaatgcacaggctcctgctcaccagatgcagtctgctgcggctcctgtcgggatcctggggactgctcctcgtatgaccggtatggaccagcatgaacaggccattattgcccatgaaaccatgacgaacgggtcggcggatgcgcaccagaaaatggtggaaagtcatcagaggatgatgggaagtcagaccgtttcccctaccgggccgtcaaagtcattcgcggcaatgaatgagcatgaaagagctgcagttgcccatgaatttatgaataacggtcagtccggcccacatcaggccatggccgaagcgcatcgtcgtatgctcaatgcaggctga

SEQ ID NO: 216616 - DNA, 351 bp, Klebsiella pneumoniae; identical to SEQ ID NO: 177740

SEQ ID NO: 216617 - DNA, 126 bp, Klebsiella pneumoniae
atgttattcaatagtaatgcttttaccttacttacagagaatgtcattatttcctggcagttaccgatttggcgcgtaaaaatacaaagcccgaaattaatcgggtttgaattatttaacgattaa

SEQ ID NO: 216618 - DNA, 996 bp, Klebsiella pneumoniae
atggcatactgcagatgttacccggccgcactcataccgggtaacgaactgtgtattgtgatgattttttattacagggggatgatcgtgatcaataagatttgccaggtaattgacggggagtacgtctgcgacattgatatcagtgtggaagaatggaaagctctgttaatgaatgaaaaggtttttgactctaaaagtattgaggcgttaaaaaaatggtatattgaaccaaatcattcctgcacatgtttcgatataggcaaaaagtacgaacagcacagtatgagtgctaatggcgttattaacgggctcggtggtagagttcaaaaagagcttggcagatttgaagttaaagggatcggcaatatagcacccggcacaaaattcattacagtcatgaagagtaaagaaaccggtgaaaaaccaaaaagatacttatggactattcgtgatgaacttgttcaggcaattaaagaactggatttttttgggtcgaaagaaataaccaccaatgagtattactcagacgatgagttgatcaacgccatggaggcgaataatacatttgatgtcgcgcagacatttgaatatacaggggaagctaaaccaaagaaacatgcaacagaagtaaaaaatggcgtctcgtacccaagaagtaaaggggtttcaaaaaatgcactgaacaaagcaggttacagatgtgaagtcgatggcgaacacccaaccttcagaaggcgtaactctcccctgaattatactgaacctcatcacattgtacctatgtccaggcaggatgactttaacacttcgcttgacgtcgaagaaaatataatatcgctgtgttgcaattgccataagcaaattcacctcggacagggatatgaagaaatgcttgagaaaatatataatgagagaaaggagttgttaaaacaggtagctatcgatatatctctggaggatttgattcgctattataaaggacagaacaggtga

SEQ ID NO: 216619 - DNA, 849 bp, Klebsiella pneumoniae
atgacctggtttgagtttctgcacggtttttgcttccggcctttcctgcaggagcagctggcatcgcgtggcctgagcttcgaccagcccccacccagaataccgcgcacgaatgcccggcattatcaggatcccgccggacggctgtatcaccggaggctcgcacatttactgacagcccgggggttgctgccggatatccgtatccggcttgcccgttactatgatgaactgcttgtcgatgaagtccaggactttgccggacatgactttaattttctgctggagctctgccgcgcggaaatcactgtgctctgttgcggcgatttttatcagcatacctttgatacaagccatgacggcaacgttaattcaacgctgcacgacgacatcacgcgatatgaggcccgcttcgacgcagcaggtttcgcggttgaccgggacacgctcaaccggacatggcgttgctcagcttcagtgtgcgagtttatcaccgggcaactgaacatccgtatcgctgcccatgggatacatgcctccctgattgaaacgatcgcagatacagagcgctcagccaccctgcacgccgataatacggtgattaagctcttctatcgtgaacatcaccgttacggctgctattccatgaactggggcgccagtaaagggctcgatcactttcaggatgtctgcattgtgatgggatcctcccactggaagcttctgacccgtcaggaactggcaacccttccaccgtcgtcccgtaacaggctgtacgtggcatgctcacgggcgcgcggcaacatttattttgttcccgaaactcatctgcgccgattccgaaactga

SEQ ID NO: 216620 - DNA, 783 bp, Klebsiella pneumoniae
atgccaaaattcgctgcaaatttatccatgctgtttaccgaactgccgttcctggaacgctttgccgccgctgcccgggcgggatttgaagccgttgagtttctgtttccctatgagtatgccgccggggaaatcagacagcgcctgcaggagaaccagctgcagctggtgctgttcaataccccacccggcgacgtcaacgccggagaatgggggctcgccgccatccccgggagaagcgccgaggcccgacgcgatattgagctggcgctggagtatgcctgccagctcggttgcccgcaggtgcatatcatggccggcgtggtgccgccgggagcggatcgcgcagcctgcgaggccgtgcttatcgataatctgcgctacgccgcggagtgctttgcccgccacgacaagcggatactcatcgaagcgctgaatccgcagaccaaaccgggctatctctaccacagtcaatatcagacgctggcgatggtgaaacgggtcgacaggccgaacctggcggtgcagttagatctgtttcacgcgcagaaggtggacggcaatttaagccatcttattaccgaatatgccggccagtatcgccatattcagattgcctccctgcccgaccgtcatgaaccggatgagggcgaaataaactatccgtggctctatgcgctactggataaaaccggttatgacggctggatcggctgcgaatatatcccccggacagacacgctttccgggctggggtggttctcgccctaccggaaaaaataa

SEQ ID NO: 216621 - DNA, 612 bp, Klebsiella pneumoniae
atgactaattttttgttcaatataaaaaatcactatttgcgagtcgctattgctgaactggttgatgaagcgatgaaggccgccgggcggccacactatcagttttctcaacaatgggatgcaggatcgatggcgcaagctgatgtgatattcacggaaatggtcgcgggggagtggtacttgtgccaggatctttttcagcatgccccggaacaatatacgctttttattttcccggacaatgaacacgctaccgtagatgagggtttaccgaattgtctgcagcatgcggtatttatgccgcctcacgctcgcgttcagcggctgaaagatgagatagctaacgccattgaacgtccgctgctaccgcggcaagacccgccgttcaatcgtctgcggcgttgcattaattgcgcctgcaggtcggtcagcgacgcgcaaaccaaagtcatttacgcgttcagtattggcctgagcccgcatgaagtcgccgctgcgctaaatattagtcacaaaacgattcattcacataaaaagaatattatgagtaaatttaatttgaatagccgtcagcagtttaacaaccttgtgcaactgctcgccaaacgctga

SEQ ID NO: 216622 - DNA, 2046 bp, Klebsiella pneumoniae
atgtccgaacgaaaccccttttttagcgtcagtacgttgccttaccaggcgccgccgttcgatgtgattgacgacagccactatcgcccggcgtttgatgagggcgtccggcagcagcgggccgaaattcgcgctattatcgacaatccgcagccggccagtttcgccaacacgctcgaggcgctggagcagagtggtcagctgctggcgcgggtgacgcgggtctttttcgccatggctggcgcccataccaatccttatattcaatcactggatgaacaattttccgccgaactcgccgagctggggaatgacatctggcttaatgcggccttgtttcagcgcgtgaacagcgtctacgagcagcgcgacgcgctggcgctggacagcgagtcctatcgtctcctgaccctgacgtggcaacgttttgttcacgccggggcgacgctggctcccgagcagcaggcggcgctgcgcacactgaacaccgaagcggctacgctgcaaagtcagttccagcagcgactgctgggagcggcaaaaagcggcggcctggtggttgattaccggcatcaactggctggcctgagcgatgaggagatagcggcggcggctgacgcagcgcgtgaaagagggcttagcgaccgctggttgctgacgctgaccaataccacccagcagccgcagctgcttgcgctgcgcgaccggcaaacgcgggagaatctcttcgccgccggctggacccgcaatcagcagggcgatgagcatgatacgcgtgacctggtactgcggctggcggcgatccgcgcgcagcaggctgagctgttgggagccgctgattacgccagctgggcgctgaccgatcaaatggcggcttccccggcggaggcattgggctttatgcgccggatagcgccggcggcgcgggcgcgggcggaacgagaactggcggacatccagcaggtgatcgacaacgaaggcgggggttttcgcgcgacggcatgggactggctttactacagcgagcaggtgcggcgggctgcctatgccattgacgacgcgcagctcaaaccctattttgccctcgagcgggtgctgcaagacggtgtattctggacggcctcgcagctctttggtctgcgctttgttgagcgcttcgatataccggtctatcacccggatgtgcgggtctgggagatcttcgatcacaacggcgaagggatggcgctgttttacggtgactactacgctcgtgactcaaagagcggcggcgcatggatggatgtgtttgtcgaacagtcgactctgcgcgcgcagcgcccggttatctacaatgtctgcaactacgtccgcccgcaggcagggcagagcgcgctgctgtcgtgggatgaggtgatcaccctgtttcatgagttcggccataccctgcatgggctgttcgccagccagcgctacgccagtctctcggggaccaatacgccgcgcgattttgtcgaatttccttcgcagatcttcgaacactgggccagccagccgcaggtgtttgcccactacgcgaagcactaccagtccggggagccgatgccgcaggcgctacgcgacaatatgttgcgtgcggcaaccttcaataaagggtacgacatgagcgagctgttggctgctgcgttactcgatatgcggtggcatagcctgtcgacctcggcattaccggaggaggtggacgcgtttgagcagctggtgcttcgggaagagaacctggatctggcggcggtccccccgcgctatcgcagcagctatttctcccatatcttcggcggcggctatgcggcaggctattacgcctatctgtggacccagatgctggccgacgacggctatcaatggttcgtggagcagggcggtttgacccgtgagaacggtcagcgtttccgtgaggcgattttatcacgcgggaacagcactgatttagctgaactgtatcgccagtggcgcggacacgatccgcagattgagccgatgctgaaaaatcgcgggttgagtgcgtag

SEQ ID NO: 216623 - DNA, 333 bp, Klebsiella pneumoniae; identical to SEQ ID NO: 121758

SEQ ID NO: 216624 - DNA, 1182 bp, Klebsiella pneumoniae; identical to SEQ ID NO: 95492

SEQ ID NO: 216625 - DNA, 375 bp, Klebsiella pneumoniae; identical to SEQ ID NO: 95491

SEQ ID NO: 216626 - DNA, 1197 bp, Klebsiella pneumoniae; identical to SEQ ID NO: 95490

SEQ ID NO: 216627 - DNA, 828 bp, Klebsiella pneumoniae; identical to SEQ ID NO: 95489

SEQ ID NO: 216628 - DNA, 1479 bp, Klebsiella pneumoniae; identical to SEQ ID NO: 121753

SEQ ID NO: 216629 - DNA, 354 bp, Klebsiella pneumoniae; identical to SEQ ID NO: 97191

SEQ ID NO: 216630 - DNA, 1284 bp, Klebsiella pneumoniae; identical to SEQ ID NO: 97190

SEQ ID NO: 216631 - DNA, 429 bp, Klebsiella pneumoniae; identical to SEQ ID NO: 97189

SEQ ID NO: 216632 - DNA, 723 bp, Klebsiella pneumoniae; identical to SEQ ID NO: 121749

SEQ ID NO: 216633 - DNA, 333 bp, Klebsiella pneumoniae; identical to SEQ ID NO: 121748

SEQ ID NO: 216634 - DNA, 312 bp, Klebsiella pneumoniae
atgattatcgccgccgaagtgaaacgtgatgaacaggggtactggacacatcctgtgctggcacgcagtggttgtgaaacttccgcagaattaagctactggctcagaactcataaacttcagtgctttgtgatgacaatgcgcgatgaagcgcctgaagcctttgctgccggatttacggatgaagccccggatgcccgtggctggataccggaaccgccgaatgatgatgatggctggttcctgggctctgtccacgataccggcgacggacccgtctgctactggtttcggcataccacaaaatcctga

SEQ ID NO: 216635 - DNA, 651 bp, Klebsiella pneumoniae
atggcaaagatattaatgatggcgggcagtaccgttgttgtgctgagtttgctggggtttctggtgctgcttctgaaaggacgcgcagtaacgaagacttccccggttctgatgtcactgaaagccctgggtattcgcccctcagaggctgagcaacggttgtgtcgccagcgggtctgggtgggtaatgacacactgatgacgccacgggaacaacattttttccgggcattactgaggcataccagccgaaagcgctggctgttgtgtcctcaggtccgggtggcagatattgccacactctctccccatatccggccacgatcccggacctggtggcaactcttccggatggcatcacagtggcactgcgatgtggtcatcgttgacatccataccttcgctatcatcggcgcagttgaactggatgatgcctcacaccagaaaaaacaccgtatccggcgcgatattctgctggaagaggttctgaggcaggccggtattccactactacgcgatcgggattcagagaggctggtaagaagggtcagagagtttctgaaataccgcggagccgatgctgccgaaaaatccataaccggtatgaattcaacgacagagcatactgaacgcaaggagaaagaaaaatga

SEQ ID NO: 216636 - DNA, 645 bp, Klebsiella pneumoniae
atgtttaaatattttattctgcgcaaacagcagcagctgttctgttatttctgcggtatcgtgctagcgatggttcttatgctcctgttcccttccgtttttcgggggaatgggttttatctgcttttatcgtctgttgcgccgttctgggcaggccttgccctatatacccgtcacatcgaccggatgagaaagccagaggtctcaccgctggtcagtattcgcgacggtattcaggtggtggccgaggtgccgcgccatgaaaaggcccggctggaatgggaaatcctccgggatgatgaggtgtttcgccagcaaaggtgggagcttacaggcctgaccggacgggttatcagccgggggctgttgtatacgccggcggtgatgctggtcggtatcggtattctcgcctggggttccccacaggatgccatccgcctgattaatgctcttcgtaatatgcctgctgcggaactggtgcaccagattggttttgtcctgtgcctcgtcctgcagattagcgtcatatcagttctgatcgctgatgttgtagccgggagaggactgccgaatgtatttcgccgcgcgttgctcgacaggctgccggcagagttctgccttatcagaagagggacagaaagatga

SEQ ID NO: 216637 - DNA, 5259 bp, Klebsiella pneumoniae
atgcttagtttcagccaggttaaatcagctggcagtgccggtaattactatacggacaaggataattactacgttatcgggagtatggacgagcgctggcagggtaaaggcgcggaagcgcttggtcttgaaggaaaggtagacaagcaggtcttcacggagcttctgcagggaaaactacctgatggcagcgacctgacccggatacaggatggcgtgaataagcaccggcccggttacgacctgaccttctcggcaccgaaaagtgtatcgatgctggctatgctgggcggcgataagcgtcttatcgatgctcataatcgcgcggtgacagtcgctcttaaccaggtggagtcccttgcctccacacgggtaaagagagatggcgtttctgaaacggtcctgaccgggaatctgattattgcccgctttaaccacgatacatcgcgcgctcaggacccacagatacacacgcacagcgtggttatcaatacgacacagaacggcgataaatggcagacgctggccagcgataccgtcggtaaaaccgggttttccgaaaacatactggccaaccgcatcgctttgggaaagatataccagaactctctcagggccgatgttgagtctatgggttacaagacagtggatgcgggtaagaatggcatgtgggagatggagggcgtgccggttgagtcgttttccacgcgcagtcaggagctccgggaggctgcaggacccgatgcctccctgaagtcccgggatgtggccgcgctcgatacccgcaagtcgaaagaagccatcgatccggcagagaagatggtggagtggatgaacacgctgaaggagaccgggtttgacatccgggggtaccgtgaggccgccgatgcgcgagccgcagagctggcacgtgcacctgccgcgccggtgaacactgacggtccggatatcacggatgtggtgacgaaagcgattgccggtctcagcgaccgcaaggtgcagttcacgtatgccgacctgctggcacgcacggtcggccagctggaggcgaaggacggtgtgtttgagctggccagagccggtatcgatgccgccattgaacgggagcagcttatccctctcgatcgcgagaaaggcctgttcacctcaaatatccacgttctcgatgaactcgccgtcaaagccctgagtcaggaggtgcagcgccagaatcatgtctccgtcacgcccgatgcgtctgtggtgcgccaggtccctttcagcgatgccgtcagcgtgctggcgcaggatcgcccggtcatgggtatcgtttccggtcagggcggtgcaaccggccagcgggagcgggtggccgagttaaccctgatggcccgggagcaggggcgcgacgtccatatcctggcggccgataaccgttcacgtgattttctcgccggggatgtgcgtctggccggggagacggtgaccggtaaatccgccctgcaggacggaacggcgtttattccgggcggaacactcatcgtggatcaggcggagaagctgagcctgaaggaaacgatttccctgctcgatggcgcgatgcgccataacgtgcaggtcctgctctccgacagcgggaagcgcagcgggaccggcagcgcgctgacggtgctgaaggacagcggcgtgaatacgtatcgctggcagggtggccatcagaccaccgccgacatcatcagtgaaccggataaaggcgcacgctacagccggctggcacaggagtttgccgtcagcgtgcgtgaagggcaggaaagcgtggcccaaatcagcggggcgcgtgaacagagcgtactcaacggccttatccgtgactccctcagacatgagggggtgctgggtgagaaagacacgaccattacagccctgacgccggtgtggctggacagcaaaagccggggcgtgcgggattattaccgggaggggatggtgatggaacgctgggatccggagacccggacgcacgatcgctttgtcattgaccgggtgaccgcgagcagcaatatgctgaccctgaaagaccgggacggggtccgtctggatctgaaggtttccgcggtcgacagccagtggacgctgttccgggcagagacactgccggtggccgagggggaacgtctggcggtgctcgggaagataccggacacacgcctgaagggcggggaaagcatcacggtgatgaaagtggaggacgggcaactgacggtacagcgtccggggcagaaaaccacgcagaccctggccgtgggcgcgggcgtgtttgacgggattaaaatcggccacggctgggtggaaagtcccggcaggtcggttagcgagacggcaacggtctttgcgtcggtgacgcagcgtgagctggataacgccaccctcaaccagctggcgcagagcggaagtcatctccgtctgtactcggcgcaggatgcggctcgcacgacggagaagctgtcgcggcataccgccttcagcgtggtctcagagcagctgaagacccgatccggcgagacggacctggatgcggccattgcgcagcagaaggccggactgcgtaccccggcagaacaggccattcacctggccatcccgctgcttgaaagtgagaaactgaccttctcccggccccagctgctggcgacagcgctggaaaccgggggcgggaaggttccgatggcggacatcgacacgaccattcaggcacaaatcaggtcggggcagttgctgaatgtaccggtggcgcacggccacggcaatgacctgctgatttcccgtcagacctgggacgccgaaaaaagcatcctgacccacgtgctggaaggtaaagacgcggtggcccccctgatggatcgcgtaccggccagtctgatgacggacctgaccgccggacagcgggcggcgacccggatgattctggaaagcacggaccggttcacggtggttcaggggtatgccggggtggggaaaaccacccagttccgggcagtcatgagtgccatcagtctgctgccggaagagacccgtccgcgcgtcatcggtctggcgccgacgcatcgcgcggtcggggaaatgcagagtgctggcgtggatgcgcgcacgacggcgtcgttcctccacgacacgcagctgctgcagcgcaatggccagacacccgatttcagcaacaccctgttcctgctcgacgagagctcaatggtggggctggccgatatggcaaaagcccactccctcatcgtcgccggcggtggacgggcggtgtccagtggggataacgaccagctgcagcccatcgcgccgggccagccgttcaggctcatgcagcagcgcagcgccgccgacgttgccatcatgaaagagattgtgcgccaggtgcctgagctgcgaccggcggtctacagcctgattgagcgggatgtgcaccgcgccctgaccaccatcgagcaggtcacgccggagcaggtgccgagaaaagaaggcgtctgggcgccgggcagttctgtggtggaattcacgccggcgcaggaaaaggcgatacaaaaggcgctgagcgagggggaaaccctgccggcaggtcagcccgcgacgctctacgaggcgctggtgaaggactataccggacggaccccggaggcacagtcgcagacgctgattatcacccatctgaataaggaccggcgggcgctgaacagtctgatccatgacgcacggcgggagaacggggaaaccggcaaagaggaaatcaccctgccggtgctggtcacgagcaacatccgtgacggtgaactgcgcaaactgtcgacctggacggctcacaaggaggcggtggcgctggttgataacgtataccaccgtatcagcaaagtggataaggataatcagctgatcaccctgacagacagtgaaggaaaggagcgatatatctctccccgtgaagcctctgctgaaggtgtgacgctttatcgccaggaaaagatcaccgtgtctcagggggaccgaatgcgcttcagcaaaagtgacctggagcgcggctatgtggccaacagtatctgggaggtgcagtctgtttcgggtgacagtgtcacgctgtctgatggcaaaaccacccgcacgctgaccccgaaggcggatcaggcgcagcagcatatcgacctcgcctacgccatcaccgcccacggcgcccagggggccagcgaaccgtatgccatcgcgctggaaggggtggccggtggtcgggaacagatggccagctttgagtctgcctatgtcgctttatcccgcatgaaacagcatgtgcaggtttacaccgacagccgtgagggctggataaaggccatcaagcattcacctgagaaagcgacggcgcacgatattctggaaccccgtaacgaccgggcggtgaaaagcgccgatctgctgttcgggcgggcaaggccactggatgaaaccgccgctggccgggcagccctgcagcagtccggtctggcacagggaaattcaccgggaaaattcatttccccggggaaaaagtaccctcagccgcatgtggcgctgccggcattcgataagaacgggaaagccgccggtatctggctcagcccgctgaccgacagggacggacggctggaggccatcggcggagagggacggattatgggcaatgatgccgcccggttcgtggcgctgcagaacagccgcaatggtgaaagcctgctggccgggaatatgggggagggggtcagaatggcccgcgacaatcccgataccggggtggtggtgcggctggccggtgatgaccgcccctggaaccccggggccatcaccggcgggcgggtatgggctgatccggcgccggtgggtccggtaccgcaggccggggctgacattatcctcccgccagaggtactggcgcagcgggcggcagaagagcagcagcgccgggaaatggaaaaacaggcggaacagactgcccgggaagtggccggggaggcgcgtaaagccggtgagccggcggaccgggtgaaagaggttatcggggatgtcatccgcggactggagcgtgaccggccgggcccggagaaaacgacgctaccggatgatcctcagttccggcgccaggaggcggcgattcagcaggtggcctcagaaagtctgcagcgtgagcgtctgcaggctgtggagcgggacatggtgcgcgacctgaaccgcgagaaaaccctcgggggtgactga

SEQ ID NO: 216638 - DNA, 2310 bp, Klebsiella pneumoniae
atgagtttcaatgccaaagatatgacgcagggcggtcagatcgccaatatgcgctttcgcatgtttggtcagattgccaatattattttctacgtgctgtttattttattctgggtgctgtgcgggctgatgctgatgtaccggctcagctggcaaacctttgtgaacggctgcgtatactggtggtgtacgacgctgggtccgatgcgcgatattattcgttcccagccggtatacaccattcagtattacggccagtcgctggaatatacctcagaacaaatcctggctgataaatatactatctggtgcggagagcagctgtggaccagtttcgtctttgcagccgtggtttctcttgttatctgtatcgtgacgttcttcatcgccagctgggtgctgggccgccaggggaaacagcagagtgaggatgagaataccggcgggcgccagctttccgataagcccaaagaagtggcccgccagatgaagcgtgatggtatggcctccgatattaaaattggcgatctgcctattcttaaaaactccgaaatccagaacttctgcctccacggtaccgtaggctccggtaaatcagaagtgatccgccggctactgaactacgtgcgtgcacgtggcgatatggccatcatttatgatcgctcctgtgagttcgtcaaaagctattatgacccgtcactggataaaatcctcaacccgctggattcgcgctgcgcggcctgggatttgtggaaagagtgcctgacgctgccggacttcgacaacatctccaacacccttatcccgatgggtaccaaagaagacccgttctggcagggctccggtcgcactatctttgccgaaggcgcgtacctgatgcgtgaagacaaggatcgcagctacgagaagctggtcgataccatgctgtccattaaaatcgacaagctgcgcgcctatctgcagaacacgccggcagcgaacctggttgaagagaaaattgagaaaacggccatctccattcgtgccgtgctgaccaactacgtcaaggctattcgctacctgcagggcattgagaagaacggcgagccgttcactatccgggactggatgcgcggtgtccgtgaggaccgacccaatggctggctgtttatctcctccaacgctgacacccatgcttccctgaagccggttatctcgatgtggctgtcaattgctatccgcggcctgctggcgatgggggagaaccgtaaccggcgcgtgtggattttcgccgacgagctccccacgctgcacaagctgccggacctggtcgaaatcctcccggaggcgcgtaaatttggtggttgttatgtgttcggtattcagtcctatgcccagctggaagatatctatggcgtcaagcctgccgccacgctctttgacgtgatgaacacccgggccttcttccgctccccgagtaaggagattgcggagtttgctgccggtgaaattggtgagaaggaaatcctcaaggccagtgagcagtactcctacggtgctgacccggtgcgtgatggtgtatcgaccgggaaagaaaaagagcgggaaacgctggtcagttactccgatattcagacgctgcctgacctgtcctgctatgtcacgctgcccgggccgtatccggccgtgaaactggccctcaaatacaagccgcgtccgaaaattgccgagggatttattcctcgcactctcgatgcgcgggtggatgcgcggctcagtgcgttgcttgaagcgcgggaagctgaaggctgtcttgccagggcacttttcacgccggatgcgccggcatccgggaccgctgatacaaacagtcacgccggtgaacagcctgagccggtcagtcagcctgcaccagcagaagtgacagtatctccggcaccggtaaaagcgccggcgacaacgaagatgccggcagcggaaccctccgccaggacagctgagcctcccgtcctgcgggtcacgaccgtaccgttgatcaaaccaaaagcagccgcagcggccgctgctgccgcaacagcatcctctgccggtacccctgctgcagctgcaggcgggacagaacaggagctggcgcagcagtccgcagagcaggggcaggacatgctgccggccggtatgaacaaggacggcgtcatcgaggacatgcaggcgtatgacgcctgggctgatgagcagacactgcgggatatgcagcggcgtgaggaagtcaatatcaaccacagccaccgccacgatgagcaggatgatgtcgagattggggggaacttctga

SEQ ID NO: 216639 - DNA, 690 bp, Klebsiella pneumoniae; identical to SEQ ID NO: 92403

SEQ ID NO: 216640 - DNA, 372 bp, Klebsiella pneumoniae
gtgacaggcgccgctcttggggcggggattaccgcttacaactccagttccgcgggagcaaccctgggagtagggcttgcagccggtctggtcgtaatggcggctgacgcgatggtggaagatgtgaactacaccatgatcaccgatgtacagatcgcggaaagaaccaaaacacaggttcagactgataacgtggccgtattacgtcagggaacatccggagcaaaagtgcagacaagtactgaaacgggtaatcagcataaataccagactcgcgtcgtctctaacgcgaataaagttaacctcaagttccctgaagcccagcctgttcttgaagaccagctggcaaaatcgatcgctaatatcctgtaa

SEQ ID NO: 216641 - DNA, 651 bp, Klebsiella pneumoniae; identical to SEQ ID NO: 167745

SEQ ID NO: 216642 - DNA, 1245 bp, Klebsiella pneumoniae
atggcagttgataacatcaatcagcataaaagctttgttcaaaaccggcgttcatctcttctcgccgccatttttctgatggcgacttccgccattggcccgggttttattactcaaaccgccaccttcaccgccaccctgggtgtcgcattcgcgttcggtattctggcttctatcctgattgactttgtcgtacagcaaaatatctggcgcgtggtaaccctgacacaaatgaatgcagcagaggtagcaaaccgggcaataccgggcagtggctatctgttggctgtgttggttatctttggcggactggtgttcaacattggcaacatcgcgggcgccggtttagggctgaatgccttgtttggcttgagccctaaactgggtgggcttatcagcgcagctattgcgatttatatttttgcttcacgccgtgctggtgtagcgcttgaccgcatgcttattgcgctgggggttgtcatgatagtgctgacactctacgtggcactggtttcacacccaccattgggcatggcactacgtgaaaccgtgttccccagcaatattaactttgcggcaatcaccactattgttggcggtactgtcgggggttacatcagttatgcgggtgctcaccgcctgctcgataagggcatcagcggcaaagaacacatcaaagaagtttcttcggcggccaaccgcgggattattgtggtcggcatcatgcgttatgtgctgtttctggctatttttggcgtggttgccagtggtgtcaccattgatctctccagccacaatgcaaacccggcttctcaggcattcctggccgcagccggtaatgtgggcctgcgtattttcggtattgtattgtgggccgcagcactttccagcgtggtaggcgccgcatggacatccgtttcttttatttccgttttccgcccggggattactgagcgccagcgcaatatcgccactctgatatttattgcattcactctggttgtgtatctgtgcctgggtacagcccccgcagctctgctggtgtttgctggcgggttcaatggcctggtgcttcccctggggttaactttattcctttgggttggctggcgccgggcagacctgatggacggttaccgttacccacgctggttgctctggctggggatgataacctgcatcatgacctggtatatggccatcatgtcggtttccactatttttaatttcctgaaaattgcataa

SEQ ID NO: 216643 - DNA, 774 bp, Klebsiella pneumoniae; identical to SEQ ID NO: 180292

SEQ ID NO: 216644 - DNA, 807 bp, Klebsiella pneumoniae; identical to SEQ ID NO: 180293

SEQ ID NO: 216645 - DNA, 1584 bp, Klebsiella pneumoniae
gtgcgatttttaccttgcagcctgtccagttttttagtggagctgggcactcttgatgacacgctggctttgttcgccgccttgcaggctgcgccattgtcaggagtggaagagatcattcctgcagcccgtaccctgcttatccattttgacccaactctcacccagtgccaccagttatctgctgccattcgccagctcgacggacagatgcaagctcagcgcacaggtaaagtagtcaccatccccgttcagtatactggtgatgatttggccgagatggcggaatacctcgggttgagtgttgaggcgctcattcagcgccacaccggctctttgtggcaggtggccttttgtggttttgcgccaggtttcgcttaccttgtttctcgtgaagccggtatccaggttccccgccgcgcaagcccccgcacccgtattccggcgggttctgttgggcttgccggagaattcagcggtatttacccccacgcaagtcccggtggctggcaaataattggccgcaccacagaaacactgtttgccctggacaggcagccgcccgcgttattgcaacccggcatgcaagtgcagtttgtcgatgtcacgcgcgccccggtctgtgtgccggtggtaaaaccacagcccctccaacaatcagcttccggtagcgcagtgatgtcagtgatatcaccaggtttacaaaccctgtttcaggatgccgggcgcgcagggcagtcaagcatggggatatccccttcgggtgcacttgaccaggccgcttggcggcgcgccaactggctggttggcaaccctggtcacctgcccgcactggaaattactgccggtgggttcagagcccgtatttgtgccccaatggtcgtggcgctaacaggcgcgccctgcccggtcatggtcacccgtgcagacggcgcacattttaccgccagcacagaagcgccactggcacttgaagcaggcgaccagttacgactgggagcgccagcacgcggcgtgcgcagttacctggcacgccgtggcggctgggccgttacaccacaactgggcagtgcctcacgcgacacgctggcacaagttggcccggaaccgttacaggctggggttaaattgtatgcaggcaccacgccgccatacagtgcggtacagcctgctgtcatcggcctgccttcattaccggcacccggcgagaccatcacgctggatatcatccctgggccacgctgcgactggttcaacgacgaagcgctggaccggctcaccagccagtgctggcaagtcacgccacaatctaaccgcattggcctgcggttacagggcgagttaccgcttacacgcagtgacaaccgcgaattacccagtgaaggaacttgcattggtgccatccaggttccggcgaacgggcaaccggttctgtttctggccgaccacccgttaaccggtggttacccggtgattggtgctgtcgcccactaccatcttgatattgcgggccaactcccgcccaactgccagattcgctttcgggccattcacccttttactgtttttgaggagtataaataa

SEQ ID NO: 216646 - DNA, 1746 bp, Klebsiella pneumoniae
atgagcgctgttgctaccgttcccccacacaaagtgctcgtcgcgaaccggggcgaaattgcggttcgcattatccgggcctgccatgaatacggttttgccagtgtcgcggtctatgctgacccggacgtcgacagcctgcattgccgcctggctggtgaagcctgggcattacccgggtccagcccggcagagacttacctgaatatcgaacaactgatcgacgttgcccgccgcagtgaagccacaatggtgcacccaggttacggctttttgtctgagcgggctgaattcgcccgtgccgtggaagccgccgggcttatctggattggcccacgctcggaaaccatcgagcaattgggtgataaagtccaggcgcggaaaattgccatggcagttggtgcaccgctggttaaaggtacgccagacccggtttcttgcgcggaggacgttatccgctttgccgatgaacacggcctgcccgttgctatcaaggctgcctttggtggtggtgggcgcgggttgaaagtagcgtggtttcgggaggaaatcgccacactttaccagtcagccgtcagtgaagcgctgacagccttcgggcgcggggagtgttatgttgaacagtatctcgaccgcccgcgccatattgaagcgcaggttatcgccgacgagcagggccacgtagtcgtggtgggtacccgcgactgctctctgcaacgccgcaaccaaaaactggtagaagaagccccggcgccttttctcagtgctgaaatcgaagcacaaattgccagtgccgcgcagtccatttgccagcgtgccggttaccgcagcgcaggcacggtagagtttttgctgggtgccaatggtgtgttgtcgtttcttgaagtcaatacccgtttgcaggttgaacacccaataactgaagaaaccagcggtctggatctggtcaaagaacagctacgcgttgcccatgggttaccactgagtattaccacaccaccagtgccgcgtggccacgccattgaactgcggattaatgcagaagacccggcgaaaggttttctcccggtgccgggtacgattacacgctttgatctgccaggaggaccaggggtacgcgtggacagtggtgtcacccatggagacactatttctggcttctatgattcactgatggcgaaactggtcatttgggcaccagaccgcgaccaggcgctggcgcgtgcgcgccaggcagtcaaagcctttcgcatcgaaggagtggcatcagtgctgcctttccatgaagcggtactccattccccggattttactaaaagctttagtgttcatacgcgctggattgagactgatttttctgctgagcttgctgaacaggtacgccctttacccccaggtaactccccgctacaacgttgctggattgaaattgatgggcggcgccatcaactggctctcccggccagtttccaggctgcctccggtagtgctgttccggcaagtctggctgaaacaccccaggcattacaggttgccggtgcagtaactgcgcccatctccggcattgtgcagcgctggcttaaaacttccggcgaaaccgtcagtgaaggcgagactctagcagtaatggaagcaatgaagatggaagtaccggtacttgctgcccgcaacggagtgctgtcaatccagattgctgcaggagaaagctgccagcaggatggtgtgttgggtaaggttacgccctga

SEQ ID NO: 216647 - DNA, 501 bp, Klebsiella pneumoniae; identical to SEQ ID NO: 180210

SEQ ID NO: 216648 - DNA, 1017 bp, Klebsiella pneumoniae
atgaatatcgtatttctgggtattgatctggctaaaaatgtttttcagctctgcgggttaaaccaggccggcaaaccggtttatacgaaacgcactggccgaaaagaattgctccagacgctggcaaatattcctgcatgtctgattgggatcgaagcgtccaccggggcattttactggcagcgtgagtttgagaaactggggcacaaagtaaaggtcatcagtcctcagtatgtaaaaccctttgtccgcgggcaaaaaaatgatggtaatgatgcacaggccatcgcagtggctctgatgcaaccgacaatgcagttcgtgccgccaaaaagccccgaacagcaggatatccaggctttacaccgggcaaggcagcgtattgtcaatcaccgcactgctacagtctgtcaaataagagggctgttacttgaccgggggatccccattggcagtgctgtttccagagctcgccgggctattcctcttatccttgaagatgcagaaaacggtctaagttcccgtatgcgcagaacaattgccgagctctatgatctctttaacgatctcgagcgtcggatccatttttttgataaggaaattgaaacagtattcaggcaatcagaagcctgtcagcgtatcgccaaagttaaaggcattggccctaaaacggccacggccgttgttgctgctattggcaaaggaactgaatttaagaatggccgccactttgctgcatggctgggtctggttccacgccagcattcgagtggcgacaggcaggtgctgatgaatatgacgaaaaaaggcgacaagcatctgcggacactttttattcatggtgcccgcgctgtcgtcagggttgccacgaataacaatgatggccatatgaatcagtgggttaaccagttaaaggaacggcgcggatttaataaaacgaccgtggcggtcgctaacaaaaacgcgagaataatctggtcgatgctgagaaatgagaccgagtatcaggtagtgtga

SEQ ID NO: 216649 - DNA, 285 bp, Klebsiella pneumoniae; identical to SEQ ID NO: 161834

SEQ ID NO: 216650 - DNA, 249 bp, Klebsiella pneumoniae; identical to SEQ ID NO: 161833

SEQ ID NO: 216651 - DNA, 264 bp, Klebsiella pneumoniae; identical to SEQ ID NO: 180194

SEQ ID NO: 216652 - DNA, 801 bp, Klebsiella pneumoniae
atggtcgataaaccgggcatcgcgccgggtgccatcggcggcctgatggcttatcagatgggcgccggatttttaggcggcatgctctccgggattattgccgggctggtggtctatgttctgttgaacctgatcgcccggcttaaaaccccccacttcctgcgcatggtattaccgatatttattattccgctgatcgggacctttctcaccggcatggcggtgtattacatcattggcgacccgattgccgtgctaatgaagtggcttagcgtctggcttggcaatatgcagggcgcgtcgtttattatcctcggtaccatcctgggctgcatgatcgccgttgacatgggcggcccaatgaataaaaccgcttttttctttgctgttgcactgatctcaacgaacccgcagctgatggcagcagtcgctgccgccgactgtactccgcctctggggctggcgctggcaacctttctgtttaaagacatctttaatgatgtggagcgagaagccggtaagccagcgataattatgggctttatggggataacagaaggggcaattccgtttgcggcggcggatccggtacgggtgatcccggcaattatgcttggcagtgcggttgcggcaatcctctcactatggtttggcgcaaccaacgccgccccgtggggcggacttatcgtattaccggtagtcagcaaccattttggctacatcgtttcggtggtcgccgggagcatcaccaccgcctttgcggtgaaagtcctgaagacagttatcaaacctcgggcataa

SEQ ID NO: 216653 - DNA, 855 bp, Klebsiella pneumoniae
atggctacatttattcaatctattctcagtgaattcagcgctcagggctcgatagacaaaggcgtcatggtagctaacggcaatacgcaggctccggcgatggcctaccatctgcacgttccgcgcattgagttgacggtaaagggcacacttcgcatgctgctgccgaaaggcgtggactgcatcgtgaaatatgaacgtccggtcggcaccatcacctatatccccgccaatagctggaactcgccgctgtgggaaagcccggttatttgcatgtcgatagtcttctggaagcaggacgtcggtttcagcatcagcaactgggatggcacgcagtttaaagaggtagagaagtacaatctgcaaaactccagcagtacggttcgcgatcggcttctcgacctggctgaatcgctggcgtggtcgcaagataccaccagcgagacctttgcccacgtggtctatgcgctgcttaacgacctgctgtatcaaattaccgatggcctgaataaccagcgagctcccttctcattgctggacgaaattaagagccatatcgatagtcactaccacacggacattagccgggaaagcgtcgccgaaacgtttaatatttccccaggctatctgtcgcgtctgttttcgaaggagtcagacgtgaaatttaacgaatatctcaagttagcccgcatttcacgttcaaaaacgctgctgaccaataccaatctgaaaataaacgaagtttcagaaaagtgcggtttcacagatactaactatttctgcaaggtgtttcgcgatatcaacgactgtacgccgcttgaataccgccgcaaaaataaaggagcaagatcatga

SEQ ID NO: 216654 - DNA, 390 bp, Klebsiella pneumoniae
atgaccactcgtgcaacaagagatgagattcagcctttctccagcgaacgtaatctgcatattgtggcggtgaccgcgtgcgcgaccggcgtggcgcatacgtacatggccgcagaacagctggaaaaactggcgaagcagtattactttgcgatcaaaatcgagactcagggcgtactggggcttaagaatccaattaccgataaagatattttcgagtctgagctcaccatcatcgcatccgatattactatcgataatccttcacgctttgaaggttgccgtattctgaatgtttgtattaattcgctgttactcaaaccaactgaggttatcgccgccattcgcaagtctttaaatctgccgcgaggcaacgttattgacctgtag

SEQ ID NO: 216655 - DNA, 741 bp, Klebsiella pneumoniae
atgtatcccgtcgaccttcatatgcataccctggccagcacccacgcctatagtacggttcatgactatatcgccgccgcggcgcgtaaacatattcgcctgatcgccattaccgaccatggcccggaaatggttgatgcgccacatccgtttcactttaataatttgcgtgtgctgccgcgcgttgtcgatggtgtggggatcctgcgcggtattgaggccaatatcaaacctggtggtgagaccgactgcagcgacaaaatgcgtgcgtcgctggatttagtgattgccggattccataagcaggtgtttgcgcctgcgggcatcaccaccaataccgatgcgctgattgcagtaatagcgagcggcaaggtccatattatcagccaccccggtaacccggagtatccgattgatatcccggcggtggtggccgcggctaaggagtgtcatgtggcgttggaggtcaataacgcctctttcgtccattcacgtaagggcagtgaggggaactgtcgcaaaattgtagcagccgtgcgcgacagcggcggacttctctcattgggtagcgattcacacagcgcgttttctctgggggactttagcgcctgtcagcatctgctggtggaggctgattttccagcatcaagagtgctgaatacctctgtgcgacgagtgctgacgtttctggaacagcacggcggggggcggatagccgagctttatgggcttcctggctaa

SEQ ID NO: 216656 - DNA, 1995 bp, Klebsiella pneumoniae
atgtcatcacgaaaaaccctggccaatgccatccgtatgctgagtgtcgatgccgttcagcgagctaattccggtcatccgggcgcaccgatgggaatggcggatattgccgaagtcctgtggcgggattttctcaaccataacccgaataaccccgcgtgggctaaccgcgaccgttttgtgctctccaacggtcacggctcaatgctgatctacagcctgctgcaccttaccggctatgatttgccgattgatgagctgaaaaacttccgtcagctgcattcgaaaacgccggggcacccagaggtgggttacaccgcgggcgtcgaaaccaccaccgggccgctggggcaggggatcgccaatgcggtcggcatggctatcgccgagaaaaccctcgcggcgcaatttaaccgcccgggccacgacattgtcgatcacttcacatatacctttatgggcgacggttgcatgatggagggcatttctcatgaagtttgctccctggccgggacgctgaagctcggtaagctggtggcgttctacgacgataacggcatctctatcgatggtcacgtcgagggatggttcaccgacgacaccgccaaacgctttgaggcttacggctggcatgtggtacgcggagtcgatgggcatgatcctgaatccattcgtgccgcgattgatgttgcaaagtcgattaccaccatgccgacgttaattatctgcaaaacggtgattggttttggctctccgcataaagcgggtactcatgatgtccacggcgcgccgctgggcgaggctgaagtggcggcaacgcgtgaagcgctggactggccgtatccaccgtttgttatccccactgagatagcttcgcagtgggacgcccgcaaatcagggcaggctaaggaggctgcgtggaaccagcagtttgccgcatacgcgaaagcgttccccgagctggcagatgaatttacccgtcgggtgaatgggcaactgcctgcagagtttgccagcaaggcgcaggcgtttattgaaaaattgcaggccaaaccggcgaaaatcgccagccgtaaagcctcgcagaatgcgattgaagccttcggtccactgttgccggaattcctcggcggctctgcggatctggctccatcgaacctgaccttgtggtccgggtctaaagcgattaacgaagacagcgccgggaactacattcactatggcgtgcgagagttcggtatgaccgctatcgccaacggtattgcgctgcacggtggcttcctgccgtacacctcgacgttcctgatgtttgtcgaatacgcacgcaacgcagtgcgcatggcggcgctgatgaagcagcgtcaggtgatggtttacacccacgactctattggcctgggcgaagatggcccgacccatcagcctgtcgagcaaattgcctcactgcgcatgacgccgaacctcagcacctggcgtccctgcgatcaggtggagtcggcggtggcgtggaaatatggtgttgagcgccaggatggtcctacggcgctgattttttcccggcaaaacctgacccagcaggaacggacctggcagcaggtgcaggatatcgcgcgcggcggctatgtactgaagaattgcgaggggcaaccgcagctgatccttatcgcgaccggctcggaggtggagctggcggtagccgcatggcagcaactgacggctgaaggtgtgaaggcgcgggtggtctccatgccgtccaccgatgtcttcgacaagcaggatgcggcgtatcgtgaagcggtgttgccgcaggcggtttctgcgcgtattgccgtggaagcggggatcgcggattactggtttaaatatgtcgggctgaacggcgcgattatcggtatgcagacctacggcgagtccgccccggcggaacagctttatcaggagtttggcattaccgttgaggtggtgttgcagcaggcaaaagcgcttctggcttaa

SEQ ID NO: 216657 - DNA, 666 bp, Klebsiella pneumoniae
atgcattttcgtggaatattactggatttagacgggacgctggtgaactcgctggatttcgtagaggcctcctggagtttatgggccactaaaaaagggctggaaccggggacggtatgccattatctccacggtaaacccgctttgagtacgctgcgccactttatgcccgatgccagcgaacagatcatcatcgacgaatttctcgcgctggaagagtttgaagcgagcaatactgacggcatcactgcggttaacggggctgttgattttctccgccagcttgagcagttgcaggtcccctgggccattgtgacttccgggtcgctgaaggttgcctcagcacggatccgacaagccggtttccccgttccgccggtgctggtgaccagcgaagatattcatcatggcaagccgcatccggagccgttcctgacgggtgcagcccgactcggtctttctcccgctaattgcctcgcttttgaagactccactgccggtctgctttctgccacccaggcagggtgcgtggtggttgaagtcctgactcgccagtctgtagttcacgatatcgatacctggaaaaccattgataactacctcgacctgcgcgtaacgcgcaagggcgaggcagattttttacttaagattcagagggagttttaa

SEQ ID NO: 216658 - DNA, 2511 bp, Klebsiella pneumoniae
atgtcagagataataacgtatcaatgtgatctaaaggatggtattcacgccagaccggcggggtatatcgaacggctgtgcaatacatttcaatctacggtgtgctggaataatattcgcagcggcattcagggtaatggtaaaagcgccctctcgattgtcgccaccgataccttactcaacgacgcctgtgaaattacaatcagcggaaaagatgctgcaaacgctgctcagcagctgagtgcgctgcttaaaaaactgccctccttcgaggttagtcatgcagatgaagccgcagcgcctgcgggctatctcccgcgttcgctgcgggagactcagctcagttttattcagggttcacgcatcagcggcggtgttgccattgccaaacccgttcgtattcagagcctgtctctggacgaaatgctggcgcgtaacccgggcggtgagtattccacggagcatcagcagcgtatttttctggcgggtttagaggcgcttaagcaagagaagcaggctgcgctggaaattaaaaaaggcgttgagcacgatattttacaggcgcatttatccattatcaccgatgcgacctttcaaagccatatctcctcggcgatttccggtggtgacaatacctgggatgcggtgattaaagctgcaatggaattctgtgaaattcttaatcgctcatcaagcaaatacattaaagagcggaccctggatgttctcgatattaccggacaattacttactgcgatctatggcccaggtatattaccgcagaacagtcttgaattaacgcaaccatcgattattctggccaacagtctgacaccaagtcaatttctcgggatcaataaagagtttcttgccgggatggtattatccgccacgggtaaaacgtcgcacaccgctatccttgcacgttcgctcggtatcccgactctgacagatattgatttttcgaccctgcagctgaatacagaaatggacatcatcatcgatggcaatccgggtattttaattatcgctccggatgagaaagtcctgcgctattaccagaatgaaattgccgttcagcagagtatgcagcaacagatgctggctaatgtctatcaggcagcgaccaccagcgatcatcacagcattgagatagccgccaatatcgccagcctggcggaagccgaggcagccttcagcaacggcgctgaaggcatcggactatttcgtaccgaaatgtcattcatggaccgtgaatccgcaccggactaccacgaactggctgagctctacagccaggtgatacaagttgcacaagggaaaccggttatcttccgcaccttcgacattggcggcgataaacctgtcgactatatgagcatcggcgaagaagaaaacccgtttctcggcttccgggcggtgcgaacttatccgcgttatcgcgaccttttcgccatgcagctcaaggctatcctcagcgcctcggcttttggcgatgccaaaatcatgatcccgatgatcgccaacgttgatgaagttatctggtgccgtgaagtcctcgaagaggtcaaaagtacgatgcgtgatgaaaggttggcattcaacgacagcatctcgctcggcgtgatgctggagatcccctccgttatcttcgcgattagcgaaatagcggaatacgcggatttcttcagcgtgggcagcaacgacctgacgcagtacttttttgccgccgaccgtggaaatacgcaggttgaggcggtatacgacaactattccccggcattcctgcgcgccatgcagtatgccgccgacgaagtccaccgcgcgggcaagtggataggtatctgcggagaattgggtgcaagcaaagattttctgccgctattcgttggcatgggctttgacgaactcagcatgagcggcacctcgattccgggtgtaaaacatgcgctgcgcgagctgagttatgccaaatgccaggggctgtcgcagaacattgtggcgttaaaacgttccgctgatgtcaaagccgcgctgcgttcaccggacgtaaaagcggtcagcaaaatgccgatcctcgccccggagtttattctttgcggactacaggccagagataaaaacgaagttatcaaaaagatgaccgacaatctgtggctgcaccatcgcaccgataatcgggatcaattaaccgatgatatctggacccgcgaagactcattctccaccgccgtgggctatggcttcgccattccgcacaccaagtcggaccatattcactactccaccatcagtatggcaacccttgcgtcgcccattatgtggggcgatcaggaagtcgaaaccgtattcatgctcaccgtcagtaaatccgccgaccctaatgagcatatgaaatatttctccacgcttgccagaaagttaatgaaagaggatttccgcaatgaaataaaacaggccgaaaacgtcaacgtactctacaacctgatggccaatactctggccgtatga

SEQ ID NO: 216659 - DNA, 321 bp, Klebsiella pneumoniae
atgaaaattgtcggagtcgcagcatgcattaccggagtcgcccacacctatatggcgcaggaagctatcgagcaggagtgcaaaaaaaggggttatgacgtcaaagtcgagacccaaggcggcatgggaattgaaaatgaattaagcgaagatgagattgccgaagccgatgtggtgattctggcaattgctattggtattgaaggcgttgagcgctttgaagaaaaagaagacgctggactgattatttcgctgaacccggcagaggtggttcgcgatccagcagcgattattgaccgggctgaaaaactggtgaaataa

SEQ ID NO: 216660 - DNA, 1104 bp, Klebsiella pneumoniae
atgtcggaaaaaatgaaagtcatcaaggatgatttagtcaaagcatttagtaccggggtgtcatatatgatgccggtggtggtggtcggcggtatctgtctggcactctccctgattggcggtgagccggtcgcgggtaaaggcatggtggtgaccaacccattcttattaaacctcggcgctatcggcagcgcgggcctcgggatgatgatcccggtgctggcggcgtatatctcctactctatcgccggtaagccggggctgacgccgggtttaatcaccggctttatggccagcacgccgctgggtgcagaccatgtggtaaccggttttctgggggcgatgctgctcggtattctcagcggatacgtgaccaaatgggtaaaaggctggaaagtcggtaaggtgctgatgcctgttatgccgatcatgattattcccatcgcctcaagcgtcatcgtcggcatgctctatctgtatgtactgattgggcccatcggttttgccatgaaatggctggtttccatgctctcacaaatgcagggaagcagcggactggtacttggtctgattgtcggtgccatggcggcctttgatatgggtggcccggtcaataaaaccgcgacggcatttactctcgcattaatggctgaaggtatttatggtccgaacggcgcttaccgtgttgcctgtgctattccgccactgggcattgcactttctacttttatttcaccacgtaaatgggctgaagatgaaagacgaatgggaacctctgctgcctttatgggattaattggtattaccgagggggccattcctttcgccgttaaaaacctgaagaccgttctgccatcaataattatcggcagcgccgtcggtgccggtctggcaatggttcacggcgttgaatcaatggttccacacggcggattaattgccatcgcaggcgtcaataaagcacctgtatggtacgccatcgatatggctatcggcgttattgtcaccgcaatctgcctatatattctgcgccccaacattagcgagccggtaaaaaaagagtcggctaaaaaaacaatcacttctgatatgaataaagtctga

SEQ ID NO: 216661 - DNA, 1254 bp, Klebsiella pneumoniae
atgaaaaacacaatgaaacagtacgtcgattatattgttaacggtggaaaatcaacaatgctgggaattggccccatgtctccggcattaattcaggcctgttttgagctgggtaaagaaaaagacctgccgctgatgtttattgccagccgcaaccaggttgatgcagatgagtttggcgcgggttacgttaacaactgggatcaatttcgctttgccgccgacctgaaagcgatggcggaaaaagtcggcttcgacggtgattacttcctctgccgcgaccacggtggcccgtggcagcgtgataaagaacgcaaagaccatattcctgaagccgaagcgatggcgctggcgcgccgctcttatcaggtcgatatggacgccggtttcgacctgctgcacatcgaccctacaaaagacccgtatgtcgtcggtaaagtcattgatatcgaactggtgctgagtcgtaccgttgagctgatccgcttctgcgaagagtaccggaaggcaaataacctgaaggagttcttctatgaagtcggaactgaagaaaccaatggcggcctgaccgacgtcagcgcctatgaagggtttattatcgagctgaataagcgtcttgctgccgaatcgctgccgcagccgctgtttatcgttggtcagaccggtaccctgacccgcctgaccaaaaacgttggccattttaacgataagcagtccgcagagctttcggctatcagcacccgtcacggcgttggtctgaaagagcataatggtgactatcttccggatgagatcctgttgaaacatccgggtctgggcatcacggcaatgaacgtcgccccagcctacggcaccattgaaacccgcgcttatctgaagctggcggaagtcgagaaagatctggcagcaaaaggctttatcaagtcagcgtctgatttaaaaaccgtcctgacccgcgagtgtgtgctgagccacaaatgggaaaaatggatgactgatgagcacaaaaacaagtctgaagagcaaatctttaacgagccagaattgttgaaagagattcttgaactcagcggccactacaactacgaaaaaccagcggtagtcaaagagatgcaaaccatgtttgctaatctgaagtcgtttggtgtcgaacccgagcgttatgtggttaataaaattaaagatatgatccagaacgaagcagagtgcttcaatatgccaggcctgaccacccgcgtcgcgcaggcaaaataa

SEQ ID NO: 216662 - DNA, 951 bp, Klebsiella pneumoniae
atgaatcagcttgaacaactaaagcagcgaaccacgattgttgccgacagcggggatattgacagcattatggcttaccagcctgaagatgcgaccactaacccttcgcttatttataaagcggcgcagcttccgcagtaccagaaactggtaaaagatgccgtcgcggcggtgaagtcccgccagaatggaaagccggtacaacctgcggatattgccgattatctggcggtgagcatcggggtgctgatcctgaaaaacgttccgggtcgtatttcaactgaagtggatgctcgcctctcgtttgatacccaggccagtattgctaaagcgcgggaaattattgcactgtatgaagagaaaggtattggcaaaggtcgggttttgattaagcttgctgccacctggcaagggatccgtgccgcagaaacgctggaaaaagaaggtatccagtgtaacctcacgctactgttctcctttgcccaggccagagcctgtgccgatgccaatgttttcctgatttccccgtttgtgggccgtatctacgactggtacaagaaaaacaaccctgataccaccttcaccgtcgagaacgatccgggtgtcgaatcagtgcagaagatctatcgcttctataaaatgcacggctaccgcaccgtggtgatgggggccagtttccgtacgccggaacaggtgctggcgcttaacggatgcgatcgtcttaccgtttccccggcgttgctggcgcagttgcagcaaactcagggggcggtaccaatgccgctgacgtatgaaggtgaaatccaggcgaagcccatagcgatgaccgaagctgagttctactgggctcataatcaggatgcgatggcagtggaaaagctcgccgaaggtattcgcctgtttgccgtggaccagaacagtcttgaggcactgctgagtcaatatctgtaa

SEQ ID NO: 216663 - DNA, 456 bp, Klebsiella pneumoniae; identical to SEQ ID NO: 25798

SEQ ID NO: 216664 - DNA, 366 bp, Klebsiella pneumoniae; identical to SEQ ID NO: 122249

SEQ ID NO: 216665 - DNA, 276 bp, Klebsiella pneumoniae; identical to SEQ ID NO: 25796

SEQ ID NO: 216666 - DNA, 426 bp, Klebsiella pneumoniae; identical to SEQ ID NO: 25795

SEQ ID NO: 216667 - DNA, 1686 bp, Klebsiella pneumoniae; identical to SEQ ID NO: 77387

SEQ ID NO: 216668 - DNA, 366 bp, Klebsiella pneumoniae; identical to SEQ ID NO: 25794

SEQ ID NO: 216669 - DNA, 237 bp, Klebsiella pneumoniae; identical to SEQ ID NO: 77389

SEQ ID NO: 216670 - DNA, 213 bp, Klebsiella pneumoniae; identical to SEQ ID NO: 25793

SEQ ID NO: 216671 - DNA, 1680 bp, Klebsiella pneumoniae
atggcgacggacaccccacggattccagaacaaggcgtggccactctgcctgatgaggcttgggagcgtgcgcgccgtcgtgcggagatcatcagtccgttggcgcagtcggagacggtcgggcacgaagcggccgatatggcggctcaggcgctgggcttgtctcggcgccaggtatacgttctgatccggcgtgcccggcaaggcagcggcctcgtgacggatctggtgcccggccagtccggtggaggtaaaggtaaggggcgcttgccggaaccggtcgagcgcgtcatccacgagcaactgcaaaagcggttcctgaccaagcagaagcgcagcctagcggcctttcaccgcgaagtcactcaggtgtgcaaggctcaaaaactgcgagtgccggcgcgcaataccgtggccttacggatcgctagccttgacccgcgcaaggtcatccgccggcgggaaggccaggatgccgctcgtgacctacaaggtgtgggcggcgagcctcctgccgtgaccgcgccgctggagcaggtgcagatagaccatacggtcatcgacctgatcgtggtcgatgaccgcgaccggcaacctattggccgcccgtacctgaccctcgccatcgacgtgttcacccgctgcgtgctcggcatggtcgtcacgctggaagcgccgtctgccgtttcggttggcctgtgcctcgtgcatgtcgcctgcgacaagcgcccttggctggaaggactgaacgtggaaatggattggcagatgagcggcaagcccttgctgctctacctagacaacgcggccgagttcaagagcgaggccctgcgccggggttgcgagcagcatggcatccggctggactatcgcccgctgggacagccgcactatggcggcatcgtggaacggatcatcggcacggcgatgcagatgattcacgacgaactgccgggaacgaccttctccaaccctgaccagcgcggcgactacgattccgaaaacaaggccgccctgacgctgcgcgagctagagcgctggctcacattggcggtcggcacctaccacggttcggtgcacaacggcctgctccaaccgccggccgcgcgctgggccgaggccgtggcgcgtgtcggcgtaccggccgtcgtcacacgcgctacttcgttcctggtcgattttctgccgatcctccggcgcacgctgacccgcaccggctttgtcatcgaccacatccactactacgccgatgcgctcaagccgtggattgcgcggcgtgaacgctggccgtcctttctgatccggcgcgatccgcgcgacatcagccgtatctgggtcctggaaccggagggacagcattacctggaaattccctaccgtaccttgtcgcatccggctgtcaccctctgggaacaacggcaggcgctggcgaaactgcggcagcaagggcgcgaacaggtggatgagtcggcgctgttccgcatgatcggccagatgcgtgagattgtgaccagcgcgcagaaggccacacgcaaggcgcggcgtgacgcggatcgccgccagcacctcaagacatcagctcggccggacaagcccgttccgccggatacggatattgccgacccgcaggcagacaacttgccacccgccaaaccgttcgaccagattgaggagtggtag

SEQ ID NO: 216672 - DNA, 1272 bp, Klebsiella pneumoniae
atgttcgccctggccgacgtcaactccttctacgccagttgcgagaaggttttcaggccggatttgcgcggcaaacctgtcgtcgttctcagtaacaacgatggctgcgttattgcccggagtgctgaagccaaacggctgggtataaagatgggaaccccctggttccagctcaaagaggcgcagtttcctgaaaaactgtacgttttttccagcaactacgagctctacgcgagcctgagtaaccgtgtggtcgccctgctggaagagctgtcgccccgcgtcgaacaatactcaattgacgaatgtttcctggatgcccggggaattagccactgtatggatctggaggattttggcaggcagctgcgtgggcatgttctcagtggaaccggactgacgatcggtgtcggcttcggcgccacaaaaacactggccaaatcggcgcagtgggcgtcaaaggaatggccacaattcagtggggtgctggcgctgtcgcccgaaaatccacgcagaacggcaaaattactcagcctacagccggtggaagaaatctggggcgtgggaaaccggatagcgaaaaagctgcacgttatggggatcaccaccgccctgcagctgtcgctgacgaaccctacatttatctggaaaaacttcaacgtagtgctggagcgcacggtacgtgagctgaacggcgagagttgcatttcgctggaggaagcgccgccgccgaaacagcagattgtctgcagtcgcagcttcgggcagcggatcaccacctacggagaaatgcgccaggccgtctgccagtatgccgagcgcgcggcggaaaagttgcgcggtgagcgacagtactgccggcatatcagcaccttcatcaagacatccccttttgcggttaatgagccgtattacggtaacgtggccacggaaaaactgaacacccctacccgtgacacccgggacattatcgcggcagcggtcaggtctctggacaggatctggctcgatggccaccgctacgcaaaagcggggataatgctcaatgatttcagtccgaacggcgtcgcgcagctgaatctgttcgatgacgtgcagccacggccgcacagcgatgcgctgatgaaggtactcgacggcattaatcattccggactcgggaaagtctggtttgccggacggggtattgcgccggactggcagatgaaacgggagatgctgtcaccggcatataccacacgctggaaggagctgccggttgcccgtttctga

SEQ ID NO: 216673 - DNA, 1083 bp, Klebsiella pneumoniae; identical to SEQ ID NO: 162165

SEQ ID NO: 216674 - DNA, 282 bp, Klebsiella pneumoniae
atgaaccgtgaggaggcgagtctgttcttccggctgctgaaccgccggtatgaaaaagcgagcatcatcctgacgtcaaacaaagggttcgccgactggggtgaaatgttcggtgataacgtgctggcgacggcgatcctggatcgtcttctgcatcactcaacgacgctgaacataaaaggagaaagctatcggttgaaagagaaacgcaaagccggagtgctggcaaaaagcgcaacgccaatcagtgatgatgaaatggtggaaagcggacaacgttaa

SEQ ID NO: 216675 - DNA, 609 bp, Klebsiella pneumoniae
atgaaaaaggttcttctctctgctgcaatggcaactgcgttttttggtatggctgcggcaaatgctgctgataccaatgtaggcggcggtcaggttaatttcttcggtaaagttaccgacgtatcttgtactgtttccgtaaacggccagggcagcgatgcgaacgtttatctgtcaccagtgactttaacggaagttaaagctgccgcggcggatacctatctgaaaccgaaatctttcaccatcgatgtttctgactgccaggcggctgatggcaccaaacaggatgatgtgagcaaactgggtgtgaactggaccggcggtaacctgctggcgggcgcaaccgctaaacagcagggctacctggctaacaccgaagccgccggcgcgcagaatatccagctggttctctccaccgataacgccaccgcgctgaccaacaaaatcatcccgggcgacagcacccagcctaaagcggccggtgatgcctctgccgttcaggatggcgcgcgcttcacttactacgtcggctatgcgaccagcaccccgaccacggttaccaccggtgtggttaacagctacgcgacttacgaaattacttatcagtaa

SEQ ID NO: 216676 - DNA, 702 bp, Klebsiella pneumoniae
atgaagcgtattgccctttttttctgtttcatttttagttttgcggcccatgccaataatattattgttaacggtacccgctttatttatccaggaaatgaaaaagaaataacggtgcagctctctaacaccgccgaccgtccggcgctggcgcaagcctggctggataacggtaatgccgacgcgacgccggataccattacgaccccctttattatcacgccgcctatttcccgcgttgatgcgaaaagcggtcaaaccctgcgtattaagctcggcagtaatgcagggctggctaaagataaagagacgctgtggtggctgaaccttctggaaataccgccggttgaggccagccagaaaaacgaagggcaaaatattctgcagctggcgattcgttcgcgctttaagtttatttatcgccctgccgggctaggcaatcgcgacgctgcggcagaaaaactggcgctctccgctaacggcagcagcctgtccgtcagtaacccaacgcccttttatatcaccgtaagccgtatctcccgtaacggcggcaaagcgctcaacagcaaaacggtcatgtttgccccgcagtccagccagaccatcgccctctcttcagcggtgagcaaaggcgagaccctgaccgttaacaacattaatgattatggtgcagatgtcgcagtgaaagttaccgtcaaataa

SEQ ID NO: 216677 - DNA, 2487 bp, Klebsiella pneumoniae
atgaagcagaggtcaatctgcccgggaagattaagcacggctattgcggttgcgctgtgctgctttccgccattttccagcggacaggaaaacccgggaacgatctatcaatttaacgatggttttatcgtcggcagtcgcgaaaaggtcgacctgtcgcgcttctcgaccagcgctatcagcgagggcgtctactcccttgatgtctataccaacggcgaatggaaagggcgctatgacctgaaaatcaccgccggtaaagacggcaaaatgggcgtctgctataccaaagcgatgctgatgcagtatgggatttcgccggaaaaattaaatccgcagctcagcgaaaaagagggcttctgcggacgcctgcaggagtggcgtcacgaagataacgtcaaagacacgctgattcagtcctccctgagactggatattgccgtaccgcaaatctacgaagatcagcgcctgaaaaactttgtcagcccgcaattctgggataaaggcgttgcggcgctgaatttaggctggatggccaacgcctggaacagccatatctcctcggccaacggttccgataacagcagcgcgtatcttggcgttaacgcgggcctgtcgtgggacggctggctgctcaagcatatcggtaacctgaactggcagcagcagcaggggaaagcgcactggaacagcaaccagacctatctgcagcggccgattccgcagattaactcgatagtcagcggcgggcagatttttaccaacggcgagttctttgacaccatcggcctgcgcggggttaacctggcgaccgatgacaatatgtttcccgacggcatgcgctcctacgcccctgaaattcgcggcgtggcgcaaagcaacgccctggtgacggtgcgccagggcagcaatattatctatcagaccacggtgccgccggggccgtttaccctgcaggatgtctatccttccggctacggtagcgaccttgaagtgtcggttaaagagggcgatggttcggtcgaggtattcagcgtaccttacgcctcggtagcgcagctgctgcgtccggggatgacccgctacgcgctctccgccggtaaagtcgacgatagttcgctgcgtaataaaccgatgctctaccagggaacctggcagcatggtttaaataacctgtttaccggctataccggcgtcaccggatttgatgactatcaggcgttcctgctggggaccgggatgaacaccggcatcggcgcgctctccttcgacgtgactcactcgcggctgaagagcgatacccttgacgagcacggtcaaagctatcgcgccacctttaaccgcatgtttaccgaaacccagaccagcatcgtgctggcggcgtatcgctactccaccaaaggctactacaacctgaacgacgccctctacgccgtcgatcaggagaagaactacaacagcaactacaccgtgtggcgccagaaaaacgggatgacctttaccgtcaaccagaacctgccggacggctggggcggtttttatctgagcggtcgggtggcggattactggaaccgttcggggacggaaaagcagtatcagtttagttacaacaacatgtacggtcggctctcgtggtcggtcagcgcccagcgcgtctataccccggatagttccggccaccgccgcgacgatcgcgtgtctctcaactttagctacccgctgtggttcggtgaaaaccgcaccgctaacctgacatcgaataccgcgtttaacaattcgcgtttcgccagctcgcagattggcgtcaacggttcgctggatagcgaaaacaaccttaactacggcgtgtcgacgaccaccgccactggcggccagcacgatgtggcgctgaacggcagttaccgtaccccgtggacgacgctgaacggcagctatagccagggcgaaggctatcgccagagcggcgtgggcgccagcgggacgctaatcgcgcatcagcacggcgtcgtattctcgccggaaaccggcactactatggcgctgatcgaagcgaaagatgccgcgggcgcgatgttgcccggttcgccgggtacccgcatcgacagcaacggctacgccattctgccgtatctgcggccttaccggataaattccgttgaaattgacccgaaaggcagcaatgacgatgtcgccttcggcagtaccgtggcgcaggtggtgccgtgggaagggagcgtggtcaaggtctccttcgataccacgctgcagaacaacatcactctgcgggcgcgccaggctaatggcctgccgttaccgtttgccgccacgatattcggtccgtccgggaaagagatcggcgtggtggggcagggcagcatgatgtttatcagcgacgccagcgcgccgaaggccacggttaagtggagcggcggacagtgctcggtggaattaagtcaggaaaaaacaaaggaaacgctatgtcgctaa

SEQ ID NO: 216678 - DNA, 975 bp, Klebsiella pneumoniae
atgtcgctaatgaaaaaactgatgctttttattggcttaatggcgctggggacaacgtcagcatgggcatcatgttggcaatctaatagtgcctatgaaattaatatggctatggggcgcgtggttgttagcccggacttaccagtagggagtgtcattgcaactaaaacatggacaatgccggataataatacgatttatgttacatgtgatagaaatactactctgaaatcagatgcgaaagttgttgctgctggtttggttcagggggccaataaagtctattcaactgcaattcctggaattggtttacgtttctcacgtaaaggggcgatcagtatgatctaccctgatagttataccacgacaggttcctcctttagactcgcaggttcaacattcacattagatataattaagaccagtaccacaacagggagtggaaccttagccagtgggccgtatacagagtacggaccaggatttacaatccttaaaaccagccttaatgctgatgccattacaattgtttcaccttcttgtaccattttaggtggcaaaaatatgaatgtcgatataggcacgattaaacgagctgatttaaaaggggtggggacctgggctggcggtacaccatttgatattaaactggagtgtagtgggggagtcagtgtcagtggttatgcaaatattaacacctcattttctggaacattagctacaaatacatcagcgaatcaaggtgttctactaaacgaaaagaccggaaattctgctgctaagggcgttggtgtgcaggttataaaggacaacactcctctggaattcaacaaaaaatataatattggtacattacaaagccaggaaactcgttatatcaccctgcctctccatgcgcgcttctatcaatatgcgccgactaccagtaccggtgaagtggagtcgcacctggtctttaacctgacgtacgattaa

SEQ ID NO: 216679 - DNA, 651 bp, Klebsiella pneumoniae; identical to SEQ ID NO: 147080

SEQ ID NO: 216680 - DNA, 1026 bp, Klebsiella pneumoniae
atggacaagtactgctgtgcgagctgttttggggataatggtttaaagaaaaatatcataccttcactttccccagattttggcgattgttcgtattgtggtaccaaaggtattgagattattgagcctcatgctttattcgaacactttagttcattgataaatatctatgaaaatcatccggatggtaagagtctagttgcacatttgaaagaggattggaagctattttcacatcctcttttagatgaggctcatgccaaagagttattaggtgatatacttgatgatgggaatattgttagaaaaaccttcgtgctttctgatgattataagagcgaatctctcgcattatgggatcatctttgtcaggaactcatgtatgaaaatagatattttctcaataaatcacttgatacagataggcttggagagttattaagtttccttgctttagatgatttttctaaaacttggtatcgagcccgtatttatgcagatgatgctgcttttacaatagaccaaatgggggctccccccaagagatcagttagtcatgggagagcaaatcctacaggtataccgtatttatatcttggatctaaaccagatacagctttgtctgaaattcgacctcatacaggtgacagagcttgtgtcgcagagtttactctaaaagataacctgactctaatcgacctaagaaaccctcgtgaaaccgtttcaccgtttttattaaccgatccaggtgaaatgggtaaaatgcttgcagatataccttttcttgaacgacttggttatgaactaacaagacctgtattacctaaaagtgcagcccttgattatattccaagtcaatatatatgcgaatttattaagaaaacaggttttcatggagtactttatagaagttctgtaagtgaaggaatcaatcttgctctttttgatccgataaatgcgactggaggcaatgtaagcattcatgatatagataaagtcgaggttagtgtaagcaaacaagattaa

SEQ ID NO: 216681 - DNA, 933 bp, Klebsiella pneumoniae
atgtattatccttattttcgtgggaaacaatttgaactgttagctattagagacactgctaatgtaatggctgaagcaggttttactccaattatagagcctgtgagagaggctctcaatggtcttgagcgaacactgaaaacaataaaagaaaatgatggtaaggctattgtcatcattaatccggcatgtggtgatcactcttctgatggacaaagtatagctcaattattaaaaaatgaatttagtaattataaaaagatttctgtaggaatactccttgataagagtatgactattgctaaggttgataatctccttcattcagatctcgttcatgaagtcacctttatccatgctgggtttgatgagccaaaagctttacatgaaagatttggggatggatacaaacatgtatttatttcaaactattgttctaaagcttatcgaaaacatttttcaggttcagaaagaattttaattaaagatggctttgaaaaaagacgaaatgctgaccatcccgattctgagttcttttcagatcttcatcttaactatgaagaagagggtatgaatggttttggtgatttcttaattgttggtgatgagtttagtgagtccggtggccctgcgtatgctgttgctattcatctaacttacattaatacgaagcatgaagatgaaatgtacatctatcattttgtttcgacaacacgtgatacaccgacagacccagcaggtaagttcgcacagtcccttgataaattaatggctgctttaaattcaggcaaatccatgttgcttgaaacgtcggctatcaaagaatttagacgattacataatccgagccacttccctggtttaggcacagttaaaaaattgtctatgattcaccatatagaaaccctagccaatttcatggatggtaaataa

SEQ ID NO: 216682 - DNA, 801 bp, Klebsiella pneumoniae; identical to SEQ ID NO: 202111

SEQ ID NO: 216683 - DNA, 555 bp, Klebsiella pneumoniae
gtggaagataaaattaattttctatatcagtccttgaacgacacacaagcaaccattaaagctattgatgtaaaaattgggttcctctttgtaattgcatttatgcctatcactgtattacaaacattgaatagcactgtaatgacaatatggtctgcaaatgcaatttataaattatgcttgattttaatatgtgtaagctggctattatctgtagtatatctttttctggctttaacaagtatctcagatcctaacaaacacatgcatggagccaaaccaagcggattattttatggaaaaggtattttcaagattgaaacggaaaattttggttttaaaataaaagtaacatctaatcttacagtagatgaggtagttagcaatttacctgaccagaatgggattcttaaagaattaacatatgagaaaatgaaaataacttatattagagaaattaagttaggatattattctagatccactaaacttatgtctttttggctactactaagtacagccatttatttaataaataatttcattaagatctaa

SEQ ID NO: 216684 - DNA, 789 bp, Klebsiella pneumoniae
atgaataatgaacaaaaagcagcaatagaacaaataattaatagttcgcttgatcaagcggaagcccattggagaaatggtggttataaaatagcccttgaaatgaggaaaagtcatgctcaagatagccgagattttgctattaacgaatctctgatgcctggtcttccacctatttatgagggacaaaccattattggtgagttcatagcactagttgcagatatgcgagactcgaccaatcatttgttacaagcaatttcaccaaagatagcggatatttcagacttacaacgagtattttacgaaacgtcagctttattaccatctttagcaaaagttgtttcattccatgacgggaaaactacagaatatttaggagatggtatcttggcattttttttagtcgacgaggaagacaaaactaatgctatgtatagggctcgcagggctgcaaatgatattattgaagaattaagacccttacttaaccgtattatatttgaaagatatagattgccagaaattgatctaggggtgggaatggggattagtaaagcaatagtttctttagttggactgccaaaggaaagacaagttaaagcatttggtgaatgtgtattcagagcaacgaaactatcttcaggaagaaacgaaatttgtgtggatactaatctacatgcccaatggccgacatctaataatggaacactccgtttcagattaaaatcatttggatcaggagacaaagccgtttctggatatttattagaaccgtctaaaaaatag

SEQ ID NO: 216685 - DNA, 966 bp, Klebsiella pneumoniae
atgagaaaagctctattcattggtataaacgaatacgaaagcattcaagatctcaaaggatgcgaaggtgatgccatatctatgtcagaagtgttaagccgacactctgatggaagaccaaattttggtgcaaaaaaattaataaactcaccagcgaagccggtaacacgcgaagtacttgaaaaagaaattcagatgctatttaacggtgatgccgacattgctctattattctttgcaggacatggatactttgaccaaaatatagatgaaggagtcatcctaccttttgattataatcaaagtaaaaataatggcgtgagaataagtgatatattaaattgggcaaataatgcaaataaaatacgaaataaaattataatacttgactgctgtcaatcaggtgcagcaggacaaatcaggaatttaagaggaggtgaatctctaatttcagatgggagcactattttaaccgcttgtcaaagagatgaatttgccatggaggaaaatggtcatggtatatttactacattaatgttagaagccttgtacggtgcgggagctaatatattaggatatgttactccggggagtttatacagctttgttgatcaagctttaggtgagtgggagcaaagacctgtgttcaaaactaatgtttctaggtttgttatcttgagagaaacaggtccacggatttccttagacactctcaggatgctaccagtctggttcaaagaagactcatccgttttcaatttgaatcctagttttgaacctgagtccaacataccggatgagaataatataaatacgtttaagcaattacaggcatgtaatagacatggtctagttgaaccggttgatgccgagcatatgtatttcgcagcgatgaactctactggctgtcgtttaaccgctttaggagtttattatcgtaagttggcagaaaaacaacgaatttaa

SEQ ID NO: 216686 - DNA, 276 bp, Klebsiella pneumoniae
atgagtctgattcaagaattatgccaaaaagcgacatttcaatatgggaaaataatacgtgctgaaaaagtaatagtgaatacaaatgcaagcggtattgtgagtatgtataacttatacatcgaatatttagatgggaatatatatgagcataaatatttccctgacgacgatattcatttatttgtagataaagttgtgccatttgattgtattgtggaaaattctatcaggaatgtaatctttgtatataagaatttagaaaaacattcctga

SEQ ID NO: 216687 - DNA, 504 bp, Klebsiella pneumoniae
atgctggggatgctttgtgccttcgctgcattactgtgctggagccgttacgctgtcgagaactcccgctgtctgaaaaacctcccttacaacagcaaccagtggtcgctcctgataggcctgtgtacgggatgtatttcggtactgctgtggctcatcgccagtatattcaggttttctgcagttgacttgtcgttaccggaacacactcaaacgctcttttggataacgaacatgatgttagccgtggtctcctcatggctgggatatctggcgtggaatctctgttcccggcgtcttccggtatcactgacagggcagatggtggtttttgaaacccttttcgcgctgctatatggttttatctattcacagcgcattccggatctgcaggaaactgccgccattttactgttgctgggcggggttctggtcacggtacattaccatcagctcagccgtcgcggctacgcaggtaatagtccggaagtcaagggtagctga

SEQ ID NO: 216688 - DNA, 729 bp, Klebsiella pneumoniae; identical to SEQ ID NO: 180182

SEQ ID NO: 216689 - DNA, 426 bp, Klebsiella pneumoniae; identical to SEQ ID NO: 188205

SEQ ID NO: 216690 - DNA, 1290 bp, Klebsiella pneumoniae; identical to SEQ ID NO: 180184

SEQ ID NO: 216691 - DNA, 1752 bp, Klebsiella pneumoniae
atgaaattcttaaagaatatcccgtcttacctgtttttcaccggtaagggaggtgtaggtaaaacttcgatttcctgcgcaacggctatacgtctggctgaactgggaaagcgtgttctgcttgtcagtaccgacccggcttctaacgtcggtcaggtattcgatcagactatcggtaacactatccagcccgtgactgctgtgcctggactttcggctctggagatcgacccgcaggacgccgcccagcaataccgcgccagaatcattaatcctattaaaggtcttttgcctgatgacgttgttaacagcatcagtgaacagctttcaggagcttgtacgacagagattgctgcgttcgacgagtttactggcttactgaccgatacttctctgctgacccgcttcgatcacatcatttttgatactgccccaaccggccacactattcgtcttcttcagcttcccggagcctggagcagcttcattgaaagtaaccctgatggtgcctcctgtcttgggccgatggcggggctggaaaagcaacgcgaacaatacgctcatgccgttgaagcattatccgatcctgaacgaactcgcctggtgctggtcacgcgattgcaaaaatcaacactacaggaagtcgggcgtactcatgacgaattatcagctattggccttaaaaatcagtatttagtcattaacggtgttctgccagctagcgaagcagaacgtgatgcactggccgccgtaatatggcaacgagagcaagaggcgctggcaaatcttcctaccgggttatctgatttgccgacagacaacttataccttcagccgctgaacatggttggtgtgcccgcattgaaaggcctgctcaacgaacacgctgagatagcattgcttcctgaacaaagcatacaaaacaaaccagagaatatgtcgttctctgtcctggtcgatgatatcgcccgcagtgaacacggtctgattatgctgatgggcaaaggcggtgtgggtaaaaccacaatggctgcggctatcgccatcagtctggcggataagggttttgatgtgcatctaaccacctcagatcctgctgcacatctcagtacaacgctgaatggcagcctcaaaaatctgcaggtcagccgaatcaaccctcaagatgaaaccgaacgctatcgtcagcatgttctggagacgaagggcagggatcttgatgaggccggaaagcggctgctcgaagaggatttacgttctccttgcacagaagagattgcggtgttccaggcgttctcacgcgtaatccgtgaagcaggcaaacggtttgtggtcatggatacggcaccgaccgggcatacgctattactgcttgatgctaccggggcttatcaccgtgagattgctaagaagatggggaataaagttcattttaccactccgatgatgcagcttcaggacccggaacgcaccaaagtcctgctggttactctgcctgaaaccactccggtactggaagcggcaaacctgcagtccgatcttgagcgtgcggggattcatccctggggctggattatcaataacagcctctctattgcacagactcattcaccactgctgtgtctgcgtgctcaacaagaacttcctcagatcgaggctgtgaagaaccagcatgcaaggcacatagcgttagtacccctaatggcatcagagcctaatggcatcgagaaactcagagagttggcagtttaa

SEQ ID NO: 216692 - DNA, 363 bp, Klebsiella pneumoniae; identical to SEQ ID NO: 180186

SEQ ID NO: 216693 - DNA, 354 bp, Klebsiella pneumoniae
atgccagaaatcgcatccctacaacttttcaaaatactatctgatgaaacacgcctgggtatcgtactactgctcagggagatgggggagctgtgcgtttgcgatctctgcacagcgctggaacaatcacaacccaagacctcccgccatctggccatgcttcgggaaagtggcctgttgctggatcgcaagcaggggaaatgggttcattatcgcttatccccgcatattccttcctgggctgccctggtgattgagcaggcctggttaagccaacaggacgacgtacaggccatcgcccgtaagctggcatcagcaaactgctctggcagcggtaaggctgtttgtatctaa

SEQ ID NO: 216694 - DNA, 1998 bp, Klebsiella pneumoniae
atgagtgataatgatacaatcccgaagaagtctacaagccagattaacaaagcggtattctttacatctgctttgctaattttccttcttgtcgcctttgcctccgtattcccggaggtcgccgacaaaaattttaaactactacagcaacaaatcttcacgaatgccagctggttctacatccttgctgtggccctgattttactaagtgtcacgttccttggactctcacgctacggtgatatcaagctgggcccggaccatgcgcagcctgatttcagctaccattcctggtttgcgatgcttttttcggcagggatggggatcggcctgatgttctttggcgttgccgaacctgtaatgcattatcttacgcctcccgttggcactccagaaaccgttgcggcagccaaggaagcaatgcgtctgaccttcttccactggggactgcacgcatgggcaatttatgccattgtggcgctgattctggcgttcttcagttaccgtcacggtctgcctttaactctgcgctccgcactctatcccattattggcgatcgcatatacgggcctttaggccatgcggttgatattttcgctgttataggcacggtctttggcgtcgcgacatcgctgggttacggtgttttgcaggtgaatgccggtttgaaccatcttttcggggtgcccatcaatgaaacggtgcaggttattctgatcgtggtcatcacggggttagcgacgatttcagtggtgtccggcctggataagggaatacgtatcctgtctgagctcaatctgggtctggcgttgttgctcctggtgctggtcctgtgtctgggaccaaccgtgcttctgctgaagtcatttgtggaaaatacgggcggttatctttcggaactggtgagtaaaacgttcaacctttacgcgtatgagcctaagtcgagcaactggctggggggctggacattactgtactggggatggtggctttcatggtcgccgtttgtggggatgttcatcgcacgggtctcccgcgggcgaaccattcgcgagtttgtcaccggcgtgctgtttgttcccgcgggttttacgctaatgtggatgacagtgtttggtaacagcgcgatctatctcattatgaaccagggggccacagacctcgccaatactgttcagcaggatgtggcgctggccctgtttaatttcctggagcatttcccgttctcttccgtgctgtcattcatcgcaatggcgatggtcatcgtcttctttgtcacgtctgctgactcgggggcaatggtagttgatactctggcatcaggtggagtggcaaacacacccgtctggcagcgaatattttgggcctcgctcatgggcattgtcgcaattgcgcttctccttgccggagggctaagtgcgctgcaaacagtgacaatagcgagtgcattgcctttctcagtgatcttactgatatccatatacggacttttaaaagctttgcgccgggatttgaccaagcgtgaaagcctgagcatggcgacaattgctcctacggctgcacgtaacccaattccctggcagagaaggttacgcaatatcgcgtatctgccgaagcgatctcttgtgaaacgttttatggacgacgtcatccagcccgccatgacgttggttcaggaagagctgaacaagcaggggacgataagccacatcagtgacgcagtcgaggatcgtattcgtcttgaagtcgatttgggtaacgagctgaattttatatatgaagtgaggcttcgcgggtatagctcaccgaccttcgcgctcgccgcgatggataataatgagcagcagactgaacaacatagatattatcgcgctgaggtatatctcaaagaaggcggtcaaaattatgatgtgatgggctggaaccaggagcagctgattaatgacatactggaccagtacgaaaaacatctgcacttcctgcacctggttcgttaa

SEQ ID NO: 216695 - DNA, 1278 bp, Klebsiella pneumoniae
atgatttcacgctggaaatggattctgaagcagacagttaaaaagctatggttcagggcaacgttattcgccattgtcgcgataataacggcccttttatcaattctttttaaatcaatgatacctgagtcggtttccgtgaaggttggtgcggaagcagtcgataacattctgaacatactggcatcgagtatgctggcagtgaccactttttcgttgagtatcatggtcacagcctacggttcagccactactaatgtgactcccagagctacgcgtttagttgttgaagacgtaaccacacaaaatgtactggccaccttcatcggttcttttctcttcagtctggtagggattattgccctcagtatgggagcttatggagaaagggggagagtcattttattcattgtcacactggttgtcattgccttaatcctcatcacattgcttcgctggatacagcatttgacctctctgggaagggtaggtgagacaacggcaaaagtagaacaggcggccatcgaaacatttattgcgagagcaagaaatccctgtctcggcggatatccatggcttgagaacaatgaacagccgaaaggaacggttgcagtttatccgaagaagattggctatgttgaatatattgatatggtgaaacttagcaagctgctgaccaatgatccccgtcatgtatacctcgtggcgcagccaggcagtttcatacatccatccatgcccgttttgtacctgagtcaaggccaggagtcatcaatcagcgccgatttacttgagacgattattgtctcggatgtacgttcatttgctcaggatccccgattttgtcttagcgtcatggccgaaatagcctgccgggcactttcccccgcagtgaacgatcctggaaccgccattgatgtcattggcagaggtgttcgtatactttccacttacgcgcagaataaatctgatgaaatagaagtgaaatatccttcagttcatgttgcaccacttcagaataacgatctactggaagactttttctcacctgtcgcgcgcgatggtgccggtatgagggagattcagataagagtccttaaaggactgtctatgctgagtaagggttggcctgggatattttctgaggccgcgcataatttagcatttgaaacattagagcatgcaatacgtgctgaccatatagattctgacagatgtctaataaaatcaatttattataatttatttagtggtgaagactctaataaaaaaccatag

SEQ ID NO: 216696 - DNA, 516 bp, Klebsiella pneumoniae
atgtttagcatggatttttttgaagaaaatggcgatttcaaaaaagagttgaaaaagaaaccaataacaaaaactatgagagacttttttcttaaccaaaatagcagcaagatgtatgtttcatttgatttaggaatgtccagcgatgaagaaattataacagctttacaaacgatgctacccattctcaggaaagaatatgaaattgagccagtcaaaacagaaaaaattggactggcaaagataagaaaacttgtcgattacaatattatcccaatgatggatctattgatttgggcaaaatttaaaaaagtaaaaatctcaaatatggtcttgtctcgtgtcttgtatcccgactttacaagtgagatcagaggagaagatcacattaaagatacagacaggcctgttgcagagaagtcattgaatggagaaacaacccgtagtctcgaatactttatcagcaaaaacagccatctcctcaacataccgatttctgaactcggctctttctag

SEQ ID NO: 216697 - DNA, 207 bp, Klebsiella pneumoniae
atgaatacaatcaatcaaagcttaattcgtttaccagaagtcttgaaacgaactggtttcggcaaagcctgggtctatcgtctgatcagtgaaggtcggtttccggcacccgttaagatcggtgttcgtgccgttgcttttgtcgagagtgaagttgacgagtggattcaatcagttatcgaaacaagtcgaaataatgttgcttag

SEQ ID NO: 216698 - DNA, 315 bp, Klebsiella pneumoniae
atgaatatcgaagaatttgtgagtgaagataaccatatgtgtaatctgggtcaggaacttttttgtgaaattttcgaacccggagcgatttacgatttacctgataatgagtttaacagaaagattgtttactggttaagccagtatttagtggggaatctaagagaaccgttagattcgatctctgagcttaatattttcgaacagttttatgtctatgaaacatggttctcactaattaaatgccctgtagaaatgaaaagtctttcaaagcgattaatccaataccatattggtctgagaactcttttgtaa

SEQ ID NO: 216699 - DNA, 1203 bp, Klebsiella pneumoniae
atgcgtagtatttgtgtggattcttttatgttcgaaaatggtgagagatattgtcatatcgtaaataaaaatactggtgaaccattgtattatcctaacttgtatataacaacacaggtcaggaatcggtcagagtctatatcaacaatgaaggttattgccggtagcatttcattgttatatcgattctttatgaggaaagagatcaatattgatgaaagaattcagaaaaggatatttctggctcctcatgaaattgaagatttgatcgaattcacttcattcaattttcgagatggcgagaatgataattttagaatttcaaatgtcaaaaaaccaactaagtactttcggataacaaccatagctaactatctggaatggctgtgcaaaatacatctttctcatacaggacagaaggatactctcaaatatattttagatttcattaacaacataaaacgaaagaaaccgagaaataatgataaatataatatggatatagaaaaaagtttaaataatgaacaattggattctttgtttagcattcttgcaccgggtagcaaattaaatcctttttcagaaaaagtgcaaaaaagaaacaatctaatattcctgctattacactgctttggcctgagagcaggtgaacttttgaatctgcgaattggtgatatagattttgcagaatcgacaattgcaataagaagaagagcaaatgataaaacagatccgcgagtgtatcagcctttagttaaaacttgtgagagggaattaattgcagataaaaagctcatgtttgaaatttcagattatattttgaatgatcgaagaaacataaaaaattctaacaaacatgatttcctgtttattacttataaggaaggaaaaactcaagggcaacctatttcattttcttcatatcacaaagtggtgagtgttgttcgtcaatcctcctcacttctagggggattgacaggtcacaaactcagacatacatggaattatgagttttcgaaagcaatagacaagaatcaggacatatccgatgaaaaagagcaacaaatccgttcttatctcatgggatggcgaccgggttcagaaacttcaatgatttataatcgcaggcatatttatgagctatcgaaaaaaactgcacttgaacaacaagagcaactattcaaaggagaatttgatgaataa

SEQ ID NO: 216700 - DNA, 1305 bp, Klebsiella pneumoniae
atgaataatttaattaaaaataaatctgataaaatgtctttgcatgaacataaaatcgtcagttcgattgaaaataacggaatcaatcttacaaacttaatatatgctatgaacgaaaatttggtttatgggtttgtatatacagtacaatattattttaatagcaacagctatttgtatgtgaaaaatattgttagaaatatggagagtcttatccgtaaactatctcctactcatattgatgataaggttctaattgaatatcaaaataagaaattatcaaaagcctcagcatcatttcgcgttttacgaccatttttgattaaatggtttgagttaggatatccgggaatagatgaaagtgcggtagaactgttaaagcatttggacctaaaaataaaaaaatctggtcagtctgtgcttcaagatgatccaacagagggaccattaaataaagaagaacatacttctttgattaaggctatgaatcatgcatatagaaaaggtgaactgtcactgccacattatgcaatatcactattgatcagtcttacaggtagaagacctcagcagttagttatgttgaaatataaagaccttcttcaaaagaacttagataatggcaaagtagaatatgtaatttcagtgccacgagtaaaacaacggggtaaagaactacgatatcgagaacttgcaataatatcagaggttgcatcaattgttcaattgcaagctaatcaatcagtgaaacttgttgagcaagctcttggaaaaactcttgatgattattctaaacgagaagttcctattttcttaaatgaggaaaaactctcagatttatccataacaggttcaattcttctggaatataataaattatatgcgaagcctacaattgctaatgtagcattgaaaagtattgttaataatgggaatgtaatatccaaccgtaccggttcgatactaaatattactcctcgtaggcttcgttatacaatagcaactatgctggctaagaatgggcataatgttaatactatagctgaattattggatcattcatctacttcaagtgcggggatttatattaaaaatcatgctgacagtgttgaaaggattgattccgctgtttcagaacaattgtcatttgtcgctgatatttttatgaacggaatcaaatcgaaaacaagtagtcatttcaaatttttttcttcaagtagatgccagagtcagaattcaggattcccttgcaatcaatgtatattttttattccgattgatcgcagtgaggtgaatcaactatga

SEQ ID NO: 216701 - DNA, 1299 bp, Klebsiella pneumoniae
atgaataatattattttgttcaaatcaaaaaaacatattcttgtagaagaaaattataatgagtttataaaattttgtcgctatcaactgcccggactaacccaaactcaggattgggagcagtatgcctggaaaggatatgtaacatttagaaaaataggggttggaaatgaagtctttgattccattgatgcaatacacgaagattatatcaattttgcgaaagcatatatcagatatcaacactcattgaaaccattgaaaaattatggggttattatgatggccttgcgatgtctcgaacaggcccttttgcaggttcagaacactggtctcatttataatgttacagccgttgttttcgatgaggcaatgcagatcgggagtaaatattttgaaggtaacgttttagctaaatgtggaatacagcttgaaaaaatatcaaagtttctatgtgaacataatcttgtgaagtcaggatatatctcatggaaaaatcatgtaaaacagaaagtcaaaaacaattatcttcctgagattgaggattatcaccgaagcgataagttaccagatgaagaggcattactcgctattgctgatattttttcacaaaatgatgagttactgagtccaagggataagttcaccagttcagtatttgcacttctactttgttgtccgagcagaatctctgaaattttagccttacctgctgattgtgagattacacaaatagatggcaagggtatcgaaagatatgggttgagattttattcggcaaaagggtatggtcctaatatcaaatggattccacgggttatgataccagttgcaaagaaagcgattagaagattactttccttatcacaacatgcaagagcacttgctcactggtgcgaaaagtacccggataaattttaccgacatgagctttgcccaacagttgatgaaaaagctaaattgaccgttgtacaagtttgccatgcactgggatatcatttatttgatcataaatcatgtgttttaaaaattaaaagaacgagtttggatggtgggaaaagcttcttaaaccacaatgattacaactattcattgagtgatttgtgggaaattattagttctaattttagcagagactttccatggtatgataaagaaaaatccataaaatttagtaatgctttatgcttgctcaatactgatcaattttctttatcaagaatgacttcaattttcacattttataagcctactaaaagtttctttttcagtgacatacaaagaaaaaaaaagctatga

SEQ ID NO: 216702 - DNA, 576 bp, Klebsiella pneumoniae
atgaattataaaaatatattttcccgatatggatattatgatgatgaaggtaaaccactacttattcgctcacaccagccacggcaccttttaaacacaatagcccattatggtgaaatgtctgaactggatatagctaaatggtctggtcgtatcaatgctaatcagaacagagtttataaccatgtgtcggaagaagatatgttagataaaatcaaagctattaaattgaataggagtaattactgtcaaagggagtcaatacccacaaatgaattgacaattgattttgataaccttaatcaaggtgcaatacacttaactgaatttggttactgtgtacataactatttaatcaagccttgtgcaaaaattaatcatcttattgaatgtgataatgaaacaccggacattaactcagtagatagaattagactgcaatctgtccgagagaaagtaatgcaattaaagagaataactcagatcgcttatgaaaatggtgattatggtgcagacaaatggttgcaacaccatgaaaaaaatttggaaagaattaataagcttttgaataattaa

SEQ ID NO: 216703 - DNA, 387 bp, Klebsiella pneumoniae; identical to SEQ ID NO: 10359

SEQ ID NO: 216704 - DNA, 426 bp, Klebsiella pneumoniae
atggacaaaaacattatctatccagagtttactctggaagagcaacttatcattatcgtcgataaatatatctcaaaacgataccagccaggtgataaaagtttctcatatcaactttacctaatttttgtgggataccatttaaaatatttctaccctaaaaggatttattccaaatccaatcaaaatattgataacataatgactatgtttagctcggtatacaaaagtctgacaagcaatcttctacaacgattaaataacaaagaaggagttattagggaactaaactcgcttgttaattacatagataacaatcaagaaaaagcagaggaaatctatgctactgtcagagcacaatatgaaatgaaagtaattgagaaagagttaacccatgaagttcgcgtaagaaccgtcaggttatag

SEQ ID NO: 216705 - DNA, 315 bp, Klebsiella pneumoniae
atgaaaatatactcaatcctcacagttattcttacctcatttcttctaaccgcatgtaacagtgaaccatcgcaagacgatatatacaatgctttcaaaagtgttgtagataaatcaaatgccagtatgaaagcttttgattcaagagtttcagaaaaagatcttttaagaatcgattatgtgaagaaagttagctgcacagaagaagcaaataatgtttataactgcattgtcgatgcctctattagtaatatgaaacagacaaaacctgttaagcttgtgaaagcagatggtatctggaaagaagttcagtag

SEQ ID NO: 216706 - DNA, 387 bp, Klebsiella pneumoniae; identical to SEQ ID NO: 10362

SEQ ID NO: 216707 - DNA, 567 bp, Klebsiella pneumoniae
atgaagacattactaacatcggggtgtactaatcaacggggagcaggtcagttcaatccggatgctccggatgagcgttgggtaacggacataacctacatcaggacccacgaaggctggctgtatcttgccgtggttgttgatctgttctcacgcaaaattatcggctggtccatgcaatcccggatgacaaaggacattgtcctgaacgcactgctgatggctgtatggcggcgtaatccccaaaaacaggtgctggttcattcggatcagggcagtcagtacacaagccatgagtggcagtcgttcctgaaatcacacggcctggagggcagcatgagccgtcgcggtaactgccatgataatgcggttgcagaaagctttttccagttgttgaaaagagaacggataaagaaaaagatctacggaacgcgggaagaagcccgcagcgatatttttgattacatcgaaatgttttataacagtaagcgtcggcatggttccagcgatcagatgtcaccgacagaatatgaaaaccagtattatcaacggctcggaagtgtctag

SEQ ID NO: 216708 - DNA, 462 bp, Klebsiella pneumoniae
atgaaaaccagtattatcaacggctcggaagtgtctagattatccgtggcgattcaggctgtatctgaagaaaatagctgggacagggaatcccgtacctggcttcctaaatacgtctatatcaccgcgttagggtttcagatgctgggagtggatctggaaaaacttgatgcggaacaacaaaaaaagctccggcaaagcgaagagcgtcgtcgtcttatcgaggaggggattctgcgtgaagatgaggagatctccccgcgtgcagcacgtgagcgctggtaccgtcaaaaaactctcgatgcactgaggttccgtcggcagcgtggcgccgagcgtaaacgagctaaccgcctggccagatattctcgtgagcgccagattcacgaaatgtcgcttcatatcctgaagacaatgccggcagacgaggcttactggtgtacaacggagcggctgcagtag

SEQ ID NO: 216709 - DNA, 816 bp, Klebsiella pneumoniae; identical to SEQ ID NO: 167739

SEQ ID NO: 216710 - DNA, 1509 bp, Klebsiella pneumoniae; identical to SEQ ID NO: 167740

SEQ ID NO: 216711 - DNA, 723 bp, Klebsiella pneumoniae; identical to SEQ ID NO: 180301

SEQ ID NO: 216712 - DNA, 837 bp, Klebsiella pneumoniae
atggcgaattatcctgcagcgtatcagagcacgtccggctcggcgttagacgttgaccgcgatttctacaaagcgcttgccgaaggcccgcgtgagcttatcacctctcatctgattccaattcgtactggctttgcctgggaagttcccgccggacatctattccggattaccacgccggaaggaccgcaggtaggggatttgaatatctggaaccgccgtgacccacgcgaaagaatgtgggtatcccgtacccgccaattacaacgggcgcacctgtcgacttacgatcgactctggtcgaatttgccgtttattcgtccgatagcgaccatcaccgcagattcgctggcggattatggtatcgacagcgacggcggccgcgtacatgacctgatgggaacacgttgcgatccctatgtaaataaattactgactggcgaagatttcgatttccattgccattccaacctggtacgcgctgtacagccctggggactgacagaatttgatgtccatgacgtgatgaatgtattccagtgcaccggcctgaatgacaatgaccagtattttatgaaagcctgcccggcgaagaagggtgattaccttgagtttttcgccgaaatcgatctgttatgtgcactttcaacttgtccgggcggcgatttgtcgttaccgatgtggggcgaagaggcgcaagacacgctgagggtctgccgtccgcttggggtggaaatttataagccgcaggcggacctggttgccaactggacgccgccggtttcaccggactaccgtggtaatcacggtatgcaactgaagccagttgcctggtaa

SEQ ID NO: 216713 - DNA, 1392 bp, Klebsiella pneumoniae; identical to SEQ ID NO: 180303

SEQ ID NO: 216714 - DNA, 501 bp, Klebsiella pneumoniae; identical to SEQ ID NO: 83644

SEQ ID NO: 216715 - DNA, 840 bp, Klebsiella pneumoniae; identical to SEQ ID NO: 6027

SEQ ID NO: 216716 - DNA, 291 bp, Klebsiella pneumoniae
atgaagcaaccaggcaatggctgtaattatgacgacgccgagtcccgaccagactgcataagcaacaccgacagggatggatttcagaaccagacgcagccgcaggcgccggaaactaaaccgatgtctgtagggttaccgctggatctgcgtgaattccagcagcagcaagagaaagactttctacaaaccagcttacagcaggcaaaatttaaccagaaaaaagccgctgaattactgggtctgacttaccatcagcttcgcgctttgctgaaaaaacaccagatttaa

SEQ ID NO: 216717 - DNA, 645 bp, Klebsiella pneumoniae; identical to SEQ ID NO: 118676

SEQ ID NO: 216718 - DNA, 453 bp, Klebsiella pneumoniae; identical to SEQ ID NO: 118677

SEQ ID NO: 216719 - DNA, 651 bp, Klebsiella pneumoniae; identical to SEQ ID NO: 153351

SEQ ID NO: 216720 - DNA, 1542 bp, Klebsiella pneumoniae; identical to SEQ ID NO: 30088

SEQ ID NO: 216721 - DNA, 840 bp, Klebsiella pneumoniae; identical to SEQ ID NO: 6027

SEQ ID NO: 216722 - DNA, 348 bp, Klebsiella pneumoniae; identical to SEQ ID NO: 6026

SEQ ID NO: 216723 - DNA, 426 bp, Klebsiella pneumoniae
atgagcaacataaccatctatcacaacccggcctgtggcacctcgcgcaacacactggagatgatccgcaacagcggtaacgaaccgacgataatttattatctcgatacgcctccgacccacgatgagcttattaaacttatttcagatatggggattacagtgcgcgccttgctgcgtaaaaacgttgagccttatgaacacctgggtcttgatgaagataaatttagtgatgagcagttgattgatttcatgcttcaacatccgatcctgattaatcggccggtagtcgttacgccgcttggtactcgtctttgccgcccttcagaaatagtgctggatattctaccggaaggtcagaaaggagcgtttaccaaagaggatggtgagaaggtcattgacgaaacggggaagcgggttaagtaa

SEQ ID NO: 216724 - DNA, 1290 bp, Klebsiella pneumoniae
atgcttttggcagggagtatatttttactgacgcttgtactggtgatctggcagcccagaggcctgagtattggctggagcgcgagtattggcgctatgctggctctagtaaccggtgtcatccatatcgctgatattcccgttgtctggaatatcgtctggaacgcgacagcggcatttatagcagtcatcatcatcagcctgctgcttgatgagtccgggttctttgaatgggccgcactgcacgtctcgcgctggggtcacggacgtggccgcctgcttttcacctggatagtcttgctcggtgccgctgttgctgcgttgtttgccaatgacggcgccgcgctaatccttacgccgattgtgattgcgatgctgctcgctctggggttcagccagcgcacgacactggcctttgtcatggcagcaggatttattgcagatacggccagcctgccgctcattgtttcgaacctggtgaatatcgtctcggcggacttctttggtctgggttttacacagtacgcctccgttatgatccccgtggatatggcagcgattgcggccacgctggctatgctgcatctcttcttccgcagggatattcctgcgacgtatgacgtttcactgctgaagacgcctgccagtgcgataaaagatctggcaaccttcagggcgggctggattgtcctgttattgctgcttgtcggtttctttattctggatccgctggggatccctgtaagtgcgatagcggcggctggcgcagcagtgctgtttgtggtggcgaaaagaggccatgccatcaacaccgggaaagttgtgcgcggtgcgccatggcaaattgttattttctcgctgggcatgtatctggtggtctatggcctgcgcaatgcaggactcacggagtacctgtccggcgtgctgaatctacttgaagacaagggcttatgggcagcgacgttcggtacgggcttcctgacggcgttcctctcatcagtgatgaacaatatgccgacagtacttattggcgcactgtcgattgaagggagcacagcaaccggcgtcgttaaagaggcaatggtttatgccaatgtgattggctgcgatttaggcccgaaaatcaccccgattggcagtctggcaaccctgctgtggctgcatgtgcttgcccagaaaaatatgacgatcacctggggatattacttccgtactggcattatcatgactgtgcccgtgctgtttgccactcttgccgcgctggcgtggcggctctctgtcactttgtaa

SEQ ID NO: 216725 - DNA, 384 bp, Klebsiella pneumoniae
atgatttcaaagtttatacatatgatttaccatatgtattttctaaagggaacggagagaaaaatgctacaacctgttcagcttttcaaaatcctctcggatgaaacacggctcgccatcgtcatgcttctccgggagacaggagaactgtgcgtttgcgatatttgtgcagccacctccgaatcgcagcccaaaatctcgcgacatatggctatcctgcgcgatgctgggctggttcttgaccgtcgggaaggaaaatggatccactatcgtctgtcaccccacataccggcgtgggcagctgagacaatcacgacgtcctggcagtgtatgcgggaggatgtgcgtgaatggctggctagattagcctgcacctcctgctga

SEQ ID NO: 216726 - DNA, 300 bp, Klebsiella pneumoniae
atggaacaattttctgccctagatactgaatgttttgatcaacacatcgctgaacgcctgcacctgcaggagccaccacggattctgatcctgtatggttcagtaagggagcgctcctacagccgctttgccgcggaagaagccggtcgcctgctgacggcgatgggcgcggatgtaaagctctttaacccttccggtttacccctgccagatgatgcaccggacacgcaccctaaggtcaccgaactacgcggtctgatcagatggtgtggagttctccggaaaggcacggggctatga

SEQ ID NO: 216727 - DNA, 990 bp, Klebsiella pneumoniae
atgagccttctatctgatgacgaaccggagcgtaatcttctggcagaagcgttcccgctggatgaggaatttctgccggcgctgtccggccctgacgccccggttaatccggcccgggcctatctcctgtccctgaattcaccccgcagccggcagaccatggcctcgttcctcgggatcgtcgccgggatgctcggggccgtaagcgcggacgcctgcagctggggcagcctgcgccggcatcacgtcatgggcattaccgagctgctgcgcgacaccggccgggccacggccaccgtcaacacctacctgtcggccctcaagggggtggcgaaggaagcctggatgctccgcctgatggacgtggagagcttccagcacatccgggcggtgcgcaacctgcgcggcacccggctgccgtccggccgggccctgccgccggaggagatccgggctctgtttaccgtctgtgaggccgaccgcagctgtctggggccaagggatgcagccatgctggcggtcatcctcggctgcggcctgcgccggtccgaagccgttggcctggatatccgtgacgttgtcacgcaggacagggtcctgcgggtgctgggcaaggggaataaggagcgcctggcttacgttccggccggggcctgggcgcggctgcagatctggatcgatgcagtccggggtgagacgcccgggccgctgttcacccgcatccgccgcttcggggatgtgaccctgaaccggctcaccgaccaggcggtgtaccatgtcctgcaggtgcgccagggccaggccgggataagtaagtgctctccgcacgatctgcggcgtaccttcgcgaccgccatgctggaacagggggaggatctgatcacggtgaaggatgcaatgggccacgccagcgtcaccaccacccagcagtacgatcgccgcggggaagagcgtctgcgcgccgcccgggatcgcttaaacctgacctga

SEQ ID NO: 216728 - DNA, 1371 bp, Klebsiella pneumoniae
atgaatgttaatgataggaaagttttatgtactgttgaccaagctttttatggtgaacgtgaagatcaatttggaaagttaaaagcatattatgaagtatttagtaatggtgaaataataccaataaatcaaagcgagtttttctgcgagacagaacaagtattcgtaacaggtggtttttctgaaattaaggacaagtttaaagacaacttattcgaggccacttgttccccaacaaacttcgaaaaaaaagaaggcgattgcaaatatgttacaagatttaatgcatgtgaggaaataaaaggactccaagtcagtcagattataaatgaaaaactccctttgcctgaagatcctattatagtcacagaaaaaaaaccaacaacaaagactattgttattgaagaaaatgattatatatttgggccgttcgattttacatcatatcatgatgaatcatcagacacattcacattaaacttaaaacctataaatacccctctaaatagaatcccacaatatcatattgggaaaattggcattcaaaaatgcattgcaaatatagcaaaaaactctaaaagtaaaatttcatatttatcaaacataaagagaaaccttgaacaaattgatgatgtgattgactttatctccgacgatcaaattatttcgacgtacggcaacaaaatagctcaaaattctgacataagaagctttactaaaggaactatatctcaaatacgtaagcatttttcatcctccaaggaatttagagcgttccctcaaagatttaataggttattcaattgcttagaaaatgcagaaggatgggatgaaacaagagttgaattattagatagttttatatcaacggaaaaagggaagcagattgttaaaagcttcattgaagaaaatcgggatactttctttaaggaagaaaaagagaatttaactcgtaggttaaacaatgaaacctctaaattaactgaggtaatagcagaacttaataataagaaagaatctcttgaactcgaaataagaaaaaaaacgcgcgaacgtaatgatattgagataaataacacagactcactcccaggacttactgaagaagctcagaaaaaacttgatatacaattatcagaacaaagaaataaactagaaagtttaaattcggatatcacaataaaagaagagagactctctaagctaataaatctagaaaaacttactacagaaatagatgatctcgaaaaagatcgcgacagagctcgtgatagaatgaaacgcatgcaggagcaagttgaagaggtagcctcaaaattaaaagaaagcaatgaggctctaacgagtcgattgataagccgttgcgcctga

SEQ ID NO: 216729 - DNA, 2973 bp, Klebsiella pneumoniae
atgccacgccgctcaatcctgtccgccaccgagcgcgaaagcctgctggcactgccagatgccaaagacgaactgatacggcactacacgttcaacgaaaccgacctgtcggtgatccgtcagcgtcgcggcgccgcgaatcgattgggcttcgctgtgcagctttgctacttgcgattccctggcacctttttgggcgtcgatgagcctccgtttccgcccctgttgcgcatggtggccgcgcaactcaagatgccagtggaaagttggagcgagtacggccagcgcgaacagacacggcgggagcacttggtcgagctgcaaacggtttttgggttcaagcccttcaccatgagccactatcggcaagccgtgcatacattgaccgagctggccttgcagaccgacaaaggcatcgtgctggcgagcgcacttgtcgagaatctgcggcggcagagcattatcctgcccgccatgaatgccatcgagcgcgcaagcgccgaggccatcacccgtgccaaccgacgcatttacgcggcgctgaccgattctttgttatcaccccaccgtcagcgcctggacgaacttctcaagcgcaaggacggcagtaaagtgacgtggctggcatggctgcgccagtcgcctgccaaaccgaactctcgccacatgctcgaacatattgagcgcctgaaatcctggcaagcacttgatctgcccgcaggcatcgagcggcaggttcaccagaaccgcctgctcaaaatcgctcgtgaaggtggccagatgacgcctgctgatctggcaaagttcgaggtgcaacgacgctatgccacgctggtagcgctggccatcgaaggcatggccaccgtcaccgatgaaatcatcgaccttcacgatcgcatcatcggcaagctgttcaacgcggccaagaacaagcatcagcagcagttccaggcttccggcaaggcgatcaacgacaaggtgcggatgtatgggcgcatcggtcaagcgttgattgaggccaagcaaagcggcagcgatccgttcgccgccatcgaggccgttatgccctgggacaccttcgccgccagcgtcaccgaagcgcaaacattggcgcggcctgccgactttgatttcctgcaccacatcggtgaaagctatgccacgctacgccgctacgcgccgcagttcctgggcgtgctcaaattgcgggctgcgcccgccgccaagggtgtgctcgatgccatcgacatgctgcgcggcatgaacagcgacagcgcgcgcaaggtgcccgccgatgcgccaaccgcattcatcaagccgcgctgggcaaagctggttctgaccgacgacggcatcgaccggcgttactacgagttatgcgccctgtcggagctgaagaacgcgctgcgctccggtgatgtctgggtgcagggttctcgccagttcaaggacttcgacgaatacctggtgccggtcgagaagttcgccactttgaagctggccagcgaattgccgctggcagtggccaccgactgcgaccaatacctgcatgaccggttggaattgttggaggcgcaactcgccacagtcaaccgcatggctgcggccaacgacttaccggatgccatcatcaccaccgcgtcaggcctgaagatcacgccgctggacgcggcagtaccagacgccgcgcaagccatgatcgaccagacagctatgctgctgccgcacctcaaaatcaccgagttgctgatggaggtcgatgaatggacgggcttcacccgccacttcacacacctgaagaccagcgacacggccaaggacaaaaccttgctgttgacgacgatcctggccgacgcgatcaacctgggtctgaccaaaatggccgagtcctgccctggcaccacctacgccaagctgtcctggctgcaagcctggcacatccgcgatgaaacctattcgacggcgctggccgagctggtgaatgcgcagtttcggcaacccttcgccggcaactggggtgacggcaccacgtcatcgtcggacggccagaacttcagaaccggcagcaaagcagaaagcactggtcatatcaacccgaagtatggaagcagtccaggacggactttctacacccatatctccgaccagtacgcgcccttcagtgccaaggtggtcaacgtgggcattcgtgattcaacttacgtgcttgatggcctgctgtaccacgagtcggacttgcgcatcgaggaacactacaccgacacggcaggcttcaccgatcacgtgtttggcttgatgcatttgctgggatttcgcttcgcgccgcgtatccgtgacttgggcgaaaccaagctattcatccccaagggcgatgccgcctatgacgcgctcaagccgatgattagcagcgacaggctgaacatcaagcaaatacgcgcccattgggatgaaattctgcggctggccacctccatcaagcaaggcacggtaacggcttcgctgatgctgcgcaaactcggcagctacccgcgccagaacggcttggccgtggcgttgcgcgagctggggcgcatcgagcgcacgctgttcattttggattggctgcaaagcgtggagctgcgccgccgcgtccatgcggggctgaataagggcgaggcgcgcaacgcgctggccagggcggtcttcttctaccgattgggtgaaatccgcgaccgcagttttgagcagcagcgctaccgggccagcggcctcaatctggtgacggcggccatcgtgttgtggaacacggtatatctggagcgtgccaccagtgctttgcgtggcaacggcacggcgctggacgacacattgttgcaatatctgtcgccgctggggtgggagcacatcaacctgaccggcgattacctatggcgcagcagcgccaaggtcggtgcggggaagtttaggccattgcgaccgctgccaccggcttag

SEQ ID NO: 216730 - DNA, 558 bp, Klebsiella pneumoniae; identical to SEQ ID NO: 25161

SEQ ID NO: 216731 - DNA, 1260 bp, Klebsiella pneumoniae
atgaataatagagaaatacttagtctcttgctaaaaataaagcaagaagctaaaaatatcgaatatgatgacccatatcaggtatgggtcttcgacaattccacttatgtagcaatagaggacgatatttctcgtctaaaagaagttgatgatctaaagttagaagcaataaaaaaagaaagtatcgtaaagatatcacttttattaacatcagatatcaattggttttctaccacaattgaatattttaaaactcttagggtaagaataaagagcagtaaagaagcaatcgatgatttctacattgaaaatttaagttcagaagaaatagaaaccatatctaattcttcaaaagcatatatacaatggtgtgaaatactctcaaaaattgcagaccacgtagaatacgatgattcaaatttttggccaaattatatttttgttatggaaggtggtaaatcaaagaaaatcaccacttacaatttaccattaaaaaatgttgatgagaattttctaaattcggttgatattagcccgtgtgatgtgtctactttgacaaatgttgacctgcactcctatgagcgaaaacttgtattaagatcatcgttaattgagttatataacgattctaatgagaaaaatacgttccttagctcagtgttaaattcaccgaaaaaattgtgggatttattttccattaactatgaaatatacatcaacaaatattccataaataaagtaatacacgaggttgaaactcagaaattagatttcttatcaaagcttaattctttgattcaagaacatcagaccaaatcactttctatacctgctgttctgataagtacagccataataaagggctggtctccatctggtttactgcttatatttgtagctatgctacttacgtgctctgtagttatattgggcatccataatgccaaaaaatcattatcagatattattgaatcatctaataagacgatgattttattcacgaaagagaatgccaatgatgatgacgaagcattaaccaaccgtattaatcagatcacaaccgaagctttaaccaaactcagtaataaaaaagtcgatgctgaaaaaaccttgaataagctccaatggttgattttcattggtgtatcagtctggtctatgtttgttttatatcaattcaaagataacataatcccagttattgaattagcctatcagcatataaagagtttcattacttatttattaagcaagagctaa

SEQ ID NO: 216732 - DNA, 1095 bp, Klebsiella pneumoniae
ttgacttctttacaggttttgaatgctatcgctgttaggattacacctccagagaacgaacagaaagattggtcctataccttaggtgctctctggcccaccgatcagcaggaagtcatcacatttacaacgaaagtagatgcaagatttcataagagcagtaaatctcatgcgaagtttcaaaaaccttatccaggaagctctttcccttcaaagctgtcaaaatttttagaaaaagaaacttcattcgaagtcttcgtagatgattttatccagaaaaagttaattacatctgcaagacaatccagagcaagtaatggtgcaatattggtttttactcattaccaactgcaacatgaaaaggaagatggttctgttcataaagatttcgagcgacttcttgttttaatgcttaaaaacaccgatgcactaagattcaaagaaaacctacaactaaatcccgttgatataattgacttagataaattcttgcagggcgcaagaattgatataaccagatttatgtctgaggaggtagaagatgaagacaaaaataatttatgcttcatccgtggaactggtgatgtaagaaaatattttaccgaatcaattggtgccgaagatattatctccaataaaaccagtagtgaacaatgtattaaagctttggaacaattctctcatcaaaaagaatttggtcgtgctttgagagaaaaaatcgaatccaaggttcaggaactatttaataattgtaagcgtggacagtccataaccttagaaaagattcaaacacaaatcgatgctattatacctgttgatttagcagagcataaaaatacattcgtagattttgtaaacgaaaatggatttgaagttaatgaagaattcgaagtatctgcaagtgataaaagacaatatgaatggttagattttgaaaccaatattgcaaaaatgagtgtaagaaaacatcagattggtttgcctggttctgatagaccaattatctttgacacagaaacaaacgaagtaaagctaactcagaagattaatgatccaataattattgctcggctgaaagagcttgcaaatgaataa

SEQ ID NO: 216733 - DNA, 705 bp, Klebsiella pneumoniae
ttggtaaagagttcactacaatcattatgcaaaaaaaatgaattaggaaaggaaaaatctaaaaacaacggaccttacgtctgtatagttgaaaacgaaagcggaatagttcattcttcaaggaagatttatgtacgccaattaataaacaaaaaaatatttaatattttctttattccctttttgctaattttatttttgatatgccttgggtattacagcattgtcttttttgcaatattatcatatcttttacccatattatttggatatatgatttattctatgacatatgaccaaatgggtgattacttaaagaaaatggctgactttgttgtaatatttacaggagccattggcgcaaccgtattgattctagaatttattgatataaatatatttaaagaaaatgtttttatttttgaagtaataaatttctcccaagcaaaaataaatcacctaaaagctttccgtgtacttgccgttgaaatatttattttcttctacacaagaaaattatttatttccttcactgaatttagagttgcaaggaaagagtggattacaaaaggagctataaattcaatttttgtaacaaactctccaaaaaaaattttgcgttccaaactcaaaaccctagtaaagaaagccacttacaagattataaatttatatctagaagttaaacataaaatttttcagtaa

SEQ ID NO: 216734 - DNA, 1140 bp, Klebsiella pneumoniae
atgcaatttaatagcagccaaaaagcaattgcaaaaaacatcttgagcaagttaacttttgtaagtagagatgagtttaccatatggcttcaaaagagcatttctgatttaccaaaaaataaaaactatgccctttattcagttcgcaaattagatccagacaaacaagtattatgggaccttaatggtgatgttgttaatagaccaggtcattcgcaaggtagcgaagacttagtatattcaattatttcaaaccttgtgcggtctaataaaactatgtttttagatcatccatctctcaatgatctgaaaaaatctaaagtcaacgattttttacttattgatgattcgattggtagtggtgatagagtatccggatttattaatgccatgctcgataaccctacctttttaagttggtggagtttaggattagtaagattaactttaatttctttcgccaggacactaggttctgaaaatagaataatcaatactattcgcggctcagaccatggagtaagaaaatatagaaaatctgaaaaaatcaatttcataagtaacatcgtatataatgaaaattggttagaaactcggtggggtgagcagtataatgaaataatcaatctttgtaaaaatcaaaccaaaattccttcatgggctcgtcttggctatggtaatgttttatctaatataattttctatcatagtgtccctaataaccttcctggaatactatggttttctaataaaaaatggcaaggactaatgcctgatagagcaattccaggatggctgcttgccttgttagaaaatggaacaaagcataacacttccccccattcatctttatctcccgaaattataaatttactaaaacttataaaaagaggtgtcagagataacaaaagcattgccttacgtttgaatgttgattgttcgtatgtagaaaaactactcatatatgcagagacattaggactattgacaactcaaaaacgactatctaaattcggacttgacaaacttttaaattctaggcatgttaaaaacgatagtgtatgggattttggtctttacattccagagtcttggtgtgctgatcagcactccgttcagccgttaaacaatgatgagtga

SEQ ID NO: 216735 - DNA, 1164 bp, Klebsiella pneumoniae
atggaaatctggtcagcacaccaactttatcaaaatgcagagtcatccttagggaagacacaggctctaaatttaagaaattatgcaagtaatctgaagaaaaataatctccctgtaatttttacattacgccatctttcaaaaattactggtgttgattatcgcttgctacgatccactgtatcacgccgccgtgaatcagcaaattatcgcatgtttgctataaaaaaacgttcaggtggaagacgccatattcatgctgtaactggcgagatatttaaagtacagcatttcatcaatagtgaaatattaaaaaagttagttccccataatacttcttttgctttccatcctaatggtggcatcagaaaatgtgccgaacagcattgtggtgctaaatggctcttccaattcgacatttccgatttcttttattcaataaatgaatctgatgtttatttggtttttaaaaatgctggatatcggccattaatagcatttgaactatcaaggctatgcacaactatacgtttaccacaacatttacaatctctaatttctgttcctaagcactcaactaaggaatataagctttacggacaaaatacagagaagaaccttttttgggacatatcagaatcatggccgttaggagtgctacctcaaggggcaccgagtagcccaatgcttagtaatttagccactgtaaagttagatatttctctatctgaatatgctaataaatatggcttcacttatactcgatatgctgatgatataacattatcctgcggtggtactctacccgacggtgtttcggttggaaaaataaaaaataacattatcagcatcattcgtaagcaccatttcaaagaaaacgtaagcaaaataagagtagctggacctggctcaaaaaaaatagttttaggattacttgttgatggcaatgtccctcgattgtctaaacaaacttataaacgtattgaacgccacctttactcaataaaaaaatttggtctatcagaagttgcaagacatgaaaaatttgactctccaattggcttttacaatcatgtcgcaggtctgattgcttttgtaaaggatgttgataatgcaagatggctggagtttagtcaaaagtttgtttcaatagagcatccttaa

SEQ ID NO: 216736 - DNA, 375 bp, Klebsiella pneumoniae
atggctaaattaagatcagatgacagaattagaatacattgcataagtgttcgactcaacaacaatgaattacagattttaaatattaaacgaggtaataaaagtaaaggtgaatggctccgcatgttatttctgcaaaacctgccaccagtagtaccgacaattaatactgaagcctggaaaaaattgtctgacatatcacaaaagttgaatcgtatttctctccatatcgacagtaagagtaaagatagccagcttactcatacagagcttttcgctgtcaaacgacaactgcaagagcttcgccagcacctgctaaatgctgacatatggagcaaaccctatgaagggtatgcagaagatcaaaaggggtaa

SEQ ID NO: 216737 - DNA, 336 bp, Klebsiella pneumoniae
gtgtacgattataatcggcgctttgtcaaattcctcgacatgactttgatgtgcatctgccacttgaatatgatgacctggctgcctttttcatataatgccgtattcatcgccgctattgccgcaatagtgctggcgatcaccaccggcctgggcgttggtggtatttccgtaattgtcggcactgtgttcatgttcttctctatgaatggcatcatcgcggcgacatccacgacttgcgcactggatgcagtgcttaatacaaaactgcaacggctggaagaaaacctggggctgccgacatcattctttcacaggatgactcacgtcagataa

SEQ ID NO: 216738 - DNA, 2502 bp, Klebsiella pneumoniae
atggcggtggttataacctatgtatgtgagcttcatgaaggtgttcatgcccggcctgccggatacatcgcgcggctatgtaatcttttccaggcagatatcgactgggaaaacacccgtacgggactactggcaaatgcaaaaagcgccctctcgctgattgccagtgacacgctggtaaacgatacatgtcgcatcaccctttgcggagaagatgagcaacaggccgcagtccagctgcgcacgttgctttccgatctcccgaccttcagccttgaaccggaacccgcaaccacgtggggctatcttccccgctgcctgcgggaactgaacccgcacgtgattcagggaactcgcataaataaaggcgcagccatcgccagaccacaggtaatacagagcctggctttcaccgatattatcgcccgcaatccagggcatatcgacaatattgaaagcgaaaaagcccactttcttgccgggttagattcattacgcctagagcaagaagccgcactcggaaaaaaccaaggtattgagcacgaccttattgcggcacatctatctctgataaccgacagcgcatttcaggatagtgcgatcggttatctgaataacaacatgaatgcctggtcggctatagcgcaggcgtccctagacttttgccatcagcttgagcgctcgcctagccagtatcttcaggagcgcgccctggatattcttgatatcgcgacgcagctcatcagtgcgatctatggcgaacaggctctggcttaccacccgcctttgctaaatgaaccgacaattgttttcgccagtcacctgacccccaaccagtttctggcgctaaaccgcaaacaccttgcaggtctggtgctgtcctctacggggaaaacctcccatacagccatactggctcgttcgtcaggtatcccaaccctagcggatatcgatttttcatcgctggatatcgatgtcgagcagctgataatcattgatggtgagccagggatcctgattactcatccggatgagaaagttctgcgctactaccgtcatgaaattgccgtccagcaggatatgcagcagcggctgcgggaaaatgctttagcgcccgcaagaacccgcgatgggcatcgcgtagaggtagccgctaatattgcaagccttgccgaagcgcaggcggcctttgaaaacggcgcggaaagcatcggcctgtttcgcaccgagataacctatatgggccgcgattgcccgccctcctgcgctgaactgacagacctgtataaacaggttgttactctggcaggggggaagcccgttatctttcgcaccttcgatatcggcggtgataaaccggttggatatctaagcgtcgacaatgaagaaaacccgtttcttggtttccgggcagtgcgtacttatccgcaatatcgcgaccttttttccacccaactgaaggctattctgagcgcctcagcatcaggtaaagccaaaattatgctgccgatgatttctcgggtggaagaacttatctggtgtcgtgaggtactggaatcggttaaacaggagatgcgccacgagggtctggcatttgatgaacagacagcgctcggaatcatgctggaagtaccttcggtacttttctctatggcggagatggcagaacatgcggatttcttcagcgtgggcagtaatgacctgacgcaatactttttcgccgcagaccggggtaatgcccaggtaaaaacgctttatgacagttacactccaccgtttttacgcgccctgcagttcgcagtgaaagaggctcatcgcgccggtaaacctgtcgggttgtgcggtgaactcactgctgacgaaaccattctcccactgcttatcggcattggctttgatgaattgagtatgaactgcaccgcgattccggggattaagcacgctctgggccaactcagtgccggagattgccggtcgctggcgcagaatcttttgcaaaatcacaacgcacaacagttcaaagccgcattacataactcgagccttagtgcggcgcaaaagccgctgctatcgccggagatggttttatggggaattgacgccgctgataaaaacgaggctatcaaaatgatggttgataacctgtggcttcagcagcgcaccaatacacgtgacaggctctgcagtgatatctgggctcgcgaagtgccttttcctaccgtcgttggctcgggctttgctatcccccatgcccaaacggacgctgtcagggattcctccgtcagtattgccacgctcaggcaacctatcgcctggggcggcgtcatggtggataccctgttcatgctgacgattagcaaatccgcgcaggataacgagcatatgaagtacttctccaccctggcgcgcatgctcatgaatgatgaatttgtcagcaagattaaagcggcaaaaagcccggaagcgctttacacgctgatatccagaactctggtcttctga

SEQ ID NO: 216739 - DNA, 228 bp, Klebsiella pneumoniae; identical to SEQ ID NO: 195746

SEQ ID NO: 216740 - DNA, 231 bp, Klebsiella pneumoniae; identical to SEQ ID NO: 185380

SEQ ID NO: 216741 - DNA, 1356 bp, Klebsiella pneumoniae
atggcaccgactaccgcacagatcatgacggaaaacaccgcaggccagacttaccgggcaacctattcacccgatgataataaattgcgactttacgcatcattacggctcgatgaagaaacgtattccctgatcaacaaagcaggctttcgctgggcgcccaaacaggaactttttgtggcgccagcctggacgccggggcgggaggatgtcctgctttccctcgccggtgatatcgaggacgaggacagcaccctgtttgatcgccaggagcagcgcgccgggcggttcagtgactacagtgaccggcgggcggttgaatcggagcaggcgcttgcgcatgttgattcgctggcatcggctgtcccgctgggacagccgatcctggtaggccaccacagcgagcgccgcgcgcgccggcatgcgcagaaaattgagaacggcatgaaacgtgcggtgatgctgttcgagcgcgccgaatactgggaacagcgcgcgcaggcctctctgcggcacgcgaaatacaaggagcgtccggatgtgcgttaccgccgtatcaaaaaaatcgaggcggaattacgcaagtcccaaaagcacattgcccggtctgaaaagtatatgacgatgtggcgtgcgcagacgctcgatctgaaaatggcgttactggtcagtaattatgatcatattcatgcctgcttcacgctcgacaaatacccccgcccggcagagaaaagccagtatgagggctcgatgtctctccattctgccctgtctgaggagatcattacttttgaacaggcgcgtgatattgcgatccgctgtcatgagcgcacgattaaccaccaacagcgctgggtgaatcattaccagaaccgcctggcctacgaacgcgcgatgctcaatgaaaacggtggcgttgtcacccgaacacaggaatttgaaccaggcgggcaggtactgagtcggggagaatggttaaccattctccgggttaaccggagtaagggggaggtgagttcagtcgaaacgcccggttatcgctttctgggctacagcggcacgatgaaactcacgcccgaccgtatcacggactacaaagccccgacagcggaggaagccagcaacgcgaagaaagcggcgaagcgcccaccgatcgtcaattatccgggggaagggttccgggaaatgacaaaagccgagtgggcgaaattacccgctgattataaaggcgtgcggggtgctgcagaaaccgaaacacacggcgcctatcgcttccgccggtgcatgacgcacggttgtacgctcgtgaatgtgtatatcacagacatgaaaaccgttgaaattccgaaaaaataa

SEQ ID NO: 216742 - DNA, 564 bp, Klebsiella pneumoniae
atgcatcatgaccttaaacaccgtattcaggcgatgcgggacaaactggaagggcgcgcccctgtcgctgaaattcagggtagctcgcaactttttgtcaccccctccccggaatgtcgccggctggttgagctggctgatgtccgggaaaccgatcgcattctggaacccagtgccggaacgggcgccatactgcaggcgatcagggatgcagtcccccgggcgaagtgtgacgccgtggagctgcacgccgggttagcccgtcacctgcaggcgcatttcccggaggtccggatctggtgcggagattttctcgaatatcatccggagcgccggtatacccgaattatcatgaatccgccgtttaatcgcggtgatgatatccggcatatccggcgggcattaactctgcttgagcctggcgggattctgacgggcatatgtctggacgggccgcgtcagcaaaaggcgctggagtccctggcggacgtctgggagccattgccgcggggaacattcacgtatacccaggtagcgaccgccattctcagaataaccgtctga

SEQ ID NO: 216743 - DNA, 564 bp, Klebsiella pneumoniae; identical to SEQ ID NO: 95289

SEQ ID NO: 216744 - DNA, 1104 bp, Klebsiella pneumoniae; identical to SEQ ID NO: 95288

SEQ ID NO: 216745 - DNA, 405 bp, Klebsiella pneumoniae
atggacgacaacaaaccagtgctcctgacacttcacgaagcgctacgcctggatttgattgaagcctatatggcgcgggaaattacgctggcaaaagtggcggaatccatggagctcacccgtcgtcagtgctcccgtctgattaaacgctaccgcgagctggggccagccggtctggtcagccggcgccgtggaaagccaggcaatcatcagttaaacaccaccatcagagatcaggcactgcagcttattcgctcacgcggccggggtatgaatccgtcagccatctggcgaattctgaccacagaatacggtgtccggatttcaaaagagaccgtgcggaaaatgatgattgccgagaaaacctggcaccctcgcccgtcctcaaaccctgaatcagactga

SEQ ID NO: 216746 - DNA, 1359 bp, Klebsiella pneumoniae
atgttggtgactatgacagacaaagaactttaccggcttggcatcattcagcgagtatttgaccgggctttgcttcagcgcgacgcagcagacatacttaagctcagtgttcgtcaggtgcagcgtcttgtgcgtctgtaccggacagatggcgcaaccgcatttgcatcttcccgccgtggacgtcctgcaaacaaccggatcgacgaagaaacacgctgtaaagccctggatttgatccggtgccactattcagattttggcccaacgctcgcaaccgaaaaactggctgaacgccatcatatatatctctccgttgaaaccatccgtaactggatgacagccgacggtctctggcgtcctcattcccgccggcgaccccgggtttaccagccgcgatatcgtcgcgactgtctcggcgaactggttcagatcgatggctctcaccatgactggttcgaaggcagagccccaaaatgctgtcttctggtcttcatggatgacgccacaggtcgcctgatgcacctgcgattctgtgattcagaaaacgcctttgactacatgatggctacccggcaatacattgataaacatggtaaacctgtcgcattttacagcgacaagcatgcggtgttcagggtcagcggacccgaaagccgacgtaccggcacaacccagttcggacgggctctccgggaactggcgatcgaattgatttgtgccaacagcagccaggcaaaaggacgcgtggaacgggtcaataaaaccctgcaggatcgcctgattaaagagatgcgactgcagaacatcagctcggttgctgaagccaatcagtggattgaacatttcatgtctgattttaaccgtcgtttctcccggccggcaaaataccctaaagatctgcaccgtgcggtcacacagagtccactggagctgaatgatatcttcgcctggcaggagctgcggaccttatcgaaagcactgacttttcagtatgataaagtgatgtatatcattgaacccaccgaacaaaatacgcgcatagcaggtgaaaaaattaccgtttatgattaccctgacggaagcattactttccggcatcagcaccggccactgggttataagattttcgataaactgacctgcgttgatcagggggcggttgttgataacaaacgactgggtgccgttctgaggctggcacagcagaaacaggaagagctggaggctgaaggaaagcgaatgcgcagtacaaaaatgccccgcaggcgcgctcaggaacgtgcactggaagagctcagggcgatcaacccggtgctggccagtccgcaggattttatccccagcctgaagcgatga

SEQ ID NO: 216747 - DNA, 186 bp, Klebsiella pneumoniae
atgaacgtagtaagcccttatgaagaattaaaaagctggtttagtctcgaaaactatgagcagttaaaatcactaacaatcaaagaactgcatactgagcttgcctttagagaagcgattttcgacagtgtaaattttggatgggaagatgataatcacaatttaaggtctattcggctttgttga

SEQ ID NO: 216748 - DNA, 1251 bp, Klebsiella pneumoniae
atggctctcaccgatatcaaagttaggactaccaagccctctgacaaacccttcaaacttactgatgggcagggtatgcacctgctgatcaaccccaatggttcaaagtactggcgactccaataccgtttcgggggcaaacagaaagttttagcgttgggtgtttatccaatggtctctcttggtgaagcccgcaggaagcgagatgaagccaaaaagttggtatctgatggtatcgatccttctgaaaagaaaaaagcagataagattgagcaaagcgaagccctgacattcgaagctgttgcaagggactggcatactgcctgtaaaaggaaatggtcagattcccatagtgagagagtgctaaaaagcatggaagatggcctctttactgctattggtaaaagaaaaatatccgagcttaataccagagatcttcttgcccctattaaggctgttgaagcttccgggcgactggaagttgcttcccgcctacagcaaagaacaacggcagtaatgcgatatgctgtacagaatgggctaatagattacaatcctgctcaggagatggcaggagctattgccgtagccaaaagagtccacaggccagctttgccattcgaacgattctcagaacttttagaacgaattgatagtttcaagggtagaaaactcacgaagttagccgtaaagctgacattgctcattttcattcgttccagtgaactcagattcgcaagatggtcggaaatcgatttcgagaatgctatgtggactattcctgcagagcgagagccattacccggagtgaaacattcgcaccgtggttcgaaaatgcgaactccacaccttgttcctttgagttgtcaggcattggctgtgttgatggaaattaaagagatcagcggtgaccatgaacttgtgttcattggcgaccatgatttcagaaagcctatgagtgaaaatacggtaaacaaggctttgaggtctatgggctatgacacaaccgtggaggtctgtggacatggattcagggctatggcttgtagtgccttgattgaatccggcttgtggtcgaaagatgctgttgaacggcaaatgagccatcaggagcggaactcagttcgtgctgcctacatacataaagcagagcaccttgatgagagaaagcttatgttgcagtggtgggccgattaccttgacctccttagaatacgacaagtttcaccatttgattttaaaaagacttaa

SEQ ID NO: 216749 - DNA, 1086 bp, Klebsiella pneumoniae
gtgcagcgcgataccgttggcgatagcggtcataccgaactcgcgcacgccgtagtggatgtagttcccggcagcgtcttcgttgatcggcttagagccagaccacagggtcaggttggacggcgcgagatctgcggagccgccgaggaattccggcagcagcgggccgaaagcttcgatggcgttctgcgaggctttacggctggcgattttcgccgggttggcctgcagcttcgcgatgaactcgttagctttcgcgtcgaagtcagacggcatctcgcctttcatacggcgggtgaattcggctgcttcctgcgggaaggctttggcgtaagccgcaaacttctcgttccacgccgcttctttcgcctggccggcttctttggcatcccactgggcatagatgtcagacgggatgtcaaacggcgcgtgtttccagcccagcgcttcgcgggtcagggcgatttcggcgtcgcccagcggcgcgccgtgggagtcgtgggtaccggctttgttcggcgaaccgaaaccgatgatggttttgcacatcagcagggacggtttgtcggtgaccgcccgcgcttcttctaccgcgcgtttgatggcgtcagcgtcgtgaccgtccacgccgcgcaccacgtgccagccgtaggcttcaaagcgtttcgcggtgtcatcggtgaaccagccttcaacgtggccgtcgatggagatgccgttgtcatcatagaacgccaccagtttacccagtttcagggtaccggccagggagcacacttcgtgagaaatgccttccatcatgcagccgtcgcccatgaaggcgtaggtgtagtggtcgacgatatcgtgtcccggacggttgaactgcgccgccagggttttctcggcgatagccatcccgaccgcgttagcgataccctggcccagcggaccggtggtggtttccacgcctgcggtgtagccgacttccgggtgacccggggttttggagtgcagctggcggaagtttttcagctcttcaatcggcagatcgtagccagtgaggtgcagcaggctgtaaatcagcatcgaaccatggccatttga

SEQ ID NO: 216750 - DNA, 780 bp, Klebsiella pneumoniae; identical to SEQ ID NO: 10334

SEQ ID NO: 216751 - DNA, 225 bp, Klebsiella pneumoniae
atggcactgactcttatcaacaagctctacggcatcgagcgcgacatggaagaggcgggcgatgcccagcgataccagacgcgccagtcgcaaagccaggctttcctggagcaactgaaagctaggctggacaaaacccctccccaggtcacgtcgtcaaagtgccttgggcaagcaatcaattgccttgcgagcaacggcactgttgcaaatagtcggtggtga

SEQ ID NO: 216752 - DNA, 570 bp, Klebsiella pneumoniae; identical to SEQ ID NO: 97257

SEQ ID NO: 216753 - DNA, 510 bp, Klebsiella pneumoniae; identical to SEQ ID NO: 97269

SEQ ID NO: 216754 - DNA, 1200 bp, Klebsiella pneumoniae
gtgattactaacccggaaaccaccgccgcctcgccggatatggccattccgttcggcctcaagttcagcggctatgcccgctatggcgctcacttccagaccggcgaccagaaatatgtcggcgtcgacggctcctataacggcgcctcggcgatcggccgtctgggcaacgaaagcaacggcggcgaattccagatcagcaaggccttcaaaagcgcgcagggggctatctgggatcttaacgtgatgttcgaccactggagcgacgaagttaacctgaagaaggcctacgtcggggtcaccaacgtgctggaatccaaccccaacgcctatatctgggccggccgcgacttccaccagcgtccgcaacaggggatcaacgactacttctggatgaaccacgacggccagggcgccggggtgaagaactttgatatcggcggcgtgcagttcgacgtggcggcggtctcgcaggtgaaatcctgcagcccggaagtgatggccgacgagaccaacccgtcgcgcatcacctgtaccggcagctccgacaccggcgacaacggccactacgcgctgaccaccaaaacccacaacatcaaggccgggccgatcgacgtcgaggtgtacgccaactacggctttgattcgaaggcggtggacagcgacgcgcgtctcgaagcctggcagggcggcctggtgctgagccacaccaacgacagcggggtgaacaaggtgatcctgcgctattccgacaactcggataacagcgtctataacaaaaccgacgacctgaccacggtctacgccagcttcgagggcagccataagttcacccagcaggcgcaggtggaatatctgctggccttccacgactacgacaacggcaaagataataccgacaaccgcaaaaactacggcgccatcgtccggccgatgtacttctggaacgacgtgcactccacctggctggaagcgggctaccagcgcgtggattacgaccagggcggggataaccacggctggaagctgacgctgtcgcagaacatcgccatcggcatggggccggagttccgcccgatgctgcgcttctacgtgaccggcggccaggtggataacgagcacaccgcgaaggtaaacggcacccaggaccagcagctggattcgctgaacgtcggcggaatgtttgaggcgtggttctga

SEQ ID NO: 216755 - DNA, 765 bp, Klebsiella pneumoniae; identical to SEQ ID NO: 6031

SEQ ID NO: 216756 - DNA, 1014 bp, Klebsiella pneumoniae; identical to SEQ ID NO: 29928

SEQ ID NO: 216757 - DNA, 267 bp, Klebsiella pneumoniae; identical to SEQ ID NO: 121816

SEQ ID NO: 216758 - DNA, 294 bp, Klebsiella pneumoniae
atgatccggcacatgctcattaatgtaagcataggcatcgttttcaggtacttcaggtttatcactgagcgtgacttcacgaatatcgagattgaaagtgtgttcctgagcatcgttaaaccagttagctttatatgtgcgcacagcctctttattccattcactggtaaaaacgcactggccaccgatggtttcgaagcccttccgtatacctccaatcccagcaaacaggtcaataaaccggaaggcatagtcagggtgatgtgcaggcgcttccggaagcatttttcgtag

SEQ ID NO: 216759 - DNA, 297 bp, Klebsiella pneumoniae; identical to SEQ ID NO: 133773

SEQ ID NO: 216760 - DNA, 336 bp, Klebsiella pneumoniae
atgaaatctccctttctctttttagttacagcggtattgctgttaacgggctgtaatcagcctgctgaagctgattcagtcagcggtgggggtggaaccatcgaggccatcaaccatacccactgggctatcaaccactttagtgtcaacgggcagtcgggtattgatatcattggcccatggcagggaggaggcggtgcgggttactttggtgtgcctcccaaatgggaaccgggaatgacggtaaaaatagactgggagacaggcgaagcatctacagatgacttccctggttttggagatgataaaaaagttcttgagtgggaaaaaaaataa

SEQ ID NO: 216761 - DNA, 336 bp, Klebsiella pneumoniae
atgaaatctccctttctctttttagttacagcggtattgctgttggcgggctgtaaccagcctgatgaagctgaatcagtcagcggcggtggcggaaccatcgaagctatcaaccatacccactgggccatcaaccattttagtgtcaacgggcagtcgggcgtcgatattatcggcccgtggcaaggcggcggtggcgcggggtattttggtgttcctccaaaatgggaaccgggaatgacggtaaaaatcgagtgggaaacaggtgttgggtattcaatggattttccaggtttcggggatgataaaaaagtccttgaatgggaaaaaaaataa

SEQ ID NO: 216762 - DNA, 264 bp, Klebsiella pneumoniae; identical to SEQ ID NO: 94215

SEQ ID NO: 216763 - DNA, 831 bp, Klebsiella pneumoniae
atgctgatgtgtgatgcgaccggtctgtcgcaacgtcgtgcctgcaggcttacaggtttatccctgtcgacctgccgctatgaggctcaccgtccggctgctgatgcgcatttatcagggcgcatcactgagctggcactggagcgcaggcgttttggctaccgtcgtatttggcaattgctgcgccgtgaagggcttcatgttaatcataagcgcgtgtaccggctttatcacctcagtggcctgggcgtaaaacgcagaagacgtcgtaaagggctggcaacagaacgcctgccgctgctccgtccggcggcgcccaatctgacctggtcgatggatttcgtcatggacgcactttccaccggtcgcaggatcaagtgtcttacctgcgtcgatgatttcacaaaggaatgcctgacggtcactgttgcctttgggatttcaggcgttcaggtctcgcgtattctggacagcattgcactgtttcgaggctatccggcgacgataagaactgaccaggggccggagttcacttgccgtgcactggatcaatgggcctttgagcatggtgttgagttgcgcttaatccagccgggcaagccaacgcagaacggatttattgagagctttaacggacgatttcgcgatgaatgcctgaatgagcactggttcagcgatatcgttcacgcaaggaaaatcattaatgactggcggcaggattataacgagtgtcgtccacattcagcactgaattatcagacgccatcagagtttgcagcacggtggcgaaatggaaaatgtgaaggtaaacaaaccgaccttactaactga

SEQ ID NO: 216764 - DNA, 279 bp, Klebsiella pneumoniae
gtggatgtggactggctgatcgccgagcgtcccggcaaggtaaaaaccttgaagcagcatccgcgcaagaacaaaacggccatcaacatcgaatatatgaaagccagcatccgtgccaaggtggagcacccgtttcgcatcatcaagcggctgttcggcttcgtgaaagccagatacaggggggtgctgaaaaacgataaccaactggcgatgttattcaccctggccaacctgtttcgggtggaccaaatgatacgtcagtgggagagatctcagtaa

SEQ ID NO: 216765 - DNA, 924 bp, Klebsiella pneumoniae
gtggcaaagcaaaagttcaaaatcaccaactggcccacctacaataaagccctcatcaaccgtggctccataactttctggctggatgatgaagctattcaggcctggtatgagtcagcaacaccttcttcacgaggcagacctcagcgctattctgaccttgccatcacgactgtgctggtcattaaacgcgtgttcaggctgaccctgcgggctgcgcagggttttattgattccatttttgccctgatgaacgttccgttgcgctgcccggattacaccagtgtcagtaagcgggcaaagtcggttaatgtcagtttcaaaacgttcacccggggtgaaatcgcgcatctggtgattgattccaccgggctgaaggtctttggtgaaggcgagtggaaagtcaaaaagcatggccaggaacgccgccgtatctggcgtaagctgcatctcgccgttgacagtaaaacacatgaaatcatctgcgctgacctgtcgctgaacaatgtgacggactcagaggccttcccgggtcttatccggcagactcacagaaaaatcagggcagcatcggcagacggcgcttacgacacccggctctgtcacgatgaactgcgccgcaaaaaaatcagcgcgcttatcccgccccgaaaaggcgcgggttactggcccggtgaatatgcagaccgtaaccgtgctgttgcgaatcagcggctgaccgggagtaatgcgcggtggaaatggacaacagactacaaccgtcgctcgatagcggaaacggcgatgtaccgggtaaaacagctgttcggaggttcactgacgctgcgtgactacgatggtcaggttgcggaggctatggccctggtacgagcgctgaacaaaatgacgaaagcaggtatgcctgaaagcatgcgtattgcctga

SEQ ID NO: 216766 - DNA, 684 bp, Klebsiella pneumoniae
gtggtgctcgacgccctcagcgaacaggatctgctcacccagggcgtggcgctgcgggagatgaagctggtctccggcggttccggcctcgccatcggcctcgcccgcgactgggcgcagcgccatggcgccaggggggaaagcgctcaggccggcatgccgctggccggtccggcggtggtgctctcgggctcctgctcggtgatgaccaacagccaggtggcggcctatcgtcaacaggcccccgcccgcgccgtcgacttaagcgcctgctttaccgatctggagagctacgtcaggacgctgactgactgggtggacgcgcagcgcgatgcgccgctggcgccgatgatctatgccaccaccgagccgcaaacgctgcagcggatccaggcgcagtatggcgacaaggccagcagcgaacgggtggaacagctgtttgccgctcttgccgccgccctgaaggcgaacggatttacccgctttattgtggccggaggggaaacgtcgagcattgtggcgcagaccctgggggttgaggcgttccatattgggccgaccatctcccctggcgtgccctgggtgcgtgacacccgccagccgctctccctggcgctgaagtcaggtaacttcggcgatatccagttctttgcccgtgcccagcaggagtttcgtcatgactga

SEQ ID NO: 216767 - DNA, 483 bp, Klebsiella pneumoniae
gtgggatgtataactgcgcccgagccgttatccagcgcccatcaactggcagagttcgtcagtggggaaacggtactcgatgaatggttaaaacagagaggtttaaaaaatcaagctcttggcgctgcacgaactttcgttgtttgcaagacgggtacgaagcaagtagctggtttttactctttggccaccggtagcgttaaccatacggaagcgacaggcagtcttcggcgtaacatgccagatcctataccggtgattatactcgctcgcctggcggtagatgtttcattgcacggaaaaggggttggcgccgatttacttcacgatgcggttctacgctgttatcgcgtagctgagaatattggcgttcgtgcgataatggttcacgcgcttactgaagaagccaaaggtttctatgctcaccatggatttaaggcatcgcaaacttatgagcggactctgttccttaaacttccatga

SEQ ID NO: 216768 - DNA, 267 bp, Klebsiella pneumoniae; identical to SEQ ID NO: 180192

SEQ ID NO: 216769 - DNA, 705 bp, Klebsiella pneumoniae; identical to SEQ ID NO: 8686

SEQ ID NO: 216770 - DNA, 294 bp, Klebsiella pneumoniae; identical to SEQ ID NO: 111049

SEQ ID NO: 216771 - DNA, 474 bp, Klebsiella pneumoniae
ttgaaagtatcattgatggctgcaagagcgaaaaatggcgtaatcggttgcggtcctgacattccttggtctgccaaaggggaacagcttcttttcaaagcactgacctataaccaatggcttttggtagggcgcaaaacatttgagtctatggggccgctgcccaataggaaatacgcggttgttacccgctcaaactggacagcggctaatgaaaacgtagtggttttcccgtcgattgacgaagcgatgggtagattaggcgagatcactgaccatgtcatcgtcgccggtggtggagaaatctaccatgaaacgatacccatggcctctactctgcatgtgtcgacaatcgacgttgagccagagggagacgttttctttccgaacattcctgggaagtttgatgtcgtttttgagcaacaatttacatcaaacattaactattgctatcaaatctggcaaaagggttaa

SEQ ID NO: 216772 - DNA, 210 bp, Klebsiella pneumoniae
atgacggatggctggccgctttatgaatcacgcctgaagggagaactgcacgttatcagcaagcgatatacgcagcgcattgagcggcataacctgaatctgaggcaacatctggcaaggctgggacggaagtcactgtcgttctcaaaatcggtggagctgcatgacaaagtcatcgggcattatctgaacataaaacactatcagtaa

SEQ ID NO: 216773 - DNA, 1254 bp, Klebsiella pneumoniae
atgaacaaacgcattgtcattatcggcggcggcgtggtcggtctggccacggcctgggaactgatcaagcgcggccatcaggtgcaaatactggagcgcaatgccgaaccgggcagcgccaccagttttgccaacggcggacaattaagttaccgctacgtcgccccccttgccgacagcggcgttcctctgcagggaatgaaatggatgggcaaagccgattcgccgctgaatatgcgtctcaggatgtctctccagcagtggcgctggctgctgcagtttctgcgcgcctgtaataaccagaccaataaaatgaatggcgaccatattttacgcctgtcgctgctcagccgtcaggtcatgcaggcgtggcgggatgaggataatcttgccgatttccactggcggcgcagcggaaaattaattatccatcgtcgcgaatatgattttaataaagcagcaaaagggattgatcctcagtatcagcaggcgctgaatgctgaagcctgcctgcagctggagccggcgctcaaacatattagtccttctctgcagggcggaatctattcgccaggcgatgaaacggcagattgtcatcagttctgccttgccctgctcgacaagctcaatgccagcagcgactttagcctgctgacccagtgtgaggtgcggcgactcaataagcgcgggggacgcatcagcagccttgagaccagtcaggggcccctcaccggcgatgagtatgtcgtcgccgccggtaacggcagtggttctctgcttgggcatctgggggttcgcgtgccgctgtgcgccctgaaggggtacagcctgaccctgccctatcctgaaaaagcaggtattgcccctgacatcagcgtcaccgactacgggcacaaaatcgtttatgcccgccttggccaacagctgcgcatcgcggcgatggtggacatcggctacgacggcgacgaactgcgcgaaagccgcattcaggcgctgaaaaacatcgtcgcccgcagctttcctgaactggaggggctggacgaggccgaagtctggaccggcatgcgcccgtcaacgccagctggcccgccgatgctggggcgcgccggataccccaacctgtggatgaacctcggccagggtagcctcggctttactctcgccgccggcagcgcggtggtgctgggcgcgttaatcgacaatcagatgccagacatttctttagaaggtctcacatggaaacaaaccgcatga

SEQ ID NO: 216774 - DNA, 825 bp, Klebsiella pneumoniae
atgagtgactcaacgctcacaggcaatgcgcctgtcagacgaaatatcacgcggaaaaacgttattattggtctgttattgctgctgttcgtgttgatcgcgctgtggtgccacggtcgaccaggcagcgagcttggtctgctgggatttacgccgctggtggcgctagcgatattatcgctgatcggcgttgatattgtgctggcggtcatctcctcgattattatcgccatgataatgacctcgaccggcctgccggaaatgggcacgatgctggcgaaatccaccgggtcatttattgccaccgttgggcttatcattatgctcggcgccggcgtgggggaagtggccacccgcaccggcgcagcggttgagctggtaaaatttgtcgtccatcgcatcgggttgtcgagtcagacgcgggtgaaattcggcattgtggcgtcatcgattttaatttgcggttcgttgggcactatggccggtggcaatgccattatcgtggcagtaatcattccggtggcggcagcggtacgcttgacgccgccaacggtcgccgcgctgatgatgaccgccggttccgttgggctgtttaccgggcctttcacccccagtaccgtgacgatcctcagcctcggtgggttgagctatccggactatctgctgtacgttggtctgccgatgagcgcggtcacgctgctggccggctgggtaatggcgggacggatccagaagatgaccgaagcaaactgcgctatgacgtcgatctcgcggaaaagccgcaagaggatctcagcgccgcgcagcagcgtcggcgtaaattaa

SEQ ID NO: 216775 - DNA, 690 bp, Klebsiella pneumoniae
atggcgcagggagcgcacagggggtggccagtcgccgtcgccccctgtacccccgggctccggccagcaaaatcgccacttcgtggtgccttcgacttatccctgcaggcttcgggtcgggccgaggcagcgtccgtgcaaaacacggccctcagcccgcatccatgcgggctgccccggccttccgggaacgtctcagcgattttgaggccgccagcaccgccagtttcagcaacaatggtgaataaattaacgacaagtcgcacggaccgtaggccgggtaagtcgcagccgccacccggcacaaaagcggctccgcacccgctgcccttgcccggcggcgctacgcttgcgcgggcctacgaagggcgcgaattgagcgccaaatcaccgggccgggtaaggcgtagctgccacccggcaaaaatacggcaccagagcgtagcccggataaggcgccatacgccgccatccgggattttctctgctggcgctgtcatgccgctgacgcggctttcagaagcttctcgatgttgtaagtgtacgaatgctattccagaatttcatgtctgctgtgtgtccaaagtggaaggaggagattatctgcatatcgaaaaatggctgcctaagccatggcgatttatacagcgttttttgtgcctccacaaaaatccatttccatggttttag

SEQ ID NO: 216776 - DNA, 549 bp, Klebsiella pneumoniae
atgagagtgattattattctgttgttatccattgctctttctggctgtgatttttttaaaacggattttactgtggaggaagctggtaagcgagccaccttaggtgagttacaaataaaagtgggagatctgcgcaatggtgacatcgatataattgacggttccaatgtctatgttacatatacaaataaatatggaactcaaattatgaagaaaatttttataactatgaaagatggtattaaacccaatgatattatgcacataccaattccggattttggttatacactaggtgatatacatatctgtttttattacaaggagggggttaatgagaggatgacatatgaagtttttctacctatatatgaatataacgaattccgaatgagcgcaacaaagggtttcaaattttatagaaataacaatgaaatgttatataaacagccgtttgaattctatgtaaaaccaaaccttaagcttgatggtctacatggattcattaacaaagatttccctattggatcaggtttgtcctctgtataa

SEQ ID NO: 216777 - DNA, 564 bp, Klebsiella pneumoniae
ttgcaaccagatcgctcaagactttatcttcgccgcgtaaacgcatcagatatagatgatctcttcaggatttatggcgaccctgcaacaaatacgttcaatccagcaggcccgtatcccgatattagtcacgcacgtaatgtaatggcccgctggcttaaccactgggagaattataggttcggaaactgggctatctcactgaaagagaatcccgatagaattatcggttttggagggcttagcattatcagttatgacaatacaccgataatgaacctggggtatcgtttctctacagagtcgtgggggaaaggtctggcgacagagttcgctaaatatgcggtcgggtacgggtttgatgttttaaaactggctgagatttctgcggtagtaagaccaaaccatctggcatcccaaaagatcctgacgaaagcaggtctccggttttcacgaaatattcatgacgtgaaaaatgagcccgcaagcatgctttttactgtgactctggatgagtggaacaacgcgctaagtaggggaactaccccacccattgatcattag

SEQ ID NO: 216778 - DNA, 771 bp, Klebsiella pneumoniae
atgaacttacacggtaaaacggcgctggtcaccggctccaccagcggcatcggtttagggatcgccaaagtgctggcgcaggcaggcgcccagctggtgctcaatggcttcggcgacagcagccacgcccgggctgaagtcgccgcgctgggcaagatccccggctatcacgacgccgacctgcgcgacgtcgggcagatcgaggcgatgatgcactatgccgaaagcaccttcggcggcgtcgatatcgtgatcaataacgccggcatccagcacgtggccccggtggagcagttcccggtggacaaatggaacgatattctcgccatcaatctctccagcgtcttccacaccacccgcctggcgctgccgggtatgcgccagcgcaactgggggcgcatcatcaacattgcctcagtgcatggcctggtggcgtcgaaagagaaatcggcctacgtcgccgccaagcacgcggtggtcgggctgaccaaaaccgtggccctggaaaccgcgcgcagcggcatcacctgcaacgccatctgccctggctgggtgctaaccccgctggtgcagcagcagatcgacaaacgcatcgccgagggggtcgacccggagcaggccagcgcccagctgctggcggaaaagcagccctccggggagtttgtcaccccgcagcagctgggcgaaatggcgctgtttctgtgcagcgatgccgccgcccaggtgcgcggcgccgcatggaacatggatggcggctgggtggcgcagtaa

SEQ ID NO: 216779 - DNA, 861 bp, Klebsiella pneumoniae
atgaagaacatcctcgccattcagtctcacgttgtgtttggccatgccggcaacagtgccgccgaatttccgatgcgccgtctgggcgccaatgtctggcccctgaataccgtacagttctctaaccatacgcagtacggcaaatggaccggctgcgtcatgccgccttcgcatttgacggagatcgttcaggggattgccgatatcgacaagctgcagacctgcgatgcggtactgagcggctatcttggctccgctgagcagggagagcatatcctcggtatcgtgcgtcaggttaaggcggccaatccggcggcgaaatatttttgcgatccggtgatgggtcacccggagaagggctgcatcgtcgcgccgggcgtggcggagttccacgtgcgctatgcgctgccggccagcgatattattgccccgaatctggttgagctggagatcctgtgcggtcatccggtcgccagcgtcagcgaggcagtggccgccgcgcgggagctgattgcccaggggccggaagtggtattagttaagcatcttgcccgtgcgggtctgagtatggatcgttttgagatgctgctggtgacggccgaagaagcctggcatattagtcggccgctggtggatttcggcctgcgtcagccagtgggcgtcggcgatgtgaccagcggtctgctgttggttaaattgctgcagggggcaagtctgcgcgatgcgctggaacacgtcaccgccgcggtgtacgagattatgctcgccaccaaaaatatgcaggaatacgaactgcaggtagtagcggcgcaggatcgcatcgccgtaccggagcactgcttcagcgccacccggctttaa

SEQ ID NO: 216780 - DNA, 1506 bp, Klebsiella pneumoniae
gtgtctactgcaaacaataaaccagcagaaagcgtgagtctgaacgctttcaaacaaccacgcgcgttctatctcattttctcgatcgagttgtgggagcgttttggttactacggcctgcaagggatcatggccgtttacctggtaaaacagctgggtatgtcggaagcggattccattactctgttctcctcctttagcgcgctggtttatggcctcgtcgccattggcggctggctgggtgataaagtgctgggtaccaagcgtgtcatcatgctgggcgctatcgtgctggcgattggctatgcgctggtggcctggtccggccatgacgccgctatcgtctatatgggtatggcgaccatcgccgtcggtaacggcctgtttaaagccaacccgtcctccctgctttctacctgctatgacaaaaacgacccacgtctggacggtgcatttaccatgtactacatgtccatcaacatcggttcgttcttctctatgctggcaaccccgtggctggccgcacgttttggctggagcgtagcgtttgccctcagcgtggtggggatggtgatcaccattattaacttcgccttctgtcagaaatgggttaaacagtacggctctaaaccggactttgccccggtacacatgggtaaactgctggcgaccatcgctggcgtggtggtgctggtcgctatcgccacctggctgctgcataaccagggtatcgcacgtatggtgctgggcgtcgtcgcactgggtatcgtcgtgattttcgccaaagaaaccataggcctgaaaggcgctccgcgtcgtaaaatgatcgtcgctttcctgctgatggtagaagcgattgtcttcttcgtgttgtacagccagatgccgacctcgctgaacttcttcgccatccgtaacgtggagcactcgatcctcggtctcgcctttgaaccggaacagtatcaggcgctgaacccgttctggatcatgattggtagcccgattctggccgccatctacaacaagatgggcgaccgcctgccgatgccgcacaaatttgctatcggtatggtactgtgctctggcgcattcctcgtcctgcctttaggggcgaagttcgccagcgacgccggtatcgtctcggtcaactggctgattctgagctacgcgctgcagtctatcggtgaactgatgatttccggcctcggcctggcgatggtcgctcagctggttcctcagcgtctgatgggcttcatcatgggcagctggttcctcaccacggcaggcgcggcgatcatcgccgggaaaatcgctaacctgatggcagtcccggagaatgtcaccgatccgctggtgtcgctggaagtgtacggtcacgtattcctgcagattggtatcgtcaccgcggttatcgccgccctgatgctgctgaccgcgccgaaactgaatcgtatgactcaggacgacagcgcggacattaaagcacgcgaaaccgcggctgcctga

SEQ ID NO: 216781 - DNA, 942 bp, Klebsiella pneumoniae
atgacacaacataactttgaaaatgataataaatatcatgagcgttcggtgcaggcgcgaaagagtacccttgttagcgtggtggttaatattttcctttctgccttacaggtagtcgtgggaatattttccggctctcagggattaattgccgacggaatgcactctttttccgatctggtcgccgatggcgtggtattgatggcgaataaaaagagccgtcgaccgtctgaccacgatcaccactatggccactggcgctatgagaacggcgcctccctaatcatcggcgcgatgctgctgctcgtcgggggtggcatgctatggtccgcggcgggccatcttgcgcaaccgcaaactattccgccggtgcacagcgcggcgctgtggatggcgctggtggcgctggccgtcaaggaggggctgtttcgctatatgctggcggccgccaggcggctgaattcgtcgctgcttatcgccaatgcctggcatgcccgctccgacgccgcatcctccctggtggtggccctggggattatcggtaatctggccgggttcgcctggttcgacccgctcgccgcgctggcggtggggctgctgattgcgcgcatgggctttcgtttcgccgccagcgcgctgcatgatttaatggaccgtgcggttgatgaagagatgcagcaggcgatcgccgatacgctgcgagccacgccgggcgtggcgggcctccacaatctgaaaacccgtaaggcgggggatctggtgctggtggatgtccatctcgaggtggctggcgagatgtcggtagccgaaggacatcagattgcccgtcacgcgcgtgagcgagtgctggcgcagcatccggtgcttaatgtgatggtgcatctcgatccctgcgatgagcatggggttgaagaaagcggtctgatacacccggtagcctaa

SEQ ID NO: 216782 - DNA, 1281 bp, Klebsiella pneumoniae
atgtcatctcataccaacattgtacaagaaaaggctttgcaactgatgcaaagcattggtcaaaatacctaccttaagtcaatcatgagcggtatgatgctcatattgccagtaacgatcatgagttctgtggcgactttggttaaagtgtttccgtttgctccatatcaggattttttgttacgacacaacttaactcgcttctttgatatcccgattaccttcacgaataattttttagccgtgattgtcgctttctccgttgcctatacgctagcgaaaaatttcgatgttgatggcttcatgtcaggcctgatttcaatgatctctttctttattttaacgccgtatgatctcggtgaaatagggccgttagggcaatcattttcaatccctggccaatggctggggcccatggggctgtttaccgccattctggtggcgataatttcaacacgaatattcgtggcgataactcgcaaggggttgattatcaaaatgccagaaaatgtccctgaatttatctccaaatcgttctcttcattgattccaggaatcgccatcctgacgctgtttacaattatctccgcagtcattaccagcgttggttatgggagcattcacgaaattatttataaattaatccaggttccgctaacatcacttggatccggaatctggtcactcatctttgttgctgttgttgcgcaattgctatggttttttgggctgcatggccacgctatcaccctcggtatcgtagcgccgatctggtttgccatggatgcccagcagcttgctgcgtatgctgcaggcgtcgacttacccaacatcaccggctttgcgttctttatgacttatggcgctgctggagatttattgccgctggctataatgctcgcttttttcgcgaagagcgcacgctataaaacgctcggtaagatcgccttgccgccagctatcttcaccattggcgaaccgatggcttatggcgtgccgctggtaatgaattttactctggcgattccttatatttttatcaatggcatcatgctcggcattgcatggtatctaacggtcattggcgtattgcctcgcgtcgctggggtgagtaccccggccggcatgccgatcattatttctggttttatgcaggggagctggaaaattgccgctttccaatttataggactttttgcgcgatttgcaggatggtatttcttcttcaagactgccgatcttgtcgcttgccgggaagaaaatcagacggataccatttga

SEQ ID NO: 216783 - DNA, 2613 bp, Klebsiella pneumoniae
atgttaagtatcaattaccaaacggaaaacattattgtcgatcatctgccaattatggtgtgctggtctaccaattatcctcaaaagtcattttcgataaaagtgtataaaggtgccgaactggtatctcttatcgcaagagagggtaataatacaattgtcactctcgatgcaatatcgttacaaagctttacttcttataccatagaagtccttacccacggtgacaatggtgagaacaacgtttttagaaacagttttacaaccagtaatcttggccatttttctggccgctgggtgagcggtgggcatcacttcactaatgatattcattactatcgcggtaaacgtaatgtggtgatgagaaaaacaatttatctcgacgaagacctcctcgatgcctatatcagtattgttggtcttggtttttataaattgtatatcaacggtaaagaggtcacacgcggtgagctcaatactgactggacaaattatgctaaaattatttattatgatacttacaatataaagccgtttattaatcagccgaaaaatgaagtcattgttgagctagccgatggctggtttaatccagcgccgcttaaattatttggtaaatataacctgagagagaccttaaccatcggtgaaccacaggtcatcgctgacatttatatgaagtttgcagaccgcgaaatgatcatcggtagtgatgccgactggcaatattgcgaaggcgcttataccttcaataatatctatttgggcgagcgcctggatatgaaactgtttcgcggagacaacaccaccgatttgctgatgcctgactggaaaaatgtggtgctgagcaacgggcctgaaggccgtctggtctcgagttttattccgaaaattaaccatacgttgtccctcggggcagagcatatccacgtcgtagacgaagagacattcattattgatttcggtgccatcgtcaccggatttatcgatttatccattaccgcgtctgagaatcaacgtgtggaactgctctatagcgaagacgttgatgaaaactacgaactaaacactgactccacccttgcgggatttgtcggcaaacaggttactgaaggtgtgattattgacggcggaattggagcaccggcgagggcggaacagaaggatgcctttgaatgccgcagtgggaagaatcattttatcaatgcctttacctgtcattcgtttcgctatgtgcagttaagcggtattaatattgaacaattaaacaacgttcaggcgctttcagtacatactgtactaagggaaaacgggggcttttactgctcagatccttacataaataagctctttgaggttgctaaaagaaccaaactgaataacattcattcggtcttcggggattgtgcccgcgaacgtttcgcctatggcggagacattgtcgcgttggcccggtcgcaagtgtatcagtttgactctgccgctatttataagaaaactatctttgattttatcaatgatattcgtccctgtggtggtgtgacggaaactgcgccatttatgggaattaagactaatggagtcggcggggaaacgggccccctgggctggcaactggtattaccttatttgatagccattcactatcgacattatggcaatgtcaatctgctggccgaaagtttgccatttcttgagaagcagatcctctccctggaaatgcgcgactttgatgacctggtgacctgctgcctgggtgactggggaaaccgcgttcatgatatgcgtaattacaaaaatggctcgccagctctccatttcaccagtgcttgtttctattattatcatttgttaattatcgcaaaaatatgtgatgatcttggctttaaagaaaaatggctaaaatatattggaaaggccaataaaattagagagaaaattttatcactctataagaatacggatggcagctttgccgatcgcagtcagaccagctttgtttttgcaatctacttcgatttgtgtgatgatatcgagagttcattgaatgcattgatcgatctcatcaaaaaagagcaaaatgttatcacttgtgggatttttggccaaagttttgcctatgaaatatttcatcgctatggtcataatgaattaatccttgaatggttaagagtcgaagccggattcaagaaaatgcttaaaaatgatgccagcacattgaaggaatttttcggtgataacctgaatggttcgaataatcatgcgatgttcagttcttattccagttggctgtttcaggctttgggcggcattaccgtcgctgaggaggcggttggtgctgatgttattttaatcagtccatcctttactgacacgattaactttgtggattgctggcatcaaaccatcagagggcgtattgagtgtcgctggcggcgctataaaaaaggcattgaattagtcatcaaagtgccatttaacctcaaaaaatgtacccttaaattaccaaaagtgtatcaacttaataaacaattacctgcgccgatagactgtgatacctatcatcacttttatgacattaccgatgcaggtgagataaaagtactattgtaa

SEQ ID NO: 216784 - DNA, 945 bp, Klebsiella pneumoniae
atgttacaccatgatattcatgaaaagctactggcttataccgatagagaactcgaactgcttcgcgctaactatcaactgtgtcataaattcaaaagccatatggagcgaaggtttttcaaagacaactacattcatattgaaaagcagacccgatttactaaaattccgttgcattctcatggctttatcgagcttatttatatatatcagggtaaaatgcatcagaagattaatgaagaaagtctcactttaggtaagggggagatcctgcttatcaaccagtttgccagacacgaaattgaagccgcagggcagaatgatattatcatcaattttattattaagaccgaatttttcggtcgactcatgtccctttttgacgaaaataacatcatttcccgttttatcctttcagcaattaatggcagaaaaaaacatggagagcatattcactttaaagtgggggaaatcgacgcaattcaaaacattatgcatgtcatcattagcgagatctacagtaataaccacttaaaagagatacgcgtcaatttcctggtgggactgttgatgaccgaactgctctcgaatgtgcaagccagcgattaccatatcaacggcagttacaatgaatcacttgccatggccgtgttgagatatattgataccgattataaaactgccagcctgaaagagatctcttgtcgtttaaatcagcctaattataaggtgagtaaactgataaaagacttcactggtaagaactttagcgatttgttggttgaaaaacgcctggatgtgttgatccatctccttaagcatactaatcactctattattgatgttattaatatgacgggttatgaaaacgcctcgcattgttataaggtatttaaagagaaatataatatgagtattaaggagtatcgtgatctgaactcctga

SEQ ID NO: 216785 - DNA, 1284 bp, Klebsiella pneumoniae
atgaaccccagaattattatttcaggtgttatctcatgttttctgcctgcgaccttatgccatgcggccaatctaagcgacgacggcagcttccagttaaatggatatggcatggtggctggagattttcagagcgaactaaaccgtcccaaaaacatgtcgttgcataccgatcccaccggacctaatcaggatcctcgtggcaaaatgggcgatttgggaaacagtttctggcacgattactggacatcgctggctatcactaaaaaatggcaggggctggcttctcccgagcaatgggctgattacacctatgaaatggtgggttacggcgataaaacggtagaaacggcacagaattatgggcgctttggtgggctctcttttcttcccgagggcgcaaacatttgggctgggcgtcgttacctcgatcaacgtattaatatcttcgcttacaataccaaagaagtacatattgattccggcctcggttataacagtaagaattttgatttgaacgttggtaccgaccagatcgactggtccagcgataccgcgccgcaggcgatagaaggctcgcggcgcatcgttgatatggcttatcgtatcgatcagacagagctgggtatgacctatgttaaagaaattgatgacccattgggcactggcaagcagaaagcaattagtttttccgcgaaatacagcatgccgtctttttggggagtggcaaagggacaatcgacagtcaaattacagtatggtaaaggggttattgctccttatctgaacaccagtcgtattaccgtccttagcgaagagggcgattgttcaatgcgtttttccaccgacggaaacttgacgttatttgatgattttgccgtctcgccggctttcatctatgaatataccaagcgtgaaaaaactgctgaccgaaccacctttatacctgatacaggttattcagggggggacatgacctatggttccgcaaatgaaaccgggatctttaccggcgtaaacgttaaacaaaatattcatcaccaaaatctctccatgttgtatgaagtcatggtgaataacactatcaataaaaatggcgtcgaaggtgccagcggcgtcggctacaaaattgccgccggcccggccctgcaactggatgttttaccgtatgtcgcgccgattctcagtttgacggttacctacgcaggcggggacaaagaggtcacgttattgccggaagactcggagtggcgagtcgggtatcgaatggaagtctggttctga

SEQ ID NO: 216786 - DNA, 966 bp, Klebsiella pneumoniae
atgaacaaacacgtcgctgctatgctgacgatgcttattattccgtctgcttttgcgcaaacacctttaacagacagcaaaactatcgttattaaacctagcgctctggccgtcgagatggtgcctgatattgcctattcatttacgcaaaatatcatgggacgaccgctccagttaacgatggatttgctcaagccttatgctgataaaccgttacccgcagtagtatttattaccggcggcggctttctcgatgcgcccaaatcaaaatttatcggtcagcgggtcgatattgcccgggccggttacgtcgtcgccagcattacctatcgggtcgtacccaatgtgactttcccgggcatggttgaagatgcgaaaacggcggtcagatttttacgcgccaatgctgaaaaattaggcatcgatcccaaccatatcgctgtgatgggcgagtcggcgggtgggtatttagccgccatggtgggtaccaccagcggccataaggaattcgaccagggagagtattcaaatcaaagcagcgatgtgcaggcggtggttgatctctatggcctgtccgatctgacgaaagtcggggctgacttttctgcggacattcaaaaagcgcatcagtcaccggccataccagaggcgatgctggttaatggtattccctggcaaggcggtggcgcgatctccgcctatcccgaaaaggcgaaacgggctaatcccatcacctggatttcgaataaaacgccgccttttctgctaatgaacggcgatgccgacaatgtggtttcacccagccagtcaacgcttttacacgaggcgctggtagcgaaaaaaataccgtccacccattacgtggtgaaaggggcggatcacgcaggtttgatgtggtatcagcctgaagtatcaaaaattattattaattttttagaccaaaatctcaaagataagcatcaataa

SEQ ID NO: 216787 - DNA, 324 bp, Klebsiella pneumoniae; identical to SEQ ID NO: 138459

SEQ ID NO: 216788 - DNA, 315 bp, Klebsiella pneumoniae
atggatatggaagcaaccgtcatggaactcatcattaacgccggtgagtcccgcagtctggcgatgcaggcgctgcaagccgccagaaaaggagtgtggcaggacgttgataggctgatgcaggacgccgcagatgccgcaaaacgcgcgcatgatgtacaaaccatgcttatcggtatggatgagggctgtggcaaagtaccggttaatcttattctggtacatgcccaggatcatataatgacctctatgcttgcgcgggagttgatcgcggagcttattgaggttcagcgccagctgcaacatcgcaactga

SEQ ID NO: 216789 - DNA, 1407 bp, Klebsiella pneumoniae
atgtctaccacccaggttctcggcgaaacgccctatgcttcgccaggacaaccgcacgccagcttaaccggacgcattgatgcgctgcccgcctcatttgggttatggtcgtttattaccctgctctcacttggcggcttctttgagctctacgatctcttccagaccgggtatatcagcgcgggcctgctggcggagggcattttccacaccggacaggcgggcatcttcggcatcgccgaccaggcggccttcgcctccgccacctttatggggctgtttatcggcgccagtctgctggcgccgctggcggacaaactgggccgccgcctgacctttatggtggcgctcgcctggtacggtcttttttcgctgctgatggcgacgcagagtagcgcggaaggggtgatcttcttccgctttctggtggggatcggcctcggcattgagctggtgaccattgatacttacctcagcgaatgggtgccaacccatctgcgcaataaagcctttgcctttgccttcttcatccagttcctctcggttccggcggtggcgctgatgtcctggatgctggtgccgaccaccctgttcggcctcagcggctggcgctgggtgatcatctttggcgcactgttctcgctggcgatctggtttatccgtaaaaagctaccggagtcagcccgctggctggaaagcaaagggcggcatgatgacgcgcatacggtgatgtgtgagatggaagcccgctgcggcctgacgccgtcgccgaagcatgcgcatgcggcacagagcgtcgtcaaacgcggcaccttccgcgaaatctgggcgccgcagtatcggcagcgcaccctgatgctaatggtgatgaacttcttccaggcgatcggtttcttcggctttggcaactggctgccggcgctgctctccggtcagggcgccagcatcacccatagcctgctgtacgccttctttatcaccctcgcctatccgctgggctgcctgttctgcacccgcttcgtgcatcgctttgaaaacaagtggcagattgtcctctccgcgctgatgaccgttatcttcggcaccctgttcgccctgcaaaacagtccgatcctgttggtgatctgcgggtttatgatcacctggtccaacgcctggctgaccatcagctatcacgcctaccaggccgaggtcttcccgacccatattcgcgcccgcgccgtcggcttctgctactcgttcagccggctctcgaccgcggtgaccagcattctgatcggcattattctgcaatacgccggcacgccgggagtaattagctttatcgtcgtcagtatgctgatggtgatgctgtcggtggggatcttcggcccgagaacgcggggcattcgtctggagaatatctga

SEQ ID NO: 216790 - DNA, 681 bp, Klebsiella pneumoniae
atggtatttccttatatgactcatttactcgcggcaatgttgttgggggcgctgatcggcgcggaaagacagtggcgacaacgtatggccggtttacgcaccaatgccctggtggccaccggcgcggcggtgtttattctcagcgcgatgtcggcctcgccggacagcccggggcgtattgcagcgcagatcgtctccggtatcggcttccttggggcaggggtgattatgcgcgatggcatgaacgtccgcggcctcaataccgccgccacgctgtggtgttcggccgggatcggcgtactctgcggcctgggacagttctggaacgcgacggcggctacgctgattattctgtgcgccaatatcctgctgcgcgaggcggcgcagcgcattcatgccttgccgggggccggtgacgaagagaaacgctatgtcttacgcgtcacctgtctgcgcgaacatgaaaatgccgtgcgtcagctgttgctgaatattgcgcagcagcagcggtttaccctgcagggattgcagtcggcggcggcggacaccgcggaccatctggagatttgcgcacagctgattagccataagcagcaccaaaaaacgctggcacaaattatggcgcagatgggcgttcagcagaacgtcacatcggtgcactggcgtgtcggagaggcgtag

SEQ ID NO: 216791 - DNA, 1062 bp, Klebsiella pneumoniae
atgttaaataatggatgtgtaccctcggaatctggtcccacagaggtgacggctgattttcgttttacccgcgtgatggccgagcaggcggcgcgggcgcgtctgacgctggacgacgatcagctgtcactcatcgcccgccttgacgccctcggtcagcagttggtgtccacgacaggcaggccgcagggggtgtacgtctggggacgtaccgggcgagggaaaagctttatcctcgaccactttttcgccagcctgccgctcgccgccaggcggcgggtccattttcatcacttcttccgcgaactgcaccagcggctgaatgcccccggagcgcccgacctgcagacggtgatgaggcagatgacatccggttgccgcctgctatgcttcgacgaatttcatctgcacgaccccggcgacgccatgctgattaaagccttgctggaacacctctttcaacacggtatcgtgctgctggccacctcaaactacccgccggagatgctgctgcccaatccgctgtatcacgatcgctttttaccgtcgatcgcgctgatccgcgcccatctaacggtggtggcgctgaacggcgaggaggattatcgcgtacggcatctgagccaggataacgccttctgcagcgggcggatgtgggttaatccgaatgcacaacagcgtcagctgtatgacctgccgtcgctgcctggcgaaccggtttcgctgacggtaggctatcgcacgctgctggcggccgcggcgtcgcccgcgttgctgcacttcacctttacccagctttgtcaggccgccacggcggtgatggactatctgacgctctgcgaaagctatgccgtctggctactggacgaggtgccgccattggctacggtggggccggcggcccagcagcgctttatcaatgtgattgatgtgctgtatgaaaagcagatccgcctgctgctggtgacccgctgcgacctggagacgctggtggcaggggtggaactggaggatattcaacgaacgcggagtcgcctgcaacagctgccgcgggcggtataa

SEQ ID NO: 216792 - DNA, 2178 bp, Klebsiella pneumoniae
atgagcacgtctaacgacccatccaacaatgcatccgccgggaagtgccctttccacgccgagacgctaaaacagagcgccggcagcggcaccgccaaccgcgactggtggccgaaccagctgcgtgtcgatctgttaaaccagcactccaatcgctccaacccgttgggtgagaattttaactacagggaagagtttaaaaagctcgattactccgcgctgaaggctgatctcagagcgctgctgaccgattcgcaagagtggtggccggcagactggggtagctatattggcttgtttattcgtatggcctggcacggcgccggcacctaccgcaccgttgacggtcgcggcggcgcaggtcgtggacagcagcgctttgcccccctgaactcctggcctgacaacgtcagcctcgataaggcccgccgtctgctgtggccggtgaaacagaaatatggccagaaaatctcctgggccgacctttacatgctggcgggtaacgtcgctctggaaaacgccggcttccgcacctttggctttggcgccggtcgcgaagacgtctgggaaccggatctcgacgtcgactggggcgatgagaaagagtggctggcccaccgtcatccggaaagcctggcgaaacaggccatcggcgccaccgaaatgggtctgatttatgtcaacccggaaggtccgaacgccagcggcgagccgctgtccgccgcggcggccattcgcgccaccttcggcaatatggcgatggacgatgaagagatcgtcgcgctgatcgccggcggccatacgctgggcaaaacccacggcgccgcagaaaccagccacgttggcgccgagccggaagccgcgccgctggaagcgcagggtctgggctggcactccagctacggcagcggcgcaggcgcggacgccatcacctccggtctggaagtggtctggacgcagacgcccacccagtggagcaactactttttcgaaaacctgttcaaatacgaatgggtgcagacccgcagcccggctggcgcgatccagttcgaagccaaagacgcgccggagattatcccggatccgtttaacccggagaaaaagcgcaaaccgaccatgctggtcaccgacctgaccctgcgcttcgacccggagtttgaaaaaatctcccgccgattcctcaacgatccgcaggcctttaacgaggcgttcgcccgggcgtggttcaagctgacccaccgtgatatggggccaaaatcccgttacctcgggccggaagtgccgaaagaagatctgatttggcaggatccgctgccggcagcgacccatcagccgagcgcggaagatatcgccagcctgaaaaccgccatcgccggcgccggcctgtcggtcagtgagctggtctcggtcgcctgggcgtccgcctccaccttccgcggcggcgataaacgcggcggcgctaacggcgcgcgtctggcgctggccccgcagaaagactggccggttaacgccatcgccagccgggtgctgccgaccctgcaggcgatccagcgcgcctccggcaaagcgtcgctggccgatattatcgtgctggccggcgtggtcggcgttgagcaggcggccgctgccgccggcgtcagcgtcaatgtgccgtttaccccaggccgcgtcgacgctctgcctgagcagaccgacgtcgagtcgtttgatctgctgcagccgctggcggatggcttccgcaactatcgccgtatcgaaggcggtgtctcgacggaaaccctgctgatcgataaagcgcagcagctgacgctaaccgccccggaaatgaccgtgctggtcggtggcttgcgcgtactgggcgcgaactacgacggcagcaaacacggggtgtttaccgaccgcgtcggcgtgctcagcaatgacttcttcgttaatctgcttgatatggctaccgtctggaaagcggccgatgataacgcggagctgtttaccggcagcgaccgtaaaaccggcgaagcgaagtacagcgccacccgcgtggatctggtgtttggctccaactcggtactgcgcgccctggcggaagtgtacgcctgcgccgacgggcagcagaagctggtgcatgacttcgttgccgcctggaccaaggtgatgaacctcgaccgcttcgatctgtaa

SEQ ID NO: 216793 - DNA, 1911 bp, Klebsiella pneumoniae
atgccccttttgagagatgaaattcgcgaccactccgcggaagagatgctgtttatccgccgggccgcaattgcttttctgctggtggtggtctgctttggcgtgctgatcgttaacctctaccatctgcaggtggagcagcacgatttttaccagacccggtcaaaccagaacgacatcaaaatgctgcccatcgcccccagccgcgggctgatattcgatcgcaacggcattccgctggtgcagaatatcaccctgtatcgcctgcaggtgatcccgagcaaaattcccgatatggccgcgctgttgcagcagctgacgcctatcgtcgacctgacgccggacgacatcgccagctttcgcgacgatatgcaccacaccagccgctacaaagcggtcaccctcaagtcagacctcagcgatgtggaggtggcccgcttcgcggtcaacgaattccgtttccccggcgtgacggtggagagctaccaacaacgggaatacccctacggcgcagagctggcgcacgtggtgggctatgtgtcgaaaatcaacgacagcgatctgcagcggctggcgaaaaacggcgaagaggagaactacgccgccgaccgcaatatcggtaagcagggcatcgagggctattatgaaaaagcgctccacggcaccaccggctatcaggaagtggaggtggataaccacggccgggtggtgcgtctactgaaagaggtgccgccggtggccggaaaaaacctctatctgactctcgaccttcatctccagcagtatattgagtcggtgctgaagggacagcgggcggcggtggtggtggtcgacccgcgggatggcggcgtgctggcgatggtctccagtcccagctacgatcctaatccgttcgtcaaaggtatcggctatcaggcctataaatcgctgctggagaatccggaccggcctctgatcaaccgcgtcacccaggggctatatcctccggcttcgacggtcaaaccctatatggcgctgtcggcgctctccgctggggtcatcaccccgaacaccaccttcttcggggcgccgacgtggacgctgccgggcacgcaacgccgctaccgcgactggctgaagaccggccacggcatgctcaacgtgaccaaagccatcgaagagtcggcggacacctttttctatcaggtcgctttcgagatgggcattgaccgaatccatgagtggctgagcaagtttggttacggccagtccaccggcatcgaccttaatgaggagtatgccggggtgctgcccagccgggagtggaaacagcgggtgcataaaaagccctggtatcagggggacaccatctcggtcggcatcggccaggggtactggatcgccaccccgatccagatggtgaaggcgcttaccactctgctgaacaatggtaaagtacaggatccgcatctgctctattcgatgaagcagggcaaccatgtggaacgttatcagcagccggcgaacctgccgcaggtgggtgacccgaaatccccgtactggggcattgtgcgcaacggcatgtatgggatggcgaatcagcccaacggcaccggctataagctgtttcatactgcgccgtatcagatcgcggcgaagtccgggacctcgcaggtctttagcctgaagcaaaaccagacctataacgccaaaatgatcccggtgcgtctgcgcgaccatatcttctacaccctgtttgccccttatcagcatccgaaggtggcgatggcgctgattctggagaacggcggcggggatggggtggtagccggaccgacggcgcgcgccatcctggaccatatttttgtcccgcagcaggcatcttcggcggcagccgatgtgccgcagcgtgatagcgccgatgcccagtaa

SEQ ID NO: 216794 - DNA, 144 bp, Klebsiella pneumoniae
atgggcagagttgcttttcgcgtcgacaaggggaagcgttcgctctgtgccagagcagacgttaacgtcgataactacgtcacttctgaagctgaacataaccattatcagctacacttgttcctgtttttcgtcgagagctga

SEQ ID NO: 216795 - DNA, 726 bp, Klebsiella pneumoniae
atgcgtgtacactttatcgtacatgaaagttttgaagccccgggcgcatatgaaacctgggcaataaaccagggtcatgatgtaacttactcacgcgtctatgcaggcgatcggctacctgatgacgccgtaggcatcgattttctagtcgttatgggcggtccgcaagatccggacaccacgcttgaagcgtgcccgcactttaatgctaaagcggaacaggcgctgattgcttccgcggttaaaaccggtaaggcggtgatcggtatctgcctgggttcacagctcattggcgaagcgctgggcgcgccgttctctcatagcccggaaaaagagattggtaaattcccgatcacattgaccgaagacggcaggaaggatgagatgttctctcactttgggaaaacactggaagtgggtcactggcataacgatatgccaggtttgacgccagaggccaaaattattgcttacagcgaaggctgtccgcggcagatcgttgcctattcagaccgcgtctttggtttccagtgccacatggagctcacattggacgttgtagaacggctgatcgctcattctgagaaagacctgagccgtgcagcagaatatcgtttcgttgacacgcctgaagcgctccgggcgcacgattacagtgaaatgaatcaagtactttttggctttttggataagctggaagcacgttacacagcagcgcaagcataa

SEQ ID NO: 216796 - DNA, 1275 bp, Klebsiella pneumoniae
atgggcgtttccgttaaacgcattgtcgtcaccgggatggggattgtcagcccgctgggctgcggcgtacagcacgtctggcagtcgctgctggcaggtaaatccgggatcacccgactcagcgagcagctggtcgcggatattccctgcaaagtggccggccaggtgccgtccattgacagcgatccgctgcacggcttcgacccgctggcgaccatcccggcgaaagagcgcaaaaagatggatcgctttatcgagtttgcgctggtcgccgcccgtgaagcgctgacccaggccggctggtcgccagcatctgcggccgaacaggaacgtaccgccacggtgatcgccaccgggatcggcggcttcagcgagatcgccaatgcggtacataccaccgatgaacgcgggccgcgtcgtctctcgccgttcactatcccctcttttctggccaacctggccgccgggcatgtgtctatcgcccacggcttccggggccccatcggcgcgccggtcaccgcctgcgcagcgggtgcccaggccatcggcgatgcagcgcggatgatccgcagcggcgaggcggatattgccctctgcggcggcgcggaagcggcaattcatcgcgttagcctggccgggtttgccgcggcaagggcgctgtccagcgcctacagcgaccagccggaaagcgcttcccgcccctttgaccgtgaccgcgatggttttgtgatgggagaaggcgccgggcttattttgatcgaatctctggagcacgcgctggcgcgcggggccacgccgctggccgagctggtgggctacggcaccagcgcagatgcttatcacctgaccgcaggcccggaagacgggaacggcgcacgtcgggccatggagatcgctattcgccaggccggggtgaccgtcgacgagattgaccatatcaatgcccacgccacctcgacgcaggtcggtgataaaggtgagctggcggcgattaaaacgctgtttggcgcgcatccggtcgccattacctcgacgaaatccgccaccggccatctgttaggcgcggccggcgggatcgaggccatcttcaccattcaggccctgcgtgaccaggtggtgccgccgacgctgaacctgcatcaccccgatgaagacgcggcaggcatgaacctggtggcgctgcaggcccgcccgcagaagatgcgttatgcgctgtcgaacggttttggctttggcggcgttaacgccagcctgctgctgaaacgctggcaataa

SEQ ID NO: 216797 - DNA, 1533 bp, Klebsiella pneumoniae
atgcattcatacgaggaccggattcgggccgtcgaactctattaccggtacggaaagaaagcctccgttgtcgtcatggagctgggatatccttccacaaaacagctgggccgttgggttcggatttatgaagagaagggcgatttacccagggaattaaaaccaagagaacgctattcacgtacacagaaaattgctgctgttgagcattatcttactcacggtggttgcctgtcgtacactcgccgagccatcggctaccccagtaacgaaattctaaagcgctggattgaagagttttacccaaatgcgcgtcccctggtcattcgctcaggcacaagcaaatgcttcagcccggaagagaggtctcaggccgtccgggagctctgtaaccgacgtggaaccgcgcgtaaagttgcacaaagcataggcgtcagcgtcccggtcctgtacaaatggaagaaagaccttatcagtgacgaggcttatcaatccatgcgcaaacgaaaggcagcccctcaggataaaaatcaggatgctttactcggtgaaatccagcgtctcaggaagcaggttcatcagctgcagctcgaacgtgacatactgacaaaggcgaatgaactgataaaaaaagatctgggcgtcagctttctgaaactgaaaaacagggagaaaaccctgatagttgatgcccttaagaaaaagtaccccgttgctgagttgctaagcgttctgcaacttgcccgcagctgttatttttaccacaaagccagcaaacgtctgtacgataagtatgcggaaatacgcgtgatcatggccgatatctttgaggagaattaccgctgttacggctaccggcgccttcacgcgatgcttcgcagtaacaacagagttatttctgaaaaggttgtccgcagactgatggcagaagagcagctcgttgttaagcgcaccaggcgacgacgatataactcttactgtggcgaaatcggtccggcaccggaaaatttactcgcccgggattttagttcctgcaggccaaatgagaagtggctgaccgatattacggagttccagcttccggctggaaaagtctatctgtcgccggttatcgactgctttgatggccaggttgtaagctggtcgataggaacacgcccggacgcgacgctggtgaatacgatgctcgatgacgcactcgatacgctcagcgaacatgataaaccggtgatacacagcgatcgtggtggccattaccggtggccgggctggcttgagcgtatcaacacctccggacttataaggtccatgtcgcgcaaaggatgctcgtcggataatgctgcgtgtgaaggcttcttcgggcgtatcaaaaacgaaatgttctatggcagagactgggcgggtatcacgctggaaaaatttatctgcttcctggacaggtacatacgctggtataatgagaaacgtatcaagctatcattaggtgcaatgagtcctgtgaagtaccggcagcatcttgggatcacaacataa

SEQ ID NO: 216798 - DNA, 372 bp, Klebsiella pneumoniae; identical to SEQ ID NO: 212322

SEQ ID NO: 216799 - DNA, 195 bp, Klebsiella pneumoniae; identical to SEQ ID NO: 212252

SEQ ID NO: 216800 - DNA, 717 bp, Klebsiella pneumoniae; identical to SEQ ID NO: 212251

SEQ ID NO: 216801 - DNA, 1266 bp, Klebsiella pneumoniae
atgcagcttggtgtcattgccgatgacttcaccggcgccacggatattgccagcttcctcgtgcgcaacggcatgccgacggtgcaactgaatggcgtgccgacccgcgatcttccgctgaccagcgaggcggtggtcatcagcctgaaaacccgctcctgcccggcggaaatggccgtcagccagtcgctggcggccctgagctggctccaggcccagggctgtcagcagttttatttcaagtactgttccactttcgacagcaccgcgcagggcaacattggcccggtgctggatgccctgctggccgagctgggtgagacgcggacggtgatttccccggcgctgccggttaacggccgcacggtctatcagggatatctgttcgtcggcgagcaactgctgaatgagtccgggatgcgccaccatccggtgacgccgatggaggatgcgcacctgggccgcttaattgagcgccaggggcgcggaaaagccgcgctgattgcctggccgattgtcgcccgggggccggaggcggtcgccgccgcgctggcggcagtcaacgatccggcggtgcgctatgtggtgctcgacgccctcagtgaacaggatctgctcacccagggcgtggcgctgcgggagatgaagctggtctccggcggttccggcctcgccatcggcctcgcccgcgactgggcgcagcgccatggcgcccggggtgaaagcgctcaggccggcatgccgctagtcggcccggcggtggtgctctcgggctcctgctcggtgatgaccaacagccaggtggcggcctatcgtcaacaggcccccgcccgcgccgtcgacttaagcgcctgctttaccgatctggagagctacgtcaggacgctgactgactgggtggacgcgcagcgcgatgcgccgctggcgccgatgatctatgccaccaccgagccgcaaacgctgcagcggatccaggcgcagtatggcgacaaggccagcagcgaacgggtggaacagctgtttgccgctcttgccgccgccctgaaggcgaaaggatttacccgctttattgtggccggaggggaaacgtcgagcattgtggcgcagaccctgggggttgaggcgttccatattgggccgaccatctcccctggcgtgccctgggtgcgtgacacccgccagccgctctccctggcgctgaagtcaggtaacttcggcgatatccagttctttgcccgtgcccagcaggagtttcgtcatgactga

SEQ ID NO: 216802 - DNA, 1215 bp, Klebsiella pneumoniae
atgaagctcacagcccgccaggtcgacacatccaagcccaaggacaaaccctataagctgtctgatggcggcggtctttacctgttggtgaaccccaatggctcgcgatactggcgcctgaagtaccgcatcgctggtaaagagaagttactggcgttgggggtatatcctgatatcactctggcggaagccagacagaagcgcgctgatgcaaagaaagtcctcgctgctggtggtgatccgggacaggagaagcaggaagagaaacaagcgaaagagcaggctgtggcaaacagctttgagcgcctggccatggaatggcattcccataaaagcacatcgtggtcagaaggctatgccgagcatcttctgatgtacctgaagaaagacatcttccccttcatcgggcaaaaggcgattacggatatcagccaggttgaaatgcttaacgtcctgcgaaagatggaacaacgtggcgttctggataaactcaagaaaacccgtcaggcctgccggcagatattcacctatgccattattaccggtagagcggagcacaaccctgtatccgatctggctggcgcgctgaagtcgcccaagcaacagcactacccacaccttttagtcgaccagatcccggattttctccgtgcgctaagtgaatacagcggcagcaccatcacccgcaacgccactcgattgttaatgcttacagggctcaggacaattgagctccgtgcctctgaatgggttgatatcgactttgacaaaggcgtctggaacgtccccgcagagcgaatgaagatgcggcgcccacatctcgttcctatctcaactcaggttcgcgaactgcttgaagaaatccaccagcttaccgggcgagggaagtatgttttcccgggtcgaaatgatgctggtaagccaatgagtgaggccagtattaaccaggtgattaagcgtattggctacgacggtaaagcgaccgggcacggcttcaggcataccatgagtaccatactccacgaacagggctataacaccgcctggattgaaacgcagttggcccacgtcgataagaactccatccgcgggacatacaaccatgctcagtacttggatggccgccgggaaatgctccagtggtatgccgactatatgcaggcgttagaaaatggtgaaaatgtggtccatggctcgttcgggaaacgtgcctga

SEQ ID NO: 216803 - DNA, 963 bp, Klebsiella pneumoniae
gtgttaaatgctgattcattaaaaagatgttatgacgtcatatcatctttgcgggataataagcctttatggatccccaaagctagtttgttaaatgatcttagtttctataaagtaagttataactataaaaccaaaccagcatcatttatttactcaattatacatacacactctgaatttgaagagtatatgtcagtggttaaaaaatccattgatggatatgtcaaaatttcagatctggactattgtaatgctgtctggaaagaaataattgatgataaatatataaggaagtcatttaatgatgctgggtttccatttgattgctctatccagcccgatagatatgcaagatatgtgatattgactcggttattagagttatcgaataataaagaaaggtttgattactggcatgcactttacgatttttctaaagtagaagtggaaacttttgaaaatagctatcttcaatttcatgaaaaactcgtgtctattatgtatggatatgtgtcaggagagttacgcactgcctatgttaacggagttgatgcaataaaaaaatataaattacttcttgaaaatttaattgttgttgaaaaggaactggtttttaaatacctgtttgataaaaaaattcatcgagatatcgagtgggatatgattgccgcgaatgaaatcctcgatgttctaataactaataggaatgatgagactctgtcagaacgtgcttttgtaagcgaattactgaaattgtatatgaagtattcaataaatggaaatagaagttttgtatctttagtgtatagatttacccgcgcttctttcatagttaatgatatagaaagaaaaacaattcaacgatgctgggaatcattgtgtagggcgatgcgtgatggcgaacatgcccatgataggtattttaaaatggagaatgaaaccgtttctgggacaaagtag

SEQ ID NO: 216804 - DNA, 198 bp, Klebsiella pneumoniae; identical to SEQ ID NO: 144442

SEQ ID NO: 216805 - DNA, 717 bp, Klebsiella pneumoniae; identical to SEQ ID NO: 144441

SEQ ID NO: 216806 - DNA, 321 bp, Klebsiella pneumoniae
atgggggcggagaaatccgcgccggttaccttgtacgccggttacgccaaccctgttcagctcaccaccagtgaaattggcgtttccggtggtgggattaaatcccagtacaaggaggctgccattatggctactacccctaccaaaaatccgcaatatatctggattatcgccgctgttcgccgcgaaatgccgacaattaagcccaaaatttaccatatcgccgcgccgtctgagcgtgaagcccgcagttatctagttcgtgatcacgtctgttttttcgccggacgcatccgtctgacggaggtgcatcatgcgtaa

SEQ ID NO: 216807 - DNA, 222 bp, Klebsiella pneumoniae
atgcgtaaaaacatcctctctactgccatcgctgagaagccgtatttgctcgatgaactcacctacgaaaccgaatgtgtgttggcgattctgcgaacaatcaacgatgtcagtgatccacacaccaaaagccacctcgtagactccgccgaacttattggtactcagttgttgaaaaagctagagcataacgcacgtctggaagatggtgattgcgaatga

SEQ ID NO: 216808 - DNA, 2757 bp, Klebsiella pneumoniae
atgaaaaatatcgacctcatccgtgaagttaccctggctgcagctgatcgctggcctacagtgctggctgggctgcatatcgatgtgccggattcaccgcgccggcacgcaccgtgcccggcctgcggaggctcggatcgcttccgtttcgatgatggcggccgcggtagctttatctgcaaccagtgcggcgctggtgacgggctggacttaatcaagcgggttaacaactgtgacaccacggaggcggcgcagcttgccgctgatgtgctgggtattgattaccggacggtgaaacaggacgaagcgacagctagccagaagcgggaacaaatgaaagccgaaagccagcagcgcgagcaggaacgccaacggcgcaaattggctgaaatagaacagcgccgcggtttatttgtgagccactggcaggggcttgcagaaacagctttcgagggtgaaagcgaatacctcatgaacaagggtttggttgggtttaccttccctgttctgccggatggttcgcttttgttagggctggttgatgaatctggcacagtaacagctgcacagacaattacacagcagggtgaaaaacgtcttctggccggctcggcgaagcgaggtgcataccatgctgtaaacgcagcagacgcaccgcagagtgttttaattgctgaagggttggcaacagccttatctgtccatctgatacgcccggaagcactgacggtatgtgccatagacgcaggcaacctgcagcccgtcgcccaggccatgcatcagcgttacccgaatgcgcagatcatcattgctgccgacaacgatattaagcccggagagccaaatacaggcaaagacgctgcggagaaagctgcaaaggctgtctctggctgggtggctttacctccaacggtgaaaaaggccgactggaacgactaccaccagcagcatggactagaagccgctacaacggcgtttaagaattcgatgtatcaaccgcaggagcctgaagtgtccgcgaaactgcaagtgatcaacggagggaaaaagggcgcatcaaaacctgaatctctgcgacctcatgtcgaaagccgtgctgatggtatttattgggttgaacccaaatcagacaaagatgccggagagatcatctgccgtgagagttggctatgttctgctcttaaggttatcggcatcggcattgatgacagtaaaacccggtatttgatcctgcgttggcaggcatttggtgcgaagagtgaaaccgtacaggcgataccctttgctgacattggtgagcgtgaaggctggcgaacgctcaaagccggtggcgtgaatgtaacaactaagagcggtttacgcgcaacgctagccgactggcttcagagctgcgccaatggtgaggtatggcgcattgctcatgctacgggctggcagtgtggcgcctatatcatgcccgatggtgagatcatcggtacgccagaacaaccggtgctttttaatggacggagttctgcagcatccggttacaccaccagcggcaccgttgatagctggagggagagtgtaggacgtcttgcctttgggaattactcgatgatgactggtgtagccgcagcattggccgccccgctgattggccttgctggtgctgatggattcggtatccacctctacgaacagtcgagcgcgggtaagactaccactgctaatgtggcctccagtctttacggcaatccagatgtactgcgtctcacttggtacggtactgcgctggggctggcgaatgaagccgccgcacataacgacgcgctgatgccgctagacgaaattggccagggcgctgacccggtggaagtctataaatcagcctatgcgctatttaacggtaccggtaagctgcagggggcgaaggagggagggaaccgcgatctcaagcgctggcgtactgtggcaatcagcactggtgagatggatcttgaaacattcatcgccagcgccggccgtaaggctaaagcgggccagttggttcgcctgctgaatatccctatgcggcgggcagtacgcttccatgagcatgctaatggtaagcaccatgctgatgctctcaaagatgcataccagcatcaccatggagtggcagggcgtgagtgggtgaagtggctggcggaccaccagcaagaagcggtaagcgctgtcagggtaacggaagagcgctggcgtagcctgatcccttcggattacggggagcaggtccatcgtgttggcgcccggtttgccattctggaagccgcactattgttaggtaatgtgatcaccggctgggatgagcagacctgtcgggatgctatccagtacagttataacgcctggctgagagagtttggtaccgggaacaaagagcaccagcagattatcgagcagaccgaggcattcctgaacgcctacggtatgagccgctttgcaccgttcccgtatgacccatccagtctgccgatctccaatatggcgggataccggcagaaaggtggccacgatgccgacccaatggtgttctacaccttcccggcggccttcgaaggggagattgcccgcggctttaatgctcgtcagtttgccgaagtactgaagaaagctggcatgctaacgcctccgacgtcaggccgggggttccagagaaagtcaccacgcattgatgggcgacagattcgggtttatgtcctgcagtatttgccggacgatgaccaaccagagtaa

SEQ ID NO: 216809 - DNA, 444 bp, Klebsiella pneumoniae
atgaccgctcaaatttcagcgtatggccggctggtggccgacccgcaaaccagaacaacaggaaaaggtacgaacatggctatggcccgcctggcggttgcgctgccttgtaatgcggcaggggacgggcaggctaccttctggctgggagtcattgcctttgggaagaaggcagatacgctggccaaacaccgtaaaggcgaccttgtcagtgtggcgggcaatatgcagctcaatcagtggactggtcaggatggagatacacagcaaggctatcaggttattgcggacagtgtactcagtgccagaacggcacgcccaggcggtatagcaggtcaacaaggacaggctactgatgccatacgacgggctcacgaacatcaagcgcccactaccgggtatgaaggattcgaccagaccccgccgtatgacgatgatttttag

SEQ ID NO: 216810 - DNA, 699 bp, Klebsiella pneumoniae; identical to SEQ ID NO: 110127

SEQ ID NO: 216811 - DNA, 546 bp, Klebsiella pneumoniae
atgcccttacccgaacgttttaagccagccaagataaatcgccagaaacttaaagaactaacggacgcagccgaagaaatgctgtcgcaaattgatagtggtgctgacgaagatgatgaagagctaaaagcgatgattgatgactggaacaggcaggtagttaatccgtatgaattctctgatttccgtgacttttcctcatggaccgacgcaaagaactttacccggatggcatttaatcaggagaaatacgttgtggatttaacctgggatgaactcgttcagataattagtttcgtgtgcaatgctgaaggcaaggaatcggaacaaagctacgcgctgggattgctggagataaactttgatgccaatccgtccgatctcatctactggcctaatgaatggttccagaatgaagacatgctccatgtagatttgacgcctgaagaaatagccggatacctgatggcaagatctggccggcttctaagcgatgcgccacaaatcgacctgagatacccgctacctcccagcgcagcaagttaa

SEQ ID NO: 216812 - DNA, 165 bp, Klebsiella pneumoniae
atgtcaaaacagtccgtcaaacctgtcttgctcagcgaggcacagattcaggcaatcagaaaaattcaggaaaagcagcgccagcaatcaggtatcggtgttgcgcctacgatccatgaaattgctcgtgggctggtggataaagcgctccagcatctggggtaa

SEQ ID NO: 216813 - DNA, 2697 bp, Klebsiella pneumoniae
atgccaaccgttccgcagtatcaacgccagagccagacgcaggccgcgccggtaatgaccaataatctccgcgtgccggagaatccactggtgcagggaatccagcaggctgctgatatgtcgatcaatatgatggctgatgcaaagcgcaaggctgatttagccaatacccagaatgggttacttcaggtcagccaatttaatgatgatcaaattaacaatccgcagactggacttataacaaagcagggcaaggatgcgcttggacaatctgatttagttgtttctaatgcgactcagaaagtgcaggacattgcctctaccctgccagagggggaagtgcgcgataatttcatgcgccaggctcaggtacagttactttcgttgaaaagccaggcaaccagatacgaggttgggcagcatcggcaatatgaagccggtcagcaagatggttacttacgcctccagcagcagcaggccctgaacccgcaggaatttaatcaatctgcgatgaatgcctaccactccataattgcttatgggcaagctcatggacaaagcccagaagagatagaagcaaattgggcgcagtggcatgagcaggcagcgaaccgagcgagcgaagcctggtatacgccaatgtatcagcagctacttgggccaaacgggaaagttgaggtcactgatacgcccagtgaatcgcagctattttccgcaatgatctggcaggagagcggtggtaatcagtatggtaaagacggatcgccgttggtgtcgccgaaaggcgcggtgggcgtagcgcaggttatggaagacacagggccagaagctgcacgtctggctggtgtggcgtgggatcgtgacaagtggcttaacgatccgcgctataacgcgaagctgggccaggcgtacttcggtgcgcagatgacgaaatacggtaacaatcctgtacttgcggttgctgcctataatgccgggcccggggcggtcgatagctggataaaaaaaattggcgatccgcgtacaggcgccgtaagcaatgaacagttcgtcgcggcaattccatacgaggaaacccgcaactatgtggcgaaagtaaccggaggtgcgctggctatcccgggtccggccacaatggaaagcctcatcaagcagcctttctggaatgcgatgagcccacagaacaaatccgccatgatgagtaaagttgcaggcatgtatgatatgcaggcggctgccgggcgtgtagcgctgcagagtcagatgcttgatgacatggtaacgcttgaagctggaggttctgttaatccagtcacgccgcagaaatgggctgcggtaatgcctttgcaggcgtcgcccgctgagcgtatgcaactggagaaaatctatcagcagtatcaacaggccatgagcctgcagcccgtctaccagaccattgtgaaaggtaattatcagcaaggtcttgcggccgttcagtctatacaaccccagcagggtgagacgaactccaaatataagagtgagctttatgcttctgctgtatcaaaactccagcaagttcatgatgcacgcgaggctgatcccggagcctggttgcaacaacattccccggtagttcaatcagccttccaagagtaccagaataatcaggttaccggtgaatatctggcttcacgcattcaggcagaaaaagaccggcttgggatccgaagcaaaagtgtattacctgcgagcatagttgacgggatatcggcaaaagttgatagcggcgatatgaacttttctgacctgaaagggattatctctggctttggccgttacggtgacactgttgtcgcgcagttgcagccaaaaacaaaagcagcagtaagggttgctacagcgataaacgaccctaacgctgctgacacgatgtttaccatccgcaatgtgaagactgaagagctgaagaagaacgctggagaacaagccaaaggtgtagacgcggcctggaactctctaatttccgcagcatcgccgacatttagcctacagcgacaaggtggagcggaaacgcttgctgatatcaatgagcaaggtaagcgcctggcttattactacatggcatcgggggaagatgctcaggcagcaacagaaaaagcctataaaaaaatgatcggcgatcattatacggtcactgagacatggcgaatgcctaacagcctgggactgaaagagaataatgttaccgacggtctgagtaatatcgtcaatagcctcaaggtagatgatattggcagtcggagtatgttttatattccatcaatgacgccagagcagaatgccgcgaataatcttgcgcagatacagaatagcgctgaatgggtgacggacgaaaatgaacaaggtgtttatctgacagttaacggcacccctattctggatcagcacggctctcctatccgtgtgagctttgccgatgccagcaagtctggaattgcaaaaccgagtacaaccggcgccgttcttaactggatgggcgaaaaacgcaaggttactccaccctctgagttctatacaccaaatgttaatgccactatgtccgatgccttcagggtgatccagggtcaggatgggatgaacctgcagccccaaaaagagccggacacctcgaggaatgtattgcgcgatgctcttaatacacgaggaggccaataa

SEQ ID NO: 216814 - DNA, 1728 bp, Klebsiella pneumoniae
atggcgttctataccggtgctccgctaagcaacaaccccttgccagtcgagggcgagcagccgctattacgctcgcttggcgcgtctgtttctgaaggattcaacgaaggtccattcgtatcatggggtgaggaatcacgccttgcccggctaaatattgatcccagtgcagagcgatatagccaggaagatgccaggcgtttattcggcgaacataaaattgaatctatcaatgttcctagtgcgggtttaacaaagccttatgttgacgctgttattcaggaccatcaggctcacctcaacaggcaacagattttacaaggcgctccatcgggtaccgtctctactccactgaagtatatggctaatctgatgggcagcatggcggatcctggtaacgctttaatagggcttatccctttcgctggtgaagccagagccgcaacacttcttggccgtgctggccaacgttttctacagggaagtgcatatggtgcagcacagacagcagcaacaatgccgctggttgcagaaggacaagcagcccagggtaatgattttactatgggagactacgcctccaactttctatttggaacaattggcggtggtattcttcacgctggtggtgggattgtggctgatgcgcttcgagcccgtgatatgtccacttcccgggtaaatgaggtaccaggtgcagcaaccgaaaagtcgccatctccggaaattggtctccccatcgaatcaccggcggcggaaccattaattatgcgaccgggcatatttcctgattcgccaacatatctctccagagcgccggcagatgacctggctagaagcatcgatcattaccgcgagaactatacgcagcaaacggcctataacgatgttgtcccttcttatgccgataatcttcaggagttggcatcacggcagataacaggcgttggtgaacttcagcgccaggtggaaagtctgaccagaaatattggctctcttgatgcatcgctgcccgagcttactaaacagtatcaggggcagaggatgaagttcagggaagcacgtgcggcggcacaggctcaactgaatgatcggcgccagcggttacagacggagatcgaacaactgaattctcgtattggagagcaccaggacggtgccagagcggcgcaggaactggcatctatctctcgcggggaacttcccgaaccgcttgcaaagcaagtctcccggcgagccgatgagatccgcttgtcactccgacaatccccggttgcgcaaggtatcaaaagtgcagctcagaagttaggtgaggctgactggatggtgcgtaatcaggctatgcgatcagccgtagcccagatgcgccggggggaggatgtaaacatcgagccgttcctcaatctggtagacccggagaaaaaaataacggctattgatgatctgtctttacctcgacgcatcccagcagcgcaagacgatgtagcggccagtgcttcagctgatatccagataaagtcagcgggtgagtcagggactactgatgacgcattgagacaagcagaagaaaacctgaattatacgcgccagattaacgacgctatttcttctgatgatccggagttcgccgctttaatgaaacaggttgaacatgaggcagcagatacctccatggaaaaagcaatcaaagctgcggctatgtgccgtatagggaaactgaatggctga

SEQ ID NO: 216815 - DNA, 2568 bp, Klebsiella pneumoniae
atggctgataatatttttctcaccgcatgcgaaaaagcagtaaatgctgccgccggtcgccctctgaccgatgaagagatgcagagtttatttaacaacatggatgatacgatagcgcggatcaaagctgagaatgctgctatttcaaatgagggggctgcgctccaggctgctgaggagctaatgaaatccgagaggctggcaaaagccattgagactcagcagaagctgatcaacctgcgtatttacaaaaaacactcggcctttctcaacaatactcgttttggcaaaggcgaagcagatcgccctgatatcacactgtcttccattctggtcgggcgtaatgaatatgcggccggaacccgtgaatcagtagccagggagcaggagcaactgagcggtaaatacaatggtggtttctttcacgacatcgataaaacaggttacgaaaaagccttttcatctggtgagtacgatcttgatatagcccgagctattgaccgtatggggcgcagggagtctaccgatggtctccctaaagaggcgatagcacttggcaaagtcataatgaagtggaatgaagtcacgcgtcttgataaaaatcgagccggcgcatgggtaggtaagctggcgggatatatcactcgccagagccacgacatgtacaaaatcagagccgaaggatatgagggatggcgtgattttattttgccgcggctggatgatggcacttttgaaggcatagctaatcgcgaagagtacctacaaaacgtctataacaacctggcatcgggaacacacctgacttacaagcccgcctcagagtggctgaagggcttcaaaggtggcggatccaatatagccaaacgtgccagccaggagcgcgaactcatttttaagcccggtggtgatgcctggttcgaatacaacaaactgtacggcgccgggaatattcgcgagtctgtcatcgcctctctggatagtgcagcaaaaacaaccggtctgatgcgggtactcggaacaaaccctgagcacatgtttcagcgtctttttgatgatcagttgctgcgtattaaaaagacaaatgaccccgcggcagtggctgatcttaacggtcagttccgtatgctcaaacagcagcttgatgaggttatggggtttaccaatatcccagggaatgcaaccctggccaaaacgggagccagtattcgagcagttgaggggatgactaagctgggtagcgcaacgctttcatcccttaacgatataggcaacatgtccatggaaatgcggtatcagggcatgaatatctatgaggcgatgagcaaaaaccttatgggtaagttgcagggctacagcagcgaagagaaaaaagaaatcctcagttatatggggatcggttttgatgctgtacgcaatgaagtgatctccaaattctcgggtgatacttctgtcccagggaagatagcccgtcttcagcagaagtttttcaaatacaacctacttaactggtggaccgagaacgggcgttcgggcgccggtcttatcatgtccaactggatggcgcgtaatgctggcagtgagttttcaaagcttaaccccgagctccgccgcgtacttgaaataagtggtatcggtgagcatgagtggtcggtattccgtaatatgcagatggacgaactgaacggtaacagccatatgacccctaatggtgttcagtttatccccaatcacgacattgaaaaatatcttgcgacgcagaacatcaaggccagttcggcggcgatcgccaatgcgcgggaaacccttgcaggtaaactccgaggctactatctcgatcgtattcaggttgctatgtccgagcctggggcgagaacaaatgcgctaattaaattcggtactgtaccaggcacgccggttggtgaagccgttcgaatgatgatgcagttcaaatctttcacagcgtcatttatgcagaataccctgggaagggagttgtacggccgtggttacacgccggcggcccttgggcagagtaagtttccggcgctggccaaagcgatgtttgcaggtaacggagaatggcagggctttgctcagttgttcatatggatgacagcttttggatatctgtccatgcaggcaaaactcatggtcaaggggcaaacaccgcgcccgctggatcataaatcagtcatggcagcgatggtacaaggcggcggcgccggcctaatgggggatttccttttcggcgaatataaccgtttcggtgggggcatggcatccagcctggccgggccatttgtaggagatgtggatcaactacgtaacctgtacctgcaggcccgagatggcgatgcaaaggccggagattttctccgtttcggtatcaaccatacaccgttcctcaatctgcttggtgtgcgtcagggaatggactatcttattctgaaccgcatgcaggaatggttatcacctgggtctcttgagcgctatgagcagcgtgtacagaaagatcagggtaatacatttatgttaccgccatcgcaattcatgttagggaaataa

SEQ ID NO: 216816 - DNA, 513 bp, Klebsiella pneumoniae; identical to SEQ ID NO: 144430

SEQ ID NO: 216817 - DNA, 363 bp, Klebsiella pneumoniae; identical to SEQ ID NO: 103279

SEQ ID NO: 216818 - DNA, 288 bp, Klebsiella pneumoniae
atgccagccacccttgagaccataaagtcggaagagaagcagacctatcactaccctctgaagacgaactaccgtgagcacatccatagtcctgagggagtgaacggtccggttgaacactccatgctgatggatatgctgaaaaagatggatgccgactggcatgatgtgtccggcgccgccgcagaggtaacggccatgctcagctacattgttggtatcggcgccgtactgcgcgacatagagacgcatgctcagtatgtgatggctaagaccaagggttactga

SEQ ID NO: 216819 - DNA, 426 bp, Klebsiella pneumoniae; identical to SEQ ID NO: 214798

SEQ ID NO: 216820 - DNA, 441 bp, Klebsiella pneumoniae
atgtctacttactcttttattgacgtctctgcatccctgacgggcccgaccggcagtatcgatctgggttacggctcggcgaactccgaagaggggatcaccgtagtcatggcagaggcaaaaaacaccatgaccgtaggcgccgacggggaagtgatgcacagccttcacgccggtaagagcggcaccatcacggtaacgctgcttaagacctccccggtcaacaaaaaactgtctctgatgtacaacgcacagagccagtcttcagccacctggggtaacaacgtcatcgtagtgcgaaacaaagtctctggcgacatctcgacagcgcgttcctgcgccttccagaaacagccggatcacgccaacgcaaaggttggtaacacagtgtcgtgggtttttgactgcggcaagattgaccaactgctgggggagttttaa

SEQ ID NO: 216821 - DNA, 1146 bp, Klebsiella pneumoniae; identical to SEQ ID NO: 211910

SEQ ID NO: 216822 - DNA, 405 bp, Klebsiella pneumoniae
atgacacatccgttgctagaagcattgcaggttaacgaggcgcaatttatcgctctgcgtcgtcggttccaccagcagccggagatcggctttgaagagcaccagaccagcagcgaggtcgcccgactgcttggcgagtggggatacgaggttcaccgcggcctggcgggcaccggagtggtgggcacgctgcgcgtcggcgaggggaaaaaacgccttggcctgcgggcggatatggatgccctgccgatgcaggagcggagcggtaagccgtgggcaagccaggttgaagggcgctttcacggctgcggccatgacgcggccatgacgggcacaccaccacgctgctctacgcagctgaatatctggcgcgcacccggcagtttaccggcacgctgcagctga

SEQ ID NO: 216823 - DNA, 906 bp, Klebsiella pneumoniae; identical to SEQ ID NO: 211978

SEQ ID NO: 216824 - DNA, 678 bp, Klebsiella pneumoniae
atgtgcggacgttttgcccaatcacagacacgcgaagaatacttggcttatctttcagcagaagccgagcgcgacatcgcatacgaccctgagccgattgggcgttacaacgtggcgccggggactaaagttctactcctgagcgaacgagacgaacagctgcacctcgatccggttcactggggttacgcacccgggtggtgggataaaccacccttgattaatgccagggttgagaccgcagccaacagcagaatgtttaaacctctgtggaagcacggtcgtgcgatatgctttgccgatggctggtttgaatggaagcgcgtaggagacaagaagcagccttactttattcatctcgccgacggccagccaatcttcatggcggcgatcggcagcgtgccttttgagcgcggcgacgaagccgaagggtttttgatagtgaccgccgcagcagatcaagggctcgtagatattcacgaccgccggccgctggtgttgtcaccagaagcagccagggaatggatgagacaggatataggagggaaagaggctgaggagatagccgtcgacggcgccgtgccaaccgaccattttacttggcaccctgtttcaagcgcagttggtaatgtgaaaaatcaggggcctgaattgattgaggctatcaaaagcctgtag

SEQ ID NO: 216825 - DNA, 963 bp, Klebsiella pneumoniae
gtgaaaattgttttcgaggttaatggaaagaaagtcccactaaaatctttaaaatacataagcaaaaaagatcaactcgaagcaatgaaaaactggttctttgaaaactttgaagatcccgcaaatgcttgtccgtatgaaagtagagaaggtggctatgcttacatatatggcgggccgtatgatgcgagcgaagaactacaagccatgttcgaacaatatgttaaacctgagtatatcgaggaattagtagatgacttacaaacacaatgttttgactggtctggaaactcaaataatatagatgattggtacgatgatgatatctacgacgcagtaacgtcttccgacaatccgtatttaaaattcattgacaacatcgataaaataaaaaaacttgcaaaagataaaactgaccaacagcaaaaggaccacttgcttagtttgctctacacgaatgttattacagctttggaaaccctttatgttgaactattcattaactctatagagaaagatgatgtttacatagcaaattgcatagaaaaaggtaagactgaatttaaagtaagcaaagatattgctgcattacctttcaaaggtgaacccatcgagaaaattaggggagagctaatcaggtcaatcaaggaacacttgatcagtgcaagctggcatagcactaaaaaggtaatcgaccgctatgaagctacattcgatataaaattacaaaaagactgtccggtagaagctattgaattggcaaccctcaatcgaaatcacttagtgcatcgtggtggaaaggataaagaaggaaacctcgtagtgattacagaccaagctcttgaaacgctgattgaaaatgcgtcgaacctagcaattatgctctacgacagtttaaatatagcaacgaataaaaccaccattttacaaccagatgacaaaccgttcattcatgaattttaa

SEQ ID NO: 216826 - DNA, 1002 bp, Klebsiella pneumoniae
atggatattcgcacacgaaagacaaaatttctagagtcgttagattcaactgaagtgatacgcaaagcagtaagtctcgctatagattgcattattgataatcataatagtaatgaagatacccccttagttattaccagctatgatgatttgtgtagactcaaggtattaaattatgtacaggaattttgcgaagctgcattccccgatatggatgaatgttactttaatcctagcatacttcgcatctacggcaagactagtgaagaagcctgtattaacttaattaaactcttaagaaagacaaaaggcatactattctggtcagatgcctcatcgtggttcgctagcctcccagacggactatttcatgttgttaacattgatcaaaaaaacgttactcgcggccttaataagaaagactctaagccgacaataatcaataaagagtacagcgtagatacactactatcagagctatttttgaatggcacgcacatggagcaaaccaacgtacacaacgtttctgagggagacatgaagttctattgtgaatgccaagctggattaatcagaccaatacccgctccaataggcgcgtcatacgatgaagagatcacaattaattctccagattggcaaaaactcgcgtgtgtagctttacgccgctatcagtcgaaggaatgtcatgacggaatgcaatgggatacaaccgataatggttggactgatgtaatcgcgtatccattcatcgatgaaatacaatcaatggataatagtggttatcgacaatgtttagttgggctagtcacaataaacaattcaaatgaaaattccccgtacctatctaccgtttggatacatccattttatcgcaggggaagattattaagtaagttatggccaaaattacaagcgttatatggaagtaacttcgaaattgagcagcctaatgaaaatatgaaagcatttttgaaaagtgtgaaacacgcagattactaa

SEQ ID NO: 216827 - DNA, 1266 bp, Klebsiella pneumoniae
atgtttgcactttgcgatgtgaactcattttacgcatcctgcgaaactgttttccgtcctgacctgaaggggcgtccggtggtcgttctgtcaaacaacgacggctgtgtgatcgcccgctcgcaagaggcgaagcccttcgtcaaaatgggcgagccttatttcaagcaaaaggacatgtttcgctggcacggtattatcgcgtttagcagcaactatgagctttatgccgatatgtccaaccgagtgatgacaacgctggaggaactctctccacgctgcgaaatttacagtattgatgaggcattttgcgacctgacaggagttcggaattgtcgcgaccttaccgactttggcagggaaattcgcgagacggttctgcgcaggacgcacctcacggtcggtgtcggcatagcccagactaaaaccctggcaaagctggccaatcacgcggcgaaacagtggcagcgacagaccggaggagtggtggatctgtctaatctggaaaggcagaggaagttgatggctttgcttccggtggatgaggtctggggagtcgggcgccgcatcagtaaaaaacttgaagccatggggattaaaactgtgctgcagttggcggataccgatatccgttttatccggaagcatttcaacgtcgtgttggaaagaactgtgcgggagctgcgcggcgaaccatgccttgggcttgaggagttcgcgccggtaaagcaggaaatcgtgtgcagccgttcgttcggcggccgtatcactgaataccatgagatgaggcaggcaatctgcagctacgcctcacgtgcagcggagaaactccgtggcgagcatcagtattgccgatttatctccgcatttatcaaaacgagtcctttcgcgctgaacgagccgtattacgggaacagtgcatcagtaaagcttcttacaccgactcaggatagccgggacatcatcaccgcggcgacaaaatgtctcgatgtaatctggcgagacgggcatcgttaccagaaagcaggagtaatgctgggagatttctacagccagggcatagcgcagctcaacctgtttgatgtcaacgcgccacggaagaacagtgaaaagcttatggaagttctcgatcatctcaacgcgaaggacggaaggggaacgttgtattttgcagggcaggggatccagactgcctggcagatgaagcgggaaatgctatccccgcgctatactacgaggttctgtgacctgcttaaagttagatga

SEQ ID NO: 216828 - DNA, 420 bp, Klebsiella pneumoniae
atgcagttttacacgcccgttgagttacgtgagatcatgctgatcccgttgtacagtgaccttgtgcaatgtggttttccaagccctgcacaggattatgttgagcaacgtatcgatctgaacgagttgctcgttaaccaccccagtgcgacgtattttgtcaaagccgccggcgacagcatgaaagacgccggcataggggaaggggatcttctggttgtggatagctcaaggacagcagttcatggcgatatcgttattgctgctgtggatggggaatttaccgttaagaagctgcagctgcatccgcgggttcagcttaacccaatgaaccctgcatattcgccgatagtcgttggtagcgaggatactctcgatgtgttcggggtcgtaacttacatcatcaaatcggctggctga

SEQ ID NO: 216829 - DNA, 1209 bp, Klebsiella pneumoniae
gtgaaatctttgtcttcaagtcgccgggaggtacttgtagattgttttcacgtccacgcctgtcacatcagccacctgctgccgggtagcgccagtacccaacatcctgcggcatcgctccacaacctcagtggtcattacccgccggcggccaccaatacaccctgctctctcgccgccaccaggcctgcgcgggtcctctccacaatcagctctcgttccatctctaccagcgcgctcatgacgtggaagaagaagcggccggcggccgtgctggtatcgatgctatcggtcaggcttcggaaatttaccccgcgggcctgcagctccgagaccagagtgattaagtcgcgcacgctgcgccccagccgatccagtttccagaccaccagcacgtcccccggttttagccgcctcagcgcgcgttttaacccaggccgccgggcatttttcccgctcgcggtgtcttcgaatatcgtggctgccggatatgactacaccgatccggcgagcattgaggcgtgcgcaattgaactggcccgccgcagtcagtttctggtgtataccggtattacaaaaacgctgccgggcatgggggcttattttgctcgcgaactcccggcgggtcgggtctcactgacctacgaaaacaacaactgcgccggtttcgtgaccattaaaaacagccagtcgctgaagccggtggatgccgggaaatttatctttcagtccgccgatatcctcaatgacacggattacgactattccggtttcccgctggagctgaaagtcagattcgatccgggccaggtcgggccggataattcgctgtatctggttgatgatgacgggacagaaattccgtgccagttcgccgacgagctgcacccgaatctgcgcaaccaggctaaccagggctatcactatgatggctctcttgcctgcggttcagtgctgttctatgacgatctgcctgccggttcccggaaatattacaagctgaaagcgtattcccgcccgcggctggcggcagacctgccggttatcacgcaggatctgtccactctgacgattggttttggcggttatacgtttacgtttgacctcgtgcgcaactggcagctgaatatggtcactgaccaggcagggaacgccacacgcgtgcagcacggcaatttctttgctgcttacgacaccgccgtggtgtag

SEQ ID NO: 216830 - DNA, 1110 bp, Klebsiella pneumoniae
atgactacaattctcgtgaaagatgccctgcgcaccgccattgaagcggcttctggcggaaaacaaacagtactctacacgccaaaggggcagccgactttcgtgaatatcatcccgaaggtgagcattgagacccttaaccccgcgctgggtattacgggtgtgcatccggcctttaagtcgggagataaagaaattccgcagctgtatatcggcacctatcagggggcgattgtaaacggggaacttctgagcctgccgaatgttgatccaaatgcccgaaacaccacgctgaatgctgcaattagcgcagcaaaagcgatcgggagcaactggcatgtcatgactaatgccgagttttctctgatgcaggccatagccatcaacaacggattcaaccctcacgggcagaatactatcgccggattcaactcaaccggggaacacggcagaaggcttgacggcaaggcacccggtgaggccggaggccgttacatttataccgggtcaggcccggtgtcgttccggcatgacggtaatttttccggcattagcgatattgtggggaatctgtgggagcgaaccccgggtgcccgtgtcgtgccgggcggtgagattcaggtttatggaaaggggaatgaggctgctgccgctggcgctgatattttctcaacctcagataccagtgccggctggtatgcatttgacgctaccactggagagctaatcccggcaaccttctccgggtcgctcgcggggggtgactatgtgccaaccacggttaacagcgtaagagtaaaggccagcgccaccggcctggctgccaatgagtttttctttggcagctgggccagcgtgaccgttcagcccacaagcacgctgccggcagcagtgaaaagcgcgatggagttgcacggcctgtggccgaccatcacgggcgcgggtatcgcgcggggcggtgaaaccgcgcaatacaccccgtctgcaacctcggcaatccatccgcttcgctcgctgtccgggatttttcagtttggattcgtgggtagcccggtaacggtcgttagtgaacaaggcgtacgcccggtttactattcaccgttaagttag

SEQ ID NO: 216831 - DNA, 1956 bp, Klebsiella pneumoniae
atggccgaacttaacccgcctttgggaacgacgacgcctgaaattttcctggataatgttaagcgcgctgacaaactggtgaacgggccggcggccaccgtccccgatcgcggcggtgaaccgctcgactcctggcgcctgattatggaaaaggtcgcagatgtcctggccgcatatcaggaaaacggcggcgtgctggcgttcgccagtgaacaggcgctgctggcctttacgccggataaaccgaacgttctggcgctggatagcacgaccggtgcttactggttctgggacgggacgaagtggataaaaaacagctatcagtttgcagagatcgcaggcgaacaaagcctggcgatacaacggctgtttgtcaccctgcagttgctgtccggcgcaatgaatgatctggatactaccgatcagattatcagtgaaactcttcagcgcctcgtggtctctcagcaggttatagcagaaggcgtcaacgaactgtcccagctgccggacacggctgaagatattcggctgcacactctctacgcgatttcggttctcggcggccagatggtcccgctggatggatttactccgggaagtgacgaccttcagacctcgcagctgtccacccttatggcactttccgtcctgggtaacgcgcttcttcctcttgaaggcttcaatccggcgtcatccggcggcggttcgggtgatgcaggctcgccgctgcgttatccggggatttatgcgtttggcgagccgcgcggtctggtgcgtattgatttaacgtcaccgtcgggcgcacccacatcaaaagatgacgccattaaaggttcggtcaggatcgatattgacggcgaggttttttctgcctattgcctgttgtctgtgcagggggccacttcggcagcttatccaaagaaaaacatgagcattgagctttaccctgatgccacgtatgccaaaacggtcagcctgaaaatcggcgatgttctgccgcatgaagaatgggtgtttaaggccaactggattgactccactcatgtgcgcaacacgctctgctacaacctgtgggataaagtcgtggagacgcgccggagctggcctaagcgcgagatcgataatacttatatcggcaaaacaggcgctgctgctgtggataccggggccaccggccatcctaaagggtatgcctgtatcacctacctgaacggtgatttttacggcatcggcgatctgatgattggcaagaaacgaaagaactacaacatagccaaaaatgaggcgactcagattctgatcggtttcgacggtgccgtgaatattccggcgctgccggatgatggaacatgggagttaaaggccccgtcaaagtctcatgatgaaaccactgcggcgctgaatgcctggcgggcgtttgcatcgtcatcgcaggccgatttcgcagcgaacgccagcgcacatcttgatgcgaccaacatcatcgacttctacgttttcatgtgcgtgatctgcgcgccagactgcgtgcagaaaaatacccagtttctcacctgggacggggttaagtggtatttcatgccatatgacctcgataccgtttttggcctgcgctgggatggcaaagagatttcctatgcacccacgctgaacctcttcgacaacggtctggttatgggggcgaatcgcacgttctggaataaagttcgcaccacctggttaactgaaatgaacgcgcgttatgcggagctgcggactgcgggcgttttttccgtcgataccgtttacaccctggcccgtgacctgatgtcccgctactcagaagaaatgtttgccgctgaatacgctaagtggccgacggttccgtcgctgaacgtaaccagccttgatcagattctgacctggcttgatgcccgactgaattacctcgatacctttttcagctataacccgtaa

SEQ ID NO: 216832 - DNA, 2898 bp, Klebsiella pneumoniae
atgactgaacaaacctcccgcctggccattgttattgatagctccggggcagaaaaacaggctgataatctcgcaactgcactggtaaaaatgacgcaggcaggtgaacgtgctgccaccagcgcagtgaaggtgacaaaggccactgatgaagaaaaacagtctctttctgaactcttagatcgcatcgacccggtaaacgccgccctgaacaaactggataaacagcagcaagatcttgcaaaattcaaatcaaaggggatggtagataccgatacattcgatctttattcaaagaaaatcgaggaaacacgaaacaggctaacaggatttcgcgacgaccttggtaaaaccggccaatccgccgcccagaccgcctatgccatgcgcatgatcccggctcagatgacagatattgttgtcggcttatccaccggtcagtctccgtttatggtgctgatgcagcagggcgggcagttaaaagatatgtttggtggtattggtccggcaattaagggtgtgggcacctatgttatggggttggttaaccctttaactcttgcagctgcggcggtcggatttcttggtctggcctattacaaaggcactcaggagcaggacgaattttataagtctctcgttctcactggtaatctggtaggcaaaacttccggtcaactggcagatatggcggcccgtgtatcggtcgcagctaactccacaaccggtgcagcagcttcaacgctgaatcagttggtgttatccggtaaagtagctggcgactcattggagcgcgtgacaaccgccattgttaagaccagcgaggcgacgggcattgctaccgataagctggttggtgatttcaacgacattactgctgacccggttgcggccattaccaaacttaacgaccagtaccactttctgacactggcaacctacaaccagattaaagcgctacaggatgaaggtaatcagcaggatgctgcacgggtggctactgatgcttacgccaatgccatgcagcagcgtgcgaatgatattcatcagaatcttggtcttcttgaaagtgcatgggactcgctgggtaaaacggccaaaggcgcctgggatgcgatgctcaatattgggcgtgaacaaacactaacggataaacttgccaccttaaacgaaaatattgctgaagcccaaaaagggcaaaaagatggtgggttctggaacagttttagcgcgaggtttaccaacctcccggagatgataaaacagagagatttgctcgaatcagttgccaatcttcagggggatgtaaccaaaggacaggcgaaggctaaggaagccgaacagcgaagaattaaaacgcagcaggaagcagatcgcgttaaccagcaatatctgagcaatgcggataagcgcaataaagctattaagcagcaaagcgaattcctgaaggctggtgcaattactgcagagcaatatgcaaaaaatgtttctcgcattaacgagatgtacaaagatccgaaaccacccaagacgccaaagggtaaagcatataccgaggacgcagcaaccaggttgcttgatcagataaaccagcagaccgctgccatgcagtcccagcttgacgccagtgacaagcttaacagcgcaactcaggcgcgggttaagttcgaacagcaaattactgacctcaagtctaaaacgcagctcaccgctgaccagaaatcgatcctttcccgttcagatgaaatcctccaggcgtataagcagcaggaggcactgcaaaactccgtaaaaaccctggacgattaccggaagatgcaggaacaggtaaagacgaaggatgagcggaccaacgatctgcttaaaacccgccttgaactactggagaaggccaaagcaaccgggcaactcaaacccggtgaatatgaaaaaacgcgggcagatatttatcaaaataccgatatgcaactgccctcgacggttcgtaatgttgtaggaaacctgacacccacaggagggcgactctctggaacttttgaggggatgcaggggcaaatcaacgaatatgacctggctcagcaagagctccagcgctggctggcagctcaggaggaagcttatgcgaaggccggcgaaataactgccgagggtgaggccagaatgacctcgattcgtcagcgtgcagcggatgcaaatcaggtcatagaggctcagaaaaacaccatcatatctgcggccacgcagtccttgtttgacagtaccgccgacatcatgcgaacggggtttggtgagcaatcggcaatctacaaggtcgcttttgctgcgagcaaggcattcgctatcgcggactcaatggtgaaaatccagcaggctatagcaagcggtgcagttagcgcgccttatccggccaacatcatcgctatggcctcaatcgctgcgcagaccgccagtatcgtctcaaatatccaggctgtttcaggagttggattcgcctccggcggttacaccggccccggtggtaagtatcagccagcgggtattgttcacaaaggagagtacgtcttcgaccaggcatcaacgaaccggatcggcgtgtctcagcttgaggcacttcgaaatggcaaaccgcttgatgcaactctggggcgtacagggtttggtactggtgttcagaacgttaacagcgataaccgtaggcaaacaactgtacacgcgccgattaatcaggagtttcatctccagggtattactccggagcagttgagcgctacactcaatcagaataatcgactgctttccaggcagttaaaaggtgaactcacaaaggaggttaccatgccacaaggggcttttggcaacgctctaaaaggaaactatacacgacacggtcctaggtaa

SEQ ID NO: 216833 - DNA, 1173 bp, Klebsiella pneumoniae
gtgagctcaggtgcaaaagtagtagccgcgtttattcgcgagataacgccaggaatcacgccaacagcaggggcgtggaacttgctgcgtcgttcttcatttggtctgaaaccaacgcagaacaccaatgacaatgacgaaatcgctggtgaccgcatggcgcagggtgtttcacgcggcacagtggatgtcggcggcgatgtcggcacgcggtttcgctggaaccagcatgatgattttcttgccagctgcttcggttccgaatgggtaaataacgtgctgacgatgggtaatggtcgcattacgttctccgtggcgacttttgccagtgatgtggggatcgcccagattgcccgcggttgccaggttggcaccttccagatggaaatcccgtccgatggtgatatcactgcaaccattacgtttgcagggctggactgggagacgaagggggacgataccagctatttcaccgcgccggtggatttagcgggggcgctgcgttactccttcaaagaggtcaccaacatccggctaaatggtgttgatggcgggacaggcttctgcgtcgacacctttaacattcagttcgacaacaatatgcagacccagcgctgcatcggtaccggttcggcgttcgccggcgcaaacattcctacaacctttaccccgtcaggtcaaatcacgctgtcatggtcaaaagctgcctgggaggtttacaaaaaaacgttcaccggcgaaacggtgccgtttagcttctccctggagaatgctgaaggctcctataccttcgatttcccggaagtgcagatctccggcgactggccggatgcggggagcactgacattgttcaggttcagctggatatcaccgcggccaatactccgccgacgattatgcgcgtgcctaaagtgccggcgacggcaatcagtgttgcgccagccacttcaactggggccgtgggatctacagtgacgttaaccgccacgcttacgccagctgattcaactgataccgtccagtggacgtcatcggatccgactatcgccagtgtggtttctaccgggcagaaaacagcgaaggtcacgcgtaactcagccggtactgcaatcatcactggtaaggcccgcacctttaccgcaacgtctgaaatcaccgttaccgagccttaa

SEQ ID NO: 216834 - DNA, 393 bp, Klebsiella pneumoniae
atgacccttacagaaatcagaaacgctgtcatttcccgaatggcggcacagaccgctattgcctctgatgcggtggattatcccaatggcccggtatttgaccccagtaaccgcgatatctgggcccgactaaccaacattgctgggcaggctggcgcaaccgagatcggggacgggccggtcgtccacaggacgggcttactcatcattcagctgtttgttccggtcggttccgggacgttgcttatctcccgaacggccgatcagctaacggagctattcgagtttaaggacgacggaaagctgagttatttcgctgtttctgctgtgccggcgggtgagaccgatggctggttacagctcaatcttcaaattccttatcgcgctctgtag

SEQ ID NO: 216835 - DNA, 1308 bp, Klebsiella pneumoniae
atggcgatagctccgacgcttaacgttccccaggctcgttttctggctatgcagcagaagttcaaagcctatgtagctggttttggatccggaaagacatgggttggctgcggtggaatatgcaaagggttctgggagttccccaaaataaaccagggctactttgccccgacttatcctcagatccgcgatattttctaccccacggtggaagaagttgctcacgactggggactgaaagtcaaaatcgttgaaagcaacaaagaggtccatttctacagtgggcgccagtaccgcggcacgacaatttgtcggtcgatggaaaagcccgacacgatagtaggctttaaaatcggcaatgcgctggtggatgaactcgacgttctgaaagcggataaggcgcgtcaggcgtggcgaaaaataatcgcgcgtatgcgttataaggttgatggtctgcgtaatggcattgacgcgaccaccacacctgaaggatttaagttcgtctataaccagtttgttaaggctgtgagggaaaagcctgaactgaggtcgatgtatggtctggtacaggcttcgacattcgacaacgaaaagaacctgccggatgactatattccttcgctcctggcgagttacccgccggaattgatcaaggcatatctgaatggccagtttactaacctgaccagcggcaccatttatcatcagttcgacagggtgctgaataattccagtgaggaagagcagccaggtgaagcgctgtatatcgggatggatttcaacgtcgggaagatggcagggatcgtccatgtattgcggctcggcttaccacacgcggtaacagagattatcaacgcttacgatacgcccgacatgatacgcatcatcaaggaacgtttctggctgtatgccgacggtgactaccgcaaggtccgcgagatttatatttacccggatgcctctggtgattccaggaagtcaaacaacgccagcaaaacagatattgagcagctccggcaggccggatttaacgtcatcgttgatgatgctaacccgccggtaaaggaccgcattaactccatgaacgccatgttctgcaatggtaatggcgatcgccggtacaaggtgaatgtggcccgttgcccggtctatgccgactgcctggaacaacaggtgtgggataaaaatggcgagccggataaaaagagcgataacgatcaccccaacgatgctgccggttacttcattgtgaagcaattcccaatcgttcgacctgcattctctatttcactggacacgacattctga

SEQ ID NO: 216836 - DNA, 279 bp, Klebsiella pneumoniae
atggtggtggtcctggcggcgggttctcacatggtccgggtttgcgttaataacagaaggcccttttcagggcctattcgtatcagttggtatcagtcgatacctcctttcctgaacgaaaacaatacttccataggcaccaactgtaatgccttagctggcctgctcagctgcggtatcaaacagcgccagcgcttcggtcgcttcctgaatcgctttacgggtcttcgagacaatctcactttcagtgaagacgcgatcgaaagagtcagcgaatag

SEQ ID NO: 216837 - DNA, 225 bp, Klebsiella pneumoniae
atgatgaatacccataagcttctggatacatacatgttagttggtaccggtctttctcgcgtcaaatatgagattttttcaggagatgaaggatcatatgcgtttattacgatttatgcatatgagcctcatttccatattaagggccatgattccttaaagttagacgaagctgttgatgtcagatctcagatcgaagggcattttgcagatagctaccagtag

SEQ ID NO: 216838 - DNA, 201 bp, Klebsiella pneumoniae
atgttaacagtaaaagtgatgtcaccagatggtggcgaagaaatccattgtggcctgagtgttggtttcaaccccaaccagcagagtattgccgtatcgggaatggaccagaacgtattcctgaagcagggagaggttgcctatgtgatgaacgcaaacggcaagaccatttcccgttacgaacacagggtccagcagtag

SEQ ID NO: 216839 - DNA, 183 bp, Klebsiella pneumoniae
atgacgatgttgatcgggagctgcgcgagcactttacccgccccggtagtcgttgatacggcctgcagctgggtgcggatcatctacctgaccgaccacgatatcgacgtgctggatatgcagaccaagcgtgacattctggcgcacaacaaatcggtacaggccaactgtccgaaattatga

SEQ ID NO: 216840 - DNA, 276 bp, Klebsiella pneumoniae
atgggaatcgaagcaatcgcggggctggtggttgtcatcctgggtgctatcgctggcgcgttcggcatcggccacgctcgcgggaccagtaaggcggaagccaaagccgatcagcagcgtaccgaagagaacgccgccgccaccgtcgccgcggcagaacgtaaggcggaagttgtgaaaggggccagtgatgtacagcagactgttagccatatgcctgatgacgatgttgatcgggagctgcgcgagcactttacccgccccggtagtcgttga

SEQ ID NO: 216841 - DNA, 630 bp, Klebsiella pneumoniae
atgaatcaaacacaattccagaaggcggctggtatcagcgccgggttagctgcgcgctggtttccgcatattacagccgcgatgaaagagtttggcataacagcagctatcgatcaggcgatgttcattgcccaggtagggcatgaaagcacgggatttacccagcttgttgagagcttcaattatagcgtggccgggttgaatagttttgtccgcgccgggcggctgacgcagggtcaggctaattcgctcggccgccgtcagggtgagccctctttgccactggagaggcaaagagcgatcgccaacctggtgtacagcaaacgcatgggtaataacggggcaacagacggctggttttaccgagggcgtgggctcatccagatcaccggcctgaacaattaccgcgactgcgggaatgctctgaagattgatctggttaaacagcctgaattgctggcccaggatgagtatgcggcgcgcagtgctgcttggttttatgcctcacgcggctgtttgcgttatcccggtgaccttgcacgcgtcacgcagattatcaacggcggacagaacggcatagatgaccggcgcgcccgcttcctgaaagcaaaagcggtactggtggtgtga

SEQ ID NO: 216842 - DNA, 282 bp, Klebsiella pneumoniae
gtggtaataaatgacccggcagcgctggtcaatgcggtgatatgtgccgttattgtctgcgctttgatgttttatcaacgtcgcggtgccaggcaccgccctggtatctccattcttgcttacttgctggtattgatttacgcgagcattcctttccaatttatcttcggtctttacgtacagtcccactggctggtggtaatggcaaacgtaatgatatgcgccgccgtgctgtgggcacggggtaacgtggcgcgtctggtcgatacactgaggcactaa

SEQ ID NO: 216843 - DNA, 396 bp, Klebsiella pneumoniae
atgtccgatcctttaactggtaccggcctgatttttggtggcggtttaattggttccgtcatatatggcgttatcacccataccgattttggtgtggtatttggggcttttggcggcgcagtgttttacgtggctacgaccgcaaacctgacacgtggaaggcaaatagcttacttcatgacgtcgtttattgtcggtgttctggctgcaggattattaggctcaaaatttactgcatggacaggctatacggatcgtccgcttgatgcgctcggtgcggtggtggcatctgctgtaaccatcaaggtcctgactttcattaacagccaggacttgagcagcctgttcggattactttcccgattaaggggaggaggttcgagtggtaataaatga

SEQ ID NO: 216844 - DNA, 141 bp, Klebsiella pneumoniae; identical to SEQ ID NO: 216171

SEQ ID NO: 216845 - DNA, 639 bp, Klebsiella pneumoniae
atgcgtaaaccagcacgccgtaaatgcgcccactgccgcgaatggttccatcctgcccgggaggggcaggtggtatgcagttttgaatgcgccagcgcgatcggcaaaaaacagacagcaaaagcccgggaggcggcgaaggccagggcggtgaagcgccagcgcgaatccgaaaaggaaggtcgccagcgtcgccgggccaagcgagagtcattcaagacaaaggcccaatgggataaagaggctcagtcagcctttaaccggtatattcgcattcgtgatgaaggtaagccctgcgtgagctgcggaaacccgcttattggtaagagcaactacctgaccggcagcgcaattgacgccagtcattaccgttcccgtggtgcggcgtcgcacctgaaattcaacgtgttcaatgtccactccgcctgcacccgctgcaaccggcagttgagcggcaacgctgttgaatatcgcattcacctgattgaacgcattggcctggatcgcgtaaagcgccttgagtctgataacgagccgcgccggttcgatattccctacctgcagcgaatcaaatccatattcacccgcagagcccgcgcgctggaaaagcgccgcgcccgccatcaggaggccgcatga

SEQ ID NO: 216846 - DNA, 177 bp, Klebsiella pneumoniae
atggctatgcaatgtcttctcgccaaagtaatggagcgcggcatcttccgcgtgccggcgcgccgcaagcgcaaggtcgaagttaagccttccgacataccgaccctgaaagactataccgcccgcctggtcgataagaagtggctacgcctgagagcaaggaggccacatgcgtaa

SEQ ID NO: 216847 - DNA, 597 bp, Klebsiella pneumoniae
atggcgcaaacactgcaatttgagaagagttatcaaaacgtactgattcccgcagaaccgggaaccagcgaatacctgcaacttatccccgtagggcaactgctttgcggtgagttccgcaagccccggaattacgcattccacaagaagttcttcaaacttctgactctcgggtatcactactggacgccttccggtggcctcattgagcccgctgagcgcgccctcatatccgggtttatcgacttcctttcatctgacttcgatcagcgcgctgcgctccagaacgccgcggagatgtatctctcctctgtcggtatttctcgttcccgcgatatggcgcttctgaaacacttcgaatccttccgcgagtgggcaaccattcaggctggcttttacgacgaataccagatgcctgacggcagccgtcgtcgtgtcgcaaagtcgatctccttcgccagcatggacgacagccagtttaacggcgtctacaaatcagtgctgaatgtgctctggaactacattctgcgtcgcaagttccactcgccagctgaggctgaaaacgccgccagtcagctgctgagctttgcggggtga

SEQ ID NO: 216848 - DNA, 258 bp, Klebsiella pneumoniae
atgtcacagtggaacattgcagccaaatcgaaagacgagcaggacaaggtcaatgttgacctcgcagcctccggcgtcgcgtacaaagagtgcctgaacatgcctgttgtcgccgaagtggtagccagagagcagcctgaacatctgcgcgagtatttcatggagcgcgtccgctactaccgcgagcagagcatccagctcccccgcgcatccgatccgcgctatctggaaatgacagagcagaacgccaagaaatag

SEQ ID NO: 216849 - DNA, 204 bp, Klebsiella pneumoniae
atggcgcacaaaatcttaaagcaatacctgtctccgatggcgaaagtcaccggcgattttctacattcagagtttgacctttctggagatgaagacccgcttggatgcgacgttctgccttacgattcagcggtatgtattggtctgattgaaggcattagggtttacatttccggggtaatcattaatcaatttggggtgtga

SEQ ID NO: 216850 - DNA, 813 bp, Klebsiella pneumoniae
atgatttttatgagccataactataaagataaagatttcgttgaacatatctctaaaaaaattgcagatatatatggaagagaaaatgttttctacgattcttggtctattcagccaggtgagggtattattgataaaatgaatttaggcttgcagggcactaaatttttcttcttctttgtaactgcaaatagtcttgctagtaaaatggttagtcttgagtggcaaaatgctttaatgagaacgacgacgagcggtgtaaaatttataccggttaaatgcgatgaatctcccatgccagcattgttgactcaaaatgtatatttagatctgtattcttcaggcatagacgtaatcattacacaaatgaaagatattattgatgggaacagcacgttcaaaccaaaggatcaagacttctctaatctatcttatgatttaaaatttgaagacgataaactaaaaattcgaattacagctgattatttcagtgaggttatggcggattttatattggctttaaatgataaatacactgaatcagaactacgatggggtattattggtgaatcaactttcatatcaggcactgcgccaaattctcagctgggtgatgggcgtaaatgttttatgctgaggattgctctacaacacggcattaaacccaaaattccagtggatgttgagctaagccttaattcaggtgaaagacccgatctgcttgcggtaatgacgaagtatagttcaacagcttacaaggcaataccctataagaaaaaagacgactttagtggttttgaatttaaattctag

SEQ ID NO: 216851 - DNA, 516 bp, Klebsiella pneumoniae
atggcacttacacacgatgagctttgccagatagcctgccgctttctgcaaaccaacggtttcaaggtggcctttcatgatcggttccgagcatggacgccatacggtgagcaggctgatgcaatcggcttccgcaatggggccagttgtctgattgaggctaaatgctctcgttctgacttgttggccgaccgcaagaagcctttccgtgttgaacccgagaagggcatgggagactggcgtttcatgattagtgagccgggtatcgtaaatattgaggatttgcagcctggctggggattgcttcacgtggtcaaaggtcgggttaagaaggttcacggctggcctggaaactgggagtgggttaaccgggacagcaagccatttcaggctaacaaacaggcggaatgcgattacatgtttagcgcgctccgtcgcatggacttacgcggccacctcaaagaagtatacgacggcgtgatagttaaccgggcagcagaaggagccaaccaatga

SEQ ID NO: 216852 - DNA, 264 bp, Klebsiella pneumoniae
atgagcatcgccacttatctcaataccggtttagccattctgggatgggcatacatcatggttaaaacaggccaatggattaccaaaaatgctctgaggcggtgggacaagcgtcgtaaggagtctcgtcgccagaaagctgtgaatgagttttatgacgcctttgagcttaacagcctggagcctggctctaccgttcgtctggccactaaaggcgatctgacaatcatgatgttccgcagcgagggaaaggccaatgactga

SEQ ID NO: 216853 - DNA, 681 bp, Klebsiella pneumoniae
atgactatcacattacaggcagtaaacgagctcatcgcctccctggagagcgcaggcgagctgtcaatcagagagcagaagttcctgaagctggcgaaagcttaccaggagctggctgcggagaatgtggtgctgacggctggcgtaacttacttcgcatactcgcctgaatacggttttgattatttcaaagacaagcagagcgctatcgacacagcgcaggctgagattgacgcataccgtgaggacgcagacgacggctggagcgaagatgttcagcgcgtgtcatggggtatcgtgattcaacaggctcaaggcttcgatgctcaagggctgcatacctccgatagccagcacacctatcaaacatgcaattaccggttggttgactcggtagaaacccccgccaccgatcgcatcgtagccggctttaaggctgatggtgtagcagaacgggaaaagaccatcacattcacagcagctaaaaagcgcacgcaggatggagtagcgttaatcgctatcggaaagccttataaaattcaccacgatgatgtgattggcgaattcttcatcggtgagcgcgggcgctacggcgtaatcaccatggatcgtctcgattacttcacaacgtctgacgaatacgcatgggagttttcgctgcgcgagggggccgacaaatga

SEQ ID NO: 216854 - DNA, 294 bp, Klebsiella pneumoniae
atgacaggaaaagacgcaattctgaactacctgaaaacgcataaaacctgtagctctccagatgtcgccgcggcttccgggatgacgcatacctgcatcaaccaggctgcaaatatcctggcaaagcagggggtactggtagcggaagctcgggtgtggcggacggtttactaccggttggccactgaagaagaaatttcaggcaggaagagcaccaatcagattttcaacgagtgtcggcaaagcccggcgatgaagcgggtactggctgtttacgggagaacatcagcatga

SEQ ID NO: 216855 - DNA, 852 bp, Klebsiella pneumoniae
atggaactggaagaaaaaatcactgccattgagcggatgcttgatcagctgagtaagccaccggaagacatcccgaattgcgaggtggttatcgagcgcgtctgttgcgaaaagcatggcgagtatgagcagcgcaagcggatcctgaccagcagcatcatcaatctgccatcaccgccgacacgctgcccgggctgcctggaagatgaactgaattttctgagggatgaaaaggttcgctgggataagcgagttcgccagcaaactgcagaaaggctgcttcgacagctggacataccagagcgcttctccacgtgcactctggacagctacaagcctgttgggaaggattctgagcgagcattacgggtctgccaggcctacgcatcgaaatggactgatcgactccagcagggaggcgggttggttatgtgtggcaagcctggtaccggtaaaaaccaccttgcgctggccattgcccgccatgtgattgagcaccaccaaagctcagtcatttttacgacggcgctcaagattgcccgggagtttaaatcgacctggtcaaaaacagccacgcgcactgaggatgaggtgatctcctacttcacgaagccagacctgctgattgtcgatgaggttggtgtgcagtttggcagcgaagccgagaagatgatcatgtttgaaatcatcaacacccgctacgagcgcctgaagccgacgatcctgatcagcaacctgccgaaggatgagctgactcagtttatcggcgagcgcgtcatcgaccgcatgaacgacggcggcggatgcacgatttcgtttacctgggacagctatcgggagaaccggtcatga

SEQ ID NO: 216856 - DNA, 855 bp, Klebsiella pneumoniae
atggcaaatactgccgaagtaatcaatttccctgtgcctgtcgtggcactacaggagctgcgcgtggcagatctcgacgatgggtttacgcgcatcgccaatgagctccttgaagctgtcatgcgtgcgggtctgtcgcagcatcagcttttggtgttcatggctgtcatgcgtaagacatacggcttcaacaagaaatctgactgggtcagtaacgagcagctctcggagctgaccggcattctcccgcataagtgctcagctgcaaaaagcgtcctggttaagcgggggatattaactcaaaccggtcgtgttatcgggattaataaaacggtcagcgaatggtcatctttacccgtaaaaggtaaagaaaaaaaaccttacctgaaaaaggtaacattacccgaatcaggtaagaaaagtttacccgaatcaggtaacgcctattacccgaatcaggtaaacacaaaagacaaacatacaaaagacaataaagacaatattaataacccccctaaatccccccgggcggtttcgttcgatgcgttagctgttcagttgcctgactggctttctgcagaaatctggtcgtcatgggtggcatatcgtcgcgacctgaaaaagccgatcaagtctcagcagacggtcacccaggctatcaacctgctggaccgctgcagactgaacggttacgcgcccgaagaaattatcaaccgcagcatcgccaatggctggcaaggcctgtttgagccaaatggtgccaagcctcaaccaagtcaacaggtgcgagttgccgaaaatttcgcagggaaggattacgggcagactgaaatcccatcatgggcgagggactga

SEQ ID NO: 216857 - DNA, 321 bp, Klebsiella pneumoniae
atggagaatgcaatagcccgaaagttagagccgccaatcctcaacccaattgagattgaaggcattttgttaaaccggcttttatccattggccaaaaggtttttgcggaaatgcgaggggttagcgagtcgacaatcagtcgccgcaagagcgaggggtattacgccgagatggcgaaggaaatatcagcgcttggtctgcaagtagttccgccagaggcggtggtagtttcccgccactacctgcagtcagtagaaacgctggcagatatcggattacgtgctgagcggtgccggcctggtccgttgggatgggactaa

SEQ ID NO: 216858 - DNA, 228 bp, Klebsiella pneumoniae
atgacgaacaaaaccatccagaaggcaattgatatcgctggaagtcagaaaaaattggccgatctgtgtggcgtagcacagccgacagtttggcgctggctgcatggcggcggaattgatgcccgctatgtgatgaaaattgtgtctgcgactaacggcaggattaaggcagcagagatccgccctgaccttgcacagttgctaagcgcgcattcaccggccgcctaa

SEQ ID NO: 216859 - DNA, 435 bp, Klebsiella pneumoniae
atgcaagttaacctagaaagaatatcatttataacacctttttctgatagtgaggaccagacacagccaaagcttagttttgagtgcgtgaacttccccgctcagttttcgataaatttccgggtgggaatggtaggtttgaagccaaatactcgctatcaactcggactgtttgttataccagctcatttatttattaaagaggggcaggaatttcaacttcctgacggcactcaggaatctgtttctgttaacattgatactaaagacagcaacatggcgacgggtgccagtggacaggttgtcattactctaaacgaaatgcgcctccccggtaaggggctgtatagtgtgactggcgtcttacacgccaacgattcgataaaaaccgtgcttcataaaaacgagtcatttttcactgttgataaattatga

SEQ ID NO: 216860 - DNA, 648 bp, Klebsiella pneumoniae
atgagtgacgataaagaatcaaaaaatcaagagaatcagagcgcgagaccaaatagcctaaggaggctgaaagttatcggtggctcagatttcgatgctgaatttgataattcctctgagaaggtgcaagatcacttcataacgtcgcatacttcggagcgagaagtggataggattagcagagaagaacttgaagcaaggctgtgcgccaataaagcggaaatggaatcaatagcctcttcaattcgagcagacatggccttagccagagaaaataccaatgtccagttcgcaaatctctcctccgcaattaattctatctcttcaaaaattgacgggaagatggatagtgtagatggagaaatgaaagcaataactggtaagtttgatggcatccagggtcagataactggcctgaacacagccattagcggaatccagtcaggcatatctacgcgacttgcaatttttagcgtaattatcgctgtgattgtcgccttgcctgggattatctcctcatttaaggactctccagctaagtctgatgataatccttcacccttgattattcagatgccagcgcagcaacaaaatcaacaacccgccccccaaaaccaacagaaagcctcgccaaatcagcataagtag

SEQ ID NO: 216861 - DNA, 747 bp, Klebsiella pneumoniae
atgagcacagcactttctacaatggccgggaagcttgcctcccgcctcggcatggatgccggaactgacctgatgaacactctgaaaaatacagcatttaagggtgggaatgtcactgatgagcagttcacggcactgctgatcgtcgccaaccagtacggactaaatccgtggacgaaggagatttatgcattcccggataaaggcggaattgttccagtggtcggcgttgacggctgggctcgaatcatcaacgaacatcctcagtttgatggaatggagtttgcctacgacaaggaagaaggcgcgtgtacctgcaagatataccggaaagaccggacacacccgaccatcgttactgagtacatgggagagtgcaaacgcaacactcagccatggcagtcccaccctacccgtatgcttcgtcacaagacgctgatccagtgtgcgcgtctcgcatttgggtttgctggcatcttcgatcaggacgaagccgagcgtgtcattgaagggagtacggcagaggttcatgtagggcatgagtcggatggtcgtcgcccggaactgatcgcaaaaggcgagtctgccgcacgccttggaactgttaagtaccaggaattctgggttgcgttaagcgcagaagagaaacaggttatcggcgcggttgagaagcgtcgcatgtatgacatgagccttgcagtcgacaacgcagaacctgtcgatgccgcagcgccggaggataaatga

SEQ ID NO: 216862 - DNA, 624 bp, Klebsiella pneumoniae
atgatggaacaacgcaccccagaatggtttgccgctcgctgcggaaaagtcacagccagccgccttgctgacgtcatggccagaaccaagtctggctatgcagcaagccgacagaactacatggccgagctgatttgccagcgcctcaccgggaagcttgaagaaggtttctccaacgccgcaatgatacgcggaacagaactcgagccggtagcacgcgagatgtatgcgctgaatgagttcgatgccgaaatcactgaggtggggcttatcgatcacccaactataccaggattcgcagcaagtcctgatgggcttgttaatggtgatgggcttatcgaaattaagtgccccaacacctggactcatcttgagaccttaaaaactggcgagccaaaacgccagtacctgttgcagatgcacgctcagatgatgtgcacagggcgcaaatggtgtgatttcgttagtttcgacgatcgtctaccgccagacctcgcctatttcaaaaagcgcattcacttcgacgaagcactggcaaatgagattcagtccgaagtgaaaaagttcttggaagagctggagaaagagatttccagcataaaaaaccacgaccatgccgcatga

SEQ ID NO: 216863 - DNA, 528 bp, Klebsiella pneumoniae
atgactgatttcggcggatcgaaaactccaaaaaatgaacgtgactactggcaaacgccgattgaaattttcaacgcgctcgaccgcgagtttggcttctggctggatgctgcagcctctgagagtaacgcgctatgcgctcactatctcactgagctggatgactcgctgaacagcgaatggacgtcatgcggcgcgatatggtgtaacccgccctattccgatatcggcccgtgggtagaaaaggctgctgagcaatcccgggcgcagtctcaggccgtagtgatgttgctaccggctgacatttctaccggctggtttatttcagccatgcaatcagctgatgaactcaggctgataacgggtggccgtgttcagtttgttcctgcatccgttacaggaaagcgccagagcaacccaaaaggctcgctcctgtttatctggcgcccgtacatcaccccgcgacacatcatcacgaccgtatcgctggctgagttaaagcggatcggaaatctggaggcagcatga

SEQ ID NO: 216864 - DNA, 222 bp, Klebsiella pneumoniae
atgacgccagaagaaaaagaaaacgccctccgcgcccaggctcgtcgctgcgcagaagagataaccaaagcgatgagcgcaaagcctaaaccgaaatggaacgctgtatgcccccccatccttcgcaagcactacgagaaggtaaagccgatgggtgtcagccttgtgaaatttgtcagtgttattggccgcatgaatgggcggtatggagtggaatcgtga

SEQ ID NO: 216865 - DNA, 657 bp, Klebsiella pneumoniae
gtgaaagaacgcggaatgatttttaacggggagatggtgcgggcgctgctgagtggccggaagacgcagacgcgcaggattataaaggactgcacggtcggaagagaccaaatttcaaaattcattcagatcgagaagaagtttatcggctgctacccggaagatgtacctgaactgatcagggaatgctgcccatacggaataccaggcgatcgcatctgggtgcgggaggcctttcgggtgcatagccgggctacagacgtcgccaccctggtatacaaagccagcgagcgaaattcatggactgagcaaacccaccgtgtacccgtagctgtctgcaataagccggcaacgcctgagaaatggactccttcgctgcacatgccacgctgggccagccgcattctgctggaaatcaccgacgtgcgggttgagcggctaaacgctatcaacgagcatgatgctcaggcagaaggtgtggcgaagctacgagggggcttctggaagcactatcagccaggctggactcaacatcaactgagcgcccgcggctcattcgtaaccctttggaaatcaatctacggcgacgaatcatggaattccaatccatgggtttgggttattaagttcaaacgaattgaggagctgacagcatga

SEQ ID NO: 216866 - DNA, 309 bp, Klebsiella pneumoniae
atgagtcttaaacatcgattacctgagctggaagccagcatcgacccggcagcattgcgtgcagccgccgacgaatattcggatctgcttctgactttgtgcttatgcatgaagatggccggccccacccgggcgaacgtgtgcgcctgcgccagcgagcttaaaaaacgcctgacaacctggcacagccataaagagctcaatgcaattctgtccagttgggatcccgttggctatgttctcggcctccgccgtgaagcgaacgacaacgcgcgcgcagctggcgatccggttgatgtctttgtgtga

SEQ ID NO: 216867 - DNA, 966 bp, Klebsiella pneumoniae; identical to SEQ ID NO: 210635

SEQ ID NO: 216868 - DNA, 1449 bp, Klebsiella pneumoniae; identical to SEQ ID NO: 210636

SEQ ID NO: 216869 - DNA, 1125 bp, Klebsiella pneumoniae; identical to SEQ ID NO: 210637

SEQ ID NO: 216870 - DNA, 1470 bp, Klebsiella pneumoniae
atggtttcggaaactaaaaccacagaagcgcccacgctacgtcgtgaactgaaggcgcgccacttgaccatgatcgccatcggcggttccatcggtacgggtctttttgttgcctctggcgcaaccatttcgcaagcaggtcccggcggggcgctgctgtcttatattctgatcggtttgatggtctatttcctgatgaccagcctcggcgagctggcggcgtttatgccggtatccggttccttcgccacctacgggcagaattatgttgaagaaggcttcggcttcgcgctgggctggaactactggtacaactgggcggtgacgatcgccgttgacctcgtggcctcacagctggtgatgagctactggttccccgacactccgggctggatctggagcgccttgttcctcggcatcatgttcctgctgaactggatctcggtgcgcggctttggcgaggcggaatactggttctcgctgataaaagtggccaccgtcattatctttatcatcgtcggcgtgatgatgattgtcggcatcttcaaaggggcgcagccagccggctggagcaactgggggatcgcggatgcgccgttcgccggcggtttctcggcgatgattggcgtggcgatgattgtcggcttctcgttccagggcaccgagcttatcggcatcgctgctggtgaatctgaaaatccggagaagaacattccgcgcgcggtgcgccaggtcttctggcgtatcctgctgttttacgtcttcgcgatcctggttatcagcctgatcattccgtataccgatccgagtctgctgcgcaacgatgtgaaggatatctccgtcagcccgttcaccctggtgttccagcatgctggtttgctgtcggcggcggcaatcatgaacgccgttatcctgactgccgtgctgtcggcgggtaactccgggatgtacgcctccacgcgtatgctgtacaccctggcctgcgacggtaaagcgccgcgcattttctcgaagctgtcgcgtggcggcgtgccgcgtaacgcgctgtacgcgaccaccgtgatcgcggcgctgtgcttcctgacttccatgtttggcaaccagacggtgtacctgtggctgctgaacacctccgggatgacgggctttatcgcctggctgggtattgcgatcagccactatcgtttccgtcgcggctacgtcctgcagggtaacgatattaataatctgccgtatcgttccgggttcttcccgctggggccgatcttcgccttcgtgctgtgcctgatcatcaccctcggacagaactacgaagcgttcctcaaggacaccattgactggggcggcgtggcggcgacctacattggtattccgctgttcctcgtcatctggtttggttacaagctggcgaaaggcacccgctttgttcgctacagcgaaatgaccttcccggaccgctttaagcgttaa

SEQ ID NO: 216871 - DNA, 867 bp, Klebsiella pneumoniae
atgcatattacgctgcggcagctggaagtgttcgccgaagtccacaagagtgggtcgaccactcaggcgtcacagatgctggcgctttcgcaatccgcggtcagcgccgcgctgaccgatctggaagggcagctcggcgtgcagctgtttgaccgcgtcggtaaacgactggtggtgaatgagcatggacggctgctgtacccgcgtgcgctggcgctgctggagcgggccctggagatcgagcagctgtttcgcggcgataacggggcgatccgagtctacgccagcagcaccatcggcaactatattatgccggagattattgcccgctatcgtcatgacttcccggatctgccggtcgagctgagcgtcggcaacagcctggacgtcatcaacgccgtcgccgacctgcgggtggatttcggcctgattgaggggccgtgccatgccgccgatattattgccgagccgtggctggaggatgaactggtggtgtttgccgcgcccaactcaccgctgctggcgggggaggtgaccctgcagcaactggctgaggcgccgtggatcctgcgcgagcatggctccggcacccgggagattgtcgattacgttctgctgtcgcatctgccggcgtttcatctgggcatggagctgggtaattcagaggcgatcaagcacgcggtcaggcatggcctgggcatcagctgtctatcgcggcgggtgattgccgaacagcttgcctcgggcacgctggcggagctgaaagtgccattgccccggctgacgcgcacgctgtggcggatccatcaccggcagaagcatatttctaaagcattacaacgttttctgcactattgccaggtgtag

SEQ ID NO: 216872 - DNA, 510 bp, Klebsiella pneumoniae
atgaattccaaccctagaatgcaaatagccgtttttattatgcgtcacggcgacgctgccctcgatgcagccagtgactcggttcgtccattaaccgtatgcggttgtgatgagtctcgtcagatggcaacctggctgaaaggtcaaaaagtggatattgagcgcgttcttgtcagtccctatctgcgtgcggaacagacgctggatattgttggggagtgcatgaacctgccgaaacatgtcgacgtgatgccggagctcacgccgtgcggtgatgtgggaatggtgagcgcctatctgcaggcgctggcgaatgaaggcgtggcgacggcgctggttgtctcccacctgccgctggtggggtatctggtctcagagctgtgtccgggggaaacgcccccgatgttcaccacctcggctatcgcctgcgtgacgctggatgccgacggcaaaggtgagttcctctggcagaaaagcccctgcaacctcaagatggccaacgccatctga

SEQ ID NO: 216873 - DNA, 1269 bp, Klebsiella pneumoniae
atgcttgacctgctgaatctgccaggcatcaagccggtcgatatgcgccacgaaggcaagtgccttgtgatagttgctgagccggtaacggtcgaggtgccgttatgtggggagtgcaacatccctatgcacagacacggtacgcgcaaaaacaagttcatggacacgccgttgtacatggagcccgtccgccttgaagttcagcgcccgcgctttcgctgtgagtcgtgcggaaaaatgtccatgccggagttgagttttctggatgacaaacgccgagccaccaaacggctggtcgatgttattcggcaacagtgcctgggaaccaccttccatgctttagccgagcaaaccggtgtggcggtgaacaccgtcaagaacatcgctcgcgatctcattgaggaactctcccaaaccgttcgttacgaaaccccggtcatcatgggtattgacgaagtgaacctagccggagggtatcgctgtgtaatcaccaatctggcaaccaacaacgtctttgatatgttggagcatcgtactcaagagcatttgaagcccttcttcaaggatttgccggatgctgacaaggtggaatgggtctgtacggatatgtggcgacccttcaaacgttcctttgctcagtatctgcccaacgccaaactggtgatcgacaagttccatgtcgtcaagatggcctctgaagccttggaagcggagcgcaagaactatcaggcacagttaagcaaagaagatcgcatttacgtcaaaaagtccattcgctggctcaccctgaagcgacccggcaacctaacgcccgcagagcaaaaggcgctggaggttgtaaagcaggcaatcccagcacttgccatggcctatgacttcaaggaagccttcttctgcatctacgacgaacccgacaagcagagcgctcagaacgcctttgaggcttgggagaacagcctgccgccttatggcatggagcctttcaaaaaactggtaaaaacggtacacaaccattacgacgacatctttgcctactgggatgcgccgttctcaatcaccaatggctataccgaagggctcaacggcttgatcaagatgtccaaccggttaggtcggggttatagctatgagatcatccgtgcaaagacgttgtactccaaagaagcccgcaaggttggcagtggtattcgagcaggacgaggcaaggtcgagtatggaccgcacattccgacattgttgaagcaggcagaaggtggagagttggattaa

SEQ ID NO: 216874 - DNA, 3258 bp, Klebsiella pneumoniae
atgcaatcagcagcacatcaggaaaaacacttccagcaatacatcatcgaccggttggtagagcagggctggaagctgggtgattccaagttctacgacaccgagcgggcggtgtaccccgaagacctggaaagctggatcaaaaccagcggccagcaggaaaaatgggacaagctggaacggctcaacggggccaaaacccttgaagtgctgatggatcgcttggataaagcactggagaaacaaggcaccatgcaggtgttgcgccagggtttttccattgccggttgcggcctgatcgagatgaccgaggctgcaccggaagacaagcgcaatgcagcagtcattgagcgctaccaggccaatatcctgcgcgtggtgccggagctgaagtatcacccggcccgtgaatttgccattgatctggtgctgtttatcaacggtctgccggtggcaaccgtcgaactgaagaccgacttcacccagtcctgcgaagcggccatggatcagtaccgcaatgatcgcctgccgtatgacgccaagaccaaacgccgggagccattgctgaccttcaagcgtggggcggtggtgcatttcgccatgtccgactctgaaatcatgatggcgaccaagctggatggagaaaacacctttttcctgccgttcaataaggggcgcaaggacgaaagtggcacggtacatgcgggtaacccgccaggtgagattaaggccgatggtacccaggaatacccggtagcctacttctgggaggcggtctgccagccggatgcctggctgcggattttccatagctttgtctacgtcgagaaaaaggacgttgtggatattcagggcaactggtcgaagaaagaaaccctgattttcccgcgcttccaccaatggacggcagtgaaccagatgctgaccgatgcccgcgaaaacggcgcaggcatgacctacctgtgtgaccacagcgccggttccggcaagaccagcaccatttcctggacggcccatgacttggtgaaactgcgcgaagataacggcgattcggtatttaacagcgtgatcattgtcaccgaccgcaatgtgctggacggccagcttcaggacgcggtgaagcagattgaccatcagtttggggtgatcgccgccattgaccggcagaagtcatccaagtccaagagcaagcaactctcggaggccttgttgtctggcacgccgattgtggtggtcacgatccagaccttcccctacgcgatggaagccatcatcactgacaaggccctgaaagggaaaaactttgctgtgatcattgatgaggcgcataactcgcagacaggctctaccgccgctaagctgcaagccgcgctggggatgagtgggcaaggcaagatgtccaccatgacggtggatgaattgctggaacaactgcaaaaatctcgggctcgcccggacaatatcagctatttcgcctttaccggtacgccgaagcactccactttgatgctgttcggtcgcccaacagacccgagccagccagcctctaacgataaccctccacaagccttccacctgtacaccatgcgccaggccattgaggagaaattcattctcgatgtgctgaaaggctatgtgccctacaaaacggccttcaacctttccaagcagcttgaagacagcaagcgggtaagcggcaaggccgccaaacgcgccctggcacagtggatgtcattgcatcccaccaatgtgacccagaaggtacagtttatcgttgagcacttcaccaaaaacgtcgcccaccggctggatggcaaggccaaggcgatggtcgtgaccagctcccgcgccgctgccattcgctacaagaaggcgtttgaccgctatatcgagcagcacagcgagtacggctttattcattcactggtggccttctccggcaagatgaccggtaagcaggtgatgcaccaggatgacagcgagttcaaggatgatgtgtttatcgtcgatgagaacgaagagttcaccgagcagagcatgaacccggatgtccaagggcaggatttgcgctttgcctttgaccgacctgaataccgggtgatgttggtggctgacaagttccagactggctttgatcaacccaaactggtcgccatgtatgtagacaagaaaatcgctaaccatgtggagattgtgcagaccttctcccgtctcaaccggacggcgcccggtaaggatgaggtctttatcatcgactttgtgaacgacccggagaacgtgcgtcaggcctttaccacctatgacaagggtgctcacatcgacgaagtgcaagacctcaatgtggtctacgagatcaaggagcgcttggacgagcacggcctgtacgacgagaaggacttggctgcgttcaaggaagcacgcttcaagaccatccgcgacatcacccataccaaatcgccacagcacaaggcgctgtatgccgccactgctggagcgacggccttgtataacgacaagatgaagatgctgcgcgatggcatggcgacctgggaggcggcttttgagaaggcccgcgccaagggtgatgaggcgggcatgaagtctgctgaccaccatcaggatgagtacgccgagcaaatcaaggcactgattggcttcaagtcggatttggggcgtttttgtcgtacctactcctatatcgcccaactgattgattttggcgacccggagctggagaacttcgccgccttcgccaagctattgcaaaagcgccttcagcacgaagcacctgaaaccgtggacttgaccggcctggtgctcaccggttttgacatcaatgctcgttcagataacgcggaggacgaaggcgaaaccccggtactgcaaccggtaggtgcaggcggtggtggtgtggcgggcgacaagccgaaattcgtcaaagagattattgagcgactcaacagcctgtttggtgaggcaacgccgatccaggatcaggtggccttcgtgaatcagatcttttcaatcgccggcgaaagcgatgtggtgatggctcaggtggaaagtaacacccgcgaacaggccatgaaaggcaatttgcccggcgctgttcagcaagcggtggttcgtgctttgtccagtcatcagaagctggcaacccaagtgctcaagtctgaccgtcagggcatgaccgcattggttgatatggtgtatgacctgctgcgcgaaggcaaagacatcgatctgggtatggattaa

SEQ ID NO: 216875 - DNA, 1317 bp, Klebsiella pneumoniae; identical to SEQ ID NO: 156053

SEQ ID NO: 216876 - DNA, 2028 bp, Klebsiella pneumoniae
atgaacgaatttacgggatcggcagcttcacaggctgactttatttggaagaatgcggaagacctgtggggtgacttcaagcatacggactttggcaagatcatcttgccgtttaccctgctacgccgtctggagtgtgcgctggagccgacccgcgaggcggtgagagaagcgcatgacgctttcaaggatgccgatgttgagctggataccattctgcgctcaaccgctgaataccccttctacaacacctctgaatactccctcggcaccctgggtagcaccaagacgcgccgcaatctggaagactacatcgccctgttttcggataacgcccgcgctatcttcgaggagtttgagtttggcaatacggtgatccggctggagaaagcgggcttgctgtataagatttgccagaacttcgccaagatcgacctgcacccggacgtggtgccggatcgggtgatgagtaacatctacgaacacctgatccgccgctttggtgctgaggtcaatgaaggagccgaggacttcatgacgccgcgtgacatcgttcacctggcgaccgcattgctgcttgacccggatgatgccctgtttgaggccagcccaggtttgattcgtaccctgtatgacccgacctgtggcacgggtggcttcctcaccgatgctatgaaccatgtgggggactacggtaaccgcgacaagatcccgccagtgctggtgccgcacgggcaggagttggagccggaaacccatgcggtttgtgtggccggtatgctgatccgccgtttggagtcggaccctggccgagatctgtcgaagaacattcgtcagggcagcacgctgtccaacgaccagtttgccggtgagcgtttccactactgcctgtccaatccgcctttcggcaagaaatgggagaaggacaaaaccgctgtcgaagcggaacacaaaaaaggcgagctgggccggtttggtccgggcctgccgaaaattagcgatggctccatgctgtttttgatgcacctggcgagcaagctagaactgccgatcaacggcggtggccgcgccgctattgtgctgtccggttcgccactgtttaacggcggtgccgcgtctggcgaatcggaaatccgccgttggttgctggaagacgacctgattgaagccattgtagctctgccaacggatctgttcttccgcaccaatatcgccacctacctgtggattctgtccaacaagaagcctcaggagcgcaaaggcaaggtgcagttgatcaacgccaccgacctgtggacttcaatccgcaacgagggcaacaagcgccgtattgtcagcgatgagcagcgccgccagattctggacatctacgcagcaggcgaaaccggtgcgctttcccggatgctggactaccgtacctttggctaccgccgtatcagggtcctgcgcccgctgcgcatgaccctagagctggataaggtgggtatggagcggttggaagccgaagctgcctgggaaaagctctctgacgcgcatcagacattctggcgcgaagccctcaagccgctgatcgggcaaacgcagccctatagctgggcagaaacctttgttagcaactcgatcaagtccgatgaagccaagcagctcaaggtcaaatccaacaagacattgatcaccgcgctaatcaacgcctttggtcacaaagacccgaaagccgagccagtcacggattcaaacggcgagctggtgccagacacagatttaactgattacgagaacgtcccctatctggaggacatcgacgactactttgcccgcgaagtgcttcctcatgtgccggatgcctggctggatgagagctttaccgatgccagggatggtcaattgggccgcgttggctacgagatcaacttcaaccgcttcttctaccagtaccagccgccgcgcaagctgcatgatattgatgaagacctgaagcaggtagaagccgagattgccgcgctactggcggaggtggccagcgaatga

SEQ ID NO: 216877 - DNA, 2145 bp, Klebsiella pneumoniae; identical to SEQ ID NO: 209554

SEQ ID NO: 216878 - DNA, 1323 bp, Klebsiella pneumoniae; identical to SEQ ID NO: 209551

SEQ ID NO: 216879 - DNA, 1080 bp, Klebsiella pneumoniae; identical to SEQ ID NO: 211078

SEQ ID NO: 216880 - DNA, 1233 bp, Klebsiella pneumoniae; identical to SEQ ID NO: 211138

SEQ ID NO: 216881 - DNA, 918 bp, Klebsiella pneumoniae; identical to SEQ ID NO: 213429

SEQ ID NO: 216882 - DNA, 1452 bp, Klebsiella pneumoniae
atgatgacaacacaccacgaccgtcactataaagccggtggcgacccgcgcacgctggctgattttatggccctgcgtgcggaaatgaacaagctcagccacccggcgcggccggatattaactggccgtatgccgagcagcttgcccgcgggctgttggagcatcacggcgcggacctgcagactgtcgcctggtataccctggcccgcgcccggctgggcggggtggcagggatcaatgaggggctgacgctgatggagtcgctgctggttcgtcaggggaaaaacctgtggccacaggcgctcccggcccggacagagatcttccgcaccttgagcaagcggctgcggcaggtgatccgtaccctgaatcttaccccagaggatgttgagtcgcttgagcaggctgaacgttcgctgcaaagcttcgacgcagtgctccagcgccttgagatcgctcctgaaaaccagctgagcgacctgcgggcgctactgcacatcacggctactcgcttcgagagcctcgaccctgcgccagcgcttcccaccgcgccgccggtggtggtgtctgacgcggaacttcccggcactctggtcagcgaagaggatgcggcgaaggctgagccagtgccagacctaaaacgtagaccaaaggctgagccagtgccagacctaaaacgtagaccaaaggctgagccgctggctccgccttcacctgcaaagcggcccgcgccggtggcggcgtctactccggcagccgcgccgcgctggaagccgtttatcgccggaatggttaccatgctggcggtaacgggtatcgccgtcggcggatggctggcgctgcgtcagtccgacttgccgcccatttcggtcacccaaaatgccggaccgataccgggcctgccggcgacaacgcccccggggccggttgatctgccacagacgcagcgccagcttggcgagcttgcccgcctggcgccggactgggcggtcagctacggcgaccagctggtccaccaggccctgatccgctggccggatcaggcgcaaccgctggcgcagcagtggcggcagcagctgagtgctggcgcattgcccgcggaaaaccttaccggctggtcggagggcatgcagcaactgcagcggctcgccgaccagctcaatgccctcgacgagcagaaggggaagtacctgacggtgagcgaactgaaaaccgcagtatttgccatcacgcagtcgtttaaccgcgctgttccgctggaggagcagctgcgccagctggccgcgcttcccgttgatcaaccctggccagccgcgcggggaagcctcgcggagctgcatctgcaacagctgatagtggagtatgccctgctgaagcgaaaacagccggcgtcgccgaccgctgcgctccccgcaaccggtgagccctcggtgagtgaggcggtgaaataa

SEQ ID NO: 216883 - DNA, 1764 bp, Klebsiella pneumoniae
atggacgatttaaccctgcgatattttgacgctgaaatgcgctacctgcgcgaggcggcaaaagcgttcgcgcaggctcaccccgatcgggcggcgatgctggatctcgataaagccggtacgccggacccttatgtagagcgcctgtttgaaggctttgccttttccgtaggtcgcttgcgcgaaaaaattgatgatgatctgccggagctgaccgaggggctggtcagcatgctgtggccgcactatttgcgcaccattccgtcgttatcgatcgtggcgctgaccccaacgctgccggcgatgaagatagcggaaacggtgcccgccgggtttgagattagctcccgcccactggggccgaaaaataccgtgtgccggtaccgaaccacccgcgatctgacgcttaacccgctggcgatagaggaggcggtgatgacggcggagccgtacggacgttcggccctgcgactacgattcgcctgtagcgagctggctgactggtcgcagaccgatctccgccgcctggcgctgtacctgggggaagacgccgttaccggcagcgccctccatctgtggctgacccgacgccaggccgcgctgtacctgcgtctgccgggtcagacagagcgggtaagcctcgacggctatttttccccggggggattcagcgaggaggatcgtttatggccgaagggggagagcgctttcagcggctatcagctgctgctcgagtatttcacctttcgcgaaaaatttatgttcgtgcagctaaatggcctggaaaacatcaccctgccggcggggatatcgcatttcacgcttgaggtggtgttcagcgaggtctggcaaagtgatttacccgtcagcgcaagcagcctgcgcctgcactgtgtgccggtgattaacctgtttacccttgaggccgatccgttgaccatcagcgggctggagagcgaatatctcctgcgtccgaagcgcctgcaggacgggcataccgaaatctattctgttgacagcgtgaccggctccgggcgcaccggggaggcacgctatgtgcctttcacccgctttcgtcaccaggggggaatgatgcgtcgccatgcgccggagcgctactaccacacccgcgtaaaacggggcgtaaccggcatgcacgatacctggcttatcctcggcggacagcaatgggaggctgaccgcgagctggcgcgggaaacggtctccttgcgcatcaccggcactaacggccagctgccgcgccgggcgctacagagcacgctgctggatcgctgtgagtcgatatcagccacgccgcttaccgtccgcaatctctgtaagcccacgctgccggcctatcccccggcggaagaccgctaccactggcgggtcatgagccatctgggcacccgttttctcaacatgatgagcagcgccgaggtgctgcgcggcacgctgtcgctctacaactggcgggaggatgagctcaataatcgccgtctggacgccattctggcggtcagccatcaccgaattcagcgtttcgagcagggtttcctgctgcgcgggctggatattgaagtgacgctcgacggtagcggatttaccggtgcgggcgatgtccacctgtttggcgatatgctcaaccgctttttcgcactgtatgccgatatgaatcagttcaaccagctgacgctcattgttcaacctgaagggaaatgtatccggtggaaagagaatcacagtctgcgcctgcccggctga

SEQ ID NO: 216884 - DNA, 3411 bp, Klebsiella pneumoniae
atgaatataccgggtaatggcctgggccggtttggcctggccgggcttacgttggccgggatggctgcaatatggtgggggatcacccgctatggcggcatgctgaatatcaatacgcggggcgagcaggtactggtgtttgtcctggtctgtctggcgttggtatttgttttttaccttcctgcaatgtcccgccgtgtgaaggagagtttatatcgccggcagtcgcagcaggccagcgtcttacccggcgaagaagggcgcgtggcgctgacacctccccatcatattacggtgggggaaattcgccagactctacgctatcagtatggacgcgcctggtcccgcaaagtccgtattctgctgataattggctcagtcagagacgtagaacaactgatcccaaagctcacgcaggaactctggcaggaagatcaaggtacattattgctgtggggtggagaccctggggcagcggtagataacgcctggttcacagcgctgcgtaaactgcgttatcgcccggctgatggtatggtgtggataacatcgggctttgacggcgttttgacaacgatgaacagaacgaagcccaggctcacgccagatgaaatggacagtgtgtctcactctctaaagctacgcttcgaagctattggctggaaactacccctatacgtctggtcgctgtatgaggggggcaacgaaaaaaatggacgtatcactcagcctgtaggctgcctgttacctgcaggttgtacgccgcaaatagttgccgaacagttcactgccctggcgtcgttactgatagagcagggcatccagcagatatgcgggcaaccacagcacaattttttactcgcgctggccgaccagttgacccgtaaaccggaaacggtggtggaaccgttatcgatactgcttaatccataccgaccattgccgctggccggggtggtatttagtgaggcgtcagtagaggctggtcgcagtgtccgtcatcactggggacgggataaccgctgggaaacgataccagactcagtgctgtggttgccagccggtctacgtccgcgcaaacagggagtcaactggatgcgtgggatgagcgtggccgccgccgccctgatgttactctgggccgcctcaatgacagtctcttttatcgccaaccgccacctggtggcgatcgcacaggagcaggtgcggctggcctcagcggagaaacagccgctggccgtacgcctgcatgcgctctccgcgttacagaaaacgctttctcaactggaataccgctcgcagcacggcgcgccgtggtacctccgcgctggcctcagtcagaacgatgacctgctggcggcgctgtttccgcgctacggggagatggcgcaaccgctgctgcgcgatgcggcggcgcatcatctggaagagcagctcaccgccttcgtgcagctgccgccggacagcccactgcgtgagaagatgacgaagaccgcttacggacaactgaaacaatatctgatgttgacccgcccggaaaaaatggacgccgcgtggttcgccaccacgctaatgcaggactggtcgcagcgctcaggcatcgccgacgccgtctggcagggcagcggcccttcgctgctggcattttatgccgccagcctggcatcgcatccgcagtggcgtctgcctgtcgatgacggtctggtcagccaggtgcgcacacggttaattcgccaactgggccagcgcaacagtgagtccacgctttaccagaagatgctcgcgcaggtggcgaatcagtatgccgatatgcgcctggcggatatgactgccgacaccgatgcttcgcgtctgttcagcactgatgaggtggtgccgggcatgtttacccgtcaggcctgggagcaggccgtgcagccggccattgagaaagtggtcgcggaacgccgcgatgaaatggactgggtgttgagcgatacgaagcagactgccgcgcagtcgacgtcgccggaagctctgcgagccaggctggcggagcgttatttcgctgattttagcggcgcctggctggatttcctcaacagtctgcgctggcagcgcgcggcgaccctctccgatgctatcgaccagctgaccctgatggccgatgtgcgccagtcgccgctggtggcgctgatgaacaccctgagcgtgcaggggcgaaccggccagaccggggaagccatcgccgattcgctggtcaaatcggccaggcagctgtttaaccgtgataactcgcccgtcatcgatcaacggtccggcgcgcgcggtcctctggatgccaccttcgggcccgtactggcgctgctggacaatcgcgacggcgggacacccaccagccgtcttagcctgcagaccttcctgacccgcgtcacccaggtgcgtctgcgcctgcagcaggtcaccaacgccaccgatccgcaggcgatgacccggttgcttgcgcagacagtattccagggcaaggccgtggatttaaccgaaacgcgcgactacggcagcctggtggcggcggggctgggccaggagtggagtggatttgggcagacgctgtttgttcgcccgatggaacaggcctggcagcaggtgctgaccccggcggcggaaagcctcaacgcccagtggcgcagcgcagtggtggaggactggaatagcgcttttggcggtcgctacccctttaaaaataccagcagtgaagtctctctgccgctgctggcaaaatacctcaacagcgagaccgggcgcatcgcccgctttctgcagacccggctgaacggcgtgctgcataaagaggggagccgctggatggcggacagtatcaatgctcaggggctgacgtttaacccggcctttctgcaggcgatgaataccctgagccatctctccgacgtcgcgttcgccaacggcgaagcgggattgcattttgcgctacgtcccggcacggcggacggcgtgatgcagacggagctggtcatcgacagtcagaaacttgtctatatgaaccagatgccggtctggcggcggttcagctggcccgccgacaccgaagcgccgggcgccagtctgagctgggtcagtacccgggcgggcacccgccagtatggcgatttcccgggcgcctgggggtggatccgtctgctggataaggcggtggtcagcgcttatcccggaacgagcagcagctggagcctgagctggaaagcgccggatggtctgttgctgaactacacgctgcgtaccgaggcgggggaaggaccgctggcgctgctggcgctgcgaaactttacgctaccggagacgatattcagcgtgcgcgcgtctgctgaacgtgttccgctgaccgacgatatacccggcgaagagggatactga

SEQ ID NO: 216885 - DNA, 1158 bp, Klebsiella pneumoniae
atgggctgggtacgaacaaaagcattgaccatggagcagccatcggctccttcactgacccgatggctgtttgccggtgtactgatggcgattatcggtgtcctgctctttatcctccatgcctccggcaccgtaaaaattatctcagtgataaatatctggtgggtatccctgatgcctgcaggatgctggttgctgattttttgcctgcgttgctacctgtgggacagggatctgaaagcgcatcagttcttgctgaaagaggcggaatacggacagcagaggtgggaagactgggccgggcgctggctggccgttctgagcagtgcagtgctgttgccggatcatatttctgcggcgcattgggggagtgagcggcctcagcaatacggacttgcccgcaggattaattaccttccggcagaagagcccgtgcagttgagtgcgatgcatgcgctgctgaccagtatagaagagcgcgtgcagtgcctgccggaagagctaccgctgtatgtcaccctgatcacggataatccctcgcctgagctgaccagcagtttcagtaatctctggaaagaacacattcctggccgcgccgtgcctgatgatattaccgttaccggctcattctcactgtcggaagtggaggagcgcctgaagcagcctgtactgacggtcaatttactcctggtcatccagctcaacggtggtacagcatactccgacgggctggccgtgctgctgctgaccagcgatgatgtggcgcaaaaataccatctgccgcactcatcacggctgttacgtcctatgcccttagatatgacgaactttgaagacgatatcaccctgtttctggaaacccagactgtcgcctgccatacgccctccgttatcggggacgcaaaaaaatggacggaaagaagcgccgcgcttatcacgcagggcggcaaaatgcataccccatggaaagctgaagatatcgcgctgctggaaaaatggtgcggtattccgggacccgcagcgccctggctcctgaccgcgctggcagccgatctggtcagcctccgtaaacagcccctgctggcgttattttccagcgaacaggaacattttatcagtaccatcaccccagggagtgaagatgaatataccgggtaa

SEQ ID NO: 216886 - DNA, 264 bp, Klebsiella pneumoniae
atgagaaaattaatcgtagttgctactgttgccgccagtttactgctcgggtgcgaccagaagagtactggcaagcgtgaaaccttgtctgaagcgcttgttgctaagtcgctttctaacatggttcccgttaagggcggcgagttcttaatgggggatttcggcccattagtcggtgaaaaactgcctttcagcaaaaaccaggatgataaggtattacataaggttgtattcctatgccgtttggtctggaacgagttatga

SEQ ID NO: 216887 - DNA, 894 bp, Klebsiella pneumoniae
atgagaaaattaatcgtagttgcttctgttgccgccagtttactgctcgggtgcgaccagaagagtactgacaagcgtgaaaccttgtctgaaacgcttgttgctaagtcgctttctaacatggttcccgttaagggcggcgagttcttaatgggggatttcggcccattagtcggtgaaaaactgcctttcagcataaaccaggatgataaggtattacataaggttgtattaagcgatttttcgatatcaaagtttaaagttaccaacgatgattataataaatatctgcagataacaggaataaaaaaacctcccattaatattctggtaaaagagtacccatccttgcaaaaaggtgattactctgttggtgttacctggcaacaggcaaaagactattgtcagtggctaggtaaggagtccgatagaaatattgatttaccgacagaagcacaatgggaatatgcggcaaggtccagagggcaatacattccgtttgcaacgaataatggtgagttcctgcccggtaaaaacatccccagccaggatgagctgagtgaatatactgatggagcaggtattcctatttatccagtggggaaatatcccccaaaccccctgggtctgtatgacatgggacttagtggctctgaatggaccaatgactggtatgcgtcagattattactctcattctccggtaaacgatcctcagggacccgtaaaggggaccgaaaaagtcctgcgcgggaatgttggcggtgacagacaatacgctttaaccgtgttcagacaatcagatttgccagttccaaagatcaataaagacgatgactatgaaaaatatggtgttggtccgcagtatgttttccgttgcgtcatcaataaataa

SEQ ID NO: 216888 - DNA, 894 bp, Klebsiella pneumoniae
atgagaaaattaatcgtagttgcttccgttgcagccggtttactgaccgggtgcgaccagaagagtactggcaagcgtgaaaccctgtctgaagcgcttgttgctaagtcgctttctaacatggttcccgttaagggcggcgagttcttaatgggggattttggcccattagtcggtcaaaaactacctttcagcataaaccaggatgataaggtattacataaggttgtattaagtgatttttcgatatcaaagtttaaagttaccaacgatgattataataaatatctgcaaataacaggggtaaaaaaatcacccatccatatttttttaaaaaattatccatccttgcaaaaaggagattattctgttggtgttacctggcaacaggcaaaagactattgtcagtggttaggtaaggggtctggtaaaaagattgatttaccaacagaggcgcaatgggaatatgcagcaagatccagaggtcaatactttcagtttccaacaaataatggtgagtatttacctggaaaaaatgttccgggtaaagatgaattagataaatatacagatggttttggtttcccattttatccagtaggcaaatatcccccaaaccccctgggtctgtatgatatggggctcagtggctctgaatggactaatgactggtatgcagcagattattactctcattcaccggtaaacgatccccagggacctgcgcagggtactaaaaaagtcctgcgtggatatattggtggcgacagacagtacgctttaaccatgttcaggcaatcaaaattgccagttccgaagatcgataaagacgatgactatgaaaaatatggtgttggtccgcagtatgtatttcgttgtgtcgttaataaataa

SEQ ID NO: 216889 - DNA, 891 bp, Klebsiella pneumoniae
atgagaaaattaatcgtagttgcttccgttgctgctggtttactgacagggtgcgatcagggaaataccaccgggagtgaaaaagcagctaaagcacttgtggataaatcggtctctaatatggtccccgttcagggtggtgagtttttaatgggtgattttggtccattagttggtgaaaaattacctttcagcatacaacaggatgataaaaatttacataaggttattttaagtgatttttcgatatcaaaatataaagtcactaacgatgattttaatgtttatttgaaagtaacagataaaaaaaatccacctgtggatatactggcaaaacgtcatccttctctgctaaagggggattatcctgcaggtgttatctggcaacaggcaaaagattattgtcagtggttaggtataaaatccggtaaaaaaattgatttgccgacagaggcacaatgggagtttgcagcaagatccagaggtcagtatcttccgtttgctactaacaatggtgagttttcaccaggaaaaaatgtcccaagccaggatgaactgaataaatacactgacgggatggggcttcccatttatccagtaggtaaatacccatcaaatcccttagggctgtatgatatgggattgagtggttcagaatggaccaatgactggtatgcagcagattattactccaactctccggtaaagaatcctcagggaccagagcaagggaccgagaaagtgttgcgtgggaatgttggcggcgacagacagtacgcattgactatgtttagacaatctgcttcaccactcccagaagaagttgatggtgactatgaaaaatatggtgttggtccgcagtatgttttccgttgcgtcatcaataaataa

SEQ ID NO: 216890 - DNA, 2262 bp, Klebsiella pneumoniae
atggctaccggagaagagaaaagtaaaacatcggtacaagggacgggaacggttgtaaaaggaaaatatggcccagaatgttattttcacccaggtagcgcaacattgctttttctggaggcttcagatactaaaattatcgaacaggagcatgattttctgtctggcttgcttgaaactcagaaacaggcgcaaaaaaatcttgatgatattaattttgaagcaatcactcaggcaggcagagtgccagcaagaaaatttgaaagtgaaatcactaaagcctatgaagctttaaacaaagcaaatcaggctttgcggaaagagcttatgtcactaacagcgaatcctccggagggggaattgcttaatgataaaatgaaagatactgccgttggtataatggaacttattccgcttaaaaataacacagtgaaaggattcaagaaaacttatgtgcgttccgataaaataaaacaccagtggcgaacatataagctcagcgaagttgataaaaaaagtggtgaagctagtttcataaaatataaaaacaaaactattgtttctcaggatgcgaatggtaatcaggttaataaaaccatacgtcagggaaaaatagatacagcagaactaaaaaaacaactaagtaacgtacctgtttcactgaaattcgatcttgttgacgatacgaatgttattgtcagtcactgggcagaggaaatgaacaaatctctgacctggccaaagggggatggtaaagtcgatgaatctgtttatcaccagtatgttgatatcagcgcgcaggctcaactgatgcgctacagccatggagcgggtgcatcagcggaatataatccgtcagaaaaaaaactggagggaaaaattgaaggtcatgccagttttgcactgggggaggcgaaggccgaaacggccctgtacctgccggacaggttaggtgtcagccttttatttccggcgaaaaaagtgactccacagataccggatggtgtctgtaatatgggagcgctgcgttttgccatgaaactggtattgtcaggtagcgttggtgccagtgctgcaattgaattaggggtgacagcagactggagtggagaaatgggaaagggctatggcattaaaggccgtcctgcaaccctgactgccccaccgttaccaggacagcagcaggtgaatttaaagacctcaacaatacctgaagcacaggggggaggtgaaattggtgtttttgttggtgctcaggcgggaggtaatatcagtggtgccattgagtggtttgacccgcatcctgatgatacgccagtagctataggtgttgaaaaagataacaaaccccttgtcaataaagagaagaagtttgccgcgatagccaaactggaagcggggatgacggtgcaggcaggcgctgggggaagtggggttttttatatcacctatattcagggacgttttcgtatttactgtaaagcggctttatgttggggagtgggagccaaaggggaagtcggttttgaagttgatggcagcagttttgcggcttttatgaagagttttatgtttatgctaaggaatgtggattatcagaagcttgagcagatgatggcaggggatgcctttcgatctttatgcgcaattcctattattatggctgcacagggtgtacaggcagcggaagctatgcttgatgatatgcttgcagtgttacaacgtatccaaaccgacatcttggatgaaaataaacgagtctatttaatgaatagtattttatctaatcctgatcagcttaagtatacccccccggaaacaaaaggggcagtaattgccacattaattgatcagaactgggcggactggtttgaccctcgcaatcagaataatgattttttttccgttaacagctggaagctcggtcctctaaagaggcgaaaacaagcggtgtttatggcgctgaagtggatacaaagtcaggcagattataacaatgtcatgcagcatttgacgttgtcgccaggggagaagaaaggtaataaagaactgaatgaaaaagatgtgattaactttttaggtatcggggaacaaaaattgtttttttacaccaattatggcgaaaagctcaccttactgcataataacctcccggtttttgttgacccggatgagccatttaaacccatacctgacatcctgatgtcagaatatcttgccatgatcgacgaccagcacccgacgggtacaatgactgcctga

SEQ ID NO: 216891 - DNA, 1209 bp, Klebsiella pneumoniae; identical to SEQ ID NO: 19673

SEQ ID NO: 216892 - DNA, 900 bp, Klebsiella pneumoniae
atgcccgtaaattttgacttcaacgatctctacgcctttcgcgccctgatggaatatggcagttttcggctggcggccgaatccatctgcctgtcgcagtcggcccttagccgacgcatcgaaaagctggagacggcgctgggcaaccggctgttcgatcgcaccacccgacgggtgaccctcacgctgtatgggcaaaattttgccgaacgttcggagcacctgctggcccatgtcgagacggtgctggcagatatcagccaggtcagcaaggcgcgcaccgggctggtgacggtggcgacagtgccctccgccgcctactactttatgccggaaatcatccgcagctttcaggcgcgttatccccaggtgcgcatccggttgattgacagcagcgtcgggaatgtgatcgaggcggtcagcagcggacaggctgactttggcctctgctttgccaaaaacctgccagccagtatcgaattcacccctcttgccgacgaccgctatgtggccgcctgtcggcacgatcatccgctggcgcgcaagacgcacctaagctggcaggcgtattttgaacaggattatattggcctggatcgggtctccggcaaccggacgctgcttgaccgggagctggcgcatctgacgccggcgcggccaagtatctgcgaaacccgccacgtcaccacgatgctggggatggtggaagcgggcatcggcattgccgccgtgcccgcgatgtcgatgcccgccggggagcattccgttctccgcgctgtgccgctcaccgacccggtggtcacgcgtacggtaggcctgatccgcctcagcggccgtattcagtcctacgtggcggcagagctggagaagctgattattgaacagtatccttctggctga

SEQ ID NO: 216893 - DNA, 1296 bp, Klebsiella pneumoniae
atgcattcaacaacctcacagatgagtacccgtgaccggatcggcgccattctgcgcgtcacgtccggtaactttctcgaacagttcgactttttcctgttcgggttttatgccacctacatcgcccataccttttttccggcgagcagtgaattcgcctcgctgatgatgaccttcgcggtctttggcgccggctttttgatgcgccccatcggcgctatcgtacttggcgcctatatcgacaaggtggggcggcgcaaggggctgatcgtcaccctgtcgatcatggccaccggcacctttctgatcgtgctgatcccctcttatcagaccattggcctgtgggcgccgctgctggtgctgatcggccgtctgctgcagggcttttccgccggcgccgagctgggcggggtgtcggtctatctggccgagatcgccaccccgggccgcaaaggcttttacaccagctggcagtcgggcagtcagcaggttgccatcatggtggcagccgcgatgggctttgccctcaacgcggtactggagccgagcgctatcagcgactggggctggcgtattccgttccttttcggctgcctgattgttccgttcatttttatcctgcgccgtaagctggaggagacccaggagtttactgcccgccgccatcatctggcgatgcgccaggtattcgccaccctgctggcgaactggcaggtggttatcgccgggatgatgatggtggcgatgaccaccaccgcgttctacctgatcaccgtctatgccccgacctttggtaaaaaggtgctgatgctcagcgcctctgacagcctgctggtcacgctgctggtggcgatttccaacttcttctggctgccggtgggcggggcgctgtccgaccgctttggccgccgatcggtgctgatcgccatgaccctgctggcgctggctaccgcctggcctgcgctgaccatgctggcgaacgccccgagctttttgatgatgctgagcgtgctgctgtggctgtcgtttatctacggcatgtacaacggggcgatgatcccggcgctgaccgaaattatgcccgccgaagtgcgcgtggcaggtttctcgctggcctacagcctggcgaccgcggtgtttggcggcttcacgccggtgatttccacggcgctgattgagtataccggtgataaagcgtctcccggctactggatgagctttgccgccatctgcggtctgctggccacttgctacctctatcgccgtagcgccgttgtgctgcagacggcacgttaa

SEQ ID NO: 216894 - DNA, 1065 bp, Klebsiella pneumoniae
atgagcatggccttttacgcccaggcagacgtgaagattggcgtcgccgggccctttaccggacccaacgccacctacggcgcccagtactggaagggggcctcgcaggcggtggccgatatcaatgccgccggcggcatcaaaggcgaaaagattgtgctggtgcagggggatgacgcgtgcgaaccgaagcaggcggtggcggtggccaaccggctggtggatgaagcgaaagtctccgccgtggtggggcacttttgctcttcctcaacgatgccggcctccgaggtatatgacgaagccgggatcctgaccattacccccggctcgaccaacccgcagatcaccgagcgcggcatgaaagatctcttccgcatgtgtggtcgtgacgatcagcagggggcgatcgccgccaactatatgctggacgtgctgaaggcgaagaaaatcgccgtcatccacgataaagacacctatggtcaggggctggccgatgccacccgcgcggcgctggcgaagcggggtaccaaagaagtgttgtacgaaggcctttcccgcggtgaaaaagactttaacgccctggtgaccaagatcggcgccctcaagccggacgtggtctactttggcggctgccatccggaagcgggcccgctggtgcgccagatgcgcgagcagggggtgcaggccaaattcttctccggcgactgtatcgtcaccgaggagctggtcacggccgccggcgggccgcagttcaccaacggcgtgctgatgacctttggtcaggatccgcgcaccctcccggacggcaaagcggtgatcgagaagttccgcgccagcggctttgagccggaaggttataccctctacgcctacgcctctattcaggctatcgccgcggcctggaacgccgtcggtaccgataacgccaaagccagcgactggctgaagagccacgacgtcgagacggtgatgggcaagaaagcctgggatggcaaaggcgacctcaaggtgtccgactacgtggtctatcagtgggacgacaagggcaaatatcaccagctctga

SEQ ID NO: 216895 - DNA, 858 bp, Klebsiella pneumoniae
atgaataatgaaaatacgtatggctacgtatatatactggtatcagataaaacaccgtatattaaaattggtggcacggattatttgccagagaagcggtgtaaggagattaatacccagccaccctattgtttatatgccccatggcgggtagcagactaccgtagcgtacctgactggcataatgtcgaaacctggctgcactatctttttcgcgattctcgcgtgcggactattgcaaatcagaaagagctatttaatgtcacgcctgaactggctgcccatcatcttgccagccttgatcaacaaccgttgacgactaaacctaaaatcgaccgactttttcatcaccaggggttgagagattacctggtaaaactattcgctatcgccggttgtgagaaatggcgacataaagaaggggtttgggtgtttagtctattcccaggggcgcatagcggatggtcccggtattttacgcttagtatccatagccacgaagtcgctttttcaacgcggtcccgcgattgtcaaattcatatgttattagcagatgagcttatcatggactatcccgatattgttcagtgggtaacggaccataaaggagggtttgaaaaacctatttataaaacagccttatcgcacgcgcagcaaatctggtttgagggtgagtttgaagtgggtcttcagttactctcgttccctgaagtccagcaggctgttgccacctactgggaccgcgcattaacaaaatacgattatagtcttcaggcgaagtatcataaccggatggcagttgaggagatcttcaaacagttacaagtacaacggcagcgagaatcgagcgcaatgtaa

SEQ ID NO: 216896 - DNA, 1383 bp, Klebsiella pneumoniae; identical to SEQ ID NO: 209913

SEQ ID NO: 216897 - DNA, 1272 bp, Klebsiella pneumoniae
atgaaagacattatcactcgccataagtcaggcgaacatatcggcatctgttcagtatgttcggcgcatccgctggttatcgaagcggcgttacgtttcgacctgtcgaccaacaataaggtgctgatcgaagcgacgtccaaccaggtgaatcagtttggtggctacaccggcatgcagccggccgatttccgcgacttcgtctacaacatcgcgcgtaccgtcggttttccggcggagcgcattattcttggcggcgaccatcttggaccgaactgctggcaagacgaaccggccgccgtggcgatggaaaaatcaatcgacctgatcaaagcctacgtcgccgccggctttagtaaaatccatctcgatgcatcaatgtcctgtgctgacgatccggtgccgctggatcctggtgtggttgctgagcgcgccgctcgcctgtgtcaggctgccgaggagaccgccagcgatgagcaaaagcgccacctgacctacgtcatcgggaccgaagttccggttcccggcggcgaggccagcaccatcggcagcgtacatgtcacccgggcgcaggatgccgccgcgacgctcgaaacccatgaagccgccttccgtaagctggggctcgacgccgcgctggagcgagttatcgccatcgtcgtgcagcccggcgtggagttcgaccatacgcaaatcattcattaccagccgcaggaagcgaaagcgctctccgcctggatcgaaagcaccccgatggtctacgaagcgcactctaccgactaccaaacccgccaggcttatcgtgcgctggtccgcgaccacttcgccattctgaaagtcggcccggcgctcacctttgccctgcgtgaagccatctttgccctcgcccaaatggaaaatgagctgatcgccccggagtctcgcagtcgcgtgatggaggtgatcgacgaagtgatgcttaacgaacccggctactggaaaaaatactatcgccccacctggagccaggcgatggtcgatatccacttcagcctttccgaccgtatccgttattactggccgcatccgcgtattcgccaaagcgttgagaaacttatcgctaatctgaccgacgctaagctaccgctggggcttatcagccagtatatgccggtgcagtttgaacgactgtcgctgaatgaactgaacgccgagccgcacgcgctgatcctcgacaaaatccaggatgtcctgcgtgcctatcgctacggctgttcttctgaaaccgcgtga

SEQ ID NO: 216898 - DNA, 390 bp, Klebsiella pneumoniae; identical to SEQ ID NO: 211603

SEQ ID NO: 216899 - DNA, 1203 bp, Klebsiella pneumoniae; identical to SEQ ID NO: 211606

SEQ ID NO: 216900 - DNA, 657 bp, Klebsiella pneumoniae; identical to SEQ ID NO: 211607

SEQ ID NO: 216901 - DNA, 1326 bp, Klebsiella pneumoniae
atgaagaaattacttgaattacgccagcagaaagccgcactcaaaacccagatgcgttccatgctggaaaaagctgacagcgaaaagcgaagcctgaacgatgaagagggcaagcagttcgatgaactccgcgcccaggctgatgcgcttgagtttctggcgatggcagggattccaaataccggatcaggcgaatatgtgtctgccggtactgcggaatccctgccggcggtgatgaatgccgtgtcagttatcagtgaggcagtggcaacaatgccctgctatctctaccgcgtgcacaacgataacgggcgagaagcgcgagagtggttgagtaatcatccggtagattttctcctgaatgagcaacctaacgattgccagacgccttaccagttcaagcgcacgatgatgcgccattgtctgctgaacggtaacgcctatgcggtgatccagtggggccgcgacggtcagccggaatccctgcatccgtatgcgccgggggaggttgttcctgagcgtatcggccagcataagtacaaatacactgttactgagccgtttaccggggcagtgcgcacctacttgcaggaagagattctgcacctgcgttactcgaccgatgatggttttctggggcgctcgccgatcaccatctgccgtgaagcgctggggttaggtctggcccagcagcgccacggtgccagcattatgaaagatggcatgatggcggcgggcgtagtcactactgctgaatggctcgatagtgtgaagggtaagcaggcgctggacgcgcttgagcgctacaaaggtgccagaaatgccggtaaaacaccgatccttgaaggtggcatggactataagcagcttggcatgagcaatcaggatgctgagtggctggcctcccggcgcttcaccatcgaagatattgcccgcatgtttaacgtttctcccatcttcctgcaggaatacagcaacagcacctacagcaattttagtgaggcgagccgcgcctttcttaccatgacaatgcgcccgtggctggcgaactttgagcagcagattaaatccgcgttgctggtggcatcgcctgtacccggaattcgttatcaggtggagttcgactctgccgatcttcttcgagccactccaaccgaacgttacgcaacttatgagcgcggtatcaagaacgggatcatgaacccgaacgaagcccgcgaacgcgaagggatgccgccgcgtgaagggggcgacgaatacagccaggcatggaagcaggaagtgaaggtcagtaccggttctgagaataaggaggatgcgtcatga

SEQ ID NO: 216902 - DNA, 1002 bp, Klebsiella pneumoniae; identical to SEQ ID NO: 209910

SEQ ID NO: 216903 - DNA, 402 bp, Klebsiella pneumoniae
atgagcggccaggcgattcagcaggcgctggaatccattcagttcgaccagttagtcctcgagaccgccggtacgccgcagaccgtcgcgctggcgattgaggccgccggtccgcgggcgcagctggcgttggttggcacgcttcatcacgatttaaccctcctggcagccaccttcgggcagattctgcgtaaggagttgaatattgtgggtagctggatgaactactctggcccgtggccgggagaagagtggcaaacggccacccgtctgctgactgaaaaacgcctgcagctggcgccgctgatcgcccatcgtggcgacgcagaaagcttcgctcgtgcagtgcaggcgctcaacggcgcgccaatgcaaggcaaaatcctgctcaaactctcttga

SEQ ID NO: 216904 - DNA, 1158 bp, Klebsiella pneumoniae
atggagagaaatgtcacgctggactttgtccgcggcgtcgccatcctcggtatcctgcttctcaatatcagcgccttcggcttgccgaaggccgcttatctcaatcccgcctggtcaggaagcgcgtcccttagcgatgcctggacctgggcgctcctcgacctgctggcgcaggtgaagtttctcaccctgttcgcgctgctgtttggcgccggtcttcagctattgcttccgcgagggaagcgctggatccagtcgcggctgacgctgctggcgctgctcggtttcattcacggtctttttttctgggatggcgatattctgctggcctatgccctggtggggctggtgagctggcgcatggtgcgtgaggcgcaccatgtcaaatcgctgtttaacaccggggtggtgctctacctcaccggcattgcggtgctggtcctgttggggatgatctccgggaccgcgacgaatcgctcgtgggcgccggacgcggcgaacctgcaatatgagcagtactggaagctgcacggtggcatggaggcggtcagcaaccgggcggatatgctatctgacaatctgctggcgctgggcgcgcagtatggctggcagctggcggggatgatgctgatgggcgcggcgctgatgcgtagcggctggctgaaggggcagtttagcctgcgtcactaccggcgtaccggcgcgctgctggtggcggccggcatggcggtcaatctgccggcaatattcgcccagtggtatctggcctgggactatcgctggtgcgcgtttttactgcaggcgccgcgcgaacttagcgccccgctgcaggctatcggctatgccgcgctggcctggggctactggccacagctctgccgtttccgcctggtgggcgctatcgcctgcgtcggacgcatggcgctgaccaactacctgctgcagaccctgatctgcaccaccctgttttatcatcttgggctgtttatgcgcttcgatcgtctgcagctgcttgcctttgtcccccccatctgggccgttaacctccttgtctcatcgctctggctgcgccgcttccgccaggggccggtggaatggctgtggcgtcagttaaccctgcgtgcgtcaggcacatcattgaaagacacatccagataa

SEQ ID NO: 216905 - DNA, 1023 bp, Klebsiella pneumoniae
atgatcaccattcgtgatgtcgcccgccaggcgggcgtttccgtggccaccgtgtcgcgggtgctgaataacagcgcgctggtgagtccggatacgcgcgacgtggtgatgaaagcggtgacccaactgggctaccggcccaacgccaacgcccaggcgctggccacccaggtcagcgataccatcggcgtggtggtgatggacgtctccgacgccttcttcggcgcgctggtgaaagcagtggataccgttgctcagcagcatcagaaatatgtgctgatcggcaacagctatcacgaggcggaaaaagagcgtcacgccatcgaggtgctgatccgtcagcgctgctcggcgctgatcgtccattcgaaagcgctgagcgatgatgaactgagcgactttatgcaacatatcccggggatggtgctgatcaaccgcatcgtgccggggtatgcccatcgctgcgtcggactcgacaacgtcagcggcgcgctgatggccacccgtatgctgctcaatcatggtcaccagcgcatcggctatctctcctcaaaccacggcattgaagatgacgatatgcgccgggaagggtggagcaaagcgctgcaggagcaaggcatcatcgccccggacagctggatcggttccggctccccggatatgcagggcggtgaagcggcgatggtcgaactgctggggcgcaatctcggcctcaccgcggtgtttgcctataacgacagcatggcggccggcgcgctgacgacgctgaaggacaacggcattgtcgtgccgcagcatctgtcgctgattggctttgatgatattcctatttcccgttacaccgatcctcagctcaccaccgtgcgctatccggtaatgtcgatggcaaagctggccaccgagctggcgctgctgggggcggccggcaagctggatcgcgaggcgacgcactgctttatgccgacgctggtgcgccgtcattccgttgcccagcggcaaactgtggggccgatcactaactga

SEQ ID NO: 216906 - DNA, 1521 bp, Klebsiella pneumoniae
atggtcagcaataatagcgaacggtcaggcgaatatttgttggagatgagcaacatcaacaaatcgtttcctggcgtcaaggctcttgataatgtcaacctgaaggttcgtccgcactccattcatgcgttaatgggtgagaacggcgccggtaaatcgacattattaaaatgcctttttgggatctatcaaaaagattccggtagcattctttttcagggaaaagagatcgatttccattcggcgaaagaagccctggaaaacggtatttcgatggtgcatcaggaattaaacctggtattacagcgttcggtcatggataacatgtggctcgggcgctatccaactaaaggcatgtttgtcgatcaggacaaaatgtaccgggataccaaggccatttttgatgagctggatattgatatcgatccgcgcgcccgcgtcggtaccttatcggtatctcagatgcagatgattgagatcgcgaaggcgttttcctatgacgccaaaatcgtcatcatggatgagccgacgtcatcgctgacggaaaaagaggtcaaccatctgtttaagatcatccgtaagctgaaagatcgcggctgcggtatcgtctatatctcgcataaaatggaagaaattttccaattgtgcgatgaaataaccatcctgcgcgacggccagtggatcgccacccagccgctggaagggctggatatggataagatcatcgccatgatggtcgggcgttcgcttaaccagcgttttccggatcgcgaaaacactccgggcgaagtgatcctccaggtgcgcaatctcacctcgctgcgccagccctccattcgcgatgtctcctttgacctgcataagggcgaaattctcggtatcgccggcctggtgggcgctaaacgcaccgacatcgtggagaccctgttcggcatccgtgagaaggccagcggcaccatcacgctgcacggcaagaagatcaacaaccacagcgccaacgaggcgataaaccacggttttgcgctggtgaccgaggagcggcgctctaccgggatttacgcctatctggatatcgggtttaactcgctgatctccaatattaagaaatataaaaacagcgtcggcttgctggataactcgcgaatgaagagcgatacccaatgggttattgactcgatgcgcgtcaaaacccccggtcagcatacgcagattggctcgctttccggtggtaaccagcaaaaggtcattataggccgctggctgctgacccagccggagatcctgatgctggatgagccaacgcgcggtatcgacgtcggcgccaagtttgaaatctatcagctgattgccgaactggctaaaaaagacaaagggatcattattatttcttccgaaatgccggaactgctggggattaccgaccgcattctggtgatgagcaacggcctggtcgcgggcattgttgagactaaaaccaccacgcaaaacgaaatactgcgtcttgcgtcattgcacctttaa

SEQ ID NO: 216907 - DNA, 2163 bp, Klebsiella pneumoniae
atgtctccagttacaaacaaatctgtcgtgaaagatgccgatgagattgatttaggccgtttagttggtgagctaatagaccatagaaagcttattatttctgttacagcattattcactctcattgcactaatatatgcgcttttcgcgacaccgatctatcaagctgatgccttgattcaggttgagcaaaaacagggtaatgctatactcagcaatcttagccagatgctaccagatagccaaccgagctcggcaccggaaataacattattgcagtctcgaatgatcttaggtaaaacagtaagtgacctaaatcttcaagctcggattactcagaattattttcctgtgtttggaaaaggttggtctcgattattgggggaaaagcctggttttattaatatttcaagattgtatatagcagaagaggggagtgatacaccagagatagtacttattgttgaagataaatttaattatataattaaatacaatgacaagaaactagaggggaaaattggagaactacttgaggcaaatggtctctctattaaggttgattctatagaagcagagccaggaactgagtttacagtttcgttcgttagcaaactgaaagctatcactgatttacaaaaagtatttacagttgctgatgaaggtaaagatacaggaatgctttctctatcacttactggtgataatgcagatttaattgtaaagatcgtcgacagcattagtaataactatttggctcagaatattgctcgtcaagcggcacaagatgctaagagtttagattttctaaacctccagctaccaaaagtaagagcagatctagatatagcggaagacaaacttaatcaatatcgtcgtcaaaaagattcggtcgatttatcattagaagccaaatcggtactggagcaaattgtaaatgttgataatcaacttaatgaattaacattccgtgagtctgaaatatctcaactgtatactaaagaacatcctacctataaagcgttaatggaaaagcggaaaactttacaagatgaaaaggaaaagcttaacgaacgagtttctgctatgcctaaaacacaacaagatattttgcgacttagtcgagatgtggattcgggccaagcagtatatatgcaactcctgaatcgtcaacaggaattaagcattgcaaaatccagcgctattggtaatgtgagaataattgataatgcagtagctcagccgaaacctgttaaaccaaagaaaatactaatcctactagttggtatagcattaggtattatcacctcatttggtatagtacttatgcgtgtatttttgcggcgtggaattgaaagtcctgaacaacttgaagagttaggaattaatgtgtatgcaagtattccagtgtcagaaacttttgcaaagaaaatggttcaggtaccaagttggagaaaaaaaagaaatgaagaatttcagggatttcttgcaatagaaaatcctgctgacttagctatagaggctattcgcggattacgcaccagtttacatttcgcaatgatggaagctcggaataatgtattaatgatttcaggtgcaagtcctaatgcgggaaaaacatttgttagtacaaacttggctgcagttattgcacaaacgggtaaaaaagttctcctcgttgatacggatatgaggaaaggttatacccataagttatttagtgtttcaaatgaaaatggcttgtctgatttcttatctggaaaagtagaactgtctaaaacagtaaagaatatttcgcaggtagattttgattttatttcacgaggcatttctccaccgaaccctgcagaactacttatgcaccgtagatttggagaactaataacctgggcgagtcagaattatgatatcgttattctcgatactcctccgatcctggcagtaactgatgctgcgattattggccactatactggaacaacgcttttaatagctcggtttgaacagaatacggctaaagaactagaggtgagtgtcaaaaggttcgagcaaagtggagtaattgttaaaggttgtattctcaatggggttgtgaaaaaagcgagcagttattacggctatggttatagccactatggttattcatataccgacgataaataa

SEQ ID NO: 216908 - DNA, 912 bp, Klebsiella pneumoniae
atgaaatactatatagcaataccaacatataacggtggcgaaatatggaagacagcagtggacaatataaaaaaatatgcgccacctggtttgtttgttcatgttattgactcaaccagcaaagatgatactgttctcattgctgacaaggctggtttcaatgttgttacaattgcaggcagtgatttcaatcatggaggtacgagaaataaagcagttgaagaattcattgatcgctacgatgtggttatttttttgactcaagatgctattcctcaaccaaatttcattgagaaaataacatcagtttttgttgacgatagaatagcttgtgcctatggtcgacagttgccacatacgaatgctaacccactggcaaaacatgccagaagttttagctatcccgagaagggatatatttgcggtaaagaaaatattccacaaatgggattgaaaactgtttttatgtcaaattcgttttctgcttatcgattgtcaacatttaaacaattgggaggattcccttcgaatacaattctctgtgaagatatgtttttcacggcaaaagcagtactagctggttataaggttgcatatgttgctgaagcaatggtcgaacattcacataattatactcctttagaagaattcaaacgctattttgatattggtgtatttcacaaagatgaaccatggattcgtaaaagtatgggcggtgcaggcggtgaaggaaaaaaattcataatttcagaaattatttttttgttgaaaaaagcacccatctggttacctgttgcatgcattaataattttatgaaaatactaggatataaactagggctacgatatgaaaagatacctaaaaaattgattaaatcctttagtatgcataagcgttattgggatttttaa

SEQ ID NO: 216909 - DNA, 1065 bp, Klebsiella pneumoniae
atgaaaataattgtaactggtggtgctggctttattggatctgcggtagtccgtcatataatcagggatactcaagacgaagtggtggtggtcgatagtttaacttacgcaggtaatttagaatcgttaaatgaagttgcagacaactctcgcttttattttgagaaggtaaatatctgtgacagattagaattggaccgagtttttaatgagcaccaacctgatgcggtaatgcatttggctgctgaaagccatgttgaccgttcaattgatggcccggctgaatttattgaaaccaatatcatcgggacttatacgatgcttgaggcagcacgtacgtattggaatcagttggataacaaaggaaaacaaagttttcgttttcatcatatctcaaccgatgaagtatatggagatcttcacggaacagatgatctgtttactgaaacgactccttactctcctagcagtccttattcagcctctaaagcgtcgagcgatcatctagttcgtgcatggttaagaacatatgggcttccaacaattgttaccaactgttctaataattatgggccgtaccattttccggaaaaactgatacctttgatcatactaaacgcattagaaggtaagccgttaccggtgtatggtgatgggggccagatccgtgattggctatatgttgaggatcacgcccgtgcattgtataaagttgtaaccgaaggtgtagttggtgaaacatataatattggtgggcataacgaacgtaaaaatattgatgtcgtaaagacaatatgtatgttacttgaagaacttgttccaactaaacctgctggtgtcgcacaatatgctgatttgattacttatgtaactgaccgcccaggtcatgatatgcgctatgcaattgatgctaataaaatttataatgagttaggatggaaaccacaggaaacatttgaaactggaattcgtaaaactgtagagtggtatttggctaacgaaaaatggtggagtcgtgtcaaggatggttcatatgctggtgaacgcttaggtctatctcattaa

SEQ ID NO: 216910 - DNA, 903 bp, Klebsiella pneumoniae
  misc_feature (705)..(714): n is a, c, g, or t
atgaaaggtattgttcttgcaggtggttctggtactcgtctttatcctatcacaaaaggaacctctaaacagcttttgcccatttatgataagcctatggtgtattacccaatttctgtattaatgttagcaggcattcgcgatatattaataatttcgacaccggatgatatgccaggcttccaacgcttgctcggtgatggaagtcaatttggtgtgaaatttagttatgcaattcagccaagtcctgatggactcgctcaagcctttctaatcggtgaagagtttattggtggcgatagttgtgcgttagttcttggtgataatatttactttggcgaaagttttggacgtaagttagaaactgttgtgcaacgcagtgaaggtgcaacagtgtttggctaccaagtaatggacccagaacgttttggtgttgtagagttcgatgataataatcgtgccgtatctcttgaagagaaaccttctagcccaaaatcgaactgggcagttacgggcctttatttctacgataataaagttgtagatatggcaaaaaaagttaaaccttccacccgtggcgagctagagattaccacactaaatgaaatgtaccttaaacacgggaatttgcatgttgaaaagttaggtcgtggtttcgcttggttagatacggcacgattattatcatcgaactctacaacaccnnnnnnnnnncgtcccaatttattcatacaattgaacagcgtcaaggttttaaagttgcttgcctcgaagaaattgcttaccgtaaaggttggcttactaaagatcaagttttatcgcaggctaaaatattatcaaaaacacaatatggccaatatcttcaaatgcttgttgaggagcaataatcatgcaggttattga

SEQ ID NO: 216911 - DNA, 558 bp, Klebsiella pneumoniae
atgcaggttattgataccaagatttctgatgttaaaattattcaacccaaaatctttggtgattctagaggtttttttcttgaaacatttgagaaaaaacgttatcaggaaatgttgaatattgactatgatttcgtccaagacaatcactcgcgttcgacaaaaggggtactacgtggacttcatttccaaacaaaacatgctcaaggtaaattagtacgtgttgtccgaggggttgtctttgatgtggcggtagatattaggcctgaatcaccaacctatggtcaatgggagggcttaattctatctgaagaaaataaaactcagttctggatccccccaggactggcacatggttttgttgtcctatcagaaattgctgattttgaatacaaatgtaccgattattatacacctggatatgaaggttgtttggcatgggatgatagtgatgttaatataaaatggccgattgattttactccaatactatcagataaagataaaaaagggctgaatctaaaagatctatcgaaagtattaggtgagcttaagtaa

SEQ ID NO: 216912 - DNA, 1179 bp, Klebsiella pneumoniae
atgactgtattaggcaccgcgctgcgcccggcagccaccaaagttatgctgttaggttccggcgagttgggtaaagaagtcgctattgaatgtcagcgtctgggcattgaaaccatcgccgtagaccgctaccccgatgccccggcgatgcaggtcgcccaccgcgcccacgtcatcaatatgctgcacggcgagagcctgcgcgccctgattgaacaggaaaaacccgattacatcgtgccggagatcgaagctatcgctaccgacaccctggtcgaactggaacaggccgggcagaaagtggtccccacggcgcgggcggcaaagctcaccatgaaccgcgaaggcattcgccgcctggcggcggaagagctgcagcttcccacctcccgctatcgttttgccgacagcgaagaaggcttccgcgcggcggttaccgagatcggtttgccatgcatcgttaaaccggtgatgagctcctccggcaaaggccagagctttatccgctcggctgaccagctcagcgaagcctggcgctatgcgcagcagggcggccgcgctggcgccggacgggtgatcgtcgagggggtggtgaacttcgatttcgaaatcaccctgctcaccgtcagcgctgtcgatggcgtgcatttctgcgctccggttggtcatcgtcaggaagacggcgactaccgcgagtcctggcagccgcagcagatgagcgacctggccctcgagcgtgcccaggccatcgcccgcgaggtggtgctggcgctgggaggttatggtctgtttggcgtggagctgttcgtatgcggcgacgaggtgatcttcagcgaagtctccccgcgaccacacgacaccgggatggtgacgcttatctcccaggatctctcggaattcgccctgcacgttcgcgccttcctcgggctacccgtcggcgctatccgccagtatggtccggccgcctccgcggtgatccttccgcagttgtccagccagaacgtcagctttggccagctgcagtcggccgtcggggctggcctgcagctgcgtctgttcggcaagccggagattgacggtacccgccgcctgggggtaaccctcgccgtcgccgattcggttgaggaggccgtggcgcgggctaaagccgccgccgcggcggtcatcgtcgaagggtaa

SEQ ID NO: 216913 - DNA, 705 bp, Klebsiella pneumoniae
atgaatcccgatacctccaccgtcctgaagccccgccgcggccgtccacccaaggtcgatcgccagtttgacgatacgcgtcaggcgctgattcgctcaggccttgaagtgctgaccgaaacgggctatctcgcggcgggtattgatgcggtgatcaagaatatcgccgtgccaaaggggtcgttttatcattgctttaaaagcaaagaggcttttggcctcgccgtgcttgccgcctatggcgacttctttgcgcataaattagataaattcctgctggacgacgccgtgccgccgctggaacgaatggcggcctttgtgcgtcatgccggtcagggaatggagaaattccagtttcgccgcggctgcctggtgggcaacctgctgcaggaagccccgttgttacccgagacgtttccccaacggttgatggctatcctggcggcatgggagtcgcgcgtggcgcgctgcctgcgcgaagcgcaggcagccggggccatcgccagcgaggcctcaccgcaggcgctggcccaggtgttctggatcggctgggaaggcgcggtgatgcgcgccaggctggtccagtctgccgcaccgcttaaccagtactgggatttttttgcgcacagtatgacaacaaaaacacctgcacaggacggcgctagcgccgataacccccttccgacgaggaatactctgtcatga

SEQ ID NO: 216914 - DNA, 270 bp, Klebsiella pneumoniae
atggatatttcagttaccgctgtaaaaaccgggcgccgccgttatctgacgctcatcatgatctttattaccgtggttatttgttatgttgaccgcgccaacctcgccgtcgcctcggcgcatattcaggaggagtttggtattagcaaagcggaaatgggctacgtattttccgcctttgcctggctgggtaatgactccaatttactgatagtgttttatgttcagatagtgcccgatgactttgtcatgcagctccaccgattttga

SEQ ID NO: 216915 - DNA, 1149 bp, Klebsiella pneumoniae; identical to SEQ ID NO: 213019

SEQ ID NO: 216916 - DNA, 618 bp, Klebsiella pneumoniae; identical to SEQ ID NO: 213020

SEQ ID NO: 216917 - DNA, 993 bp, Klebsiella pneumoniae; identical to SEQ ID NO: 212132

SEQ ID NO: 216918 - DNA, 1077 bp, Klebsiella pneumoniae; identical to SEQ ID NO: 214979

SEQ ID NO: 216919 - DNA, 792 bp, Klebsiella pneumoniae; identical to SEQ ID NO: 212732

SEQ ID NO: 216920 - DNA, 1734 bp, Klebsiella pneumoniae; identical to SEQ ID NO: 212734

SEQ ID NO: 216921 - DNA, 1245 bp, Klebsiella pneumoniae; identical to SEQ ID NO: 212760

SEQ ID NO: 216922 - DNA, 1428 bp, Klebsiella pneumoniae; identical to SEQ ID NO: 212761

SEQ ID NO: 216923 - DNA, 867 bp, Klebsiella pneumoniae; identical to SEQ ID NO: 212762

SEQ ID NO: 216924 - DNA, 675 bp, Klebsiella pneumoniae
atggataatagggttacgtggggcaaggatatggatgacgcagtattatttaatgggtgtataattaatcaggagattatatttaatgccaatatgaatgagctgcggccgcttgccggggacggggagtgcatcagcctcaatgcgccaaccgccagatgcttgctgctgcttttgcagaattgcggcaaagtcatttcacgggatgagttcctggcggctgtatgggaaacacggggggtggtcgtttcgcaaaatacgttctatcaaaatatctctttgctgcgaaaatcgctggtaaaagctgggctatctgaggatatcattatcaccgtccggcaaaaaggctttagcgtcgctccgaatacattggtcattcctctctctgatgaagagtgtgagaatatgaaccgggtgacattaacgcattatcagaataataaagttgttggctttatttctgaagataaggaaaaacctgacactcatttaaatcttccactaatagaaaactcatcaaatcatggcagtgatttgatggcaaataaaccggaagaaggtgaaaaagtatctgagcggttacatgttacttttaaaatacccatatggttaatcgcgctaattgtcgtgatgattgtaattaatattattgtgttggtcgtgctaaaccggtag

SEQ ID NO: 216925 - DNA, 564 bp, Klebsiella pneumoniae
atgaaaaagacaatcgtagctgtaatggtcgctgcatctgcagtgctgagtgctcaggcaatggcaaccaacaccgctcaggtaactgtactgggtgaagtctctgatgcagctaactcttgcgtcgtgaccccaaccggtactctgaatagcggtatcgttcagctgatcaccgtaaccactgccgaagcgaatgcagaatcagcgggtaccctgttcaaaactcaggatttcggttttgacgtaaaagactgtgcacagggcagcgctacaccggttactggcgtaactgtaaacgtttccggtattacttccagcgacaataccatcctggacaacactgcttctaatggtgcaaccggtattggtatcggtatccagcgcatcagcgattcccatcgcgtagccttcgacggttccgacactatgaccgaaagctactctgccgctagcggtactcagctgaaatacaccactggttatgtaagaaccaacgccgcgaccccggtaactgaaggtccggttaaaggtgttgcgacctttactatcgattacaccctctaa

SEQ ID NO: 216926 - DNA, 687 bp, Klebsiella pneumoniae; identical to SEQ ID NO: 214878

SEQ ID NO: 216927 - DNA, 2544 bp, Klebsiella pneumoniae; identical to SEQ ID NO: 214879

SEQ ID NO: 216928 - DNA, 1653 bp, Klebsiella pneumoniae
atgtcgactaaaccgtttgtttatcaggatccgtttccgctggcgcacgacgatacggaatactatctgctcagcaaagagcacgtctccgtcgccgaatttgacggccagcaggtcctgaaagtagagccgcaggcgctgaccctgctcgctcagcaggccttccacgacgccgcctttatgctgcgcgtctcccatcagcaacaggtcgcctcgattttgctcgacccggaagccagcgataacgataaatatgtcgccctgcagttcctgcgcaactcggaaattgccgccaagggcgtgctgccgacctgccaggataccggcaccgcgattatcatggggaaaaaaggccagcgcgtctggaccggcggcggcgatgaagccgccctggcgcagggggtgtacaacacctataccgaagataacctgcgctactcacagaacgcgccgctggatatgtataaagaggttaacaccggcaccaacctgccggcgcagatcgatctctatgctaccgatggcgatgagtacaaattcctctgcatcgccaagggcggcggctcggcgaacaaaacctatctgtaccaggagaccaaggccctgatcaccccggcgaagctgaaaaactacctcgttgagaagatgcgcactctcggcaccgccgcctgcccgccgtaccacatcgcgtttgtgatcggcggcacctcagcggaagcgacgctgaagaccgtcaaactggcctcgacccgctattacgacggtctgccgaccgaaggcaacgaacacggtcaggcgttccgcgacgtgcagctggagcaggagctgctgcaggaagcgcagaacctcggcctcggcgcgcagtttggcgggaaatacttcgcccacgatatccgggtgatccgtctgccgcgccacggcgcctcctgcccgatcggcatgggcgtctcctgctccgccgaccgcaatatcaaagccaaaattaaccgcgacggtatctggatcgagaagctggagagcaatccgggaaaatatattcctgaacatctgcgtcaggccggcgaaggcgaggtggtaagcatcaacctgaatcagccgatgagcgagatcctggcgcagctgtcggcacatccggtctccacccgcctgagccttaacggcactattatcgtggcccgcgacatcgcccacgccaagctgaaggagcttatcgacaacggcgaggcgctgccgcagtacgtcaaagatcacccgatctactacgcgggcccggctaaaacgccagccggttacgcttccggctccctcggcccaaccactgccggccgcatggactcttacgttgatctgctgcagtcccacggcgcgagcatggtgatgctggcgaaaggcaaccgcagccagcaggtgaccgatgcctgccataaacacggcggcttctaccttggaagcatcggcggcccggcggcagtgctcgcccagcagagtatcaagagcctcgagtgcgtggcctatccggaactggggatggaagctatctggaaaatcgaagtggaagattttccggcgtttatcctcgtcgatgataaaggcaacgacttcttccagcagatccagaataagcagtgcgcgggctgtaaacagcacggctaa

SEQ ID NO: 216929 - DNA, 951 bp, Klebsiella pneumoniae; identical to SEQ ID NO: 211598

SEQ ID NO: 216930 - DNA, 720 bp, Klebsiella pneumoniae; identical to SEQ ID NO: 211597

SEQ ID NO: 216931 - DNA, 855 bp, Klebsiella pneumoniae
atgaaagtaatgcttgtgggtggtagggggcagttaggtacctgtttccagaaggtggtacctaaggattggactctgcatgtcacagattcagactctctcgatattactaatagagataaagtgttatctgttgtctcttcgtttaaacctaatgtcattgtcaatgcagctgcttatactgctgtagataaagcagagatagatgttgaatctgccatccttgttaataaaatagggcccgaaaatctcgcacatgcagcggcactaaataattgtcagctcattcatgtatctactgattatgtttttgatggaaatgctacagtcccttacaaagagacttcagccacgaatccattaggggtctatggcaaatctaaacttgatggagagtttgcggtttcggcaattttgccgcaagctataattgtgcgtactgcgtgggtctttagtgaattcggcaataactttctgaaaactatgctgcgattagggactgaacgtaatagcctcagtattgtaggcgatcaaagaggttgtcctacatatgctggtgatattgcgtgggccatcgttgaattgattaatttaaacgctaaaggagggatttatcatttttgcggtgatacagaggtttcttggtttgaattcgcagaattcattcttaaagaggctttgttattaaataaaatctccaagcttcctgaattaaattcgatatccacatctcaatatcctacacctgcaaagagacctgcatattctagtttggacacttccaaaattaggagtttgggtattcaggcctcggattggaaacttgctgttaagaatgtacttaacattctttga

SEQ ID NO: 216932 - DNA, 1407 bp, Klebsiella pneumoniae
atgtccaagcaacagatcggggttgtcggtatggctgtgatggggcgtaaccttgcgctgaacatcgaaagccgtggttataccgtctccgttttcaaccgctcccgtgaaaaaaccgaagaagtgattgccgagaatccaggcaagaaactggttccttactacacagtacaagagtttgttgaatccctcgaaacaccacgtcgtatcctgttgatggtgaaggccggggctggcaccgacagcgccatcgattccctgaagccttacctcgacaaaggcgacatcatcattgatggcggcaacaccttcttccaggacaccatccgtcgtaaccgtgagctgtctgccgaaggttttaactttatcggtaccggtgtttccggtggtgaagagggggctctgaaagggccttccatcatgcctggtgggcagaaagaagcctatgagttagttgctccgattctgaagcagattgctgcggttgctgaagatggtgagccatgtgtcacctatatcggtgctgacggtgctggccattatgtgaagatggttcataacggcattgagtatggcgacatgcagctgattgctgaagcttatgcgctgttgaaaggcggtctggcactttctaacgaagagctggcgcaaaccttcaccgaatggaacgaaggtgagctaagcagctacctgatcgacattaccaaagatatcttcaccaagaaggatgaagacggtaaatacctcgtcgatgtcattcttgatgaagcagcaaacaaaggtactggtaagtggaccagtcagagctcactggatctcggcgaacctctgtctctgatcaccgagtctgtatttgctcgctatatttcttcgcttaaagaccagcgtgtagccgcgtcgaaagtgctgagtggtccgcaggcccagccggccggtgataaagctgaatttatcgaaaaagtgcgtcgcgcgttgtacctcggtaaaatcgtctcctatgctcagggcttctcccagctccgtgctgcttctgatgaatacaactgggatcttaactacggcgagatcgctaagattttccgcgctggctgcatcattcgtgcgcagttcctgcaaaagattactgatgcttatgcgcaaaacgctggcattgctaacctcctgctggcgccatacttcaaacagatcgctgatgactatcagcaagcgctgcgtgatgtcgtggcctatgccgtgcagaatggtattccggtaccaacgttctcagccgcaattgcctactatgacagctatcgttccgcagtactgcctgctaacctgatccaggcccagcgtgattactttggtgcgcacacctataaacgtaccgataaagaaggtgtattccatactgagtggatggaataa

SEQ ID NO: 216933 - DNA, 1167 bp, Klebsiella pneumoniae
atgaaaattactatttccggtacaggttatgttggtttatcgaacggtgtcctgattgcgcaaaaccacgaagtggtggccctggatatcgtacaggccaaagtggatatgcttaaccagaagatctctccgattgtggataaagagattcaggaatatctggcagaaaaaccgttaaatttccgtgccaccacggataagcacgacgcataccgtaatgccgactacgtgatcattgccacgccgaccgactacgatcccaaaaccaactacttcaacacctctacggtggaagcggttattcgcgatgtcacagagatcaacccgaacgcggtgatgatcattaaatcgaccatcccggtggggttcacccgcgacatcaaagaacgtttagggattgataatgttattttctctccggagttcctgcgtgaaggacgtgcgctgtacgacaacctgcacccgtcgcgtattgtcatcggtgagcgctctgcgcgtgccgaacgttttgctgatctgctgaaagaaggcgcgatcaagcaggatatcccaaccctgtttaccgactccaccgaagcggaagcgatcaaactgttcgctaacacctatctggcgctgcgcgttgcctatttcaacgagctcgacagctatgctgaaagccaggggctgaacagcaagcagattatcgaaggggtatgcctggatccgcgtatcggcaaccattataacaacccgtcctttggctacggcggctactgcctgccgaaagataccaagcagctgctggcgaactacgaatcggtcccgaacaatatcatcgcggctatcgtcgatgctaaccgtacccgtaaagactttatcgcggattctattctcgctcgtaagccgaaagtggtgggtgtgtatcgcctgatcatgaagagtggttcggacaacttccgcgcctcttctattcagggcatcatgaagcgcatcaaggcgaaaggtattccggtcattatctatgaaccggtgatgcaggaagatgagttcttcaactcccgcgtcgtgcgcgacctggatgccttcaaacaagaggcggatgtgatcatttccaaccgtatggcggaagagctggcggatgtggcggataaggtctacacccgcgatctgtttggtaacgattaa

SEQ ID NO: 216934 - DNA, 1005 bp, Klebsiella pneumoniae
atgaagtttttagtgactggagccgcaggctttatcgggtttcatacctgcaagcgccttctcaatgcgggccatgaggttgtcggcctcgacaatatgaacgactattatgacgtcaatctcaagcaggcccgtctggatttactccagtctcccctgttccgttttcacaaaattgatctggcggatcgtgacggtgtcgcccaactttttgctaatgagaaatttaaccgggtgatccatcttgctgcccaggccggcgtgcgctattcgctggaaaatccctttgcttatgccgattctaatctgatcggttatctgaacatactggaaggatgccgacataatcaagttgagcatttactctatgcgtcgtccagctcggtttatggtttaaatcgcaagatgccattttctaccgatgattcagttgaccacccggtttcactctatgccgcgacgaagaaagcgaatgagctgatggcccacacctactctcacctttatgggatcccgactaccgggctgagattctttaccgtctatggaccctggggacggccggatatggcgctctttaagttcacaaaagccatgctggaaggaaagagtatagatgtatataactacggtaaaatgaaacgcgattttacctatattgatgatatcgttgaggcaattgtgaggatgcaggatattatcccgcagcctaatcctgaatggaccgttgaaacgggttccccggccaccagttccgcgccgtatcaggtatataacattggcaacagctcaccagtggaactgatggactacatcaccgctctggaagaagcgctgggaatggaagcgcagaagaatatgatgccgattcagccgggcgatgtgctggacaccagcgcagatactcaaccgctgtatgacctggtgggctttaagccgcaaacgtcagtgaaggaaggcgtgaagaacttcgtggagtggtacaaggattactatcagatctaa

SEQ ID NO: 216935 - DNA, 1797 bp, Klebsiella pneumoniae; identical to SEQ ID NO: 149305

SEQ ID NO: 216936 - DNA, 1191 bp, Klebsiella pneumoniae
atggctaatattgcttggtttatacctcaactcattgaagggtctggtggccaccgcacaatgctgcaacatgccgcttatctggaaaaaatgggtcatacatgtacaatttatcttgaagataaaagcggcaaaacaagcggtgcagaggtaattcataaattatttggtctaaaatttaaagacgtcatttatgactggaataatgcgcaaccatgtgatgctgcagttgcaacaatatggtattctgcaccattcgtggccgctctaccatttgattgtaaacgtttatatttcgttcaggattttgaagcttacttcaacccggtgggcgatgcttacctgatggctgaaaattcatactgttacggcttaaagccaattacgattgggcgctggttacgatataaactgcaaaatgattttgctgttgaaagctatcacttcgaatttggggcgaatcataatatctataagcgcgttcccaccattcaaaaagaaaaagcggtttgctttatctatcagccagataaaccgcgacgttgttcgcgtattggtattgaggctttaggtatagttaaacattgcatgccagatgttaaaatttatctttatggttcatcaattaatgataatctctggttcgagcatgaaaatctaggtttattagatttgccgaaatgtaatgagctatataataaatgctccgtaggactctgtattagttcttcaaatccctctcgcatcccctttgaaatgatgaatgcaggccttcccgttgttgaagtctggcgagaaaacaatctttatgattttagcgaagatgctatgctgttgtgtaaacagacacctgaaagcattgccaccggtattatgaaaattctaaacgatgctgatttagccgcgagtatgagctcggctggtcaaaagtttatgaatgggcgtaccctggaaacggaaacagaaggcttttacaaagcgttcaactgcgtgatgaacgagcaggcatacacagcagaagtgatttcacgatcgtataataagcccccgtttgaagcccctcttgccagacctgatattgccaacacgttaacattcgcgcatcagagtctgttaaagagaattgctctacgtttaccgttatttgtgcgcacacctttaagcgcgctttattttaagttgaagaattaa

SEQ ID NO: 216937 - DNA, 2118 bp, Klebsiella pneumoniae
atgaatgatatttcaataactgattatctcgggcctggggtgtatttattacaaaattacccaaaagaaactgagggcctgattgcagagaagggttataaggtgcacaactgcgctgatctggcgcagtgtaaagatattcttaaccgcaataaggttaatttccttttaaccaatgataaagataataattttaatgaatatgtcaagattgtcagaaccgctgcaagacagcttgtaaataaaatcgttattaatatctttgtagaaaagggaaacggtcagagtttccaggattttattaatataactgacaatcttggttattcgatagacactgtattttatttgctcaatcctggctatgatgaacaatttcgggatgatcaaagcctaaagatagttttgagttatagacgtcagtcagtagtttcgacagacaaaaatatcttagaaacgactatttttgaaaaaaaacttgtaaatacttttccctacatacgtcctggggatcgagtacttgtaatcattaagaataaaaattcgataacaaacattaaaaatattattgcagaacaaaccaaggcatctgaagttgaaatttactcattggatgaaattaaaagtgttcagctaaatggcaatggctaccattttctcattactgataaatatgccgatgatggactaaataatgcactcaaagtcattatatcttacctggtgcccgctggcaggtacgttagttttcatacagataaaactgtagttgagacattaagtaattacaatttacaacctgaagtttatttattttatgaacatggccatttaaagactcaaatacatcagggagaggaaattacactctctcctgaattatgtgtttttatgaaaagccctttagccaggtcagagcttccgtatcaggaaacgatttatggctactcgcatccaccaaaaaacctattagcttttgccagagattatactaacccgtggcttattcgcgggatcgtagaattcccattcaggaataggtcaacttatcatctacagcagtatagccatcagattttggagcacagtgctcctgacagccccgattatgccgctgcattggcagtattaggttatcaaatgctaagcggcagtgatgatacagctgacatttacgcaaaaatgctagattactgctcaaatgtgtcgcagatggataatcctacgccacatcaatatcgttggctcatatctttatcgacacttttaggtcttatttgtaacaaaaataatgataaaactaatgcgttaatccatttatctcgtgcagcaaactccagcattgataaatttagcccctctatcggcacgaagattttacaaagcttttatcttcagtccgttatattaatttctttaaatagaatctcctgtgccgagataatcgtcgatagagggattaaaagaggtatacagctactttatcaacatcctgacgaactggtgggtaaaatatctcaaccatttaattttgtgctttatatttaccatgatattcttgattggcttataaagatggtcaacattaaaaacgccataccaggcagaaaattcaacattgcaaattttgacaacggtaacacctggtcggctttgcttcatgaacgcatgaatgcaataaataatatgtcgcaaatgatagatgagcgtgacagaacaattcatgatcaaaaatgcttaattgatgaacgcgatagaactattcacgaccagaagcgccttattgatgagcgagacagcactgttcttacgcaaaaaaatttaattgatgagcgtgacctggtctctgctcagcaaaatcaattaattgagcagaataataaaactattcagcagcaaattcaaaatgtaactgacttaaatagtcaagtttcctctaagggacagaaagttgatgaattacagaatcaaaacataaaattaatttcattaatcgatgaaaaagatctccatattgcccagctctctgcagatctagaacgtgcaaataccatactgcgtaagattaatagcacgcctgtaataaggcatctactacgcatgctaaatataaaataa

SEQ ID NO: 216938 - DNA, 1410 bp, Klebsiella pneumoniae
atgtcatctgataacattgcaattagcgtaagtaacattagcaaatgctataacatttaccaaaaccccagagataggttaaaacagtttttcttacctaaagtccagagtatggttgggaaacctgtacaacgctactataacgaattttgggcgttaaataacatcaactttaccatcaataaaggtgagtcagcgggaattattggacgcaatggttctggcaaaagtacattactacagctaatcaccggcacgctaactccaacaacgggcacgatacaaaccaagggaagaatagctgccctcctggaattaggctccggtttcaacccagagtttaccggtagggaaaacatctatcttaacggcgccgttctgggattatcgcgggcagaaatagatgcaaaatttgatgctattgccggttttgctgatataggaacccatctcgaccagccggtaaaaacatactccagcggaatgatggtgcgccttgcatttgccgttcaggtacaattagagccagatattctcatcgtagatgaagcacttgctgtaggcgacgcactttttcaaaagcgctgtttccaacaaattgagaaattaaccagcaatggcgtaactttactgtttgtttcacacgatcaagagtccgtgcgtaccttaacaaacagagctattcttctcgatcgtgggacgcaattaagtactggcttatcatcagaagttttacttgaatatcgtcgtttactacaccgggaagaaagtaagtatttttctcagttagcagaggaagttgctgcccacgcggacgccactcgcgatattaatcaaccccccaccgcgccggctaagatagaaattagtgctaatgctgaaacccctgctgtagaggaaacctcgccctctcgtacagataaactatcgttcggtgaaggtgaagcagaggttgaaaatgttgaattgtttacggcttctggtgaacgcagcaatgcctttaaccctggtgataaaatcagagttcgtgttaattgcaaagtaaataaagatataaaccacattaacgttggcattcgtattcgcaataaagaaggcgtcaaaatttattcatggggaacgttaaaccaggacatgtatgttcgtttccatcaacttaaagatccccaattttgggaacgtgagtttaaagcaggcgagcgtttttatgttgatatggaatttgaatgtactttaggaacaaacctatatgaaatacaggcggcgatatcctatgaggggacacctaattatttctcgcagcgcattttacactggcgtgatgaagccgcgttttttcacgttaatgtcctgcgtgatgaatatttctttggtggcattctggatctcaagatgactgcagagtggtaa

SEQ ID NO: 216939 - DNA, 732 bp, Klebsiella pneumoniae
atgggacgctataaaggatcctttcttggtctggcatggtcacttttcaaccccatattgatgttaacagtctacacatttgtattctcggttatattcaaatctcgttggggaagcagtccagataccgggcatgcagattttgcaatcattttgtttaccggactgattatttttaacttatttgcagaatgtattaacaggtcaaccagccttatcacctcaaatgtaaacttcgtcaaaaaagttgttttccctattgagatattacctatagtaaatctgctggctgctttatttcatgccagcattagcctcatagtcttatttatcgcaatactggtgtttaagcatcagcttcattttactgtcctgttactgccagtcattactattccacttatgctctctatacttggattaagctggatcctggcctcactgggcgtttttgttcgtgatatgccacaaactattagtatcatcgtaacaatattaatgtttttatctcccgtattttatccgttatcagcattaccggtggttttccaaaaaattgtaatgttgaatcctctggcatttatgattgaagaagcaagaaaagttgtttactggggaattgagcctaactggaccatgctcgcaattaatatgcttattggtttagttatctgtgctgcaggttttttatttttccaaaaaacaaaaaaaggatttgccgatgtcatctga

SEQ ID NO: 216940 - DNA, 1146 bp, Klebsiella pneumoniae
atgaggatagtgtattttgtcaatgcagcgtggtacttcgaactgcattggttggaccggtcagaagcggcaattagcaaagggtatgaagttcatcttgtaagtaattttgctgatgacgccatcaaaaataacctggaaaaaaaaggtataaaatgttgggatattgagcttaacagattttctaaaaatgtgtttaaaaacatttcaatattcactgcatttagaaagatctgtaagcaaattaaacccgatcttattcatctaattactataaaaccaatcctttttggtggattgtatgcccgggttgcaggcatcccttttgtcgtgagctttgtgggattagggagattgtttggtaataaacgaggttggttgaataaattcattttcaactcagtactgtcaatttatagtcttttgctatcagcaaaaagcccagcgcaagtaatatttgagcataatgctgactttgctgagctgaataaatatattaaatttgatgaaaataacatccatatcattgaaggagccggggtagacaggtttcgctttagttatcagccagaaccaactcagaataatttctcggtattatttgccagccgtttgctatggtcaaaggggctcggtgaagtagtcgaggccatcggtaaggttaaacaaaatgaaaataacacaaccttatacgttgcgggaattctcgatgacaaagatccggatagaattgaattagatcaaattttgcaatgggaaaaagaaggaaaaatcatttggttaggtcgaagagatgacatccaaaatttaatcagaaatagccatgtcgtgattttgccaactaaatattcagaaggcgtgccaagaataatcattgaagcgtgtgctatgggccgaagttgcattgtcggaaatgtacccggctgtaaagctataattaaagataatttcaatggatgtgtactaaaaacacatagcgctagtgagatcgcggagaaaattgaatatcttagagataacatggaaataagaaaaaaattcggcctacgctcagccgaaattgtaaaagaaagattcagcaaagaaattgttatagataaaacgttatgtgtttacaataaaatactaagtacaacaaagcggtaa

SEQ ID NO: 216941 - DNA, 906 bp, Klebsiella pneumoniae
gtggatagcgcacgcgcccttattgcccggggatggggagtaagcttcgtcagccgttgtctccgggtgtcgcgtgcgcagttgcacgtcattctcagacgaaccgatgactggaaggacggccgctgcagccgtcacacggatgatacggatgtgcttcgccgtatacaccatgttatcggagagctgcccacatatggttatcgtcgggtatgggcgctgcttcgcagacaaacagaacctgatggtatgcctgcgatcaatgccaaacgtgtttaccggatcatgcgccagaatgcgctgttgcttgagcgaaaacccgctgtaccgccatcgaaacgggcacataccggcagagtggctgtgaaagaaagtaatcagcgatggtgctctgacgggtttgagttccgctgtgataacggagaaaaactgcgggtcacgttcgcgctggactgctgtgaccgtgaggcactgcactgggcggtcacaacgggtggcttcgacagtgaaacagtacaggacgtcatgctgggagcagtggaacgccgctttggcagcgagcttccggcgtctccagtggagtggctgacggataatggttcatgctaccgggcgaatgaaacacgtcagttcgccaggatgttgggacttgaaccgaagaacacggcagtgcggagtccggagagtaacggaatagcagagagcttcgtgaaaacgataaagcgtgactacataagtatcatgcccaaaccagacgggttaacggcagcaaagaaccttgcagaggcgttcgagcattataacgaatggcatccgcatagtgcgctgggttatcgctcgccacgggaatatctgcggcagcgggccagtaatgggttaagtgataacaggtgtctggaaatatag

SEQ ID NO: 216942 - DNA, 1593 bp, Klebsiella pneumoniae
atgaatcacgactatctcgcccgtatcgctgcgctggaagacacgcttcgccagaaagacagtcagctcagtctcgttgcagagactgagtcgttcctgcgttctgcactggcccgcgcagaagagaaaatagagaacgaagagcgcgagatagagcatctgcgggcacagatagaaaaactgcgtcgaatgttgttcggtacccgctccgaaaaacttcgccgacaggttgaagaagccgaagccctgctgaaacagcaggagcagcaaagcgatcgctacaacggacgggaagacgatccgcaggtacctcgccagttacgtcagtcccgccatcgtcgcccgttaccggcacaccttccccgcgagatacatcggctggatcctgcggaaaccagctgtccggaatgcggcagcggtatggcgtacctcagcgaagtcagcgtggagcagctggaactggtctccagcgccctgaaagtgatccgcacggtcagggtgaaaaaggcctgcacccgatgtgactgtatcgttgaagcacctgcgccatcacgtcccatcgatcggggtatcgccgggccgggtctgctggcccgcgtgttaacggccaaatactgcgaacacctgccgctgtatcgccagtgcgaaatctttgcccgtcagggcgtggatctgagccgggctctgctctccaactgggtggatgcatgttgccggttaatggccccgctggatgaggccctttaccactacgtgatggactgccacaaactgcatacggatgacactccggttccggtgcttgcaccgggcagaaagaagacgaaaaccggacgtatctggacgtatgtacgtgacgacagaagcgcaggttcatcagatccgccagcggcatggttcgccttctcgccagaccggcagggaaaacatcctcagcaacaccttcgccactatcatggtgtgctgcaggcggatgccttcgcaggctacgatcggttgttcagtccggaacgtgaaggagggccgctgacagaagccgcatgttgggcccatgcccgccgaaaaatccatgatgtctatataagcactcacacagcgacagcagaagaagccctgaaacgtatcggtgagctgtacgcgatagaagaagaaatacgcggcctcacgacagaagagcgtctggcagccagacaatcgcaaagcaaaccactgctggcatcgctgcatgaatggctggtagaaaaaaatgagacgctgtcgaaaaagtcccgtctgggcgaagcgttcgcttatgtcctgaaccagtgggatgcgctgtgctactactgtgaagatggcctggcagagcctgataacaacgctgccgaacgagcccttcgtgccgtctgtcttgggaaaaagaattttatcttcttcggcagcgaccacggtggtgagcgcggagccctgctgtacggactgatcgggacgtgcaggctgaatggtatcgatctggaagcctaccttcgccatatcctgagcgtactgccggagtggcccagcaacaaagtggccgaactgctgccatggaacgtggttcttaccgataaataa

SEQ ID NO: 216943 - DNA, 351 bp, Klebsiella pneumoniae; identical to SEQ ID NO: 125594

SEQ ID NO: 216944 - DNA, 441 bp, Klebsiella pneumoniae
atggaaaatgctgccaactggcgaactgaatcgcgtaccgtctattccagtgacttcaaacttcggatggtcgaactggcttcacgaccagatgccaacgtcgcacaactggcgcgggaacatggcgttgataataatctcatttttaagtggctacgcctctggcagagagaggggcgaatctctcgtcgaatgcctgcaactatcgtggggccggtggtacctcaatctcttccggcttctccgactctgttgtccgtcgacgttatcaacgacccgttgcccgcagcagagaatgacactctgtgtacgttctcctccgctcacgccagcgccacttcctgtcatgttgagttccgccacggcaaaatgacgctggagaacccgtcgtcagagttgctgactgtgctgatccgcgaattgaccgggaggacacaatga

SEQ ID NO: 216945 - DNA, 1164 bp, Klebsiella pneumoniae
ttgaaaggccgtttgtttattgctgtatctttgctcgcttcgagcgtttcctgcgcatttgccgtcgacttacctgctacggtcgcgccgccttccattcaggctggctcctgggtgctgatggattacaccaccggtcaggtcctgaccgcgggtaacgaacatcagcagcgtaatcctgccagtctgaccaaactgatgaccggctacgtggtcgatcgcgccatcgacagccatcgtatcacctttgacgatatcgtcaccgtgggtaaagacgcctgggcgaagggcaacccggtgttcgacgggtcatcgctgatgttcttaaagccaggagatcgcgtcagcgttcgcgacctcagccgtgggctgattgtcgactccggtaacgacgcctgcgtcgcgctggccgactatgtcgccggcggccagccgcagtttgtcgccctgatgaatcagtatgtcgaaaaactgcacctgcgggacacccatttcgaaaccgtccacggcctcgacgccccgggccagcacagttcggcctatgacctcgcggtgctctcgcgggcgattattcatggcgaaccagacgtctaccacatgtacagccagaaaagcctgacgtggaacgggatcacccagcaaaaccgtaacggtctgctgtgggataaaacgatgaacgtcgatggcctgaaaaccggccacacctcgggggccgggttcaacctgatcgcctcggcggtggatggccagcgccggctgatcgccgtggtgatgggggcggacagtccgaaaggccgcgagcagcaggccgctaaactgctgcactgggggcagcagaacttcgacaccgtgcaggtgctgcagaaggggcagaaggtcggcaccgagcgtatctggtacggcgataaagagcagattaagctcggcaccgatcaggatttctggttagccctgccgaaggcggaagtgtcgcgcattaaagcgaaatatgtgctggataagaaggatcttgaggcgccgatcgccgccaatcagcgggttggcgagatttcactgtatgacggcgacaaggtggtggggcactatccgctggtcaccctcgaaagcatcaataaaggcggagtgttctcgcgaatgagcgattacctgcatcacgagctgtaa

SEQ ID NO: 216946 - DNA, 642 bp, Klebsiella pneumoniae; identical to SEQ ID NO: 31871

SEQ ID NO: 216947 - DNA, 486 bp, Klebsiella pneumoniae
atggacgcactggccacaggtcgcaggatcaagtgcctgacctgcgtggatgatttcacaaaggaatgcctgacggtcactgttgccttcgggatttcaggcgtgcaggtcacgcgtattctggacagcattgcgctgtttcgcggctatccggctacgataagaaccgatcagggcccggagtttacctgccgcgcactcgatcagtgggcttttgagcatggtgtggagctgcgacttatccagcccggcaagccaacgcagaacggatttattgagagttttaacggacgctttcgtgatgaatgcctgaatgagcactggttcagcgatattgttcacgccaggaagatcattaatgactggcgactggattataacgagtgtcgaccacattcatcactgaattacctgacgccggctgaatttgcagcgggctggcgaaacgggaaatatgaagaaaaaccaaccgacattactaactga

SEQ ID NO: 216948 - DNA, 693 bp, Klebsiella pneumoniae; identical to SEQ ID NO: 210568

SEQ ID NO: 216949 - DNA, 222 bp, Klebsiella pneumoniae
atggcgccggaggtgccctgcccggcggcgctgcgcttgccgggcctggggtataggaccttacgggaggatcccgtaggccggataagcgtagcgccatccggcacaaaggtgggtatggccccggggatgtcctccccggcggcgctgcgcttgccgggcctggggtatatgggcctgcggggtgccggagataatgttattggtatgcaactctattaa

SEQ ID NO: 216950 - DNA, 786 bp, Klebsiella pneumoniae
ttgaccacaacactgctgatttacgcccatccggaaccgcgctcgctcaatggcgcgctgaaaaatttcgccgtccgccatctgcagcaggccgggcatgaagtgcaagtctccgatctctacgccatgcgctggaaggccgggtatgacgccgacgacagcggcgccccgccggtcggcgagttctggcggccgaccctcgattccaaacaggcctttgcccagggcacccaaagtgcggatatcgcagccgagcaggaaaagctgctgtgggccgatacggtgattttccagttcccgctatggtggttctcgatgcccgccatcatgaagggctggatcgacagggtgtacgcctggggctttgcctatggcgtcggcgagcacagcgaccgccactggggggatcgctacggggaaggcactttcgtcggcaagcgggcgatgctgatcgtcaccgccggcggctgggcggaacactattcaccgcgcgggatcaatggccccatcgacgacatcctgttccccattcagcacggtatgctgttctaccccggctttgaggtgcttccgccgctggtgttctaccgcacggataaaaccgatgccgggcagttcgccgatcagtgcgccgccctggccgagcggctggacacgctgtggcaaaccgagcccattccattccgccgccagaatcatggcgattatctgatcccgtcgctgacgctgcgcccggagctggcgccagggcaaagcggcctggcggtgcatttgcgtagcgaataa

SEQ ID NO: 216951 - DNA, 1485 bp, Klebsiella pneumoniae; identical to SEQ ID NO: 210296

SEQ ID NO: 216952 - DNA, 984 bp, Klebsiella pneumoniae; identical to SEQ ID NO: 210297

SEQ ID NO: 216953 - DNA, 870 bp, Klebsiella pneumoniae; identical to SEQ ID NO: 214831

SEQ ID NO: 216954 - DNA, 462 bp, Klebsiella pneumoniae; identical to SEQ ID NO: 212460

SEQ ID NO: 216955 - DNA, 1602 bp, Klebsiella pneumoniae; identical to SEQ ID NO: 212462

SEQ ID NO: 216956 - DNA, 864 bp, Klebsiella pneumoniae; identical to SEQ ID NO: 139298

SEQ ID NO: 216957 - DNA, 312 bp, Klebsiella pneumoniae
atgtgggtgacggaagacgaacaccggcggttgcttgagcggtgcgacggaaaacaactggcggcgtggatgcgccagacctgccttgatgagaaaccgacacgcgccggcaggcttccctcgatttcgcccgcgctgctgcgtcagcttgctggcatgggcaataacctgaaccagatcgcccggaaagtgaacgccggtggtgccggtcatgaccgggtgcagatcgtggcagcgctgatggcgatcgatgccggtctggaacggttgcggcatgccgtactggaaaaagggccggacgatgattgttaa

SEQ ID NO: 216958 - DNA, 498 bp, Klebsiella pneumoniae; identical to SEQ ID NO: 179615

SEQ ID NO: 216959 - DNA, 216 bp, Klebsiella pneumoniae; identical to SEQ ID NO: 179614

SEQ ID NO: 216960 - DNA, 372 bp, Klebsiella pneumoniae
atgagtaaaaaaaacgatttaaacctcagtgaatcaacgttagaaagcctcagggagtatgtcgatgacttcggcatgactgttgatgatgttgttctgaagttaattaatgagaataagtcattgaaggaatcacttggacaagactttgtgttatctggcgaaaaggaagcgcaccactttaaagattatgtgattcataaactgcccaaaggaaaaattctggttacccataatgggcttaaggccagcaacatgaagaagatattgattgaggcggggagggagctaggcatggatgaaaatgaactcaatccagatttcacaacctatgagatagggcgttttttgtttaagcacctacatgcgtaa

SEQ ID NO: 216961 - DNA, 426 bp, Klebsiella pneumoniae
atgagttttcagcaagttttgaatgaggtaaaggttatttcaagcaatggtgatacaagcctagcgattaccagatatgaccaacaaggattgaaccgttttcttttacgtgacttatctcatcagaccgagactcgtagtaactatgtaaataatcttgagcaattatgccagcaggcaaaatgtaacagggttattttgaacgtgaatgaaatttcagagtcgttttatatgaaattaataactttttgtaatttcactctgttagacgccaaacaagatatgcaacatttgaatggcttcaattactttattgttcttaattcttttgatgaaaacagtgggcatacagtttgggcaccatcgtatagccccaattgtgtaactgagcgcgatttagatgaatacgacccagatcgttggtaa

SEQ ID NO: 216962 - DNA, 402 bp, Klebsiella pneumoniae
atggccagagtgtctattagtgaggctgcccgactgacgggtaagagtagaacaacactacacaggttaattaaagcaggtgacctgtccacctgtagcggtgaacgcaatgcaaaaatggtagatacttcagagcttttgcgtgtctttggtccctttgaacaaccgaaggatgaactccattctggacaggtctctgaacagcgtgatacagcctctgctgaccagagtgaacaggtgattcgtcatctgaaacaggagattgaacacctgaactccttacttttgtccaaggattcgcacattgacagcctgaaacaggccatgctccttcttgaaaatcaccaggcaaaattaactgaatccccggcgccatggtggaaattctggaaaaaatcctga

SEQ ID NO: 216963 - DNA, 192 bp, Klebsiella pneumoniae
atgacgaaacaacagaaaacagcgctgaacatggctaaattcatccagaatcagtctctgctcctgctagagaagcttaatgagcttgatcttgatgtagaggccgacctttgtgagaaactccacgatgatgcggagcatcttttccgtacactgtcctcgagactggatgcattacaggatggtaactga

SEQ ID NO: 216964 - DNA, 570 bp, Klebsiella pneumoniae
atggcgaagttaccactgccactaccgatagcgtcccccccaacagtaaacaatagtggctcagaaagagcgaagaagtcaggaagaagaactcttgcagcaaaaaggaaaaccttgttagaagaactatggggagacgaacttgaacaactcaaggtatggaatcgccatgagcatgacgggtatacaactgtgccaagaacgctgacatatatcagtcgaattctcgattatctcggaggaacgggactgccattgtcccaaacatatctggctctttggtgcagggtatttgatgagggctttgtggaaataagagataaagatggatttgcttatgaagctggttttagtggacagcgagcagtaaccacatggacagggaggatgagaaaactaagagatttaggtttcataactacaaaacctggcacatcaggtgagtttcaatatgtgattttgcttaacccactgactgtcattaaggagttatacgaaggtaaggaaaaagatgaaagatacaatgcattagtgggccgtatgcaggaggttggtgctaaatgggagtaa

SEQ ID NO: 216965 - DNA, 546 bp, Klebsiella pneumoniae; identical to SEQ ID NO: 109940

SEQ ID NO: 216966 - DNA, 183 bp, Klebsiella pneumoniae
atgacggggtcaggatttcttccagaatttccaccacggagaatgaacctgtggagagggttcgagcttgtgttccagaagctgcatagcctggcgaagagaatcgatatgttcatcacgagctttaacagcccctttaagaccatcgttttcagcttcaagcaaagcaattttatgctgtaa

SEQ ID NO: 216967 - DNA, 477 bp, Klebsiella pneumoniae
atgactgtgttatcaactttaaataacctcaaatcaatcccttgtattaatgcatttacgggcagagcaaataattcatatttatggcgttatgttatggaagatcataaagatgagtttggcgctacaactattaagtgtttttatcttagggaggaaatttcagaggattatgtgtctatttatcattcaaataaagattattatgaaggaatggtaagggatgtacataaaagaatccctgtagggaaaaccaaacctgccatatatctctcatttgatgcagcggaagtgatcgagcaagttaacaaaccagataaatgtattgatataaaggacgaaggttaccctcacttgggtttgtggtatttatttgatattaatgatgaatttactttgattgaggtgactacaactattttggaattatcctctttttttcaaagaaatgaaggtggcgtggttgttcctctttag

SEQ ID NO: 216968 - DNA, 645 bp, Klebsiella pneumoniae
atgaaatacattaaccactgcgatagtgaagattattatattactaatgatagcattgatctcggtgttcgttatgatgtttctgattataataagttagagctaaatgatttaagagatccggatttgtttaaagttttgggtcgagcatttgttgttgttgagaattctgtttgggagtcttggaatgatgatgttaaaacattagattgctctggtgacggttatgagtcaattttaaaacattacgaatcattagaattatcaggtgaattcttattgttttttaaaaaaataagaagtgccatttctgtttataatagagaatacgagttctgcactggtgacctagaaccatctttgcaggctattgttcagttgattaggtatgcccctgaacttgctgcaaaaaaagacgctcagatttactttgataaaaaatcagagtgttttgggcttatatataaacaaactaagaaaagcaaaggcacgctaaatttaatagtgaaaacaaataacgagattattttttcctttgttagaaaagtttctggagtggttaaggttacaggtagggcatatattggcgatagccttgataactccattgctatcaaatcattatttaaaatgatggagtggtga

SEQ ID NO: 216969 - DNA, 567 bp, Klebsiella pneumoniae
atgaccacccttacgctacagcaggcttttgaagcctgtcagaagaacgaaaccgcctggctgaaccgtaaagccgaactggcggccgcagagcaggaatatcaggaacaggtgctggccggggatgaccgtatcccggcaattatgcaggaactgcgcgacattatcgatgtcaaaaaatgggagataaatcaggccgccgggcgctatatccgctcccatgaagcggtgcagcgcatcagtatccgcaaccggctgaatgactttatgcaggcgcacgggacagagctcgccgccacgctcgccccggagctgatgggactcagtcagcagcccgcactcctgaccggccatgcgctcgaccgttcggcgcattacctgcgcgaagcgctgtcagtgtggctgagtaccggtgaagaaattaattattcggcagaagacagcgatattttaacggccatcggattcaggcctgacgcggcttcgcgggtggataatcaggaaaaatacacccccgcacagagcctgatttatgcccgccggcgtacggaactggccggcagatag

SEQ ID NO: 216970 - DNA, 246 bp, Klebsiella pneumoniae
atgatgcactgtccgttctgcaaaaagtcggcgcatgcccgtacctcccgctatctgtcggagaacgtcaaacagcgctatcaccagtgcaccaatattgagtgctcggcgacgttccgcaccactgaagccatcgacgaggttatccggcccccggcggagaaagcgccgcctgtcgcggagccggtcacacccccggcaccccgtaacgtgcagggctgctacagctcgccataccgtcattaa

SEQ ID NO: 216971 - DNA, 738 bp, Klebsiella pneumoniae
atgaccgacaccacctttatccctgattacctgaaaccggcgctggagcgactggccgaggccagagcggcccatcttgaacaggcccgcctgatggaggacaccctgacggccatcacccgcgcagaggagcagaaagcggagctggagcaggacaacggcagcgacacccgcacctggcgtgctgctttccgtgccgggggcgccatgctgacggatgagctgaaaagcggccatatcgaacgcgtggcccgccgggagctggcgcaggaatgccacaacctgaccgaagtgctggcctttgaacgtgaccagctgaaagtcgcctgcaacagcaccgcaaagacattccgccaggcgcatcatgctgtgctgagtaaatacgctgaggaagagcttaaccgcgcgctgaatgacaccctcgggccactggtccgggcgatggtgctgaaagcagaggtgatgggaaatccactggccaacaccaccggccatcaggggtacatcgagccggagaaggaggttatgcagcaggtggtcaccttcctgaccgggaaagtgagcgccttctctgtcacgccagcggatgagccggtgctctccctgaccggcttcccggccgtcgcgcttgcgcatatggaccacgacgccgccagcacgcccggcgagcgtaaggtctggcaggagaaaatccgtcagcgcgaggctgacctgaaagcgcgggggctgctgccatga

SEQ ID NO: 216972 - DNA, 807 bp, Klebsiella pneumoniae
atgaataggtttgatttctctgtttctcaagaaagttttataagaggtttttctagttcgcatgcattatttgttgagaatgttgatggattatatttatccccagacttaaagtgtaacaacgcaatattcccattatatatttataagtctaagaacttagatattaatggagtatacactaattctggtcaagtatatcctgttaagggaaaagatttacagttaggatcttgtgtgaaaattgcgcggtcaagttcgtttaaagtaaatgtcgttacaaaacattctgcatattgtggacttgaaattgagccttactgtgaaaatggcgatgtgacagtatctgctactgactgttttatgcatggatgtattgtacatcaatatagtaaaaatattaaagttaatattaaactggcaggaagtaataaaggtgctggacttagaataagttccggttcacagaatgtttttggcatagttaatgccactgaatgtatgaatgcagtgctaatagtatccaaaaataattctatatgtcaaaatatcaacctaaagattgaagcatttaatatattcggagacacattgtttatttataatgacgataaattgagtgcgtcattgattaatggaaaattctcttttttaaattcttcccaagagggggacttaataaatatttctaattgtgctaatgtaaatattattttagataaaactaattatagtaactttaatattaatgatcagcgtattgttaattgcagtaatacgcacgttttattatctgaagtcaagtaa

SEQ ID NO: 216973 - DNA, 1263 bp, Klebsiella pneumoniae; identical to SEQ ID NO: 67462

SEQ ID NO: 216974 - DNA, 123 bp, Klebsiella pneumoniae; identical to SEQ ID NO: 8077

SEQ ID NO: 216975 - DNA, 195 bp, Klebsiella pneumoniae; identical to SEQ ID NO: 215003

SEQ ID NO: 216976 - DNA, 228 bp, Klebsiella pneumoniae; identical to SEQ ID NO: 215004

SEQ ID NO: 216977 - DNA, 2394 bp, Klebsiella pneumoniae
atgcgccacggcccggctcataccgttaccgtcgtcagcctctccatcctgctgggcggacagagcgcgctcttgcacgcccaggcgacctttaatatggatctgctggagaaaaacgaccatttgccggcagtggatctgcaacgcttcaatcagcaggcgggccagccgccaggcgtctatccggtgagctggcaggtcaacggcgtcacgctggacgcccgtaagaccgtcacgtttcgccagaacgatcgcggacagctcacgccctgccttaagccggaagatctgctgcaggccggagttaacccggccgtgctgtcccaggcgcccagcgcaacgtcccgctcatgtcccgaactcaacgcactgctgccgggcagcacggtcaatttcgattttgctcatcagcggctggtaatgaccattcctcaggcgctgatgacgcaccgggcgagggataatgttccctctgcgctgtgggacgaaggtattagcgcctttcagagtaactatcgttattcaggcgccagccagcgtacccgcgagggcagcaccgagcgcgataactatctgatgttgaaaagcggcgtgaacgtcggcgcctggcgcctgcgcgccagcaatagcctgaccgccaacagcgatgataagccccagtggacgaccagcggcgcctggcttgagcgcgacctgacgcgctggcagagtgaactgaccctcggggataccttcacgtcgggcgatgtgtttgacgcggtacagtttcagggaatatccctcgcctccagcgatgcaatgctcccggactcgcagaaaggttttgccccgaccatccgcgggattgccagaaccaacgcccaggtcacggttcggcaaaatggctacgtgctgtatcaaacctacgtcacccccggcgcgttcgtgattgacgatctttatcccaccgccagcagcggcaatcttgaggttgccgtcaaagagtcggatggcgaaatccgccgcttcacccagccgtatgcttcggtgaccagcatgcagcgcgaaggcagcctgaaatacaacctggtcgccgggcgctaccatagcgacgatgccagccagcggccgttgatgatgcagctgtcgctgatgcgcgggttcgcccataacctgacgctgtttggcggactgcagagcgcggcgcaataccataacctctcgctcggcgcaggacagggtttgggagaagccggggcgctctcgctgcagctgttaaacgcccgcgaccggcaccagcaggatccgatcgatggccgggcctggcagctccagtacagcaaaggttttgatcgtcttggcacgcagttgactttcaccggctggcgttattcgcatcagcgctatgccacgctgagcgaggcgttttccagcccgggtagcgacgacgacctgcaggatagcgacaacaaaaaagcaaccctgcaaatcaccgccagccagagcctgccgtacgatatcaccctctatctgagtctcgaccaggacagctactggtcagggggcgccacacagcgtaccgccaatatggggatcagcagccaggttcacggtatcgcgtggtcgctcagctacagcgactcccgcagcagccacggtgacgaggaggatgacgagccgcattccgacaaagtggtgacgttgtcactttccgtgccgttgagccacctgctgccggggagctatgccggctataccctgacctcctcccgccacagcgttggcagtcagatggtcagcctcaacggcacattgctggacaatcacgcgcttagctacgccgtcagccaaacccgcgatcggcaaaacgggtccagcggcagcctgacggccgggtacagcagtggaaggggcgatctgaatctcggctacagccacgattcgcaggccgctcgtctgaactacggcgccagcgggggcattctgattcaccgccacggggtagtctttacgccggaaatgaatggcgctgtcgtcctgattgacgctggtggcgccggcggtgtgaccctcgccaaccagaaaaccatcgccaccaatggtgacgggtacgccgtgctgcccttcgccaccgcctatcaccgcaacgacgtctctctcgacagccattcgctgccggagaatgtggatctggccaacagcaccgtgacgctggtccctaccaaagacgcggtggttctggcgcgctttcacacccacgttggctataaggcgctgtttacgctgcagtcgcggggacaaccgctgccctttggcagcgaagtacgcgccaaagacaccagcagcatcgttgccagcgagggtcaggtgtacctggccggcctggcgccaaaaggcaccctttatgcgcaatga

SEQ ID NO: 216978 - DNA, 696 bp, Klebsiella pneumoniae
atgcagtgttataaagcggcttttatcctgagccttctcttttgcccgttcctggcgtctgccgccggggttgccattgccggcacacgtgtcatttataatgaacaaagccatgaggcagacatcacggtaaaaaacaccaatcctcacgatccggtgcttattcagagctgggtagacgatctggctgataataataaatcaccgtttatcgtcaccccgccattgttccgtctggatgccggagacagcaacgatctgcgcgtgttattaacctcggcgcaactgccaaacgatcgggaaagtttgttcaccctgaatatcaaagtgattcccgccaataccgcgccggctggcgagaacattctgcaatttgctattaagaatcaactgaagctcatttatcgcccggcagggctccctggttcggcgctcgacgcggcgcagcacctgcgctggcgggtcagcggcaaccatctgcaggcggagaatgcctccccctattatgtgactatcaccacgctcagctgcgcgggccagaaccagaaaacgccgcttgagcgcagcgtgattgctcctcacagccgtaaagagtattccctccccggcgaggcctgcgcccgcgaggtgagctggcgcattctggatgactttggcgctgtgcagacgtttagcgcccccgtttcggcgcactaa

SEQ ID NO: 216979 - DNA, 1557 bp, Klebsiella pneumoniae
atgaacagcacctccgccgacttccagaatctgtaccaggccctgagccacagcgccgcccgcagcccggatgccctggcgctggcgtttgaggatcggcgctatctgtaccgcgattttcatctgcgggtacagcgggcgatggcgcagcttgatcgcggctggtcgctgcgcaaaggcgaccgtattctgctggcctggggcaatcaccccgctttttgcgaagtcctttttgccgcgctgggtttgggcatcgaagtggtgcctttcagcaccaagcttaagcaggccgaaagcgaggcgctggtaggccatatcgctccccgggttgtcctgttcgatgcgaccgtacaggactggctgaaaaacacccctgacgcgcgtgcggtttcactcagcgaatggcaggcgctctgccttcccgaaccgctgacccgcccgccggtcccggttaaccgcgacgatacggcggtgatgatgttcacctccggcaccaccggagagcctaaaggggcgattatcacccacaataacctgctctgcgcgattgacgcctatacgcaaagactgaatctcaccgccgcggatagcaccattctggcggttcctatctatcacatcaccggcctgtcggcgctgctggcgctgtttattagcctcggcgcgagcatctggctgcagcatcggttcaatgccccgcaggtgatcaccaccctgcgcgagcagaacattacctttctgcacggctcgcccaccatttttatccttctttgtcaggctgcgcgtgagcagagcgccagccatcccggcgattttccggcattgcgcacgattgcctgcggcgcgggccacctgagcgatggactgatcaaggagttaaaaaccctgttcccgcataccgcgattcagccgatctacggcctcaccgaaacgacctcgcctgcgacgatttttccgggcgacgtctggggcagcgataaatgcggcagttcaggtcaggcgatcccgggtctcgccattaccatccgcaacgatcgccagcagcccctccccgccgggcaaatcggccatatctggctaaaaggcgatgtggtgatccgcgaatactggcagcacagcgagcgacgcccgagctgcgatgcgcagggctggttttgtaccggcgatctgggctatctcgacgacgaaggctggctgtacatcaaagaccgcagcaaggacatgatcaatcgcggcggcgagaaaatttactcactggagctggaaaacattctctctacctatcggggagtacgggaagttgccgtcatcccgacccccagcccggtctacggcgaagagcccgtggcgtttatcgtgccggatggccagcatcacctgaccagcgaagagatcctcgactggctgaaggtcaaaatcgcccgttttaagctaccggcgcgcattattttcacccgtgctttaccgcgtacccacaacggcaaagtgagtaaacagcagctcaaaacgcgtctcgcagaatccatcatcacgctatcaacggaggataaaaagtga

SEQ ID NO: 216980 - DNA, 1011 bp, Klebsiella pneumoniae; identical to SEQ ID NO: 212324

SEQ ID NO: 216981 - DNA, 1404 bp, Klebsiella pneumoniae
atgagcgcagaaagctcaggagtgtttactttgaaagagatcaaccgggttaagattatacaggacgtcatcgaacgtcgcatcacaacgcgtcgtgcggccgagcaccttggtatcagcgacagacaatgccgccgtcttcttgctcgttaccgtgaaggcggtccgcttggtatggccagcagacgatgtggcatgcgtggtaaccgtcagttgcctcccgggctcgcagacgaggctctggaactgatcaagacgcgttatgctgatttcggtccaactctcgcgcgtgaaaagctcgaagagctccacggactgtttcttggcaaagaaacagtccggcgcatcatggtccgggctggtttatggatcccccgtaaacaacgcgccgcaaggatccctcaaccacggtaccggcgtccttgcactggtgaactgatacagattgacggctgtgatcatgactggtttgaaggccgtggcccggcctgcacagcgctggtctacgttgatgatgcaaccagcaaactgatggaactgttgtttgttaaatcggagtccacgttttcttactttgaagccacgcggcgctatattgataagcatggtaaaccgctggcactgtacagcgataaagctggtgtttttcgtgttaacaataaacacgccacaggcggagacggacatactcagtttgggcgagccatgcatgaactgaacatccagactatctgtgcagaaaccagccccgccaaagggcgtgtagaacgtgctcacctgactttacaggatcgtctggtaaaagaactgcggttacagggcatttgctcaatggaggctgcaaatgacttcgctgaggcctatatggctgactataaccgccgttttggcaaagtaccgcgacatgattttgacgtacaccgtgctgtagaacatgatgaagacttggagcttattttcactgttcgtgaaaaacgtaaagtctcaaaatcgttgacgatacaatatgataaaatgttgtacctgattgaagacagcgagctgagtcgccgtgcaataggtaaatatatcgatgtgtatcactatcctgatggcagaaaagagctgcgcctgaacggtacgttacttccctactctacttacgaccgactgtcagaaatcgaccagggcgcgattgtcgataacaagcgtcttggccgaaccctggagtttatcagtctggtgcagagcaagcgggataacacgcgctctcagtcaattcccgctggtgatggcccttcccgacgacggccaaagcaggaagggaagaaatcccagcgctcactggataatgatgacatgctcgaagcactcaaacagcttcagtcacgttcagaggatatttttggtaaaagagcccgctga

SEQ ID NO: 216982 - DNA, 633 bp, Klebsiella pneumoniae
atgcttcgatacgagttaacgccgaacaatgcaggttttatactgtggggagattcagaagccctgaatgaattgcacgaactcgttcattacatcgtggatgaaagcccactgattaaagttaaagacggatttatgttatcccttgcctatgatattcgtaaagcgcgggaaggtaatcgtcgtgttgagcaacatcagtatgatcaacatgatacatataagctttatggtgttgagattttatggcctctggtcctggttcagtcctcaatactcagaaactcaatgggttatattcagacagacaaaaaccagctgtctgtcatgtatgcctttgaatacctgatagaatcagcattaacagagtctgaccgaacaacgtcgaatgatattatgcaaacagcaaaatatgcatcagactctgattttaatttcattgaggataatattgacagcaggtgctgctattttatcagcttatctccggagcaaagaaaaaagcagttaatcagtattgttcgctcttttgattcattatggggtaagtatgcccgtgaaaagcaggacataaagatgctgaacgaaatgaataatacatcatgggtctggccggacaatatcaactggtga

SEQ ID NO: 216983 - DNA, 1200 bp, Klebsiella pneumoniae
atggtcaggttcaggggtgcaaaaatgaaaaaaactgttttgctttcgtcaatgctgctgtttccattttttgctgatgcaactggttcaggggtggatttcgaactaaaatcgacaccagtgcctgatgctctgagcgttttttatactcaaattctgaaaaagccttttcggttgtctcccgatgtcgtggcattgactaacaaaaatatttcttttcacttaatgccagagcaggatgctagaaaattttttattgattacatggctgatatcggcgttcaatctaaaacaaaaaatggtgtcgatttctactatgtgccctctcaatcagcagaaaaaacagttttgcccaaattcagttacacctatagacccctgtatcggtctgtcgattatctggcatcacagatgcaatcattagccagtgacggtggtcagttctctggaggtggtgagaaaacggctgctgacatgttggttttttacggtacaaaatctgagattagacgtgtttctgaggcgctgccattggtagatattccggctgatgaggttctggtgtccggttatgtttatgaggtccagagtacgtcgaaaacgggttcaggtctgcaactggctgttaatttattgaattcaaaactgaatttacagattggtggaagttcagctagagggtatgacaattttctgaaaataggcaccggctctctgagtgcattggttgaactgtttaacacggattctagatttacgacggtttcggcaccgacattgcgggcgcgttctggttctcaggctgaattttcggttggtagttcaactcctacgctgggaactgttagttatcaggggcaatcggctgtacagtctgtgaactataaagactctgggattatttttaaaattttgccggaggttcgttttagtgtgattgacctgaatctgtctcaggaattatccaattttaccactactgataatggtgttaacgagtctccaacactgattaaacgggcaatttctactgatatctcattgaaagatggggatattattctgattggtggtctcgctgataacaaaaatactgatactaaaacgggattttctttgtttccgtttctgaccagcaagggtggcgattcaacaagaaccgatatcgttattgttttacaggtacgaaaaatccggtga

SEQ ID NO: 216984 - DNA, 1056 bp, Klebsiella pneumoniae
atggcgatttctgcatatgttggcgttcctgggagtggtaaaagttttgaggttgtccgcagtgtaataattcctgccgttgctcaggggcgtagggttgtatcaaatatttatggcctgaatgctgaaaggatttatgcttttgttcgtgataattataaaaacgctgatattggcgaggttttgtttgttacaaatgagcagattcaggacgaaaattttttcccctataaaaattcagattcagacggggtaaaaacctattgccagccgggggatttgatttgtgtcgatgaggcatggcgtatctgggcctcggactctaacatgcctaaaaaccataaatcatttttggcagagcatcgtcattttgttcatcctgaaactggtgtgacctgcgatttggttgttgcgaatcagtcaattactaatctgcctcgattcattcgagacagaatagaaataacgttcaaaatgactaaattaaaatctctcggcctcaactccagttatcgcgttgaaatatattcaggtgcaaaactgattaaatcggagttaaccagcaaacgaaattacaattttgataaaaaaatatttccactttatcagtcctatgatggtaacggtcaggaaaaaacagttgataagcggcagagtattttttcttccggccttctctggttaggcattattttttttatggttgttggtctctcgggagtttggtttttatgggggttttttcatggtgatgggttggggaaaaatgttaatgacaaaacggattcagcagcgttgacagttaatggtgctgttcaggctagaactaattcgaattctgttcaggtatctgtgtcgcggccagcggtttccagacagtggcgtgttatcggtgttatcagggataaggcggggcgttttgttgttctgtctggtgctgatgggcgtcagcgtgtcgagccagcggcgggatttattattaacggtgctgtaatcagtggcgttttagatggtgaggttgttacgacatggtcaggttcaggggtgcaaaaatga

SEQ ID NO: 216985 - DNA, 1254 bp, Klebsiella pneumoniae
atgaaaaaaattattttggttattattttaataatcctcccaatttcaagttatgcatttttgccattgctaatcgcaggcgccgattttgccggtgctgccgctctgcgtactgcgatttctcggggcgcggcccagctcgctgttagtgctgctgagaggcaggttcttgagaatgcaacaaaaacagcgttaaatcagtcagttaagcggttgattgcaatgtcgccaaaccctacaaaatttcagctcgccactggtgcaataacctgggcggggctgggctcggcactgctcgatctgggcgatgaaatttttggtgttgaccagagtgcgggggtttcctccggggattctgctgataatggccgaaaattctatgtcggggctggttcgggcggaacaaaaccttatttttcaggcgattacccagaaagtctgatttattcagcgtatcgttatcagtcctccaacggtctcctgccctgtaacagcgccagtggctgctcatattcggccagtttttctattctgagttcaagcactggctccagtggttctaccagttatcagattcagtaccaaaattcttatttgacgagttcaggttctacagcgacggttaatagaacggctaactataccgtcctgtctaacgccaattttgattcgtctatcacgccgcaatcagctgatatcactgctgaacaggaggagacggccaaaaatgccccgctgaatcctcaacggctggccgatgtggccaatgcgctgctattggacgcggctagtcagtccgattatgcgggtattccaatctccagttctaatccgctcgtaacagcgcaggatttcactgatgcactgactgctgtagggcgaacagagcccactaacgccgagtggactactccatgggaggatctggaaacaaatactgacactggtacagatacagggggagggactgattcggggtcaggcagtgagactgctactgaaccaacgctcgatagtcctcctgacggaaaaactattttgtcgcctctgctaaatatattcccagccgattggggtaatttttcggttggttcacgtgatgcagtctgtcctgtcggtgagttcgaaatatgggataaaaatttcgttatcgattctcattgtgggttgattgaacagaatcgcgaactgataaaaataatttttctgattgtctgggccttttcggcatttcgtcgggtaatgtccgcatga

SEQ ID NO: 216986 - DNA, 219 bp, Klebsiella pneumoniae
atgaagagatttttttcgctgtctgttctgtctaccgctattctggccccagctatgagttttgccgccgagggggatctcgatctctccaccttgaccgattcattctctgtcgcgccagtgattacgggagtgctggctattgcagcggttctgctcggcctatacgccgccatgcgcggtgccaaaattattctggcgctggttcgtggcggctaa

SEQ ID NO: 216987 - DNA, 309 bp, Klebsiella pneumoniae
atgacgattttaattcgtggaaaatttcttggtgcccgaaatcgcgaattcactaattcgcaggggagctactcgttttatgagatcggtgttgaaaattcccgccctgacgggtggggtggttcacagtcggttcagaccgctatacgagtgcctaaaaaattaattgattctggaattctcaataaaatttcctcattgcagggaaaaaatgttgaaattccaatttgggctgatgcgtacattgggaaaaatggcgctgcgataaattttttcctcgagagcgatcagatcacagagattaaatag

SEQ ID NO: 216988 - DNA, 996 bp, Klebsiella pneumoniae
atggcagttatcgttgacacggtttcgttcacgttccaaatgtccgcgctcagggatttggccgactattattatcctcggcccgttggattcggcccgtggccggttctaccagaatctggagatacaaatcagtttcaggatttgtgttgcgctgctctggaggatcgtgctcggtttttgttcagcgattatttcgggatggcgttatcgcctgctactggtagggggcggctgggctattacgatcactgtcgaattactgacctgtccggggctgtcgaattcggctatctggcgtttggtggcaatcgggacacggttcattgctatctgaatggtcacgcctgtaaagaattttttgagagaaaacaaccagttgaattgcatcattttttgactgagattctgggtgtctctcgactgaatcgcctcgatctcgcctacgacgattattctggtgtaaccggttttgactcggttatcgccgcatatgaccgtgatgcgttttattgtggaaagggcccgcgacccaagatcaccactattcaaagtcgatcagggaaaaccgatttaggatcaacaatatacgttggttctcgtcagtctcaggtttactggcgatcctacgacaaaaatgccgagcagggaatagttaaccccgtaacgccgtggtggcgacacgaggcagagctaaaaaaagtttccgtcgatttattattagatatttcagcggcttatgctggatgcaacgattttgctcgaacactggctgattctgagcccgttcgtgtccgcacaaaaattgaaaaaactgcggcaactctggattctcagatccgttgggggcgccgcctgattggtagaaccctgcgttcgctaatcgatctgttcgacgcgccaaccgctctggcgctactaactgctggggaacgtggtcgcctgcacctgacgccgggggagatcgcaacctatcgaacggcgttgcaaatatga

SEQ ID NO: 216989 - DNA, 222 bp, Klebsiella pneumoniae; identical to SEQ ID NO: 183785

SEQ ID NO: 216990 - DNA, 987 bp, Klebsiella pneumoniae
atgaactatacgcatcttggccgcaccggcctgaaagtcagccgcctttgtctcggaaccatgaattttggtgacgtcaccgacgagaagaccagcgcccgcattctggatgaggcgcttgaggcgggtatcaatttcattgatacagcagacgtgtatggcactgaacaatctcccgatatccagcaaggctcggggctgtccgaggaaattattggtcgctggcttcagcagggtggccgccgtgaacgcatcgttctggcgacaaaagtctatcagcctatgggaccgggcccgaacgatcgccggctttctgcgtatcatattcgcaaagcctgcgaggacagtttgcgacggcttaagaccgaccatattgacgtctatcagatgcatcacatcgatcgtcatacgccgtgggaagagatctggcaggccatggaactgcttgttcagcagggaaaggttctttatatcggtagcagcaatttcgcgggctgggacattgcgactgcgcagtcagtcgccacggcccgtcatttcctgggcctggtcgccgagcaaagtctttataatctgacagcccgcaccattgagctggaggtcattcccgcatgccgccattttggcctggggttgatcccctggagcccgcttgccggagggctgcttggcggcgtactgaaaaagatggcaagcgggcgccgtgccaggcccgcgtttgcccgccaaattgaagattatcgtccgcagctggaagcctatgaaggattatgtgatgacctcggcgaatccccttccgatgtggcgctggcctggctcctgcagaatcctgtcgttaccgctccactgattgggcctcgtacggtcgaacaactccagcaagcgcttcacgcaacgacaatcacgctatcagacgacaccatgagctgtctcgacgaaatctggcccggccccgggggagaagcgccccaggcttatgcctggtaa

SEQ ID NO: 216991 - DNA, 1251 bp, Klebsiella pneumoniae
atgttgagtaataactgttcgattctgctgattgacgatgatgccgatgtgctggatgcctatacgcagctgcttgagcaagcggggtatcatgtcagtgcctgtaataatccgtttgatgcgcgggagcaggtgccgaaggactggcccggcatcgttttaagcgatgtctgcatgcccggctgctccggtatcgatttaatgacagtgtttcatcaggatgacgatctgctgccgattctgcttatcaccggtcacggcgatgtgccgatggcggtggaggcggtgaaaaaaggggcctgggatttcctgcaaaagccgatcgatccgggcaagctgctcacgctggtggacgccgcgctgcgtcagaggcaatcggttatcgcccgtcgccagtattgtcagcaaaaattacaggttgagcttattggtcgcagccaatggacggttcggtatcgccagcgccttcagcagctggcagaaacggatattgcggtatggctttacggcgagccgggaaccggccgcatgaccggcgcgcgttacctgcaccagttaggacggcacgctgaaggtccgtttatcgcctgcgagctgactccggctaacgcccatacgcttaatgaactgatcgcccaggcccagggcggaacgctggtcttaagtcaccccgagcatctgactcacgagcaacagcatcagttggtacagctgcagagtcatgagaagcggccttttcgcctgattggtattggtagcgcttcgctggtggagttggccgccagcagccagatagtggcggaactctattactgcttcgcgatgacgcaaattggctgccagcctctgtcaaagcgacctgatgatatcgagccgctgtttcatcactatttgcaaaaaacctgtcaacggctgaatcatcccgtcccggaggtggatgctggtctgttgaaggggatgatgcgccgggtgtggccaaataacgttcgcgaactggcgaacgccgccgagctgtttgcagtaggggtattaccactcgcagaaacggttaatccgctgatgcacattggcgagccgacgccgctggatcagcgggttgaggacgtcgaacggcagatcatcaccgaagcgctgaatatccaccagggacgtattaatgaggtggcggagtatctgctgataccgcgtaaaaaactttatctcagaatgaagaagtatggtctgaataaagagcactacaaaggggtttag

SEQ ID NO: 216992 - DNA, 1995 bp, Klebsiella pneumoniae
atgctgcaacgcctgcggcaaatcagtatcagtagcagtctgcgcggggcatttctgacgggggcgctgcttacgctgattgtcagcagcgtaagcctctattcctggcatgaacaaagttcgcagagccgctattcgctggatgagtattttccgcgcatccatgcggcttttctgattgaagggaatctcaacctggtggtcgatcagctcaatgaatttctgctggcgccaaataccacggtacgactgcagctgcgcaaccagattatccagcatctggacaaaatagaacggctaagtcaggggttgttgccggcagaacgccagcagttgggggtgatattgcaggacagccgcgcgctgctggcggaactggatcgcgtgctctacaacatgtttctggttcgtgaaaaggtgggagagcttgcggcgcggatcgactggctgcacgatgatttcaccaccgagctgaattcgctggtgcaggattttacctggcaacagggaacgctgctcgatcagattgaagcccgacagggggatgcgaggcagtatctgaaacgcgcccgggaagtgcagaatgaacagcagcaggtctataccctggctcgtattgaaaatcagatcgttgacgacctgcgcgacaggctcaatgaactgaaatccgggaatgatgacggcatgctggtggagacgcatatccgctatcttgaaaacctgaaaaaaacggcggatgaaaatatccgtgcgctggatgactggccgagcaccattaccctgcgacaaacgattgatgagctgctggaaattggcatggtgaaaaataatatgccggataccatgcgcgactatgttagcgcgcaaaaagcgctcgtggaagccagccggtccagagaagcgacgctggggcgcttcagaacgctgctggaagcccagcttggcagcagtcaccagcagatgcagatgtttaatcagcgtatggcgcagattgtccgggtcagcggcgggttaatcctggtggcgacgatgctggcgctgctgctggcatgggggctgaaccattattttattcgctcgcggctggtgaaacgctttaccgcgctgaatcaggcggtggtgcagattggtctgggccggaccgaggcgaccattccggtttacgggcgcgacgagctaggacgtattgccggtttgcttcgtcataccctgggtcagcttaatgcgcaaaaacagcagctggaacaggagattggcgagcgaaaagcgattgaggccgatctgcgcgccacgcaggacgagctgatccagaccgctaaactggcggtggtgggacagacgatgaccaccctggcgcatgagattaatcagccgctgaacgcgctgtcgatgtatctttttacggcgggaagggcgatcgaacagggacaggcggagcaggcgcggacgaagttaagcaaagcagaagggctgatcaaccgcattgacgcgattatccgctccctgcgccagtttacccgccgcgcagaactggaaacgccgctgcatccggtcgatttgcgtcagacgtttaccgtggcgtgggaactgctggcgatgcgtcataagcctcagcaggggacgctggtgataccggatgacactgtctggatccagggggacgaagtgcgcgtccatcaggtgctggtgaacgtgctgtccaatgccctcgacgcctgcccgcacgccgcgcaaatcaccgtgagctggcaaatccagggcggaaggctgtgcgtgttgattgccgataacggccctggctggcctgcggccttactcccttcgctgttaaagccgttcactaccagtaaaaccgtggggctcggaatagggctttcgatatgtgtttcgctgatgacgcaaatggaaggggcgttgcgcctggcgtcgacgtttacacgcagtgcctgcgtggtgctggaattcaatttgacggatgtaaaagatgttgagtaa

SEQ ID NO: 216993 - DNA, 192 bp, Klebsiella pneumoniae
atgtccgcggcggcttccgacagcggtataaagcaagtattcctgccatcactgatgttgctgctgagtggcctacttcgccgggataatcagcacctgacccggatagattttgtcgggatgggtcagcatcggtttattggcttcaaaaatgcgttgatactcattggccgagccatacatcgcttttga

SEQ ID NO: 216994 - DNA, 873 bp, Klebsiella pneumoniae
atgcgtgtttacgttactggtaatattaccgtagatgaaacctggtccattccggatataccgaaaaaaggagcctccattcacggcgttaaagtgtcgcaggatatcggcggtaaaggcgcgaaccaggcgattatattatcccgctgcggaatagagacgcgtttaattgccgccacgggaaatgacagcaacggcgcgtggatccgccagcagataaaaaatgaaccactgacgctactacccgacggccatttcaatcaacatagcgatacctcgattattttaaatagcgctgatggcgacaacgccatcattaccactacggcggcggccgatacattcagcctggatgaaatgattccgcatatggcggatgccgtcgctggcgatattctgctacagcagggcaatttctccctcgataaaacgcgggcgctgttccagtacgccagaagccgcggcatgacgacggtattcaacccctcacctgtcaatcctgacttttgccatctgtggcccctcatcgacatcgcggtggtcaatgaatccgaggccgagctgctccagccatacggggtgaaaaccttagtgattacccagggcgccgcaggcgcctggctggtccaggagggccagcgtcagttttgtcccgccgtgcccgccgaggcgcttgatactaccggcgcgggcgacacgttcctcgccgtcatgttggcctccgccctgctgcgcggcgtcgcgccggatgcgctggcgctggcgcacgccagtcgcgctgccgccattacggttagccgccgggggacgctcagcgcgtttcccggcagccgtgagctcgccgccctgttaaccacggacggggcgcgctga

SEQ ID NO: 216995 - DNA, 756 bp, Klebsiella pneumoniae
atgcagaaaaaaatcttactggtcggtgagtcctggaccagcacgtcaacgcacgttaaaggcttcgaccagtttgccaccgccacctggcacaccggcgcaacggactttctggccgcgctcgccgaaagtccctatgccattacctatatgcccgcccacgcggcggcgaccgactttccgctgacgctggaagcgctgcaggagtgggatgcgattattctctcggacattggcgccaatacgctgctgctgcatccggacacctggctgaagagccgccgaaccgccaaccgtttaacgctcctgcatgattacgtggccggcgggggggcgctgatgatgatcggcggctattacagcttccagggaatcaacggcggcgcgcgctaccgccataccgaggtggagaaagtgctgccggtacgctgcctggcctgggacgatcgcattgaaaccccggaaggctgctatgccgaagtgacggaggctcaccccctgtttaacgatattccgggcgaatggccgtggctgctgggctataacgaagttgaaatgcacccggaaggcaaactgctggcgaccgtggccggtaccggtcatccgctgttggctgttcgcgaatatcagcagggtcgctcgctggtgtggaccagcgacatgtcggcgcactggctgccggaagagtttgccaaatggcccggctatcgccagctgtggattaactgcctcgactggctgacggaacgccgctga

SEQ ID NO: 216996 - DNA, 903 bp, Klebsiella pneumoniae
atgcggccagttcttgactttaatgcgctgaaaatcttcattgctgtggtggaaagagacagttttgtcggggcatcgaaagccctggaaatgccgacatcaaatgtgagccgttgcatttctcagttagaagacaaactgaaccttcagctcattgagcgcagtacccgacatatgaagctcacacaggctgggcatctactctatacccgggcgaagccattactggaagcacttgagcaaactgaaaccgaattaacgttgcgacaaatgcaattcaaggggccattacgtatctgtattcccaatgaaatcggtcctgtattgctgggctctgttgttgctgatttcgcctgtcagcatccggatctggagatgagttgcgtcacaaatttgtcgggttatgaatccctgcgagatgatctggatttagctgtcattgttagccgtggtcagatggatgacagtgactacatcgcccgtcatctggtgacgatcccttgcaccatcgttgcggccccctccgtcatccagcgttatggcacgccttctcgaatacagcaatttgaagagttaccctgtattacaacggtgaatgcgcttaaaggcgctccctggcagtttgtgaataaaaagggcggattcgagacgatcaaggttaacggtcgttatcgggtcaacagcggagagatggcagggcgagcggccatctcaggtgtcggttttgccatcctgtcgaaacaagcctgccaaccctatattgatgatgggcggttaatcgagattgaatttgaacaatcggcagcccccttgcaattgttcgctctgtattcagatcggcgttacttgccggcaaaaacaagagcgcttattgatttcatgcatcagagattgagtcattaa

SEQ ID NO: 216997 - DNA, 1656 bp, Klebsiella pneumoniae
gtgaaacaaacattcctttccggcgcgacccttgccgccctggtgatgctggtcgcgttaccgttagtgtttattgtgctgcaggcgatttttccccattttagcgccggttcgctcggggacgcctttggcggcatcccggcgctgctggccgatcctcagctgccggcgatgctcggcggtacgctgtggatcgccgccggcgtggcgctggtcagcgtaatgattggcctgccgctcggcatcctgcgcggtatgttttcgctgccgctgccccggctgtgggatctcctgtttttgatcccctttctgacgccgccctatatctcggcgctctcctggatgctggccctgcaaagccagggctatctgcagcagctgaccggctggcagctgaacgatctgctgttcagccgcagcgggatcgtgctggtgatgacctttaatatatttccggtggtctactttgccgtctcccgcagcctgctggcgagcgggacccggctggcggtggtcgcccgcgtccatggcgccagcgcctggcgcgccttctggcacgtgacgctaccgatgctctctccggcgctggcggcggggatgctgctggcgtttaccctcgccatcgaggagtttggcgtaccggcggcgctgggcagccgggcgggagtggtgatgctgacggtcggtattgagaaaaagctggccgactggccggtggatctccctggcgccgcgctattgtcgctgctgctgatggcggtagcgttgttcgcctggtggctgcaaaggcggctggtgggggagaaagaggtcaccagcgtcaccggtaagccgggggagaaccacggggcatcgctgggctggatgatgctgcccgccgtgctggcgatggcggccgtcggcggcctggcggtcggcgtccccgccgtctcgatgatgctcaccagcgtgatgggcacgctctccggtggcgtgagtgttgagaatgtcacactgcgtcatttcgcggcgctgtttgaccagcagggagatgccctgtcggccctcggcaccagcctgtcgctggccctgggttcggcgctaatcgtcggcgcgctgggcctgctggccgcctggctggtgatggtgcagaagattaaagggcgcgggatggtggacgcgctgtcgctgatgccggcggcgctgccgggcgtggtggtgggggtcggtttgatcctgctgtggaatcagcccttctggccgcgctcgccctataacacgctgtggatgctgctgctctcctattgctgcctgctgttgccctggccggtgcgctatgtcggcagcgcgctgcgccagctgggcccgaaccttgagcccgccgccagggtgcacggggcgtcgccactgcaggcgctgcggttgattgtcctgccgctggtctttccggcgctgctggcggcgatgctgatggtgttcgcggtggcctcccgggagctggtgacctcgctgctgctctctccggccggtacgcaaaccgtggcggtgtttatctggcgccagttcgaacagggttccgtcggtcagggcatggcgatggccagcctgacgttgttgaccggtctggtcctgatgctgacggcgctggcgctgatgcagcgccgcacgcgcggttaa

SEQ ID NO: 216998 - DNA, 1569 bp, Klebsiella pneumoniae
atgtcacaagcaattcaatacaattccagcgtggcgatgatccgtcacccgcgctttttacagcgtgcggccgacctgacgcccgcgctgcaacgcctgcgccagacgccgcaggccatcgtcgaggccgtcgctgaaccaggagcgctgaacggctggcgggggaataccatctgcacgccggagcagttttatcagcaaccgctcaacgtcggcgacagcatcattattgattttggcagccattttgttggctacctgcagttcagctgccgcagcgtcggcagcccgcccgatgccccggcccatctgcacttcaccttcggcgagacgctgagcgaagtctgtgagccgttcagcgaataccagggatggctgagcagcagctggttgcagcagcaggatctgtggcttgacgtcctgcccgcccgggtcgctctgccacgtcgctattgcctgcgctacctgaaggtggaggtcaaagcgctgtcgcgcaagtttcgtctgcagttcgatgagatcgctctggaaaccgtcacctctgccggcagcccgcacccggcggtcatcgccgatccgcagttgaaagccattgatgacgttgccgttcgtaccctgaaaaactgcatgcaggaggtgtttgaagatgggccgaaacgcgaccgtcggctgtggctgggcgacctgcgcctgcaggcgcaggtgaatgacgtgaccttcggccaccacgatctggtccgccgctgcctgtatctctttgccggccatacccgggaagatggcatggtttccgccaatgtctttgttcagccagaggtacgcgccgatgacacctttctgtttgattactcattgttttttgtcgacgtgctttataactacctgcaaagcaccggcgacacggaaaccgtcggtgagctgtggcccacggcgcggcggcaaatcgagctggcgctgacccgctgcgattctcaggggctggtgcgcgacagcgatgactggtgggtctttatcgactggcaggcggagctgaataaacaggcgtcggcgcagggggtgctcatctactgtctgcagcgcgccctctggctggcgcagcgttttgaaccgcagcgggtacccgactacactgccacgctctggcagttgaaggaggccgccctccaccacctgtgggacaacgagcggcaggtgtttatcagcggcgccgtgcgtcaggtctcatgggcgtcgcagatctggctggtgctggcggaagttggcaccgccgggcagcgtcaggcgctgatgcgccgcctgcagcagcagccgcccgccattgccatgaataccccgtacctgcgtcatcatcacattgttgccctgctacagtccggcctgcgcgaggaggcggtggcggagatcaaagcctactggggggcgatggtcgcctatggcgccgacaccttctgggaaattttcgacccccaacatcctgacttttccccgtatggcagtaagcttatcaacagttactgccatgcgtggagctgtaccccggcctggtttattcgccagtacggactttaa

SEQ ID NO: 216999 - DNA, 1383 bp, Klebsiella pneumoniae
atggcagaaacaacgtttaccctgtggcggcagcgccttggctatggcattgccgatctctcctgcaaccttgtgtggcagatgatctctctgtatctgatgttcttttacaccgacgtcatgggtctcccggcctattatgtcggcctgatgttcctggtcacccggctggtagacggcgtggccgacgtgctgatggggctggtgatcgacaataccaccacccgctgggggcgctgccgcccctggctgctgatcggcgccctgccttttggcctgctgtgtattctggccttttatgtgccggatttcggcaccaccggcaaactgctgtacgcctttgtcacctatctgtgtctgtcgttcctctacaccctggtgaatattccgttctgcgccatgctgccgtttttaaccagtgattccgcagaacgcaccacgctgtcggcggtgcgcattttgctgggctcccttggcgccaccatcgtcgccgtggctacgctgccgctggtcggcatgctaggcaaaggcaaccagcagcagggattcctctataccgcggtgatttttggcgtactggcggcctttttcctgctggtgagctttcgcaacgtcgaagaaaagatcacccttaccggggagcgcatgaccctgaaacgcgcctggattagtctgcgcgccaatcgtccgtggtgggtcttcgccagcaatatctttctgatgtggggtgcctttttctttcagaccggagccctggtgtacttcttccattattacgtcgggaataccgagctgacggcggttatcgccgggatctccaccttcgttcccctgctcggcaccctcaccgtcccgctgctggcccgacgcatgaaaaaacgtcatgtctatctggtggccagcgcggtcaatctgctcgggatggggattatgatggtgtctggcgcccacgttctgggactgatcgtcggggccgtgatcctctccctcggcgccggccaacgcacggctatctatttctcgatgcaggccgacccggtggattacggcgtgtggaaaaccgggattaataccgcagggatcctgacctcgataaacggttttctcggcaaggtggcgatggctggtgccggggctatcaccggcgtgctgctctcctccagcggctatatcgccaaccacacgcagagcgacagcgccctgttggccatcaaggcctgctatctatacattccggcgctattgatcctcgcctcgatgctgtggatgggccgcttctaccgcctcgacgatcagtatgagcagattcgtgccgaccttgatgccggacgcggcgcctcgccagccccggccccgaccgccggagaatcccccgccatgtaa

SEQ ID NO: 217000 - DNA, 918 bp, Klebsiella pneumoniae
atggacagcctcacctcgctgacgtcctttgtccgcaccgccgaaacgctgagctttgttcaggccgccaggctgctgggcatatctgcctcggcggtgggtaagaatgtcgcccggctggagcataaactgggggtccggctgttcaaccgcagcaccagaaacgtcagcctgacggcggagggggccgcatttctgacccgctgtcagagtatcctggagcagatccaggaggccgagtcagagctgaccagcagtctctcacagcccaccggcaaactgaggatttcactgcccgtcattggctaccgcctgttgctccccgtcctcaccgcctttagccgtctttatccgcaggttgaactggatctcgactttagcgaccggctggtcaatctgatcgatgagggggttgatgtcgctatccgcagcggtgaattagcggactcccgcttgatcgccagaacgctgggaggctttcgttttgtgctctgtgccagcccggcctatctggcggaatacggcgcccccgactcgccagcggaattggcggcgcacaagtgcattttttttcgcttccccgcgacggggctgatccagccctgggaactgcgcgatatgcggctgacgggagatttcagggccgctgccgcgatgacggtcaataacattgaggccgccattcgcttaagcgcggcggggatgggcatcgcttatgtgcctgattttgtcgtgcgcgaggccatggatgagggacaactgcaggaggtgttgcccgggtgttgcgtcaaggatgggcatttctccgtcctgtggcccgccagccgctacctgtcaccaagaatacgctgttttatcgattttatagctgcggcagagatacctttgtcgcccgcatcggcaagccctaccacctga

SEQ ID NO: 217001 - DNA, 990 bp, Klebsiella pneumoniae
atgacctcaaccacccagaatcaacgctacgccttacaggaactggaaaaagaggcgctgatgggcgccgagggcgaagagaccttcgcccgcgaagtgcgctgtatcgacctgtcgaactttgccgcaagaaaaaatgacattgccgaacaactgtgggaggcggcggtggagattggcttcttccaggtcagccatcacggtattccgctggcggatatccgccaggcgttcagcatgaccgaggcgtttttcgacctgcccgacgaggtgaagcgccagtatccgctggccggtaacgccggctgggaaagcaaagcgcaggttcggccgtcgacccgcaccccggatcaaaaagagtcgtatcagatcacccggccgctgatggccgggcgctggcccagcgatcgggagctgccaggcttccggcagacgatgctcgggtttgagtcgcagtgctggcagctggggatgaagatcctctcctgctttgctttgaagctcggttttccggaatcgttttttaccaccgcgcacgatccgcagcgtgacacctatcagagcaccttgcgcatgctgcattactatgcaaccgagcagtcgcagcaggggatgtggcgggccggcgcgcacaccgattttgactgcctgacgctgctgttccagcgccccggccagggcggcctgcaggtttgtcccggtaaagaccgcgaaagccagcagtggaccagcattgagccgcgggaggaggtgatcacctgcaatatcggcgatatgctgatgcgctggagcgacgaccagctgccgtctaacttccatcgggtgagaaatccgctgccccatgaatatcaggggccgcgctacagcctggcgtttttttgccaggccaataaagatgtcgagatcctcgggccgcagaggaagtacccgcccatcagcgccgaggattatctgcagcagcggatccaggccaattttgccaaagggtaa

SEQ ID NO: 217002 - DNA, 1419 bp, Klebsiella pneumoniae
atgtcattaatgattaaaaatgcccatgccatcctcagcggtctgcccggagaggcggcgcggctggccgggccggatattcgcatccgcgacggcaagattgccgccatcggcagcctgacgccgctgccggaagagcgacagatcgatgcccgcgactgcgtgatctatccggcgtgggtgaacacgcaccaccatctttttcagtcgctgctgaagggcgagccgcaggggctgaaccagagcctgacggcctggctgagcgccacgccgtaccgctttcgcgcggctttcgatgaacatacctttcgtctggcggtgcgcattggcctggtggagcttctgcgctcgggctgcgccagcgtggcggatcacaactacctgtactggccggatatgcctttcgatacctcggagattgtcttcagcgaaggggaagcactggggatgcgcatcgtcctgtgccggggtggggcgacccagggccgggcggtggaacaggatctgccggtggcgctgcgtccggaaaccttcgacggctatatggcggatgtcgaacggctggtcagccgctatcacgacccccggcccgagtctctgcgccgggtggtgatggcgcccactaccgtcctgcactccgcgccgggcgcccagctgcgggagatggcgaagctggcccgccagctgaggatccggctgcacagccatttatcggaaaccgtcgattatctcgacgccgcgcggcagaaattcgccatgacgccggtgcagttctgcgcggaacacgactggctgggaaatgacgtgtggtttgctcatctggtgaagctgctgccggaggagattgccctgctgggccgtaccggaaccggcatcgcccactgcccgcaaagcaacggccggctgggcagcggcatcgccgatctgctggcgttagagcaggccggggtcccggtctcgctgggggtcgacggcgccgcctcgaatgaagcggcggatatgcaaagcgaagcccatgccgcatggctgctgcagcgcgcgcgcaaggggatgctggcgcagccgcgctacgccgggggcacctttgagggtggggccgatgcagccacggtggaggatgtagtgcgctggggcagcgccggaggggcgcagatcctcggcttagcgcagagcggcaccctgcaggtcgggatgcaggcggaccttgccatttaccggctggacgatccgcgctacttcggcctgcacgatatggccattgggccggtggcctgcggtgggcgcgccgcgctgaaggcgctgctgctcaatggccgccccatcgtggaagacgacgccattcccggtctcgaccttgacgcgatgcgtcacgacgcgctggcggccgtccgtaccctccaacagcgcgccgctgtttaa

SEQ ID NO: 217003 - DNA, 768 bp, Klebsiella pneumoniae
atgcagttgctgttgtcgaatcgggccgatgtgatcatcggttacgacctgcagctgctggaaggcattcagcgcggcttccaggcaaaagccattgccgcgccctttcagtacgatccccaggggctgctgacccatgccgatgtcacctctctgcaggggctgaaagacaaaaccctgctggtctccagctccggtcaggcgacgtggtggccgtggctgaaggcgcaataccagctgagcgacgcgcaggttcgcccctataccttcaatattcaaccctttgtcgtcgatgacgctgtcgcccagcaggcctatgtcagctccgaggtgttccaggtgcagaaggccggagtgaaggcgaacttcttcctcttttccgagcacggctatcccccctacggcggcatccttatcgcccgcccggataccatcgccgagcgtaaagcggcgatggcgaagtttgtccgcgcctcaatggagggctgggtgagctatctcaaggatccggcgccgggcaatgcgttgattaagcaggacaacccgaaaatgaccgacgatctgctcgcctggggcgtgacccagatccgtgagcatcacctgatcgacggcggggatgccgccagccagggctgggggacgatgaccgacgctcgctggcagaagacccgcgactttatggtcagcgccggtttgctggcggcggccaccgactggaaacaggcctacactaccgaatttgttcaggccatgcaggttaaaccctga

SEQ ID NO: 217004 - DNA, 900 bp, Klebsiella pneumoniae
atgtttgccttctcccgatttctgctctatttcaccgaagtggcccgtcagggatcgtttcgtaaagcgtcagaggcgctgcatgtgtcggcgtcttccatcgaccgtcagattttgcgcgtggaacaggagctggcgatgccgctcttcgagcgccatcccagcgggctgaggctgaccgccgccggggagctgctcctgcacgcggccaataactggaaaaaggactttacccgggtctgcgagcagctggacgatctgcgcgggttgcggcgggggcatgtgcgcatcgccaccatcgatgccattaaccggcatttcttttcgacgatgctcaaagaggtgcataaacattatcccaacatctcttttacattgaccaccatcaacaatatccacatccagcaggcgctgatctccggcgaggcggatttcggcatcatgctcaatccccagacctctcgtgaactgcaggtccgggcgtttgccgagatgaatatggggattgtggtgcccaccggccatccgctggccagccgcagcgcggtgcgctttagtcagtgcctcgactacccctttatcctgccgtccgccccattgatgatcagcgagccggtggaggcgctggtgaacatcagcggcaacgaggtaaaggaggtggcggtatcgaataacattcacatgatccgcaccctgatcaaagagcagatgggcatcggcatcctgtgccggctggatattctcgatgaaattgagtccggccagctggcgtttgtgccgctaaccgatccgcagcttaagcctttcaccctggcgctgtgcgtctcgcccgcccgccagctttcccttgccgcctcgatgatgctgaaccagctggagatgctcttcagccagctgtga

SEQ ID NO: 217005 - DNA, 984 bp, Klebsiella pneumoniae
atgaataccagattgacgcccgtttttaccctgctgaccgtggccgccctcgcgacctcagcctcctgcttcgcggcggagaagtttacctttctcaccaactggtatgcccaggccgagcacggcgggttttaccaggcccaggccaccgggctgtatcaacacgccggtctcgatgtcgaaattaaaatgggcggcccgcagatcaacgtcatgcagctgatggcggccggtcaggcggactgcacccttggcgacaacggccaggcgctggagacctggcaggccggggtgcacgcggtgaccgtcgccaccgtgttccagcactcgccgacggtgtttatcacccatgacaaggtggagaacccggcggaacttaaagacaaaaccttcctgctcgccaccgaggcctatacctccttctggccgtgggcgaaaagcgagctgggtctggctggcagcaaagtgcgcccctatacctttaacgttcagccgttcctcgccgataaaaatctggtgcagcagggctacgtgacctcggagccgttctccgtcgccaaaggcggacagccgttctatgtctatccgctcagcgactggggatatccgccctacggcaactcgattatctgtatggccgacaccatccgcaaacgtccggcggcggtggcggccttcgtcaaagcctccatggaaggctggaaaagctacctgcaggatcccgcccccggcaacaacctgatcggcaaagcgaatccgcagatgggcgccgagcagatcgcctttggcattgcccagatgaagcagtaccagctggtgaccggcggcgatgctaagaccggcggcatcggcatcatcaccgagccgcggctgaagaaaacctgggacatgctggtgaaaaacaaactgatcgacgccagcaaggtgccgtttgagcagacttacaccctggagatggtcaaagacgccggagtgatgccatga

SEQ ID NO: 217006 - DNA, 831 bp, Klebsiella pneumoniae
atgaataccgccccaaaactgaccgtgatgagcgatacccgctttatacccgccgctgccaccccggccatcgaggtgctgtcggcggagaaaatctacagcaacggcacccgggcgctgctgcccgtcaacctgaccatcaatcagggggagtttattaccctgctcggcccgtccggctgcggtaaaagcaccctgctgaagatggtcgccggcctggtggagcccagcgacggcaagctgatgctgtggcggcgcgatagccgggagaaagcccagcatccgctgtcgttcgtcttccaggaagccaccctgatgccgtggagcagcgtgcgcaataacgtcaggctgccgctggatctggccggcgtgccgcgcgcggaaggtaatacccgggtgagtgaagtccttgaactggtggggctgggcaaattcgccgacgtcctgccgcgcgaactctccggcggcatgcaaatgcgcgtctccatcgcccgcggcctggtcacccgaccaaagctgctgctgatggatgagcccttcggcgcgctggatgaaattacgcgtaacaaactcgacagcgacctgctgcgtctctggcaggagcagaacctgacggtggtgtttgtcacccactcgatccacgaagcggtgtttctctcacagcgggtgatcatgatggcggcccgtcccggacgggtggtggaagatatcgccatccgggagccgttcccgcgcagcgaggcgttccgcgtcagtccggccttttccctgtatgcccgtcagctgcaggacagtctgttgcaggccagccagtccggtatggagtcataa

SEQ ID NO: 217007 - DNA, 960 bp, Klebsiella pneumoniae
atgcatctcttgatccttaacctgacaacgtctcaagccacgctgcgcatgcgtgtctggcgaaccctgaagcagagcggggcggtggtcctgcgcgatggggtctatctgctgcccgacgtgcgccagggctatgacactttcctcagcacctgccaggcgatccgcgcggaaggggggaccgggtatgttttcacgattgaggcggcggaagaagaggcgctcaggccgctattcgatcgtcgtgaacagtacgacgcgctgttgcaggatctgcaggcgctgcaggggacgttatccaacgacgaactggcggctcagctcaaacaactgcgtaaaattcagcgtgactaccggcggatcgaggccattgatttctttccgggggccgcccgggagcaagccgctgagcgactggccactatcgagcaggtcattaatcagcggctatcgccgaacgagccgcagtcggtggcgggcgaactgagcctgctggacagaggcgcctttcgcggccggctgtgggccacccgccgacgcccgtgggtcgatcgtctggccagcgcctggcttatccggcgctttattgacgacgaggcgcggttcctgtggctggccgcgcccgagacctgtccggcgacggcggtcggttttgattttgacggcgcgccattcagccatgtcggcacgctggtgaccttcgaagtactggtccggcgttttgtgctggacgcggtgatccccgacagtctgggacggttgatccacttcctggacgtcggtggggtaccgaccccggaggcggcgggggtagaaagcattcttgcagggctgcgggaaaccattacggacgatgaccaactgctggcggcagcttgctcgctgttcgacggcttactgaggtcctgtgaaatgaggtctggcaatcatgagcaaaacggtcgttcttccgcagagtga

SEQ ID NO: 217008 - DNA, 1179 bp, Klebsiella pneumoniae
atgctgccgctggcggtgcagaacaaaaacatctttcgcctggctgccgctcaggcgctggccggcgccaactcggtggtcttctacgctaccggcgcgatagtgggtaacgcgattgcccccagcccgtcgctggccacgctgccgatcaccctgtttgtgctggggatggcggcctccattctgcctttcggcgcgctggcgcgaacgcggggccgcaaagcggcgttcaggctcggcaccggcgccgggatggtgaccggactggcggccgccctggcggtagtgctgaattcttttctgctgttttgtctcgccgcgatgcttggcggcgcctatgctgccgtggcgctcagttttcgttttgccgccaccgacggcgtcgccccggcgcgtcgcgcccgtgcgctgtcgctggtgatgggcggcggtgtggccgccgggatcattggcccgatgctggtcaccggcaccatgcacctctggccggcacataccttcgccgtcaccttcctcgctcaggcgctggttgcagtgctggccgcctttttgttgagaggggtgacgccggcggagcccaccgcggccagcgtgcgcggagggcggccgctgcgcgagattgtccgccagccgggttttgccactacggtattcagcggcgcggtggcctatatggtgatgaattttctgatgaccgccgcgccgctctccatgcatatgcacggtctttcccagcaggccgccaaccttgggatccagtggcatgtgatggcgatgtacggcccgggatttttcaccggccggctgatccagcgcttcggcgcagtgcgaatggcggcggcgggattgctgatcaccgccgcgtcggtggcggtcggcctgagcggtctcggcgtgtatcattactggctgtcgctgattttgctcggcatcggctggaactttggcttcaccggcgcctcggcgaaaatcatcgatttccaccgcccggaagagaagacccaggttcagtcgctcaacgattttctggtcttcggcgtgatgatcgtggggtcgttttcgtccggggttctgctcaacgccttcggctggaacgccgtgctgtggggctccctggtcccggttgcggtggcgttgttgaccctgctgctgcgccccttatccccatcccgcgcttag

SEQ ID NO: 217009 - DNA, 582 bp, Klebsiella pneumoniae
atgttatgtcttggatatatggatggcgcttcgactgtaggtgtttattcagttgctgctaccttggcaacgtcatggggatttatctgccagtcttttattaagtcgacgttaccctcaatattttcggagaaagaacatcatttagcaataatgaagtcagcaacgttaagcgtattggttgtatgtattgcatcgccaattcttcttggggcatttatttttggtgaatggtttataaatatattttatggtgaaaaatatcaggcagcctttataccgatgatgatattatcattctccactgttatttctgccttaggtaccatatcagctagattcatcgccaggatgtctggctatgggtttctatctaaaaagatgctggtagttgcaatagttagcttgctttttaatgttgttttgataaattattacggaattataggtgcatctattgctactatcgttacggagatattatcacttactttgttaaattatttcttccacaaaggtattgttttccagatacataaaatgattattttaaaaaatttatttcttttaaaaagaaagtga

SEQ ID NO: 217010 - DNA, 1146 bp, Klebsiella pneumoniae
atgaataacgttggaattgtcactgactggcttgttacttatgctggtgcagaaagagttgttaaagaatttatcgatttatatccaactgcggaattatattcagtcattgatttcttgaatgacgaagcccgaaagcaattaaacaataagcaagccaaaacgacgtttattcaaaatcttcctttttccagaactaactatcaaaaatatttgccactcatgccattagccatagaacaactagacgtcacttctcatgatgttgttttgtctagtagtcatgctgtggcaaagggcgttctcaccggacccgatcaattacatttaagttatgttcattcacctattcgttatgcttgggatttacagcatcaatacttgcgagaatcctttctaaataaagggattaaaggaacgctcgcaaagatcttgttacataaaatgcgaatatgggattatcgtactgctaatggtgttgatcacttcattgctaactctaaatttattgcaagacgtattaagaaagtatacggtcgagatgctgacgtgatctaccctcctgttgatgtagaacgttttacattaaatgaaaataaagaaaattactattttactgcatccagattagttccatataaacgtattgatcttattgttgaggcattcagtcacatgccggataagaaacttctggtaattggagatggctctgaaatgaataagataaaatctaaagcttccaaaaatattgaaatcttaggatatcagcccaattcagtaatgcaggagcatatgaagaatgcaaaagcctttgtctttgctgctgaagaagactttggaataacgcctgttgaagcgcaggcttgtggtacccctgttattgcatatgggaaaggtggggcattagagacagtccgtcctcttggccagaatagtgctactgggttattttttggtaagcaggacgttacttctattgtagaagcagtgaataaatttgaaatatcaatttcggaattacaaccagccgactgtagaagtaatgctctaaaattctctgctcaacgctttaaggacgaaatgggaaggtacatagaaaataaatggttagagtttcaagatgctaaaaaaattgtttattga

SEQ ID NO: 217011 - DNA, 1356 bp, Klebsiella pneumoniae
atgacacaaatactgggaaccggagagggaaaaacatcatcagtcgcaaaagagccggttgttgagcgtaaacccgcacaggtattttttgaatcaatggcgctggctgcctcaatgagtggttattatgcagggccaacagccacaacgctgggaaattcgctttcattaggggcggggactgcggcaggtgtcggagaaggcgtcgcgggcgcacgggtgctggctgcgcctaatcccctcaccgttgctctgctggctatcttctattctccgtcactgaatgaaggtgagacggaaatgctacaaaatatacgtggcgaccagctctatcagaatctgatccatagccagatgatggtgggcgcttttacccgtgtaaactcaacggtcattcagggggattatgtcccggaatatgaactccgggaaatagcccgacaaaatggcacagtgcacacgagggtgcgctttcgtattgaagaagatcctgagtcaggggaactggtttcccgcagctatgaggtgggggaaaaaagcgggctggatcgggtccgggtgcggtttgcaaaacagctgaataaagagacatggggctttgaagatccttcaattaaaggaacatttgtctggtcccggtctgccgggcagggaaaatttgagtggggatccagtcagactactgttcatgacgggggcgctggcggctctaccacaccgcctacacccattccggaaccgcggagcgtctggggattgcctaacccggccccggcatcgttaccgcccgtaccgggaacgccgatcccggaggaacagggaccaaatattgaaacattgcccatcgaagaccgggatttcaatgactttattattgttgacccgatggggggtgtcccggcaatctatgtttattttcagaaagcttcagttagagatttagaggttgactattacggaaattttgaaggtcgttcaaggcagggcctatatgaagtggatcatattccttcaaaggaagctgttaggatatatttgaaagggacatatccaaacctgaaagatgacattatagaacaaatgactgacagagtggctgctgtcgctataccgatagaagtacaccggcaatgtagtgaaacctatggtgggaaaaacaatagtaaatttagaacacaagacggaggattagtcactcaaaaagttctagatgccagtaatttagaagctgcagttgatgctaactgggatgtcaatgctgagtgccttaggaatgaatatggtgtaagtgatgaaaaaattgaagagatcagggccaaactacatgagataaaccggaaagcggggttgtattaa

SEQ ID NO: 217012 - DNA, 507 bp, Klebsiella pneumoniae; identical to SEQ ID NO: 214891

SEQ ID NO: 217013 - DNA, 1437 bp, Klebsiella pneumoniae
atggagcgggtgcatcagcggaatataatccgtcagaaaaaactggagggaaaaattgaaggtcatgccagttttgcactgggggaggcgaaggccgaaacggccctgtacctgccggacaggttaggtgtcagccttttattttcggcgaaaaaagtgactccacagacaccggatggtgtctgtaatatgggagcgctgcgttttgccatgaaactggtattgtcaggtagcgttggtgccagtgctgcaattgaattaggggtgacagcagactggagtggagaaatgggaaagggctatggcattaaaggccgtcctgcaaccctgactgctccaccgttgccaggacagcagcaggtgaatttaaagacctcaacaatacctgaagcacaggggggaggtgaaattggtgtttttgttggtgctcaggcgggaggtaatatcagtggtgccattgagtggtttgacccgcatcctgatgatacgccagtagctataggtgttgagaaagataacaaaccccttgtcaataaagagaagaagtttgccgcgatagccaaactggaagcggggatgacggtgcaggcaggcgctgggggaagtggggttttttatatcacctatattcagggacgttttcgtatttactgtaaagcggctttatgttggggagtgggagccaaaggggaagtcggttttgaagttgatggcagcagttttgcggcttttatgaagagttttatgtttatgctaaggaatgtggattatcagaagcttgagcagatgatggcaggagatgccttccgttctttatgtgcaattcctattattatggcggcacaagggatacaggcgggtgaggccatgctaaagaatatgggaataatattacgacgaattgaaaccgatcttgaagatgaaaataagcgcgttcatctgatgaatagtattttgtcaaaccccgaccagcttaaatatacccctccggaaacaaaaggggcagtgattgccacattaattgatcagaactgggtggactggcttgaccctcgcaatcagaataatgattttttttccgttaacagctggaagctcggtcctctaaagaggcgaaaacaagcggtgtttatggcattgaagtgggtacaaagtcaggcagattataacaatatcatgcagcatttgacgttgtcgccaggggagaagaaaggcaataaagaactgaatgaaaaagatgtgattaagtttttaggcattggagaacgaaaattgtttttctataccaattatggcgaaaagctcaccttattgcataataaccttccggtttccgttggcccggatgaaccatttagacctattccggatatcctgatgtcagaatatcttgccatggttgacgagcagcatccaactaatacaatgattgcttga

SEQ ID NO: 217014 - DNA, 894 bp, Klebsiella pneumoniae
atgagaaaattaatcgtagttgcttctgttgctgccagtttactgctcgggtgtgaccagaagagtgctgacaagcgtgaaaccctgtctgaagcgcttgttgctaagtcactctctaacatggttcccgttcagggcggcgagtttttaatgggggattttggaccattagtcggtcaaaaactacctttcagcataaaccaggatgataaggtattacataaagttgtattaagtgatttttcgatatcaaagtttaaagttaccaacgatgattataataaatatctgcaaataacaggggtaaaaaaagcacccatccatatttttttaaaaaattatccatccttgcaaaaaggagattattctgttggtgttacctggcaacaggcaaaagactattgtcagtggttaggtaaggagtctggtaacaagattgatttaccaacagaggcgcaatgggaatatgcagcaagatccagaggtcaatattttcagtttccaacaaataatggtgagtatttacctggaaaaaatgttccgggtaaagatgaattagataaatatacagatggttttggtttcccattttacccagtaggcaaatatcccccaaatcccctgggtctgtatgacatgggacttagtggctcagaatggaccaatgactggtatgcgtcagattattactctcattctccggtaaacgatccccagggacctgcgcagggtactaaaaaagtcctgcgtggatatattggcggcgacagacagtacgctttaaccatgttcaggcaatcaaaattgccagttccgaagatcgataaagacgatgactatgaaaaatatggtgttggcccgcagtatgtctttcgttgtgtcgttaataaataa

SEQ ID NO: 217015 - DNA, 1158 bp, Klebsiella pneumoniae
atgggctgggtacgaacaaaagcattgaccatggagcagccatcggctccttcactgacccgatggctgtttgccggtgtactgatggcgattatcggtgtcctgttctttatcctccatgcctccggcaccgtaaaaattatctcagtgataaatatctggtgggtatccctgatgcctgcaggatgctggttgctgattttttgcctgcgttgctacctgtgggacagggatctgaaagcgcatcagttcttgctgaaagaggcggaatacggacagcagaggtgggaagactgggccgggcgctggctggccgttctgagcagtgcagtgctgttgccggatcatatttctgcggcgcattgggggagtgagcggcctcagcaatacggacttgcccgcaggattaattaccttccggcagaagagcccgtgcagttgagtgcgatgcatgcgctgctgaccagtatagaagagcgcgtgcagtgcctgccggaagagctaccgctgtatgtcaccctgatcacggataatccctcgcctgagctgaccagcagtttcagtaatctctggaaagaacacattcctggccgcgccgtgcctgatgatattaccgttaccggctcattctcactgtcggaagtggaggagcgcctgaagcagcctgtactgacggtcaatttactcctggtcatccagctcaacggtggtacagcatactccgacgggctggccgtgctgctgctgaccagcgatgatgtggcgcaaaaataccatctgccgcactcatcacggctgttacgtcctatgcccttagatatgacgaactttgaagacgatatcaccctgtttctggaaacccagactgtcgcctgccatacgccctccgttatcggggacgcaaaaaaatggacggaaagaagcgccgcgcttatcacgcagggcggcaaaatgcataccccatggaaagctgaagatatcgcgctgctggaaaaatggtgcggtattccgggacccgcagcgccctggctcctgaccgcgctggcagccgatctggtcagcctccgtaaacagcccctgctggcgttattttccagcgaacaggaacattttatcagtaccatcaccccagggagtgaagatgaatataccgggtaa

SEQ ID NO: 217016 - DNA, 3411 bp, Klebsiella pneumoniae
atgaatataccgggtaatggcctgggccggtttggcctggccgggcttacgttggccgggatggctgcaatatggtgggggatcacccgctatggcggcatgctgaatatcaatacgcggggcgagcaggtactggcgtttgtcctggtctgtctggcgttggtatttgttttttaccttcctgcaatgtcccgccgtgtgaaggagagtttatatcgccggcagtcgcagcaggacagcgtcttacccggcgaagaagggcgcgtggcgctgacacctccccatcatattacggtgggggaaattcgccagactctacgctatcagtatggacgcgcctggtcccgcaaagtccgtattctgctgataattggctcagtcagagacgtagaacaactgaccccaaagctcacgcaggaactctggcaggaagatcagggtacattattgctgtggggtggagaccctggggcagcggtagataacgcctggttcacagcgctgcgtaaactgcgttatcgcccggctgatggtatggtgtgggtaacatcgggctttgacggcgttttgacaacgatgaacagaacgaagcccaggctcacgccagatgaaatggacagtgtgtctcactctctaaagctacgcttcgaagctcttggctggaaactacccctatacgtctggtcgctgtatgaggggggcaacgaaaaaaatggacgtatcactcagcctgtaggctgcctgttacctgcaggttgtacgccgcaaatagttgccgaacagttcactgctctggcgtcgttactgatagagcagggcatccagcagatatgcgggcaaccacagcacaattttttactcgcgctggccgatcagttgacccgtaaaccggaaacggtgacggagccgttatcggtattgcttaatccttaccgcccgcagccgctggccggggtggtatttagtgaggcgtcagtagaggctggtcgcagtgtccgtcatcactggggacgggataaccgctgggaaacgataccagactcagtgctgtggttgccagccggtctacgtccgcgcaaacagggagtcaactggatgcgtgggatgagcgtggccgccgccgccctgatgttactctgggccgcctcaatgacagtctcttttatcgccaaccgccacctggtggcgatcgcacagcagcaggtgcagcaggcctcggcgggaaaacagccgctggccgtacgcctgcatgcgctctccgcgttacagaaaacgctttctcaactggaataccgctcgcagcacggagcgccgtggtacctccgcgctggcctcagtcagaacgatgacctgctggcggcgctgttcccgcgctacggggagatggcgcaaccgctgctgcgcgatgcggcggcgcatcatctggaagagcagctcaccgccttcgtgcagctgccgccggacagcccactgcgtgagaagatgacgaagaccgcttacggacaactgaaacaatatctgatgttgacccgcccggaaaaaatggacgccgcgtggttcgccactacgctaatgcaggactggccgcagcgctcaggcatcgccgacgccgtctggcagggcagcggcccttcgctgctggcattttatgccgccagcctggcatcgcatccgcagtggcgtctgcctgtcgatgacggtctggtcagccaggtgcgcacacggttaattcgccaattgggccagcgcaacagtgagtccacgctttaccagaagatgctcgcgcaggtggcgaatcagtatgccgatatgcgcctggcggatatgactgccgacaccgatgcttcgcgtctgttcagcactgatgaggtggtgccgggaatgtttacccgtcaggcctgggaacaggccgtgcagccggccattgagaaagtggtcgcggaacgccgcgatgaaatggactgggtgctgagcgatacgaagcagactgccgcgcagtcgacgtcgccggaagctctgcgagccaggctggcggagcgttatttcgctgatttcagcggcgcctggctggatttcctcaacagtctgcgctggcagcgcgcggcgaccctctccgatgctatcgaccagctgaccctgatggccgatgtgcgccagtcgccgctggtggcgctgatgaacaccctgagcgtgcaggggcgaaccggccagaccggggaagccatcgccgattcgctggtcaaatcggccaggcagctgttcaaccgtgataactcgcccgtcatcgatcaacggtccggcgcgcgcggtcctctggatgccaccttcgggcccgtactggcgctgctggacaatcgcgacggcgggacacccaccagccgtcttagcctgcagaccttcctgacccgcgtcacccaggtgcgtctgcgcctgcagcaggtcaccaacgccaccgatccgcaggcgatgacccggttgcttgcgcagacggtattccagggcaaggccgtggatttaaccgaaacgcgcgactacggcagcctggtggcggcggggctgggccagcagtggagtggatttgggcagacgctgtttgttcgcccgatggaacaggcctggcagcaggtgctgaccccggcggcggaaagcctcaacgcccagtggcgcagcgcagtggtggaggactggaatagcgcttttggcggtcgctacccctttaaaaataccagcagtgaagtctctctgccgctgctggcaaaatacctcaacagcgagaccgggcgcatcgcccgctttctgcagacccggctgaaaggcgtgctgcataaagaggggagccgctggatggcggacagtatcaatgctcaggggctgacgtttaacccggcctttctgcaggcgatgaataccctgagccatctctccgacgtcgcgttcgccaacggcgaagcgggattgcattttgcgcttcgccccggcacggcggacggcgtgatgcagacggagctggtcatcgacaatcagaaacttgtctatatgaaccagatgccggtctggcggcggttcagctggcccgctgacaccgaagcgccgggcgccagtctgagctggatcagtacccgggcgggcacccgccagtatggcgatttcccgggcgcctgggggtggatccgtctgctggataaggcggtggtcagcgcttatcccggaacgagcagcagctggagcctgagctggaaagcgccggatggtctgttgctgaactacacgctgcgtaccgaggcgggggaaggaccgctggcgctgctggtgctgcgaaactttacgctaccggagacgatattcagcgtgcgcgcgtctgctgaacgtgttccgctgaccgacgatatacccggcgaagagggatactga

SEQ ID NO: 217017 - DNA, 3093 bp, Klebsiella pneumoniae
atgagcgccgggcgttttaatctctccgcgctggccgtccgcgagcggtcggtgactctgtttttgattatccttatctccgtcgccgggctggtggcgttcttcggactcgggagagcggaagatccgccctttacggtcaagcaaatgacggtcattaccgtctggcccggcgccaccgcgcaggagatgcaggatcaggtcgccgagccgctggaaaaacggctccaggagttaaagtggtacgatcgcacggagacctatacccgccctggcatggcgttgatcaccctgtcgctgcaggatcagaccccgccttccgaggtgccggagcagttttatcaggcgcgcaaaaagctcggggatgaggcgaaaaacctgcctgccggcgtctccggcccgatgatgaatgacgaattcgccgatgtcacctttgccctctttgccctgaaggcgcggggagagccgccgcggcagctggtgcgtgacgccgaagccctgcgccagcagctgctgcatgttcccggggtgaaaaaagtgaatatcctcggcgaacaggcggagcgcatttatctctcgttttctcatgaccgtctcgccaccctgggcctttcatcagaggcgatttttgccgcgctgaacagccagaatgtgctgaccgccgccggggccattgagacccggggcgggcagatctttatccgcctcgatggggcgttcgaccgcctgcagcagatccgcgacacgccgattattgccgggggcaaaacgctgaaactggccgatgtcgccacggttgagcgggggtacgaagatcccgccaccttcctgatccgcaatcagggcgaaccggcgctgctgctgggcgtggtgatgcgcgagggctggaatggtctggcgctggggaaagcgctggacgccgaaacgaccagcatcaatcagagcctgccgctcggcatgtcgttgagcaaagtgaccgatcagtcggtgaatatcagcgccgcggtcgatgagttcatgatcaaattctttgtcgccctgctggtggtgatggcggtgtgctttgtcagcatggggtggcgcgtgggcgtggtggtcgcggcggcggtgcctttaaccctcgccgtggtgtttgtggtgatggcggcgaccggcaaaaacttcgaccgcatcactctcggctcgctgatcctcgccctggggctgctggtggatgatgccatcattgccatcgaaatgatggtggtcaaaatggaggaggggtatgaccgcctcaaagcctcggcctatgcctggagccataccgcggcgcccatgctggccggtaccctggtgacggccgtgggttttatgcctaatggatttgcgcagtccaccgccggggagtacgccagcaatgtgttctggatcgtcggtatcgcgctgattgcctcctggattgtggcggtgatttttaccccctggctgggggtgcacctgttgccggacagaaaacccgcggcggccggccacgccgcgctgtatgacaccccgcgctatcagcgcttccgtcggctgctgacccgggttatcgcccgcaaatggcgcgtggccgccggggtggtggcgctgtttatcgtggcgatcctgggcatgagcgtggtgaaaaagcagtttttccccacctccgatcgtccggaagtgctggttgaagtgcagctgccttacgggtcgtcgattagccagaccagcgccgcggcggcgaaaattgagcactggctgcagcggcagccggaggcgaagattgtcaccagctatatcggccagggcgcgccgcgcttttacctggcgatggctccggaattgcccgatccctccttcgccaaactggtggtgttgaccgacgggcagggtgcccgcgaggcgctcaagcggcggctgcgggaggcggtggccaatggcctggcgccggaggcgcgggtgcgcgtcactcagctggtgtttggcccttattcgccttatccggtcgcctggcgggtgatggggccggatccgcacgctctgctcgacatcgccgagcgggttaaatcggtgctgcaggccagcccgctgatgcgcaccgtcaataccgactggggttcgcgggtaccggtgatgcatttcagcctcaatcaggaccggctgcaggcgagcggactcagctcccagtccgtcgcccagcagctgcagttcctgctgtcagggatcccgatcaccaccgtccgggaagatattcgcgccgtgcaggtgatcggccgcgcggcgggcgacatccgtctggatccggcgaaaatcgccgacttcaccctggtgggcagcggcgggcagcgggttcccttgtcacagattggcgacgtgtcgatcaggatggaggacccgctgcttcgccgtcgcgaccgcacgccgaccatcaccgtccgcggagatgttgcggagaacctgcagccgccggatgtctccaccgcgctgatgaagccgctgcagcccattatcgactcgctgccgcctggctatcgcatcgagacggcggggtcgattgaggaatccggcaaggccacccgggcgatggtgccgttatttccgataatgatcgccctcacgctgctgatcattatcctgcaggtgcgttcgctgtcggcgatggtcatggttttcctgaccgcgccgctggggctgattggcgtggtcccgacgctgctgctgttcaatcagccgtttggcatcaatgccctggtgggcctgatcgccctgtcggggatcctgatgcgcaatacgctgatcctgattggccaaatccatcataaccaacaggcggggctcgatccgttccacgcggtggtggaggcgacggtgcagcgcgcccgcccggttctgctgaccgcgctggcggcgatcctggcgttcattccgctcactcattcggtcttctggggaacgctcgcctatacgctgattggcgggacgctggggggaaccatcatgacccttatcttcctgccggccatgtacgcgatctggttccgcatccgtccggagaacactgtacaacagacagagttgcaccttcagaggtaa

SEQ ID NO: 217018 - DNA, 1488 bp, Klebsiella pneumoniae
atgtcgcgtaatactgaagcaactgacgatgtcaaaacctggaccggcggcccgctcaactacaaagagggcttttttactcgcctgcaaaccgatgagctggccaaaggcattaatgaagaagtcgttcgggctatctcggctcgccgcaatgagccgcagtggatgttggagtttcgtctgaatgcctaccgggcgtggctggaaatggaggagccgcactggctgaaagcgcattacgataagctgaattatcaggattacagctactattccgcgccctcctgcggcaactgcgatgagacctgcgcctccgagcctggcgcggtgcagcagaccggggccaatacctttctgaccagcgaggtggaagaagcctttaaccaactgggcgtgccggtacgcgaagggcgcgaggtggcggtggacgcgatatttgactcggtgtcggtggcgaccacctaccgagaaaagctggccgagcaggggatcatcttctgttctttcggcgaggcgatccacgatcatccggaactggtgaaaaagtatctgggcaccgtagtgccggggaatgacaacttctttgccgcgctgaacgccgcggtggcttcggacggcacctttatctatgtgccgaagggcgtccgctgcccgatggagctgtccacctatttccgcatcaacgccgaaaagaccgggcagtttgaacgcaccattctggtggccgatgaaggcagctacgtcagctatattgaaggctgctcggcgccggtgcgcgacagctatcagctgcatgccgcggtcgttgaggtcatcatccataaagacgcggaagtgaaatactccacggtgcagaactggttccccggcgataacaacaccggcgggatcctcaacttcgtcaccaagcgcgccctgtgcgaaggggagaacagcaaaatgtcatggacccagtcggaaaccggctcggccatcacctggaaataccccagctgcatcctgcgcggcgataactcgatcggcgaattcttttcggtggcgctgaccagcggccatcagcaggcggacaccggcaccaaaatgatccatatcggcaagaacacccgctcgaccatcatctcgaaagggatctccgccggacacagccagaacagctatcgcgggctggtcaaaatcatgccgaccgccaccaacgcccgcaactatacccagtgcgattcgatgctgatcggcccggactgcggggcgcataccttcccgtatgtagaatgccgcaacaatagcgcccagctggagcacgaggcgaccacctcgcggattggcgaagatcaattgttctactgcctgcagcgcgggatcagcgaagaagatgccatctcgatgatcgtcaacggtttctgtaaagacgtcttctccgagctgccgctggagttcgctgtagaggcgcaaaaattgctggccattagccttgaacatagcgtcggctga

SEQ ID NO: 217019 - DNA, 747 bp, Klebsiella pneumoniae
atgttaagtattcaagatttacacgtcgccgtcgaagataaagcgatcctgcgcgggctgaaccttgaggtgcgcccgggagaggtccacgccattatggggccgaacggctcaggcaaaagtacgctttcggccaccctggccgggcgtgaagattatgaggtgactggcggtcgcgtcgaatttaagggcaaaaacctgctcgaactcgctgcggaagagcgcgccggggaaggtatctttatggccttccagtatccggtagagatccccggcgtcagcaaccagtttttcctgcagactgcgctgaatgccgtgcgcaattatcgtggccaggaggcgctggatcgtttcgatttccaggacttaatggaagaaaagatcaagctgctgcagatgccggaagatctcctgacccgctcggtgaacgttggcttctccggcggtgagaaaaagcgcaacgatattctgcaaatggcggtgcttgagccggagctgtgcattctcgatgaatcggattcggggttggatatcgatgccctgaaaatcgtctcgcagggagtgaatgccctgcgcgacggcaaacgcgcctttatcattgtcacccactatcagcgcatccttgactatatcaagccggactatgtccatgtgctgtatcaggggcggattgtgaagtcgggcgatttctctctggtcaaacagctggaggagcagggctatggctggcttaccgaacagcagtaa

SEQ ID NO: 217020 - DNA, 1062 bp, Klebsiella pneumoniae
atgaacaaagaaacgattctgagccgtcagattttgacatatatgttgttgctaacgtttgttattattgccattgcaatactcggttcctacttattttatagtttcctgatttattacctgccgggtggaatgaacgaaggtagtgaagatgctatgacattccttgactggatgtggattctgatggcgtccattaccagtctggtcgttgcacttttctttaccgtaaagctgtctgcaagaatattcaacccactgaatgacgttgcatacagcctgaaacaaatctctcagggaaaccttagtgccagagcatttaacagcagttctaagttgggagagatgaataggctcgtcaatgactttaatgagatggctgaaaagttacagacgctggatgcgcagcgaaatttatggaatgctgcaattgctcatgaactccggacgccggtgactatcttacgtgggaggcttcagggactggttgacggcgttttcgaaccagaaccgtcgttattcagaaaccttcttaaacaaactgaaggtctgaccaacttaattgaagatctccgcgtcgtgagttcttcaggaggcgcagggtactccttgatgctgagtgaagtcgatctcaaggccacgatttcaaatgcgcttgataccttttggccggactttgataaaaagcatttcaaaattgtcactgagattaaccagcagtattgcgtttgcgatcccttacgcattattcagtgcctcaccgttctttttgacaatgccttaaaatactccacatcacaaacgctgttaataaagaatggtattacaggaaacgataattttattatcgttcaggaccaaggacctggaattcctgaagaactccagaagtccttattccagccttttcagcgaggagaatacgccaaaaatattaatccagagggctgtggtttagggttgtcggtagttaaagccattatgtgcgcccacggtggagacgttagctatagtttaacaccagaaaatggctcacttttcaaactctcatggcctgtttaa

SEQ ID NO: 217021 - DNA, 2706 bp, Klebsiella pneumoniae
atgttgattccgtccaaattaagtcgtccggtccgccttgaacacactgtggttcgtgagcgcttactggcgaaactttccggcgcgaacaattatcgtctcgtgctgatcaccagtcctgccgggtacggtaaaacaacgctcatttctcagtgggccgcgggtaaaaacgatcttgggtggttttcgctggacgaaggcgacaaccagcaggagcgttttgccagctatctgatcgcggcgattcagcaggctaccggcaaccactgcgcggccagtgaagcgatggtgcaaaaacgccagtacgccagtctctcctctctttttgcgcagctgtttattgaacttgccgactggcagcgcccgctgtatctcgtcattgatgattaccatctgatcaataatccggtgatccatgacgcgatgcgctttttcctgcgccatcagccggagaatatgaccctggtggtcctgtcgcgtaacctgccgcagctgggcattgccaatctgcgcgtccgcgatcagcttctggagattggcagtcagcagctggcctttacccaccaggaggcgaaacaatttttcgactgtcgtctgacatcgcctatcgaagccgacgacagtagccggctgtgcgacgatgtcgccgggtgggccaccgcgctacaactcatcgccctctccgcccgccagaataactcctccgcccaacactccgcccgccgcctcgccgggattaacgccagccatctgtcggattatctggtggatgaagtgctgaataacgttgacgcccgcacgcgcaactttttgctgaagagttctctgctgcgctcaatgaacgacgcgttaatcgtgcgcgtcaccggcgaagagaatggccagatgcagctggaggagatcgaacgccaggggctgttcctgcagcggatggatgattccggcgaatggttccgctatcacccgctgtttggcagcttcctgcgccagcgctgtcagtgggagctggcggttgaactaccggagatccaccgcgccgcggcggaaagctggatggcgcaaggtttccccagcgaggccatccaccatgcgctggcggccggcgatgccaaaatgctgcgcgatatcttgctcaatcatgcctggggcatgtttaaccatagcgagctggggctactggagcagtcgctggcggcgctgccatggtccaatctgctggaaaatccgcgcctgatcctgctccaggcctggctgatgcagagccagcatcgctacagcgaagtcaataccctgctggcgcgcgccgagcaggagatgagtgtggaaatggacaccgcgatgcatggcgacttcaacgcgctgcgcgcgcaggtggcgattaacgatggcgaccaggacgaggcggaacgtctgtcaatggtggccctggaagagctgccgctggccaactattacagccgcatcgtagccacatcggtgcatggcgaagttctccattgtaaggggaagctgaccaaatccctcgccgtgatgcagcagaccgaacagatggcccgccgtcacgacgtatggcattacgccctgtggagcatcattcagcaaagcgaaatcctcttcgcccagggcttcctgcaggccgcctgggagagccaggagaaagccttccagctggtacgcgaacagcatcttgagcagttgccgatgcatgagttcctgctgcgcatccgttctcagctgctgtgggcatgggcgcgcctcgacgaggctgaagcttgcgcccgccaggggatggacgtgctctccacctatcagccgcagcagcagctgcagtgcctggcgctgatggtccagtgctcactggcgcgcggcgatctggataatgcccgcagccacctgaaccggctggaaaacctgctcggtaacggtcactatcacagcgactgggtctccaacgccgataaggtgcgagtgatctactggcagatgaccggtgataaaaccgcggcggccaactggctgcgccagacgccaaagccggagttcgccaacaaccacttcctgcagagccagtggcgcaacatcgcccgggcgcagatcctgctgggcgacttcgaaccggcggaaatagtgctggaagagctgaacgaaaatgcgcgttcgctgcgtttgatgagcgatctcaaccgcaacctgctgctgctcaatcagctgtactggcagtcgggacgcaagagcgaagcgcagaaagccctgctggaagccctgacgctcgccaaccgcaccggttttatcaaccactttgtgattgaaggcgaggcgatggcccagcagctgcgccagctgatccagttgaacacgttgccggagctggagcagcatcgcgcccagcgtattctgcgcgacatcaaccagcatcatcgccacaaattcgcccactttgacgaagggttcgtcgagcgactgctgaatcatccggaggtgccggagcttatccgcaccagcccgctgacccagcgcgagtggcaggtgcttggcttaatctattccggttacagcaacgagcagattgccggcgagcttgacgtggcggccaccaccatcaagacccacattcgcaacctgtatcagaaactgggcgtcgcccaccggcaggacgcggtacagcatgcccagcagttacttaagatgatgggatacggcgtctga

SEQ ID NO: 217022 - DNA, 1053 bp, Klebsiella pneumoniae
atgaatagcgcctgggttaaacatgccattagcgaaatcaacgctgactatcagcgctccgccgacacgcacctgatccgtctgccgctgcccgcttttccgggcatccacctgtatctgaaagatgaaagcacccaccccaccggcagcctgaagcatcgcctggcgcggtcgctgtttctctatggcttgtgcaacggctggatcaaagaaggcacgccaattatagagtcctcctcagggtcaaccgccgtttcggaggcctatttcgcccgcctgctggggctgccgtttatcgctgtgatgccttcctgcaccgccaagcgcaaaatcgaacagatcgagttctacggcggacgctgccattttgtgcagagcgccggcgaaatctacgcggcttccgaaacgctggcccgcgagctgaacggccattatatggatcagtttaccttcgccgaacgggccaccgactggcgcggcaacaacaatatcgccgacagtattttccgccagatgagccatgagccgcacccgcagccgtcatggatcgtcatgagcgccggcaccggcggcacctcagcgaccattggccgctatattcgcagccagggctacgagacgcagctgatggtcgttgatccgcagaattcggtgttcctcgattactggcagacccgcgacgccagcctgcgcagcccggtcggcagcaaaattgaaggcatcggacggccgcgcgtcgagccgtcgtttattcccgacgttgtcgatgagatgctgcgcgtgccggatgcggcgagcgtagccaccgccctgtggctggaaacgcagcttgggcgcaaggtcggcgcctcgaccggcaccaatatgtggggcgtattgcagctggccgcgcggatgcgcgaagaaggtcgcaccggctcgatagtgacactcctgtgcgacagcggcgagcgttacctggaaagctattacaacccgcagtgggtggcggacaatatcggcgatattgcgccctggcaggcggagatcgccggtctggtcgaaaggcgataa

SEQ ID NO: 217023 - DNA, 1773 bp, Klebsiella pneumoniae
ttgcgattatttgctcaactcagctggtacttccgccgggagtggcgccgctatcttggcgcaattgccctgctggtcattattgccgtcctgcagcttattccaccgaaggtggtgggcattgtggtcgacggcgtgacgcaacagcattacaccgcggagaaggtgtggatgtggatcggcgcgctggtgctgatcgcggtgatggtctacctgctgcgctatgtctggcgcgtgctgttgttcggcgcttcttaccagttggcggttgagctgcgggaagatttttaccggcaactgagccgccagcatccggcgttctatttgcgccatcgcactggggatcttatcgcccgcgccaccaatgacgtggaccgggtggtgtttgccgctggcgaaggagtattaaccctcgtggattccctggtgatgggctgtgcggtattgattgtaatgtcgacgcagattagctggcaacttactctgctggcgctgctgccgatgccgctgatggccctggcgatcaaacgtaacggcgatgcgcttcacgaacgttttcgcgttgctcaggcggccttttccagcctcaacgatcgcacgcaggagagcctgaccagcatccgcatgattaaggcgtttgggctggaggatcgccagtcggcgcagtttgctgccgatgctgccgataccggcgcgaaaaacatgcgcgtggcacgcattgacgcccgcttcgaccccaccatctatatcgccatcggggccgctaacctgctggccatcggcggcggcagctggatggtgatccacggcagcctgaccctgggccagctgaccagcttcgtgatgtatcttggcctgatgatctggccgatgctggcgctggcgtggatgtttaacatcgtggagcgcggtagcgcggcctatggtcgtatccgcacgatgcttgaagaggcgccggcggtggatgacgggaccgaggcggtgccggcaggccgtggcgtcctgcaggttgctatccgcgatttcatctatccgcaggcgagcaaaccttcgctggagcaggtaaattttactctccagccggggcaaatgctgggcatctgcgggccgacgggcgccggcaaaagcaccattctggcgctgctgcagcgccattttgacgtcactcacggcgagatccgctttcacgatctgccgctgccgattctgcagctcgacagctggcgcgcccggttggcggtggtcaatcagacgccatttttattctccgataccgtcgccaataatatcgcgctgggaaaaccggacgcgacgcaggcgcagattgagcgggttgctcaactggccagcgtgcatgacgacattctgcgtctgcctcagggctacgagaccgaagtgggcgagcgcggcgtgatgctctccggcggccagaaacagcgcatctctattgctcgcgccctgctgctggaggccgaaatattgatcctcgacgatgccttatcggcggtggatggccgcaccgagcaccagatcctgcataacctgcgccagtggggggaggggcggacggtcattatcagcgcccaccgcctgtcggcgctcaccgaggccagtgaaattttggtactgcagcatgggcatattgcccagcgaggccgccacgaggcgctggccgtgcagcccggctggtaccgcgacatgtatcgatatcagcagctggaggccgcgctcgacgaggttccgcagacgcaagaggaggccctggatgcgtag

SEQ ID NO: 217024 - DNA, 234 bp, Klebsiella pneumoniae
atgaaaaaaggccgcaaagcggccctttgttggcaaaaaacaggggacaggtcaggcaatatcctgcgcaacggcgcctggcgcgcaaaaatgcaccacaacggtgcatttgatgtaacgtttttgcaccatggcaggccgcccagcgttccctgcctgctggtggtgcatcaggcgctgagcgactcctctctggcgctggccgccagctcttcgccggccagctgcagctga

SEQ ID NO: 217025 - DNA, 789 bp, Klebsiella pneumoniae
ttgtcatcagtctcaaggaatgcctatgaacgtaacccgaaaagagcagccattattcagcgcgcgctgaatgcctggcaggccagcggggagttaaccccctcggacagccagcggctggcgcaaacgatgcgcgtctcccccttcgactggcggcgcctgagccgctatgccttctggaccgcgctggcctgcgtgctgatttccctgggcagtctgttcgccgacagcgagctggtggcgtggctgctgagcctgttcagccactcggcgctgatgcggatcctgctgcctgcgctgctggcagtcgtctgctacggctggggttttcgccgccagcggcgggagacgcagtggcactacagcaccgaggcgattttgtttctgggcgtcgtctttaccgcggtggcgctatggcagcttggcgaacggctggataacggcagcggccatatcgcaccgctgtttctggccggatgcgtgatttacggtgccattggctatattgcccgctccgggctggtgtggctcttttttctgctggcgctgggcaactggttcggcgcggaaaccggctacgtctcggggtggggcgcctactggctgggcatgaactacccgattcgcttcgtcctgttcggcggcgcgctgctggcgctctgctacggcgcgcaatccctgcttcgccagcggcagctgtttaccgtcagcaaggcgatgggcctcacgtacctgtttattgcgctgtggatcatgtcgattttcggcaattacgacgcagacagctag

SEQ ID NO: 217026 - DNA, 987 bp, Klebsiella pneumoniae
atgtctatagctcatcaaaacgcacatactattattcgcgatattttatctaagcagcacattgagcgcgtatggtttgttggctgcggtggttcattaaccggtttctggccggggaaatattttctcgattgtgaagctaaaaagctggccgtcggctatgttaccagtaatgaatttgtccatgcgacgccgaacgcgttaggtaaaaacagcgtagtgatcctcgcctcgcagcagggcaacaccgctgaaacggtggaagccgcccgcatcgcgcgtcagaaaggcgccgccactattggactggtatatacccccggcacgccgctgtgcgaacacagcgattacactattgaatactgctgggcgcgctatcccgaaaccgtcgatccgacgcagcaaaaagcggcatacagcctgtggctggcgctggaagtgcttgcgcaaactgagggatacgcccattacgatgagatggtcagcgcctttgccagttttgaatccgtggtacgcggcgctcagcagcaggttcaggcggatgcgcgccattttgccgaagcctggaagaccgaaaaggtcatctacatgatgggcagcggcccctcattcggcgccgcgcatcaggaatccatctgtattctgttggagatgcagtggattaactccgccagcatccacagcggcgagtatttccacggcccctttgagattaccgaaacgggaacgccgtttattttattaaaaagcagcggccgcacccgcccgctggatgatcgcgcgatccgctttatcgaacgttaccagggaaaactgcagattattgacgtggaaaaggtgggaatcgacgcactgcacgccagcgtgcgcgaatatttctgcggcctgctgcacaactgcgtactggatgtttacaacctggcgctggccaccgctcgcaaccacccgctgaccacccgccgctatatgtggaaagtcgaatattga

SEQ ID NO: 217027 - DNA, 720 bp, Klebsiella pneumoniae
atgttattacgttgcctgctccctctggcgctgctgcccctggccgccgtcgccagcgccgcctgtaccctcaccgacccgacgctgaccctgcagagctatcgggtggatgcgcagaaagagcgcattgcgatgtactggcaggatcggcacggcaaagcctggggttccctgcgttcgctgctggcgggtatcgatggcgacggccgggtgcagatggcgatgaacggcggcatttacgataaggcctacgcgccgctggggctgtatatcgaagacggcaaacggctgacgccggtcaaccgctccgccggcggcgggaacttctttatccgccccggcggcgtattcctggtggaaaacggccgggcgaaaatcgtgccgctgccggcgtacaaaccctctcccgccatccgctatgcggtgcagtccggcccgatgctgattgaaaatggcgtcatcaactggcgactgaagccctccgccagttcgcgcaagctgcgcaacggggttggtatcgataagcagggccgggtggtgtttatgctcagcgatcgcgagaccaacttttacgattttgcctgctatgcgcagtcaaagcttggcgtgcggcagatgctttatctcgacggcaccctgtcgaagatgtaccgcaaaggcggcagcgtgccgtggcagtatcatccgttcgtgaccatgataacggtggagagaaaatag

SEQ ID NO: 217028 - DNA, 924 bp, Klebsiella pneumoniae
gtggtagattcaacactggataaatcggcgcccggcccctggtccggatggcttcatggtttactgggggtgatcattttcagcggttcgctgcccgcgacgcggctggcggtgcaggatatggatccgttgttattgacctttctgcgcgcctctatcgccgggctgcttgccatcgcgctgctggtgggctttcgccagaaacgcccgcgcctggcgcagcttgtgtccctgatcatcgtctcatccggggtggtgctcggctttccgctactcacggcgctggccctgcagcgcatcacctcggcgcattcgattgtgtttattggcctgctgccgctgatgaccgccctctttggcgtactgcgcggcggcgaacgcccgcggcgggctttctggatcttttcgctgctgggcagcctgctggtggtgggattcgccctgacgcaaaatgcggcggcctcactcagcggcgatctgctgatgctggcggcggttatcgtctgcggcctcggctatgcggaaggggcgaagctgacgcgggagctcggcggctggcaggtgatctgctgggcgctggtgattgccctgccgttgatgctccccgcctcgctgctggttcagcccgcctcctggcatgccatctcggcctcctcctgggcggcgctcagctatgtgtcgctgttcagcatgctgatcggtttcatcttttggtacaaagggctggccgcgggcgggatcgccgccgtcggccagctccagctattacagccgttcttcggactaggcctgtcggcggcgctgttgcacgaaaccgtcagccccttgatgctggcggtcacgctgggcgtggtgctgtgcgtggtgggctcgcgcaaatttggccgccagcggggtggcgaagagaacgggggcaacaattga

SEQ ID NO: 217029 - DNA, 711 bp, Klebsiella pneumoniae
atgaatgaaggcatagcatgctgtccggaaaaccggacatcaacacgggaggcggtggttgacgccatgctggcgtcaggcgatgaacttgcacaactgcagccggcgctgaacctgcttccgcccccgctgaacgccacgcctggtgaagcgctgctggccagctgttatgaggccggcgctgaccacaacgctgaggaggcaacacgggcggtgagcgccttaccggcggcggtcgtgcgctctgcgacgccctcgctgcagcgcagcggtctgctgtgcatggcggccggggcgctcagcgcccggcaacttccactgacgcacaaccggctgtgtgacgtggcggggcagttcgcccgcgctatccctgaaggcgatgaagaggcgggtagtggattttataccgtgcgcagcgtgtccctgcccgtctaccggcggctgcggcgggataaccattctcacagcgtctgtctacagcaggcgctgctgcatttgctggcctggaagagtgagtcgccctgggcgcggcagcaggcgcagcgtctgctctggcagggtggcgtgctgggtgagaagggggaatttgcgctactgacgctggatgatgagcttcgcgagcgacagatagtctggcccgcgctgagatcgctgctggcggtgaccgggtttctggtcagattcccggccggtccggtatttagcgattaa

SEQ ID NO: 217030 - DNA, 1419 bp, Klebsiella pneumoniae
gtgaatcacgataataaactgtcatttgcggagaagctgggatatggcatgggggatgcagcctgcggtatcgtttactcttcggtaaccatgtttttgacatggttttatacggatatttacgggctttctgctgccgcagtcggagtgatgttcttggtgacgcgggttctggatgcgattaccgatccgctaaccggcattgttgcagaccgtgtaaagacccgctggggccattttcgcccgtggcttatctggtttgccgtaccttatgccgtgctggcggtaatgaccttcacgactccggaatttggcgcatcgggtaaactggtttatgcctacctgacctacaccttactcatgctgtgttacacctttatcaatattccctactgcgcattgggcggagtcattacgcgtgatgagaaggatcgcctttcagcccagtcatatcgttttacgatctcatctctggccggtctgatggtttctgtcgcaaccctgttcctggtggattttttcggtaaagaaaataagcagtttggttttcaggcgacaatgggaatcatgggcgcgatcgctattgtaatgctggctttttgcttcttctctaccaaagaacgcgtggctccagctgttgaacagcaggggagcatacgcgaagacctccgtcagctgctggcgaatgaccagtggcgtattgtggcgataattacttttttctccagtatggccggggttatgcgcagcgccgccacgctctattatgcaacctacctgatgttaggcggtgtggagtcagcggcgggaacggccatgaaatcagcatttgtttccaccagcgtcgttggcacgattatcggcagcatcgccgccggatggctggccaagcgctatcgcgcggtatcgctgtttaaaaatatcaacctcctgctggtcctggttggcgtcgtaatgttctttgtgccgccgacctggctgccggtggtgttccctttatacttcctggtcggcttcttccatcagatgtaccagccgtttaaatggaacatgatggccaacgctgccgattatggcgaatggaagtttggccgtcgcatcacgggattatcctattccggtaatctgtttgctttgaaaatgggcatggcggttgctggcgccgccgtaggtttttcgcttgggctatttggctatcaggcgggcgtaacggcgcagactccgctggcgacaatgggaattgtggggctgttaaccctcggtccatcactatcttacctgctcctgtggtggctggcgcgtttctataagctggatgacaaaatgatgcagacaattcagcgcgagctgtccatgcgtcagcagcaggggcattcagagacgcatttgccgctaaacgccgttccggaaaaggcctga

SEQ ID NO: 217031 - DNA, 213 bp, Klebsiella pneumoniae
atgaatatactccgggcggatatccgggtcggtgaacggtacctgctctgccagggcatagtcgggcttcagcagattaaacagcgccagcgcggtcatcccgccgacagtatatttccccgccagctggagaaactcgcgtttactgattttgccgtgggcatagtagtcataatactcgagcaactgctgcgggaaatctttggccgttaa

SEQ ID NO: 217032 - DNA, 867 bp, Klebsiella pneumoniae
atgtcagagcaaaactaccagccaccaaaagtgtgggaatggaagcaaaacagcggcggcgcgttcgccaacatcaaccgtcccgtttccggcgcgactcatgaacgcgtcctgccggtaggaacccatccgctccagctatactcactcggtacacccaacggccagaaggtgacgatcatgctggaggagctgctggcgctgggcgtcagcggcgcggagtacgacgcctggctgatacgcattggcgaaggggatcagttttccagcggctttgtcgagatcaacccgaactcgaagatcccggccctcagcgaccattccaccacgccgccgacccgggtatttgagtccggcaacattcttctctatctggcggaaaaatttggtttcttcctgccgaaagatcctgccggtcgcaccgaaaccctcaactggctgttctggctgcagggcgcggcgccgttcctcggcggcggcttcggccacttctataactatgcgccagtgaagatcgagtacgcgatcgaccgctttacgatggaagccaaacgccagctcgacgtgctggacaaacagctcgcccgcggtcgctatgtggccggcgaggagtacaccatcgccgatatggctgtctggccgtggtatggcaacgtagtgctgggcaatgtctataacgcggcggagttcctcgacgccgggagctataaaaacgtgctgcgctgggcgcaggatgtcggcaaccgcccggccgtcaagcgcggacgcatcgtcaaccgcaccaacggcccgctcaatgagcagctgcatgagcgccatgacgcccgcgactttgacacccaaacggaagataagcgccaggcgtaa

SEQ ID NO: 217033 - DNA, 516 bp, Klebsiella pneumoniae
atgtctattaagaaaagtgttatcgctgctgcagtttttgcaagcctttctggtgtcagcatgatggctaatgcagcaccgtctgctgatgtgacgctggaaggtattatcaccaactctacctgtgatgtttccgttaacaatggcctggcgaccctgaatgtgggggtctacaaagcaagttcttttactcctaacactcagcagggctctgttgcgctgccggttgaattaaccaactgcgctgatgagactggcgcgctgattattcaggggcagagcgcaagctccgacccgagcaagcagctgtttaccgccgcgacgggtgataccgttggctttatgattaaggatgctaaggatgtgcaggtggctgagtcacagaatgtggctttggatgtgacctctgctgacacgaatagttattctttcaatgtaggtatgggtaccactgacgctacgccggcagcgggtagttatagcgtaccggtgactgtggcttatattgtcaattaa

SEQ ID NO: 217034 - DNA, 681 bp, Klebsiella pneumoniae
atggcttccgccttcgcgggaatttccatcgacagctcgcgcattatatttcagaacagtgatgatgccagagggcgcagcgtcggcgtaacaagttcagtctcatcggtcgcaccttatctggtcagggcacaggtctcacgggatatcgaaggtaacaacgtacagactccgttcattacgacgccgtcattatttcgccttgagccgggcagtacgaatcaggttctggtggtgaaaaaaccgggtgcggatgggctggcgacggacagagaatccctcttctattttcgcagcgttgccatgccggcgggggaaaagcagagcgcttccccgtcatccgtggtaggggggtcacttcaggtttccacggcaacggtagttaagctgttttaccgcccgggagggctggcgttaccgcagcagcaggctatgggtatgctgcagttttcatccaccgggcagggccttcgggtgaccaacccaactccgtattacattacgctcgccgatcttaaggtggccggagtcagggttcctctcagtgcggtagcaggcaacaccatgatagcgccttttggggctcagttatatgcgcgtgcgccgcatcaggggcgggttgaatggaaggctatcaatgattatggcggtacggaggtgtttcatggttcggtccgctaa

SEQ ID NO: 217035 - DNA, 549 bp, Klebsiella pneumoniae
atggttcggtccgctaagccgttatccggcgtggcgctcgcctgcgtgttggtatcatcgggcattcaggccgctgacacggcggaggtgaattttaccgcgcaaatcagcgatggtacctgtgatgtccagttatcgcagtcatcactccagtttggtatccacaaagccgttgattttcagtccggcgctaccgtggcgatgttacctctgacggcgaccgtgatatgcagcggggcgacaacgccaaagatgtcggtgtcgggcagcacaccgtattcagacagtaccattttccgcgatccgggctcggtggccacaggtgtagggttcatggtacgccaggacactggagatatagatttgggatcgttttataacccctcacaggcggtcagtaataacgtcagttttgctctgtcgcccgtcgggaatgcaggcacgccccataacgaacccttcctgctgggcctggtgagggccggaagtgaaagtgtgacccctggcgccgtcaaatcgacattaacgtttacggtatcgtttgactga

SEQ ID NO: 217036 - DNA, 579 bp, Klebsiella pneumoniae
atgcattacaatgaacggacccgttccacaaaactggtcggctttatgttgtcaggcatgttgtttgcactgaccacatcagtatatgcaggctcttcctcaacgacggttaatttttcagccacgctggttggaggctcctgtcagatttcagtggatcggcccagtattacattttcgcctgtgtcctcttccacggtaattgcggcagggggggatggtatcgacccgcagttattttcgatgacgttttctgactgtagtggctggggattaacacccaaagtccagattaaagggaataccttcacgtccggaattccgctgttccgcaatgataatgcggccagtgattattctcaggggtatggagtaaaactggttcagcaaggccagatggccgcaatcgctaatatggataagctaattgtcggtactgcggaccagcagcttaatacccttaatggtcagacactgaattttgaagcacgtttatcctgtggtaactgtactgccggaccttcgttgaagggcggtaatatgaacgccaccgtgacgcttcagtttatttatgaatga

SEQ ID NO: 217037 - DNA, 774 bp, Klebsiella pneumoniae
atgaatgtattcgcacaagctgcgggcagatttatactgtggtttgccgggtttataggcttaatgctggtctgtaatgtagcgagtgccgctgaggggggactgcagctcagtcagacacgcgttatatttgatgccagagcaaaagatacacaggcgacgataaagaataacagcggccaggtttatttgataaaagccgatgtgtttgcgacacctgacggtagaaacactcagacggacccgaagtctgctgtaccctttatggtgacgcctcccttattcaggctggagccaaacagtcaaaattcggtactgatagtccgtaatggcgcagcacaattacctgcggatcgtgaatcggttttttatctgagttttttggctattccttcgacatcagatgccgccgaagggacacagtctggtgtgtcagcccgtatttcagtcggtatacagtcggtgattaaactgttttaccggccttccgggctgtcaatgccggcgagtgaagcggccaaaaagctgactttcagcaatacggaacatggactgggtattagcaatcccacgccgtattacgtgaccctgtcccgactgaatgtagacggtaagagcatggatgtgaaagggacagaggcgggggcaatgcttgcgccattctccacacagtattaccccgtcaacggggctgtgcggaccgtttcctggacaaccattaatgatttcggtggtgaaagtatcgaacatcaatcggccgtaaaaggaatataa

SEQ ID NO: 217038 - DNA, 765 bp, Klebsiella pneumoniae
atgctgcgtattttttgtttgcgtcaatatcgactaatgatattgcttttttccatgtttatcatcagctcgccatcatatgggacaactggtaataaccctgacggtattaaattacaatccacacgcgtgatatatccgggtgagagccacaatggtattacatttacagttaccaataataccgcaaagcctttccttttacagtcgcgggttattccatggcaggctgatgaacaggataacgtatccggtaatcagagtggaggggtgccatttattgtattgcctcccttacagcggctggaagcatcagatgcgctgacgctccgtatccgtttaacgcgtaatacactgcctaaggatcgtgagtcggtatttattctgagcctgaaaaccatacctggtcaggagaaaaacacggattcagcgtcattgacgctggctatgcaaaataatctgaagctgttttatcgcccggaggggatgcctgagtatgatgtgtccgaatttgcgcgggaaatacggtttatatcgcagagtggggaactgaaagtgataaacccgacaccatattatctcacttttcgttcactgtctgtcgggaaatatccggtcgaaaaaaacgcgctttcaaaaatgataccgccatttggggagcagaggtacccattatcatccggtgcgcgggggcaggtgacctggagtcttattgacggtgaaggacggaatactccagagcaggtcagcgtactgtctgggtaa

SEQ ID NO: 217039 - DNA, 2595 bp, Klebsiella pneumoniae
atgcatcttatttctaatttcgggaagccttcttccgggaagcttttccgttactccccggtggcaggttttttattggtttgtattaacccagcctgggccggtgattattttgatccgggatttcttggtaattccggcgataatacggctgtcgacctttccgcattttctgaggccgggggagttcagccggggaaatatacggtatgggtatttgttaaccagcgcaatgcagggcagtacaccctggattttcagaaaaatacgcagggcaaaattgcgccggttctcacgccatctgaactggaaacgtttggagtgaatgtcaggcaactgccggacctgaaagatttgcctgctacggctgagatagacaatattggcgcgcttatccctcaggcgaccaccatgctggatctggcgcgcctgcgtctggatatcagcgtacctcaggccgcaatgcagcctgaagtacgtggtgcggttgacccgtcgcaatgggaggaggggatttccgccctgatggcgaactatagcctcagcgccggtcgtaccacgaattccggccagaaccagacctcacataataacaacctctttgcaaccgtgcgcgccggggcaaacacggggccgtggcgcctgcgcagcaccatgacccatacccgggtggagaataacggcggaaataatgccctgacgaccacccagacacgcttttcgaatacctaccttgcccgcgatattcggggctggcgctcgaacttactcatgggtgagagtagcaccggtagtgacgtttttgacggtatccctttccgtggggtgaagctcagctctaatgaacagatgctcccgagccagcttcgtggctatgcgccggccatcagcggcgtggcgaacagtaatgcccgagtgactgtgcgtcaaaacggcaatgtagtgtacgagacctatgtggcgccagggccgttttacatcaatgatatccagcaggccggcctgtcaggggactatgatgtcaaagtcacggaagcggacggcaccgagcgccagttcatcgtgccctactcttccctgccggtcatgttgcgtcccggtggctggaagtatgagctgacggcgggacagtatgacggcaatctgacagatggttcccgccgggctgattttatgctggggaccgtggtatacggactgcccggtgatgtcacgctgttcggcggtattctcgcagcaaaagactaccaggcgttcaacatcggtaccggggtatccctgggatacgtcggtgcgctctcggctgatatcacgaattcatcggcgaagtttgataacgaatccaccctgataggccagtcttatcgcgtccgttattccaaaagtctgctgtccacgggcacctctgttgatttaaccgcgctgcggtattcaaccgaggattattacagtttcagtgaattcaacagtcagggacaccagttgcaggagggagtcagcccgtggtccctgcagcgccgccgtaacagcttccagacgcagctcagccagcaactcggggactggggaaccatgtatttccgggccagccgggatgactactggggaggcgaacgtacgctgaccggcatgtcgctgggttacagcaacagcctgaaaggcgtcagttacggtgtcaactacaacattgatcggacaaaggatgcgaacggtaactggccggaaaatcgccagatttcgtttaacgtcagtgtgccgttcagcatctttggctattcacgtaacctgcaatcaatgtatgccaccacgacgctcactcatgataacaccgggcggaccctgagtcagaccgggctcagtggtaacactatggacgggaaactgtcctacagtgcttcgcaaagctggggtaaccagggacagatcagtaacaccaacttaaataccggttaccagggaagcaagggaagtatcagcggcggatacagctacagcagcgatatgcaggctatcaacatgagcgccagtggcggggtgatggtgcatagtggcgggataacgctgtcacgtgccatgggcgattcggtggcgctggtgagtgccccgggggcggctggcgtgagtgtcaacggtggtacggcggtcaccgactggcgcggatatgcggtagtgccttacctgacggattacacccgcaacagcgtgggtgttgaccccagcaccttaccggaaaatgtcgacctcacacagaccaacctcaatgtatacccgaccaaaggcgctgtcgtcaaagcaaactttgcgacccgggtgggttatcaggtgctgatgacgcttaaactcgacaatggcgtggtgccgtttggagccgttgccacgttactgaatgcggggatggcagaggtgaatagcagcatcgtgggtgatgacggacaggtttatctgaccggattgccggagcggggggagttactggttaagtggggcgagacagcagcacgtcagtgccgtgtcagttttgacatctccggtttatcgacgtcgccggataaaccggtccgtcaggtgacctatacctgtcagggcgggaaatga

SEQ ID NO: 217040 - DNA, 2082 bp, Klebsiella pneumoniae
atgatgaacatgaatcccacacagtgtaatgagctgagtgcggagcacgatgaacgcacgaagtggcataacgacgacctgcgtgatgcgcaacgtttagacgaggcctgggcctggctgtgtgagtcgcgcaaaacggcgccagcgaatgcggatatctggcatttgcgacagcgctggcctgcctgccgggaagcgtttctcagaaaactgcagtcgggagagcaccacctgtcccccatgttggtggtggggacacgccgtcaggtgatgtggcccgcggaggatgcgctggcccttaagtgggtggcgctgtccatcaccccatccatcccggtacatgagaagtgtgagcatgtgaaggggcatggcggtggtagatcgtccgtacgtcggatctcgcagagcctgaccgaaaacggttaccgctgggtttgccgcaccgacattaaggggtattacggggctatcaataaaaagactttgctgttgcagctgagagagcatattacgcacccggcgtatctgactattttaactcagtatattcactacagcgtggaagagggcggcgagttttacacgcccgaaaagggtatcgcgcgtggttgcgcgttaagtccgctcatgggggcgttgcatctctgggctgtggataattattttgctcatcaacataaaatctattatggacgttatatggacgattttgttattttaacttacagccgctggcagttacgtaagcaggtgaagcaactcaataaatatcttgcgtcattagggtttgagaaacacccggacaagacgtttattggcaaagtgagccggggttttgactggctgggcgcgtggctcacggataagggtgtggtcggcattgcccctcgcgcactgaccaaccaccgggagaaggtccgtcggctttatgagcagacacgtcactggtctaaaacgaaacaagccaggcgtgtgtcggattaccgtgcacggtggaaaatttggggggctatggtaggactcctgtcctccgccccctcttacgccctcattgaggtcatacgcccaggcggggcggatgctacctggcgcgttccggtgaacatcactatccccgggaccaccgcaactggttccaactccgctagaaattctctcgcggcaccggcgcacgtcgcgcgaaccgacaccgcgccctaccgtagcgtctgcatgcgcgacccgaatgaccagcctatgaccaagaccagtgacgggttctacggcataccactaggtccggacctcgtggtagggatctcgggcacgatgactggctcgacccagtacaccacggggttagtgactggctctgcgacgctggctgatagcggtctcaccgtgagtcagacctatccgcaacccttgtgtccgtgggcggccccaaccctctcagcatcgtcgcctctagtggaagtgtcgcccgcgacaatgtcgtatccatccacgttcattgggagcgtcttcatccatgcaggtccgaacgccgttgccgggacgtacaacgtgccaccgcttgtgtttgcaaaattcaatgcgtgggggagtactcccacagtccctctacccttgccgtctactgtgagtgtggtgtccacttcttgcaccgtcaacatagacacacctacagtccaatttggccagattgacgcggccgtcgcatccgggcaactcatgcgggtgcagcaaagcactataacgacctcgtgcacctctgtcgatgatggtggcagtgggaccaatcgcgtgtcagttaccctatccgcgcaaggcaccgttggagacgtttcaaattctctcgctctccaggatgcctcgaatactgtcaagatggctaatatctttggtctaataggaaaccgccctgccgggcagtgcacacccgacgtcaacaacttcgacttcgtaggaaccccgtctgacctgggaaccgtaggggtagggagcacgggtaccatccttacctggtccttgtgcagtaacggaacgggtgccctcggcatagggcatgctagtgcggtgctcaccgtctcgtggccttga

SEQ ID NO: 217041 - DNA, 864 bp, Klebsiella pneumoniae
gtggcaggcaatatccgctggacggaggcacacgccgctaaagccctgcgctcgctggagctgcacgtatttccactgattggcaaaatccccgttgccgacctgaaaaccgccgatctgctgatcccgctgcgggtggcggagagaaagggcaatctggagaccgccgcgcggctccaacagcgcatcacggcgatcatgcgctacgcggtacaggagagcctgatcgccagcaatccggcaaacgatcttaccggagccatcgcaccgccgccgaaaaaccactaccccgctctgccgctggagaaaatgccggaattactggagtgcttcgagggctattccggcaggctgttaacccgtctggcggtgcagcttaacctgctgatctttattcactccagcgaactgcgctttgcccgctggacggagatcgatctggatggcgcaatgtggaccatccccgccgagcgtgagccgattccgggtgtgcgctattcagagcgtggcgcaaagatgaaaacgccgcatctggtgccgctgtcaaaacaggcggtcacggtgctgaaacagttaaagctgctgtccggtaacagcgagttgctgtttcccggcgatcacgatccgcgcaagccaatgagcgaaaacaccatcaacaaggcgctgcgggtgatgggctacgatacgaaagtggacgtatgcggtcacggcttccgcacgatggcctgtagcgcgctgatcgagtccgggcgctggtcgaaagatgccgtggagcggcagatgagccatcaggaacgtaacaacgtgcgcgccgcctatatccacaaggcggagcacctcgatgagcgcacgcagatgatgtag

SEQ ID NO: 217042 - DNA, 798 bp, Klebsiella pneumoniae
atgcaggaacagactccgcacgcagaaaccaccttcgcgctggatcgcgtcactttccgtgtgcctggccgtacattgctccatccgctctcgctcaccttcccgaccggaaaagtcacaggcctgatcggccataatggctccggcaaatcgacgttactgaaaatgcttggccgtcatcagccgccctccgcaggcgaagtgctgctggacgggcagccgctggagagctggggcagcaaagcctttgcccgcaaagtggcctatctgccgcagcagctgccgccggccgaaggtatgacggtgcgcgagctggtggcgatcggccgctatccatggcacggcgcgctgggtcgctttggcgcagcggaccgtgagaaagtagaagaggcgattgcgctggtggggctgaagccgctcgctcatcgtctggtggacagcctctccggcggtgaacgccagcgggcgtggatcgccatgctggtggcgcaggacagtcgctgcctgctgctcgatgaacccacctcggcgctggatattgctcatcaagtcgatgttctggcgctggtgcatcgtctcagtcagcagcgcggcctgacggtgatcgccgtcctgcacgatattaatatggcggcccgctattgcgactatctggtggccctgcgcggcggagaaatgattgctcaagggacgccggcggaactgatgcgcagcgacactctggaacagatctatggcatcccgatggggatcctgccacacccggccggtgcggcgccggtaagctttgtctattga

SEQ ID NO: 217043 - DNA, 1644 bp, Klebsiella pneumoniae
gtgctggcgtcgcaattcgccgcgctggccggggcctgtctggtgggcgcgctggtgtttggcgtctcgtggggcaagcgcctgtcgccggtaacgctgatcctggcggggctggtggtcagcctttactgtggcgcgcttaaccagctgatggtgattttccatcacgaccagctgcaaagcatgttcctgtggagcaccgggacgctgacgcagaccgactggagcgtggcgcagcgcctgtggccgcagctgcttggcggggcaatactcaccttgctgctgctgcggccgctgaccctgatggggctcgatgacggggtggcgcgtaacctcgggctggcgctgtccctggcgcgcctcggcgccctgacgctggcgatcgtcatcagcgcgctgctggtgaacgcggtagggattatcggctttatcggcctgttcgcgccgctgctggcgaaaatgcttggcgcccgtcggctgctggcgcggctgctgctggcggcgctgatcggcgcgctgctcctgtggctttccgatcaggtgatcctctggctgagccgggtatggcgggaagtctccaccggctcggtcaccgccctgattggcgcgccgctgctgctgtggctgctgccgcggttgcgcagcatcagcgccccggtgatgaacggcggcgataatgtgcagcctgagcgctatcatgtgcaatggtttgttctcgcaggcgtcgcgttgctgctgctggcggtgagcgtggcgctggcctttggtcgcgatgcccacggctggctgtgggcccacggcgatctgctggagcaactgctgccctggcgctggccgcgggtgctgtcggccctgttcgccggggtcatgctggcggtcgccggctgtattatccagcgcctgaccggcaacccgatggccagcccggaagtgctgggcatcagctccggcgcggcttttggcgtggtgctgatgctgttcttcgtgcctggcgacgcctttggctggctgctgccggccggcagccttggcgcggcggccaccttgctgatcattatgctcgccgccgggcgcggcggcttctcgccgcatcggatgctgctggcggggatggcgctgagcaccgccttcactatgctgctgatgatgctgcaggccagcggcgatccgcgtatggcgcagatcctgacgtggatctcggggtcgacatatagcgcgacgccggagagggtggtgcgtagcggcgcggtaatgctggcgctgctggcgctggcgccactctgtcgtcgctggttaaccatcctgccgctgggcggggaggcggcgcgagcggtgggcatggcgctgacgtcatcgcggattgttctgctgctgctggcggcctgcctgacggcggcggcgacgctgaccatcggcccgctgagctttgtcgggctgatggcgccgcatatcgcgcggatgatgggcttccggcgaaccctaccgcatatggtgatttcagggctgactggcgggctgctgctggtcttcgccgactggtgcggacggatgatgatgttcccgtatcagatcccggcggggctactgtcgacctttatcggcgcgccttactttatttatttgctgagaaagcagagtcgctaa

SEQ ID NO: 217044 - DNA, 1512 bp, Klebsiella pneumoniae
atgtgccgcaagggcatttttttgacgacgcagcgcgccgggacggctaaaatgccgctctcttcatttgtattaccaataattgataacggcatgaaagcagaaactccctcttttgaagcacatcagtttgtgcgggtgcgtcgcggcgatgcggtgcgccgtctgattcaacgcgataaaacgccgctggcggtgctgtttatggcggcagtggtcggcacgctggcggggctggtgggcgtcgcctttgaaaagagcgtgaactgggtgcagaaccagcggatcggcgcgctggcgcaggtggcggaccactggtatctggtctggccgctggcgtttatcctgtcggcgctgctggcgatggtcggctattttctggtgcgtcgctttgcgccggaggccggcggctccgggattccggaaattgagggcgcgctggaggagctgcggccggtgcgctggtggcgcgtgctgccggtgaaattcgttggcggcatggggacccttggcgccgggatggtgctgggtcgtgaaggaccgatggtacagcttggcggcaacattgggcgcatggtgctggacgttttccgcatgcgcagtccggaagcgcggcatacgctgttggcgaccggtgcggcgtcggggctttcggcggcctttaatgcgccgctggccggtattctgtttatcatcgaagagatgcgcccgcagttccgctacaatctgatctccattaaagcggtgtttaccggcgtgatcatgtcgagcattgtgtttcgcattttcaacggcgaagcggcgatcattgaggtgggtaaactaagcaacgccccggtaaataccctatggctgtatctggtgctgggcatgctgtttggctgctttggcccgctgtttaattttctggtgctgcgcactcaggatctgttccagcgcatccacggcggcaacatcaaaaaatgggtgtttattggcggattaatcggcgggctctgcggtctgctggggctgatgcagccctccgcggtgggcggtggctttaacttgatccctatcgccgctgccggtaacttctccgtcggactgctgctgtttatctttattgcccgcgtggtgaccacgctgatctgcttctcttccggcgcgccagggggcattttcgcgcctatgttggcgctcggcacgctgctgggcacggcgttcggcatggcggctattccgctgtttccggcctaccatctcgatgccggcaccttcgcgattgccggtatgggggcgctgctcgccgcctcggtgcgtgcgccgctgaccgggatcgtgctggtgctggagatgaccgataactatcagctcattttgccaatgattattacctgccttggcgcaacactactggcgcaattcctcggcggtaagcctttgtattcgaccattctgcagcgtactctggcgaagcaggaagccgagcaggcggcaaaagcgcagcaggctccccgggagaatacttga

SEQ ID NO: 217045 - DNA, 624 bp, Klebsiella pneumoniae
atgcttgtctattggctggatattattggcacagctgtcttcgcgatctccggcgtactgctggccggaaaactgcgtatggacccgttcggcgtgctggtgttaggggtagtgacggcggtaggcggcgggaccatccgcgacatggcgctggcgaatggcccggtattctgggtcaaagatcccaccgatctggtggtggcgatggtcaccagcatgctgaccatcctgctggtccgccagcctcgccggctgccgaaatggatcctgcccgttcttgatgccgtcggtctggcggtgtttgtcggcattggcgtcaataaagcttttctcgctggcagcggcccgctggtcgcggtgtgcatgggggtggtgaccggcgtcggcggcgggattattcgcgacgtgctggcgcgggaaattcctatgattctgcgtaccgaaatctacgccaccgcctgtatcgtcggcggtattgtccacgccacggcacacgacacctttcatctcccgctggagaattcggcaatgatggggatggtggtcaccctggtaattcgtctggcggctattcgctggcatctgaagctgccgacgtttgccctggacgataacggtcggtaa

SEQ ID NO: 217046 - DNA, 240 bp, Klebsiella pneumoniae
atgccgcgtttatacgaaatcgagacggcttgccggaatgcaatagatatcctgcctaacggaaagcgcatcctcaccaccaggcgatttctgcaggaactggagagatataactggcactggtcgccacggcaggctaatcagtggatagagggctacgtgacaacattccgcgacgtctcaacgcaggaaggtgacgatcgcacgttccagctttacaacccaaatggagggctgtaa

SEQ ID NO: 217047 - DNA, 327 bp, Klebsiella pneumoniae
gtgggctttccatcgccagcatcagactatgtagagggacggctaaccgtcgataagatatgcagcatcggccctaatactagggtcgtacagactgaaactggttatgccgtagttgatttctccgttaaaccaaagcagcaggacacggtattgatccagtactccggcggtacagattttgcgaaagtttttgggaaggcgtttattactcgtgatggtgaggcgctggaaggcgaggcattggacgatgtggtagtgttaggaatagtgacattcgtcatcaatcgcactagccgtaatgatgacgaatgcccggttatataa

SEQ ID NO: 217048 - DNA, 1368 bp, Klebsiella pneumoniae
atgaacaatcaattcacatggcttcatatcggtctgggttcttttcatcgcgcgcatcaggcgtggtatctgcatcgtctgattgcttccggggataatcgctggcgcatcgcggcggggaatattcgcaacgacgccgagcaggtggtccaggcgctggcggcgcagggaggacgttacgtcctcgagaccgtcaacccggaaggggagcgcgaatatgaagagatcacctcaatccagaaactgctaccgtggcaggccgggctacagccgctgattaacgaaggggcaaacccgcagaccaaagttatcgcctttaccgtgacggaaggggggtactacctgaacactcgccatcggctggaaaccagcaaccccgatctgcaggccgacctgcaaggcgagtgcaaaaccatttacggcaccctcgcgcggatcctggaaaagcgcatggccgacaacgccgggccgctgaccctgctcaactgcgataacgtgcgtcataacggcgagcgtttccacgacggtatggtcgagttcctgcagctcaccggcaaacaggcggtgattgactggatggcggccaacaccacctgtccgaacaccatggtggaccgcatcaccccgcgtccggcggccgatctgccggcccgcatcaaagcgcaaaccggaattgatgacaaagcgccggtgatgggggagacctttatccagtgggtagtggagaacaacttccgcgatgcccgcccggatctggaggcggtcggcgtggagatggtggagtcggtcatcccgtatgaagaggcgaaaatccgtattctgaacgcgtcgcacagctgcattgcctgggcgggaaccttaatcggccagcagtatattcatgaaagcacgctgaccgatgttatctacgccattgccgaccgctacgtcacggaggacgttattccgtgtctcggcgataacggtattgatctgccgacctaccgggatgtggtgcttaagcgctttaccaacccctatatccaggacaccaaccagcgcgtcgccgccgacggtttctcgaaaattccggcgatgatcgcgccaaccttgcaggagtgctaccagcgcggcgtccgcccggaagcgaccgccatgctgccggcgctgttcttcgtctttatggagcagtggcacaagggaactctgccatatcagtaccaggacggcatcctggatgcgcaggcggtgcatgagatgttcgaggctcaggatccggtggctgtctacgcgcgcgataaagccctgtttggtgatctcgccaacaacgcggatttcctggcgctgatgcgcgagaaagtcgccgccgtttacacgctgattaactaa

SEQ ID NO: 217049 - DNA, 420 bp, Klebsiella pneumoniae
atgcagttctacacgcccgttgagttacgtcagatcatgctcctcccgttgtacagtgaccttgtgcagtgcggctttcctagtccagcgcaggattatgttgagcaacgtattgatctgaacgagttgctcgttaaccaccccagtgcgacgtattttgtcaaagccgccggcgacagcatgaaagacgccggcataggggaaggtgatcttctggtcgtggatagctcaagaacagcagttcatggcgatatcgttattgctgctgtggatggggaattcaccgttaagaagctgcagctgcatccgcgggttcagcttaacccaatgaaccctgcatattcgccgatagtcgtgggtagcgaggatactctcgatgtgttcggcgtcgtaacttacatcatcaaatcggctggctaa

SEQ ID NO: 217050 - DNA, 1266 bp, Klebsiella pneumoniae
atgtttgcgctttgcgatgtgaactccttttacgcatcgtgtgagacggtgtttcgtcctgacctgaaagggcgtccggtggtcgttctgtcaaacaacgacggctgtgtgatcgcccgctcgccagaagcgaagcccttcgtcaaaatgggtgagccttatttcaagcaaaaggacatgtttcgccggcacggtattatcgcgtttagcagcaactatgagctctatgccgatatgtccaaccgagtgatgacaacgctggaggaactctctccacgctgcgaaatttacagtattgatgaggcattttgcgatctgactggtgttcgtaactgtcgcgaccttaccgactttggcagggaaattcgcgagacggttctgcgcaggacgcacctcaaggtcggtgtcggcatagcccagactaaaaccctggcaaagttggccaatcacgcggcgaaacagtggcagcggcagaccggaggagtggtggatctgtctaatctggaaagacagaggaagttgatggctttgcttccggtggatgaggtctggggcgtcgggcgccgcatcagtaaaaaactggaggccatggggattaaaactgtgctgcagctggcggataccgatatccgttttatccgaaaacattttaatgttgtgttggaaagaaccgtgcgggaattgcgcggggagccttgccttggtctggaggagttcgcgccggtaaagcaggagattgtctgtagtcgcagctttgggcagcggatttccacctacgaagagatgcgccaggcgatatgcttatacgcatcccgtgccgcggagaaactccgtggcgagcatcagtattgtcggttcatctcagcgttcgttaaaaccagcccctttgcgtcgaatgaaccgtactacgggaacagcgcatcagtaaagctgctaactccaacccaggacagcagggacatcatcaccgcggcgacgaaatgcctcgatgcaatctggcgagacgggcattgctatcagaaagcaggggtgatgcttggggatttctacagtcagggagtagcgcaactcaacctgtttgatgacaacgcaccacgaaagaacagtgaaaagctcatggaagtactcgatcatctcaatgcgaaagacggaaggggaactctgtattttgcagggcaggggatccaaactgcctggcagatgaagcgggaaatgctttcgcctcgctatactacgaggttctgtgacctgctcaaagtcaggtga

SEQ ID NO: 217051 - DNA, 1764 bp, Klebsiella pneumoniae
atgttgaccgatctcagcagagatgaaagtaaaagacttgcggcaatcgacttgttgaaaaatcctgacaagggccgggatgatgcgttaaaaaaatatactcatctaatatgccaattgctgaacatgccgatgggttttgtttctgttctcgatgaagaaaagcaatacatcaaatcagcccaaaatgttgccgtcacggaaataagcctgagtgaggcattttgcgtacagacccaggaacagagtaagacattcatttgtcatgacactcatcagcaccctatctttcgtgactatcacgcggtgaaagaggctccattcattcgcttttatgcaggctgcccacttaaaacccaggatggagtacccataggtaccttgtgtatcctcgatactcagcccagggaactttcagacgagcagctcgatctttttgaaaagattgcaggacttatatcggattttctggcctcgtggcactccgtcggctacctcgatatagtcacgctattaccaaaccggcagcgactgctgaaggatatagaggtttcaactgaaggcgcattcaggctcgtcattattgattgtattgatatgccattagcctacgaaatggctcgctcactcggtatgactgccgtagaaaatctacttcgtaatatggtcgcagagctgcagatccgcctacctttagaagggccgctctacaccgtggcagttggacgatttgccttttttacccataaggaaaaaactcggacattagaagatatctctcaaagccttcaggggatccaggccaggtttacccctgaagttccccttgatctggatattcacatgggtgactccgggctttgcgataaatctctgacatcgaatgaaatactgcgccgtgcagtcagcgcattgcatgaagggataaatcaggggcgccggtttacagtttatgatgacgcactggatagccgtaagaagacagatttcagccttcttactgaagttagacaagcgctacaagaaaaccagggcttatatctggtttatcagccgaaaatctcactggtgacagggcgtgtgacgggagccgaagctttgcttagatggcaacatcctaaaaacggagaagtgttgccgggtgtgtttattcctctggtcgaaaagaccagcctgatgcgtgaactcacagcatgggttatcgatcacactattatgcaactgagtgcctggcaaagccgtggactttctttacctgtgtcgattaatctggctgccagtgatttttcaagaccagatttctgcgatgagctggaacagaaaatgctggacgcgcgtctggatcccgccctgctgggggtagagtgtctggaaaccgagaagatgctggaaagccccgctgcacttatcggcctggacatgctcaaacaacgcggatttaaaatatctctggatgattttggttccggatacagcaacattaattacctgcgacaaatcccgatggacatcatcaagcttgaccgctctattgttagtaaggttgctggcgacaatgccagccgcatcattgttcgcaacgttatcacactcctcaagcagctcgactatatcgttctggccgaaggagtcgaggatgccaggaccgttgatattttaagaaggctgggctgcgatgaagtacagggctatttttttgccaaaccgatgacccctgatgcttttgaaacctggtatcacggcagagacgaagctttaaagtga

SEQ ID NO: 217052 - DNA, 1335 bp, Klebsiella pneumoniae
atggaaatgaaatataaattaaaccctgttgtgtcgttagtcatagtaattagtctgtttcttatcgcctccaacactattatatatatggaggtgaatgaaatgaacattccgctatcctcttatttaattgttgttatagccctcttttttataaacatcactgcttttatgtttttacagatggactatatgtctaaccgcattgagttttcaaaattcgtgctaagcctgacattttttggctgtttagtctactttgccgaaaccattatcatcattcaaaagccggtgaatgatgcactagaattacaaatcaaagccaatgacacggcaatattttatcttttccgacaaatgagtttcattattttacttatactggccatttacagttataaactagaacaatcccaaatcctgaatggttgtagaaaaatcaaaatcatggtttattgtcttttcccaacatttatcatgccgattgttgctcataacctgagtagccataatgcgacatacactttcatgctaacaaactatttgagcggtgataaaaaagccatatggaacatacagtatatcaatgcattgatcattttatggtctctaacgtcatgctttatagtaaaggtgacgaagttatcttctgatatctggaatggtatgttagttatttgtctgtcggcaattatgtataatacattcttacttttattagataaatataacctatcgatctggtatttaagccgagcgattgaagtgttaagtaaactatttgtaattggcaccctaatgaactgtgtctttgtcaaattaaagattgccaatcacctcgccatccgtgacccgatgacaaacattcataaccgacgattcttctttaccagattggaagagatattgaaatctacttgccagaatatctgtgtaatggtgatcgatctagatgattttaaaagcattaatgacacatggggtcatcctaccggggatagcacactactcgccgtggtggatattattggtcaatacatcggcccgaatgatatctttgcaagaatcggcggtgaagagtttggtattattgtaaaaaaaagcagtttaaaagatgcaattgaattttcgaatatgttacgcaataacgtaaaaattgaaaccgccaaaggcaataaatataacataccgaggacgatcaccttgagtgttggtggtacgctccttacgtctggaacatattccgtgggggatgtaataaaagcagcggataacgcattatattcagtcaagaacaacggaaaggatggcatcatgttcgccgaagtgaattga

SEQ ID NO: 217053 - DNA, 1617 bp, Klebsiella pneumoniae
atgaagtatcctgtcgctttgacatgcggcgcgctgtggttagccagcgtatcttctctggcctgggcggctgacgtaccgccgggcacggtactggcggaaaaacagctgttagtgcgccatatcaaagatgaacccgcctcgttagatcccgccaaagcggtgggcctgccggaaatccaggtgatccgcgatctgtttgaaggtttagtcaatcaggatgcgaaaggcaacctggttccaggcgtagcgacccgctggcagagcaacgataaccgcgtctggacctttaccctgcgtgataacgcccgctggtccgacggcacgccggttactgccgaagatttcgtctatagctggcagcgtctggtggatccgaaaaccacttcgccgttcgcctggttcgcggcgctggcggggatcgctaacgcgcagaacattattgacggcaaagccgcgccggagaccctgggagtcaccgccgtcgacgcccacaccctgcgggtgcagctggataaaccactgccgtggttcagcaacctgaccgccagctttgccttctatccggtgcaaaaggcgaatgtcgacagcggggcgaactggacgcggcccggcagcctggtgggcaacggcgcctatgttctgaaagaccgtgtggtcaatgagaagctggtggtggtgccgaacacgcactactgggataacgccaaaacggtgatccagcaggtcacctttgtgccgattaaccaggagtccgccgccaccaagcgctatcttgcaggggatatcgatatcaccgagtctttcccgaaaaatatgtaccagaaactgctgaaggatattccggggcaggtgtataccccgccgcagctgggtacctactattacgctttcaatacccaaaaggggccgacggcggatgagcgggtacgcctggcgctgagcatgaccatcgatcgccgggtgatggcggagaaagtactggggaccggggaaaaaccggcctggcgcttcacgccggacgtgacggcgggcttcaccccccagccgtcacagtttgagagcatgagtcaggctgagcttaatgcccaggcgaaagccctgctggctgccgctggctatggcccgaatcgtccgctgaagctgacgctgctgtataacacctctgagaaccaccagaagattgccatcgcggtggcgtcgatgtggaagaaaaacctcggcgtggaagtgaagctgcagaaccaggagtggaaaacctatatcgacagccgtaacaccggcaatttcgacgtgatccgcgcttcgtgggtaggggactacaacgagccgtccaccttcctgtcgctgctgacttccacccacagcggaaatatttcgcgctttaacgatccggcgtacgacaaaatcctcgcccaggcggcggtagagaattcggccaaagcgcgtaacgacgattacaacgcggcggaaaagatcattatggtcaaagcgccgatcgcgccgatctaccagtacactaacggccggttgattaagccgtggctgaaaggctacccgatcaccaacccggaagatgtggcctacagccgtaccatgtatatcgtgaagcactaa

SEQ ID NO: 217054 - DNA, 762 bp, Klebsiella pneumoniae
atgaacaatagcgcaaaaatcgccctggtgacaggcggcagccgcggcctgggacgcgcgaccgtcgaagcgctggcacagcgcggcgtaaatgtagtactgacctacaaaacgcgtcttgccgaggcgaacgaggtggttacacgggttgaagcactgggcgcccgggcgatcgcgttgcctttcagcgctggcgaaatcgacacctttgacgcatttgttagcgcttttcagggcgcgctgacggagctggacgccgataaatttgattatctggtcaataatgccggcaacgccagcggcatgggatttcttaacgccacggaagcggaattcgatgcgctgtatcgcatccacgtgaagagcgtttttttcctcagtcaaaaactattgccgctgctggccgatggcgggcgaatagtgaatgtctcgtccggcctcacccgcatcgtgatggcgaaccgggcgccctatgcgatcatgaaatccgcggtggaaaccctgactcgctatatggcgtttgagctgggcagtcgcgggatcacggtgaactgcgtggcgcccggcgccatcgccaccgatttcagcggcggggtggtgcgggataacccgcaggtcgctcaggcggtagcgaacatgacggcgctgggccgacctggcctgccagaggatatcgggccgatgatcgcctcgctgttatccgatgatcatcgctgggtgaatgcccagcgcattgaggtttccgggggaatgcgcatctga

SEQ ID NO: 217055 - DNA, 1533 bp, Klebsiella pneumoniae
atggattttgaaaatgaactgaccagtaagatccttgatcccattcacggcactattcgtttgacgacactcgagattgcctttatcaatcaccccctgttccagcgcttacgcaacattaaacagaactcttttttatataaggtgtttccctctgcggtgcacagccgcttcgaacactctctcggggtgctgcatttatcaagtgaaatactcaataatttacgcctgaatgcgatacggtatcaaaagaaatatgatgatggccatgtgtttggtcatatcgatcagataccaaaacacaacattcaggagttgagactcgctgccctgatgcatgacatcgggcacgggccggtatcccaccagtttgagagttttatgccttgtaagcacgaattctccgatgttctccccacagcctaccattctatcattgatgtattaagcaagccagaacagaaagttgaacatgaacagctttcgctgttgttcagcctgatgatttatcatgatctgagaaaacaaggtaagattgatgacgaaataaatatcgaaaatgtgttaaaaatcatcgaaaaaagatacggtgaccaacagatcattgaggaaattaatggaaaggcaacagatatcctgccgttaatgacctcgatcatctcttcctgtccgatcgatgccgaccggatggattacttgctcagagatggctatttctccggcgtcaagtgtggcatctacgattacaatcgcttgtttatgtcaattgtcccggtcgaggaacagggaaaattgtaccttgcttacaaagagagtgggattgattcgatcgctgagtttattggggcgcgctccagccttttctcgcaggtgtattaccataaaacaaaccgcgcctttgcgacgatgttgagcacattatgtgagattatgcaaagcaaggatccacaaaatgtcattatcgctgacgttaccgaccgtatcgttgaccatagcgatgaaaccttcatcgacgcgctgaaggagttttatttggcgtgcagtgatgattattttttgaatgacaaggttggtgaatggatagatatcagcgataccgaggcggttaataaaaaaatacttgatgacattattaaccgacacccatggtcgaaggtctatgaggccaaacactctgtgtataaagctaacatcgctgacaaggaaaataaggcgtggaagagtcaactcaccgggttattgacttctgtattacagcctcatttcaaaccacatgaatttgccgttgatattgtctccgactgcgcttttaaagacctggataaaaccgaagttaagcttttggtgaaagatcttaagaaccgctacgaaataaaaccgttaattgaatgtggtgataagttaaatcagtatcaaatcatcaaatattgcattcgggtatttgttgaccgcgatatcaaagaacgcgtaactcctgaaataatctataaaatcaatgaaatagtggtcaagcagatcgcgttgctgaattga

SEQ ID NO: 217056 - DNA, 1344 bp, Klebsiella pneumoniae
atgatgaaaacggaacgtccgttgtggggccggggcattatggtgtcgcctcagcattttcaacagcaggctgcgtatgcagcctggactgcggaagtgattgcccggatgggtcttaaccacccctggggagtggttgaggcgaccttcgaaccagagatgctcaaactgggccgcctgcaggctcacaggctgcaggtccggttccaggatggcacgatgattgatacggacaatgccgatgcgctgccgtccgcgctgtcgctggacggcgcgtccggtgaggcggtgatcgtgctggcgctgcccctgatgcaggcgaatggcggcaactgtctgaagccggaggaggtggccgaaaggccggcgcgcttccggcagcgctggcgcgatgtccgtaaccagtttggggatgatacccggcagattgccgtcatacagccggagctgaccctccgcttcgcccaccaggacaacagcgattacctgacctgtccgcttgttcgcctgcagcgggactcgcagggggcctggcttatcgacgagacgtttctcccgccgctgctgcagatccagggcagccgctggctggcgacgcagcttgaacagctgctcatccagctccgggctcgtctgacgcgcctgatggccatgcgtcgcgaaagcaatgaacggatggctgattttgccgtagccgatgtctctctgttctggttgctgaatgcgctgaacagcgccgagccggtgctggggtactttctgcgttaccggcaaagcccgccggaacgcctctacccggagctggcgcgcctggctggtagcctgctgaccttttcgctcacccatcaggcgaatgccgtcccgatctatcagcatgaccagctgaacgcggtttttccgccgctgtttgatttactgagcgacctgctggaggcgagcctgccatcgcgggtggtggcgattgccctggagcatgatgcccggctgcacttctggcaggcgcgtctgcacgatgcccggctgcgggaaggggctgattactacctgtcggttcgttcgtcggtaccggtcgcccaactgcaggagcagtttccgcgacagtgcaaagtgggcagtccggatcatgtcaaagccatcgtcaactcctcgcggacaggggtgcccctcacgccattgcgtcatgtgccggcggcgatcccgctgcgtctggaaaatcagtatttcagcctcgatgtgtcccaccctctggcgacggaaatgctgcagagcggcacctgtatgttttacgtcccggggatgctcggtgagcctgaacttgaactttttgcggtactacgaacgtga

SEQ ID NO: 217057 - DNA, 690 bp, Klebsiella pneumoniae
gtgaatgagcctaaacgcggcaacgccgcgtccattgatattgatgcgctgctgcagaacacctggctgcaggttatcagcctgcgccacggcccgcagttccgcgatgaggaagggtacacgctatggcagcgctgtatcgctgatgtcgagcgcgtgcaacatgagctgaaggcgagcgggcttgatgacgccagctgtcagcatattctcaccgcccagtgcgcgctgctcgatgaagccgtgaaaggtcgcggcgtggaggatgaggcctgcctgcagtggtatgacattccgctgcaggggcacttcctcggcaccatggacgccggcgacaccctgtgcgagcggatgcgtgatgtgttgcgtgaaccggcgcccaacctggccgtggtcacctgttttcagcgggtgctgctgctgggttttattggcagctttcgctccctccacgaccccgagcgcctgaagctggtcaacgcgctcggtgagcgtgttcctccttttcagtgcccggctaccgctcccgtactggtagagagtcgcgccggtctggggataagcggctggctggccccatggccggtacgtattggcctgagcgtggtagtagtactcgccctgtggtgggggctcaaccactggctcgatcacctgctgctgaccttgttaccgggggaggtgaaatga

SEQ ID NO: 217058 - DNA, 531 bp, Klebsiella pneumoniae
atgaaatctgcattaatcagcccgctgctggcggggctgctgctgttaaccggctgcgcacagcctgccgcacaggccggaggcggcggtggcggaacaataaaagccatcaaccacacaaaatgggcaattaaccacttcagtgtcaatggccagtcggggatcgacattataggcccgtttcaggggggcggaggcggctgctgtttcagcgtgcccgcccgctggacgccgggtatgacggtgcgcgttgactgggaaagtggggaagcttcaactgatgatttcccgggatatgaaaactggaataaatatcttgaatgggaaaagaaaataaaagccagtcatcggcagcacagcaaaactgtcccgctgcccgactataacggccaggatgtgtgcggcattacggtgcactttttgccctgcgatgacgtgaaggtgaccaccagctgttacacctacggcagtccgtcctacccgataaaagagcccgtcaggatgaaggagcccgccgtatgtccgaagtag

SEQ ID NO: 217059 - DNA, 2442 bp, Klebsiella pneumoniae
atgtccgaaataaccgaaacccatgccgcctgggtcccgccgccgtttccgccgcagggacgtctgccgggccgggcgctgcaggttgggcagaactgccatcagcagaacagcgacgagcggcgctatcatcaggaactgtgcctggctgccggacgtcgcgtggagccgccgtgctgcaagacgctgcacatcagtctgtttttcgacggtaccggcaataacttaaatcatgacttttttatcgcgaagccgaaacatccgaccaatatcgcccggctgtttcgggcgactattggaacgggaacggctggcggggtgccgtctgacgatcagagcaagctgtttgatgatgacgccgagggggacgggaaatattttaaattctatatgcccggcgtgggcacccccttcccggaagtgaatgacccggactattccaccatgggtctggtgggggcagttaagggggaggatcggattaactgggcgctgctgcgcataatcgatgtgctgatgtttagtgccaccgaaaaatggctgaccaccacagagagtcgtcgttcactgaaagaaatgagcaccagctggaaccggctgtggtttggcggcagccataaccgctatgaagagttcactcgcttgctgaatggtcttgccccgaaactgatgccgatgctgattcagcctgagccgggcaagccgaaactgacaggcatcaagctgtatgtctatggtttttcccgcggcgcggcagcggcgcgcacctttgtgcgctggctgagcgaactgctgcccccgccggcggcggagggtgaaaaaccgccgcagtgcctgcagacaggcgggatgcagctgcccgtcagcgtggagtttctcgggctgctggatacggtggcctccgtcggggtggcgcatgtggtgccggttgccgacgggcatatgtcctgggcagacggcacgatggagctgccggatgatgaaacctatggcgggctgataaaaaaatgtgttcacctggtctccgggcatgagcagcgtctctgctttccgctggactcggtgcggcgggcaaacggcaaatatccgccctgtgccagagaggtggtttacccggggatgcactcggatattggtggaggatatccgccgggggatcaggggaaagcgaatggtagtgatgaccgtctattgctttcgcagatagttttaaatgatctttactctgccagcttccaggctggggcccctctgaaagttcctgttgacacgctgcctgtcgatcttaaaaaagatgcatggcgtgctatgcatcctgaacttattgagcaatacggaattaatgaaaaactagtcaaccgcttcaacgcctggcgtgaactcaccctgggccaaaccacgcctaaaacgttcgatcccgatgcagcctctcactacgaaccacttgccgccggcggcagtctggaaaccgtcattgctgagcagatggcctggatcaccgcctggcgcatcgaccgctatgccagaggctcgatgctgaaaacgcccttctatcagcgcgccacgaataccgacgcgctgcctgccgcgcggaaggcggcagaagagattcgtgataaagaacaggagaaggtgctcagggctcgccagaaccagatagcaaaccagcctcctgacaggatggacgagctggttctgcagccgggcgtgaaggattttgacccaaagatggatcaaacccagctgttcgacgcggcgaaggagttcggtaaggattaccacgacggttaccgtattccggataacctggcgcagctggtgctggataccgtgctgcagccggttattttcgttctcaataccgatgatgaagcgcaggaataccggcgcatgaagcgtgacggagaggcccgggtggccgtcctctttcccgatgccggggaggccagcaacgcggagcagcctgccgggctggtgagggcgctgtttgatgatcaggtgcatgactcacgcgcctggtttatgtatgccgcgctcggcacgcgcgagatgtggaccggctacttccgctaccggatgatttacttcagcgagcgctgcagtaaaccactctcgccgctggtgctcgccggagacctggtgggttttgcgaccgtgaccgcgggcgtcgtgctcagtttccggcaaaagcgcctgaccggcaagctggccgggctggctgcgacaggcgccgtgcgctcgctggaggtggcggtgctggaccagataaccggggaagcgctgccggagctgcccggaggggcgcagctgcgggcatttacccacgagccgggaaccgttgtcgcacagcaaaaggcgcggaaagcggacgagcagctggcgcgggggcaagccgcgctgccggccagctggctggaggacgttctgacgacaacggtctga

SEQ ID NO: 217060 - DNA, 312 bp, Klebsiella pneumoniae
atggctaagcgtatgcaagacaaagagagcattgccgggatgtcctggctggttctgctgatcattgcttgctggggtggacttgtccgctacctgatagatgtgaagcagagcaaggcaacatggagcttgatcaatgctcttgcccaaatggtggtttcagggtttaccggcgttattgctggcctggtgagcattgaaagcggactgagcatttacatgattctggcaaccgcggggataagcggcgcgatgggctccgtagcgctcacgtatttctgggaacgaatcaccggagtgaaagcacaatga

SEQ ID NO: 217061 - DNA, 381 bp, Klebsiella pneumoniae
atggaccgtcagcgcgcagctggtgaaggacaaaaatccgcctcggccagactctcgctggcgcaacaggatgtgggggtgagtatggcgaaccttcgcaaagcggcccgaggtcgcgaatgtacagtgcggatccctggttactgtaacggcaacccggaaaccagcgtgttggcgcattaccgcctggcgggtacgtgcggcacaggatgcaagcctgacgatactcaggcggcgatcgcctgcaacgggtgccatgacgtaatcgacggcagaactaaaaccaccgatttcacctacgacgaattgcgcctgatgcacgcggagggggtaatgcgcaccctggaaatctggcggaaagagggactcattaaatcatga

SEQ ID NO: 217062 - DNA, 1986 bp, Klebsiella pneumoniae
gtgaaagatagcgaaatcatcgttgataactttgctggtggcggcggcgcctcgacgggcattgagctggcgattggtcgtagcgtggacatcgcgataaaccacgatccaaacgcggttgctatgcataccaccaatcacccgggaactctgcactattgcgagtctgtttattcagtgcgtccaaaagtagcgaccgccggccgccgggttggtttggcctggttctcgccggactgccgccacttttccaaagcgaaaggggctaaaccagttgaaaaagcgattcgtgggctggcgtggatcgttatccgctgggcgctggatgttggtccgcgtgtaatgatgctggagaacgtcgaagagtttaaaacgtggggtccgctactggcggctgaaatgcgtccggatccggaccgcgttggcgaaacgttcctggcattcgtcggcatgttgacatccggagttcctgcggatcaccctgcgttgttggaatgctgcgagtttctggagttgtcgcctgatagtgaacaggtgaaacgcttagttgccggactgggctatgttgtcgatttccgtgagctgcgcgcctgcgactatggcgcgccaaccatccgtaagcgcttcttcatggtgatgcgccgggacgggcaaccaatagtctggccggaagcaacccacggggatccgaaatcaccggcggtgctggccggaaaactggcgccatggcgcacagctgcagaatgcattgactggtcaatcccagctccgtcgatttttggccgcaaaaagccgctggcggaaaacacgctccgtcggattgcccggggaatccagcgctttgttatcgaaagcgcttcgccgttcatcgtgaagtgcaatcacacaacgacacgcgggaaatatgactgtttccgggggcaggaactggacgatccgttgcagacgattacgaaaacccacggtttcgcggttgccgtgccacacctgaccaagtttcgcaccggcgccaccgggcagccagtcaccgaaccggtaccaacggtaaccgcaggcacgtccagacgaccgggcgggaatggtcatgcactggggattgttgaggcgggccttgtcccgttcctcgctggcaacggtggcagcgaataccaggctaaaccgcgcccgcttgataaacctgctcacaccatcctgaaagagtcgcgcgcctgcgtcgttactccggttatcgcgcgccagttcggagcaagcatcggccaccgggcggacgaacccagcgcgacaattactgcgggcgggggcgggaaatcgcaactcgtgatgccaacgctgattcagatgggttacggcgaacgaccggggcaggaaccgcgcgtgctgcaactggacaacccgctgggtactgttaccgccggcggcaataaattcgcgacggtgagtgcatttctagcaaaacactacggcggcaactacaccggtcccggcgtggggctggatgagcctgcgcattcagtaacgactgtcgatcaccatgccgtggttgcttctcacctcgtgaaactacgtggtacttgccgtgatggtcagcgtactgatgaacctatgccgacagtcacagctggtgggcagcacgtgggggaggtcaaaaccacgctggcggtcgaggactacgacgaagagcgcgcgcagcaggtgctggcgttcctgcaggaatactgtggagaggaatgcaccggtctggtggaaatcgccggggtaacttaccgcattattgatatcggcatgcgtatgcttcagccgcatgagctctaccgcgcgcagggcttcccagaatggtacatcattgatcaggattaccgcggggtgaagtatgcgaaggataagcaggtcgcgcgctgtggtaacgccgttccgccgccgtttgctgaggcgctggtgagggctaatttaccggagatgtgcctgaaaaaaggtattgcagcatga

SEQ ID NO: 217063 - DNA, 258 bp, Klebsiella pneumoniae
atggactcttccctggaatacgcctgcaaacgcctgcaggaactggaaagcctgctgctggtggatgtgcctgaaacagtatggccagcggaagtcagtatggtcttctctcaggtcaaaaacgccgggacactcccggcacaccaccagcgccgactgcagcaccatatcaaccgtatgtggctggaaaaaataccggtaccgtcaattatcgccgcggctggttcgctggcctgcgccatggagaaatacgcgtga

SEQ ID NO: 217064 - DNA, 375 bp, Klebsiella pneumoniae
atgactgatatcaccgaactgactagcgtacaaaaaaacgcaaatattcaccgtttatccaggctcattgcctacgcacctaacgatgaattgcggcaaatggctgttgaagttgagcattacacggatcagctcatagaggcgctggagaaggcgcagctgagtatcgccgaactggagcgcgaacaggagaatcttcgcccggtaggtgtgatgagcgagaaagcatttcaccgtcttgaaaacagcgaatgtcgctttattgcgttgtggccgcgccctggtatctttttgccgcgcaagcgccccgaggatggcgtgatcgtttatgcgcttacagttgccgccgctggcatcaaggtggaggctgagtga

SEQ ID NO: 217065 - DNA, 237 bp, Klebsiella pneumoniae
atgagcaactcactgcaaattctctgcattaaggataccgaaggatactggactgaaggtgaaatgtatccggcccgtgtagttgctggcgggtttgttcaagttggcgacgatgacgatctcaatggcgaagcctggagcgctgcaccaatggaatatcgggaagatggctcgatcgtttatcaggtcggcggtattgagggtgatgtgttattcgaggaggccagccatgactga

SEQ ID NO: 217066 - DNA, 255 bp, Klebsiella pneumoniae
atgactgaacacgtcgaaaaatacacaaacaaggctatagaaatcattgccgactatatccagcgcactaacaagaaaaacgagcagttgcaagaagcgaaggtgcgcttggataaaaaaatcgctctgttcgcagactatgagaactgcaacacaaacaggctgatgtccgtatttttaccagcaatgaccagccatacccgagatggctttttcgaagagatagcagcggcgttagaaggggcagacaaatga

SEQ ID NO: 217067 - DNA, 204 bp, Klebsiella pneumoniae
atgacaatcgtaaaaacccataccggcatcgtgatcaccaaagacggtccgcaggtaaaaaaactgcaccagacagagcggatgtgggtcgttggcaaaaacgagttttaccacaaagaaaccgggcgccgtcactttgcagaaaatacgcgccgccggttgttgttggaaacgattgagtcgataggtggttcacatgactga

SEQ ID NO: 217068 - DNA, 786 bp, Klebsiella pneumoniae
atggctaagaattcaatcgatgtatacggtgccagcggcaaaacaaacgtgctcaatttcgagcctgaaaacctgcacctggtcaccgataagacccacccactttacgatgagcgtgtacacctgccgatcgaggaagggatggtactgaacattgcggagctgggggtactggagccaatcatcgtctggaaagaccctgaaacggggctcacctgcgtagttgttggccgtcagcgcgttaaacatacccttgaggcaaataaactccgtctgaaagaaggcaaagacccactgcttgttcctggggtcgttaagcgcggatcagcaaatcagatggctaaatacatggtcagcgaaaacgaaattcgccgacctgatacgccgcttggccgggctaaaaaaatgtcagacgcgctcgaccgtgggctcgatgaggacgatattgcggtgttgtttggctgcagcgttcagaccgttcgagcaacgctctccctcctcgatgctactcaggccgtcagggaagcggtggaggctggcactgtcaccattacccaggcgcgacagcttggtgcgctcccacctgaagagcagcgggaaaaagttgcagaaatcgagctggcgacagctggtaccaaaggccacgaaaaagcccgtcgacaacgtcaggtcctcggtgatgcaaagcctcgcctaaaaacccgcaaagaaatcacaaaagccctggaatctgccgagggtgagtatgcgagcgcactccgttgggtgcttggggaggccgtatga

SEQ ID NO: 217069 - DNA, 336 bp, Klebsiella pneumoniae
atggctagagcattatcagcagttgagcgcagagagtacgtccgcgcagtgattcggatcaccaggcatcaggggcgccttacgaccaccgaggcaatgaaaaaactggggctgagccgcgctactgtccagcggtatttttccgaagcagaagcgactggcgaggttgtccggcatggtcgtttggggctgttccgcgatcagcgggccgttatcgactttgacatgaagcgttttggcctggtgccgaaagttgctgttgggatgaattacagcctgcttggcagtcctgtttttcagcgagttttagatgttcaggaggctattcatggctaa

SEQ ID NO: 217070 - DNA, 744 bp, Klebsiella pneumoniae
atgaaatctatcgcagaaagcatgcacaacttcgaccgtgaaaacttccagcgagtggctgccgggcttccggaaatgcaggacgagcaggcattaaagcgccaggcggccaagactgcggagatcttcaacgagctgttccgccagctgcttgccgtattcccggtgctggccaacaaatctgtggaagacctcaacgagatgcgtcgccagtggttgttggcgttcaaagagaacgggatcaccacagttgagcagattaacgcagggatgcgggttgcgcgcaaacaggaaaaaccattcatgccatcaccgggacagttcgtcgcctggtgtcgttctgaggaggcggtaactgtaggcctgccagatgcgagtgagctggttgaaatggtttaccagtattgccggactcgcggccagtatccagacgctgagtcgtacccatggcctgagcacaaaatcgaaccgttaacgctgaaacacaaagcctgctactggatggttactggcttgtacgcagacatgcgcgcaaacggcctcagcgacactgagttgcgacgtaaggcgcaggatgagctgctgcgtatggttcgtcgcttgaatgccggggaagtgattcccgagccggttaagcagatcccaaagcttggcggacgtccgcttagttacgagcagggcttaaacagaatcgctgaaatccgcgcgaaattcggtttaggcagagggcggaaacatggctag

SEQ ID NO: 217071 - DNA, 858 bp, Klebsiella pneumoniae
atggccgacctgtccaacggctacaccagaatcgccaatgagatacagaaactcaagccgcggctgcgtatgtccgggcgcgagtggcagtgtcttgaggctgttatctggctcacctacggatggaacaaaaaacaggatcgggtgacaaataccgtcatttctgagttaaccgggttgagtgattctcatgtttcagatgcgataaagctactcgcagcacggggaattatttttagtcacaagcatggtgtgatgaaaactgtcggtataaatactgagctatccgcctggattttggacaaaccgaaaacgggaaaactcttcccgaaaacgggaatttccttcccggaatcgggaaaaaccttcccggaaacggtagacacccaagactataacaaaaacaatattaaaagatcttcgtctcggaattctgaagaatcccgaaacaagaaaactcatgagtttctctctcgtcatccagaagcggccgatgggatttatacccctgcgggtaaatcctggggaacagctgacgacctcaaagccgcgcgatggattttcgataaagcccttaccgtgaatgcctccctctctgagccgaactgggttgaatgggcgaacaccatccgcctgatgcgcctgcaggacaagcgcactcactatgagatctgcgaactgttcaagtgggcaaatgaggacggtttctggcaggacaacatcctttgcccctcaaaactacgtaagaaatgggatcagctcacaactaaacgcctgcgcagccatggtccatcaagaaactcatcaggcgccagtgcgctggacaacacagactggatcgacggggtactcgaatga

SEQ ID NO: 217072 - DNA, 537 bp, Klebsiella pneumoniae
atgcaaacactttcctttcaacaaaataccggaatcaccaccggcgccctgataaagcgaaatcagctgagagagtcagatcacgacgctattcgctctgctgttcgcgcctgggcagcagctgaagggcaggatgttgtctcggcatacatcatcgatgagtggcgacagcagggcggcgaggagatcgcgtttcctgatgatatcagccgtgcccgacagaagctttttcgctacttggacaacccggccgagtctgagcgctatcgcgagtacgttcgccttcttaccccggcaatcatggccgtccttcctctggagttccgacatcgtctgatgcctcaggacgatattttgtcgcgcctgtcttcggccatgaaggaatgcgctgaagcaaagcaggcggtgatgctgaacgcgccagagcaccagaaactgaaggaggtgagcgagggaatagcgtcgcttttcaggttaatgcctgagcagacaggagcgctgatgacgatcgtgagctcaatgctcggcgtgatgtaa

SEQ ID NO: 217073 - DNA, 231 bp, Klebsiella pneumoniae
atgaacaaagagacgcaacaaaaaatcagtaaggcagcatctcgtgcctgtatcggaaagcactttggcatcagcggtcaggctgttggtaagtggatttacgagaatggagtgcctcaaaaacgcatcgtcccactatgccgttttcttaactgggaagtaacgcctcatgaaattgatcctgaggcgtacccaaacccaactgacggcctgccgaaacgggaaggctga

SEQ ID NO: 217074 - DNA, 135 bp, Klebsiella pneumoniae
atgatactctcgctctttaaccaacttcctgagtccgaaaagttgcgtcttatccttcacaccaaaggtgtcctgcacgatatcgagttgcttaagaacgacgtctacgacctcataaacaatcaaaaaaaatag

SEQ ID NO: 217075 - DNA, 192 bp, Klebsiella pneumoniae
atgagcacgatgtttgccctggttctcaccgttagcatgctgacgggcggtaatcaggatgtcctgctcggcgtttacgacagtgaaaatgactgcaaggcagccgcagaagagcaacacgtgaaagctgaatgttatccgctgaaaggtgtactggacgagcatccggccgggttcacggtgcaaatgtag

SEQ ID NO: 217076 - DNA, 156 bp, Klebsiella pneumoniae
atgcagaagaaatgcggttactgccgtaaagcaatcgagggaaaaccagtggtaagcaccctgttgtacctccaggggaaccagctcgcacggaaagaaaaagagtattgctctgaacgttgcgcctctcacgaccagatggctcacgagggctaa

SEQ ID NO: 217077 - DNA, 3096 bp, Klebsiella pneumoniae
atggaatatttttatctgataaaagcgactcaaaaatcgggtaaagctgatgccgtaatctggcgcactaataaatcagaagctcgcgcccttctgcaactggacgtcgatctggaagacgccgggatcgaaacaggccgcggcaaagactatcaaaaaccaattcgcaccgatttcccggtattcaatgacctaccggcggagggtgttctcgattactcatggtgcgaacgctaccagctcggcgatgatggccgcacctgggctctgaagccaggtcaggcgcctgcggatcatcacatcgatgatgccggagtatccgctgagcccgttagtggcgtgctggttgatgccaatactactggcgacgcggcacaaggtgagaccgtggaaactttcggtagcgatgaataccaggacgattcgagcgcgctttttaacgtggcagaactcccctttcgcgctcagttgctggcgcagtatatggcagaagaacgccacgtttatcatatcagcatgcctcaccggcaggagctgtcagttcttgaaatggacactgataacgcagccgtccaggatctgattctggccgccgagaatatccctgaaatcaaaaaatacgatatgccggcgctctggaaattcaccagtgccaataaaaaagtattcccggaagggaaacggcatgagctcggcaagcgtatccagtttgcaaagctgtggttcgccacgaacgcgatcgaccgcggcattctcaccagggaatgggctgccggtaactgcatttcttcggttatgaaaactgatgcaggtacgaatgctggcggcgctaataagaccgatcgcaatcctgactacacccatacccttgatacgctcgatgtagaaatagccctggccacaatgccaatggatttcgatatctacaatttcccggcatcaattcaccgccgggccaaagagatcgttcagaagaaagaaagtccgttcaaggaatggtcggcagcgctgcgcaaggttgcaggcatcctggattattcccgcgccgcgatttttgcccttattcgtggcgccaccagcgacattcatcatttcccggtaagtctgcagacctatatcaatgcgaacctgaccgagcataagcatgacgccccttctgctgagactcttgaaaaagctggtcatgtttcatctgccgccgtcactctggacgctgtgaaaaaggctatcgatggagatgaaggtgtgcctgacctggaaactctcccaactgactttcaggtaattggcaccgaactggtgaaagaagctcaaaagaaacgccctgacgctaatcaggttctggccgccgaacgtggcgaatatgtcgaaggcatcagtgaccccacggatccgaagtggataaccgaagacctgaccaaacccaaacagcctgaagtttcaaacatgggcaatggtgttttttcgattgatggtctgatggatagccagccagcaccagcactttctatcgtggaccaggcgcgccagcgcgctgcagaagaaaaattacatccagctaattccggggaaaccaccagcgatgtgcagatggaaacggctcagccggtcgaagacgaaaatgataatgcggtatcagcaggcgaaggcgctgatgagcctcctgcgcaaacaattgccgtgaacatgagcaaaatactggctgaacgctgcccggatcttaccgccgaagtgctgaaaagccaggtttcagagagtgctcatagcgatgaagaggaagaggctgaacaagcagcgccagcatggccggagtatttcgagcctggtcgatatgaaggcgtgccaaatgaggtctaccacgccgctaacggcatcagctccacgatggttaaagatgcccgggtatcgctgatgtatttcgaggcgcgccacgtatccaaaaccatccagaaggtgcgctctcctgttctggatatgggcaatctggtgcatgcactggcgctgcagcctgatcagctggaaaaagaattcggtatcgagccggaaatcccggaaggtgccttcaccacgacggcgacgatccgcgcatttatcgacgaatacaacaacgggcttccggttttactcagcgcagatgacatcaaaagattcctggaggaatacaacgcaaacctgcccgcccaggttcccttgggtacatcagttgaagaaaccggccagggttatatgtctttacctgctgagttccagcgcattgaagacggtcagaagcaaaccgccaccgcaatgaaggcctgcatcaaagaatacaacgccaccctgcccgcccaggtgaaaaccagcggtggccgcgatgccttactggaacagctggcgcttattaatcctgacatggttgctcaggaagcacagaaggcgcagcccctgaaagtctctggcacaaaggccgatctgattcaggccgtgaaatcggtaaaaccggatgccgtgtttgccgacgagctgctggatgcatggcgcgagaacccggaaggaaaagtgctggttacccgccagcagctggctacggcactggccattcagaaagcactgttgaatcacccgaccgctggcaagttgttgacgcacccgagccgtgccgtcgaggtgagctatttcagcattgatgaggaaaccgggctggaagttcgcgtgcgccctgaccttgagatagacatgggcggcctgcgcattggtgcggacctgaaaaccatcagtatgtggaacattaagcaggaaggcctgcgcgcgaagctgcaccgggaaatcatcgagcgcgattaccacctgagcgcggctatgtactgcgaaaccgcagcccttgaccagttcttctggatattcgtcaacaaagacgagaactaccactggatcgccatcatcgaggcatccgaagaaatgctggaactcggcatgctggaatatcgcaaagcaatgcgtgccatcgcgaacggtttcgacactggcgaatggccggcgccgattaccgaagactacaccgaagaacttaacgattttgatatgcgccgtctcgaagcgctgcgcgtacaggcataa

SEQ ID NO: 217078 - DNA, 1110 bp, Klebsiella pneumoniae
atggaaaacactaacattgttacagccgaacagcaggcaccaaacaccatttcagctagcaacgcgatctttaacgttcaggctctcggtcagttaactgctttcgcaaaccttatggctgattcacaagtgacagtgccagctcaccttgcaggtaagccagccgattgcatggccatcgttatgcaggctatgcagtggggcatgaatccctatgcagtcgcgcaaaaaacgcatctggtaaacggcgtgctcggatatgaagcccagctcgtcaacgcggtaatcgccagttccagcgctattaacggtcgatttcattatcgctacggcggcaactgggaacgttgcacaaggacgcaggaaattaccagggaaaaacacggtaaaaatgggaaatacagcgttacagaacgggtgcgcggctggactgatgaagacgaaatcgggttattcgtccaggtcggcgcgattctgcgcggtgaatcagaaatcacctggggggagccactttatctctctggagtcgtcacacgtaattctcctttgtgggtttctaacccgaaacagcagatcgcttatctgggcgtcaaatactgggcacggctgtattgcccggaagtcatcctgggtgtttacagcccggatgaagttgaacaaaggaccgagcgagaaataaacccggcgccggcgcaaagaatgtctgtcgcagagatcaccagcggaacagacatcaccaccagcgcgcaggattcagctctcaatattgattccctggcagatgatttccgtgaccgcattgagcgcgccgaatcggtcgatgcagcaaaagccatcagggcggatctggataaagagaaagctgtgttgggcactgttcttttcaccgaactgaaaggtaaagccgtgcagcgttatttcatggtagacgcccgaaacaaagttgaggccgccattaattcacttcctaacccgggggatccggaagccgaagcgttattcgcgaaggcagaaagcaccctgacctcatcgcgccgccacctcggtgatgaactgtatgagcagttccgcatcaccctggacgacatgaaaccggaatacgtgggctaa

SEQ ID NO: 217079 - DNA, 948 bp, Klebsiella pneumoniae
atgaaagcagccgtggtttttgatctcgcagaaggcccggtttgggccgattttatcgacccgcagcccgcgcccggccagacgctcattgacgtccgcgccgccgcgctgagccatgtggttaaggcccgggcatccggacgccattacagcttcgacggcaatctgccctttgtgcctggtatcgatggcgtcggcaccacacctcagggccagcgcgtctacttcgccttccccaccgcccccttcggcagtatggcgcagcgggcgccggtcgccctgcagaattgtctgccgctgccggatgcgctggatgatatccaggcggcggcgatggccaaccccggtatgtccgcgtgggcatcgctggtgacacgcgcccagcttcaggccggcgaaacggtgctgattaatggcgccaccggcagcgccggtcagttggcggtacagattgcccgctatctgggggcgaaaaaaatcattgcaaccgggcgcaatgcgcagtcgctcgcggcgctggacgccgatgagtgtattcagttaaccgctgatgataaaaccttgagcgggcaattttcagcggtcagcgccgcgcagatcgatgtggtcatcgattacctgtggggacatagcgcggaattattattgccggcactggcgaaatatacccctgccggcagtccgatgcgctatgtgcaggtgggttccctggctggcgccgatatcgcgttaaatggcgcagtgctgcgttccgccccgctcctgctgatgggcagcgggatcggtagcctgtcggtatcgcagctgctggcggcgaccggtgaaatgctgcaggcggcggtgccggggaaattgaccatcgccaccaccccgcggccactgcaggagatcgcggcggcctggccgcaggacgacagccagaagcgcacggttttcaccctcggataa

SEQ ID NO: 217080 - DNA, 708 bp, Klebsiella pneumoniae
atgaaatccgaaccccgcaacactattcttatcgtcggcgcctcacgcggccttggccatgccatggcggcgacgttcctccagcacggctgggaggtcatcggcaccgtgcgcgatttatcatcccacacgccgctccacgacctggccaagacgcatcccctgcggctacgcctggcgacgctcgacattcgcgatgaagcccagctggccgcgctgcaggcgacgcttcccccggcaagcctcgatatgctgtttgtcaacgccggtaccaccaatcgtgacccatcgcagaccattggcgacgtctccaccgaggagttttaccaggtgatgctcaccaatgccctggcgccgatgcgggttatcgagcgcctgcagcaggccgttaaaccgcaggggctgctcggcgtgatgtcctctggccaggggagtctgaccaataaccttaccggccagcgggaactctaccgcgggagtaaagctgcgctgaatatgtttatgcgcagctttgccgctcgccccacctcggcctcccatccgctggtggtgatggccccgggatggatccgcaccgagctcggcggggcagatgccccgctgaccatcgaagagacgatcccacgcctggtgaacgtcctgctcgacaaacggcaacgtccgggactggagtatctcgattaccagggccgtaccgtgccctggtga

SEQ ID NO: 217081 - DNA, 675 bp, Klebsiella pneumoniae
atggggcaaatattcagaaaagttgtcattgacgtttttaaagaggcacagcaactcggggacgtaccagttggttttaatccagcagaagcagcaaaaaaacctcacgtcaaaattacgcgccaacgattaacttttgaagagtggaagttaatttatactgcggcgaagaaagaacattattttcttcagaaagggatgcttcttgccgtggtaaccggtcaacggttgtcagatatttgcaaaatgaaatttaccgacattgaagataatcatctacttgtcgaacagactaaaacaggtgcaaaaatcgcgataccgctcgccctgcgatgtcaccaacttgatatcagtctgggtgaagtgatttctctgtgtagggatcaggtgcttagccagtatttatttcaccatcaccacgccaaaggaaaggcaaagcgtggagggaaggtacaacctttaacagtggcatttagtaaggccagagacgaagttgagtatgactgggcgcaaaacggtacaccacccagttttcatgaacaacgttccttgtccgagcgtctatacagaacgcaaggaatggatacccaggtactactcggtcactcaagtaaaactatgacagatcgttacaatgattcgcgcgggaaagagtggaaaaaaataataacttag

SEQ ID NO: 217082 - DNA, 912 bp, Klebsiella pneumoniae
atggggttgatgcaggatgcgacaaagtgggttttatttttggcgagccctgaagagccagaagagcggcatgttcttgatttggctttcggattgcattgcttagagtctgcaggggtttcttctgaaaatattgaaatatatattgatggcgataatagacaaaacattatcagttggatgtcgattggaagtaacaatccttatgagattcttcctactgagcatttctttaatacacacggcgccaatgcgcactcaaatctagttatgttcgtaactggacacggtgggccaaatggaatagctggcaagcaagacataacaccataccttttacttacaacacttaaaaccatgcctggcctggaaaaggctatagtttatcttggtcagtgctttgctggtgttttcaactatataggtgcaggttctggacgttttaaggcggcagttgaaagaaaagaagctgacgttatttttattggtgcaactaatttgcattccagtttaagcctgtctactaaagaaaacgtttcatctgaagatgatccatcgaaagagtttaactggattgcaaatgtatttctttataatgtgtttaagtggttttccaaaccaatcgacattgatggtgatgggcgaattacaatcattgactcatacaagttcgctggttcttactcaaatataatgaataaagactttagagtaaactcctttgtagcctctgtagacctccactcggtttggaaagatgccgtaaaagcaagagacgctgaaaacacccctcaaaatgcaatggacttatcaatgattgaaaaaagatatgtaaacattttatctaacagtcatactcatcaagaatgctggattcttaatgcaattccagcacagtttattgaagtctga

SEQ ID NO: 217083 - DNA, 291 bp, Klebsiella pneumoniae
atgcgggctatcaatattctttcgtcagatttgccagaaataagtaggtttaccaaagaatgcatcaatcatggtcaagctttgctcttcaaggcttccaaagaagatgtgaaagatatctatttcattttaaaggatggcgccgatttttatgctctaggcgataaaggtcaagttgttagcatgtatcgaccactcaaacaagatatggttatcgatgaagtagtttatttttcggatattgataaacctaattcacttagtaacttccatatatcaatgaaggggtga

SEQ ID NO: 217084 - DNA, 807 bp, Klebsiella pneumoniae
atgtctcagcagcagagcgcggactgggtcaggctggcgcaatcgcccagccggacggaacgcatcgaagccttcttcggcggccacggctatgagccgcaccggcatgatacctacgccatcggccagacgatcgccggcgtgcagagctttcactatcgcggcggactccagcacagcttgcccggcggaacgatggtgcttcatccgaacgaaatacacgatggcgaggcgggcaccgaggcggggtttcactaccgcatggtctatatcgaaccggcgctgatccagaagatactcggcggcaggccactaccgtttatccccgacggcttgtcggcggatccacggctacgtcgcgccgcgcagccgctgttgaaagcggtcacggataccttcgagccgctggaggaagaggatgctctgtacgacctggcgcagaccctggccgttgtcggcggccaacgttcccgtcgccaggcgtttgattatcaggcggcggagagggcccgggagtatattcatgcctgttttatgcaggatatgaccctcgacaccctgtcgcaggtcagcggccgggaccgctggagcctgagccgggatttcagaacgctgtacggcaccagcccgtggcgctacgtcatgatgcgccggctcgatttttgccgccagcggatgcgcgccggggagcgtctggtggatattgccgccgacgcgggctttgccgaccagagccacatgacgcgccagtttatcagccgctttggcctctctccggggcgctggctgcaggcgatccgcggataa

SEQ ID NO: 217085 - DNA, 651 bp, Klebsiella pneumoniae
atggcattttcattaccggatctcatggatgtcgtacataagtacaaccgcaatcccactccgaaaccgattcccgtagacgaagtggatcgcctgcgggtacggaaatatcgtgacccgcaaaatagcgaaaccgtggcgcttccggagagtctgaaagcgctgttggcctacgattgccaactgaaaagcccccacggacagctggtactggaatgggttgtggactccattgatgaacatggcgtcctgctttccgactcgctggatgaagatgcttattacatgaatggtcttgatatggccggactggactttgaagagctgatgcccgtctggaacgacgatccgcgtcttcctgccctgattcgcatcagccacgccggcgatcagcaggtatttatctatgtcactgaacgtgatgaacagggtgaatatcctgttgtccgcttcgagggtaaagagaatgatctctggctggcagaatcgtcactgattgaatatctgcaggggatctttgccggcagcgaggagagtcacgacgaatggcagcatcagcagaccctcaatgaggcacgcgatggcgccttgctggagctggaatatattcatgaggatctttacgccaggctcgaaggctgtcctgactaa

SEQ ID NO: 217086 - DNA, 1818 bp, Klebsiella pneumoniae
atgtcactaactacatacgtaatagtaccttttggatacggcatgcatcgttttagtttagcgaaagccaaaccttgggggccaattgaaaaaatattgttagggtatattgctaaaacaccttgtacctcaacttttttagctaagacatcaaatctccccaggcaactcgtcgtggaaatgctaatccctctgatgaaagctggatggatcgaaataaaaccaatcaatgatgaatatttttttgtaacaacgaacaggggggcagaagtagccttatatgaagaactacctactgatagcatcccttattcaagagttagaagttttatggtggaccctttgactcgtgagtgttaccgatacgagaaaagaaaaaagaaacaaagttttcaactatactctaaacataatattttagatgctacaaagtcattccgtggtttatgctctgaattaaatatcatctctagctacactactaccttatctagaatttatgaaaaaatcacaaattacgatgaagaggttattgatatagaagatgacataatagatacaaattattctaaaaatatacattttgctcttgccgccatagacgacatggggaatattacaggagtgcccgaaatatcagatgaattaaagtgtgagatacttaaaagagataagaagattcgtgagcgcgcagagatattagatataagtaaatctgatatctatgttggagaaaatattaatgaaactgttaaaacgttaccaaaacgtttaattaacaaagagcaagttagactgattgcaggtcccgaagaacatcggatgcatcttttcaattcaataatcaatgcaaaaagtagattaattatacattctacatttatcaatgaagaatgtattgctgatgtgtttgataatttaatagatgcggcacaacgatcagtccaaattgatattctatggggccaaacagaaccagaggaacagaataaacttgaatcttataaaaatgtcatagccaaatttgacgaattaaataacaaaatagtacaaaaaggattatctacacaaataaaattccatagagcccccactctatctcatgcaaaattcataatccatgatgaaatacagggtatttacagcgctacattaggttcgtgcaattggctatcgagcagatttaatagatttgaagtatctgcctgtataaccgacgatttaatcgtagcagatttaactgatatatgctcccatctatcaatgggtggaactggattagcaaataacctgagcagagaattagctgttttctctgcaagcttatataaaaatgttagtatacgcaaagaatcagatggtaatactagcgttcaaataatttctgcacctgagcatcaccctatagtaaaacaagcttgcaatgtagttaaaaacaatatatttatttgtagtcatagagttagctatgcgggtgatagacctataatattaccgctgaaaaccgtgaaagcgtacgataagaatatatctattgatattgcttatggaagatcaagtggggatctaaaatcagccgagcttaaggaattaaaacaaaatcttcagtctttaggtttcaatattacaaccgcagataatcctgaagtacatgctaagtttttctcttgggacaataacaatattgtagtcacaagtcttaactggttgtcatcttcttctaagggtgatatttacaatgaactaggtttccttattacacttcctggcattggaaatgaagtgaaggaaaaattccatgaaatgtatccagaataa

SEQ ID NO: 217087 - DNA, 3660 bp, Klebsiella pneumoniae
atggaaacttatctcaccggaaacttcctcaatcaatatgaggattttaatactctaaatgaatatgatagagaaaatggcaaaccatgcttattagaggctgcgcaaaatgccaagcgagtgctaataaaattttggcctaaagatgaatcaaaaaacaacgatataattgaagatttgtggcgatatgaaataagacaactccataggctgaaaggcttgcccggtctaggagactatatatcttctatagttgactcaggaaaagatgaaaggggattttacttagtattggatgccgacttcagagttcctctgtcatatatatttaaagaaaaaaagacactaagtttaaataaagaatggatcaggaatagtagaagaattgagaatagaatcaaactttggcataattttataagaattattaaagccatcgaactattgcattcccaaggtctgcttcataggcatctggataaagattctatactaactgatcctagatcacttgactttgacttccaattaaccggcttcgaatggtcactacgcgtccacgctgtttcagataaacataacgaatatacatctagagatttgaagattaataagcagtattcttttttatctgattgggctgatttaggttttctaatagccgaattacttaacataagctcagatagattaataaatcttcaagtcacaattaatgatttagtagatgaaaccgatctaattcttgatgaattaattttaattcgcggattgattggtgttatgaaattagaaaccaacttatcgagggaggccataaatggctctataataatagaaaaagcaaacactatattgaagtcattagaatctctaatttcaaaagaaaattcaactaggcatattgaatttcttttttcggcaaaagcaaactcggaagtaacaccagacaaaataacatctgtttttaatgccatacaatataccataaatagagatcatggaatcacaatttcagataaagatattgatgaatgcttagactttataacaagggatctatcagggaaaatatacctatctataaataaaaatagaagtaataaagaagaaatacttctttacggagaaaaactcacttatgtactagagaaaaaacgcaacggtaaaacagaggactctgattggaacattgcattctgccatgctgcttatgttgagcctccaagacaaataaaattcaaagctaaaagaatagctttagaaagagacgtattaaaatgtattcagtttaaatctaacaatcgttatcaaggtatatataactcttgggatgatctaatccttgaacttgaacgagatgataataatattcttcccaatagagttattgtcgaagggtttgctatatatcacctaacagaaatagctttcgcaaaatcagaaatttaccctgtaacattaattagttatgataaggacaaaacagagtcaaagttttttacagtaagaatacaatgcagacaagatgatgaccatatatcgacatcattaggtattaaaccacctgcgattcgattacatgacaacttagagaatgatagaattaattcaataagctggattcttacagaaaacaacaacttctatgatggtgataatgaagtaacattggattttataaagacagaaagaaaccatgaaggggtttacgaatacatattcacaacaaatacactaaacccaggtttcaaaaaatgcttccttataccttcatcagtgcagggaactattaagcaattaagtagaagagcatcatctatagatgaattaagtaaccacgcagagctaaggagtatgttagatgatccttacaataacactattatatctgaaataaataacaaccttcatagttctttttattcattggatgaatctaaaaaagatgcatttgaaaaaataaataagactttgcctatattcttagtccaaggacctcctggtgttgggaaaacatatctgataacgactcttgtaaatcaaatattctctaatgaaagtgagagtcgaatagttcttacggcacaaagtcattctactgtccagcatttataccaagaagtgacttcatccttagatataacgaactccaaaccattaattgttagttgtataaaaaaagattcggatgatgatagcgatgacatatcaataaaccaattagactcccttgcgctagaatatattaaaagatttattgatagtgatatttttgatgaatgtacatcaactataagtaaaaattcaattatatcagccagtcgtaaatcatccaaatcagacagatattctcttatcaaacagatattgaaatctgcaaatatggtttttgctacaactaactccagacaagtagaagaattaattagtgagaaatcacaatttgactggtcaataatggaagaaacaggaaaagtcacaggcgtagaacttcttagcccgatgttactttcatatagaagactgatgataggtgatcataagcagttacccccttatgcaacagaaaaaatgagagagatcctcactgacattaataaattgaagaacgcaataattattgcaactgatataaataatcaacaaataaaaggtgattggataaaagagcgttttactgaaaattttatctcaacaattgatagcgaaacacttgaaaaattgagttctagtgcagtcaggcttcatctcttatttgaaagtcttgtgcttgaagaaaaagtgaaatcacaaaaatatatagatcgttacggtgatgatagaaagcatagaaaaattgcgagcatgcttaatttccaacatcgtatgcatccagatatcgcaaacttgatctctagcgtattttacgataaaaagcttaaaacagaaccttcaaaagaaaaattctatagagatgcaaatactattaccccttttacatttaaacctaactcaccattacttaactccccggcaattatatggattgatacccccgatgttcaacaaactaaaaacaattatgctgcagaatctcttcctgtttggacaaataacttagaaaaaaatactcttttatccgttcttgaacatttgagagtgaattcaaaagcagaaaaaacaccaaaactagcaatcatgtcaccttatgcaaagcaggtagatttaattaagagaagtctggataaaaaactgcataaagaaccaaattcgttacaaatagaatattttcaaaaaccagatgatcattcttcattttgtagcactgttgatggttttcaaggggctgaggctgacatagttattgtatctatggttagaaataatcatcattcttatgttagagcatctctaggatttctccttgatagtaggcgcatgaatgtcctactaagtagagcaaaatataagatgataattattggttcattcgaattccttaaatattggtctgatttaatcgacaaaaaagaaattaaaaaaggtgatttaagcaatcaatttttagtcgatcttgtcaataaactcatcgaatatgagcgtgaaggattattaaagaagattgactctagagaattcaaacacgtaaaacaagataagaataagaaaaggacataa

SEQ ID NO: 217088 - DNA, 618 bp, Klebsiella pneumoniae
atgagccgataccatgtatccagcagtgaaggtcagtatgagaaagactctggcgagcaggttttggctaataagctggggatcgctacttctgatgagatggatgaggctgaacttgtcctgttagaacaactctaccagtctgtttttgaagagcagttcccggaaggacagctcagcgtagccatgctaaaaagctggcatcgccgctggttaggtaacatctacgagtgggctggacaagaaagagcagttaatatcagcaaaggcggctttatgtttgccccctcagcgcagttgccaaaactgctgaacgaatttgataacaagtatctggctcaatacacaccgtgtagcggcatggacgaagaacaactcatcaccgctatcgccatcacccatgtcgagctgatacttatccatccattcagagagggaaacgggcgcctgtcgcgactgctagccgacgtgatggccgttcagggaggatacaaaccgctggattatcaaagctgggaggaaaacaaaacccagtatatctcggctattcatgcaggtgtatcaatggactatgagccgatgaaacactgggtcagtgaagcattaagaaagatctaa

SEQ ID NO: 217089 - DNA, 471 bp, Klebsiella pneumoniae
gtgactgacgttttactctgtgtcggcaacagcatgatgggcgacgacggcgccggcccgctgctggcggagatgtgcgcggcgaacccggccgtccagtgggtggtcatcgacggcggcagcgcgccggaaaacgacatcgtggcgatccgcgaattacgccccgaacgcctgctgattgtcgatgccaccgatatgggcctaaaccccggcgacattcgcatcatcgatcccgacgacatcgccgagatgtttatgatgaccacccataacatgccgctcaactatctggtcgatcagctgaaagaggacgtcggcgaggtgattttcctcggcattcagccggatatcgtcggtttttattatccgatgacccagccggtgaaagaggccgttgcccgggtgtaccagcagctggcaggctggcagggcaagggcggctttactcagctggaggccgcggacgactag

SEQ ID NO: 217090 - DNA, 528 bp, Klebsiella pneumoniae
atgaaccgtttcattatcgccgatgcgagcaaatgtatcggctgtcgcacttgcgaagtggcctgcgtggtatcccatcaggaacatcaggactgcgcctccctgacgcctcacacctttcagccgcgtattcacgtgatcaaaggggtcaatgtttccacggcgaccgcctgccgtcagtgtgaagacgccccctgcgccaatgtctgcccgaacggcgccatcagccgcgataaaggctttgtccatgtgatgcaggagcgttgcatcggctgcaaaacctgcgtcgtcgcctgcccgtacggggcgatggaggtggtagtgcgcccggtgatccgccatagcggcgccggactgaacgtcgtggcggaaaaagccgaagccaacaagtgcgatctctgcttccaccgcgagagcggcccggcctgcatggaagtctgcccgacgcatgccctcgtgtgcgttgaccgcaacaaacttgagcagatgaatatcgagaaacgtcgccgtacggcgctggcctggtaa

SEQ ID NO: 217091 - DNA, 552 bp, Klebsiella pneumoniae
atgtctattgtggtgaaaaataacattctttgggttggccaacgtgactgggaagtgcgtgatttccacggcaccgaatataaaacgctgcgcggcagcagctacaacagctatctcatccgcgaagagaaaaacgtgctgatcgataccgtcgatcataaattcagccgcgagttcgtacagaacctgcgccgcgaaatcgacctcgccgacctcgactatatcgtcattaaccacgccgaagaggaccatgccggcgcgctgaccgaactaatgatgcagatcccggatacgccgatctactgcaccgccaacgccatcgactcgatcaacggccaccatcatcatccggagtggaacttccacgtggtgaaaaccggcgatactctcgacatcggtaacggtaaacagctgatcttcgtggaaacgccgatgctgcactggccggacagcatgatgacctacctgaccggcgacgcggtgctgttcagcaacgacgccttcggccagcactattgcgacgaacatctgttcaacgatgaagtggactag

SEQ ID NO: 217092 - DNA, 270 bp, Klebsiella pneumoniae
atgaatgagttacagaaacagggcgcagagcttcgaaccaaagctaaagaattagcacttgctgttctggccaagcatcctgatggacaaaaaaatggcaaagggattaaacaatctgaagtattcaggctctgcggctttgattggggagcaaaaccaaaagcaactagctcgaatcagcaatattgggttgtagcgttactacgtgaactggaagaagatggattagtcgaacagatcaaagaaagtggcccatggcgtttaaggtaa

SEQ ID NO: 217093 - DNA, 627 bp, Klebsiella pneumoniae
gtgtttaatttttatcctgacaaaacatttagcagaacagatgtcatgagtcgccccacacctgttcctgcagcaaatggtatttatttctggtggttcaaagagatcccctgtggcgtgccaactgaaggttgtataactcagaatggatacacattgctctatgtcggcatttcacctgataaaaaaggcaaaccgaatagccgtgccaatcttcgacaacgcatcaaaacccactatagcggaaacgccgaaggctcaacactcagacgtacgctcggagttttactggcgacggaaagcaatttcccgctccgtcgggttggttcgggaaaaagaatgacttttacccatcctggcgagcaatggctagaccggtggatggataagaatgcccgggtatattggattgaagatgatgaaccatgggtgttggaagaaatgttaattgccactatttcattgccattaaaccttcaaggaaacaaacacacctttaaaccgatactctcaagtatgcgcagcaaagcgatagcagaagcccaaacaatggagatcgcggatgaaacagggtttagcaggagtgtagttactgagatgattaagcaagcagcggaagtagagtaa

SEQ ID NO: 217094 - DNA, 1017 bp, Klebsiella pneumoniae
atggagtcggtaactctatcgttacctgaagcttatgacctggcgctggaggtactcagcgccaatggatttagcgccgaccacgcggcggcgattgcccgcaatgtgaccgccggggagcgcgacggctgcgcttcccacggcctgtggcggctgttgggcattgtcgataccctgcgcaaaggtaaggtatcgcccgatgccgagccgcagatccatgaccaggcgccggcgattgcgcgggcggacgccgggggcgctttttcattgctggcctacgagcgcgcgctgccgctgctgctggagaaggcgcgccacaatggcattgcggcgctggcaatcaatcgctgcgttcatttttccgcgctgtttgccgatattgagccgttgaccgaggcagggctggtagggctggcctgtacgccaagccacgcctgggtcgccccggcgggcggcacacgtccgctgttcggcaccaaccccatcgccttcggctggccgcggcaggataagccgccgtttattgttgatatggcgaccagcgccgcggcgcgcggcgagatccagctgcatcagcgcgccggcaaagcgctaccggaaggctggggaatcgacagtcagggacagccaacgaccgatgccgcagaggtgctgaacggcgcgatgttgactttcggcggccataagggctcggcgctggcggcaatggttgagctgttggccgggccgcttatcggcgatatgaccagcgccgaatcgctggcgtgggataacggcgcgggcggtctcccctacggcggcgagctgattctggcgctggatccgcagcgttttctcggcgcgcaggcaccagagcagctggcgcgcgccgaaacgctgttcatgggtatgcaggaacaaggggcgcgtctaccgggcgagcggcgttttgcctgccgccagcagagtgaacggcagggggtcattatcagtcgttcattgcatgatgagatttgcgccttgcgccagggcgggtaa

SEQ ID NO: 217095 - DNA, 1221 bp, Klebsiella pneumoniae
atgaaataccattcagcaccgatcatcccgcacaaatccgccctcatgtccgcgccggctaatctgctggcggaagaggtctgtctacccgccgcgctgctaaaaaagtcggcgctggaaaataatatttcatggatgcagcgctacgccgacgcccgcggcgtatcgctggcgccgcatggtaaaacgacaatgacgccatggatatttcaggcgcagcagcgagcgggggcgtgggggatcggcgtgggcagcgcctggcaggctagcgcggcaatggccagcggcatccaacgcgtcctgatggtcaatcagctggtcggcaaagccaatatgcaggtggtcgcgcagctaaaagcccactatcgggcggtggattttatctgctgcgtcgatagcgaggtcaacgtgcgcaccctctccgcattcttcgcagaccagggacaaacgctggatgtgctgattgaacttggcgtgcccggcgggcgctgcggctgtcgtagcgtcaatgacgcgctggcgctggcgcagcgggtaagcgacctgccggggctacggctacgcggactggaactgtatgaaggggtgctgcacggcgacgatccgcagccgcaggtggaagcgctgttacagcaggccgcggcgcttgcctgccgcatggagccgctggttgacggcgaatttattctcaccggcgcgggcaccgtctggtatgacgtggtgtgcaacatctggctggcggcggcaaaaccgcgccgctgccgtatcgtcatccgccctggctgttatatcacccacgatcgcgggatctacgatctcgcccaacaagagctgatcgcccgcgatccgattgcctgcgatctcgccggcgatctcacttcagcgctggagctgatggcgatggtgcaatcggtgccggaggcggatcgcgcggtggtaaacttcggcaagcgcgactgcgctttcgacgccgggctgccgcagccgatcgcccattatcgtaacggccaggagttagcgctgcgcgcggagtcgatcgtcagcaccggcatcatggatcagcactgtatgctgcgcctggcgccgggcagcgatgtgcaggtcggcgatattctgctgttcggcacctcgcacccgtgtctgacctttgataagtggaagacgttgctgctggtcgatgacgactacaacgtgctggacgagctcgacacgctgttttga

SEQ ID NO: 217096 - DNA, 600 bp, Klebsiella pneumoniae
atgaacaagattaagctggtggcgattttacgcggcattcaacccgctgaggcggcagatcatattgagacgctaataaatgcaggctttcgctatatcgaaatcccgctcaactcgccggactggcagcaaagtattccggcgatggtgcgtcagtttggcgagcgggcgatgattggcgcgggaacggtgctgaaggttgaacaggttgattttctcgctgaagctggggcgaaacttatcgtgacgcccaatacggccccggcggtgatccgccgcgcggtagataaggggatgctggtgtgcgccggctgcgcgacggcctccgaggcgtttagcgcgctggatgccggggcgcaatggctgaaaatctttccgtcatcagcattcggcgcggactatattcgcgcgctgaaagcggtgttgccgccggaggttccggtgctggcggtcggcggcgtgacgccggaaaatctggcgacctggatacaggcggggtgcgccggtgccggtctgggcagcgatctttatcgcgccggacaggccgtggaacgtacccgcgagcaggcggagaggtttatctccgccagtaaaagttag

SEQ ID NO: 217097 - DNA, 198 bp, Klebsiella pneumoniae
atggttttattaaactataaaagaaaaagtaagaaaggtttctcactactcgaactattgcttgttctggggattattgcggcattagtggtagcggcttttattgtgtatcccaaagttcaggcttcacaaagagcgcaggcggaatctaataacattgccaccatacaggcaggtgtaaaagcactctatacgtaa

SEQ ID NO: 217098 - DNA, 660 bp, Klebsiella pneumoniae
atggaagtgactattgttttaggtattggaacgcttatcgcttttatgaaatttcaagatatgagaaataataaggaagcagtattggctgataatgtcggaacacagattaaacagcttctccaagctgttaaccgctatatcagtattcgctatgacaagatttccacactgtcatcatccaataatcaaaccagcgatccgggaccaagaacctgtacggcaaatggctgtgaaatcacataccagacgctgattaatgaaggtttgcccgtaggctacacgggaagcaacgcgcaaaagtccacgtataagattttgttgaagcgttcaggaatagcgcctgattacgtaattaatggcctgataacaaccagtcgtccttggaaagaaggaggtcgtatccgttatgacttgctgggtaaagctgttcaggctgcgggtgttgatggtggtatgagcagagcgacaaagatcgcttctggttatggtggtcagtggagtgagagttctggaaactacagcaatattactgatggtgggttgttggcctaccgcgtgggctataactcttccatgtatcctgtttacctgcgtcgtgatggaacgctgcctatgactggcgatctgaatctctggctaagttcggaggacgtatag

SEQ ID NO: 217099 - DNA, 1821 bp, Klebsiella pneumoniae
atgaattatatagacgaacatgatataaactactcccgatatggttttgaatcgcttgcattagctcatcccgaaatagatataaagggattatggcattgtgattctaaatattatgtgttgattgaaaaggatggaatacttactgaggatgacttaaaggaatttgaaaagatacaagaagagcatcgtattattggtagccctaaattattactaacacaaacaatccctaataatgcaataaaaatcgcaggaagagaaaactacgaagttgctctttcttttggcgcaccatacacagattctgagttagaaaacatactttatcaatatataaataaaaaatttcatccatttaaatacacacttaaattaccatctcttcatctggttttgtcattcccaagaaaattgagtgatgatgaaaagtcagaaataggaacaacattatacagcgtcggtattaaatatccaattgattatttaatagatgattcattattaaactttgatctatctgaaaaaagacactctgatgcattagcgctaatacccaataaagcattacctaaaagtgtcccaacaagagtaagaaacttgcatgaagaagatgaggatttctggcttgataatagaagtttaattctcacttcatatgacttcgaaaaaagtagtgcccttccaacaagttttaacaaaaaaaatagttgttgtttcgttgatgcacaaatttttaaaccagataatataagaaactatttatcagtttatgaacgagtagtgatatcatatccactcatcggacaagacaatgacttcttagaccatttaaaaataccgaaacaacatttactagagttaatatcgagaggtagaattcaatttgcattaccacaaaatataataagatataacttatcattccttgaagaatgcctaaacactaatcctgaatgcattattctgtccagacgattggcatcatcctcaattattgacatcagaaataaaacaggttttcttgctacaacattttctttcgaagaaaaattaaaagttctcaaaacattgagggcactggatggcgaaatattcaacttatttatcacggctctatctcaaaattggcactcaatggagatgaatatccatgagcgtggagccatgggtgtttcaaacattggcatagcccccgtcatgtcagagttactcaataggcaaggacgagaccttcttcttgaactattattttctgctatgccattggagtgggcgatggcgttaaatgctgatttttatccataccacagcaatgagcattcacaatataatgcttctgcatgttgtttatatggatataatggttttagaataaatgaagaggctattgtaaaatctaaaatcggtgaaatagcaacaagaatactatcaatcgataatgacatgtcagccttagaattagacgacgcaatacttaaaggtgatattccgaggataagggatttttcaagatcgttgtctaatttatcaagtgaagagcttgatataaaaatttacgaactaaataaagaaataaaaaaaatagaaaataaagaaagtaaactttcttcattagacttatgcggacttatagcatcaacaataggtgtttacgatgacaatccatatatcccattaggctttgccttttttaaaataatctctagcgtgttaaattcaaatgatattagctcgaaaaatatcgataaaataaagtcaacacttttaggtacgcaaactgaaacattgttaataaaaagaacgaaatccagaatataa

SEQ ID NO: 217100 - DNA, 1245 bp, Klebsiella pneumoniae
atgcaccacgatgaaatattacttatgccaaagaaagctaaagaactgtctgcactggctgtttctaaacttaagtccgatggagaatattacgttggtggcgctgatggcctgtaccttcggattaccggacgctcacgagtttggggcttgcgtattgtaatgggaacccgcatcaataaagcaggtaaaacagttccccgccgcctcaacatgggggtaggcccctacgccgaaatttcgctatcagaagcgcgcgataaggcgcgtgaactccgtaagcagatccgtaatggcatcgatccccttgcagaaaaacacgcacgtaaagcggctcaagaagcgctggcatgtaagcaaaagacatttcgtgaatgcgctgaagccgtgatagaaatcaaaagtagcgagcttaagaataaaaagcatgtggcgcagtggcgatcgacactggaaacctatgcctacccgtttattgggcaaaaagtgattggtgaaatcaccaaagttgatcttctggcaatactggaaccaatctggttaaccaagaatgagacggctagccgtcttcgtggtcgcattgaagcaatcatcgattatgcaaaggctaaagagtattttgaaggtgataacccagcagcatggaaaggcatgttgaaacccctcctccccttaccaagcaaagtgcaagatcagaaacaccatgcgtcattaccttataaagaaatccgttcttttatgtctgaattgcgcaaacgtaaaggaatctcagcccgtgcattggagttttctatcctgacagcttctcgatctggtgaagttcgtggcgcagagtggtcagagatcgatctgaaaggtaaaacatggacgattcccgccagtcgtatgaaagcggcaaaagaacaccgggttcctctatctgatgctgttgttgctctgttaaaagatttaccacgattgaaagataacaatcatgtattccccgcccctcgcgctgaaacgctttctgatatgtcgttattggctgtattgaaacgaatgggacatagtggtttaacgcagcatggcttccgttctactttccgcgagtgggctggtgaaacaacggactatcaacgtgaggttattgaacatgcgttggcgcaccagttggcagataaggctgaagcagcgtatcaacgtgggacgttgtggcctaagcgggtggcgctgatggatgattgggcggggtattgtatttcttag

SEQ ID NO: 217101 - DNA, 1281 bp, Klebsiella pneumoniae
atgactgaacataccactagctactatgccgccagcgccaacaagtatgaaccgttcccgacgctggagggatccatcaactgtgacgtctgcgtcgtcggcggcggctacaccggcctctcgtctgccctgcatctggccgaaatgggctacgacgtggtggtgctggaaggggcgcgcatcggcttcggcgccagcggccgcaacggcggtcagctggtcaactcctatagccgcgatatcgacgtcattgaaaagaactacggcccggatgcggcaaaaatgctcggcagcatgatgttcgaaggcggcgatatcatccgcgaacgcatccagcggtatcagatccagtgcgattaccgcccgggcggcctgttcgtggcgatgaaccataaacagctggaaaccctggaagagcagaaagccaactgggagcgctacggcaacacccagctggagctgctggacagagaggccattcgtcgcgaagtggacagcgaccgctacgtcggcgccctgctcgaccacagcggcggccatattcacccgctgaaccttgccatcggcgaagcggatgccattcgcctgaacggcggccgggtgtatgagcagtcgccggtcacccgcatgcagcacaccagcccggcggtggtcagcaccgcgcgcggccaggtcaccgcgcgctacgtgatcgtcgccggcaacgcctatctcggcgataaactggagccggagctggcgaaacgcagcatgccgtgcggcacccaggtggtcactaccgctccgctgtcggaagaggtcgcccgctcgctgatcccgaaaaactactgtgtggaagactgtaactacctgctggactactaccgtctgaccggcgacaaccgtctgctgtacggcggcggcgtggtctacggcgcgcgcgatccggacgacgtggagcggctgattatgccgaaactgctgaaaaccttcccgcagctgcagggggtgaagattgactaccgctggacgggcaacttcctgctaaccctgtcgcggatgccgcagttcgggcgtctcgataacaatatttactacatgcagggctacagcggccacggcgtgacctgtacccaccttgccggacgcttgatttcagagctgctgcgcggcgacgccgagcgtttcgacgccttcgccaaactgccgcactacccgttcccgggcggccgcagcctgcgcattccttttaccgccatgggcgccgcctactacagcctgcgcgaccgccttggggtttaa

SEQ ID NO: 217102 - DNA, 1488 bp, Klebsiella pneumoniae
atgaattttcagcacctggcttactggcaggaaaaagcgaaaaacctggccattgaaacacgcttatttattaacggcgaatattgcgccgcggccgataataccacctttgagactatcgaccctgccgcgcagcagacattagcccaggtcgcccgcggtaaaaaagccgacgtcgaacgggcggtgaaagccgcgcgccaggcttttgataacggcgactggtcgcaggcctcccccgcacagcgtaaagcgatcctcactcgctttgctgatctgatggaggcccatcgtgaagagctggcgctgctggaaacgctggataccggcaaaccgattcgccacagcctgcgcgacgatattcccggcgccgcccgcgccattcgctggtatgccgaagcgctggataaagtctatggcgaagtggcccccaccggcagcaacgagctggcgatgatcgttcgcgaaccaattggcgtgatcgccgcggtggtaccgtggaacttcccgctgctgctggcctgctggaaactcggcccggcgctggcggcgggcaatagcgtaatcctcaaaccctcggaaaaatcgccgctcaccgccctgcgtctggccgggctggcgaaagaggccggcctgccggacggcgtgttgaacgtggtcagcggctttggccacgaggccgggcaggcgctggccctgcatcctgatgttgaagtcatcaccttcaccggctccacccgcaccggcaagcagctgctgaaagacgccggcgacagtaatatgaagcgcgtgtggctggaagcgggcggcaagagcgccaacattgtcttcgccgattgcccggatctgcaacaagcggttcgcgccaccgccggcggcatcttctacaaccagggacaggtgtgcatcgccgggacccgtctgctgctcgaggagagcatcgctgacgaattcctggcgcggctgaaagatgaggcgcaacactggcagccgggcaacccgctcgatccggacaccaccatgggcatgctgattgacaatacccatgccgacaacgtgcatagctttattcgcggcggcgaaagccaaagcaccctgttcctcgacggacggaaaaacccgtggcctgccgccgttggcccgaccattttcgttgacgtcgacccggcatcaaccctcagccgggaagagatcttcggcccggtgctggtggtgactcgcttcaaaagcgaagaagaggcgctaaagctcgccaatgacagcgactacggcttgggcgccgcggtgtggacccgcgatctctcccgcgcccaccgcatgagccgccgcctgaaggccggctcggtcttcgtcaacaactataacgatggtgatatgaccgttccgttcggcggctacaagcagagcggcaacgggcgcgataaatcgctgcacgcactggaaaaattcaccgaactgaaaaccatctggattgccctggagtcttga

SEQ ID NO: 217103 - DNA, 558 bp, Klebsiella pneumoniae; identical to SEQ ID NO: 210643

SEQ ID NO: 217104 - DNA, 765 bp, Klebsiella pneumoniae
atggaaaatataatgtacaagccagttattggcgtcgtgatgtgtagaaacaggcttaagggtcaccagacccagaccttgcaagaaaagtacctgaatgcaattgtgaacgccggcggactgccgattgccctgccgcatgcgctggcggagccggagctactgaacgcggtcgttgataaactggacgggatctacctgccaggcagccccagcaatgtgcagccgcacctttatggtgaaaacggcgatgagcctgacgccgaccccgggcgtgatcttctgagcatggcgctgattaacgccgcgctcgaaaggcgcatccccattttcgccatctgtcgtggactgcaggaactggttgtcgccaccggcgggactctgtatcgtcgtctgttcgagcagcctgagctccttgaacatcgcgaagatcctgaactgcccgtcgagcagcagtatgcgccgtcccatcaggttgaggttcaggaaggaggattgctgtcgcaattgataccgggctgcaacacgttttgggtaaactcgctacatgggcaaggggcaaaaaccctcagtccgcagctgcgcgtggaggcgcgagcgccagatggactggtggaagcggttagcgtgaacgatcatcctttcgcgctgggcgtacaatggcatccagaatggaacagtagcgaatacgccctgtcgcgtatgttgtttgatggttttatcaccgcctgtcagggccatcatgctgaaaagcggcggcgctga

SEQ ID NO: 217105 - DNA, 192 bp, Klebsiella pneumoniae; identical to SEQ ID NO: 136947

SEQ ID NO: 217106 - DNA, 1392 bp, Klebsiella pneumoniae
atggctattaatcctccggcgcataacgccgctcaggcgggcagaccgcgtctgcgtaaatccctcaaactctggcaagtggtgatgatggggctggcctatctgacgccaatgacggtgtttgataccttcggcatcgtctccggcatcagcaatggccacgttccggcgtcttatctgctggcgctggctggcgtgctgttcaccgccatcagctacggcaaactggtgcgtcagtttccggaagccggttccgcctatacctacgcgcaaaaatccatcagtccgcacgtcggctttatggttggctggtcgtcgctgctggattatctgtttctgccgatgatcaacgtcctgctggcgaagatctatctctcggccttgttccccgaagtgccgccgtgggtgtgggtagtgacctttgtcgctattctgaccgccgcgaacctgaaaagcgttaacctggtggccaacttcaataccctgttcgtgctggtgcagatttcgatcatggtggtgtttgtcattctggtggtgcaggggctgcataaaggcgagggggtgggtaccgtctggtcgctgcagccgtttatcagccagaatgcgcatctgatcccgattattaccggcgcgaccattgtctgcttctcgtttctcggcttcgacgcggtgaccaccctgtcggaagagacccctgacgccgcgcgggtgatcccgaaggcaatttttctcaccgcgatgtacggcggcattatctttatcgtcgcgtcgttctttatgcagctgttcttcccggatattcatcgctttaaagaccccgatgccgcgctgccggagattgcgctgtacgtgggcggcaagctgttccagtcgattttcctgtgcaccacctttgttaacaccctggcgtccggcctggcctcccatgccagcgtctcccgtctactgtacgtgatgggccgcgacaacgtcttcccggagcgcatttttggctatgtgcatccgaaatggcgtaccccggcgctgaacgtgattatggtgggcatcgttgcgctgtcggcgctgttcttcgacctggtgaccgccaccgcgttgattaatttcggcgcgctggtggccttcaccttcgttaacctgtcggtgttcaaccacttctggcggcgcaaggggtacaacaaaacctggaaggatcgactgcattatctgctgctgccgatggtcggggcgttgacggtcggggtattgtggatcaatctcgaggccacctccctgacgctcggcctggtgtgggcggcgcttggtctgctgtacctgacttatctgacccgacgcttccgcaaaccgccgccgcagtttgatgccgctaaagcggagcaggcctgggagtcatag

SEQ ID NO: 217107 - DNA, 423 bp, Klebsiella pneumoniae
atgaaaaaacgtctacttgccgccgccgttgccggcgcggtgatgttatccgctggcgctcaggcgcaggacacggccgccccggaggggtatcagctgcagcaggtgctgatcatgagtcgtcacaacttgcgtgcgccgttggccaataacggcagcgtgctggagcagtccaccgccaaggcctggccgcagtgggatgtgccgggcggccagctgaccaccaaaggcggtgtgctggaggtgtatatgggccactatatgcgcgaatggctggcgcagcagaagctggtgaccagcggcgagtgcccgccggaaaacgcggtttatgcctacgctaacagcctgcagcgcaccgtcgccaccgcgcagttctttatcaccggcgcgttcccgggctgcggcatcccggtgcatcactag

SEQ ID NO: 217108 - DNA, 819 bp, Klebsiella pneumoniae
atgggcaccatggacccgaccttcaacccggttattaccgacgactccccggcgtttcgcgagaaagcgctgcaggcgatggaaaaagagcgccagggaatgcagttgaccgagagctacaagctgctggagacgatgatcgattaccgcaactcgccctcctgcaaagagaagaaggtctgttccctgagcgagggtaaagatacctttagcgccggttatcagcaggagccgggagtgtccggaccgttgaaggttggcaactcgctggtagacgccttcaccctgcaatattatgaaggcttcccgaaagatcaggtggcgtggggggagatcgccagcgataagcagtggcaagtgctgtcgaagctgaaaaatggctatcaggatagtctgtttacctcggtggcggtggcgcaaaacgtcgccaaaccgctggttaaatatatcgataacgcgctggtgggcgagggagccagcaaggcgaaagtcacgctgctggtgggacacgactcgaatatcgcttcgctgctcaccgccctggactttaagccctatcaactgcccggccagtatgagcgcactcctatcggcggcaaactgctgtttcagcgctggcatgacagcgccggcaatcgcgatctgatgaagattgagtatgtctatcaaagtaccgagcaactgcgtaacgccgacgcgttaaccctgcaggccccgccgcagcggatcactctggcgcttaacggctgtccggttgatgaccagggattctgcccgctggagacctttaaaaaggtgatcaacgaggcggcgaaataa

SEQ ID NO: 217109 - DNA, 1323 bp, Klebsiella pneumoniae
atggcactcttcgattttcctcgctggaagctgacctctcctgccgccgaatccggcgttgtcgcccccgatgaacgcttgtcggccgggcaaacgctggtgatgggcgtgcagcacgccgttgcgatgttcggcgcgacggtgctgatgccgttgttgatggggctcgacccgaacctgtctattctgatgtcgggcgtcggcaccctgctgttctttgtcgtcaccggcggaagggtgccgagctatctcggctccagcgccgcttttgtcggggtggtgatcgccattaccggctttaacggccaggggctgaaccctcatctgagcgtcgcccttggcgggatcatcgcctgcgggctggtctacaccctgattggtctggtggtgatgaagatcggcacccgctggatcgagcgcctgatgccgccggtggtgaccggcgcggtggtgatggctatcggcctgaacctggcgccgattgccgtgcgcagcgtctccgccagcgccttcgacagctggatggcggtgttaactgtgctctgcatcggcatagtggcggtatttacccgcgggatgctgcagcgactgctgatcctggtcggcctgatcgtcgcctgcgcgctgtacgccctgctggctaacggcctgggccttggcaaaccgctggacttctcccccctcgcccaggcggcgtggttcgggctgccgcactttaccaccccatcctttaacggccaggcgatgatgttgattgcgccggtcgcggtgatcctggtggccgagaacctcgggcacctgaaggccgtcgccgggatgaccgggcgcaatatggacccgtacatggggcgcgccttcgtcggcgacgggctggcgaccatgctctccggttcggtgggcggcagcggggtcaccacctatgcggagaacatcggcgtcatggcggtgaccaaggtctactcaacgctggtgtttgtcgccgcggcgctgattgccatgctgttgggtttctcgccgaagttcggcgcattaatccacaccattcccgggccggtaatcggcggcgcctcgatcgtggtctttggcttaattgccgtcgccggggcgcggatctgggtgcaaaaccgggtggatctgagtcaaaacagcaatttgatcatggtgtcggtgaccctggtgctgggcgccggcgatttcgcgctgtcgctgggcggctttacgctgggcgggattggcacggccaccttcggggcgatcctgctgcacgcgctgcttcatcgcgggacgcgcgaggcgaaggaggccagggtaacgccggtgtaa

SEQ ID NO: 217110 - DNA, 861 bp, Klebsiella pneumoniae
atgaaacagatcacaggagtctacaccgcgcctgcgcagcattgggtaggcgacggcttcccggttcgctcgatgttttcctatcagacgcacggccagcagctgagccccttcttactgctcgactatgccgggccgtacaccttcccggcgggcagcgaaaaacgcggcgtcggtgagcatccgcatcgcggatttgaaaccgtcaccatcgtctacgccggtgaagtagagcatcgcgactccaccggacgcggcggggtgattggtccaggcgacgtgcagtggatgacggcgggcgccgggatcctgcacgaagagttccactcggaggccttcacccgcagcggcggcgagctgaagatgatccagctgtgggtcaacctgcccgcgaaagacaaaatggcggcccccggctaccagagtattaccgccgggacgatccccaccgtggcgctggcgaacggcgccggacaggttcgggttattgccggccagtatgacgacgtcagcggcccggcccataccttctcaccgcttaacgtgtgggatctgcagctgaatcaggggcacgacctcacgctgcgccaaccggagggctggagtaccgcgctggtggtgctggaaggggaagtgatcattaacggttccgaatctgctcgcgaaggccagctggccgtcctgagccaggcaggtgacgcagtgcatctggaggcgaccgccccagcaaaagttctgctgatggccggagaaccgctacaggagccgattgtgggctatggcccgtttgtcatgaataacaaaacgcagatcgcagaagctgtacgcgattttaacagcggccgctttggccaaatctaa

SEQ ID NO: 217111 - DNA, 447 bp, Klebsiella pneumoniae
atgtatacgtatttcaaaagtaaggatgagcttgttaaggctattgtactggaagaacagaactccgcgctgactgcccataatgcgacctatgcaggctcttattttgatcgcctttgtgcacaagtcacgtcctgtattagcgagatcggttaccctatcacgcatcaactttgggttgaaatcatggctgagtctgcgcgtaatccagaactgcgaaaaacgtatatctccagtgatgacatcatgcggaaaagcttcgcgcggctcatccaggagggtatcgctgccggagagtttcgccgtgatattaaccttgaagaaatcacgatcattatttttgcccttattgacggtttaatcgctcgtcaggcaataaacacgaccttctcattcaaggatgatctgccaatgttttttgacgttatggcaaaattgcttaaataa

SEQ ID NO: 217112 - DNA, 864 bp, Klebsiella pneumoniae
atgactagcaaaacactgcgacttatatttcctcaatggcaaggcggtaacaatcctccctactatcttggctcgcagctcctctcgtttctctctcctgaagcaaaagggcccgttgagatcgttcctgttgagttaccaacaacagagccattgccaaggattaatgacatcacggctaagccatccctcatcaggcaactcaataatgctgccgcactgattgaaaaacatgatcccaatagcattgtcattttaggcggagactgcctggtttcgctggcgcctttcgcccacctgctcgataagttcggagacaaactcggtgtgctctggattgactcgcatcctgacgtgcagacggctgaacaatatccaaacgcgcatgcccatgtgcttggtgcgctaatgggtacgggtgataacgatttagttgcccatgtaaaaaccaaacttaatccgtcaaaaataatgattgccggtatccacgcgccacttccttatgaagctgaatacctcactcgccataacattacgacgctagcacctgaacaggttaaaagcggtgcagatgaagtcctggagtggatagcgaaagaaaagattgcgtatctggcgatccatatcgatctggacgtactcgacccatctctgttccgctccattctttttgcaaaaccggggcgcggaaaacacgattttggcgacgttgctgaaggcaaactgacgattgaggatgtactcaatctgatagcggcagcgacgacaaaagcagtccccgttggcctgacaatcgctgaacatttgccctgggacatgctgaatctcaagaacatgctcagtgaattaccccttctaaagtaa

SEQ ID NO: 217113 - DNA, 2652 bp, Klebsiella pneumoniae
atgaacgaacaatattccgcattgcgtagtaatgtcagtatgctcggcaaggtgctgggcgataccatcaaggatgcattgggagaaaatattcttgatcgtgtcgaaactatccgtaagttgtccaaatcttcacgcgccggcaacgaagctaaccgccaggagctgctgaccacgctgcagaatttgtcaaacgacgaactgctgccggtggcccgtgccttcagccagtttctgaatctggccaacaccgctgagcagtaccacagcatttcggcgaatggcgaagcggccagcaatccggaagtcattgcgcgtaccctgagaaagctcaaagaccaacccaatctcaacgaagagaccatcaaacaagcggtggaatcgctgtctctggagctggtgttaaccgcccacccgaccgagatcacccgccggacgctgatccataaaatggtggaagtgaacaactgccttaagcagttggacaacaaagatatcgctgactacgagcaccatcagctaatgcgccgtctgcgccagctgatcgcccagtcgtggcataccgatgaaattcgtaagcaccgcccttccccggtcgatgaagccaaatggggcttcgcggtggtggaaaacagcctgtgggaaggggtgcctaactatctgcgcgagctgaacgaacagctggaagccaaccttggctatcagctgccggtggacttcgtcccggtgcgtttcacctcgtggatgggcggcgaccgcgacggcaacccgaacgtgactgccgacatcacccgccacgtgctgctgctcagccgctggaaagcgaccgacctgttcctcaaagacgtgcaggtgctgatctccgagctgtcgatggtggagtgtaccgacgagctgcgcgccctggctggcgccgagggcgctcaggaaccttaccgttatctgatgaaaaaactgcgctctcaactgatggagacccaggcctggctggaagcgcgtctgaaaggtcagaagctgccgaaaccggcgggactaatcactcagaacgagcagctgtgggagccgctgtacgcctgctataaatcgctgcaggcctgcggcatgggcattatcgccaacggcgagctgctcgacaccctgcgccgcgtgaagtctttcggcgtaccgctggtgcgtattgatattcgtcaggaaagcacccgccataccgaagcgctgggtgaaatgacccgttacctcgggatcggcgactacgaaagctggtcggaagccgacaaacaggctttcctgatccgcgaactgaattccaaacgtccgctgctgccgcgccagtgggagccaagcgaagagacgcgtgaagttctcgacacctgcaaggtgatcgccgaggcgccgcgcggatcgatcgccgcctacgtgatctcgatggcgaaaacgccgtccgatgtgctggcggttcatctcctgctgaaagaagccgggattggctttgctctgccggtggccccgctgttcgaaacgctggatgacctcaacaacgccaacgacgtcatgacccagctgctgaatatcgactggtaccgcggctttatccagggcaagcagatggtcatgatcggctactctgactccgctaaagatgccggcgtgatggccgcctcctgggcgcagtaccaggcgcaggacgcgctgatcaaaacctgcgaaaaagccggtattgaactgacgctgttccacggtcgcggcggctctatcggccgcggcggcgcgccggcccacgctgcgctgctctcgcagccgccgggaagcctgaaaggcggcctgcgcgttaccgagcagggcgagatgatccgctttaagtacggcctgccggaagtcaccatcagcagcctgtcgctgtataccagcgccattctggaagccaacctgctgccgccgccggagccgaaagcagaatggcgcgacatcatggccgagctgtccgacgtgtcgtgcaagatgtatcgcggctacgtgcgtgaaaacaaagatttcgtcccttacttccgctctgcgaccccggagcaggagctgggcaaactgccgctgggttcgcgtccggcaaaacgtcgtccaaccggcggcgtcgagtcgctgcgcgccattccgtggatcttcgcctggacccagaaccgcctgatgctgccagcctggctgggcgctggcgctgcgctgcagaaggtggtcgaaggtggaaaacagagtgaactggaagccatgtgtcgcgactggccgttcttctctacccgcctcggcatgctggagatggtttactcgaaggccgacctgtggctggcggagtactacgatcagcgcctggtgaagccggagctgtgggcgctgggttccgagctgcgcaagctgctggctgccgatatcaacgtcgtgctggccatcgccaacgactcccatctgatggccgacctgccgtggatcgccgagtctatccagctgcgtaatatctataccgacccgctgaacgtcctgcaggcggaactgctgcaccgttcacgccaggctgaagaagagggcaaggacccggatccgcgcgttgaacaagcgctgatggtcaccatcgccggcgtcgccgccggtatgcgtaacaccggttaa

SEQ ID NO: 217114 - DNA, 504 bp, Klebsiella pneumoniae
atggcactttggggcgggcgttttacacaggcagcagatcaacggttcaaacagttcaacgactcgttgcgcttcgactatcgtctggcggagcaggatatcgttggctctgtcgcctggtcgaaagcgctggtaacggtcggcgttctgagtgccgctgaacagcagcagctggaagaagcgctgaacgtgctgctggaagaggtgcgcgccaatccgcagcaaatcctcgccagcgatgccgaagatattcacagctgggtggaaggcaagctgatcgataaagtgggccagctgggcaagaaactgcacaccgggcgcagccgtaacgaccaggtcgccaccgatcttaaactgtggtgcaaagataccgttgtcgaactgctctcagcgaaccgccagctgcagagcgcgctggtggagaccgcccagcagaatcaggacgcggtaatgccggggtacacccacctgcagcgcgcccagccggtgacgttcgcgcactag

SEQ ID NO: 217115 - DNA, 555 bp, Klebsiella pneumoniae
atgatagaaaataatatacaaactgaagtaaagaaatcaagaagaggtcttccacgtcatactaaaaacccatttcttaatgatacaagtctgcatacaaaaactggcgtcagacgtattactacaggaaaggatcgattagcattagttaatgagagtacgggagaacaagttggtaatggtggtttctttcagtctatggaagtagacaagacacaattcgtaaaactttatgttgatggcgtatcagctattgaaggtttgtcttcctccggtaaaaaagtgttcaagatactttatcttgctatcagagataataaagatacagacacgatattaatgtcattcgatatcgttgataaagatgtcgtaaaaatatcaagaactacttatttcaagggtatgaaagaacttgctgacaagaaatttattgctgagaccatgatacaaaactattattttattaatccagactatatgtttaatggtgatcgtttaactttcatgaaaacttattacttgaaggacaaaaaaacagtgaataacaaaaattaa

SEQ ID NO: 217116 - DNA, 405 bp, Klebsiella pneumoniae
atgagtgaagctctcaaggcactgaacaatattcgtacacttcgcgcacatgctcgtgaaacagatttggcaactctggaagagatgctggaaaaactctctgctgtcgttgaagatcgtcgtgaggaagaaagtgccgtccgtaaagaacaagaagaacgtcaggctaagctggaagccttccgtcagaaactgttagaagatggtattgatccggcagaactccttgctgctgttggctcatcccagcctaaaaccaaatcaactcgtgctcctcgtcctgctaaatacaaatatacagatgaaaacggtaatgagcagacttggacgggtcagggccgcactcctaaagcaatcgctgctgcaatcgaagctggtaaaactctggatgacttcgcgctctga

SEQ ID NO: 217117 - DNA, 549 bp, Klebsiella pneumoniae
atggacaaaaatatattagaagggcaattaagagagtgctatggaagggtcgtttacacacataaaactcatgagaaatgtgcagatattcttcaaaacaaactaagctgcatgaaaaatttacagctagttcttttagcaataactaccggtagttttataaccactgtagtgggtgatgctaaaataggtgctatcattgggtcaatactttccgctatacttctctttctaaattcatatttgaaggattatgatttaggaacgatagctcaaaagcacagacaagctgctggagatatgtggttaattagggagagatatttatctctgcttactgacttgaaaatgcaaactaaaagtatagaggaaattctccacgaaagagatgctctgatgaatgaactttctgcaatttatatgggagcaccatccacgaattacaaggcatattcaatggctcaaaaggcgctgaaggaacttgaggatatgactttctctgatgaggaaattgataaattccttcccactgaattgaaacgtaaatga

SEQ ID NO: 217118 - DNA, 1272 bp, Klebsiella pneumoniae
atgagcactgcaactgactttaagacactcctcgacaatataaaaatagataatgcaggccagattagtaaaaggtatggccgtataactaaggctttgaaccaatacttttataacttagattctaagacagccaattcactacaggttggttcctatgggcgcttcacagggattcgggggatctctgatcttgatatgctttactttctacctgcaacttcatggccaagattccgagatcgacaaacgtatttattacaggttgtgaaaacagaaatcaagaaaattttcaaaaatacggatattcgcggtgatgggcaagttgttgttgttaaatttaagaatcaagaggttgaagtagttcctgtattcagtaatgaagatggaacttttacatacccggatacacatgatggtggatcgtggaaggtatgtaaccctagggccgaaatgtcgtcttttagggcactgaatgatgataggaagggacatctgagacgtctatctaaaatgattcgagcgtggaaagctcgtcatgaagttgagataagtggattcttaattgatacactgtgttataattttttctctaatctaactgaatatgatgataagagtttcaaaagttatgatcaactttcgcttgattttttcactttcttagagaatgaaggtgatcgagtattttattatgctcccggtagtcgctcaaaagtgagcgtaaaaaaatcatttaataaagtagcaaaattaacaaaagaatattgtgaagaagctttatctgctacaagtgaaaactcaagaaacttagcttggaagaaagtttttggcaggccttttccaaattatacgaaaaaatcactcagtaatgtcaatgtatctgaacagtttattgaagatcaatatgagatgaatttatatggtcatgtttcgatagaatgtgagattagaaagaataatttattggaagctcttctttcaaatcttcttggcgaagggcatgatattagcacaaatcgcaagttaagattctatgttgatgagataaataatatatctcacccatataagattaaatggaaaataaaaaatgtaggtgatgaagctgagcgccgaggaaattttagaggtgaaattttagacgatgaaggaggttctgagcgtttcgagaccgcagatttctcaggacctcattttgttgaatgttatgttatttatggcaaccaagttgtagcaagagatagaatcgacgtacctatacataattag

SEQ ID NO: 217119 - DNA, 225 bp, Klebsiella pneumoniae
atgaataaacgactacgaaaccagcctgtgcatttctaccacctactgaaaaataaaatggatatgaacgaagtgattgaaaatactatcgagaaaataaaggtccgtttttatggggctgaaggcgaacaaaaagcggaacggatcaccgggagtgttaactatgtgaaagtaaagcaacaccttcgtcagctttggatcgtctataagtgtgtatacagctaa

SEQ ID NO: 217120 - DNA, 207 bp, Klebsiella pneumoniae
atgaaaaataatattaaacgatttattcgggtgcctgaagtgcttaatcgggtaggattcagtcgcactaccttatatgagcgtattaaggaagggaactttccagacagggtaaaaataggtccaaggtgcgtagcttttgtcgagagtgagatagatgaatggattgaagttactattcggaactcacgccagaacgcagcataa

SEQ ID NO: 217121 - DNA, 1398 bp, Klebsiella pneumoniae
atgcacgataattacgatgtgctgatcatcggcgggggtcctggggggtatgtggccgccatccgtgccggccagctaggacttcgtaccgccttagtggaaaaacaacatctgggcggcatctgcctgaactggggatgcattccaaccaaggcgctgttgcatggcgctgaggtcgcgcacagtatcacccatgccagtcagctgggcatcagcgtgggtgaggtgaatgtcgatctgcagaaactggtgcagtttagccgtgccgtttcgcaacagctcacgggtggcgttgagtacctgttgaagaaaaatggcgtgagggtgattgatggcaccgcgcggctgcgcggtaagggacaaataacggtagcggatgcccggggggaagcgcacgattaccgggccgatcacgtgatcctggccacgggcgcccgaccacgcgcattaccaggcatagcgccagatggcgaacatatctggacctattacgaggcactacagcctaagcgattgcccaggtcgctattaatcatcggttcaggcgcgattggcgtcgagttcgccagcctttataacgatctgggttgtaaagtgacgctggtcgagctagcgtcgcagattttgcccgtggaagatgccgaagtgtcagcggcggtgcgtaagtcattcgaaaagcgcgggattcaggtccatacccagacccaggtaacgcaagtacagctcaccgataccggggtgcgctgtacaatgaaaaatacgagcgccgaatctttcctggaagtcgaacgtgtgctgctggcggttggcgtacagccgaatattgaagatctggggctggaagcactgggcgtcgagttagaccgcggttttatcaagacggatgcggcttgtcgcactaacgtatttgggctttatgccatcggcgatgtagccggcccgccgtgtctggcgcacaaggccagccacgaaggcgtgatctgcattgagacactggctggtgtcgaaggcacccacccgcttgatcgcgactatgtgcccggttgcacttattcccggcctcaggttgccagtctgggcctgacggaatcgacggccctggccagaggacggcccgtcaggatcggtaagttctcttatcagagcaatggtaaggcgctggccagcggcgagacagagggttttgtgaagacgattttcgatgctgaaaccggcgagttgctgggcgcgcatatggttggcgcacaggtcacggaacagatccagggctttggcatcgcccgtcacctggaggccacagatgaaagtctcctgtcgatgatctttgcgcatccgacactttccgaagcgatgcatgaatcaatcctcgcggcctgcgaccaaccgttgcatcaataa

SEQ ID NO: 217122 - DNA, 1536 bp, Klebsiella pneumoniae
atgagcgaaatcaagacgcttgaaatgccaaagtgggggctttccatggaggaaggcttgctcgctcgatgggcaatccaggagggtgacgatttcaccagagggcaggaaatctgtgagattgaaaccagtaaaatcgtcaatgtgctggaggcaccttttgccggtacattacgccggataatcgcccgagagggtgagacgcttcaggttggcgccgtgctggctctggcggctgacgcttcggtcagcgatgctgaactggacgaatttgctgccagtctggcgacagtgaaacccgcagcacctggcccggaggctgccgcgccggacgtagcggcacaggcaggcgctaagccaccttccgttgtttcgccgccatccaacagtccggagccccctgttgggcagaccgtcatccccgtcagtctgcaaggcgtgaccgatgtgactcaggttaatgccacgccccatgcgttacgactgtctgcccgctggggtgtcgacctgaaaaaggtccgcggcagcgggcgcggggaacgtatctctgtttctgatctggaaagcgcgatcgttgccgccggcggtcgcctggcctctccgacgccccccgttcgtcccagcaaagcgccccgctcgcatgccgatgatagccaggtatcggccaccccgctggcgcgccgtctggccggcaaactgggtatcaacttgcatgactgccgaagcagcggttcacgcggtcgggtgagtcgcgatgatgtgctggctgcggcgttgttgctcgacgggcacccgccggtcagccctgtgcaggagagtgccccgacaccctttgagagcatccccatgtccggtatgcggcgggctatcgcttctcgcctgcaaacctctaagcaacagtctccccatttccgtttgagtgtcgatctcgatctggaacgactgttagcgtttcgtcaggaaattaaccgcgaagtacccggtgtcaagatttcggttaacgacctgctggtgaaggcttgtgccctggcgctggtggccgtgccagacgtcaacatccagtttgatgaagcgacacaaagtatccgccgctttgtggatgccgacatttcggtggctgttgcgctgcctgacgggctaattacccccattgttcgctcggcgaaccggaagtcgatcagcgacatatcggccgaaattcacgccctggtgaccagggccaaagcgggcacgctgaagccggaagagttccagggggggacctttagcgtgtcaaatctggggatgctcggcgtacggcagtttgacgccatcatcaatccaccgcaaagcgcaatcctcgccattggcaccggcgaggtccgggcggtagtacgcgacgggcaaatcgtcgcgcgccaccaactgacggtatcgctatcctgcgatcaccgggtcatcgatggggcggcaggtgcagcttttctccgggaactcaagcgactgactgaaacccctaccctgatgtttatccaggagacgagctatgcacgataa

SEQ ID NO: 217123 - DNA, 1020 bp, Klebsiella pneumoniae
atgacaataaaaacctatcgtgaagcggtcaaggaagccctggctcaggaaatggagcgcgatgaacgcgtggtactcatcggtgaagacttgcgtggcggtcatggcggaaatgcgcccgaagaggcgaagattgaagcctttggcggtgtgctgggtgtcactaaagggctgtggacgcagttcggctccgatcgggtgatcgacacgcccattaccgagtcggccattatcggtatggcggccggcgccgcagcgacggggctgcggccagtcgcggaattgatgttcatggatttttttggtgtgagccacgatgcactgtataaccaggcggctaagttccgctacatgtttggtggcaaagccagagctccgctggtgatgcgagggatgatcggcgcggggttttctgccgcagcccagcattcacagtcaccctataatatctttgccaccacgcctggactgaaggtggtggtgccctcgacgccttatgacgtcaagggtctgttaatccagtccattcgcgacgacgacccggtggtattctgcgagcataaaatgctgtacgacctcaagggcgaggtaccggacgagatctataccatcccgctaggtgtagccaactacacgcgcgaaggagaggacgtcaccatcattgcgttgtcggcaatggtacataaagcaaaccaggtggcggacaaactggccagagaggggatctcggtcgaggtggtcgacccgcgaaccatttcgccgctggatgaggaaggtattctggaatcggtggcttccacggggcgggtcgtgatagtcgacgagtccgctgcacgcttcggttttgctcatgatgtcgcggcgctgattgcgtcccaggcattccatttcctcaaagcgcccgttctgctggtgacgccgccacacacgccggtcccgttctcccctgctctcgaaaaactctggatccctggcgttgaacgtatcgaagccgccgtccgtcaagtgctggaggattaa

SEQ ID NO: 217124 - DNA, 960 bp, Klebsiella pneumoniae
atgctcagcaaacaggcgttattgcaggcttaccgcaagatgcgggagatcaggacctttgaagagcggttgcatcaggaaaataccagcggtgatattccgggcttcattcacctttataccggtgaggaggccatcgcggtgggggtctgcgaaaatttaacgagcgcagatttcattggttcaacacaccgtggacatggccactgtattgctaaaggttgtgacattcacggcatgatggccgaaatattcggtaaggacagcgggttatgtcgcggtaagggcgggtcgatgcacattgccgatctgtcgaaaggaatgctgggggcgaacgctatcgttgggggagcccctccactggccatcggcgccgcgctaacggcaaagacgctaaaaaccggcaacgtcggtgtctcttttacgggcgatgggggttctaatcagggcctggtctttgaagccatcaatatggccgtcgtgctccagcttccagccgtctttattttcgagaataacggttacggcgaagggaccggccatgactacgccgtgggtgggcgtgatatcgcccggcgcgccgctggcttcggcctgccggcagtgaccgtcgatggcaccgatttctttgccgtttatgaggcaacctcagaggcggtcaagcgtgcgcgagaaggcggtggtccaagcgtcattgaggccaaagccttccgctggcatggtcattttgagggcgatcccgcgctatatcgtgcggaaggtgaagtgcaacgcctgcgtgaacaacatgatccgctgaagattttcaccgctaaggtcaagcaacatatcacccaggaagaactggcggcgattgacgaggaagtagaagccctggtcaacgatgccgtattgaaggcccgcgccgctgcctacccggctccggaagacctgctgacagacgtgtacgtctcatactga

SEQ ID NO: 217125 - DNA, 2766 bp, Klebsiella pneumoniae
atgaagccattggatttagaaggtcgccaatcaccctcactggtctccgggccattgcggctgacgcgaggcttgccgttaatcctgaccaaattcgtcccgcctcgctcctcgatacaattgctggagcgcccccggcttcttcagcttcttaatcccgttcagcagtgccggctgggcgtcgtctgcgccggcgctggatttggcaaaaccacgctgttggcgcaatggcatcagcagatggtcgcccagggggaacgtatcgcctggctgagcctcgatgaggatgatgatgacgtatggcagtttattccttatctgctgcaagcattgcgtccactctatgctgactgggacgccgatttctggcgtgacatggaagaacagaagctctccagctccgagcaactgctggccgggctcattaaccagctacactattgcccgcatgacgtatacctgatcatcgacgacttccacgtgattaacgatcgtggggtctatgaagccgtggggtatttaatcaagcatgcgcctgccgccttgcatctgatcattggcagccgtttccacccgaaccttgcgctgagccagctgcaggcccaggaccaactggtggaaatctatgatcgagacctgcaattcacgctcgaagaaacaaaacactattttagccgcacggttgcgctacccctcagcaaccaccatgcacagcggctacagtccgtgacagagggctggattgcagggatgaagatcgcttcattgtccgcagaattacagcatgatcccgagcatctgttgcgcaatatgcatggaggaacacggtccattgcccgctatctgaaagaggtggtactggatccgctgccggaagaggttctcgatttcctggtaaaaacgtccttcctcagtcggttaaatgccgaattatgcaacgcagtgacaggacgagatgatagtaaagcgatgctgacatggattgagcgacacaacctttttttgtcagcccttgacgaacaaggctactggttccgctaccatcctctgttgcaggaaaatcttcggaccatgctgcagcagaacaacgatattgatcgcaaacagctacatgaattagccagtcattggttcgtcgaacagaagctgtggtctgaagcggtacgccatgcgctcagcgcaggcaagccggtgcatagccccgtacaggacggcgcaagcgctcagtcactggcggaagaaggggatatcgataccctgatttcatggatgcatcatttaccgcccagtaccgatccttcgcgcattgacctgcaaattaatctggcctgggcactggcgcattatttccactttgatgagtcgaggcagctgcttgataacctcgatcagatggtacttcatcatcgtgaggatttaacccgcagcacctggtgtaaattgcgggttgtgcgggcaatttgcgaagcctttgcggaaaacatcccggagagtctggctattgttcagccgttgctggccgaagtgccctgcggcgacacctgggttgatggtctgatatgcaatattctcagctattgccatgttgttaaccagcgctatcacgatgcgctggaggttcaacagcatatgccctctccggaaagtcctttagataatctgtttgtctcggtttatcgcgcttttatcattgcccagtgccatctttgtcagggcgatctggggaaagccgggtggtacgcagagaaaacgttgcgccaggctgaatgttataccggtacccagtcgaccagtggcgcgacgctggcgccgctgctggcggagatagcctatgaatgtcagagtggcgactcgcccgagcatctgttagccgaccggctcgaattcatcgaccgattcagtccacccgatgcgctgagtcgttgctatacctatctcgcgcgtcaggccctggatggcaatatgccgtatgaggccgagcgattgctggagcatgcgcagcgtcttgccgtgtctcgcggctggcaacggctccaggccatgatgttagccgagcaggtgagggtgcggctgcagcgcggcaatgtcacaggcgcagagcaactgcagcgacaacttgaacaaatggccgccagcttcagaatggatgccgaacatccctgtcaacgcgctatcgctctgtctgcatcccttagccactgtcgccttcttctcgccagaggccaggcgccgcaagcctgtattctcctggctgatatggtccctgatcaggaaaaccggggggacaggttaaccgcagcgcgtctgcgtacgctctggtcattggccttgtggaacagtggcaaaactgccgctgcgcgcacgacatttcagccagtcgtgcagctggctgaacaacagcatctcaaaggcctctttcttgaagctggcgataccttgcaacctttgcttgccggtatgaatgaaacctcttcggcttgtactgaggaagggatagtccatgaaccctgggccggcaagcgcgcgcctgcagatggaacaccgtttaatagtggaagccccgatattcatggggaactcagcgagcgagaatttcagatattacaactgatcgctgaaggtcagatgaataaagaaattgctcgctccctcgctatttctgccgagacggtcaaatggcacatcaaaaacatctacgcgaagcttaaagtgaatagccgcactcaagcgatgagccgggtgctggagatgaaattactggattaa

SEQ ID NO: 217126 - DNA, 456 bp, Klebsiella pneumoniae
atggatattgccagcattgaaaaattgatcgctctggttgaagcctccggcattggcgaactggaaattgccgaaggggcaagctccgtgcgtatcagccgcgccatctccagccccacggcggttgggtcgtccgccgtatccgcggccgtcgtccagccgcagttggatattccgattcaggccgcacaggccagggctatcgcatctgaccctgcgacggagcacatcatgtcatccccgatggtaggaaccttttatctctctccgggacccggtgcggcgccatttgtggctgtgggtcagcaggttaatattggcgataccctgtgcatcgtcgaagcgatgaagatgatgaatcaaatctcggcagagaacagcgggatcgttaaagcgattctggctactgatggtcaaccggttgaattcgaccagccgctgatagtgattgaatag

SEQ ID NO: 217127 - DNA, 1347 bp, Klebsiella pneumoniae
atgctggacaaaatcgtgattgccaatcgtggcgaaatcgcgctgcgtattctgcgcgcctgccgggagcttaacatccgctcggtagccgttcactctactgccgaccgcgagttaaaacacgtgctgctggccgatgaaagcgtctgtattggtcctccgtcatccgccaaaagctatctcaatattccggcggtaatttcggcagctgaagtgacgggcgcggcggccattcatcccggttacggttttctcgcagaaaatgcggattttgccgaacaggtggaacgctcaggatttgtgtttatcggcccgaaagcggaaaccattcgcctgatgggggataaggtctcggctattcaggcaatgaagcaagctggagtaccgtgcgtaccgggttccgatggcccgctggacgataaccatgagaagaatcgccggctggcagccgggatcggttacccgattatcgtcaaagcctccggaggcggcggtgggcgcgggatgcgggttgttcgcgaagagaaagagctggcgcaggccattgacatgacgcgcgccgaggcaaaggcagcgttcaacaatgatatggtctacatggaaaagtatctggagaatccacgccatatcgaaatccagattctggccgatgggcaagggcaggcgatatatcttgccgaacgcgattgctcaatgcagcgtcgccaccagaaggtggtggaggaggcccctgcgccggggatcaccgcggaaatccgccaggctatcggcgagcgctgtgccaaagcctgtctggacatcggctatcgcggtgccggtacctttgaatttctctatcagcagggtgagttttattttatcgaaatgaatacccgcattcaggtggagcatccggtgacggaaatgatcaccggcattgacctgattaaagagcagttgaggattgcctccggattgcctctctccatcagccagcagcaggtgagcctacgcggtcatgcaattgaatgccgtattaacgccgaagacccacataccttcatgcccagccccggcaaaattacccgttttcatgcgccaggtggcttcggcgtacgctgggaatctcatatctacgcaggttactgcgtcccaccgtactacgactcaatgattggcaaattgatcgtcatcggcgacagccggaatgaggccattgcgagaatggaacatgccctgagcgaactggtgatcgatggcatcaaaaccaacgctgaactacagcggcggatcatggcggatgaccattttcgcgctggcggctgcaacatccattatctggaaaagaaactggagctcaatcgctga

SEQ ID NO: 217128 - DNA, 1272 bp, Klebsiella pneumoniae
gtgtctgcactctcttatgtgacgggtgagagccattgtgcctgggctatatatctctcccaggtggaacgcgttctgccgctgcccggcgatctcaatcgctgggccaatactctgcgccacccggaaagggcgctgattgtcgatgttcctctggaaatggatgacgggacgattcgccattttgaaggctttcgggttcagcataatctctctcgcggacccggcaaagggggcgtgcgctatcaccccgacgtcagcctgcaggaggtgatggcgctggcggcgtggatgaccgtgaaatgcgcggcgctcaatctgccgttcggcggggcgaaaggcggtgtgcgcgtcgacccgtcgacgctatccgacagagagctggagcgtttgacccggcgctacacttgtgaaatcagcagagtaatcggccctcggcaggatattccggcgccggacgtcggcactaacgcccaggtcatggcctggatgatggatacctggtcacgcaacgccggaacagccgcgaccggcgtggtgacggggaaaccggtccacctcggcggatcgctggggcgggtacaggcgaccgggcgcggcgtgtttatcaccggctgtcacattgcggaaaaaatgggactccccgtggcgcaaagccgggttgcggtgcagggttttggcaatgtgggtagcgtcagcgccgggctgtttcatgctgctggcgcgcgggtggtggctgtacaggatcatcgtgcgacgttgtatcagcataacgggctcgatatcccggcactgcaggcgtggcaacaggagcacggcacaatagctggtttccccggtgccgataacgtgacggaagaggctttctggcgtctcgagtacgagatactgattccggcagccttggaggggcaaattagcgcggaactcgcggctgggctgcgctgccgcctcattctggagggtgccaatggtcctacgctgccggaggctgacgacgtgctggctgagcgggggatcgtgctggttccagacgttattgccaacgccggcggggtaacggtcagctatttcgagtgggtgcaggatctctccagccttttctggagcgaagaggagatcgacgctcggctggataccattatgcgccacgctatcgaaagcgtctggcaaaaagcgcaggcgctggcaatccccctgcgtaccgccgcctgggccctggcctgcgaacggatcctacaggcaagtaaagaccgcgggctgtattcctga

SEQ ID NO: 217129 - DNA, 921 bp, Klebsiella pneumoniae
atgaatgcccgacttgggatttatctaaaaatactctccgcgctatgcgctacattaatgctggcctgcgtcaaaggattgcagggggcgattcccaccggcgaggtgatcttctttcgctcttttattgctatgtttcccctgcttatctggttaaaaattcagggcaacgtgctggccagtatcaagaccaaaaatattttcggccatctgattcgcggcttttccggtaccggtgggatgtacttcaactatctggcgctggtatcgatttctctcgccgacgccaccgcactgagctacgctgctccgctcttcaccgtcatcatggcggccctgctgctgaaagagcgggtacgtttttcccgttggctgggggttatcgtcggtttttccggcattctgtttatgctctccgccagtttaaccgccagcggttctctgttcgctggcggccatctgcagtccgggatggctctcggcgtcgcgttcgccctgcttgccgctctttgcaccgccacctccaacattcagatccgttttctcaacggcattgaaaaacctggcgccatcgtcttttacttctcgctgatgaccaccctgattggtctggcaaccagcctgttcggctgggtacgtcctacgccgagtcagttgctgttgctggtgggctgcggcttcttcggcggcatggcacagattctggtcacgctgagcctgcggtttaccgacgcttcgctactggcgccgtttgactacaccacgctggtctggtcgatggtcatcggttatctgttcttaaacagcctgcccggttcttcaacgctgatcggcgcagggatcgtagcgctggcggggatattcaccctgtggtgtgaccagcggcaacggcgggcgcatatcgcgcgcgcctcttcctga

SEQ ID NO: 217130 - DNA, 840 bp, Klebsiella pneumoniae
atgaaactgaagcgaaatgcgggtttagcgctggttctgacgctggtagcagtgtccggggccgcgcgcgccgacatgctggcggatattcatgcgcgcggtgagctgaagtgcgcggtctattccgatgtgccgccattttctgccccggatccaaaaacccgccagttggtcgggatggacgttgaactctgtcatgcgctggcaaaacagatgggagtcaaggcgcagctggttcctacttccgtggaagcgcgtattgctattatcgccaccgggcgagccgacgtgctgatcgccaaccttgcctataccaaaacacgtggccgccagattcagttcagtgacccttactacgtcgcgaaagagatgctgttggtaaaagaggcgaatgccgataaaacccttgccgattttaaaggcaagcgtatcagcgccaccaagggcactacctctgaacaatccatcgtgctgaagggcggcaaaccggttaccttccaggacgcggcgtcggcgttccttgcccttgaacagaataaggtgctgggtttcgtcaccaacactatgaccggtatcaaaatgatcggtcaggcaaaaaaggacggcattaatctggcgatgattaaagagccgatggcgctagagcctataggcgtggggatgaagcagggcgaaccgcaactgctggccagcgtcaatgaaagcctgaaggtaatggatgacgacgggacgatcgacaagatctggaatacctggattggaccgaataccgaatacaaaatggtccgcgaagaacgggtacaaccgttgtccagccttacgttcgaaccgctggaataa

SEQ ID NO: 217131 - DNA, 708 bp, Klebsiella pneumoniae
atgacgccgacatcgaaaacgttgttacccgagcgccgcgttgaaattcatgccagcgctccggcgcggatttccatgatgggcagccgggcctggcttatcgaagcgccgggtgcctttgaccttccggcacagcgccgtatctggtctatggcgcagaacctgcaacagtggccggcggtggaatccctgatccccggcgtgaccaatttactggtattgctccatgacacaccggaggaaccgacggcagtggagcgccggttacacgagtactggctgtccgcgcaggcgctcaacctcgaagggcggcagattgatatcccggtgtgctacggtggcgaacacgccaccgatctcgaggcggtatgtcggcatactggtttttccgcccgggaagttattcgtcggcattcgcagggggtctataccgtggtcgcgcttggcagtgcgccggggtttggctatctccatggtctggatccgcgtctggcgacgccgcgtaaaaaggtgccttcgctgaatatgctcaaagggacggtcactattggcggtccacaggcgggggtgtcggtgttgaccggaccgaacggctggaatgcaatcggctacgcggaaattgaggtattcaacccccacgccgccattcctgcattgatggcgccaggcgatatcatccgttttctgcctgagagagtcgaactgtga

SEQ ID NO: 217132 - DNA, 987 bp, Klebsiella pneumoniae
gtgattgagattgaacaaagcggatcgctaaatacgattcaggatttaggccgtccggcgtggcgtcatcttggcgtctcagtgagtggggtgatggatccgctggcactgcgcgccggtaacaccctgctgggaaacgaggagaatgcggcggccatcgaagttcagatgtttccctttcgcgtgcgtttcctggcggacagctggatcgcgctcaccggcgccgattgccgggcaaggctcgacggcgatgaactaccggcctggtggggctgcgcggtacgtaaaggccaggtgcttgagttgcgttttccccgtcgcggcgcacgcggctacttatgcgtggcagggggtattgatgtccctctggttctgggctcgcgcagtaccgccctgcgtggcggtttcggcggactcgaggggcggcaactacagcgcggcgacgtgctgtcctgtggttcctggcagggggcgccactcccggattccgggattggcattgagccgccggaagtggccttaaacgcctttttcccgcgcaacgcacagggcgatgtccagatccgagctatacccgctggcgagtatccgttgtttgccgctgatgcatcgcggttctggagccaggcgtggaaaatttcgcagcacagcaaccgaaccggctatcgcctggcgggagagcctatcctaccagccgaaacggttgaaatgcgctcctatggcctgataccgggcatcgtacaggttccgccggccggcgaaccgattatccagttaagcgatgccaacaccgcgggaggctatcccaaaattgcctgcgtgattgaagaagatctctggcgtctgggccagctccaggcggggcagtcaattcaactggtacaggccgatacgtccaccgccatcgccgtgcggcaggaaattgaacgttggctgcagcgtttgcgcgtcagcatagcgccgctggtcaaggtcgttggtttataa

SEQ ID NO: 217133 - DNA, 771 bp, Klebsiella pneumoniae
atgaaaattgatgtgaactctgatatgggagaaggttttggcgtctatcagctatgtgatgattcagcgctaatggataaggtctcttctgccaacatcgcctgcggttttcacgcgggggatccggcgatcatgacgcggatggtacgcctggcgaaagtgcgcggcgtggggattggagcccaccccggtctgccggatcgccagggcttcgggcgcaaagagatggcgttctctgccgatgagatctgccagcaggtggtatatcagcttggcgcgctctctgccattgcccgcgccgaggggacccgggtagttcacctgagttttcacgcggcaatgggcaatatgattaaccgtgacgatgcgctggcgctgcaggtgatgcaggccgtcgcccggatcgattcgcaactgattatcttctgccagccggatactatcattgaacgagcggcgcaggctgccggattgccgacgctgacgctgtttctcgccgaccgggcctacgacgatcgcggacaacttgtcccgcgcggtattgccggttcgctaatcaaagaagaagcggcggtgcgcgccagagtacgtcagtttctccagcagggaacggtgaccacttttagcggcaataccctgtcgatacgtgcgcgttcgatcctggtccatagcgataccccgggctctctggcgctggcgacgctggttcgtagtgagattgaagcctgcggtgcgacggtagcatccgcggcggaggtgctggcgcagtaa

SEQ ID NO: 217134 - DNA, 1203 bp, Klebsiella pneumoniae
atgcctgatatagccgatcgtctcaaaaatgttaccgtctccgcctccgtcgccatgacgcaaaaagcacgcgatctcgccgcgcagggaatcgatgtcgttggtctgtctaccggcgaaccggactttcccactcctcctcacgtgatcgatgccgcctatgccgcagcatgcgccggggatacccgctacccgccgacggacggcacgccagcgttgcgtgcggccatccagcgcaagttcctgcgcgacaatgagctacgctacgatatcagccagatcctgaccgctggtggcgcccgacagattatcttcaacgctatgatggcgaccattaaccccggcgatgaggtactcatccccatgccatcctggattagctacgccgacatcgttaaattcgctggcggcataccggtgccagtaccctgtcatgaagagtacggttttaaaccactgccgcaggacgtcgaagcagcgatcacgccgaagaccaaatggctgctgctgaattatcccagcaatccgactggatcggtcgccacccatgccgaactcctggcactcggtgagacgctgttgcgtcatccgcatatctggatcatgaccgacgatatttatgagcatctgttgtatgacggcgtgaaattctggaccctggcacaggtggagccccggctgtacgatcgcgtattgacagtgaacggcgtctcgaaagcctattcaatgaccggctggcggctgggtttttgcggtggcccattgacgctgattaaggcgatgagcaacgtcaatacgcaaaacagcggcggcgtgacgaccctggcacaagcggggtccgtcgccgcactggatggcccacaggatctgctggcagaacgggcggaaatctatcgccagcgccgcgattacgtgcttgagcgtcttgccggtattcacggtctgcgatcccataagccgcagggggccttctatctgttcgtcaacatcgaggcatttatcggaaaaaccagcgccagcggccattttatcgccagcgacgccgattttgtgatggcgcttattgaggagcagcacgtggtgacggtacagggggcagcctacggcatgagcccctacttccgtctttcttacgccaccagtatggaacgcctgcaaaccggttgcgatcgcctcgcggccttctgcgcggggtgccgttaa

SEQ ID NO: 217135 - DNA, 924 bp, Klebsiella pneumoniae
atgaatcttcgccgcctgaaatatttcattaaaatcgtcgacgtcgggagcctgacgcaggccgctgacattctgcatatcgctcagccggcgctcagccagcagctggcgactctggaaggcgaagtcgatcagcagctattaattcgtaccaaacgaggggtcacgccaaccaacgccggaaaaattctctatacccacgctcaggcgattctgcgccaatgcgagcaggcgcaaagcgccatcgacggtgcaggccaggccctgagcggtcaggtttctgtcgggctggcgccgggcacagctgcccaactgctggcgatcccgctgctgacagaagtccagcgccagcatcccgggattgtgctctatttcaatgaaaattttggcaccactctcagcgaattgattatgagcggtcggatggatatggcggttatctacggtgaccgtgatattcatggattgcgttttctaccgctgatgaaagaagaactttttttcgtctgtccgcacgcgctgggggagtcccggcgcgaaatctccctggcggaggtcgcccgctacgatctgtttctaccgcggatttataacattatgcgtaaagccgcggacgacgcctttaccctggccggactgagctaccgggtgaagtgcgagattgaatctttgaccacgcttaacgccgcgctggcggcggatctcggcggcaccatcatgccggagtccgcggcgcgcaccatgctccagcccgccaatgcctggatggcgagaattgtcgaacccaatgtactcacctcgctctcgttctgtatgtccgatcatctgccgctttcgcagcccgcagaggcggtgaaggggattttgctctccctgatggcgcagcggactgaggacaaccggccgctaaccctggtgggataa

SEQ ID NO: 217136 - DNA, 438 bp, Klebsiella pneumoniae
atggaaaaagaactgatagcttttgaggacgtgcgccagctggcgcagaagatgcataacgccggactgcgggagcttgagtggcgcggcgcggactggtcggttcgcctgcgctaccccagtggcaaaacgatggccgaaccgccgcctctgccgccgctggcggccgaaacccgcccactatcggtgtgttccccgatgccgggacgcctgttgctgagccaccccagccatggggaggcgttcgttagcgaggggcagcacgttgcgccgaacgatatcctcgcgctggtgcaggtcgggccgctctatttgccggtgcgcagcccggtggccgggacgctcaaaagccttatggcaccggcggggagccggctggagtacggcagcgagatcgcgctgctgctgcccacggatgccgcttccgcgaagttataa

SEQ ID NO: 217137 - DNA, 753 bp, Klebsiella pneumoniae
atgccattttcagattataaagtggccctggtgaccggcgcttccgctgggatgggggaagcgattgtcgaacgcctttgtcaggaaggcattgaggtccatgcggtcgcgcgtcgccatgaacagcttgccgccctggcggacagaactggctgcattccccacgccgtcgacgtcggcgatctatcggcgctgaccgcactgtgccagggtctgcaggtcgatattctggtgaacaacgccggcgtttctcatccgggatcgattctcgatgccgaggccgactgggtcaacacccaggtggatgtcaacctgcgtgccgtgctgcacctgtgtcgtctgttggtaccaggaatggtggcgcgcgactgcggtcacgtcattaatattacctccatcgctgcgatttataacttcaatggcaattccatctatcacgccaccaaagcaggagtgcacgcgctgtcgcgtcagctgcgcgtcgattgctatggcaagcgggtacgaattaccgaaatttgccccgggcgggtggcgacggagatattcggtaacgtatccggcgatcacgaagacgcccgccgtcgctttatcgatggtttcgagctgccggaagcaaaagatatcgccgactgcgtggcctttgcgctcgccgcgccggtggcagtcaacatcggcaatattgagatcacgccgacgctgcaggtacccggtgggctatccacgatgcgtcctggtgaccgtgagtcctga

SEQ ID NO: 217138 - DNA, 696 bp, Klebsiella pneumoniae
atggcactcgacttcagtaacgtgatgactggccactacggccagatgattattgatggcaccgtcgtcactctggaactggcgttgggtgcatggctgctggccatgtttattgcgctggtgctggtgatgatccgtctgagcaacaagcgcttcgcgcagcttttggtcgcggcgtatgtatcctatcaccgcaatgtaccgacgcttattcagctgatgatgtggtatttcgcgattccgacgctgctgcctgagtcgttgcagatgtgggtcaacgagatgaatgcggagtttctgttctcgctggtcgcgctgggattgtgccaggcggcctatttctctgaagacatccgcagcggtctgcgtgccatccccgaaggccagaatgaagcggcgagggcgctgggaatgggatatttgcgcgccatgtggctggtgattctgccacaagggatccgtaatgcgttgccatcggtgattaaccacaccgtgctgctgtttaaaaataccagccttgcaatggtcattggcgtcaccgagttgacttacgtaacgcgcgatattgaaaaccagaccttccgtaccttcgaagcttatatggtggcgacggtaggctacctggccttctctttgttgctgatggggatgggggcgctgctggcccgtcgctttcagcgcgcgtatgcgaggtaa

SEQ ID NO: 217139 - DNA, 762 bp, Klebsiella pneumoniae
atgtttgattttttcacgattctgcatgataacggcctgttgttgctgatggggcaatatcctgatggtccgcttggcggtgtgctgtgtaccttgctggtgtcgctgctggcagtgctgttcgccttcccggtcggcgtgctgttgtgcctcgctcgcctctctccgtggcgctggctgagctggccggtcacctgctggatctatctgctacgcggtattcctctgatgatggtggtgttctggacctatttctgcgtgccgttgctgattggccacaatattagcggcttcagcacgatgctgtgtacgctggttatctacgagagcacctacatcgctgaaattgtgcgcggcgggatccaggcgctgccttcagggcaatatgaagcctcccgtgcgctgggaatggggcatgtgcgggctctgcgcctggtgattctaccgcaggcgttgtacaacgcgctgccaagtctggtcagtcaactggtgtcgattatcaaagatagtaccctcggctacgttattaacgttccggagctgacctatgcggccaaccaggtcagtaatcagctgctgacaaaaccgttccaggtctttgccatcgtagcgctgagctactacatcattaattttagcctgacgtggctggccaatcgcctggagctgcgtattgccagcaggaggcaacgtgcacagtccgctatgggaaagccggtcatgccgctggttctcgacccatcaccatcacaaactcaataa

SEQ ID NO: 217140 - DNA, 738 bp, Klebsiella pneumoniae
atgcgaccgatgattctgttcaatcaggtgaataaatggtacggggaatatcaggccctgaccgacgtcagcgccgaaataaaaagcggtgaagtggtggtggtgtgcggtccttccggatccggcaaatcgacgttaatccggacggtcaaccgtcttgagcccatcgaaaagggacagatcctgtttgacggcgtcgatattcatggctcgagcaccaggctgaaccaactgcgtacgagaatcggctttgtcttccagagtttcaatctgtttccgcacgtttcggtgctggaaaatatcatgatgtcgccagtgaaagttctcggcgagaagcgttcggaagcccgacgtcatgccggggaactgctggaaagggtgggactatcgcacaaggccgacgtttatccggcacagctttccggcggccagcagcagcgggtggctatcgcccgggcgctggcgatgaagccgcctgtcatgctgtttgacgaaccgacatctgcactcgacccggagatggtcggcgaggtgctgagcgtgatgcgcgggctggcgcaggaagggatgaccatgatgtgcgtgactcatgaaatgaactttgcgcgtgacgtagccgatacgatctggtttatggatcagggacaaatactggaaaagtctgctccggataaattctttaccgcgccgcaacatccgcgcgcgcgacgtttcctcaatgatctactgctccattag

SEQ ID NO: 217141 - DNA, 1518 bp, Klebsiella pneumoniae; identical to SEQ ID NO: 98861

SEQ ID NO: 217142 - DNA, 858 bp, Klebsiella pneumoniae; identical to SEQ ID NO: 98860

SEQ ID NO: 217143 - DNA, 1653 bp, Klebsiella pneumoniae
atgaaaagcatatactttaaaagtgctcatatattatcccttcgcgataagaaaggattctccttcaagttctcacctgatattaatatcattacaggtgagaacgacacaggtaagtctagctttattaagagcttatatcatacattaggtgctgatgttcgactggataaaaagtggaaagaagataactttgtttcaaaagttgttatttgtgttaataatcgtgactatgcgtttcttcgccacgaaaaacgtatttccattttcgatataacagcaggacaagagcatcacttagtgacctctagctctcgtgcagagattgcattagctgtgcgtgatgtctttgatttcaatttggagcttgtgactaaaactaatttggttcagggacaagcacaaccagcaagtctttatctcccttactatattgatcaagataacggttgggggaaagttttagattcatttagcagtttggctatgtatgaggactggcaaaaaaatatcttgaattttcatactggtgtaaaaccaaaggagtactatactttacaaggaaagattaatttaattgatatcgatcttgttgaaatccgaacgacgttaaaagctctaaagagagctaaaaagcgattcgaagagtcatttggaagagtacttttcgatgtggatgtaaaatattatgaagaactgctggaacgtttccttcgtaagtgccaagacttacatcaagaagaaacagaatacagaattaagctcataaaaatattatctctacgagatgaattagtaacagaaatagaggaatcaaaaagacagctcgatgaaaatgatatagattctttgctaccatcggcaggcttagaagcaagatatgtagtacttgagaataaagaaaatctattgcaaatcataccaaagttgtatgaggaaaaatctgtatatgatgatcaactctctaaaattaaagaagatttgaaacaggctataagcttaagctcagaactcaaaaacatgcttctggaagtcaaagagcaactgactcttcaagacgttattaagtctcaagcaagtaagcaggttgaggtaactttcgatgagcaaattaacgaattactgctaaaaataggcgaattggatgttgctagaactcagctttcaaaagaaatagcaaagttcgaagataaaaatcgagcaaaagaaatcaatgataagtttaaagagtcactgaagtttgcgcaaactgagttaggtatcaaagatcctaaagttggaactattcttcaatatggtccgatttctaagagcgaaacaggcagccgtgctccaagatcaatattggcttatcactatgctcttctaaaaacaatagaagataaatcgacaagtcctatgcttccagtagtaattgactcgcctaaacaacaagatccagatccgcgtacaacaaaaaagttattcgatttatgtattaatggtttatcaactaatagccagctaattatcggctcagtttcatttgaaagagaaacgaatcagtttaaaacacttattatgactgaaaaatacagtctgctaaaatcagagctttacaatcaggtttatcaagagattatgcctctttatgaacgagctgcgttatcataa

SEQ ID NO: 217144 - DNA, 1128 bp, Klebsiella pneumoniae
atgttgttacgcgagtccattgaactaaacataagggagtatatggggttagctgaaacattagttagtattccgcagtctgaaagaggcggtgagattgctcaacgtgggtttgactatcaaacttgctgggctttatctcaaatgctggaatatgaactagatgaaaagaactatgtgtttatcttcgaatatcatgatgatgttcttattcttgatgacgaagtttctccaacacaactcacatttgctcaagtaaaaacaagagagaaacactggactgcatccactcttagtaatagcaccaagaagaacccaatatctatcatcggtaagttatttattcatcaaaagaatttcgccgaatattcacccaagctcctttttgttactaatgcttctttcaatctatgtgaggaaaacggtggtaagtcttgttttggtgcaaatgaagtcaaagtggagtatcagacgagctttaagaaagcaatcaaagatcaagtaaagcttgatgactccagtatcgatctttctgttatgcgtttcgttcaatcctcattaagcctagatgaccacattacacatctaaaaggtaaactatgcgatttccttagcaagaagtttggcgatagcattagcctgagtgttaatgcattagcttctttgcttgaacaggcgtgtcgagaaaaatccaaggtaaaatccgcagatattattaattttcctgaacttatctcacgaaagggtttctcatcagaagcattgaatggtgtgcttgattccttgaatgcaagtaatagtttaaagcctgattgggacaaagctagtcccctattcaatgatcttggcaaaacatcgcttcagctcattatcctgcaagccatgttctcacaagtttgcatcgaccttaaccaaaacaaaaaaaatccttcgactgtatatctagaatatgcaattagcctttacgatgaggcgagtgctcactcggatttgaaattatatctaactgaaaccatgtacaaaattgatgcactttgtccagattatgcattgactttaaagtcagggaagaaagaatgcatagttatttactcaataatccagaagctcttagagggaggtgaataa

SEQ ID NO: 217145 - DNA, 1278 bp, Klebsiella pneumoniae
atgaacaccgataacgcttccctgtacgtaaaatggctcaaacaagaggtcgccccggctttaggttgtactgaacccgtcgctatttccttcgcggccgcctacgccgcacaatatctggatcagccttgcactaaaattagcggttttatttccgccaatctttataaaaacgcgatgggcgtcaccatacccggcaccaccgtttgcggtgtaccgctggcagccgcaattggcgcatttggcggcgacccgcaaaagggattaaaaacgctggaagatatcactccgcgacacgttgaaatggcgcagaagctgatcgccaataacgccgttgatattgccgtcgaagagactccggattttattcatctcgatctaaccctctctgctggcgagaattgctgtcgtgtcgtggtcaaaggaacccacaccaacgtggtcgaactttatattaatggccagccgcagccattaagcgaaaaacagaatacgcgcacccagcgcgaaacgctgcccactttctcgctacaacaggcttacgactttattaatcgcgtcgactttaatgatattcgctttattctcgacgccgcgcgcttaaactccgcgctggcggcagaaggcaaaacaaaaaaatatggcctgaacattaacggtaccttttctgacgcagtgaaaaacggcctgatgagcaacgatctgttaagcaaggtgatcatcaacaccgtcgccgcttcagatgcccgcatgggcggcgcgccggtggtagcgatgtctaacttcggctcaggcaatcagggcattacagcaaccatgccggtagtggtggttgcagagcatctcggcgtcgatgaagagaccctggctcgcgctttgtctctctctcatctcaccgccatctcaattcattctcgttatacgcgcttatctgcgctatgcgcagcctcaaccgccgctatgggcgccgccgccggtatggcctggctgtttacccgcgacatcaataccattaataccgcaattattaatatggtcagcgatattaccggcatgatttgtgatggcgcttccaacagctgcgcgatgaaagtctcgtcagtggtatccagcgcctttaaggcggtactaatggcaatgcaaaatagctgcgctggcgccaatgacggtattgtctgcgccgatgtcgagcagactattaataacctgtgccgtctggtgattaaaccaatgactctcaccgataaagaaattatcagcattatggtcgctaaataa

SEQ ID NO: 217146 - DNA, 1569 bp, Klebsiella pneumoniae
atgttaaaaaagactcatatcatcagcggattattgatcgcccctttaacgttatatgccgcaacatcatatcaagttgatgatatccgttttgaagggctacagcgcgtgaccgtcggggcggcgctattaagtatgccattgcacgcgggagatgcggtaacgccagaagatgtcagcgaggcagtgcgcgcgctgtatgcgagcggcaatttcgaaaatgtgcagatcctgcgcgatgggaaaacgctggtggtgcaggttaaggaacggcccactattgccagcgtcagtttttccgggaataaggcagtgaaggatgatgcgctaaaggaaaatctcaccgcgtccggtatttctgcaggtagcgcactggacagaaattcgcttagcgaaatagaaaaggggttgcaggatttctattacagcgcggggaaatacagtgcgcaggttcacgcggtggtgaccccgttaccgcgtaatcgcgttgacttaacgttcgtctttcaggaaggcatctcggcgaaaatcgcacaaataaacattatcggtaatcaggcgtttcgggaagagacgctcctggaccagcttcagctacgtgataatgtgccgtggtggaacgtggtagccgataaaaaataccagaagcagaagctggaagccgatctggaaacgctgcgcagtttttatctcgatcgcggctatgcgcgctttgctatcgagtccacgcaggtcagtatgacgccagataaaaaatccctgtatatcactatcgccctcaatgaaggcgaacgttatcgggtcgaccgaactcaggtgacaggcgatctggctcagcatgggccggagatcgaggcgcttgcccagccgctggcgggggcatggtatagcggggcgcaagtcaccacggttgaaaatgagatcaaaaagcactttggtaagtatggttatgcctggccgcaggtgacgtccacgccggaaatcgatgatgcgcatcaccgcgtggtgctgcatattcaggtcaacgcgggccgccgctactcggtacgccagatccgcttttccggtaacgacacctcccgggacgcggtgctgcgtcgtgaaatgcgccaaatggaaggggcgtggctcaacaacgaaaaagtcgatcaagggaaggtacgtcttgatcgaacgggtttttttgagaacgttgaacagcagatcgttccggtcaatggaacggcggatcaggtcgatgtggtctacaaggtgaaggagcgcaacaccggctcattcaatgtgggcctgggatttggtacggacagcggcgtgagctatcagcttggcgtgacgcaggataactggctgggaacgggtaatagcgttagcttcaacgggacgcgcaacagctaccagtcttatcttgaactgggggcgacgaacccgtggtttaccgtagatggcatcagcctgggcggaaagattttttataacagctatgatgcttctgatgcggatgccgggagctataaccagcagagctatggtttaggtagtacgctagggaaggtgcgaacaagttcctga

SEQ ID NO: 217147 - DNA, 927 bp, Klebsiella pneumoniae
atgttgcgccagcagcatatcctgctgggcgatctcgcctctccggagcattttcttaacgatccgcgcctcgatcaggtcacgcacatcctcaactgcgccgctgtcgcctcatttggcagcaacccgcttatctggaaggttaacgttgagggcacgctgcgcctggcgcaacggatggcgcaggtgacgggtctgcagcgctttctgcacgtcggtacggcgatgtcatgttcgcctgaaccggattcactggtcgctgaaagcgcggagtttcgggaacgcgctgagcacctggtggaatatacccactcgaagtcgaccatcgagcagctgatgcagcagcagtgccctacgctaccgctggtaattgcccgcccctctatcgtggtgggtcatacccatcacggctgccggccttccagcagtattttctgggtgttcagcatggggctgatgctgcagaaattcatgtgctccatggaggaccgaattgacgttatcccggtggactactgcgccgacgccctgctaatgctgcttaaccagcctctggctcacggcgaggtggtgcatatctctgctggcgaagagaacagcgtgaagtttgccgaaatcgaccaggcgatggctcaggccctggagcaggcgccggtgggggataagtacgcccaggtgagctatgaaacgctggtcaaaatgagacgcgaactgaaagggatatttgggccatgcaatgagcggctgatgctgaaagccatgcgcttatacggcgcgttcgccaccctgaacgtgcgctttagtaacgacaagctgctgagcatggggatgccaaaaccgccgcgctttaccgattacatcgaccgctgcgtggaaaccacccgcgggttgtcgatccctcagcaaatggccgtcgactttaaataa

SEQ ID NO: 217148 - DNA, 1305 bp, Klebsiella pneumoniae
atggcgcaattctactctgcaaaacggcgtgtgacgacgcgccagatcataaccgttacagtcaacgacctcgatccctttggtcagggtgttgcccgccaccaggggaaggcgctgttcgtgagcggcgtgctgccccacgagcaggccgaggtggcgctggtggaagataaaaaacagtacgcccgcgccgaggtgaaacgccgactgaccgacagcccgcagcgccaggcgccgcgctgcccccattttggcgtctgcggcggatgccaacaacaacatgccagcgttccgcttcagcagcaaagtaaacgcgccgcgctggggcgactgatgaagcgcgaggtagatgacgtcatcgccggcgcgccgtggggctaccgccgtcgcgcacgcttgagcttgaattatcagccgaagacccaacaattgcagatgggttttcgccaggccaacgccaaagcgatcgtcgatgtggtgcagtgccctgttttggtgccccaacttgaggcattgctgcccgctgtgcgcgagtgcttaagcgcgctgagcgcattacgccatctcggccacgtcgagctggtgcaggcggacaatggcccgctgatggtgctgcgccataccgcagccctgccggcgacagacagggaaaaactggaacgcttttcgcaaactcacggtctttccctgtacctcgcgccacaaagcgagatactggagcatattcatggcgaagcgccatggtatacctcagacggactacgcttagtgttcagcccgcgggattttatccaggtcaacgacggcgtaaatcagcagatggtgcgtaccgcactggagtggctggatctgcggccagaggaccgggtgctggatctgttctgcgggatgggcaactttaccctgccgctggcgacacgcgccgcccatgtggtgggcgtggaaggggtgccggcgctggtggagaaggggcgggaaaacgccgcccgcaatggtttatcaaatgtcactttcttccatgaaaatctggaagaagacgtcacccgtcaggcctgggcgaagcacggctttgataaagtgctgctggacccggcccgcgccggcgcgccgggcgtgatgccgcatataataaaactggcaccgcggcgggtggtgtatgtttcctgcaacccggcgacgctggcgcgagacagcgaaaccctgttgcaggctggatatcagattcaacgcctggcgatgctggatatgttcccgcataccggccatctggaatcaatggtgttgtttgagcgcaggcttacataa

SEQ ID NO: 217149 - DNA, 2178 bp, Klebsiella pneumoniae
atgtcaatagttaaaaacaaccaaactatgaaagagtctgacgaaatagacttaggtaggttcttaggtgagcttattgatcatagaaagataattatttcaataacgtcctttataactttattgatgttgatatacatattattttcaacgccaatttatcaagcagatgctttgattcaggtagaacagaaacaagggaacgcaatactaaatagtattagccaagttttaccgaatagtcaaccacagtcatctccagagatctcgctcttacaatcaaggatgatattaggtaaaacagttgatgatctgaatttacagacaagagtagaaaaatcatatttccctgtatttggtaaaggatgggctaggttgctaggggaaaagaatgagactgtctctatatctcaattttttttagctaataccgaagaaactgataatccggagattatattaaaggttatcaatagcaaaaattatgaaatctataatgatgacgatgaacttctattaaaaggcagtattggtaacatatttgaaaagccaggagtaacaataaaagttgatagcattgatgcaaaacctggtactaagtttgaattgtcttatgtatccaagcttaaagcaattaatgacttacgcgattcactgtctgttgctgaccaaggtaaagatacaggaatgttgattctttcaatcacaggaatggaccgttctttaatccaaaaaatattagatagcattagtaataactatcttgctcagaacatagaacgagaggcagctcaggatgctaagagcttagagtttttaaatgtacaattaccaaaagtaagagatgatcttaatgctgccgaagacaaacttaataattatagacggaaaagtgattctgtagatttatccttggaagcgaaatcggtacttgaccaaattgttaatgtcgataatcaacttaatgagcttactttccgtgaatcagaaatttcacaattgtacacaaaggaacacccaacatataaggctttgatggaaaaacgcaaaactctccaggatgagcgtgcgaagttaaataagcgagtttccagcatgcctgaaacacaacaagaaatacttagattgagtcgtgatgtcgaatctggccgtgcagtctatatgcaactattaaatagacagcaagagctaagtattgctaaatcaagtgctattggtaacgtgagagtgattgatagggccgttacacagccaaagccagtaaaacctagaaaggttattctactggtcataggtattgtatttggtggaatattgtctgttacgatagttttgattagagtctttttaagaagaggtattgaatctccagaacaattagaagaggcaggtatcaatgtttatgcaagcgtacctatttcagatacgttgcttaataaaggcagccaaataaaaggacaacgtaaaaataaaaatgataatagtgaaaaaaggcttttggccatagataacccggctgatgtagctattgagtctatccgtggattaagaactagtctgtatttcgctatgatggaagcacgaaataatatactcatgatttctggcgctagcccgaatgcaggaaagacatttgtaagttcaaatttagctgcgataatatctcagagtggaaagcgcgttttatttattgatgctgacttacgtaaaggatatacacataagttattcggcacggataataatcatggcttgtctgattggttatcagcgcgcgatcctatggataaaataataaaacacctacctaccatcggtattgattttatttcaagggggactgtacctccaaatccagcagaacttctgatgcattctcgtttgaaggaagtattatcttgggcctcgagtaattatgatttagttattgttgatacaccacctatattggctgttacagatgccgcgataatcagtaagtatgttggaacatccctaattgttgctcgatttgaacaaaataccgtaaaagaaatggaggtttgtatcaagcgctttgaacaagctggtgcaacgatcaaaggctgtatacttaatggagttgtaaggaaagcaagttcctattataactatgggtatacaagttacggatatagctattccaaagataaagattga

SEQ ID NO: 217150 - DNA, 1623 bp, Klebsiella pneumoniae
atgaaaaaaacctccttactgggagcgtgtattctcgcgctcgccatgtcgatggggagcggggaggcggtggcgaaaacgccgcccgaccagctgatcatcggcatgaatatgaataacctgctcacccttgacccggcggcgatgaccggtaacgaagtggtggggatcgtggtcaacctctacgactcgctggtggagctggaccctgagcagctcaccaccgtcaggcccgcgctggcgaaatcctgggatatcagccccgacggcaaaaccctgacctttcatctgcgcgatgacgttaagtttcactccggcaacccgctgaccgccgccgacgtcgtgtggtcaatgcggcgcatcctgcacctcaacctggcccaggcctcagtatggaaatcctatggcttcagtaagaaaaatatcgacagccaggtcagcgcgccggaccgcttcacggtgcaaatcgtattacccaaagataacgatccgcagctggtgatttactcgctggcggcgctgggcaacctcggagtgctggacagtaaaacggtgcaaagccaccagcaggataacgactggggtaaccgctggctaaccacccatgaagccggttccgggccgtttatcctcgaaacctggcaggcgaaagatgtgctgcgcatgaagcgcaaccctgactactggcgcggcgaggcgaaaatgagccgcgtggtactgcgtcatttccaagagtcgcaaactctgcgcctgatgatcgaaaaaggcgaccttgatattgccaacaatatggcggtttccgatatcaacgccctgcgcagcgatccgcagctgaccgtcgatgcggtgcagcgcggcaccatgtactacgtggcgatgagcatgaaagaggcgcacttcgccaatccgaaagtgcgcgaggcggtgcgctatctgattgattaccagggtatcaataaagcgctgatgccgggctacggcgtgctgcaccagcggcctatcaaagcgggaatgccgtccacgctacccgatcccggctacaggctggacgtggcgcgggcgaaaaagctgctggcggaagcgggatatcccaacggctttgataccacgctgcgggtactctccgatcagccatttcttaacatcgctatcgccgtgcagtcgacgctgatgcaggcggggattaacgccaaaatcatcaccggcactggtaaccagatctacggcgcaatgcgcgagcgtaaatttgacttgctggtaggtcgcggcggcagcgggatggagccgcatccgcactccagcctgcgcgcgctggtctataacccggataacagcgataaggcgcgcctgaccaacttccagggctggcgtaccggtttttacgacccgcaactgaatacgatgattgaccaggccctgctggaacgcgatccgcaaaaacaggtggctgactaccaggccatccagacacgctacgaccagctggttccggctttaattccgctttcacagatggttgattcggtcgtcgtgcgcaacgaggtacgggagtatcagccgcacccctccgccaccacttttctgcgtgacgtctataaagtccgcgaaggagagaaaggatga

SEQ ID NO: 217151 - DNA, 1278 bp, Klebsiella pneumoniae
atgtctatcaataataaacagtggctcggtttacccctgaacctgctctggggatacatcgccattgccgtatttatgaccggcgacggttttgaattagcctttctgtcgcactatatcaaagcgctcggcttctctccggcggaggcctcctttgcctttaccctctacggcctggccgctgcgctgtcggcgtggatttccggggtggtggcggaaattatcaccccgctgaaaacgatgatgattggcttcgtgctgtggtgcgtattccacgtgctgttcctcgttttcggcctcggtcacgccaactatgcgctgatcctgcttttctacggcatccgcggcttcgcctatccgctgttcctctactcgtttatcgtggcgattgtccataacgtcaaaagcgacaacgccagctcggccatcggctggttctgggcggtgtattccatcggcatcggggtcttcggcagctatattccgagctttaccattccgcacattggcgaaatgggcaccctgtggctggcgctggccttctgccttaccgggggcgtgattgccctggtttccctgcgccatattcaaacgccgcagcatatgcagaatctcaccacccgtgagaagttttccgagctgggacgcgccgcgacgctgctctataccaaccgcaatattctgctgtcgagcatggtgaggattatcaataccctctcgctgttcggctttgcggtcattatgccgatgatgtttgtcgatgagctgggcttcagcacttcagaatggctccaggtatgggcagtcttcttcttcaccaccattttctctaacgtgctgtgggggatcctcggggaaaaactgggctggatgaaggtggtgcgctggttcggctgcatcgggatggcgctctccagcctggcgttttactacatacctcagcactttggccatagctttgcgatggcgctgatccccgccatcgccctggggatctttgtcgccgccttcgtgccgctggcggccgtgttcccggcgctggagccgaagcataaaggcgcggccatttcggtctataacctgtcggcggggatgtcgaactttctcgcgccggcgattgccgtggtgctgctgccgttcttcagcaccatcggggtggtgatcgcctataccggattgtacgtggtggcctttttcctctgcgcctttatccgcgtggagcagccggggttctcccacaaggaagcaaccgcccgcgagcaggttgaattctcatag

SEQ ID NO: 217152 - DNA, 684 bp, Klebsiella pneumoniae
gtgctgtttgtggtgaccgatgcctatcgtccggcgccgcagtcggcggtacatgcgttttgtcacgtgctgccgaacctgtggcaccagatgagcgtcatgctgagcgccgccagctgtttgcagtggttctgccgtctgaccggcaccacggaggtggcgctgctggcggagattgccgagctaagcgaggaggataaagccaacgcgccgttcttcctgccctatctctccggggaacgaaccccgcataacgatcctgacgcccgcggcatcttctggggcatgacccatgccagcctgcgcgcgcagctcggctacgcggtgctggagggggtgagctttgggatcaacgacggcctgcaggcattgaaagagagcgggacgccgatcgcgcagtgctcgctggtgggcggcggcgcccgcagtccgttctgggcccagctgctggccgatattctcgctatgccggtggtgacccacaaaggcggagagaccggcggcgcgctgggcgcggcgcggctggcctgcctggctgcgggcaaaccggttgccgcggtgtgtgaaaaaccggaagtctggcagacctggcgtgcggatcccattcgccaccacaccctgatgcaacgctacgcgcagtttaagtccctgtatttaaacgatctgcactatcgacagcactga

SEQ ID NO: 217153 - DNA, 162 bp, Klebsiella pneumoniae
atgagtattggttcattacgtctcgtctttgtttctggtgtaatcaccattatcatcttttcattgctctaccttgcactttggacagaaaactctctcgactctgttactaacttcggttggatgttaaccgaactggccaagcgcttattaaagccatag

SEQ ID NO: 217154 - DNA, 558 bp, Klebsiella pneumoniae
atggctaaaacatcagcagttaccccagaacaggcgaaaaaaatcgaggcggcattgcgtcagcgtagtgaggttgctgctgatgcctggaaactcaacctacaactggcgttacgtatcagtgacctgttgtcggttaaatatgatgacgtacaagggaaatttctaagactcaaggaagggaaaacaggcaagcagcgtgaattagtattgaacactgaggcgctaagggtgctcaagcgtcgccggaaacagaatccaaatgacgtctttgtattccagtccaagagtaaccgtgttaagggtcagacgccgaaaccagtatccagggttttcatagctcaagccataaaggaagcatcacagggcgttgtagagcctggtattagcgttgccacccattcagccagaaaaacccgtgcaagggctctgttgaaagcgggaacgccgattgaggttatctcccggatgctcaatcatagcagcccagcagtcactatgacctacttggatatcacgcaggatgaggttaatcagacctatcagatggtgatctaa

SEQ ID NO: 217155 - DNA, 666 bp, Klebsiella pneumoniae
atggaagctatcattaacatgcttgtgtcaatgtttgatgtcctttctaatttcctatcgaatgtacccgagtgggcaacagcatttacaactgcacttattggtgctgtaatcgggggcagatatacgctcaaaggggttgaaaaagaagctgaaattaataaaaaggcatcagagagagattcattagagttaaagttatctgttctcaaggggatcaaaggagaaataacaacactattgagtctatatgatgtaagaatgaaagaacatatagatgatatagggccggggaaaatcctggctattggatttccagttggcgatgataattttactttttatgagcagaatgctaaagaaattgctaagctgagtgatgaatcaagagacggaattataaatatttacacatacgcgaggtcattgattcaatcatttaaaggtaacaatgaattaataaaggaggttcaagaaatgaatctccttcaatgcaaatacaaagatgatgttcatttgaaaacaatcattaataatcacctagaatgcatgatagattatgcacaaggaataaagctaattgacggtgaaacaagacaagccatatctgatggtatgctgattatagacaaagaaattgatagaattacttcactattgaagtag

SEQ ID NO: 217156 - DNA, 423 bp, Klebsiella pneumoniae
atggtagacccaacatccttagctgcaatttctggcacgcttgatcttgtgaataaatcggtggatttagttcgtaacctccgcaaaaaaggtgatgaggaactaacagccgctgaaatgcgcagcacgttgattgatttgctagatgatctagtagaagttaaaagcgaatttgtgactttaaaggcagttttacttagtaaagaagaagagattcaggagcttaaggcaaagctacaaggtaaggaatcacttaaatttgatggacttctttactggaaagaaggtgataaaatacctttctgcactaagtgctacgaaaaggataaggaagaactacacttgcgttatgtaggcacaggaaaatataagacatatcctacttggaactgtcgtgtatgccaatctaattatagagcataa

SEQ ID NO: 217157 - DNA, 1035 bp, Klebsiella pneumoniae
atgaaacggatattaattctaataacgttaatgatatttggtggcgaagctgctgcccaatgtaattatcctagtggcagcactaccaaacgtcagggattatcaatgactaacgtaaaaatcccaacagatacttccattccggtaggtagtatactacatgttcataagtttggtgttgacagaataaaaaactttacttgtactaaagcgcctaatgataaatacgttatcagcgtcgatgcgcctgttgtaacaggcgtcaccggtatccagggtaaaccggtatatgaaacaggtattgatggtattggtttccaagtctccgatattttacgcagtaaaaatggctctttggtcgcggctgaaagtagttcaacggatgtgccggtttccagttcatcagaaagatataactctactgtagtatggttgataaaaaccaaagaaacgattgacaccagcaaaatgacaatgggaaccagttcaatttccttctcggtaggaaatttaaacagcaacccggcccccgatcgattagtatacctaataaactccatttcaattactggcattaaataccgagacacttcctgcaatatttccacaccacgttcgcaggtcacactaaatcgtatcgataaaggaaaactcatgtcgatagctcgcggagcaaccacgccgtcacaaaaagacattgctatgaatgttagctgcccaaatgattcagtgggtaattctctcacctattggtttaaccctattggaggaataagtgcctcaggtgatggcattgttgataatattcttaccgggactgatgctgcgaaaaatgtgggagtgatattcaagctatcaggaaatccagtcactttttatgacatggataaatataagtataaaataaacagcagtagcgatcttaagaaaacaattaatctaaccgctgattattaccgtcagagtgataatactaacgatgttacgatgggttttgtaaaagggatgatagaggtcgtgatccaagaagagtaa

SEQ ID NO: 217158 - DNA, 1131 bp, Klebsiella pneumoniae
atgtgtcgggaaatcaccccgggtggcacctggatgctgccgacctttgtcagccaggtgatccccaggcagcagaaagaggcggataacctggctctgcgcacgttgtataacgcagtgttgaaagcgcaaaaaagcgatccagaattgtcgctgaataaggtcgccgagcagtttccgttaaccggccatattaccgacttcacgctcacttacgccgacgatacgctgatcacgaccagtaaaccgtccccggatatcagcgatgatgagtggcaggcgtttctgcgctcctcgattagcgcggattcagaaaacggcaaagtcagctttacccttatcgacctcgacggcgacggcaaacgcgacctcatcatcgacagctacgtgggcggcaccgggctcttcagctacaccggggtgctcaagcgaggtaatgatgattttgccgccgtcaacggcagcgacagtgataatggtgatgatttcgatgccggggtgcccggcgccctcttttccattaatggccgcggggctaaccagtggaaccactgggtcaaaatcaacggccaggtgtatgccctgtggtacaacggccagtttggcgaagataacctcgacctgctacgcccgttcagcaccaccagccagacgcccgcggtgacggttcgctatcgctatacgctgaacagcatccgctccccggagaaagaccagccgctgacccccagcctgagcgacggcgataaagcggacctgctgcgctcgctggaggtaatgcagggcagcctgctgaaagacagacccgccagcgacaacgacgcgccgatctgccccatcccgccgggcacctccgctgacgaggcggataactactacagcggcgtcgccgttaactatatctatgagacggtggcctatattccggtctggctgaacgggaagtgttatatcggcaccattttcagccatcatggcgcctatcgccacggcgtggatgcggaaattaccctgagctcgccgcgtgaggacgaggaggtcattggcgattatctcatctccggactacgccacgttatcgcaattaccagcggctggaaaacccgcgagggcgataacggcatgcagtga

SEQ ID NO: 217159 - DNA, 2778 bp, Klebsiella pneumoniae
atgaccagtaacgaacgtattttgcagccatttactttaccaaatggtaccgagctgaaaaaccgtttgctcatggcgccaatgaccacctgcaccggttatttcgatggtaccgtcaccagcgagctggtggagtactaccgcgcgcgcgccggaagcatcggtaccattattgtcgagtgctgctttattgatgactacggtctggccttcccgggcgcgatcggcattgataatgatgaaaaaattgccggcctggcgaaaatcgctgaggcgatcaaagccgagggttcaaaagcgattctgcagatctaccacggcggccgtatggtcgacccgcagctgatcggggggcgccagccggtggcgccgagcgctattgccgcgccgcgtgagggcgccgccatgccgcgggcgctgagcggagaagaagtggaagggatgatcgccaagtttggcgacggcgttcgtcgcgccattctcgccggtttcgacggggtcgaaattcacggcgccaacacctatctcattcagcagttctattcgccgaactccaaccagcgcgatgacgagtggggcggtagccgcgacaaccgcgcccgtttcccactggcggtgctggatattacccacaaaatggcccgccagtatgctgacgatgcctttatcatcggctatcgcttctcgccggaggagatggaggtcccggggatccgctttgacgacaccatgtatctgctggaaaagctggccgcccgcggtgtcgactatctgcacttctcggtgggtgccaccctgcgtccgtctatcgtcgataccagcgacccgacgccgctgatcgagaaatactgcgcgatgcgctctgacaccctcgcccaggtgccggtgatgggcgtcggcggggtggtgaacgccgctgatgccgagcagggcctcgatcatggttatgacctgatcgccgtgggccgcgcctgcatcgcctatccggactgggcgtcacgtatcgccgccggcgaagagctggagctgtttatcgacagcacccagcgtgaagcgctgcacattccggaaccgctatggcgtttctcgctggtggaagcgatgatccgcgacatgagcatgggcgacgccaaatttaaaccggggatgtttgttgagaccgtccacgatgacgccaatgagctggtgatcaacgtcagcctcgaaaatgaccatattgccgatatcgaactggcggcgagcccggtccagaccgtggaattcaccaccagcttcgaagagatccgcgaacgtattctcaccgccaataccccgcacgtcgatgccatttccggggccaccagccagagcgaggcggtgaaaaaagcggtcgccaaagcgatgctgaaatcgagtaaagcgctggcggcggaagagggcggcaatgacgccgcgccgaaaagctatgatgtggtggtagtcggcagcggcggcgccggtctggcggcagccattcaggcacacgacgaaggggccagcgtgctgatcgttgaaaaaatgccaaccatcggcgggaacaccatcaaggcttccgccgggatgaacgccgcggaaacccgcttccagcgcgtgaaaggtatcgaagacagtaaggagttgttctatcaggaaaccctgaagggcggccacaacaaaaacaacccgcagctgctgcgccgtttcgttgaaaacgcgccgcaagccattgagtggctggcggaccggggcattatgctcaacgacattaccaccaccggtgggatgagcattgaccgtacccaccgtccgcgcgacgggtcagcggtcggcggctatctgattagcggcctggtgcgcaacatcaccaaacgcggtattgacgtcctgctggatacctcggtggaagagatcctgatgcgcggggatgaggttagcggtgtacgtctgatcaacgacgaaaaagaggtcattgaagtacagaccaaaagcatcgtagtggccaccggcggcttcagcgctaacagcgcgatggtcgtgaagtatcgtcctgaccttgaaggcttcgtcaccactaaccacaaaggggctaccgggagcggtatcgcgttgctggaacgcatcggcgccggcaccgtggacatgggcgaaattcagattcacccgaccgtcgagcagcagacctcgtatctgatttccgaatcgattcgcggcggcggcgctattctcgttaaccagcaggggaaccgcttcttcaacgagatggagacccgcgataaagtctcggcggcgattatcgctctgccggaacactatgcttacatcgtcttcgacgagcatgtgcgggcgaaaaacaaagctgccgacgagtacatcgccaaaggcttcgtcaccagcgccagctcaccgcgggaactggcggagaaactggggatggattaccatgccttcctcgccaccctcgaatgctacaacggggcggtggaaaaacagcatgatgaacagtttggccggaccaccgcgctgcgcgcgccgattaacgaaggcccgttccacgccattcgcatcgcacccggggtgcaccacaccatgggcggcgtgaccattaataccgatggcgaagtgctgaatgtggcgcagcagccgattcgcggcgcctacgccgccggtgaagtggtgggcgggatccacggcggcaaccgtatcggcggtaacgcggtggcggatatcatcatcttcggtaccctcgcgggccatcaggcggcgaaacgtgccagaggataa

SEQ ID NO: 217160 - DNA, 921 bp, Klebsiella pneumoniae
atgagcagttcgctaaccgcgtcaatgcaggctcgtcgtcacccggagaccacccacatcgatcgcctcgccaccgccgatatgctggcgatgctgcatcaggatgataagcagatatcggaggcggtcggcgcctgtctgccggatatcgcccggctgattgatatcgccaccgcgacgataagccggggagggcgcctggtcattattggcgccggcgcttcgggccggacggccattgaggcggtcagcgactattcgccggaaggtaaacacgcgctggtggggctgattgccggtgggcagacggcggcgatggccgagcgggagactgcggcgaataattatgacctgggcgcctttgagctgcagtcgctggacttcagcaaccgcgatatgctgctggcgctgaccgtcagcggcaagacgccatgggtgtggggggcgatgcgccacgcctggtcgctgggcgccccgatagcggtcatcacccagcagccgaccagcgaggcggcgcagctggcggatatcattattgctccgcagaccgggccggaggcggtggcggggttagccaatccgaaggctcagttggcccagaggcagatcgtcaatatgctgacaaccggactcgccatccgtgacggtcgggtgtacagcaatttgcgggtggacgtgcaggctgacaattcgcactgggcggagcggcagatagcgattgtgatggcggccaccgattgcacgcgcagtgaagcaaaggccgccctggccagctgtcatcagcactgccgcaccgcgatcctgatgctgctcagcgggcttgacgcctggcacgcgcgggagctgctaaccaaacatcacgatcatctgcgtctcgccctgcgtgaagcccagcgtagcgctgtcactcccgcccagtaa

SEQ ID NO: 217161 - DNA, 1182 bp, Klebsiella pneumoniae
atgatggcggtttacaagcttagtacacgaataagatctaatgttccaacagattctttgctttatgacctgtgtatttatcgtatggactctagcaggaataaatattgcctgatagatgtaaagcaacagccattttctggaacttatgaaacacaaactcacatgacaggaaatgtagatgagtcactctcgacaatttatattatggaaatgaatctttaccgcaaaaccatgttgcatacggtctgtgtgacccccgttccattcactaaaatgtacacacttgaagcctttgcatcaggcaacgcctggtcttcggtaaagcgagagaacctctgttattttgagacaaaaggcacaatgaagcctgcaagcgagggtggggaaacaaaggagataagaattactattcctgaacgtccatttattgcgcgagagtatcccataggttcaccgcaagatccgtttaaaaaaaagaagatagaatcagaaattcaggacagattctataatctctcatatccttctcagtccggagcgagcgtgtgcggccctgctgcattcttttactgtctgcaacaagaccgtcctgatgtatatgcccaggccgccagggaactgtggcgatatggaaaaactaaaataggcgcactgacaatctcaccaggagagggatgtagacatccaacgggtatgttttttaccagtgatgggcagccaagaatattaggactagactggataacgcttgctggcctgagggattcagagaatgcagcgctgagcttcgatgctctcgattctccagtggcaggtatcaccatgtggcccacactagcggaatggtttgaaaaagcaggttatgaaatggtctttaataatgtaggaatcactcaagctggtgtccaaggaatccgagatttaaataggtatgtagcgcaaggctttaaagtcgtcacattaataaatgacggactgctcgaaggcagtacaaataacacaacgttacctacacactgggttgtatgggatagttctgtaacacaagacgataatggatatgttaatttaaaattattttcttggggccgttcaacttactggataaaaaagggaaaagatgtgcgtttttttctcaacagattctttgggggaatggttttcaagccattgaagtga

SEQ ID NO: 217162 - DNA, 927 bp, Klebsiella pneumoniae
atgcaagaggatattaaccaggagatcaccttccgcaagctatcggtctttatgatgtttatggcgaagggcaatatcgccagaaccgccgaagcgatgaaactcagcagcgtcagcgttcaccgcgcgctgcataccctggaagagggggtgggctgcccgctgtttgtccacaaagggcgcaacctgctgccgctgcaggcggcgtggacgctgcttgaatactgccaggatgtgataagtctgatgaaccgcgggctcgaggcgacgcgcaaggttgcaggcgtcggtcaggggcggttgcgcatcggtaccctctattctctgaccctggaaaccgttccgcgcatcattatggggatgaagctgcgtcgcccggagctggagctggacctgacgatgggttcaaatcagatgctgctggatatgctggaagacgatgccctcgatgccatcctgatcgccaccaacgaaggggagttcaataataccgctttcgacgtggtgccgctgtttgaggacgatatttttctcgccgccccggcgactgaacggctggatgcctcacggctcgccgatctgcgcgattacgccgaccgcaagtttgtttcgctggcggaggggttcgccacctatgccggattccgggaagcattccatatcgccggcttcgagccggagatcgtcacccgggtgaatgatatcttttcgatgataagcctggtgcaggctggcgtcggttttgccctgctgccggggcggatgaagaaagtgtatgagaaggatgtacagctgctaaagctggcggaaccctaccagatgcgccagctgatctctatcgtctattcgcaccatcgcgaacgcgatgccgacctgctggcgctggcggcggaaggacggatgtacgcccgcagtattaatcgctaa

SEQ ID NO: 217163 - DNA, 609 bp, Klebsiella pneumoniae
atgatgccgatcccaaatcgcgacgccgtcgcgttaagcgcccgcaccctgggcgcgctgttctcttatgcgccgaatagtgcggaaattgcgccgctggtcgccgccttccaggacgggagctggcagcagcagtggcccttcccggtcgcagccccgctggcgtcagggtttgccgcatcggctgaagaaacgttgccggaagcctggcagcgcctgtttatcgggccatgggccctgccggcgccgccctggggctctgtctggctggataaagagtctgtgctgtttggcgattccacgctggctctgcgccagtggatgcgcgagaacggtatcgcgctggaggccgatggcaacgaaccggaagatcatttcggcaccgtgctactcctggcggcatggttgtgcgaaacggagcaggatgcgttgttcgctcagctgctggcctggcacctgctgccgtggtccgggcgtttcctgagcgtctttgtcgaccatgccgcccaccccttctatcagacgctgggtcagctggcgcaggcgactctggcgcagtggcaggagaatctgccgatcgccgtggcgcaaaaaccgctctatcgttaa

SEQ ID NO: 217164 - DNA, 471 bp, Klebsiella pneumoniae; identical to SEQ ID NO: 138764

SEQ ID NO: 217165 - DNA, 939 bp, Klebsiella pneumoniae; identical to SEQ ID NO: 209830

SEQ ID NO: 217166 - DNA, 630 bp, Klebsiella pneumoniae
gtgaaaaagattgaaagaaagccgacccgggaccaaatcgcgcagatgattcgctaccagatcctttccggtgcgatgaaggctggggatgagctgacgcaagagagcatcgcggaacagctgggactttcacgtatgccggttagggaagcgctgcaatctcttgagcaggaagggtttctggtgcgcttgcctaaccggcatatgcaggtctccaccttggccgtggaggatgtgagccatatttttcgcgttattgcggtgatggccgccgaactctttgcccttgtgccggagaatcagggggaagtgctgcgcgcacgcgcgcaggagctggcgcgtccgggagagaatacgcgcgaactggcgttccatcagctgctgatttcctatcttgataatcgctatctggcgaaggcgtatcagcaatttttggacggttatatttcttatgtcattctttatctgaaagagaatggccaggaatcggctctgatactgagcgaactggccaacgccatcggcaatggcgaaggcggaaaaattgcccagacaacgcagcgttatttccttatgcttgcggaaattatgcgtcaacatatgaaggattgggaaagtgcagaagcctaa

SEQ ID NO: 217167 - DNA, 666 bp, Klebsiella pneumoniae
gtgcagaagcctaaattagggaaaattaagcttctttccgcgaaggagcaggtggcggcggtgttgcgtaaagcgatcctgtcgcgggatttagtggaagggcaggagattacccttgaagggattgcccgactggttggcgtttccagcatgccggtacgcgaagcgtttcaaattttagccgccgacggtctgattcaagtgcggccgaataaaggcgcggtggtgctggggattaatgagcagaccatccgcgaacattatgaaattcgcgccgtactggaaagtgaagccgtggcgaaagcttctcgtccagggaccgatatttcacgcatcgcccaggttcactatgccgcagagaaggcgctggcagacaataattctgctgaatattccgacctgaaccaggctttccatatggagatctggagcgcggcgggcaatgaaaaaatgaagatgctactctgcaacatgtggaacggtctgtcgatgggacataaagtcaccgaagaagagtatgccgttatctcaattcgcgaacataaagcgattttacaagcgcttgagcaacataacgaagcactggcccgccagcgaatgcatgaacatattattcgctcgatggaaaatatgctcactcgatacctgcccgataccaccacctga

SEQ ID NO: 217168 - DNA, 1269 bp, Klebsiella pneumoniae
atggaacctattaccatcaccctatgtttgctggtgttcgctatcatcatgtttgtctgggagaaagtgccactggcagtgacttccatggtggtttgtgtggcgttagtgctcaccggtgtattggatctcaagcaggcgtttgccggttttatcgacaggaacgtcattctttttgtcgccatgttcatcgttggcggggcgttatttgaaaccgggatggcaaacaaagtcggtggcgtgatcacccacttcgccaaaacggagaagcagctgatcttcatcattatggtggtggttggcgtaatgtccggttttctctccaataccggtacggcagccgttttgatcccggtcgttatcggtgtagccgccaaatcgggattcacccgttcgcgtctgctgatgccgctggtgtttgctgccgcgcttggcggcaacctgtcgctgattggcgcccccggtaacttgatcgcgcaatcggccttgcagaatatcggcagcggcttcggtttctttgagtatgcgaaagtgggcctgccgatgctggtctgcggcatcctctatttcctaaccatcggctataagtttctgcctaataactcgaacagtagtgaggtgggcagcattggcgaacagcgggattacagccacgttccgcgctggaagcagatcctgtccctggtggtgctgatcgccacgatcctcggcatgattttcgaaaaacagaccggtattagtctgactgtagccggctgcattggtgccctggtgctggtcatcaccggcgtgttgacggaaaaacaggcttataaagccattgattcgcaaactatttttatcttcggcggcaccctggcgctggctaaagcgctggaaatgaccggtgcgggtaagctggttgccgatcaggttatcggcctgctgggtaataactcctcaccgtttatgctgctggtagtggtctttgccctctccgtggtgatgaccaactttatgtctaataccgccaccgtcgcgttgctggtgccggtgagtttgtcgattgccgccggtatgggcgccgatccgcgtgcggtactgatggcgacggtaatcggtagctcctgcgcctatgcgacgccgatcgggatgcctgccaacatgatggtgctgtcggccgggggctataagttcgtcgattacgccaaatccggcattcctctaattatcgtttctaccattgtcagcctgatcctgctgccaatccttttcccttttcatccgtaa

SEQ ID NO: 217169 - DNA, 900 bp, Klebsiella pneumoniae
atgagcaaaagtgaacagatatcccgcatgaccgacattatggccaggttcgtgggatataccggcaaagtattgcctgatgacgtcacggcaaagctgcaagatctgcataagaaagagaccagtcaactggccgatgtgatcttcaccaccatgattgaaaaccaacgtctggcgaaagaactggatcgtccttcctgccaggacaccggcgtgatccagtttctagtggagtgcggcgccaacttcccgctgatcggcgagctggaagcgctgctgcgcgaatcggtaatcaaagctaccatcgactccccgctgcgtcataacagcgtggagacctttgatgaatacaacaccggcaaaaacgtcggcaaagggacgccgacggtattctgggagatcgttccgaattccgaccagtgcagcatctacacctatatggctggcggcggctgctcgctgccgggtaaagcgatggtattgatgccgggcgctggctatgaaggggtgactcgcttcgtgctggatgtgatgaccagctatggcctgaatgcctgcccgccgctgctggttggcgttggggtggcgacgtctgtagaaaccgcggcgctgctgtcgaagaaagcgttgatgcgtccgattggttcgcacaatgacaacgaacgtgcggcattgctggaaaaaatgctcgaagatggcatcaacaaaattggccttggcccgcagggaatgtccggcaatacctccgtgatgggcgtcaatatcgaaaataccgcacgccacccttccactattggcgtggcggtcaacgtcggctgctggtcgcaccgtaaagggcatatcgttttcgataaagacctgaactacaccattacgtctcacacaggagtggcattctga

SEQ ID NO: 217170 - DNA, 618 bp, Klebsiella pneumoniae
atgactaaaaaaatactcactacgcccattaaagatgaagatttagcggatattaaagcgggcgatattatttatctcaacggccatattgtgacctgccgtgatgtggctcatcgtcgcttaattgagggcggacgtgaattaccggtaaacgttgctggtggcgcgatattacatgccgggcccattgtgcgcccgattaaaggtacggaagataaatttgaaatggtctccgttgggccaaccaccagtatgcgcatggaaaaatttgaaaaagaatttattgctaagaccggtgtgaaattaatcgtcggcaaaggcggtatgggcaaaggaaccgaagagggctgtatggaacataaagccttgcactgtgtgttccctgccggctgcgcggtagtcgccgcggtctgtgtggaagagattgaagatgcgcaatggcgtgatttaggcatgccagaaacgttatgggtttgccgggtgaaagagttcgggccgttaattgtatcgatcgatactcacggcaataacctgtttgagcagaataaagtgatctttaatcagcgcaaagaaattgtcgccgatgaaatctgcaaacacgtgagctttattaaataa

SEQ ID NO: 217171 - DNA, 537 bp, Klebsiella pneumoniae
gtggaaaatataaataacgatgtaccacagcatcaaccttaccgaaatgaaaaggtatttaattccggtaagacagcacttgagctcaatttttctgagacaaatggcagtgtgaatcttatccttgcggggcctttagtatcgaagccgggaagttttgactggactggtcaaaaggccttttcaacaaagctgagtgatgatgaagtgatcaccttgtgtatggcgtttcttcgccttactcatgaggctgttctgaaacataaaaaaacaaagcaccataataagcaagtctacaaaaacgtaaaagttacttttgatggtaaatccacagcaatgatggaggggggagttgtagctatcaacaaagacgagagagacattaattttatacataaaattattattgatcctgccgcttgccttcgcttaggtcttttcctcttgtccgtcatactggcccgaaatccaggggtcccatctgacgcggttctaacgtgcatgcgtcttaatgcaaatgctcaactacaaaagtaa

SEQ ID NO: 217172 - DNA, 288 bp, Klebsiella pneumoniae; identical to SEQ ID NO: 182627

SEQ ID NO: 217173 - DNA, 153 bp, Klebsiella pneumoniae
atgacaaatatcattctgtgtgatgtaactgccagcgtcagcgaacttaaaaacgatccggtggccagcgccggtgccagctgcggctacccggtcgctattattgacagcaaccggcctgtttttttattgtgtgcccgcgattctgtatga

SEQ ID NO: 217174 - DNA, 147 bp, Klebsiella pneumoniae
atggttctggacgggatcaacaactcagggctgggtaaagtatggtttgccggtagaggaattgccccggaatggccgatgaaacgtgagatgccttcatcggcatataccacccgcaggaaggatctgccggttgcccgtttctga

SEQ ID NO: 217175 - DNA, 366 bp, Klebsiella pneumoniae
atgattgatgttttaggtccagagaagcgcaggcggcgaagtgttcaggaaaaaatcgccattgttcagcagagctttgaacccggaatgaccgtgtcgctggtcgcccgtcagcatggtgttgctgccagtcagctgttcctgtggcgtaagcaatatcaggaaggcagtctcactgctgttgccgctggtgaacaggttgtacccgcgtcggagctggcatctgcgatgaagcagattaaagagctgcagcgcctgttgggcaagaaaaccatggaaaacgagctgctgaaagaagccgttgaatatggccgacaaaaaaagtggatagcgcacgtgcccttgttgccggaggatggcgaatag

SEQ ID NO: 217176 - DNA, 657 bp, Klebsiella pneumoniae
atggcggtgatcaatgccaaacgtgtataccgcatcatgcgtcagaatgcgctgctgcttgagcgtaaaccggaaataccgccatcgaagcgggcgcatacagggaaagtggccgttggagaaagtaaccagcggtggtgctctgacggcttcgggttcagctgtgataacggtgaaaaactgcgggtcacgttcgctctggactgttgcgatcgcgaggcactttactgggcggccagtaacggtggatatgacagtgaaaccgtgcaggacgtcatgctgggtgccgtggagcgtcgtttcggtaacagcctgccgacatccccagttgagcggctgacagactacggttcagcctaccgttcttatcagacgcgtcagttcgccagaatggtaggactggagcctgaacatacggcggtacgtagcccggaaagcaacgggatggcagagagcttcgtgaaaacgatgaagcgcgattacatcagcatcatgccgaaacccgacgggttaacagcggtaaagaaccttgcggaggccttcgaacattacaacgaatggcatccgcatagtgcactggggtatcgttcgccacgggaatatctgcggcggcgaaccagtaatgggttaagtgataaaaagtgtatggaaatatag

SEQ ID NO: 217177 - DNA, 408 bp, Klebsiella pneumoniae; identical to SEQ ID NO: 23438

SEQ ID NO: 217178 - DNA, 759 bp, Klebsiella pneumoniae
atgagccggattctaaccgggatttgtgaaactgatccggccaggaggttatacaaagtggccgtcagtaggggaaacacttttctgtctgcaaaagaacgtttccgtgtacaggtctgtttcaaaaatgccataacacatccagatgaagatcggctgctggccgagctgttgactgttcatcacttcctggctgacacctctattttatggcatatggagcaaaaaacttatgcatgcaccacgacatgggccaccacgtccacatggctgccagaaatatatcagcgtcaggccagcacgcccaatgtggtaaagactatcaaatttatgcacgcccggtttccaggccttaaaacggttgcagaaacaaatgagcagggttacgaacaggcgcttaccagtgtggattttgaaattccttactggccggtgctgccgaaattcgaatctgatataggaacgatacaggtaacgattgccgggatgatccgttacacagaaacgatgagcaataaagattgtaaaacccctctcgacttaatgataaaaagttttaagtcagggttgatcccgatagagaaaatgccgttgagtaagactgaaaggcttatgcctctgaaaatcaacaccgctggtaagatatttacacacgcaacatggccgagatgtcgttacattttcgtaccggatgaggcgggaataatgaaactggttaacgtggtcaaattaggattaaagcctctggaggaaaaatga

SEQ ID NO: 217179 - DNA, 324 bp, Klebsiella pneumoniae
atgacttacgcgattttcttgttagtaactgctgtttgtgcattcggattaaattatctgacaaacaaaatctgttccggtacgggtttgattaaccagagtggaggctctaatgtacacgccttacggtgtatcacatcgttcctccttctccttgtctcactctggcttcctgtcaaacctgccgtgatcaatctggcagtagagtttgctgcactggtgaattttattgcatctgtcactctctataccgttgcaaatttccgggaaaaacggagattaaaaaaacaaagaaaagaagaaaaagctgctcaaaaaggataa

SEQ ID NO: 217180 - DNA, 936 bp, Klebsiella pneumoniae; identical to SEQ ID NO: 177827

SEQ ID NO: 217181 - DNA, 1401 bp, Klebsiella pneumoniae; identical to SEQ ID NO: 177831

SEQ ID NO: 217182 - DNA, 483 bp, Klebsiella pneumoniae; identical to SEQ ID NO: 177832

SEQ ID NO: 217183 - DNA, 1002 bp, Klebsiella pneumoniae
atggctgaatcacgcattattcgtgcggcggcagcccagattgcaccggaccttcatgaggccagcaggacgctggcccgggttctggaggcaatagacgaggctgcggagcagggggcggagatcatcgtttttccggagacgtttgttccctactacccctacttctcgtttattaccccggcgatcagcgcgggagccgcccatctcaagctgtatgaacaggccgtcgtggtgccggggccgatcacctgtgccgtcggcgagcgcgcgcgtctgcgcggcatcgtggtcgtcctgggggtaaacgaacgcgatcgcggcacgctctacaatacccagctggttttcgatgccagcggcgaactggtgctcaagcggcgcaagatcacgccgacctaccatgaacgcatgatctgggggcagggcgacggcgccgggctgaaggtggtggataccgttgtcgggcgggtgggcgccctggcgtgctgggaacactacaacccgctggcgcgctatagcctgatgacgcagcacgaagagatccactgcagccagtttcccggctcgctggtcggccccattttcgccgagcagatggaggtcacgattcgccaccatgctctggagtccggctgctttgtcatcaatgccaccggctggctgagcgaagagcagatcgctgaactgaccccggatcccgccctgcagaaggggctgcggggcggttgtcacaccgccatcatctcgccggagggccgtcatctggcgccgccgctgacccagggcgaaggaatactgattgccgatttggatatggcgctgattaccaaacgcaaacggatgatggattcggtcggccactacgctcgcccggaattactgagcctgcggctggataacacgccggcccgctatgtcgtgacgcgtgaaacagaacccgaaaccggaggaggtcgcgatgcagaacataccgtccacgcgccagcagctgattactga

SEQ ID NO: 217184 - DNA, 1110 bp, Klebsiella pneumoniae
atgcagaacataccgtccacgcgccagcagctgattactgagctgctgactcagggggttaacgtcattaacccgcagcaggagcacgtcagccgccacggcggcgccgggccatcggatcatcaggcgatgaacattgacggcgtgacggtgatggtgccgatatacacccacgccgcccatcgctcgccgtggcaggtgaagcacgaggcgtccggcgccgcccggctgtttaacaacgccatcccggtgcgggagattagcttcgccagcaaacccaggttttacgatcggcaaacggcggacgggatcccctattcgcacattgccaccctgcacggcaccgacgtgctggcgaccaccatcctacagacctgcattcgctatgagaaccgggcgaaggcctgccagttctgcgccatcggccagtcgctggccgccgggcgcaccattgcccggaaaacgccggagcagctggccgaagtggcgagggcggcggtggagctggacggggtaaaacacatggtgatgaccaccggcacgccgtcgggcagcgaccgcggcgcgcgcattctggtggaaagcgccctcgccattaaagccgcggtggacctgccgctgcaggggcagtgcgagccgccgggggacgcgaaatggtttacgcggatgaaagaggccggtatcgatgcgctggggatgcacctagaggcggtgacgccggaggtccgcgcgcgcatcatgccgggcaaagcgcaggtcagcgtcgagcagtaccttgaggccttcgccgacgcggtagcggtcttcgggcgcgggcaggtcagcacctatattcttgccggcctgggggacacgccggaggccattctgtcgctatcgcaaacgctgattggtctgggcgtctatccgttcgtcgtgccctttgtgccgatcagcggtacgccgctggagcaccatccggcgccggacagccggtttatgtcctcgattttacaacctctgggccagatgctgaaccaggcgcatttgcgctccagcgatatcaaagccggctgcggccgctgcggcgcctgctcgtcgctctccagctttgaacaggccacggcctaa

SEQ ID NO: 217185 - DNA, 564 bp, Klebsiella pneumoniae; identical to SEQ ID NO: 177835

SEQ ID NO: 217186 - DNA, 963 bp, Klebsiella pneumoniae; identical to SEQ ID NO: 177836

SEQ ID NO: 217187 - DNA, 291 bp, Klebsiella pneumoniae; identical to SEQ ID NO: 177837

SEQ ID NO: 217188 - DNA, 1266 bp, Klebsiella pneumoniae; identical to SEQ ID NO: 177838

SEQ ID NO: 217189 - DNA, 1671 bp, Klebsiella pneumoniae
atgcgaacagtgcagagtgagcacgatccctttctgcgcgacttctggcgggaagagtccgcgcggctttactgggaaacggattttaccgaggtggtggaaagccttgacggcagcccgcgctgccgctggtttacgggcgggcgcaccaatctcagcttcaacgccctggaccgccatttagcagagaagggggagaagtgcgccattattcatcgcgactatctcgggcaaacgcaccggcttagctatcgcgagctttggcagcaggtgaataccctcagcagcatgatgcaaagctggggcgtgaagccgggggaccgggtactcatcgccctgccgatgacgccgctggtggccatcgctatgctggcgtgcgcgcgcattggcgcggtgcatgtcgtgctctattccgccgtcacccatgaggctctgatgcagcgcatcgccgtcagccagccggtgctgctgttgcatagccgcgagcagcgaggccgtaaggaactgcccgttatcgccgggcggatggccggactgcgggtggtagatacgcacagccgggcgtttggagagctgttggcacgacatcgtggcagcgtcgtgccctgtacctggcttgcggcctccgcgccttcgcatctgctgtttacgtcggggactacaggaacgccgaaagggatcgtccgcgacacgggcggttacgccgtggcgctgctggccagccttgcacatctctttcggctgcgggacgacgagattttctttactaccgccgacgccggctgggtgaccgggcacagctacgggatctatgggccgctgctggcggggctgacgacggtgctctgcgaggttaactcgccgggagaatactggtggcagatggtagaaaccctcggcatcacccggatgctgaccattgccggggcgatccgcatggcccggcggcagggtaagccgcgcgccgatctgacctcgctgcgcacgctctatctcgccggcgagccgctggataacgccaccgatgagtgggtggccgcacagctgagggtgccctgcgagaaccattactggcagaccgaatccggctggccgctgcttgccggctccggtagagcgctctcgccggtattcacgcgcgcggctgaggtggttcatcccgccagcgggaaaacctgcgcgccgggagagacgggcatgctggtgattaacagtacgcttggcccgggcgggatgtcgacgttgtggcagaatgatatccagcacgaccagtactactggtcgtatcggcagcgacagtggcgctatgctacccacgattgcgcgataagggttggtgagcggattattattcaggggcggatggatgacgtgatgaatatcggcggcaagcgcatcgccaccgcagagatagaaaatgccctgatggggcttgagggggttgtcgaggtggttgccgccgggacggcgcactacctgctgggggaaatggtggcgctgtttgtggtcaccgatatcgccgaccctgcgcagcaggccgcgctcaaaaaaaacatttgcgcccggctggtggctagatgcggtcgcttcgccgtgccgcggcgcatccacatcacctcggcactgcctaaaaccttctccgggaaggtgatgcgccgcatactggcttag

SEQ ID NO: 217190 - DNA, 279 bp, Klebsiella pneumoniae; identical to SEQ ID NO: 182631

SEQ ID NO: 217191 - DNA, 303 bp, Klebsiella pneumoniae
atggctatgtcaggaatgcaccacgacatggctatgccggaacactgcgaacaaaacctcaccatggttcatcccatgatggcgggacacgctatgtccccgatggaagaaattgcctgtgggtactgtcatttactgattcatctgcctttcgtccagttcgtgctgacgataatgctctggctgatgttactctgcgttcatctgtctcttcctctacaggccattttctcaccgattttccgcacctgggcacctcagcgtgcccgcgcccctcctgctgcttttctttctgcgaattaa

SEQ ID NO: 217192 - DNA, 2064 bp, Klebsiella pneumoniae
atgaaaactcaacgctttgtacgtacccctcttgcagttctgattatggcattccagacgaatgccgttaatgctcaggagagtcacgatcacgcaactatggaggatgattccgttatggttgttacggctcctgcctcatcgccgctggaagttgtcacgtccccaaaaagacctcgtcagcctgtcccggcaagtgatggttccgattacctgaaaaccatccccggtttttcacagatacgggccggtggcacgaatggcgacccggttttccgcggtatgttcggatcgcgtctgcgtatcctgaccaataatggcgaaatgctgggggcctgcccggcccgaatggatgcccccagctcttatatctccccggaaagttttgaccttctgacgttgaccaaaggaccgcaaacggtcctttgggggccgggtaactctgcagggacaattcgtttcgatcgcgagcagccgcgttttgataaacccggcgtacagggaaatgccagcctgcttgctgcctcgaacaatcgctgggatgagaatgcggatatcagcctgggtagcgaagatggatatttgcgcctcatgggtaacaaatcacgttccgatgactataaggatggtaatggcgatcgcgtcccctcaaaatgggataaatggaacggcgatatggcgctcggctggacgcctgataaagataccctgattgaactgacggcagggaaaggggacggggaatcgcgttatgcgggtcgcagtatggacggctcccagttcaggcgagaaagcctgggtgccaggttcgaaaaatcaaatatcggggaggtattccagaaatttgaagcgaatgtctattacaactacgccgaccacattatggataactattcacttcgttcacccgacggtggtatgtcaggaggtatgtcggaaggaatgacagacagcggcatgggtgactcaatggatgcaggcatgtcaatggatatgaatatgccaatggcgatggaagtcgacagacgtactgttggcggtcgtatgatgggcacatgggagtgggcggatgtggagctgagaagcggcgccgatacccagctgaatacccatcgtaataaaatggataacagctgggtcaaagatgcccgtttccatgattatggtctcttcagtgaactcacctggaatacctctgattcaagcaagttagtggggggcgctcgccttgatcgtgtcctcgtggataatttttccgggaaaggctcctcagagcgaacggacacccttcctgccgggtttgtacgtttcgagcataccctcgcagaaatgccgctaatgctgtatgccgggcttgggtatacagaacgtttcccggactactgggaactgttttcccccacctacgggcctgacggcacctcagacgcgtttgataaagtgaaaactgaaaaaacgacccagcttgatattggcgcacagtattccggcaaacgtacaaacgcctgggtttctgcttatgtcggtcacgtaaatgattttatccttttccgctacgatcccaacgatgcatatatcagccaggtcgataacatcaacgccaccatcatgggaggcgaagccggtgtcagctataagctgaccgacagctggaaaaccgacgccagtctggcctattcctggggcaggaacatggaagatggtaaaccccttccgcaaatgcctcctctcgaagcccgtctgggattatcctgggaaagtggtaactggagcagtaccgggctggtacgtctggtcagtagccagcatcgggtggcgattaatgaaggtaatgtggtgggcaaagattttgacagcagcgccggttttgccgtggtttccgccaatgccgcttaccgcgtgaacaagtactttaaagtgagcgccggtgtcgataatcttctggacaaggattacagcgagcatctcaacctggcgggtaacagtagctttggctactccgccaatacctccgttaacgaaccaggaagaacattctggggcaaaattaatgtgacattctga

SEQ ID NO: 217193 - DNA, 261 bp, Klebsiella pneumoniae; identical to SEQ ID NO: 182634

SEQ ID NO: 217194 - DNA, 357 bp, Klebsiella pneumoniae
atgccgatgttcaggagaggacgggtactgattgagcctgcaccggaaaaatacagcgactacgcaaccggcgccatccctcccgccacgcagccactggcagaagacccggttttgaagccagtattcgaaaacaaagacgtcattctgcgcgcggggggtatcagctcgctggaggccgagctggagcgtcgttttgaatgccagtatccgcacggctcgtggcacagcgaaaattttacgctgttccggcatgagcctggcagcatccgcctttgctgggcctgcgataacctggtgcgtgatcagtacacagagacagtaataatgccgatgtcagtctttaccaccacttag

SEQ ID NO: 217195 - DNA, 378 bp, Klebsiella pneumoniae
atgaaactgactttaccatttccaccgagcgtaaatagttactggcgcgccccgagcaagggaccgctgaaaggcaggcatctggtaagcgagacagggcgcaagttccagcaggcagcgagagcggcgattattgagcaactgcgggccgttccccggccatcctctgatctggccgaggttcacatagtgttgtatccgccggatcagcgccgtcgggatatcgataactacaacaaagcgctgttcgatgccctgactctaacaggcgtctgggaagacgacagtcaggttaagcgcatgctggtggagtgggggaacatcgtgaagaaagggaaagtagaaatcaccatccgacgttttcgtgcagttgcctga

SEQ ID NO: 217196 - DNA, 810 bp, Klebsiella pneumoniae
atgagcaagccatttctcaaatgggcaggtggaaagtatacccagttggctgacctgttcgcgcatattccggcagggaaactcctgatagaaccattcgttggcggtgggtcggtattcttgaacagcgaaaagcacgcagattacctgctggcggacgttaacccggacctgattaatctgtatcagatgttagcggtcgtgccggatgaagtggaattaaaggcccgctggatgtttgagcacatgcggtcaccagatggctatgagctgatccgttccgagttcaacgcacagacgctggatgctactgagcgcgcagctgcattcctgtatctcaaccggcattgcttcaatggcctgatgcgctacaaccaggcgaacaagttcaatgtgggctggggaggctacaaggccccgtattacccgatggatgagatgaaagccttcgcggctatggcgcataactgcgtattcatgaccgctgactaccgccgaactatcagcctggccgggaaaggggatgtggtttactgcgatccgccttacgaaccgatgccgggaacagccggattcactgcctacgccgctggtggttttagctgggagaaccaggtggacctggcgaagcaatgcgtatctgcctttcaccgtggcgctcgggtagtgatttctaactcatctgcaccgaaggttctcgacctgtaccgggagcatggttttaacctgcaattcatcaacgcgcgccgttcgatctcctgcaaaagcagtacgcgggaagtcgcaaaagacgttgtagcgatcctttaa

SEQ ID NO: 217197 - DNA, 969 bp, Klebsiella pneumoniae
atgagcactaaattaacaggatacgtctgggacgcttgtgcatcttcggggatgaagctatccagcgtggcaatcatggcgcgcctggctgacttcagcaacgatgagggtgtttgctggccttctattgcgaccatatcccgtcagattggcgctggtgaaagtactgtcagaacggcgatagctgcacttgagaaagaggggtggctcactcgcacgcagcgccgcaacggcaaccgtaatgcatcgaacgtctaccagctcaacgtttccaaactacagaaagcggcattttctcacctgtcagtttctgacacatcaaaatctgacgcgtcaaaatctgacgcgtcaaaatctgatgcgtcaaaaattgacccctcaaaatttgatgcgtcggaatccatcaaaaaaaccagttttgacccgtcagaatctggtggggatccgtcagtaaaatcaactactgatccatcagatataaatccttcttgtccggacgcttcgcaaccggacgaacagggctctgctgatgaatttctgtcacgacatcctgacgcggtggtgtacagcgctgcaaagcggcagtggggcagccaggacgatttaacctgcgccgagttcatttggggaaaaattatcagcatgtacgaactggctgctgaaagtgatggtgaggtagttcgccctaaagaaccaaactggaccgcatgggcgaatgaggttcgcctgatggtgatgcaggacgggagaacccataaacaaatttgctcacttttcaagcgcgccaacaaagattcgttctggtgtaaaaacgtactcagcccgtcgaagcttcgggaaaaatgggatgagctgtcgttaaaactatctgctccactcaatagctcccgccaggaggcgtccatttcgcgagccagcttcgatggggttgattactcattgccagaaaactcggggttccgcacatga

SEQ ID NO: 217198 - DNA, 462 bp, Klebsiella pneumoniae
atggtagagccaaacctcaaagaagccgtcaaagcgatgtgcaaagcatatccaggtgggcgcgaagcaatggctggcgcactgggaatgacggtgacgcagtttaacaacaacctttacgagaaaaacggctgtcgtttcttcgaagtcagcgagctggaagcgatggaggacatttccaatacgtcgttactggctgattacttcgctcgccgtcgtggtgctctgctggtggatgttccgcacctggaagagctggatcgcgtggacttgtttagccgggcaatgcgtacctctgccgccagaggtcaggttgaccagattatcgaacaggcacttgaagatggggtaatcgaaaggcatgaggcagaagaaatcatggtgcatcaccgccgccacctggcagctcgggaagaagagattgccgcaattatcacgttattttcacgcaaaaagaagtga

SEQ ID NO: 217199 - DNA, 243 bp, Klebsiella pneumoniae
atgcaatcaccattaagaaaattgcgaaaatcgcatggcatgaccttgttgcacgttgcaaccggggtacaggtagatcctgcaacgttgagccgcattgaaagatgcgagcaagtcccatctgtcgaactggcggagagattagccaagttctttagaggagaaataagcgaattacacattttgtacccaagtcgctatcagacagatgacgtaccaaatgcaaataatcgtactgcttaa

SEQ ID NO: 217200 - DNA, 696 bp, Klebsiella pneumoniae
atgaaaataggatctcgcatacgacaacttcgcttagcgaagaacattaaaatcgcagagcttgcagaagctgtgggcgttgatgctgccaatatttccaggcttgaaactggtaaacaaaagcagttttcagaacagacacttaaccgacttgctcaagctttaagcgtaagtgtacctgacctatttacctctgacgaaaatgataatactgtacatataaacagtaaaaaatatgcatctcccgtaaaggatgtggatgtatacagagtcgaggtacttgatgtgagcgcaagcgccggggcaggacatatacacggtagcgacgtcatagatgtcattcatgctatcgagttcagcaatgatcaggcattggcaatgtttggtggcaggactccatctggagtaaaggtcatcaacgttcgcggtgatagcatggcctcaacgattgagcccggcgacctaatatttgtggacgtaactatcaatgagttcgatggggatgggatttacgtctttggttttgatggaaaagtttatgttaaacgcctgcagatgataccagaccaactgctagtcatctctgataaccctcgttatagagaatggaatataaccaaagagaatgaacacagattctatatctacggaaaggttttaataagccagtctcagtcctttaaacggcatggatag

SEQ ID NO: 217201 - DNA, 300 bp, Klebsiella pneumoniae
atggctaagacagcaaatcaactgattaaacaggcgtacgaaatagccaaaactatgccaccagcacaggcagcaatcatcaaggaactggctaccgtcctcgatgtttcgaatgtagctctgcgccagacgcgcaccgaacgtgacgcccttctcgcagaggtcaaatcatgggcgaaagagtgtgatcgtctgaccgagcgacacaccaagaagcgcacaaatctgcatgttctagaggctatgcgcgatttgaaagcaatttgccccaccagcttccgtaacgtggaggctctctga

SEQ ID NO: 217202 - DNA, 786 bp, Klebsiella pneumoniae
atggctaaagactcaaagcttgtatatggcgcgagtggcaaaacgaacgttttgacgttcgaacctgaaaacctgcacctggttaccgacaaaacgcacccgctttacgatgaacgtatccacctgcctatcagcgaggcaatggtgctgaacatcatggaccagggcgttcttgagccgattatcgtctggaaagacccggagacagggctgtcttgtgtagtcgatggtcgccagcgtgtgcgccatacactggaagccaacaagcgactgttgaaagagggtaaagaaccgttactggttccagcagtagctaaacgtggctccgccgttcgcatggcgcaggcgatggtaagtgctaacgaaatccgccaggcagatacgccactgggccgagcaaagaaaatggctgatgctctggagcgcgggcacgacgaggacgatttagcgctgatgtttggcgtgagtgtccagaccgtacgcgcaactctgtcactgctggatgccacccaggctgttcgcgatgcagttgagtccggaacggtcaccgttacccaggcgcgtcagctggcatcgcttaaacctgaagagcagcgggagaaagtatctgaaatcgaagcggcaactgctggcacaaccggccatgaaaaagcccggcgtcagcgtcagatcctcggcgaggcaaagccgcgcctgaaaacccgcaaagaaatcacaaaagccctggaatcagccgagggtgagtatgcaagcgcacttcgttgggtgcttggggaggaatcataa

SEQ ID NO: 217203 - DNA, 1074 bp, Klebsiella pneumoniae
atgagcaaaataggcgatcatttctttgaatttccggcgtcgcgtggaactcagggggattcaattgtcctgatgctgacagtacctgcgcggacactaacgcgagtcctcgccagcgataactacggcgacacccttgatcgatctcagcgagaactgaaccccgccagggcgaaaaagttttatcagtatctcgttgaagcatacgagaataaggaaccattcattattccgccgcttgtaggtaactgcgactcgtatgttgaattcgaagagttcggaaacactaatgtcggggtggcccgtttcccgatggatgcagagattaaattgtttgatggtcaacatcgcgcagcagggattgctgagtattgccgcaccattgatgaacctatccatgttccgatgatgcttactctccagttgccactgaagacgcggcagcagtttttctcggacattaacaacaatgtttcgaagccatctgcggctatcaacatggcctataacgggcgcgataagaacgcgcaggagatggtcagctttatcagttcacacgacgtcttttctgaagtcaccgattttgagcataacgtcgttcctgcgaaaagtgataagtgggtcagcttcaaagcccttagtgatgccacggcaaaattttcaggttccggctcaaaggatgatcttgaagggttgtggaatgcgtggctaatgctgactggtttagatgatattcgccaaggtacgaaccaggcagagtacaaacgcgagtatatccagttccatgctgtgatgatcaacgccttcggctacacagtgcagcggttaagcgaaggtcggggaattcgcggggtcacgctgatgattgaggacctggtaatgaataccggcattgccgagcgtgaagattttttcctcatttcatcatgggacgggatttgtgccagctgtaagaaagccaggccaacagtcattgcgaatgtatctgctcaaaaggcggctgcagcacgtctgatggatgccatcgtgaataaaactttgtctgttagtcgcagtaaggaggccagccaatga

SEQ ID NO: 217204 - DNA, 708 bp, Klebsiella pneumoniae
atgaccagtaaattaaccagagaaactctggacgatgagactctagcagagctgatcgcttttcgccgtagccgcgtagagtattgccagaaggaaggtcttccatatcagaaggcgctgcatgattcgatgatgctggcacttgaagagctacaggaacgccgcaaggctgatagagagccggtggtgaaaaaagtggcctgctggtcttgccaaaatgaggttgagatttcggccattggtgattgtgatgggaactgtccaaaatgcggcacgcgaattcatctcgatgaagagccatacattgcacctctgtccgctccggaccgtgaccaggtacgccgagagcacgccgagtggtcacaggctaccttcggcaatgtcggcccggttggcccgctgaagcacctcagcaaagaagcactggaagccgctgatcagcctggcgacttgtcggaatgggctgatatgcagttcctgctgtgggacgcccagcgccgtgtcggtatcactgatgagcagattacgcaggcaatgattgaaaagttggcggtgaacaaaaaacgcgaatggccggagccaaaagacggggagccaaggctgcatatcaaagaacaacctcgtaaaaaagtagaccgctgcgatgtttgtactgaaggggctcgtggcgggtgtggtacatgtatttttaacggtaattttgaatga

SEQ ID NO: 217205 - DNA, 369 bp, Klebsiella pneumoniae
atgagtataaatcaaaatggaataataaaagagattaaaattggagagcggacagcagtagaatctacaacaattttaattccgccacagactacaaaggttgaattgcatcttgatgcgtctaaaaaaatcatcattatcttttcttatgataatgaagataaaacagtaagatatacaggctctgcagatgattcaggtgcaatatacacaatgacactgattaattttaataatgtattaggtgaagggattatggagccatttcctttttataaaagtaatggcattcaatattatatctcactattggtgatgacaaatggagataagagcagatcacttatctatacgattgtgaaggattag

SEQ ID NO: 217206 - DNA, 1170 bp, Klebsiella pneumoniae
gtggcccttagtgataccaaacttcgtagcatcaatgctaagccatacagcggcgcagctgaggtcacagatggtgacgggctgagtgtacgcataactcctacaggcacgatcacattccagtttcgttatcgctggaacgggaaacccgttcgcctctccattggccgctatccagctatgtctctcaaggaggcgcgcgtagtcgtcggtgagatgcgcgaattgtacctcaagggactaaacccgaaaaattattttgccaaagaagatggtgagctgactcttaaagaatgcctggatcagtggtggagcaagtatgttgaaacgctgaagccgaacactcagacgctgtacaagtcagttgtgtacaacacgatgtacacagaattcccggacgctccggtagtaaatattcctgtttctgcatgggtgcgtttctttgataagcaggaaaagaagaacagcaaaaaggccagggtgcttcttctacagctacgttccgtcatgaactggtgtatcagccgccagttgatcccatcgtgcgaagtcctgaagcttagcgttaagaccattggcaaaaaacctgatgtaggaagccgggttctgacgtataccgagctggctaagatttggttagctcttgaaaacaacaaaatcgttacgtctaacaaggttcttcatcagttgcttttgctgtggggagctaggctgtcagagctgcgccttgctactgccagcgagttcaacatggatgatcttatctggacgactcctgcagagcattccaagatgggtaacgttatccgtcgcccggtgtttgaccaggtgaaaccttttgttgaaaggctcctcaacgctggaaatgatgttctgtttcccggccaggaactggacaagcctatggatcgctcatcagctaatctctatatgaaaaagttaagggataaaattgatataccagaatggcgaacacatgacttcaggcgctcgctggtgactaatttatcaggggaaggggttatgccacacgtcactgaaaagatgctggggcacgaactgggaggagttatggcggtgtataacaaacacgattggttagttgaacaaaaagatgcctatgagttatatgctgataagattttctggcatattaagcgccttatctag

SEQ ID NO: 217207 - DNA, 882 bp, Klebsiella pneumoniae
atgaatattacagaacggaatatctggaagctaaataatttaccgccaatggagtattgctctctggcgcgggcgcaaaaattattaaactgcgaactggaagacattcttcactggcatgatataggcgcaatcaatctatgtcttaagcttaacccaacgccgggaatattaaaaatcgccgtcctctcccatcaggaaaaagaggtaaccagcgcgtttaatccatttacctcagtcgaggcaggagaaacagtctggtcgcatcactcccatatccgcagcattctgcggcttgaaggcgatattccgacgatggaaaccctgcgcggaaatacggtaacccagttcaacgtaaaggtatttgcttcagggctctggcatccacactgtcggaacctaatggcgctgctggaggcgccagatgatattcttttcgaaaaccgcctcagcatgatgctgccggataaaccatttgtttattgtcatttcattccagaggaagacgaacgcccctcgatatcattgaaccgcatctatatcaccagccaggccattgagaaaatatacgcccacagtattagcgcccggcctatggacgtgacgaaaaatccgctactggatcaaacccgttacatccagcaggaattaaccgtcctgccgcaaagtgaggtattgctggaatttatccattatcttattcagtcccatactgtatttaatgagaagttgcagagtatggctgagccagacaagactcagctctttcatcacgtgctggaaaggcttaaggaagaaggcatgcttatagagaatgcccagcccgatgaaggcgatatcggcagcgaagccagccgtgagtcgcagttcgccggcgagtaa

SEQ ID NO: 217208 - DNA, 459 bp, Klebsiella pneumoniae
atgtccgctcacgatcgttatcttcagcgcgcattagtgctggcaaaacaaaacattgctgacggtgggcgccccttcggcgccgtgctggtgcggaatgatgagattgtcgctgaaagcgtcaatacctttcatctgagcggtgacccaacggcgcatgccgaactgaacgccgttcgcgatcttgccgccagactgggaagcgcggtgttgcgcgaatgcgtcatctatgccagcggacaaccttgccctatgtgcctgagcgcgctctatttaaccggcgtgcgggaagtgtttttcgccaatagcaatcaggacggggagccttttcagctctcgaccgccgcgatttatcagcagctgcagcagccgctggcccagcaaacgctgccgatccatcatcgcccgcagccggagggaactgaactttatcagcgctgggcggaacggcagtcatga

SEQ ID NO: 217209 - DNA, 813 bp, Klebsiella pneumoniae
gtgctggatgttcatcccagtggtttttacgcctggtttaagcaaccgtattctcagcgccaccaggtagatctgagactgacgggacagatcaaacagttctggctggagtccggttgcgtttatggttatcgcaagatccatctggacttgcgggatagcgggcaacagtgcggagtgaacagagtctggcgactgatgaatcgtgccgggataaaggctcaggtcgggtaccggagcccgcgggcacgcaaaggcgaggccaatatcgtatcgcccaacaggctccagcgacagttcaatccggatgctccggataagcgttgggtaacggacataacctacatcaggacccacgaaggctggctgtatcttgccgtggttgttgatctgttctcacgcaaaattatcggctggtcaatgcaatcccggatgacaaaggacattgtcctgaacgcactgctgatggctgtatggcggcgtaatccccaaaaaccggtgctggttcactcggaccagggcagtcagtacacaagccatgagtggcagtcgtttctgaaatcacacggcttggaggggagtatgagccgtcgcggtaactgtcacgataatgcggttgcagaaagctttttccagttgctgaaacgcgaacggataaagaaaaagatctacggaacgcgggaagaagcccgcagcgatatttttgattacatcgaaatgttttataacagtaagcgtcggcatggttcaagcaatcagatgtcaccgacagaatatgaaaaccagtattatcaacggctcggaagtgtctag

SEQ ID NO: 217210 - DNA, 279 bp, Klebsiella pneumoniae
atgagcggtaagcgttatcccgaagagtttaaaattgaagcagtcaaacaggttgttgatcgtggttattctggttccagcgttgcaacacgtctcgatatcaccacccacagcctttacgcctggataaagaaatacggtccggattcttccactaataaagaacagtcagatgctcaggccgagatccgccgtctccagaaagagctgaagcgggttactgacgaacgggatatattaaaaaaagccgcggcgtacttcgcaaagctgtccgactga

SEQ ID NO: 217211 - DNA, 519 bp, Klebsiella pneumoniae
atgcttagcgatttcaacaccgaacagcaaactctaattgagaaattatcattagttgatgatctagaagcttgggcaacttataccagacatcttgaaaaagaagagaagaaaaaaatttacgagtgtgccagacgtttgtggataaaacgtaaattacttgatggtagtttgcttttacatcctaatgttcgaagtgatttaattgagcgagagtatagaccattatctattcataagaaaatgatttgggctagtgtattagtctcttataagggtgaagatagtaaggcgtattttaaaagaataaaagggaagataattaaaaaatatggtctcaaatggtggaaagatgttgatagtagaataaagccagcttatgcagcgcagcaacgtattttaaagcgtgttggtgctcttggtccgggggtaaaatacttttcctcacgaagttcgtttgtaggcagcatgttaaatgatgagcttgatgcagcattaagaatgattccagaggattaa

SEQ ID NO: 217212 - DNA, 1284 bp, Klebsiella pneumoniae
atggcaggaaaacaagagggaaggccactttcgtttaaagcggtagaaatgatgaagccaggcgacaaagataaggctgatgtaggcgaaaatcgtggcttacgtgtctcctgtggtgcaactggggttaagtcttttttctatcgttacacaagtcctctgactggcaagctagctcaggttaaaattggtaacttcccgcagacttctctcgccgctgcacgtcttaaactccacgaattaaagctcctccgacaggaaggtcggtgccctgcgactgaactcaaaaaagataagctccagcgtgcgattgaagctgaacaagctaagatccctgaattgaccgtacagggattagttgaattgtatcttactgaacgtattgaggatcgtaaaacgaaggatgggaaggtcattcccggtgccagaaagctgaaagggcaggctgaggttcgtcgtactctctatggtgacgctgttaaaagcttaggaacccgaaatgctgctgagattacgcgtcaggatgtcatcaatttaattaatggcattgtagcccgaggtgcaaccgtacaggctggtaatgttctgagggagctttcactcgcatatgaatttgcaattggccttggacgttttaatgataattttgcgaatccggcgctgttagcaaaatccagcttaccacagaccagaattaagctcacaaacggacgaggaacacgagtactgagcgaggacgagcttgctaaattccttaaatggcttccgggttcggcttacacaccaacgatcaaaaacgtgttacgtctgactctctggactgggtgtcgtactggtgaagtctgcaatatggcatggaaggatgttgatcttgaaaaaggcactattcatctgcgagaaactaaaacagggatagagcgctacgtacagttatctgatcaggcaatcgactttctcaaagtactacggcttacctctgacaaatatctattcccttcgcaagccacaaagaagccaattcagcagaagtatctaactgaaaactcatggcgtttacgtgaaagcggtcaaatgcttgatatacctcattggacgccgcacgatctgcgtcgtacagtacgaacggggttatctcgtttgcagtgtccaaatgagatagcagaggccgtattggggcatacacgtggcggcgttgaaggtatttataatctgtataagtatgattctgagtgccggaagtggttgcaggtgtgggcggattatttggatgacctgataaaataa

SEQ ID NO: 217213 - DNA, 2562 bp, Klebsiella pneumoniae
atgagtacaatagaaaatttagactcgcacaccccaatgatgcagcagtatctcaagctaaaggcgcaacatcctgacattctgctgttttaccggatgggggatttttacgagctattttatgacgatgcgaaacgcgcctcgcagctgctcgatatctcgctgaccaagcgcggcgcctccgcgggcgaaccgatacccatggccggcatcccccaccacgccgtagagaactacctcgccaaactggtcaatcagggcgagtcggtggccatttgcgagcagattggcgacccggccaccaccaaggggccggtcgagcgtaaagtggtgcgtatcgtcaccccgggcaccattagcgatgaagcgctgctgcaggagcgccaggacaacctgctggccgccatctggcaggacagcaaaggcttcggctacgcgacgctggatatcagctccgggcgctttcgtctgagcgaaccggccgaccgcgaaaccatggcggcagagctgcagcgcaccaacccggcggaactgctttatgcggaagattttgccgaatcgtcgctgatcgagggccgccgcggtctgcgccgtcgcccgctgtgggaatttgaaatcgacaccgcgcgccagcagctaaacctgcagttcggcacccgcgatctggtcggcttcggcgtcgaaaacgccccgcgcggcctgtgcgccgccggctgcctgctgcagtatgtcaaagacacccagcgtacctcgctgccgcacatccgctccatcaccatggaacgccagcaggatagcatcattatggatgccgccacccgccgtaacctcgagatcacccagaatctggccggcggcaccgacaacaccctggcctcggtactcgactgtacggtgacgccgatgggtagccggatgctcaagcgctggctgcatatgccggtccgcgataccgccgtgctggtggagcgccagcagaccatcggcgcgctgcaggagcgctataccgagctgcagccggtgctgcgccaggtcggcgatctggagcgtattctggcgcgtctggcgctgcgtaccgcccggccgcgcgatcttgcccgcatgcgtcatgccctgcagcaactgcctctgctgcgtgagctgctggccgacgttgacagtcagccggtgcaaaaattgcgcgagaaaatgggcgagttcaccgaactgcgcgaactgctggagcgcgcggtgatcgacgccccgccggtgttggtccgcgacggcggggtcatcgccccgggctatagcgaagagctggacgagtggcgggcgctggccgatggcgccaccgattatctcgataagctggagatccgcgagcgcgagcggctgggcctcgataccctgaaagtcggctacaacgccgtccacggctactacatccagatcagccgcggccagagccacctcgcgccgatccactacgtgcgccgccagacgctgaaaaacgccgaacgctacattattcctgagctgaaggaatacgaagataaggtgctgacctccaagggcaaagcgctggcgctggaaaaacagctttatgacgaactgttcgacctgctgctgccgcatctcgccgatctgcaaaccagcgccagcgcgctggccgagctggacgtgctggtcaacctggcggaacgcgcggaaaccctgaactactgctgcccgacctttagcgataagccaggcattcgcatcaacgaaggccgccatccggtggtcgagcaggtgctgaaagagccgtttatcgctaacccgctgcagctggcgccgcagcggcggatgctgatcattaccgggccgaacatgggcggtaaaagtacctatatgcgccagaccgcgctgattgcgctgctggcctatatcggcagttacgtcccggcgcagaaggtggagatcgggcccatcgatcgcatctttacccgcgtcggcgcggcggatgacctggccagcggccgctcgacctttatggtggagatgactgaaaccgccaatatcctgcacaacgctaccgaacacagcctggtgctgatggatgagattggccgcggcacgtccacctacgacgggctatcgctggcgtgggcctgtgcggaaaatctggccaacaaaatcaaggcgctgacgctgttcgccacccactacttcgagctcacccagctgccggagaaaatggaaggcgtcgccaacgtccacctcgacgcgctggagcacggcgataccatcgcctttatgcacagcgtgcaggacggcgcggccagcaagagctatggcctggcggtcgccgcgctggcgggggtgccgaaagaggtgatcaagcgcgcgcggcagaaactgcgcgagctggagagtatctcgcccaacgcggcggcgacccaggtcgacggcacgcagatgtcgctactcgccgccccggaagagacctcgcctgcggttgaggcgctggagaatcttgatccggactccctgaccccgcgtcaggcgctggagtggatctaccgtctgaaaagcctggtctag

SEQ ID NO: 217214 - DNA, 153 bp, Klebsiella pneumoniae; identical to SEQ ID NO: 136010

SEQ ID NO: 217215 - DNA, 888 bp, Klebsiella pneumoniae
atgcttaatcttcagcgcgtgaccatgtttatcgccgtggtagatgccggcagtttcaccctggccgcagcggcgctggggcagaccaaggcggtggtcagctttaacgtacggcagctggaaaatgagctgggggtgacgctgctgctgcgttcgacgcggcgtttgcggctcactgacgccggggtgctgttctatcagcgcggggtagcgctcctgaacgcggcggaaaatctccaggatgaggtgcgggccagccatagcggcttaagcggggagctacggatcaccaccacgccggagtatggcgagcaggttatcattccagcgctggccgcgttcgcccgtcgtcatccggcgctgcgggtgcgccacgtctcctcctcccatcatgccgacctcatttcagaacgatttgacgtggcgatacgcctcggtacgctggccgattcccgctatcgggcgacgcggatagccagtttcgcgatcctgcccgtcgcctctccgacctggctggcaagccatccggtgcagacgctgtccgatctggcgcaagctgagtggattattcacgagcgcctgccgacgccgctgcgctggcagctgcgcacggatcaccagacagaggtggatttcgcgatagccagcgcgccgcggttttctgctgatagcgctacggcgctgatgagctttgctctggcgggatgcggcgtcgccttgctgcccgcatggctggtagccaaaaaggtggcgcagcgggagctggtgccgctcctgccggaataccatttcccacagcagggcgtgtatgccctttatcccgactcgcagcatttgccgacccgggtgcgggcatttattgacttcctgcgcgagaaggtcggttaa

SEQ ID NO: 217216 - DNA, 1152 bp, Klebsiella pneumoniae
atgtgtatcgataaaccagtagtatttataagctatgcaagtcaagataaagaaagagtgcttggttactacgatgcacttgaagataattcctatgaactttggatggattgcaaaaaactaataggaggacaagattgggatttcgaaattaggaagaatttttcaaaagctgatgtagtaatagcgttcataacaagtaatagttataaaaaaagagggtatgttcaaagagagttaaaattagcgttgaaaaatttagaagaaaaactaagagatgacatttatcttattccagtgttacttgatggggtaagcgtccccgaggaattaaagcatatccattgtattcatgacaaaggtgagcaagagaatattaatagtttaaagatcggcattcattcaaaattaaaaaacactaataatgaatttacgcttaatttagaatcaggcgatattagttatcgcttagagaatcataaggaattaagggaaggcttacccggttatgaggttaacaatcagttgattaaattaacctctaaaacttacaaacatctagacgacatttcatcggtaattaattcggatttaacaaaaattactttaagctatagaaaatctctattggaacaggattcatcactattcaattatgcagatcaatatttcctcaggacaaacacaattgaatcaaactgcactgtagtaaatataattggtcgcgttatatcaattttatacagtcattattacattggtgctagagctgcacatgggaatatttacttttcttcttacaattttattttagatataccaacagcaataaattcattagaagagatatttattaaccctgagagatcacttttaaagctacaagaaaaactgacgcaaaatttaatcagcacaatatatgaaggagaaataagtgatgatttgatgatttggatgaaaaatggcatccgtgattgggcaaacctaaataatttcatctttcaggatgatgggctaactatatatttcagcccttatgctgtcgcaggatacgcctatggtccacaggaagtaaaaataccctatgatgaaatatatgaagacattaagaaaatatatatatccttcctagatattccaatgccaaactga

SEQ ID NO: 217217 - DNA, 1248 bp, Klebsiella pneumoniae
atgaaaagaacggtgttttattcatggcaatcagaccttccatctaaacaaaatcgaaacctaatcgaagatgcactaaccagagctcttcgctcgatacggcgagatgaaacagaaacaatcgacccggtcttagatagggatacatcaggaactccaggatcacctgcgattagcgataccatttttagaaaaatatccgcagctgatatatttattgcggatgtttcaattatcaatcacacaaacactgaaaaaaagacatctaaccctaatgttttaattgaattagggtttgctatttctcaacttggctgggatagaattattttagtccagaactcttatttcggtggacctgaggaactgcctttcgacttaagaggtagacgagtagtaacatataattatgggccagaacatgaagataaagcgggagtacgtggattacttcaaggtcggtttgaaagttcattgaggacagcacttactgattcgagctatggtactttacctacgggattaaatgcacctatatggtggggagaatggttaaaccacaagcctggaaggaattttggaggtcgactctttattcgagaaacaacatcgaccggattcatatttgacctaactgtccatagcggttctcacttaggtcacttaacttctgaagccatatttacatcaagagacattgcatattcaagaataaaaaacggagacagcgaagaactcggagaaataactttcagacgaactatcaatgaaggaaaaagattcttatcgatagatgagactgccagttgctcctactaccgtggtatgggagtaacttttagtggcgagtttgagtggtctagcgatcatctatttgatcttggctttttaaatgaattagagcttgaaagaatttacaacactttgggtaattattattttgagtttaaatcaactatggagggaatcggggagagtgataacttagatgattttgaggctaaggtatttcatggcggagtaagaggttgctatacatctttagaagggattgtaatgtgtggtagagaaggtgatatttggatagcgtatataaatgatgaagatgtgaaatacttcactaatcgtttagactggaaaaatagacttcctcgcacaattgagcattggcacgaaagattcaacaatttggctatcacatatgttaatgaagtaaatgtattaccagccaatccatttgaaagctaa

SEQ ID NO: 217218 - DNA, 528 bp, Klebsiella pneumoniae
atgaccaccctcacgctacagcaggcctttgaggcctctcagaataacaaaaccgcctgggtgaaccgtaaagccgaactcgcggccgcagagcaagaatatcaggaacaggtgctggccggggatgaccgtattccgggcaggatgcagacactgcgcgatattatcgatgtcaaaaaatgggagataaatcaggccgccgggcgctatatccgctcccatgacgcggtacagcacatcagtatccgcaaccggctgaacgactttatgcaggcgcacgggacagagctggccgccacgctcgccctggaactgatgggactcagccagcagcccacactcctgaccggccatgcgctcgaccgttcggcgcattacctgcgcgaagcgctgtccgtgtggctgagtaccggtgaagaaattaattatacctcggaagacagcgatattttaacagccatcggattcaggcctgtcgcggcttcgagagtgataatcaggaaaaatacccccccgcacagagcctga

SEQ ID NO: 217219 - DNA, 210 bp, Klebsiella pneumoniae
atgatacactgtccgttctgcaaaaagtcggcgcatgcccgtacctcccgctatctgtcggagaacgtcaaacagcgctatcaccagtgcaccaatattgagtgctcggcgacgtttcacaccatcgaagccattgacgatggttatctggcccccggcggagaaaacgccgcctgtcgcggagccggtcacacccccggccccccgtaa

SEQ ID NO: 217220 - DNA, 240 bp, Klebsiella pneumoniae
atgactggcgcagtcgtttccgcaccctgcgcggcagtctcactcctgaaacgaaagctgagcacagcaggcgtatcgccagtcgcgagctggtcgacgagttcaccggccggattcccggccgtcgcgcttccacatatggacctcgacgctgccagcgcgcccggccagcttaaagtctggcaggagaaaatccgtcagcgcgaggctgacctgaaagcgcgggggctgctgccatga

SEQ ID NO: 217221 - DNA, 306 bp, Klebsiella pneumoniae
gtgatttataaagatttctaccatttactgttggagtctttttcccaaccagttgagctgtacactgagtcaagaaatgtaccttttacgctgtatgttgaagaacaaaaactgtttgttcgaaatggaaaagataataccagccgtattggccccaaagaagtcgcagcatttgttgagcggtttgaagaaaatggaagcatgttagctaaagactaccaggatgtgactttcaaagcctcctatttattggctgcaatgaaatatatcactttaaaaaacgcgctgaatcctggcaataaatag

SEQ ID NO: 217222 - DNA, 1329 bp, Klebsiella pneumoniae
atgatgatccaggtccgggaatatgctctgctgacttgtgataacgctcaaccagccagtatggatttgggaatagtttctgaggcaaccttttcctggcttgagcaattgcaacaccagtggcgtggttcttcgcaaattctcagccgggaaggaaagcggtttttgcgtttgggaaactatgtcggttatctacaatccccgaatggcgagtcaattgaaattctgcctaaaaccacacttgaagctccagctgaggtagtccctctacgtcaacttttacgccgaatgctaagcgcctctttagggattacgcctcgtgaggcaaatcaggctgcattgcaacgtagcgatcagcctctacatgaatggataatcagtgagtttttgcggcatcttgctgatttagtacgcaaaggaattcgtttcgattatcacctcaatgaggatgaacatagtgcgttcatccgcggtcaattgaatgtcactgcgcaaatgagaatgcctccgggcagaggcgctcgttttcatgtgcgctatgccgagttctcccctcagcgcatcgagaaccgtctgctacggacggctttggattggtcgcttaaaatggccaggcaaggacagagctggaggcaggcaaattctctaagccatcaactggaagacatattgcctatttgtggcagtacaacacagctaatgaggcaatggagcgatggtaaatatctcttcggatatcgcgctataaaaccgtggtgccagctcattcttgaacagatgaatccagattttcaatttggatcgcatcagggaatctctttgttatttcctatggagaagttatatgagggctgggtaggatgcggtctggctggggcattgcatcacgatcaccggctcatagaacaaaccaagagccagtacttgttggagcatgtacctgttggtgaaatgtcttctcaacgatggttcttgcttaaaccagactttcttatcaccggcgggcagacggtggttctggatgctaaatggaaactattagatagcagggctgatgatagccagagaaagtatgaaatcagccagcctgacttgtaccaaatgttcgcctatggacaaaagtatcttcgcgggaaaggaaatatgatgctcatttatccgcgtcatcagtactttgccacatcattgccggtattccgtttcgatgaagatttgactctatggtgtgtgccctttgatcttgaaaagggtaaattagtgaacggtgagtggcaaacttctttccactgttttccctgtgaagaggcagtaacggcgcatagcgattaa

SEQ ID NO: 217223 - DNA, 1983 bp, Klebsiella pneumoniae
atgctgaattctctcgagatataccaggcgttgaatgaattgggttatcgtcttgagtctggaaaattcgagccaagctatgcttctgagcatgcgctcgggaatggaaagtatctgtatgtcaaacgccgtcaggacggtgtggttaacaagagcccattggttcttgcaccagaaaccctggccttaaaagcggaaatcgatcgcatttcgggtatccactgcctgtgggaaaaagtaaaaagcaccagctaccgccgttatccgaaagataatggtacatcccaatatggtttcgcggctgatgttgagtcagttgaagcgttgcaggcgctggtggctttgctgggtggtcaaccagctataactccccaaaccggactaataagagacaacgaaaataaggaacaatcattaatgtatcccttaaaccaaattctcttcgggccccccggcacaggtaaaacctactctacgaccgaaatggcagtaaaaatcgccgataatgcgtggtaccaacaggctacgcgcgaacatcatggcaatgacttacgggagttggtaaaagaacgctataagttgttggtagaaaagcagcgcattatgtttaccaccttccaccagagcttctcctatgaagattttatcgaagggatccgcgcgaccactgatgaaacatcgggtgcgcttcgctacgaagtagtggatggtatttttaaacagctgtgcctgaatgctgaagttaaaacacgtggtagttcaaaccagtcattgtccttgaatgggagacggatttggaaaatgtctctcgggaatacgcttgacggagaagattatatttttgatgaatgccttgcgaataattatattctattaggttggggggataatcttgattttagtggctgcacaacagctgctgatatccgactgcgcatcgatgaagcgagtgataatctggttgagcgaagtgaatacatgctgactgcggtcaatatgtttaaaaacatcatgcaaaatggtgacatagttattatttccgatggcaaccataaatttagagccattgccgagatcgctggcgattatcaattcttacctaatgatgaacgcgtcggctatcatcaaatgcgtaaagtcaactggctacgaacctattctccgagtttaccgaaagaacagctttttttaaaagcactttcacagatgacattatatgagttgagggatacctcaattgacagggaaaaactgtctcaactactggctccggttgaaacaactgataatcaagcattgccgcacgtgctcatcatcgatgaaataaatcgcggtaatattgcccgcatttttggtgaattaattactctgctggaacccgataagcgacagggtgccgaagatgcccgcactttagtattaccttattctaagcagctgttttccgtgcctaaaaatgtctatgtaattggcactatgaatactgctgataagtcgttaattcagatggatctggcgttaaggcgccgttttagctttacagaaatacctgcaaaaccggagttgttagtagggatcactgcgtatggcgttgatgccgcacagttgctaacgcgtattaatcagcgtatcgaagcgctactggatagtgagcatatgattggtcatgcttactttatgccactaaagaaattagacaataacgccgaccgcgaagcctgccttgccagcatcttccatgacaaaatcattcccttgctgagagagtatttctttgatgattatgagcgtatcggttgggtgcttaatgactcggtaaaagcgaaagaaaaccgttttattctgttacagcagtcagcacaactaccatcactttctgcactatttccgaaagatattgcggatagtttgtctgacagacgctttcgtatcaatgaacatgctttcgcgtcggcagaagcttatcagggtattgtggcatga

SEQ ID NO: 217224 - DNA, 3249 bp, Klebsiella pneumoniae
atgagcatggatagcaccaaagagctgattttccagaatgacataatcgctcaaatggaagcaaaaggctggatgtgtggcaaaaccgacggctacgatcgcgaacgtgcgctgtattcccaggatgcattgacctttgtgcagaccacgcagccgcaggagtgggagaagtttgccaaaatttatcctaccgataccgagcgtcatttccttgatgctctggtggcacagctaaaaaaggcggatatcaacgctaccgatatgctttcacgcacttacggcacgctcggcgtgctgcgtcatggtatcaaaagccataacgcccgtttttccctgtgccagtttaagccggaacataacctcaatccggaaaccctgactcgctataaacagaatatctgccgcatcgtaccggagctgatttacagcccgaatgcgtcgaacgccgcatttgaagaaacgggtataaaagcgaaaaaatggcgtatcgacctagtgttgttcgtcaatggcttgccggtagcgacgctggaactgaagtctgaatttaagcagacggtgcaaaacgccatcacgcaatataagaaaacgcgtttgcccaaagatcctggcaccaataagcctgagccgctgctgacctttaaacgcggggcgctggtgcactttgccgtcagccagtatgaagtgtttatggccaccaaactcgatggcgataaaaccttcttcctgccgtttaacaaaggcacccatgacggcggcgcggggaatgatattccggaagatgccaacgactacgccaccacctatctgtggaaagaggtgctgcagccggacaacctgctgaaaattctcgccagttttgtgcatctgcaaatcgtcgaaaaagaaaacgccgttggcctgaagtacaagagcgagagcctgattttcccgcgctaccatcagtgggatgtggtgaataagctgatcaccgccgccacggtggaagggaccggcaataaatatctgatccagcacagcgcggggtcgggcaaatcgaactccatcgcctggacggcccaccaactttcccgcctgtacgatgaaaatggcgagaagcagttccactcggtgattgtggtgacagaccgcaccgtgcttgacgatcagctgcaagacaccatctatcagtttgagcatcaggatggcgtggtcgggcgtatcaataacaaagaaggcgatggctcaaaatcggagaagctggccagcgcgctggaaaactcgcagccaatcattatcgtcactattcagaccttcccatttgtcctgaaggcgattgaaaacagtgtcagcctcaagcagcgcaaatacgcggtaatcgccgatgaagcgcactcctcgcagagcggctctaccgcgcgtcagctgaaagaagtgctgatgaccgaagaaacggatgacgatgtggagatgtcttcagaagatattctggacgccaccgtcgccgcgcgtaaaggcagcaacaacctcaactattacgccttcaccgccacgccaaaagccaaaacgctggagctgtttggccgtcgcccgaatccgcaagaaccggcttcaaaaaccaataaacctgaagcgttccacgtttactccatgcgtcaggccatcgaagaaggctttattcttgatgtcctgaagaactacaccaactacaaagtggcgtataagctgctgcaaaagctggacgatcctgaccgggaagtggacagcaaaaaagcgaagatcaaactaaaccagtgggtctcgctgcacgatcataacgtgtcgcagaaagtgaaggtgatcgttgagcacttccgcaagcatgtaatgcacttactggctggtcaggcgaaagcgatggtggtgaccagttcacgtaaagcggcggtacgctacaagctggcgttcgataaatatatcgccgagcaaaagtacgacaagatcagcgccatggtggccttctccggggaagtggaattccatgaagatgaccacaacagccttgcgctgcttaaccagaagttcaccgagatcaatatgaaccccggactgaagggccgggatatgcgtaaagcgtttgataccgacgactaccaggtaatgctggtggctaacaaattccagaccggttttgaccagcccaagctgtgcgccatgtatgtggataaaaagctgggcggcgtggagtgtgtacagacgctgtcgcgcctgaaccgtacctatccagggaaggcgcagtccggaacctttgtgctcgatttctacaacgaacctgaagagattttgggtgctttccagccgtactaccagacagcggaactgaccgatgtcagcgatccgcaactcgtctttgagctttatgaaaaactgcgcaccagcggcattttcctgtggaacgaagtggagcaattctgcgaggcgttttttagcaaaaacaaatccaacgcggccattagcaatatctgcaaacctgcggtggagcgctggaagcatcgctacacctcggcgattgatgcgtatgtgctggctaaagagatgtttgaacgcacgaagaagaccggcgacgttgtgctgatcaccaatgcggaaaatacctttaaggactgcgagaaagaaaaaagtaagctggatatcttcaagaaggatctcggtagctttgtccgcttttacgagtttatgtcgcaaatagtcgattacgacgacaaagacctggaaaagctgagcctgtttgcccgtcatctgcgtccgttgctgcatgaacaacgtatcgaagaagatgagattgatttaagcaatgtggagatgagccattatcgcctgtcgaaacttcacgagcagcacctgaagctacaggaagatgcagcggaatacaaaatcaccccagggaatgatgttggaacggccaagccgaaggataagaaagaagagtttctgtcgaatatcctggctcgactgaatgagctgtttgtcaccgataatctcaccgataaagacatgatcaactatgccttcgcggtgcgcgacaagctgtcagaaaaccaggcggtgatgacccagattgctaacaatacgcgcgagcaggcgatgctgggcgatttcccaaaagccattgatgatgccgtcatggacagcaatgaggcacagcaggagatgatggtgcaatatctctctaaccctgaactggccaagggctttgctcgggtggtgtttgatatgttgaaaggggcttaa

SEQ ID NO: 217225 - DNA, 1374 bp, Klebsiella pneumoniae
atggctaagtataaggcgtatccggagtataaggattctggggttgaatggctgggagagattcccactcactggatttgtacccaagtaaaatatgggtacgatattactttagggaaaatgcttcagaagaacaaatcatcctcaaaggatgaattaaaaccatatcttaaagcacagaatatacaaccaacaggtattgatctgagcgttgttgataatatgtggttttctcctgatgagaaaagtaaattacttttgaaaaacaatgatgttttaattagtgaaggcggtgatgttggtcgctctgcactttggcagggacaactagatgagtgttacatacaaaacgccattaatagagcaagagcgatcaatggtaattcgccatattttctcaattactggatgatttatttaaaatccgctgatttcatcaatacattatgtaataaagctacaattgctcattacacagctgagaaagttgaaacatcaccactattattacctgattctgatgaacaattacacatcagtttattcctcgctcacgaaaccgcaaaaatcgacaacctgatcgagaagcaacagcaacttattgagctactaaaagaaaagcgtcaggccgtgattagccatgctgtcaccaaagggctaaaccctgatgtgccgatgaaagattctggtattgagtggttgggagaagtaccggagcattgggtgggtagttctttaaaatatatggcgaaagtaattgactgcaaacatattacagctgaattctctgatgtaggtattcctgttgctagtattagtgaagtaaaaagctggtttgtagatttatctaccgcgaaattaacaaacgaaaaagactatttattacttattgatggcggtaggaaacctgtttgcggcgatataatatacagtagaaatgcgactgtgggagaggctgcaattgtcagtgacaacatgcctgattttgcaatggggcaggatgtttgcttaataaaaactaatcaaaaagttattccggagtttattctttacactttaaaatctgatatcattgcccaacagttaaatcttgcaatgataggctccacatttaaacgaattaatgtggatgatattaggaatttttcgatcgccataccacctaaaaatgagcaagtactcattgtcaaaacgctaatggggaaactggaaaaatacgatcgaatcatatcaaatgccgttgacgtaatcacatatatgcaggaacgccgcactgccctgatctccgctgcagtcaccggaaaaatcgacgttcgcgactgggttgcccccgacacgcagaacgttgaggagccacaggaggcaaccgcatga

SEQ ID NO: 217226 - DNA, 2361 bp, Klebsiella pneumoniae
atgactaacactaacttttctcaaacggctgcgtttatctggtcggtggccgatctgctgcgcggtgatttcaaacagtctcagtacgggcgcgtgatcctgcccttcacgctgctgcgtcgtcttgagtgtgtgttagcggaaaccaaagatgcggtggtggcgaaatatgatgaattaaaaaccagcacactgccggaagatgccaaagagaagtttctgctgcgcgccagcgagctttccttcttcaacacctcgaagatggatcttggcaagatggggcagaacgacatcaaagccaacctggaaagctacgtacaggcgttctccccggatgcccgtgagatcttcgaacacttcaaattcagcgagtttgtcggcttgctggaagatgccaacctgctgtttaaagtggtgaagaaattcgccaccaccgatttgagcccgaaagcgatttccaactatgaaatgggcctggtgtttgaagagcttatccgtcgtttcgcggaaagctccaacgagaccgccggtgagcacttcaccccccgcgatatcgtgcgtctgaccacttcgctggtgtttatggaagatgatgaagccctgacgcggccaggtatcatccgcaccatttacgatccgacggccgggaccggcggtttcctctcttcaggcatggaatatgtgcacgagctaaaccctaacgcggtgatgcgtgcctttggccaggagctgaacccggaatcctacgcaatctgtaaagccgatatgctgatcaaaggtcaggacgtcagccgtattaagctggggaacaccctctctaacgaccaattgccgctggatcagttcgactacatgctctctaacccaccgtttggcgtggactggaagaagattgagggcgagatcaacgacgaacatacgcagaaaggctttaacggccgctttggcccgggcctgccgcgtgtatccgacggctcgctgctgttcctgatgcacctgatcagcaaaatgcgcgacaaccacaatgtggatggcaccgtgagcaacggcgggcgtatcgggattatccttaacggttcgccactgtttaccggtggtgcgggcagcggtgagagcgaaatccgtcgctacattctggaagccgatttgctggaaggtatcgtcgcgctgccaacggacatgttctacaacaccggcattgccacctacgtctggatcctctccaacaaaaaagcgcctgagcgtaaaggcaaagtacagctgattgatggcaccaacctgtgcggcaagatgcgtaaatcgctgggttccaagcgcaacctgatgggcgatgacgatatcaaattgattacgcagaccttcggtgattttaaggtagtggatgccacccccctggaagaactggggctggaaaaagccgccgagcaaaaatctaatcgtggtcgtcagtccgcaactactaaaaccgaagcgccgaaaaccttcgccagtaaaatctttaacagcaccgactttggctatcgccgcctgaccattgaacgcccgctgcggttatccgctcaggtgacggatgaagcgattgcgactctgcgctttgcgccgaagccgtttaacgcgccgatggaacgcctgtatgaagagttcgcgtcccagtggcaggaggacacctatggtgatttctccgagctggaagccgaagcgcgcgccatcatcaaagctgaatttgccgagctgaaagagaagcagatcaaagacctgctcgactgcaaactgtggctggcacagcgcgccttaatggaaaaagcgcagcagattcaggcagctctgggtgcgcaggcgggtggcaaaacgctggtgagcaatgacttcaaccagttccagctgactctgaaaggggccattaaaacggctggcgtaaagctggatgcgaaagagaacaaacagtttatcgatgctatcaccaccaaaaacccggatgccgagccggtggtgaagaaggtgctgaaagaagccgctcagccgctgtacggtgcatttgaatacaaaggtaaagtggtggagttcgaacaggacggagacctgcgcgataacgagaacgtgccgctgaacccggcagtatctaccagcgacctgattgaaaactacttcaaagcggaagtactgccgcatgtgaatgacgcgtggatcaacgccgataagcgcgatgcgaaagatggcgaggtggggattgtcggttatgaaattccgtttaaccgccatttctatgtctatcagccgccgcgcccactggaagagattgatgccgatctggacgcagtcagcgccgagattatgaagctgctacaggaggtacattcctga

SEQ ID NO: 217227 - DNA, 3516 bp, Klebsiella pneumoniae
atggacagtaatacacagggattcacttcatattggcgtaataccttagcagatgccgagtctggaaaaggggcatttgagcgtagtaaggatgaatcatttacgaaatggacgaacgtcgatagggggaggttgggtgaagatattgtggaatcattcttcaatggtgaagacacccaggtcaagaccgtcgaggtgctgttacggccagaggtatggatccgcctgttaaagcatggcaaggcgcggactgctggtgctcctgatattgttacacctttggttaccgctgcactcctcaaccgcgaaggctttttattccctacatcgccagccaccattccccgtgacctgctcgaaccgctccccaaaggtaccttttctattggtgagatggcggaatatgacaagtacagaaccacgcatgattcaatcacttttggtcccggtaatgaggatgagctgcgtgaggagactgatgaacaacgagagggacgatatgctcgttatcagcagtggtggcaaaagtatcttaaagattcagatgaacttttaaaacatgttgctggcaaatggctcgcatcacctgagcaatatgaaccagctggctatggctacattattaaagccaaccagcctggaggggccagaatccatatcctgtctatgtacgatcatttgctgacgtgcaaaaaagaggtgccattgctggcgcgctttgcttcgaaagagaagtctcctgttgagccgctcctcgccagtaatgccatgtttagtgagcgtctgggacactccggtgataagtttccgctggctgtcgcgcagcgcgatgccctgagccattacctcactcaacagcccggcgatattcttgccgtaaatggtcctccgggtaccgggaaaactactctggttctctccatcatcgctactgagtgggcgagagcagctttaaacaaaactgaaccaccggtggtggttgcgacatcaaccaataatcaggccgttaccaacattatcgaggccttcggcaaagatttttctatcggtaccgggcctatggccgggcgttggttacctgatgtaaaaagctttggcgcttacttcccgtcttcgggacgaagagccgaggcggtaaaaaaataccagacggaagccttttttaacggtgttgaatcccttgaatatgttgaagatgcccggtgcttcttccttgaaaaggcaagggcagcttttccgaatgaggaatgtcattcacctgaacaggttgtggatctcctgcatcagcgtttggttgaactctctgcagagcttgagcaaatcgagcctgcatgggatgacctgaacgcaatccgtcaggagcggcatgccgtcagtgacgatctcgaacagtatattcaggataagagaacgttactgcttaatagcaccaatgaaatctcgctattaacgcagggcaaaaaacagtgggaacaatatcgagccggagagtcgatcatgttcactctcttctcctggcttcccgccgttcgtactaagcgtcactatcaaatgaagctgtttttggacgctacgtttggcgaaagaatgacagcattccagggatctcagcctgatggaattgatgcctttatcgatggattgattgagcaagctcataaagaacaggccgggtaccaacagcaaattgatcacgctgaggacatttcccgacgtgaaagtgaagcagtcatccgttggtgcgagataacccattcgctgggttatgcaggcgagagggagctgaatctgagcgaagccgatgagcttgccgatacacagctccgtttcccggcgtttttgctggcgacgcattactgggaaggtcggtggctgatggatatggcgaatatcgataaccttcaagaagaaaaaggtcgcaaaggggcgaagactattaaagcccgctggctgcgaagaatgaagctcaccccttgtgtcgtcatgacctcctttatgcttcctcatcatatgcttatcagagaacatgttagcggtaagaagtatgataatggttatttatataacttcgccgatttgttgatcgtggatgaagcggggcaggtgcttcctgaggttgctgcagcttctttcgcactggcgaagaaagctctggtaattggcgacacagaacagattgcgcctatctggaacagcctgccttgtattgatattggcaatatggttgaggagcatatccttccagaaggttctcaggaagaacttactgaagcttatgctttggtgtgtgaatcaggaaagagcgctgcatccggcagcgttatgaagattgcgcagtttaactcgcgctaccagtacgatccggatctggcgcgggggatgtatttgtacgaacaccgtcgctgcttcgataacatcattggctactgtaacacccttagttatcacggtaagttgcagcccaaacgaggggaagaaaaagggacaatattccctgcaatgggctatctgcatatagatggtaaaggtatgcaggccaatggtggaagtcgttataacgactttgaagcgaggacgattgctgcatggcttgcagcgcacaaagaagagattgagcatcactacagtaaaccgttacatgaattagtcggcattgtgacaccattttcggcgcaggtcagtgcgattaaatcgtcattacttaagctggatatcaattgtagtggcgatgaaaattcgctgacagtgggcacggttcattcattgcagggggcggaacgggcaattgtgctgttctctcctgtgtattcgaaacatgaagatggcggatttattgatagagacagcagcatgctgaacgttgccgtttcacgtgctaaagatagctttttggtctttggcgatatggacctgtttgagattcagcccgcttcttcgccgagagggttgctttcaaaatacctgtttgcatccgataataatgcactgcagtttgagtataaagaacgccaggatcttaatacagcgcaaacacagatctctaccttgcacggtgttgaggagcatgatgttttcctgaatcagacttttgatgctattggtaaaagtattactattgtttccccttggctgacctgggaaaaattggaacaaaccggttttctgacatcaatgatccaggctcgtgctcgtggtatcgacattactgttgtaacggataaaagctttaatacccaagacgtcagttatgaaaagcgcaaagcaaaacagcagcgccttaatgatgcagtggaaaaactaaatgcgctgggcattgtgactatgttggtcaaccgtgttcacagtaaaatcgtgattggtgatgaagggctgctgtgcataggatcgttcaactggtttagcgctacgcgtgatgagaagtacaaacgatacgatacgtcgatggtataccgtggcgaaagcttacaagcggaaattaaaacgatttattccagcctggaacagcggaagttatag

SEQ ID NO: 217228 - DNA, 951 bp, Klebsiella pneumoniae
atgcagaccaaacacaaggcgtcgccggcgttcgatactctttctctgggcgcgttggcgcccgaactggcaaagtatcaacaagagccaccgcaaatggccagcggcgccgtcggcaaacatggctatttgcggctacgttttgccgatcgtggcgccaaaagcaccctccatgaaatggaaagaaaggtgccattgctggttcaaaaagccctctactgggatgaggaaatgccattcctgccctgcgtacccatgatctccacctcaggatgcgttttgcagggggatcgcttaacggtggagattgaggttgatgcgggcgcctgcgcccatatcaccacgcagtcagcgactaaaatccattcgatggataataattttgccgcgcaaacgcaacatatacgcgtcggtaagcaggcttatcttgaatttatgccggatcaggtcattccgcatcgtcattcgcgatttatcagcgatacccttattgaatgcgacagcaccgccaccgtgctttattcggaaatcctgatgccagggcgtaagcatcatcaccaggatgagcgttttggttttgatgtttattcctcgcggatcagtgccaaaaatgaagccggtgacgttttgttcactgaaaaactggtacttacccctaaagaaaagccgctggatgtcgtcggcgtaatgggaacattcgatatttacggcaacgtaattgtgttgaccccttcaacctgccaggacgaaattttgtcccgttcacgctctttttatagcgaggagctgtgtcatggcgtaagccgtttacccaatggggctgggcttatttataaggtactggcaaacgacagcacccgtataaaaaaagccatccgggatttctggcaaaccgtgcggcaagtcgccaccggttattcattgccggcgccctttctctggaaagtctga

SEQ ID NO: 217229 - DNA, 624 bp, Klebsiella pneumoniae
atgaaaaaaattactcgcctgggtatcggcggcccggttggttcaggtaaaacagccatcattgaagtcatcacccctaaattaatcgagcgtggttataagccgttaatcattaccaatgatgtggtcacaaccgaagatgccaaacaggtaaaacgcaccctgaaaggcattcttgatgaagagcggattatgggcgttgaaaccggagcctgtccccataccgcagtacgcgaagatccaagtatgaatatcgctgcggttgaggaaatggaagataagtacccggacagcgacctcattatgattgagagcggtggcgataatttaacgctgacctttagtccggcgctggctgatttttatatttacgttatcgatgtggccgaaggggaaaaaatcccccgtaaaaatgggcccggcctggtgcaggcggatattttgattattaataaaatcgacctcgccccttacgttggagcgagccttgcagtcatggaggatgataccaaaattgtgcgcggcaaccgtccttatatattaacgaactgtaaaactggcgaaggcatcgatgccctggtggacatgatcgaaaaagatttcctgtttacgcacgcaaaatag

SEQ ID NO: 217230 - DNA, 711 bp, Klebsiella pneumoniae
atgagcataaacattgatgaatcacatcagctcctgcgcctgatcagagtattgcagttcggcgactcggttctgccagtgggggcatttactttttcatgtggtgtggaatccgctattcaggtgggattggtccacgatgtcgtgagcttaaaagcgtttgttgaaacctcgctggcccaggcagcgcaatgcgatgcgattggcctggcccatgctcaccgggcattacttgatggcaacttagatcagcttctggccgttgatcgcgaaattatgaatcgcaaactcaatgaagagtcgcggttaatgacgcagcggatgggtaagaaactggttgagatgacccgtcaggtgttcgaagccgacctgctgacgtggtggctggataacattaaaaccggacagacagcaggcacatttccggtaagccaggcgctggtcatggggttacaagggatcagcgctcaggaaaccatcgctatgcatcagtatggcgttgccatgactatcctgagcgccgcccagcggctgatgaggataacgcactttgacagccagcagattctgtatgccgtaaataaaaacatacctgaattttgccggcaggccgtgaatgccgatatcagcgaaatggcgtcgtacacgccgcttatcgatattctggccgccgtacacgttgatgcgcatgtgcgtttatttatgaattaa

SEQ ID NO: 217231 - DNA, 639 bp, Klebsiella pneumoniae
atgatactgattgagacgattatcggaaatgtaaaaaacgacccgtcgtggcaggaaaagacccgcggatatcaacacgatgtgctgtccctggaacaatgggaagctcaaaaaagccgttgccgtaagcaaagcgagcagggttttgatatcggtatcgctctggatcgtcgcatgcggttaaccgacggggatattttgttatgtgatgacgacaaaaaatacctgttaaccgtacatatcactctgcgggaagtgctggttatccagctcgcctccctggccacggcagagttcgaaggcgcaattaaacgcgtgtttgaactcggacacgccctgggaaatcaacactggaagtcggtgatcaaaggcactcaggtatatgtccctttatcagtcgaaaagaaaatgatgaattccgtgttgaaaactcatggttacgcgcaatctgaatatcactttgtcgcgggtgaaacggtattaccacacctgacaccgtccgagtcccgcctgctgtttggcggtgcggaagacccgcatgtccatgtcagcgtagtcagcggcgatccacagcacagccacggccacgatcgatctcaccacgcacatcatgggaatgcgcatgagcataaacattga

SEQ ID NO: 217232 - DNA, 1719 bp, Klebsiella pneumoniae
atgccaactatttcaagaaaagaatatgccagcctgtttggcccgacggtcggagataaaatccgcctgggtgagaccgacctttatatcgaaattgagaaagacctccgcggctatggtgacgaatcggtctatggtggcggtaaatcactgcgtgatggaatgggatcgaataataccttaacgcgcgataacggcgttctggacctggtgattaccaacgtcacgattctcgatgccaaactgggcgtcattaaggccgacgtcggtattaaagatggcctgattgttggcattggtaaaagcggtaacccggccattatggatggcgtgacgcagaatatgattgtcgggctcagcactgacgccatttccggggaacacttgatcctgaccgcggccggcatcgacagccatatccatcttatttcaccgcagcaggcgtacagcgccctatcgaatggcgtggctactttctttggcggtgggatcggcccgacggacggtaccaacggaacaaccgtcaccccaggcccctggaatattcgcaagatgctgcgcgcagtggaagggctacctgtcaacgtcggactgttgggtaagggtaacgcgtttgggcgtgctccgctggttgaacagattattgccggggtggcgggcctgaaagtgcatgaagactggggagccacgccaaacgcgttacgtcattccctgcgtattgctgacgaaatggatattcaggtatcggtgcataccgatagccttaacgaagcgggttacgtcgaaaacactatcgaggcgtttgaaggccgtactattcataccttccataccgagggggccggcggtgggcacgcaccggatatcatcaaggtggccagccagttaaacgtgctgcccagctccactaaccctacccttccattcggcatcaacacccaggctgaactgttcgacatgatcatggtgtgtcacaacctgaacccaaacgtggctgcggacgtctccttcgctgaaagccgcgtccgtccggaaactatcgcggcggaaaacgtgctgcatgatatgggcgtaatctcgatgttttcgagcgactctcaggcgatgggacgcgtcggagaaaactggctgcgcgttgtgcagacagcccatgccatgaaagtcgcccgcggcaaactgccagaagacagcgacggcaacgataacttccgggtattgcgctacgttgccaagctgaccatcaatccggctattgcgcatggcgtaagccatatcatcggctcagttgaagtgggcaagatggccgatctggttctatgggacccgcgttctttcggtgcgaagccgaagatggtgatcaagggcggcatgatcaactgggccctgatgggcgatccaaacgcatcgctgccgaccccgcagccggtattctatcgcccgatgtttggtgccatggggaaaaccctgcaagacacctgcgcgactttcgtgtctcaagccgcgctggatgatggtgtcaaagagaaagccggccttgagcgtcaggttatcgctatcaacaattgccgctcagtaaccaagcgtgatttggtacgtaactccgccacgccgcatatcgaagttgatccggaaactttcgccgtgaaagtggatggtgaacatgccacctgcaaccccgtcacaacagcggtaatgaaccaaaaatatttctttggctaa

SEQ ID NO: 217233 - DNA, 441 bp, Klebsiella pneumoniae
atgaaaaagcaatccaacacttcggaaaccatggttaaaaaggtggagacaggggtctccgtcggcggctatgtattagcggactcgccaattacttttaatgaaggccgctccattactaccgttcatgtcaaaaataccggcgatcgtccaatccaggtaggctcgcactttcatttctttgaagccaataaagcactggagtttgagcgcagtaaagcgtttggtaaacgactcaacattaccgctacgacagcgatacgatttgaaccgggtgatgctattaccgttgaattaattcctttcagcggtcagcaggtggtatacggctttaataatctggtcgacggctgggtcggcaacgcctctggcattcagggcgatgcacctgaagatattcttaacaatgccatcaaacatggttttaaatcagtaagttaa

SEQ ID NO: 217234 - DNA, 303 bp, Klebsiella pneumoniae
atgcaactcacgcccagagaaattgaaaagctgatggtttataccctggctgacgtcgcgttgaagcgcaaaaacaagggtctaaaactgaaccacccggaagcggttgccattattacgaccacggcgatggagggtgcccgggaaggaaaaaccctggaagtggtgatgaatgaagcacgtaccgtattaaccaaagaggacgtcatggacggtgtggccgatttaattcctcacgtccaggtcgaagccattttcaccgatggcagtcgtctggtcacggttcatgacccgattcagtga

SEQ ID NO: 217235 - DNA, 1251 bp, Klebsiella pneumoniae
atggaacatgcacttgtaaattatttatcattagatgtacctaacactgcttttatgttgctctgcgccagcctcgtgatgttgatgacgcccgggctggcatttttttatggcggactggtacccagaaaaagtattgtgacgataatggcgcaaagctttttctcgatggggtgggtcgccgccctttggtttattgtcggttattcactgagctttggtccgacgctcaacgggatcatcggcgatcccctctattattctttcatgaataatattgatccagggacgatgtacaccggtaacaaaggtggcatccccttattagttcattttgtctatcaaatgatgtttgccatcattacccccgcattaataacgggtgcgtttgcaaatcgcgtcaattttccagcgtatctggtcttccttaccttctggacacttctggtttactgcccgtttgttcatatgatctggagtccgcagggaatgctggcgaaatggggagtcgtagattttgctggcgggatcgtagtccatgccacagcgggttttgccgcactggcttcagcactgtatgttggcaaacgtacggtggcctcagacggtacgcataatattccttatattgccctgggcgccggtttattgtggtttggctggtatggttttaacgcaggttcagaactgcaggtcaatactgttacggtctccgcgtttgtgaccacggatatcgccgccgcttttgctgccgtcacctggtttattattgagaaaatccgtacaggcaaacccaaactggtcggttttttaaccggcgcagtagccgggcttgccactatcaccccagctgctggctatgtctcgattcagtctgccgcgctaattggcattattgccagcttcgtctgttatttcgtggtgctgttggtacgccgctaccttgatgatgcgctggacgtgtttggcgtacacggcgttggcgggataacaggttcgattctggtgggtgtctttgcctcagccacatggaacgcgaatgggcctgacggtctgctggaaggcaatgggatgcaaatcattaaacagattaccgccgtggtatttaccagcgtctggtcgtttattttcacactggctattctgtggctcattaataaattcaccgtagttaaagtcgaccagaataaagttggcggcgaactcgataacactttattcggcgaagatgcctatagcgagaaaaattaa

SEQ ID NO: 217236 - DNA, 312 bp, Klebsiella pneumoniae
atgaaaaaattatccactctgtttctcacacccgttgtgactcttgttttactgaacgtcaacgccgccgtggcggcggagaaagcgtcggaaaccacaccgaaaaacatgacttgccgggaataccttgatatgaaccctaaggcaatgaccccggtagcttactgggcaatcaataatgagaccgtctataaaggtggagataccgttgactggaatgaaacggacaccgtctcggtaccaaagttaatcaaaatctgtcatgaaaagccagaaagtaaaattatgcaatgggtgaatgatattcgataa

SEQ ID NO: 217237 - DNA, 591 bp, Klebsiella pneumoniae
atgttatttattgacagcagtaaaataaatactcttggcagtacgctgttaaaaagataccgtagagctactgccgttatggccgttatactgctgttgtgtgcgctggcctgtatgctcttcccaatatatagcggtgtggtcattagcaccctgactggtgctttaatgttcatctgtggcatgtactctgtggcgatggcattgatattcattaaatacaatactcgttcttacatctcatcgttattatttggaattatttattttggcgtcggctgtggttttatctttagcacgtcattcggtattaatactttgtcattgctgttttgtgttttatttatccttgccgggtatagtcgcatcgccatgggatttaaagatcgggctatgaagggtcgttattggtgtattttcattggcataatagacctcatcatcgccctggcctggctgcgcgctagcgaagacgccaactatatcatcactgtcaccttcattggtctggaaatgctgttctgtgccggattcttcttagtgctcagctatgcactgaataaagcacaaaaaaaattaattaccacataa

SEQ ID NO: 217238 - DNA, 1536 bp, Klebsiella pneumoniae
atgagtaataatactgcacttccgccgctgaagggtgctgccttagtactggtgacattagcgctgtcgatggccacctttatgcaaatgttggactccaccatttccaacgtggcaattccgacaatctcaggatttttaggcgcctcaaccgatgaaggtacctgggttataacttcgttcggtgtggcgaatgctatttccattcctgttaccggtcgtctggcgcaacgttttggcgaacgcaaactatttttaacctcggtaaccctctttgcactggcatcattatgctgtggactttcgacaaatctggacactctgataggattccgtgttgttcagggactggtggctggtccgctcattccactctcacaaagtctgctgctacgcaattatccaccggaaaaacgcaatatcgcactggcgctttggtcaatgacggttattatcgctcccatttttgggcccattattggtggctacatttgcgataattacgactggggctggatatttttaatcaacgtcccactgggtgtcattgtggttgtgctgacctcctggttactcaaaggccgcgagacgccaactgaaccggttaaaattaatctcatcgcgttgagcctcctggtgctgggcgtcggcagcctgcaaattatgctggataaaggaaaagatctcgactggtttaactcaaccactgtcattgttctggcgattattgccgttgttgctattattttactggtcatctgggaagcaacggataataacccgattattgatcttagcctgttccgttcgcgaaattttactattggtattttatgtatcgcctgtgcctatttaatttatgccggggcgatcgtgttaatgccgcagttactgcagaccgtttttgagtacacttcggtatcggccggactggcttacgcaccgatcggtatcatgccgctactgcttgcgccgcttattggtcgctatggccataaaatcgatatgcggatgttggtaacgtttagttttatcgtgtacgccctgtgttattactggcgttccgtcacctttagctcggccattgattttacgtgggttattatcccacaatttatgcagggttttgcggtcgcctgtttctttttaccgctgaccaccatttcactttcagggttaccgccggagaaattcgctgccgctaccagtttgagtaacttcttccgaagtttgtccggctctattggcaccacgatcaccatgacgctatggagtcgtcgcgattccttccaccacgcgcagctaacagaatcggtcaccgagtataatcccccgtccgttgatatgttccataaactacaacatatgggttttgataagcagcaaatagccacctatcttgatgaccaaattactcagcaaagcctgctgatggcggccaacgatgttttttacctgtcagcaggcgttttcctgatgctcactctgctggtatggttcgcaaaaccaccgtttaactccagcaaagctggttaa

SEQ ID NO: 217239 - DNA, 1167 bp, Klebsiella pneumoniae
atgaacaatttaaatactgacgaaaacattgccggcaagcaaatccaaaaacgaaaaaaattgttgcttattttcgcggcggtcatagtcattgttgcgggttccagtaccgcctggtggtattttgatttgcgcgatgtacagagcactgatgatgcctatgtgaagggaaatcaaattgctatctcttcactggttgcagggagcgtaattagtgttaattacaccgacacggatttagtacgtcagggtgatgttcttgtcacattagatgataccgacgccagaattaattttaacaaagccgccaataatctggccaatacggtccgcaagatcaaacagatgtatattgctgacgatcaatataacgctaacgttcaggaagcaaaaatcgcatatcagcaggcactggcagactaccagcgccgcagcaggctgcagggcgcagcggcgatatcaagggagaatatgcaacatgcaaaggatgccgtggacagcagcaaagcagcgctggatgtcgctgtccaggcttatcgcggaaaccgtgtactgattcagaatacggcgttagaaaaacagccggaagtgttaatggcggcggaatccatgcgggaagcctgggttgcgcttcagcgaaccaaagtgcgcagcccggtcacggggtatcttgcacaacgcaatgtacaagtcggggaaactatcggctcaggccaggcgctgatgtcaatcatacctgccgagcaggtctggattaacgctaacttcaaagaaacccagctcagcggggttaagatcggtcagaaagtctcgatcgtcaccgatttttacggcagcgatgtggtgtttaacggtcgggttgatggtatcaacatgggaaccggcagcgcattttcggtattgcctgcgcagaatgcgaccggtaactggatcaaagtggttcaacgcctgccagtacgcattacgctggatgctgagcagatcaaggcctacccgttgcgcatcggcttgtccgccaccgtgcggctgcatgaaacccattcgcagggcgaggcactggcaacgacgcagcgaaaaaccccggcttacgcaagcaacgcactggttatcgataccacccctgttgataacgaaatcctcaatatcatcaaagccaacgcgatgtga

SEQ ID NO: 217240 - DNA, 633 bp, Klebsiella pneumoniae
atgagtaaaacggcaaatttaagcgcgattattattgatgatcatcctcttgcgcgaatggcgattcgtaaccttctggaaaatgagggttttaatattgttgccgaagcgggagatggaggcgaagcgttaatggctgttgcggaataccagccggatgtggtgattgtggatgttgatattccggttatgagcggtattgaagttgttgagaagctgcgtaagaagcaatttagccatattatcattgtggtttcggcaaaaaacgatctcttttatggcaagcgtagcgcagatgccggcgctaatgcgtttatcagtaaaaaagaggggataaacaatattatctctgccattcatgctgcgcaaaatggatacagctattttcctttttcgctgagcggctttgttggcagcttatctaacgagcaggcgatgctgcagtcgctctccagccaggaagtcaaggtgatgcgcgctatcctgaatggggcagacaatatgcaaatcgcctcagagatgcatatcagtagtaaaacggtcagcacctataaaggtcgattgatggagaaactgggttgcaaatcgctggtggatctcttctcatttgcaaaccgtaataaaatcggataa

SEQ ID NO: 217241 - DNA, 1503 bp, Klebsiella pneumoniae
atgcctgaagtgactatcgatacctggagcttctatagccgacccttttactggtttgcagggtcggcgacgctattgatcctgagtggtttgctctggggcgcgcattggctgcgatctgagcgcaaacgaaaagcggttcaggtggcgctagagcatcagctcagttttcaccagacgttgttcaacgcgatgccgataccggtgtatgtgattacccttaagggcgagcttgacagttataacaacgccttcagcgcttttttccccgagcatctgcgtgaagcgatgcatttttcactgttcgaccggcgtcatcctctcgcgcatatcttccctgcgatccagcatgaggttcagctgggcctgacccccgatatcattatcacgcatccactggcattacataatggtatagaggaacgaacgattttgcactggatggtgttatgccgcttacccacaaccctgacaccggtcttaatgtgtggctggcaggatatcactgagtcccgacagttagtggagaagcttcagaatgaaaaagaacaggtcaaagacgccagtcaggggagcagtgcctctttgccctgctcgagtcatgatgttcgtacgtcagtaagtgctatcctggggtttcttgaacttatcttcacccgccaacaaacagcagaagaagatcagcagtgccttaaactggcgtatgccaccgctcagtctttgcttggtttgaacgttgatatcctgcctgggaacgttaaggcggttccgcaggcaattcgtattctcattgccgaggatctccccgccaaccgccagctgcttcgccgccagctcgataccttgggctacgctgctgatgaagcgaaggatggcgccgaggcgcttaaactcatccagcaacagcgctatgacctgttaattaccgatctgaatatgcctgtgatggacggtattacgttaacctgtcgtgtgcgcgagtacgataccagaatggtcatctgggggcttaccgctaacctcgtggccggagaaaaagagcgttgcctggccagtggcatgaacttgtgcctgtttaagcccctggagctttctcagctggccaccgcgctgtgtgaaataaatataccccagtccggcagctcgcttgatgaattcctcaatatgaagatattcaccgcgctgacgctgggtgataaaaaattaatgcggcagatgctcgagcaatcgcgggtggaaaacgaaaaggatatcgccgcagcgcgcgcggccatcagcggacaagactggcgactggcgcaataccatttacatcgaattaatggtactgcacagattcttggcgcaaccgctatccatgcgacagctgaacagttagagaatgcgctggcggcgggggaacctgaagccgttttgccgcagggaatagatgaacttacgcagcagttgcaggcattaagcgcggcgataatctttttttccagtcaggcggactaccattga

SEQ ID NO: 217242 - DNA, 414 bp, Klebsiella pneumoniae
gtgcttaattttactattctgatctttgttggcggggcgtttggcgcaatatgccgcgaattattgatgttggtagtgcctcgcctgagcgatggctttcccctggatatcttcatcgccaatattattgccgcttttttgcttggtttatgcacatcactgtataaaaggaaccgggttaatcagtacatccatatgatggtggctacgggtatcatgggagggctatcaaccttctccagctttgtatctggcgcggtggaaatgatgaatgagccactcagggcgctgatcgccatctgttatctggttatcagcctgatagtcggttttatggctgtggagctggggttaagactgggctcccgagtaaagcctgcgccgcccatgactcataacagatcgactggttaa

SEQ ID NO: 217243 - DNA, 384 bp, Klebsiella pneumoniae
atggtcgctactgacattttttgggtgggcctcggcggcggcaccggctctttactacgctggtgggtcggtcttgccgtcagcaaactttaccgcggacattttcctctcggcacgtttttaatcaatgtgagcggcgcattaatcatcggatatctcagcgcgctgttcggtatcgactggcgcgagcgctatggtgaatggttaaatgcaggcctgctgaccggtgtccttggcggttataccaccttcagcagcatgcagttagatgccgccaacctggctcatgcgcaccagaggttactcgctgcaggatatttaatcgtctctgtcgttaccggcgtggcggcggctgcctgcggtgcatggttagcctgtccataa

SEQ ID NO: 217244 - DNA, 246 bp, Klebsiella pneumoniae
atgatgactgaagatactgcctatgagacttaccgtcatggtgtgggcaccattaccgccgctaatgaagcggcaaacggtctgctgagcgcagagcaaaggaatgtcgacgcctacacctccgcgctgatcgccgcagcgaatctcgcttttgtcatgggggaaatgacgcaggcctctggcaatataccaaacacgatggagccgcctttgtccgacgagacacaggaaaccactttcggctaa

SEQ ID NO: 217245 - DNA, 1548 bp, Klebsiella pneumoniae
atgatgcagctgagtaaaaggatgattgttgtcagccttctcgttccggcgattctggttggcctgctatcgttggggatggccgttcgtcagttgcaaagggataccgccataacggcggagattctgttaggccaggttgaccacgtgacgtcgattgctcgccataccctccacacgacagcgcaaatggcgaatcagccctgcgaaaacgttgttgaaaagatgaccgaaaccggtgcgctcaccccttacatccgtagtaccggtctggtgcgtggggacacgcttgtttgttcctccatcaccggctccagacagcaaagcattcggtcagtttatggactccccctctcagcagagatgggcagtctggaaataacggcgattaacggtacccgcagcgttccgcatcagacggctatcatctacgcctctggtgccggtaatggcatcacggttttcagcgtagtagatggacgatattttaccgatctgatggaaaccctggatgatgaaaatcatgccatcctgcggttgcggtttagtgacggtcccgttatctccagtcaggataaaggcactgaagacctcgcgggcttcagtgcggtattccattctgactttagtcaggcgcgtatacagatcatcaccccctggcaatcgcttgctcgctacctggtgcgcaatatgatttttctcggcccggcctctctgctcctgacgctggctacgctgtatttatggcgacgctggctgacaggaaaattgtctctggctgatgaaatagcgaagggaatggcgcgagaagagtttgttgttcattaccaaccggtatgtgaggcggcgtccggtatgtgcaccggtgcggaggccctgatgcgctggcagcgggctgacggcagctcaatatcgccagcgctgtttatccaggcagcggaagaagaggagatgattatcagcctgacgcgacatctttttggcctgatcgctgccgatgtcaaagcctggcaggtgaccgcccctttccatctgggggtcaatatcgctgcggcccatctgacggatgacgcctttaccacggacgtgctgcagtttcgtcaatccctcgctgcctcatttcgcctggtactggaagtcaccgaacgcagcctggtcgatgacaccgcgttggcctcagagaatctgaacgcacttcgtcagcatggctgtcaggtagccgtggatgatttcgggacaggatactgctcattgagtctgcttcacaacctgcccgtggactacctgaaaatcgataaaatttttattgatacgctgacctccgccgggacggatacgccagtattggataccatcattggccttagcaagcgtctgggcctcgccacgattgcggaaggcgtcagtacgcaacagcaggcagagtggctcaaagataaccgggtgtcttacgtccagggatatctttatgccagaccgatgccggcagctgatttcatttcctggtacgaagaaaataacagaaagcgtgagactggccgtacataa

SEQ ID NO: 217246 - DNA, 627 bp, Klebsiella pneumoniae
atgcggaacgtacttattacaggcgcaaccggttttttaggtggtgccgcattgagttatatcttgaaagaaaaatccgaatgccaactgctattactgacaagaggtgaatcgacaaaacatgctgtgatgcgtgtcaatgagaacctcagaaaatttcaactcgctgaaacgttaattaacagaatatccagtgacaatatcctgctaggagacctgacggcaccggatttttttcttgaagattgtcgtctcaatgccattactgacgtcatcaattgtgcgcatatcacctcatccggtaataatccgtttatctggacagggtatgtggaggggatgctcaggtttgtcgatcgtatgagccaggccccctcattgagacatttcctgcatattgaatctgcagggctaggtgtatccgcatccgaatgtgggctagacaacaaaccagggttttcaaactatgagaatgtgattgcccagtgcagttgggcaaacagcctcatcgagcaacggataatagaatgttatcccgagcttcctctgatgagaatcgtgccttccaccgggatcgagcagactgagttaggtaacagcatctgtcggcatttaaatctgccttag

SEQ ID NO: 217247 - DNA, 1554 bp, Klebsiella pneumoniae
atgcattcctctgttaataaaaacgaaagccgtacctttttcggccatccttatccgctgggctccctgttcttcactgaaatgtgggagcgcttctcgttttacggcatccgtcctttactgatcctgtttatggcggcgacagtgtacgacggcggcatgggcctggcgcgagagaacgcctcggcgatcgttgggatttttgccggcagtatgtatctggccgcgctgccgggcggctggctggcggataactggcttggccaacagcgcgccgtctggtatggctctatcctgatcgccctggggcacctgtcgatcgctctgtcagcatggctgggcaacgatctgttctttatcggtctgatgtttatcgtcctgggttccgggttgtttaaaacctgtatctcggtgatggtcggcaccctgtataaaaagggcgacgcgcgccgcgacggtggtttttcgctgttctacatggggatcaacatcggctcgtttatcgcgccattgatctctggctggcttatcaaatcgcatggctggcactggggcttcggcatcggggggatcgggatgctggtggcgctgatcattttccgtgtctttgccgtaccgtcgatgaagcgctatgacgcggaggttggcctcgattccacctggaacagcccggtggcgaaaaagaatggcgttggagcgtggctgctggcgctggcgctgggagtggcggtgctggtcacgcttatcagcctgggcacgatcgtgattaacccggtggcggtggccagcgtgctggtctatgtaattgccgcctccgtggcgctctatttcatctggctgttcgtcttcgccggactcaaccgtaaagagcgggcgcgcctgctggtatgctttattttgctggtctcggcggcctttttctggtccgcgtttgaacagaaaccgacctccttcaacctgtttgctaacgactacaccaaccggatgatcggcgattttgagatccccgcggtctggttccagtcgattaacgccttgtttatcattctcctcgcgccggtattcagctgggcgtggcctgcgctggcgcgtaaaaacgttcgtccgggcagtatgaccaaattcgtgattggtatcctgtgcgcagcggcgggctttggcctgatgatgctggcggcgcagaacgtcctgagcaacggcggggccggtgtgtcgccgctgtggctggtgggcagcatcctgatgctgacgctcggtgaactgtgcctcagcccgattgggctggcgaccatgactctgctggcgccggagagaatgcgcggccagatgatggggctgtggttctgcgccagcgcgctgggtaacctggcggcgggcctgatcggcggtcatgtgaaggccgatcagctgtcgctgctgccggacctcttcgcccgctgctccatcgcattgctgatctgcgccgccgtgctggccgtgctgattgtcccggtccgccggatgctggagaacagtcggtccagcgccgcgcaaaaatccctcagcaacgcctga

SEQ ID NO: 217248 - DNA, 1245 bp, Klebsiella pneumoniae
atgcaggaattaatatcgcaaattgccgccttaggaatcgaaataacccccacccgctcgctgatgattatcttcggcattatcttgttcaccgccgtggtcgtgcatctgatattgcacaaagtggtcctgcgcgcatttgaaaaacgggcgctggccagcagccatctgtggctgcaaatcatcacgcagaataaactctttcaccgactggcctttaccctgcaggggatcatcgtcaacgtccaggcgatgctgtggctgcaaaaaggcagcgaggccgcggaaatattaaccaccgtggctcagctatgggtgatgatatatgccatgctgtccttcttctcgctgctggatgtcattttaaaactggcgcagaaatttcccgccgcctcacagttgccgctgaagggcatattccagggaattaagctggtgacggcgattattatcggcattctgattatttcgctactgataggccagtcaccggcgatcctgattagcgggctcggcgcgatggccgcggtgctgatgctggtgtttaaagatccgatcctcggtctggtggccggtatccagctctctgccaacgatatgctcaagcttggcgactggctggagatgccgaagtacggcgccgacggcgcggtgatcgatatcggcctcaccacggtcaaggtgcgcaactgggacaataccatcaccaccattccgacctggtcgctggtctctgactcgtttaaaaactggagcggcatgtcggcctccggcggccgccgcatcaaacgcagccttaacatcgacaccaccagcattcattttcttgatgaacaggagcagcagcgcctgatccgggcgaaattactcaaaccctatatggattcacgccacgaggagattagcgcctggaaccagcagtacgccggggagcaatcgatcctcaacgagcggcggatgaccaatgtcggcaccttccgcgcctatctgcaggagtatttacgccatcatccgcgcatccgccaggatatgaccctgatggtgcgccagctggcgccggatgccaacggcttgccgatcgagatctactgcttcaccaacaccgtggtatgggcggaatatgaggggatccaggcggatattttcgaccatgtcttcgctgtggtggatgagtttggcttacgcattcatcaaacgcccaccggcaacgatattcgcgcgctgaccggcgccttctcccgctga

SEQ ID NO: 217249 - DNA, 1026 bp, Klebsiella pneumoniae
atgacaacttcccgcacttccctgttacgcaaaaagtggcctctgctggcgctggtccttgccgccatcctggcgctgatcctcgttatctggcagttgcaaacctcgccggagaccaatgacgcctatgtctatgccgataccatcgatgtagtgcccgaggtcagcggacgcatcgtggagatgcccattcgcgataaccagcgggtgaaaaaaggcgatctgttgttccgcatcgacccccgcccctatcaggcaatgctcgatgacgcgaaagcccggctgacgaccctcgacgcgcagatcatgctgacccagcgcaccatcaaagcgcaggagtataacgcccagtcggtggcggccgccgtcgagcgcgccagagcgctggttaagcagaccacctccacgcgtatccgccttgagccgctggtgccgcaggggttcgcttcccaggaagatctcgatcaggcgcgcaccgctgagaaagcggcgcgggcggagctggaggccacgctgctgcaggccaaacaggcctcggcggccgtgaccggcgtggatgccatggtggcgcaacgcgccggggtcctggcgcaaatcgccctcgctgaactgcatctggaatttaccgaagtgcgcgcgccgttcaacggcgtggtggtggcgctgaaaaccaccgtcggccagtacgcctcggcgctgaagccggtcttcaccctgctggatgacgaccgctggtatgtgatcgcgaacttccgcgaaaccgacctgaacaacgtgcgccccggcgtggcggcgcggatcaccgtgatgaccaaccacaaccggacctttaacggggtggtggattcggtcggctccggggtcctgcccgaaggtgggagcgtcatcgaagggctgccgctgatccagaaaagcattaactgggtccacgtctcgcagcgcttcccggtgaaaatcgccgtcagcgatcccgacccggaactgttccgcatgggcgcctcggccagcgccgtgctgcagccgtag

SEQ ID NO: 217250 - DNA, 528 bp, Klebsiella pneumoniae
atgagaacactgcagtatctgctgggcaccctgttcaccctgggcgcaccggctgcgcttgccgccgatagcacgatcgccatcagcggctatgtccgcgataacgcctgcgcggtagccggcgaatcgaaggattttactgtcgatttacaggataacgccgcgaagcagttttatgccgttggggcgacgacgccgccggtgccgttccgcatcgtgctgtcgccctgcggcacttccgtcaccgcggtgaaggtcggtttcaccggcgtggcggacagcatcaacaccagcctgttaaaactcgatgccggggcctcggcggcggcaggaatgggggtggaaattctcgatcagcagcagtcccggctgccggtcaatgcgccgtcatccaccatgacctggaccacgctgaccccgggccagaccaatattctcaacttttacgcccggctgatggccactcaggtgcccgtcaccgccgggcatgtcaatgcgacagcgacattcaccctggaatttcagtaa

SEQ ID NO: 217251 - DNA, 1869 bp, Klebsiella pneumoniae
atgtcacatcggaaatatggactggatcatttaggttgccgaactgcccggcgcctggtatctccggcgctggcgctgtggctctgctcacagccgtttgccgcgcgggcggacctctattttaacccccgctttttagctgacgatccggcggcggtggctgacctgtcgggatttgaaaaaggccaggaggttccgccaggcacctatcgcgtcgatatttatctcaacaatggttttatgaccacccgggacgtcactttccaggccgatgcccagggtcacggtctgtcaccctgcctgacgcgcggccagctggcgagcatgggtgtggataccggtcgggtgccgggcatggcgacgctggacagcacggcctgcgtgccgctgaccacgcttatcagcgaagctaccacacgcttcgacgtcggacagcagcgcctgtacctcaccgtcccccaggcatttatgggtaaccatgcgcgcggctatattccgccggagctgtgggataacggtatcaccgccgggctgataaactataacttcacgggcaataacgcccataacaccacaggtggcagcagccgttacgcctatctgaatctacagagcggcctgaacattggcgcctggcgtctgcgcgataacagcacctggagctacagcagcggcggtagcacctcatccaacgagaatcgctggcagcacgttaacagctggcttgagcgggacatcacgcctctgcgttcgcgactcaccctaggggacagctacaccaacggcgatgtcttcgacgggatcaacttccgcggcgcccagctggcctccgacgacaatatgctaccggacagccagaaaggctttgcgccggtgatccacgggatcgcccgcggcacggcgcaggtgtcaatcaggcaaaacggctacgaaatctaccagagcacagtgccgccgggaccatttaccatcgacgatctctacgccgcgggcaatggcggcgatctgcaggtcacgatcaaagaagcggatggctcccgccaggtcttcagcgtgccctggtcaacggtgccggttctccagcgtgaaggccatacccgcttcgccctcaccgccggggagtaccgcagcggcaacagtcagcaggaaacgcccgattttttccagggcacggccatgcatggcctgccggcaggctggacgctctacggcggcacccagctggcagaccgctatcgcgcctttaaccttggggtggggaaaaacatgggctatttcggcgccctgtcgctggatatcactcaggccaacgccaccctggctgacgacagcgaacatcaggggcagtcggtgcgttttctctataacaaatccctggatgagaccggcaccaacctgcagctggtgggctaccgctactctacccgcggctattataactttgccgataccacttaccgccggatgagcggctacagtgtggaaacccaggacggcgttatccaggtaaaaccgaaatttaccgactactacaatctggcttacagcaagcgcggcaaggtgcagctgagcgtgactcagcagttggggcgtaccgccaccctctatctcagcggtagccaccagacctactggggcaccgacgatgccgatgagcagctgcaggccggcctcaacgccgccgtggacgatatcaactggtcgctaagctacagcctgacaaaaaacgcctggcagcaggggcgcgatcaaatgctggcgatcaatatcaatatccccttcagccactggctgcgttccgacagccgctcggtctggcggcacgccagcgccagctacagctgtcgcacgatctcaatggccgcatga

SEQ ID NO: 217252 - DNA, 717 bp, Klebsiella pneumoniae
atgaacactaaaatattcgaagacaacattttatctcgtaatgatatcgctgtacgctacgtctttcagaaaatgttttccccacaaggtactctggtcgcggtggaatgcttaagccgctttgataatctttctatttcccccgaagattttttccgccatgctaccgccgccgttcgtgaacgtatttttctcgaacaactggcactgattgagaagcataaagcctggtttttacgtaaccatatttccgcaacaattaacgttgatgaccatatccttaacctgttgcgccagaaggatataaaagccaaaatcgccgccctgacctgcgtccatttcgaggtaaccgaaaacgccgagaatctgctgcataattctcttgccgcctggcagagcccacaggatacctcactgtggctcgacgacttcggctccggctacgcgggaattaacgctattcgcggttatcactttgactatgtgaaaattgataaggattttttctggcacctgatgcgcaaagagtccggccgccagctgatggatgcgctggtgacctttttatcgcgcaaccatcataatgtgattattgaaggtgtcgaaagcgaagcccataaagaatggctgcagggaatggagtggtttgctatccagggacattactggcgggaagtcagtattgaacaactggtcgccgatgatattgccatgtaa

SEQ ID NO: 217253 - DNA, 267 bp, Klebsiella pneumoniae
atgaccaaaacgccgaatcttaaattcctcagccacaacgccttactgaaaaacgccgtactgatgcttgcagaatatggcgagatcaccatcgacctggtggtcaaaaatgtcattgttatcaccctggataacgctaatgaagagagtgagagctactatcagatatcctgccagtttaagttccgccatctcgatgaccagcgcagaatagagaagatactgctggacctgatcttagaagccaagcgcaaaaagagaatctga

SEQ ID NO: 217254 - DNA, 2688 bp, Klebsiella pneumoniae
atgaatacagataaaccgggggcgccctattatcagcgctccgtcgaggagactctcgccagcgtgcagagttcgccggaagggattagcggaacagaggcggctacgcgcctgcagcagtatggcgaaaacgccctgccgcagaagccgggtaaacccgcctggctgcgttttattgcgcattttaacgatgtgctgatctacgtcctgctggcggcagcgttgctcaaggcggtgatgggccattggatcgacatggcggtgatcctcgccgtggcggtggtcaatgcgctgatcggcttcattcaggagagtaatgcggaaaaatcgctgcagagtatccgcaatatgctgtccagcgaggcggtggcgatccgtcagggcaaccatgaaaccatccccaccacctcgctggtacctggggatatcgtggtgatccgcgccggcgaccgtatccccgccgatctacgggtgattgaggcgcacaacctgcgggtggaagaggcgatcctcaccggcgagtcgacggtggtggaaaaaaccaccgagccgctaagcggcgatttaccgctcggcgatcgcagcaacctgttgttttccgggaccaccgttagctcaggggcgggaaaagggatcgtggtggccaccggcggcgataccgagctgggccatatcaaccaaatgatggcgggcattgagaaacaccgcacgccgctgctggtgcaaatggacaagctgggcaaagccatctttatccttattctggtgatgatggcggcgctgttcgtctttagcctgctgttccgcgatatgccggtctccgaactgatgctgtcgttgattagcctcgcggtggcatcggtcccggaagggttgccggcgattatctcgattattctgtcgctcggcgtacaggcgatggcccgtcagaaagcgattatccgcaagctgccgacggtggaaaccctcggcgcgatgacggttatctgctcggataaaaccgggaccctgaccatgaacgaaatgacggtgaaggcggtgatcactgccgacagcgtctatcgggtggaaggggatagctatgagccggtcggtaagatccacgccattgacgatccgacgccggtcacgatcgcgcccggctcgctgttcgagcgctatctgcgcaccatcgatctgtgtaacgacagccagcttatcaaagaggagagcgggctgtggaaaatcaccggcggcccgaccgagggggcgctgaaggtgctggcggcgaaggtcactctgccgccgctgaccagcgaactgcgcagtaaaattccttttgattcgcaatataaatacatgtcgaccctctaccggctgggtgaagaggaggtagtgctggtcactggcgcgccggatgtcctgttccgcctgtgccagtatcagcagagcgacagcggattgcagccgctggatctcccgtactgggaaggcaaaattgaagagtacgcccgggaagggctacggatggtggccgcagcctggaagccggctgccgcaggccagaccgaactgacccatcaggatctgcagcaaggggtgattttgctaggggtcgccgggatgatggatccgccgcgtccggaggccatcacggcgattgccgactgcctgcaggccgggatccgcgtgaagatgatcaccggcgaccacccgcaaacggcgatgagcatcggcaagatgctggggattggcaatgcgggaaatgccattaccggacgcgagctggaggtgatggacgacgcgcagctgagcgtagccgcgcagcagtttgatatcttcgcccgcaccagcccggaagataagttccgcctggtgcaggctctgcagagtaagaaagaaattgtcggaatgaccggcgatggggtgaacgatgccccggcgttgaagcaggctgacgtcggcgtggcgatggggatcaaggggaccgaggtgaccaaggaggccgccgatatggtgctgaccgatgataacttcgccaccatcgccagcgcagtccgcgaggggcgccgggtgtatgacaacctgaagaaaaccattctcttcgtcatgccgaccaaccttgcccaggggttactgatcgtgatcgcgctgctggcgggcaacgtactgccgctcacgccggtgttgatcctgtggatgaacatggccacctccgccacgctgtcgtttggcctggcgtttgaagccggtgagaaaaatattatgcggcggccgccgcgcgatccgaaaattcacgtgatggacggctttgccatctggcgcgtagcgtttgtggggtcaatgattgcggtcagcgcctttattctcgaagcctggctgcagccgcgcggctattcgccggagtttattcgtaccgtgctgttgcagactctggtcaccgcccagtggttctatatgctgaactgccgcgtatcggatggattctcgttaaccaaaggtctgctggccaacaaagggatctggatcgtcagcggcgtactgctggtgctacagctgctgattatctacgcgccttttatgcagatgctgttcggcaccaccggactgccgttccgctactgggtgatcacttttatcatcggtttcgccatgttcctgatcgtcgaactggaaaagccgctgacccgcaaatggcgttccgcctga

SEQ ID NO: 217255 - DNA, 207 bp, Klebsiella pneumoniae; identical to SEQ ID NO: 121277

SEQ ID NO: 217256 - DNA, 1407 bp, Klebsiella pneumoniae
atgaaaactcaaagtcttgtacgtgcacctcttccagttatggtgataatgacattccagacgaatgccatttctgcccaggatagccacgctcatgcaacatgggaggatgattccatcatggttgttacggctccctcctcatcaccactggaagtagtcatgtccccaaaacaacctcgtcagtctgtgccagcaagtgatggtgccgattacctgaaaaccattcccgggttttcacagatacgtgccggtggcacgaatggcgctcctgttttccgcggaatgttcggctcacgcctgcgtatcctggccaataatggcgaagtgctgggtgcctgtccggccggaatggatgcccccacctcttatatttcccccgagagttttgacctgctaaccataactaaaggcccacaaacggtcctctggggaccgggtaatgctgctggagcaatccgtttcgatcgagagcagccgagatttgataaacctggcgtgctgggaaatgccagcctgcttgctgcctcgaacaatcgctgggatgagaatgccgatatcagtctgggtagtgaagatggatatgtgcgtctgatgggtaacaaatctcgttccgatgactacaaggatggcaatggcaatcgaataccatcgaaatgggataaatggaatggagatatggctctgggctggacgcctgatgcagaaactctgattgaattaactgcagggcaaggagatggggaatctcggtatgctgggcgcagcatggatagttcacagctcaaacgagaaagtctgggcgcccggttcgaaaaatcgaatatcggagagatattccagaaatttgaagcaaatgtctattacaactacgccaaccacattatggataacttttcactgcgctcatctaacagtggtatgtcaggaggtatggcagacaggagcatgggggacacaaaaaacgctgacatggtgatgggcatgaatatgccaatagcgatgtcgatggaagtcgacagacgtactgttggtggtcgtatgatgggcacatgggagtggacggatgtggagctgaaaagcggcgctgatactcagctaaatacccatcgtaataaaacggataatggctgggtcaaagatgcccgtttccacgattatggtcttttcagtgaacttacctggaattcaactgattcaagcaaagtcgtgggcggcgttcgccttgaccgcgtcctcgtggataatttttctgatacaggttcctcagagcgaacagacacccttccggccggatttgctcgtttcgagcataacctcgcagaaatgccgctaatgctctatgccggggttggatatacggaaagattcccggactactgggagctgttttcccccacctactga

SEQ ID NO: 217257 - DNA, 456 bp, Klebsiella pneumoniae
atgggaggtgaagccggtgtcagctataaactgactgacaactggaaaactgatgcaagtctgacctattcctggggcaggaacacgaaggatggtgccccccttccgcaaatgcctccccttgaagcccgactggggctagcatgggaaagcggtaactggagcactaccgggctggtacgtctggtgagcagtcagcacagagtagcgattaacgaaggtaatgtggtgggtaaagattttgacagcagcgccggttttgctgtggtttccgccaatgccgcttaccgagtgaataagtactttaaagtggacattggggtcgataatcttctggacaaggagtacagcgagcatctcaacaaggcaggtaatagtagctttggctattcatccaattccactgttaacgaacccggaagaacattctgggggaaaattaatgtgacattctga

SEQ ID NO: 217258 - DNA, 261 bp, Klebsiella pneumoniae
atgttaaaaattctcaaaaccccggaaggaaaaaagtttctgattgccatggcatgtgtgtttatcattgcggtatgtgtggtatctaaagcagccttccagggcgtggaagatcagtacaatctgcctatggagacctgggacacatccctgtttatcattcagggcgcatgggtggccatttacagtcttatgttcgcgatagtaggctcactcccctttggtttttatttcctgggccccatgggtgaaaaaggttaa

SEQ ID NO: 217259 - DNA, 879 bp, Klebsiella pneumoniae
atgtctacgtcaccccagcggttactgcaggaatatcatcagcaagcgcaggactatgcgctgtcggacatgctgcgtgcgcggcgcggcgtgttagccgccgatgtcgatatcgagatggatgaaccccaccgcgcgggcctgaagatcgtggtgatccgtcgcgggcgtctgcgctgtgaaagcggaacggggccgcaggtggagctgaacggcccttcgctgttgctggccgccgggcgagacgacttcgtgttgaacaacttgttccaggccggcgaaccgctcgattacactctgctgcagttctccgccgcctggctggagcagaacgatgtccgcctgccgccaagcctcgatgggcggcggcatgcgcagttggtgccgctggcggcgccggcagcgctgatcggccaggcccggcaactgttcgcttgcccgctgcacgagtcgcagcgcgggctgtggttcagcgccagggccaacgagttggcggcgcattgcctgcaccagtgctggagccgccgcaccgtcgcaccgccgtccggcgtgcacctggccgcgcgcgatgtggcgcgcctacagctggcgcgcgaaatcctgttggcggagatggagcagccgccgagcctggatcaactggctcagcgcgccgggttgaacacccgcaaactcacacaagggttccgccagctgtttggcgccagcgtattcggcctgctgcaggagcaccggctgcaaacggcctggcgcttgctgagcgagcaggatctgcacgtttccaccgtcgcctggcaggtgggttatacgccggcgcacttctccgtcgccttccgcaaacgtttcggcgtcatgccctgcgacgtcaaaaagcgttag

SEQ ID NO: 217260 - DNA, 1677 bp, Klebsiella pneumoniae
atgcttagtgacctgcgggcgctgacgcgtccttttcgcatcatgctgtattccgcgctggcgctgcaggcgctggccggcgtcagttcgctgtttccctggctggcgattgcccggctggtggacgccgatccggcggcctatcccttctggcttggcgtcgccgccggtggcctggcgctgtggctgttcgcccaaacgctggcgttgcacctgactcatctgctcgacgcgcgtttgtgtcatcggctgcgcagccaattggccgccaagctggcgcgtctgccgctgaactggtttgtgcggcagggcgagagcggcggcgcccgggcgctgtcgcaggacattcaggcgctgcatcagctggtggcccatgcgccggcggagctggtgcagttggccgtggtacccggctgcgcgctggcgctgctggcggcggtgcagtggccgctgctgctgttcacgctgatacctttgctggcggccgcgctgctgtttcgcgtcatccgttcgccgcgcatgcggtcggcgtttgaacaacgcgatcgggcgtttcggcagttgaacgacgattatcggcagctggcggcgtatccgctgttggcacgccagtttcccggtgcgggcatcgaagcgcgcgcgcggcagagcctgcggggctttctcgccgcctttcaccgttggctgcggcgtatcggcgcgctcggcgccgtggcccaattactgctcagcgccgcgctgtcggccggctggctgttgctcggcgttcgctggctggcgcccgatctcacgctggcggagctggcgctgttcgtgttgctgttgcgcagcgtagcgcaaccggtgatggcgatggggcacggcggcgatgcgttgcgtgcggcgacgctggccgctggccgcattcgggcgctgctggcgcatcccgaaatacgctggggagggcgctcgacgatcgcttcggcgccgcagggagcggcgctgcggttgagcgatctcggttgccgacaggacgaacgctggttgctgcagggcgtcaatctggccgtcgaaccgggggagtggctggcaattgtcggtgcgtcgggcagcggtaagagcaccttgttgcggttgatcgcccgttatagcgagccggatagcggaacggtatcgctcgacggcgtgctcgctgacgcattctcggcgcaggcattcaatcagatggtggctgtggtgccgcaggagaatacgccgccggcgatgtcgctgcgcgacaacctgacgctgttagtcgatggggcggaggcggcgcagctgcggcgcgcgctggccgagttggggctggcggagcgtttgcaggataggttggacgatacgccttcgctttccggcggggaggcacagcgtctcgccatcgcccgggcgttgctggcgcgacggccgctgctgttggccgacgaaccgacgtcggcgcaggatcggcaaaatcgcgaatgcattctgacggcgctggcgcagctgcccgccacccggctggtggcaacgcacgatgcagaactgtgccgccgcgctgatcgggtggcggtgctggcggagggacggttgctggcggtcggcacgcccgccgagctggcggatcatccggcattgttggcggtgttggccgagcaccaggaggcggacgatgaagtttga

SEQ ID NO: 217261 - DNA, 1638 bp, Klebsiella pneumoniae
atgaagtttgagatggcgaaagcgttggccccggcgctgttgctgatggcgctggccgccgtgttggatggcgtctgcgccttgctgctggcggcagcggtggcgaactggcagcaaaatcccggccattggctagggctgctggcgttggctacgcctctcttgctcgcggtgcagtatgcggcggccacccgcggtttcttcgccggcggcgcggtgatgagcgcgttgctgcgggcgctgttccgccgtctgccgcgcgcgctgtcgccgcaggagcaggcgccgggtctgttggccggggccatcggtcagacgatgtcggcacccgcgcacctgctggcgccgttggttggcgcgatcgtcacgccgctggtgctgatcgccgggctggcctgcctgagcccgggagcggcgctgatgctgctggcagcctgcgcgctgttggtgctggtgttgcgcggttcggcggtccggttgcaccggcgagagcgagagcttggggaggccaatcaaagtattgaaggggcgctgatgcagtttgcccgtcatcaggcattgctgcgcttcggttacgggcaggcggccgccgccgaggcgttgacgcaacggttggatgaccatcatcgggcgcacgccgcgctgctgcgccaaagcttgccatatcacctgttgttcagcgccgggctacagctgacgctgttggcggcattgtggttcggtgcccatgaggtgctggcgcagcgcctgaacgccgcccaatggctggggctgatgattgtcttggcccgcttgttggagccgctacttcagctttctcacctcgatcaggcgctgcgtcagttgaagagcgcgtgggcgcaactgcggcagacgctggcgtcgcccgcgttgccgctgtcggaacgggacggcgccgcgccgcaggacgacggcatcgcgcttgagacgctgagcctggcggcggcgcacggcggttggcggttgcgggagataggcggaacctgtgccgccggagagatgttggcgatcgtcggcccttcgggcgccggcaaaagcagcctgctgagcctgatggcacgcacggaggatccgacggcggggcgggtgttctacggcggccgtgacgttcgcgcgttgtcggcgcggcaattggcgagcgggcgcggcgtgatgtggcaagataatcgcctgctgcgcggcagtgtgcgctggaatctgactcaggggcgaacggatatcggcgatgaacgtttgctggcgctgttggcggcgctggatctgccgctcgacgtgctggaagaagaggtcggcagcgacggcgatcgtttctccggcgggcagaagcagcggctgtgcctggcgcgcacgctgctgcagggggctccccggctgctgttggatgaaccgggtgccagtctggatcggcgcaacgccgagcgcgtggcggccctgctggccggctggcccggcacgcgggttgtcgtcacccacgatcccgcgttggcctgtcgggcggatcgggtgtgggtgctggaaggcgggcggctgacggcggcgggaagcccggatgcgctgcgcgaggcggggggctggttcgcccgtttctgccaggcgaaaatgaccggcgatcgatag

SEQ ID NO: 217262 - DNA, 2139 bp, Klebsiella pneumoniae
atgcgactcattcacctctcaccagtggcggccgcgacgcgccgcggcgcgttgctgtatgcgctgtgcggcaccggggcgctggcgcaggatgcgccggccaaaacggacgtaaaagaagataccctcaccgtgaccgccggcgcggcggcgcgggatgactatgtggctcccggcgtcaccacgctggggaaaatctcgctgaaaccgcgtgaagtggcccagtcggtcagcgtgatcgatcgccagcagatggagcagcagaatctcacatcgctggatgcggtgatgacacgcgccaccggcgtcaccagcgcccccttcgtgttgctgaccaccgcgtggtatgcgcgcggcttcaagatcgattcgttcgaactggacggcgtgccgacgctgctgggcaataccgccagctcgccgcaggacatggcggtgtatgaacgggtggagatcctgcgaggctccaacggcctgctgcacgggctcggtaacccggcggccacggtcaacatggtgcgcaagcacggattggcgcaaaaccgcgctcagtttaccgccagcgccgggagctggaatcagtatcgcggcgaagcagacgtgggcggcccgctgaacgcgtcgggcagcgtgcgcggccgggcggtgatggcatgggaagatcgcgattatttctatcgcgtctcggatcagaaaacccgtttactgtatgccaccgtcgacgccgatctgatgccggataccctgctgcgcgtcggcgcgcagtaccaaaccatcgattccgtcaccaatatggccggggtgccgatggggaaagacggcagcgatctgcacttgccgcgcagcacctatctggacgtggactgggatcgcttcaaatgggacaccacgcggctgttcgccgcggtggagcaccggctgaacgacgactggcaggccaagctgagcggcgactatctgcacgccaagtctcgtctgctgtatgccggcgcctggggaaacgtcgatccggccaccggcgatggcgcggcgctgatgggcggcgcctatcgctttcgcaatcagcagctggggctggacgccagcctgaacggcaagttcgacgcctgggggttgcgtcatgagctgatcgtcggcgccagctacacccatgccgaagaagagcagttcaatgcgccgttcgatccggcgtttcaggtgccggtgaacgtctaccgctgggatccgcacggcgtgccgaagccggcgatcggctcttacagctcgccggggtcgaccaaaaccgttcagcgcggggtgtacgggatgggccgcattaaactggcagggccgctgacgctggtggccggcgcgcgcgaaagctggtggcaactgcgttcgcccagcgacactctggaagagaacgtgcgtctgaccccctatagcggcctgatctgggatttcgccaaagactggtcgtggtatgccagctacgccacggtgtttcagccgcagagcggcaaaacctggagcgggcagatgcttaagccggtggagggccgcacgctggaaagcggggtgaaggcgtcgctgatgaatggcgcactcaacctctcggcagcggcgttccgcatcgatctggagaacaacccgcaggtggatcccgatcacccgggcggcggtttcgatacctggtatatcagcggcggcaaggcgcgcagtgaaggcttcgagctggaagggcgcggatacctcacgccatggtgggacgtcacgctcggctacacctataccgacacgcgctacatccgcgacgccggcaaccaggggcgcgcctacaacagcctgacgccgcgtcatatgctgcggctgtggggcgattacgacctgccgtgggatcagcgcaagtggagcatcggtggcggcatccaggcgcagagcgcgttcagcagcgccaatggcgcggcgacgctacgccagggtggctatgcgctggtcaacgtacgactggggtatctcatcgacgagacctggtcggcggcacttaacgtcaacaatctgttcgatcgtcgctactacaccgggcttttctcgccgcagtggaacaaccgttacggtgaaccacgcaacctgatgttcaccgtcaaggccgaattttga

SEQ ID NO: 217263 - DNA, 249 bp, Klebsiella pneumoniae; identical to SEQ ID NO: 195636

SEQ ID NO: 217264 - DNA, 1413 bp, Klebsiella pneumoniae
atgaacgccgtcgcgcgacgggctttggcggcgctgcatcggggctgcggcgcgttgttcggctgcgcgctgttcgtgatcctgttcaccggctgctggagcttggccggcgacagcttcacgctgtggtggaacggcgtgacgatgagcggtgagcaacggccgttggcgcagctgctggacgacgcgaaagcctacggcgaagacggcgcggcgccttacgtcatgcttccgagcgcgcgttatccggtaattcgcttttgccgcgccccggaggactgcgcgctcgcgctgagcgccgtcagcgggcggccgatcagcctgacggcgccgaccacgctgttggtgacgctgcacaagaacctgtttctcggctttcccggtcgggtgtttctcagcctgttcggcattgcgttcactgtgttgctgatcagcgggattgcgctgcatggccgacggctgcgccagctgttgcagctgcggcggcgtcaggggctgcgggtgctgctgttcgatctgcacaatctgttggggctgtggtgctatccgtggctggtgatgttcgctttgaccggcgcattatccggcctcggcgcgctcggtacggtgctgctggctgaccgcgtcagtcccggtgcaccgcagcgagtgatggcgcagctgatgggcggtgcgcaacctgcaccgccattgtcagacgctgggcgtactctcgcgcagacaatggtggcgctgcggcaccagacgccggaatttacgccgcaaatcctgcagcgcgcgccggatggtgcattgctggtggtgggcggtgtcacccgcggtattcccagtagcgcgctgttcgagcaatttcgtttcggcaacagcgagcagccggcgctgatgcggcgtagcgctgctcgtcaggggccatggacgcgcgcgttcatcgccgttcagccgttgcactatggccaatacgcctggttgccgcaggcggaggcggctgtgagcgcgatgcattttttgacagggtttggcgcggcgacgctggcgctgagcgggttgggattgtggtgcctacgggagccgcagcaccgtgccgcgcgctttatcaccggcgtctgctgcggtctgacggtggcgggaagtctgctgttggccgcccggccactggcgtcgttccctgccgcctggttgttttgggggatgtggggcacggtggcgctgttggcgtggcgagtttggttggggtggatattgttcggcagtggaatggtcggcggcacggcgctgctggtagcggcgctcggccatatactcagcgtcggccccggcctgtactggctggacagcgctttattgttggtcagcgcggccctgttcgccgccggctccttgttatggcaatcgcgcggcgcctggccgcactaa

SEQ ID NO: 217265 - DNA, 1236 bp, Klebsiella pneumoniae
atgcgacaactattgcaacatcggcatctggtgatggccctggggctgctctattttagtcagggcatcccgatcggcattgccatggatgcgttgccgaccctgctgcgccatgatggtgtgagcttgtatgcactgacgtttttgccgctggtggggctgccctgggtggtaaagtttctttgggcgccgctggtggataatcattggtcgccacgcttagggcgtcgccgcagttggattattccgctgcagtgcgtggtgacgctgtgtctgatcctgctcagtgtggtcggcatttccgcagcggcggccggtctgtgcgtcgcgctgctggccgtcgcgtcgctagccagcgctacgcaagatatcgccaccgacggcatggcggcagaacacgtcagcgatgagttgttgtcgcgcatcaatgccattcaaatagccggggtgatgagcggcttcttcgtcggtggggggggcatgatgatgctgagtactcgggtaggcgtgcagggtgcgctgctggcgatggcgatcttccctgccgtcagcctgctggcgattggccgcctccgacaacacgccgatctaccgcccgaacgcgccgattcgcgtccggccaacctgctgcgcacgctgcgccgtcacggggcggtgaggttgttgacgctcacgctgctgtcggcggtgactgcggtatccggcctcgggttgtctaagctgtttttaaccgataacggttggacaccggctcaggtcggccagatcagcatggccggcggtatggtgacgctggtgctcgggtgcggtggcggagcctggctggtgagccggctcggggtgtggaaggcgttcgcggttggccttggttgcgcgttgggtgccgcgttatgctggctagcgatggccaactggggcttacaatccagcggcgtgatcgccgcggtgattggaggcgcgctggcttccggcgtgacctcggtcgctatcatgactgccggcatgcagtttgccgcacagggcgatcaggcgggtaccgacatgaccatggtgcaaagctcgcgcgatataggggaaatggtcagcaatatgctgatggtgggaatgaccgccagcctgggctactgttcttccttcgcgttggctgccgcgctggctgtgctgctgctgggcatcaatctggccagcgaccggtactctgcggcggtgcagcggcaagaagagtggaggcgataa

SEQ ID NO: 217266 - DNA, 1089 bp, Klebsiella pneumoniae
atgctcagccagcttaacctgcgttttcacaaaaaacttatcgaggcgctgaaaacgcgtgccgggcgggaaaatacttcggtcaacgccctggccgaacgcttcctcgatgaaggcctgaaaacggtcgcgcccggcgacgggtattttcagctcattgccgatccggaggccacggtccggcagctgtaccggcatatcattctgggccagaccttcggcacgtcagcgctctcccgcgacgaactacgctttgtcctggttcacgccagggaggccttcctgcgcgggcataacaggctggccacactcccggccctggacacgctgctggacatcaccggcaacctgctggcctggcaggtggagcacgatcgccctgtggacggtcactatctgaaggggattttccgcctggccgggaaaaactggacggaagagtttgaagccttccgggcagcgctgcgccccgtggtggatcagatgtatgccgaacacctcctgcgtccgctcgagagcgactgttttggcctagcggaggtgccggacgcggtgctggcagaaatcttcaccctgccgcggctgaaagctgttttcccgctgatgctgcgcggcctggactggaacacagaacaggcaagagcgctggcacaggagctgcgcccggttatttctgccgtcacggaaaccattgaggccggcacgttgcgcctggagatccgcgtggacggccagccccccggagagcgcccgggggcctggtacaccaccccgcgtctgcacctgctgatcaccggccaggagttcatgacaccgtacgggtgggaagtcttctccgaactgctgggcctgttcacgttgtacgcccgccatccggaagccctggcgcacggccaccaaggggagcgcgtgatgttctccccgcccggccacgtatcaaaagagggatttttcgggatagacggcctgcggatttttatgccagcggaggcctttgagacgctggtccgggagctcgccacgcggtgtcaagaaggcccgctggcggaggccctgaccgggctgcgctgcctgtacggagatctgtaa

SEQ ID NO: 217267 - DNA, 1530 bp, Klebsiella pneumoniae
gtgcatggggacaggcagattatcactcatgccgttgaaaatgcgctgaatatcgaagatggcagccgttacctccagaaaatcattcagcttagttttaaattaccccgacctgaaacctttgatttacgtaatgaatttcgccggcgggctgaggctctatatcagcaaattaataatcaaccgccagactctggaatggtaagggatctcgtcgcggtgactgatacctatggtgccgcactttcgacgccacgggaaatccatcaggccattaattccctgatatttctttatccggggatgcgggattttgtttatttccctgatttgtgcctgcttcagcttatacgggtgacaaacccggctctgtatgactggacagagcattacctgacagaacggtccgtgattgaagccggccagggtatgctttctgacggagagaaagcagacttccgggaggggcttatcagatgtatgaagacgttcagggcatcaaatgcagactcatttctgacacttgcagactggatcccaggtatcagtggacataatgatgaatatctgaagctttttgagccagtcagtgaggatttccgtcatatccagacgactggtaaacgactcagcagcctgacgcactggcgatattattttgccttctcctcaccacagaatgttctgccacctgaattcttcagacagctttttgagcaggctggcgtatcggaaaaacagcagcagctttctgaattgctgctcccaaaaatcaacagtgtgggcagtctatccggaacctggtttgaacatatactgagcagactgactccgggcctgataagagaacgcaatttcgaagagtgcgcaggactggttcattttttcttcgatcacaccgatgaggtgagcactcgcttcagtatccgtaacccatggttttccctgcgtgaaatggccattaatgaggttgtacggcatctgctgaagcatatgcaggatattgatgagaccagaacgatcacgcttatggaaaagctgatcgttacgggtgcttcgccgttctggatagccgattttatgcgggatcttatctgggaacacggacttgctcagaatgcagtaccttcgccttcagacgctcttttcagtcgcgatattacggaacggttgcgtgacaggtttgctgaacgtatgaatcagccagaacttcagcaacagcttctcctgcgcaagtctcttctcgggtatctctacgcctggagagacatgagttcaggtgaaaccgtgaagcaatgggtcagagaagttactaccactgatgaaggccttgttaacctgttgatacgattacagaccagtgtcttcagctcccaccgaggggcatatcgccggattgcgcgtgaccaggtcagtccgttctttgatggctggccagcagtcgaagagaagttgaaggttatgctctccggcaacgagctgactccggagcaggaagcgctcaaaacagcgctggaaaatgacgactga

SEQ ID NO: 217268 - DNA, 900 bp, Klebsiella pneumoniae
atggcaattgatatctttcagtcacttaaaaattgcgtattcgaccttcagcgcgctgacgttcagaactaccagcaacctcttaagcaattggctcggctcttgaactcagagaatctgcagtcagttaatgcacatctggcccgcaatgttgaacttgatacctttctggccaggagtgaagatactgaatccagcatggctggttccgctgttctacagtggcctgatgagcccgctgatattttgggcctgaagttgctgctgatcgagaaaatggcagccgataacaatttttcctttaatttctgtcatacatttttctatgatcgaaacattattgaatccattcgaaaattcacgtcatcattagttgccccgttcgtgcgcgattaccagttgtatgtggaaaaccaacacgctcctgagcctgcggtgtttcggccggtttcccgaaaaatttttattgttcatggccatgataatgatgcccttcagtctgttgcccgttttatatcccggataggtcttgaggaaatcattctttcagaacgtcctgacggctcaaggacgattatcgagaaatttgaagcggagtcaggggatgtcagttttgccatcgtgctgatgacgcccgacgatagcggcagtgctctggcatctgaaagcacacgtctccgcgcacgccagaatgtcctatatgagctcggatatttcgccgggaagcttggacgcgggaaagtacttgtactcaggaagggagatatcgaaatcccttcagatcttgccggggttctctataccgagcttgatgagcatggtggatggaaacgcaaactgctgagtgagcttgcgtatgccggtgttccttttgacaaggataaagcgttaagcgcctga

SEQ ID NO: 217269 - DNA, 291 bp, Klebsiella pneumoniae
atgagcgtcaaaatcacaggtttagacaaaatgcagaaacagctaaaagaggttgagagagcaacagaggcattaaacggaagttatgatgtccacttcgatgctaacgatcctgtcagcattgagaacgcgattcaggaagcctattccatggtgtacgaacgcgcttctggttatgccactaatccgatggtcagcccattaatcgaacacatgaaagaaaatctgcgccaacagattctggacagtgcagaacaacaaagacaggagagcgggcaggatggcaattga

SEQ ID NO: 217270 - DNA, 594 bp, Klebsiella pneumoniae
atggtagcgatgatgggtgatagaatggataaatgccaggaagaaacaaatcgagtaatgacgctgcgaaaaataccggctgatgtcgatgctgctattacagaacaggcccgactgacaggtaaatccaaaaacgatcttgtgcttgagctactgacagccacattcggcgatctgctgggaaattttgtgcgtaccagcgaactggttgccctgatggacaaggaggttgcccggctgactgaacgggagatgacgtcgcagagctttgaaagcgatcttgtcccgatctataaccgggaatactgtcgtatcctcgagcttaacaatgaagacgatctcaagcgtgtactgatgaacaatattccttatctcgagcttcgtgcacgacagcttcgttatggcatgatcccgtttctgccaaaaggaatttcgatgacaatggctctgttctgtgaagtggccggacgggacgggctgaccatcgcccaattctatacttctctctggtttgttatcgggcaggaggagtattacagggagattaatgagatcagaatcgcgaaatccctgttgccaataaccggactctga

SEQ ID NO: 217271 - DNA, 1050 bp, Klebsiella pneumoniae
atgagtcttgatctgttcattaacaaagaacgcctcgatatctatgttcaacatcttaaaataacgccagtacaggtaatgtcggcatatcactggaacaaggcgctttgcggcgccatgctgccagccctgcagtgtctggaagtcacgctgcgcaatgcgcttgatcatgcgatacggacgaacccgcctccggccgcagtagcctcctctttgtggaagacagaccacaactggatatttgatcttccccgttatatgggagacaaaacgtatcccagaaataatgacaggtacaaacgcccggatccgaaaaaaacaaccctgccaagagatgctcaggggtttttgctggatcaatacggtaatcgtgtattgaagaaaacaattcccgttgaaaatcaggtaaaaatggcaatcgatgaaattgccaagactagcaagttaattacaccgaaccgtgtgatctcaggtttgtcctttggcttctggacgatgttacttacccgatattacgagaaccctcaggggacacataaaaccctgctctggcctcatctgacgcgtacagtatttccaaatgctccggccccttatgaacgaaaggaaatatgcgatcagttttatcgcatcaaggagctgcgtaacaaattgtcccaccacgaggccatctggaagttccatcatgacgatccgaagaccggtaaaccggattacggaaaccctgtatatggagcccaggccagctgtagcctgctgaggaaacattatgacgatattctggatatgatcggatggatgaatcctgaccggaaagtgaatttcctgagccactcggcaaacctacggttctatgccctgtgctcggtagacggactgaacagctacatcgccccggaaaaaattaaggcacagattaaggtttcacggggtggtaaaggtatcagcaggttaatcaggatcctcgaaaaaaatgagttcatccggattgtgaaggagggtcagacagtacttaccatcggcaatgataattccatcgccattctctag

SEQ ID NO: 217272 - DNA, 2805 bp, Klebsiella pneumoniae
gtgaagctattcccgaatggctctgaatggcgtaaatgggatctgcatgttcataccccttcgtcatcacttgagaatcagtatcggaatgactgggaagcttatcttactgcaattgaagcgtttggcgacgaggtcgctgtcatgggagcgaccgactactgcactatctccgggtatgagaagctgctcgcataccgtgcgcagggccggatagccaatattgaggccgtttttcctaatatagaatttcgcatcacacctgaaacgcaaaaagataagggtgtgaatattcatcttattgtcaatccggcggatgcaggtcacgttgacaaaataaaacacgcgctgggccggcttcacttccgttactgcgggcagaactattcctgcagcgatcagcagctgactgaactggggattgcggtagcagggttgtcctctcccgagaaaaatctgcgcgacggcattaaccagttcaagccttcttttgacgtctttgaggactggctgaggagtgaaacctggctgcggaacaacgttattgtcattgcatctaacagctcaggagacggaatctccgggctccgcgacaatggtcttcttgctgtccggcagaacatctatcgcctggttgatgcgattttttctggtaacccgcaggattgtgagtactttcagggacgcggctgcgacagcagggctgaagtcatcagtaaatacggcaagctactcccctgccttcacggttcggatgcacatggactgactaaaatttttcgtcccgacggcgatcgtttttgctggattaaagccgatcctacttttgcgggattaaaacaggtactgtacgatcaaactcgagtcaggatccagaaaacgtccccccatacaaaaacgccttatcaatatattaaacacgtctgctttacggatcgcagtggccatgcacttttttcagaccagcctgtaaacttcagtcccgacctgaatgcaatcataggcgggaagtcttcaggcaaatctctgctgctttaccacatggcatgcgccattaacgctgatgaggttagcgagaaaatcaggatctcaggacaagccgcctatgacgactttagcaatctcgatgttgaagtcacatggggaaacggtgaagttagttcattacatggtgacgactgtcggcctgtgacctacattccgcagctctatatcaatcaccttgccgaacgtagcggtcagcttcagctaaatcagctggtcgaggaaattctttatcagaataataatttcaaggctttcgcggttgagaataccgcacagcgggaagcgactattcgggtcataaaaaccaggattgattatcttaccgagctgcgcaaaaaatacagcgaatgcgttaaggaaatggagaagtacggcacggaaaaggcggtaagtgatgaaatccggcggcaggaggagaagatagctcaactgaggaagcaggcatcgtttacaccagatgaagaaaagcagtatatggcactcagactgcgcacggacaaccttcaatcccgtcggcgcgcgatagaagatcttactgatgccagcagaagccttaaagaaagcctttatcggcatgccggtagcacgatacaaagccttactgaccaactcaggctggatattcctctgcctgagaattcctcttttttggagaaaagccttcgtcagctggagacctgtctttcagttgctgtcagtgacttcattgatcgccacgaggcccgttttggccgcatccccacaaggctgacgcggattgataccgaaagcgcagccaaaagggaaacgctgcttcccctgtcagtaaaaattaccgatcaggaaacgctcaaagcatccacggctgcgcttgaaaaggaaagagaaaaactcagacagctacaacagctctctgaacgccggcggtccattttacaggaaggtaatgatacaaaaagccagctccagaccgagtatgcgcgccttactgacctttaccaggcttacgtggacgagctaagcaagcctgaataccaccctgaaggcgaaattagcgtaattgctcgcatatccttcaatgctgagaagtttgatcgcttcaccggttgctttgaccggagagggaacataaacctcctgctcggcgatctggccagcccgaaaggcggctacacattttccgctgatagccatgcggatacgatcgcaggcatctatgaccgctacagaagcggcggggttgctcccgctcttcgtaagggcattgaggattccgatattctgagttatctctatgatgactgctacctgattgatttttctgtccgttaccgcaacgacgatatcgtgcagatgtcgccaggcaaacggggtctggtgctgcttaacctgatccttcacctgagcaattcgcgacaccctatccttattgatcagcctgaagacaatctcgataaccggacgatttattcccagctcaatgatttcgtcaggcagcgcaaggcggaccggcagatcattatggtgacgcacaatgccaacctcgtcgtgggaacggatgctgaatgcgtgatcgtatctaaccagagtgggcagcgctcgggcattgagaacggtgaattccggtttgaatattataccggctcactggaatgttcgttcacttcacaggacgattccggccgtctgcatacccggggtataagagaacacgtttgtgaaattctggaaggcgggatccaggcctttaaggacagggaacgcaagtacggcctttag

SEQ ID NO: 217273 - DNA, 231 bp, Klebsiella pneumoniae
atgagaaccgtatccatttttaaaaacggcaataaccgcgccattcgtctgccccgcgatctggattttgagggagtgagcgagctggagatcgtccgggaaggggacagcatcattctgcgtcccgtccggccgacctggggctcattcgcgcagctcgaaaaagctgacccggactttatggcggagcgcgaggacgttgtcagcgacgaaggacgggttaacctgtga

SEQ ID NO: 217274 - DNA, 402 bp, Klebsiella pneumoniae
atgctcgacacgaacatctgctcgttcatcatgcgcgagcagccggaagccgtcctgaagcgccttgagcaggcggtgctgcgcggccaccgtatcgtggtttcggccattacctactccgagatgcgcttcggtgccaccggcccgaaggcctcgccccgacacgtgcagctggttgacgcgttctgcacccgcctcgatgccatcctgccctgggaccgcgccgcggtggatgcgaccacggagataaaggtggcgctgcgcctcgccgggacgccgataggcgcgaacgacacggcgatcgccgggcacgccatcgccgccggcgcggtgctggtgacgaataatgtgcgggagtttgagcgggtgccgggcctggtgctcgaagactgggtgaagtaa

SEQ ID NO: 217275 - DNA, 693 bp, Klebsiella pneumoniae
atgctgacgcatgacgtggagcctgtgattgacacgctgaagtcagtcagaaagctgttcagtaatctggttaccgcctcctgcctgcgcctgtctgccggagttatagaggagttacccgttagcgacggcgatatcatgacgttcatgcagatctgcaaatccataaccgcgtcagcagactgtgaggaaatcattaagcttatctatcttcgccgctactttgaaatcgttgacgaacgtggcgatgcttatcagctcctgtccaacctgttccatcgacgcgtcgtcccgctggatcatcgcgagcctgccgctgcgggcacgggctaccccgaaatggtgccagagaaaattcagcaggcccggcgggatatccgggagtatgtggacagctttgattacccgcgacttcaggctctcgtcagcagcacggatgaaataaaaaatctgtaccgtcgctgtcgtaacggctatgaaaaactgcaggtattccgtttactggaaatggatcaggaccatccggtaatacgaaaattcgttaacgaaacgtaccacattgaaaatgagttcatctgtcagctggatccgtccagattcgatctcatcccggagtacgtgattatggaatgtgacaagctcatcgccctgccaccggcagcaaaccagagctcggttgcccgtaccgcctga

SEQ ID NO: 217276 - DNA, 276 bp, Klebsiella pneumoniae; identical to SEQ ID NO: 102277

SEQ ID NO: 217277 - DNA, 1005 bp, Klebsiella pneumoniae
atggcaaaaccggactggggcgagcttcagcgacggttcctgtccgatcatgccgcaaccggcgtatcaccgaaggattggtgtgaagcgcagggactgaattacgctactgcccgccgatacatcaagaaacccactgcgcaaactgcgcaaaaacctgcgcagaagaaactgcgcactgcgcaaaaggaaaagtgcgcagaagagctggtggatgatgatggcctcaccgatcagcaacgtttatttgtcgcggaatacctgaaggacaacaacgccacgcaggccgctatccgtgccgggtacagcaagaagacagcgaatgagcagggagcaaggctgttagcaaaagttagtattgcgcaggccattgcgcagcagcagaaagcatccattgtgcgcacgcttggcagcgctgatgaagtgcttgagcagatgtggcggctggcaacattcgacgccaaccaactttctcagtatcgccgcgggagctgccgttactgctggggcttcggtcaccagtatcaatggcgcgatgctgttgagttcgaagagaagctggctgaggctttagcgaagaaagggaaagaaccaaacgacagaggcggctacggttacgaccataacagcgcgcctaacccggaatgccctcgctgcaatggcgatggcataggtcagactttcttcgccgatacacgcaagctggcgccggatgctgcgcttgccttttctggcgttaagctcggaaaaaacggtgtggagataaccgctatcagccgggagcggatgtacgaggcggtgatgaaacgtctcggcctggctgatagcgagttcgcccagcgtctgcagcagattgaaatcgagcgccggcagctggagatcgacaagctccgtaaagagctggccgctgacccggaagatgacgaaccaacgccagttgcaataaatatcaacgtagtcgatgcacgagtgagggaagaggatggcgatagcaccgacgcttaa

SEQ ID NO: 217278 - DNA, 1305 bp, Klebsiella pneumoniae
atggcgatagcaccgacgcttaacatccctcaggccaaattccttgcgatgcagtacaaatttaaggcctatgtcgccggcttcggttccggtaagacgtgggtcggctgcggcggtatctgccaagggatgtgggaacaccccaaaatcaaccagggttactttgcgccaacgtatccgcagatccgtgacatcttttatcccactgttgaggaggtggcccatgactgggggctgaatgtcaaaatcaacgagggaaacaaagaggttcacttctacgccgggcgccagtaccgaggaacgacgatttgccgctcgatggagaaaccgcaaaccatcgttggttttaaaatcggtaatgcgctgattgatgagctggacgtaatgcccgccaaaaaggcgcagttagcctggcgaaaaatcattgctcgtatgcgttacaacgtggccggtcttcgtaacgggatcgacgtcaccacgacgccggaagggtttaaattcgtttatcagcagtttgcaaaggctgtacgcgataagccttctctctcaacgctgtacggcctggtgcaggcctcgacgttcgacaacgaaaagaatctgccaccggactatatcccgtcgctgatggagtcatacccgccggaactgatcaaggcttatctgcgtggccagttcaccaaccttaccagcgggacgatttaccatcagtttgaccgtaagctgaataactgccgggtggaagaacaacccggtgagccgctgtatatcggtatggatttcaacgtcgggaagatggccggggttgttcatgtgttacgtctggggcttccgtttgcagttactgaaatcatcaaggcttacgacacgccggacatgattcgcatcatcaaagaacggttctggctgtacgacggcaacgattatcgcaaggtgcgggaaatctatatttacccggacgcttccggcgattcccgcaaatccagcaatgccagcgccactgatatcgcccagcttaagcaggccggcttcaatgtggttgttaatgcatcaaacccgccagtgaaagaccgcatcaacgcgatgaatgctatgttctgcaatggtaacggtgaacgtcgctacaaagtgaatgtaaagcggtgcccggtgtacacagaatcgcttgagcaacaggtttggggcgaaaacggtgagccggataaaacggcggataacgatcaccctaacgatgccggtgggtatttcattgtgaagcaattcccgatcatcaaaccgactggaaaagtcacccaactgcggatgtaa

SEQ ID NO: 217279 - DNA, 1425 bp, Klebsiella pneumoniae
atgcctgatatttcaacgcccaacctcgactataacgacatggttgaagcatgggatattaatgatgcactgatgggcggcacgctggaaatgcgccggcagggcaagaagtatctcccgaaatggccgaacgaagatcctgaaagttataaggagcgtttggcttcggcaacgttactacctgcctatgaagaggccattaaacaaaacatcgggcgagtgtttgctgagccgacggtattgagtgaggattctcctgagcaaatacgggagctgtcgccagatattgatatggaaggaaaccggctcgatgtctgggcacaacaatttttcagcatcggatttcagtatggtctggtacatgcgctggtggatttcccgaaaattgacccggaggcagtaaaaactaaagccgacgaaaaagccgcgggatcccgcccgtatgccacgatgttaaatcctcgccaggtcatcggctggaaatcgaaagtggttaaagggaaagtagtgttgaccgatctgcgtatcagagaggtcatcattattgatggcgacgattacgggcaaacgaaagttgagcaaatacgccatatcatgccgggcaaggttgaaatttatcgccgaaataaaggtgataacggcgaaagccagtggcagattcacgaggagtgggaaaccagtcgcgatgacattcccctggtgacgctttacacgaaacgcacaggctttatgcgcggttcaccgccactgcttaatctcgccttactgaatatcaagcactggcagagtcagagtgaacaggacaacattcttcatgtcgctcgcgtgccgttgctggtggcttacggtctggctgatggcgaaacgttgacgataggttcttcctctgcgactcgtttcgatgaccgccagcggcagggactggaatatgtcgagcataccggggctgcgattgaagccggtaagatttcccttgaggatctggaaaaccagatgcgtcaggccggcgcaaaactgctgcgagcggaaaacacatcgactaaatccttagaccagactcacgaagagcggatgcaggagaattcacctctctacaccatggcaagctcgcttgaggatgcgctcgataatatcctgcagattatggcggaatggctgggcgagaaagaaggcggcaatgttgatgtacgcaccgaactggatgtttcagcccagacgtttgatgccgcagctgcaacagctgttcagtcgctccgtcagggtggtgatatacgtcaggtcgatgctgttcgcgtattgcaggctctgaaatttatcgatccggatgcgaagcccgaagaggtaatcgacgagctgcgaaatcagcaggtcacgctggccggcggactgagtaacccgggtggtgcaaatggcaacggcgaatga

SEQ ID NO: 217280 - DNA, 1026 bp, Klebsiella pneumoniae
atgataaaaatcctaaatgacagcgatgcggaactgacagccagattgctggtggcgatggatagcctggatgctgaaagctttaccgtgtcgcgactggaagcgctgctcgttagtgtcagagctctcaatcgcgaggctgtgcagtcaatgtacgcgggactatgtgatgagctgcagcaactcgctcagtacgaagcaggctttcagctgagcctgttccagtttgcgatccccgatgatgtgctatcgcttcacccgctggtgggcatttcaccggatgccgtttacgcaactgtgatggcacagccgtttcaggggcgcctgctttcggagtgggcagataatcttgaagctgacaggatggcaagaatttccaatacagtgcggcagggttttctcctgggcgatacgcatgagcaaatcgccagaaaggtccggggtcatgctaaccgtggttatcaggatggcgcgctgcagatgagccgaaccaatgccggcagtattgcaaaaacggctgtggggcatcttgcttctacggccaggaaaagctttgcagatgcgaacgatgacattttgaagggtaagcagtggttatccactttggataaccgtacatcaaaagactgtcggattcgcgaccgcctcaagtacacactcgataacaagccgatcggccataaggtgccgtatctgcagggacccgggaaaatccatttctgctgtcgcagcgtcgaaacctacatcctgaaatcgtcggatgagctgggtattgctgttgggcaaatatcagatagctcacgtgccagcatggacgggcaggtgccttcggataccgattatcagggctggttctcccggcagtcgttcacgcgacaagctgagattgtcggagaaacgcgcgccaggctgattcgtgatggcggcatgtctcccgatgagttctacaacgacaggggcgagtggctgacgcttgaccaattgcgcaaccgtgacgcgcaggcgtttaaggacaccagagtgtga

SEQ ID NO: 217281 - DNA, 240 bp, Klebsiella pneumoniae
atgaagattttcttaaaaggtgggcctcgagatggtgagtccgtatcccttcacacggatgactacggagtgccattagaacgagtgcaatttcctcagcctgtttctgatgcatccccattgtttaataacggatttgatgcctgtgagctcgaacaggatattctgatatatacgctagaaaggatagtaatagacgggaaactgcatcactacgaataccactatcaaggtcgctaa

SEQ ID NO: 217282 - DNA, 765 bp, Klebsiella pneumoniae
atgaaactgaaaacagtcgaagttaacggcaaaagctatgcagaagtcgattccagcggtttacccgtctacgtccacgatgacggccaggaagttggttttgatgctgtgcaggccgttgggaaaatctcctctctgaatggcgaggcgaaatctcatcgtgaagccaaagaagcagctgaagccagtctggctaagtttgccaaaatcggtgatccggcgaaggcgctcgaagcgctggagatgatgactaaaatcgaccagaaaaaactgatcgacgcaggcgcggttgatcaggttaaagcggatatcaccaaatccttccaggcgcagcttgatgaagctactcagcgtgcgacgacccttgaaggccagctttatcaggaaatgatcggcggccgattctctggctcgaaattcatcgcagataaagtggcaatcccggcagatatgcttcaggcgcggttcggtcagtccttcaaagtcgaggacggcaaagtcgttgcctatgatggctctggcaacaaaatttattcccgctctaaaccgggcgaactggcggcctttgatgaggcgctggagttcctggtggagcagtacccacagaaagaccacattctgaaggccagcggcaaccagggaggcggctctcgccagtctcagcattcactcgggcagaaaacgatgaaacgcgatgcgtttaccagtttgagcccgaccgatcagcaatcaactctcaaagacggtatcaccatcgtcgattaa

SEQ ID NO: 217283 - DNA, 1137 bp, Klebsiella pneumoniae
atggctaatacgcttaccgggttgatcccgactatcttcacggctctggataccgtatctcgcgaacaggtcggttttatcccggctgtatcgcgcaatgctaaagctgatgcggcggcgaaggaccagactgttactgcgccggttgcgccaccggcaaccaccgttgatattaccccgggggctactgcgccaaatgacggcgaccagacgatcggcaccgttgatgtcaaaatcaccaaatccaaaatggccccggtcaaatggaacggtgaggaacaactggcactggggcccgcagggacatacaacaccatccttgctgatcagtttaagcaggcttttcgcgcgctggctaatgagatggatgcagatctcgcggctctgtatttcgcatcctcccgtgctgttggtacggccggcaccgctcctttcggtattgcaggtgatttgtcggatgcggcaaatgcgcgccaggttctctctgacaacggttcgccgacaactgatctgcagatggttctcggttcttcggctatcgcaaacctccgcggtaaacagtctgttctgttcaaagtaaacgagtctggtactgatgcgcttctgcgcgaaggtatcgtggggcgactggaaggattcaacatccacgaatccgcgcatgttaagaaacgcgctgcatctccggctgccggatacctggtgaatggagcaaaagctgaaggcgatattctgattgccattgataccggcacaggtgcttttgcagcgggcgacatcgtgacgtttgacggggacagcaataaataccttgttgctgctgcgacggccacagcaatcaccctggctgctcctggcttacgtcaggcactggccgacaacaccgctattaccgctggtggcgcctacaccgcaaacatggcgtttgatcgcaatgcattcctgcttgcatcccgaaccccggcaatgccgcagggcggcgatactgcggatgatgtgatgaacgttactgaccccgtatctggcatcacttaccaggtagcactgtaccgccagtatcgccaggtgcgttacgaagtcggtttgtcctggggcgtagcggcagttaagtccgcgcactcagcgttgttgctgggctga

SEQ ID NO: 217284 - DNA, 213 bp, Klebsiella pneumoniae
atggccggattaacaaaagagcagcgcgcccaacgagctgctgagcaaactgcgtctacgaaggtggataacaacgtacccgtaacgaccacatcgctgctggtggcgatggttaccgatttcccggcattcccgggtgcgcccaataccgccaacgttcaccctgatgaagtggagaactggaaggcgcacggctggaaagaaatggagtga

SEQ ID NO: 217285 - DNA, 411 bp, Klebsiella pneumoniae
atgatcactttcatcaccgttgaagacgtcaattcgattctcggtgccacctggacagatgaaagcaaaaaagccaaatctgtgctgatggctaatacctggatgaatggacttaacctgaaaatgccgtgcaataaggtaactcacgaaatcatcattcctgacgatgtgaaacaagctggcgcctatgcggcgctagcggcctcgaatggtggcctttatcagcagaaaaccgattctggtgtgttgctgagtaagacggtagatgccgatgatgtcagcgtttcaaagaccttcgcggaacttgctaccaacagctcggcattgcttgattctgacctacagctggcgctggccatgcttaagccatacggtgttaatcagtcgcaggtgcggcttgtgagggggtaa

SEQ ID NO: 217286 - DNA, 234 bp, Klebsiella pneumoniae
atgcaaaagccggatgtgcattatgccggtgacgggctcggtcctcgcgatgtgtttgtgaatggaaacccgatcagacatgtcgtttacgcaaacccggcaaagggcgttgttgtgtttgctccgctcccgatgcgggttaagcgcaacggcgaaatttatacccgcaaactccacggtactgtgatcgttaaacctcagcagcatattggtgggtgcaatgggcattcgtga

SEQ ID NO: 217287 - DNA, 384 bp, Klebsiella pneumoniae
atgggcattcgtgacgagttgcaaaccgaagtcgccgcagccttcgataccgacctgcaggatgcggttaacgagttcgccggaagctacaccgttcgaggtgcctgggacccggtgacggaaaccggcactgaaacgcaggtgacttactcggggcgtggagtgctggcacgctataaactgcgccgtatcgatggcgttaacattctgcatggtgatgtgaagctaaccgccctggttaacgaggtgactgataagccggccgtcgggcatatcatcaccgcaccagatccgattacgggagcgcttcagcgttacgacatcataaccgcttctgccgactctgctggcgctgcgtattcaattcaactgcggagggcgtga

SEQ ID NO: 217288 - DNA, 552 bp, Klebsiella pneumoniae
atggctaagggctggaacattgatccggcggcattcgccgggctggtggctgaagatgtcaaactacgccagcggacaatcgccattcaactgctgaatgaaatcgttcaacggtcgccggtaggaaaccctgagctgtgggccatcaacgcgaccgcggttcaatacaacaaagcggtaggtgaatggaacgaatctctttatgccgatcctgccaacctgacaaagactggccgtctcagaaagaaagtccgtgttaatgacagcatggatatcaggcgcccggctgagtatcgcgcaggaacctttcgggcatcgcattttgtcagcatcggcgaacctgatcattccgtcccgaccgaaccggatccgcgcgggacaatgacgtttcttaatggcaaaaatatcattgaccaggcgccagcctactcggtgatttacatccagtcgaacctgccttactccgtgcctctggagaatggccactcaacacaagcgccgacaggcgtctatgccgtctcgtttaatggtgtgattcaggcctacaaatga

SEQ ID NO: 217289 - DNA, 1173 bp, Klebsiella pneumoniae
gtgagctcaggtgcaaaagtagtagccgtgtttattcgcgagacaacgccaggaatcacgccaacagcaggggcgtggaacctgctgcgccgttcttcatttggtctgaaaccaacgcagaacaccaacgacaatgacgaaatcgctggtgaccgtatggcgcagggtgtttcacgcggcacagtggatgtcggcggcgatgtcggcacacggtttcgctggaatcagcatgacgattttcttgccagctgtttcggcgccgaatgggtaaataacgtgctgacgatgggtaatggtcgtattacgttctccgtggcgacttttgccagtgatgtggggatcgcccagattgcccgcggttgccaggttggcaccttccagatggaaatcccggccgatggtgatatcactgcaaccattacgtttgcagggctggactgggagacgaagggggacgataccagctatttcaccgcgccggtggatttagcgggggcgctgcgttactccttcaaagaggtcaccaacatccggctaaatggtgttgatggcgggacaggcttctgcgtcgacacctttaacattcagttcgacaacaatatgcagacccagcgctgtatcggtaccggttcggcgttcgccggcgcaaacattccgacaacctttaccccgtcaggtcaaatcacgctgtcatggtcaaaagctgcctgggaggtttacaaaaaaacgttcaccggcgaaacggtgccgtttagcttctccctggagaatgctgaaggctcctataccttcgatttcccggaagtgcagatctccggcgactggccggatgcggggagcactgacattgttcaagttcagctggatatcaccgcggccaatactccgccaactatcacccgcgtccccaaagtgccggcgacggcaatcagtgttgcgccagccacttcaactggagccgtgggatctactgtgacgttaaccgccacgcttaccccggctgattcaactgataccgtccagtggacgtcatcggatccgactatcgccagcgtggtttctaccggacagaaaacagcgaaagtcacacgtaacgcagccggtactgcaaccatcaccggtaaggcccgcacctttacggcaacgtctgaaatcaccgttaccgcgccttaa

SEQ ID NO: 217290 - DNA, 483 bp, Klebsiella pneumoniae
atgctgattgttaccccaaaaattgatttaaatggtgagcgctggttttcaccttatcaaaagccagaaaacagccaggaagaatacaccccggaagaggaatcgcttttcaaacttcgcctgctggtggccagcagcgagaatccacaatatcgctcccgtaacgctctggtgcgccgccacatcgataagatggacgctggttataaggtaggcaccaaagaattcaatctcgccagagtgggcgatatcgactctgttgatgacttgctgatcgataatgtcgcgcggtttctgttgaagggttgggaaggtgtgggccagttggtagatggcgtagaagttgccatcgactacacgccggaagttgggatcgccatgctgaaacagcacccggagctgtactggctgatactggctgaggcggcggccattgctcagggtaaggagcagcagactcaggaaaccgtaaaaaagccatag

SEQ ID NO: 217291 - DNA, 168 bp, Klebsiella pneumoniae
atggccggagtgccgctccctctatccctgaacgatattgagctttacctggcatcgcgcaccatcctgatcgaccgcattgaatttgatgctgcgatactggctcttgatgatgcctggagggatgagtgggcgaaggaacagaaaagaaacagcaagaagaaataa

SEQ ID NO: 217292 - DNA, 465 bp, Klebsiella pneumoniae
atgactgatatctactacccacatgactatcttccaatgccactgcaggaaggatacggattccagcctgtaagcccgttaaaacgaacccagctaaccaccggccgcgcgcggcaaaggcgagcttatacgtccacgccgacgcaggccagtgtgtcatggtttatggagactgacggtcaggctcagctgtttgaagcctggtatagggaaaaaataacggatggcgctgactggttttgtatgaagctacaaaccccgctgggggtggagttttataaatgtcggttcactggtatctatgaggggccaacactggtggcgccgatttactggaagttcacagcgacactcgaactctggaaacgacctgtgctgcctgatggatgggccgagttccctgacttcattgtgaacagcgatattcttgatcttgccgttaatagggagtggtcaaaggcttga

SEQ ID NO: 217293 - DNA, 1263 bp, Klebsiella pneumoniae
atggcatccctgacactgaaaaatacggcgctgatcctcggcagcatggtgattggcggcgcgcttaccgcggcgctgtacgcccgatgggcaccgacccacgctgccgctccggcggccgagcagcagcgtaaagtgctgttctggtacgatccgatgtacccgaacacccgcttcgataaaccgggtaaatcgccgtttatggatatggatctggtgccgaaatacgccgatgaggagcatgccgccgccggtgcgccgggggtgcgtatcgaccctacgcagacccagaatttcggcgtaaaaaccaccgcggtcacccgcgggccgctgcgctacgcccagaccttcccggccaatatcagctataacgagtaccagtacgtgattatgcaggcgcgggcggcgggctttatcaataaagtctatccgctgaccgtcggcgacaaagtgaaacaaggcacaccgttactcgagctgaccatccccgactgggtggaagcgcagagcgaatatctgttattgcaggagaccgggggcaccgccacccaggtcgaggggatcctcgaacgcctgcgccttgccggaatgccggatgacgatatccgccgcctgaaagccacgcgtaaaatccagacccgctttaccctcaaagcgccgatcgatggcgttattaccgccttcgatctgcgtgccggaatgaacatcgccaaagataatgtggtggcgaaaatccagggtatggacccggtgtgggtcagcgtggcagtccccgagtccatcgcctggctaattaaagacgcctcgcagttcgccattcaggttcccgcctggccgggcaaaactttcagcatcagcaaatggacccttctccccagcgtcgatagcgccacccgcaccctgcagctgcgcctgcaggttaacaacccggatgaagcgctgaagccggggatgaatgcctatctgcaactaaccagtgaaagcgaaccgatgctgctgatcccgtcaaaagcgctgatcgacagcggcagcgagcagcgagtgattaccgtggataatgagggccgcttcgtgccgaaacgcgtgcaggtattccatgaatccgccggcgtcacggccattcgcagcgggctgcaggagggtgagaaagtcgtcgccagcggcctgttcctgatcgactcggaagccaatatctccggcgcgctggagcgcatgcgcgcgcaggctcctgatgtcacggctcctgccgcccacgcgcactga

SEQ ID NO: 217294 - DNA, 999 bp, Klebsiella pneumoniae
atgaatacctcatcagctatagcgagtaaatggactcatttcactgaaataaaccctgccgtcaggtttatcgacgtgacgctgcggggatgtgctcaggtcatgtttcagaataatccactgaccgggttaatcttctttattgccatatttattgccgcttacggcgaaggcaatcccgcagcggcctatggctgtgtgctgggtacggtggttgcgacatttaccggtatgttcgttaacgatcgcacctcatggctggccggactatacggatacaatggttgtctggttggggtggcgctgccgacctttttatccgtcacgccgcagctttggggctgcattattacaggcagcatcgtgtctgttatcgccaccgtcagtattgccgacatactgaaaacctggaaagtagcggcattaacggctccctttgtgctgacgacgtgggttgtgttgctggcaagttatgcgttttcaggcctggatgcctccgggttatccgtacctgaactcccccacccgttagttagtgctccggtgggggggctgttcaacggccacatatttgccacggtattgcacggtgtttctgaggtgtatttattcagcagcgtggccgcggggggactatttgttgtgggtctggcggtggcgtcacgttgggcggcgatatttgccatcggcggttcgctgctcgcggtattaactgcctcactgcttggagcgaataccaccggcaccgacagcgggttatatgcatttagcgcggtgctcacagccattgcgcttggctcaagtttcaataaacccagctggcgagttttgggttacacctttatcggcgtgatatttaccgttttcgtgcagggagccatgaacacattgctggcgccggtaggcatcccaacgctgaccatgccctttgttctcgcttcctggctctttctggtgccgaataaagacattatgccggcccatcgtcagggtcactag

SEQ ID NO: 217295 - DNA, 1590 bp, Klebsiella pneumoniae
atgcctcacctactaaaagtaatgtcatatacttttgcgcttatcgccagcacgttaccgttttatgcgcaggctgaaacggactcagcctcaggtcactcactgacattggctattggtgaagagcccagtgaaggctttgatcctttactgggctggagccatggaagcacgttgctgttgcatagcgcgctgttaaaacaaaatgccgatatggactgggagaattttcttactgaacacgtcgagcacagtgccgacggaaagatctggaccattacgctcctgccggatttgaaattctcaaatggctcgcccttaacggcccaggatgtggccttcacctataaccaggccgcgcagggtggcggcaaaatcgatatggggaatttttccgccgccagggttctggacgaccgtcgggtcgagattaccctgtccgcaccgcaaagcacgtttgtcagcgtattaggatcgctggggattgtgcctcaacatcaatatgatgcaaaaacctatgcgcaaaatccggtcggcgcagggccgtatcggctggtgagctttcagcccgggcagcagcttatcgttgaggctaatccttattattcaggccaccgaaacgacttcgataaactgatctttgtctttctggatgaagacagcgcctacgctgcggcgcaaagtggtcagttaggattagtcagagtcgcaccatccgtttcggttacgccgcaacagggcttaacactatgggtacgcccaagcgtggaaaaccggggcatcgctttccccaccatacctgccggtcaaaaagatgctaacggatacccgatcggtaatgacgttactgcggatgtcgctatccggcgggccatcaactacgccatcgatcgtcaccttctggcaaaccagcttatggaaggtcacgcagtacctgcttacagcgcggtgcagggcttaccctgggacaatccccaggccgccttcaaagatggtgatctcgccacagcgaaacacattctcgatgatgccggctgggaggtcggagaggatggcattcgtgttaaaaacggtaaaaaggcacagttaacgctgtggtatgccagcggagacagcacccgtcgcgatttggctcaggccgtcagcgcgatggtgaaacccctcggtatcgcgatggagctcaaatccggcagttgggaaaccgtcgagcggcatatgcatgccaatcccacgctgttcggctgggggagtctagatccgatggagctttaccatcattacagcagcaaggcggcgggcgttgagtattacaatccgggttattacagcaataacgccgtggaccagcatctccagcaggcgctcaacgcgccaacgtggcaacaagcggttcccgtctggcagcaggttgaatgggatggagagtctggcgcgggcgtgcggggcgatgccgcctgggcctggctgctaaatttacaacatacctaccttgccagtccgtgtattgatttaggtaatgctgctcctgaaattcatggcagctggtcagtgcttaacaatgttcaggactggaaatggacgtgccagtaa

SEQ ID NO: 217296 - DNA, 1026 bp, Klebsiella pneumoniae
atggacgtgccagtaaaacattttttaatgaccaggctaaatctaacccgatcttacgggccaggtcctgtttttattgctgtcttcaggctcgccattctgctgatactggtatcggccggaacctttacattgctgagtttttcaccggttgatcccattcgtgcctatatcggcaatgatttgctgcatgttcccccccaacagtaccccctcattgccgcacgctggggactggaccaaccgctgtggctacgcttctggcattggttttcgcaagtcatccagggcgatctcggatattcaatgatttataacgccccggttgcccaggttattggcgaacgctttgccctctcatttatcctgttagccagcgcctggctgctgtcagggttgttagggatcatgctgggattgactgccggacgttatctccaccgctggccggatcgcttaatctgccgcatcagctacctgctgtcctcactaccgacgttttgggtgggcttattactgctggcgatatttgccgttcactggcaatggtttccggtttgctgtgcctgggcaccgggtcagaacgccgacaatgccagcctcggggagcgccttcaccatgtcatcttgccgatggttgcgttaagcctgaccggcattggacaaattgcactgcacactcgggaaaaagtggccgaaacgatgcgcagtgactttgtacactacgcgcgagcccagggcgagaaaggctgggggctattacgggtacaggtactccgccatgcattaacccccgcgctttgcctgcagtttgcctcagttggcgaactcctcggaggctcgcttctggcagaaaaagtgtttgcctaccccggactggggcaagccaccattgatgctggcctgcgcggcgatattccgttgctgatgggcatcgtgctgttcagtaccgtgctggtattttgcggaaatagcttcgctgcgatgttactggccagaacaaatcatattctggagccgaaatga

SEQ ID NO: 217297 - DNA, 816 bp, Klebsiella pneumoniae
atgatgcagaataatcccgctccggcattactgcgttttattttttcatccttactgctcggcatgatggctgcctatggcttttcattgttgtcagtggatgtaccgatagatctgcaggcacgctatcttccgcccggcgccagccactggtttggcaccgataatatggggcgcgatctgtggttacgttgctttcagggggcattgaccagtttgcaaattggtgtcggtgccgcaatctgcagcggtgttattgcgatgctgatcgccagtctgacgcttatccatcccgtgatggatcaggcgctacgattgatcattgataccctgctctcattaccccatctgctgctgcttatcctgatctgctttacggtaggaggaggaatgcggggcgtggttttagccgtcgcgttcacccactggcccaaactggcgctgatcctgcgagcagaagcccagcagattcggaccagcgactacatgacgctggctcagcgtattggaaatactcgctggtactgctggcgggcgcattatctgcccgcgctttcatcacagtggcttgtgggaacattactgatgttcccacatgctgtcttacacagcgcagcattaagttttcttggtttcggactggcgcctcatgatccttccctggggattttattagccgatgcgctgcgtttctttagcaacggtagctggtggctggcgctgtatcccggcctgatgctgctgttaattgttttactgtttgatctctgcgtgcgcgccattcgcgatctgtggttaaggaatccatcatgctga

SEQ ID NO: 217298 - DNA, 807 bp, Klebsiella pneumoniae
atgctgaatttcagtagcatctacgtcgaccatgtacattacacctggtttggacgccaacagttatcgcctctccttagcaatattaatctgtcagtcaagcgcggcgaaatgacggctctggtagggggaagcggggaaggaaaaagcctcctgctgcaaacggctctggcactcttacccgataacttacggatgcgtggggaaatcagactggagggcaaagcgatcgattcccgccattgcgcaacgcttcggggtaacacactttgctatattccgcagggcgtcggttcgctcaacccccttctgaccgtaggcactcagctgaagcgaagcctgcacctcagtggtcgccatacctgcgcactggcgctagaacagcaaatcaaacattatcatcttcagcacgatattctgctgaaatatccccgccagctgtcaggcggcatggcaaaacgcattctggcatgtaatgccgcattaggaggagcccggtatattctggcggatgaaattacagcatggcttgatgaaccgctggctttccagctcctacatcagttacgcgatctggcggctcagggggccggggtgctatgggtaacccatgatttgtcgctggcggcacgtttcgccgatcgcattgtggccctcagtcacggacagatcagtgatgatatggtcgttaacgaactcaaagacggcggtggaagcgcagcattgcgacgtcagtggttggccctgccagaacaccaacgcttattttccgatgaggaaatgcctgtccaggccgggggcgtgtaa

SEQ ID NO: 217299 - DNA, 594 bp, Klebsiella pneumoniae
atgttttctgtttcagagctcaccattgagcaagataatcgcccgctgtggcaaaatttctcttttgaattgccggcgggtgagcggttgggaatttcggcaccgagcggctatggtaaaaccatgctgggacgcgtgcttgcgggctggcagtcctgccgccaggggcggatcacccttgacggccttcctttgccaaaacgtggttattgtccggttcagttagtgcctcagcaccctgaacgcacatttaacccttttcgcaccacgggaaatgccttacgcgatgcgtggcagccggatgatgaacaactggcgcgttttcacgttaaccccgagtggttgaggcgaaaacctgctcagctgtccgggggggaactggcccgtattgcgctgctgcggtcgctcgatccccgtactcgcgtactgattgccgatgagatcaccgcccagctcgatccttctgtgcaacgggatatctggcagcagctaatccatgaatcccgtcggcgcgggttaagcatcattatatttagtcatcagacagcgcttctggagcaaataagctcacgcatgatgatagcctcgcgttaa

SEQ ID NO: 217300 - DNA, 183 bp, Klebsiella pneumoniae
atgatctgcagggacgagtcgcttaacgcggatgcgaaagcgaaagcgaaagcgaaagcgaaagcgaaagcgaaagcgaaagcgaaagcgaaagcgaaagcgaaagcgaaagcgaaatcgatgaagtatttaattagtcacaaaaaacagagccacgttataacgcggctctgctactcctaa

SEQ ID NO: 217301 - DNA, 321 bp, Klebsiella pneumoniae
atgaaagttaaatcattggtttttggtgccatcggcgcactgtttttaacctctgccgcccatgcagctgaccacaagaagccggttaattcctggacctgtgaagattttctggcggtaaatgaagattttcagcctacggcagtgggggttgcggaagcgctgaattctaaagacaaaccggaggatgcggttctcaacgtttctgggattgaaaaagtcaccccgacaatcgttcaggcttgccagaaggacaagaaaatgtctttcaaagataaagttcgtgctgaatgggataatctgaaaaaggaaatctattaa

SEQ ID NO: 217302 - DNA, 1323 bp, Klebsiella pneumoniae
atgaaaatgcgttatgtcctggcgtcaggcagcagcgcagcaagagagatcgatatgaataaaatgaaaagtgttatctgttttctggcactgggtgctatcagcccgcacgcctgggctacgccaaataatgatgacattaaagcgatgctttcccaggcaaagagtggggatgcctctgcccaaacccaacttggcattctttatgctgaaggcagtggtgtcacccgtgattataaaaaagcgcgatcgtggtttgagcaggccggtaaacaaaattatgccgatgcggaatataacctcggcgtgatgtacggcaatggggatggtgtggcgcgtgataataaaaaagcgctgacctggtttgaaaaagcggcagagcatggccatatcggcgcccgttataatctgggcatgatctacagccagggaattggcaccgccaaggatccggttcgtgcgactttctggtttgagcttgccgggcaagatggttcggtggaagacaaatatacgcttggcgtgatgtacagcaagggtgaaccgctggagaaggatgatgtcaaagcccggcaatggtttgaacgcgcagccaatgaggggcatgtgcttgcccagtataatttagcggtcatgtacagcgaaggactggggggcgatcgcgatctgcgaaaggcgcgtcactgggcggataaagccgccgggcagggtgatccagaggccaccagattgctcagcatattgaatgaacgtggcaaacagagccccttcgaaatactgatggtggcgggcggtgaccctgctgccgcgccgcatattgtgccaccggttcggctgggtgccgatcatggggttgaaaagccagcggctgaaccactttcggaaacacccgctacagtcataaatacggcgccaaccactgagtctgtcgagattataaagattgacgagggtagctccggcgtggaaatagaaaaaataacggaggacgcgccggcagaggaagccatgccgtcggatgcgctgagaagtcaaaagatggaaaacagggagagtgaggcacgggcaggcgaagcggaaaatttacaaaactctcaacggggttcaacccaaaataacgaactgactcccgccactggttcgcaggcagtgagtgaaggcgctccccgggaagaggggcaacaggcagaggagaacgacgtcatgggatcatccggtgtcagtgagtcggttcctgcccaggaaacggtttctgctacgaaacccgccgaagataatattgtggggaatcccgcacaagaattggtaaagacagaggaatag

SEQ ID NO: 217303 - DNA, 426 bp, Klebsiella pneumoniae
atgggctggcagggaagcaaaggcagcattaacgcgggctatggccactcccataatatcaccggaggggcaattgcgcactctgaaggccagacgctgtcgcgatcgcttggaagttcaatggcgctggtcagtgcaccggacgcaagcggcgtccgtcttaccagcggcaatggcgtaaccgattggcagggttttgccgttgcgccttatctttccgattataccagcaacaacatcggcctcgatcccagccccctgccggataatgtggacctgccgaaaaccaacgttgaagtttatccgacgaaaggtgcagtggtgaaagccgatttcgctacccgtatcggttacctgctactaatgaccctgacgcgcgtgggcgggatgggtattgtgcccttggtgcgacggtttcgctgttga

SEQ ID NO: 217304 - DNA, 624 bp, Klebsiella pneumoniae
atgaacagcagtaaccacaatatgagtgcagtcattattgacgatcatccatttgcacgtttagcactaaaaaccgtcctggaaaaccaaaatatagtggtaacgggtgaagcagcagatgattttcatgctatccagctggttgatcggttgcaacccgacatcgttatcgtggatgtcatgctaattggatcgagtggcatcgatgtggtaacaaaacttcgccaaaaccactacgctggtagcattgtcatggtgtccgggaaaaaccaaattttctatcgtaaatgcagtgtcgatgcgggagctaatgcctttattagcaaaaaagagtcaatggataacttcgttgctgctattcaggctgtgcagcgtggatattattacttccctctcccatcatataaccccacgcctgctgaaaataagatactttcattgtcagaacaagaaattaaaataatgcggtatattcttagtggcgcaccaaatcaaaatattgcggcagagatgaatatcaacccaaaaactgtcagcacttataaaagaaggcttatggggaagctcaactgtaaaacgcttaaagatttattcgtcttttcaaacaataacaatatcggttga

SEQ ID NO: 217305 - DNA, 3645 bp, Klebsiella pneumoniae
atgattattgtgctggctatgatattgctaacaggccaaacagtagccgctacgactgaaccaattacgctgacgctaagcagcaaaaagcacaattttatctctaagcttcctctaagccaggaggatctcgcatggcttgctgataaacgtaccatgacgattgcggtctatggtgaagaaaatccgcccatcgccatgaatagtaacaatggctgttatcgagggattaatgcagattatttgcagctgctgaaagatgctttgcacgtaaatcttgtacttcactattatgatgatgaaactcaggcgcttagtgccttgaataacgaagaggcagatctggtactgacctcaaacaatacctctcatcaggccaccacaccgttcattatcagccagctattattccaggcctatccgacattagtaaccctgaattcgaacggaatgatgccattttaccagcttgataaaactgtgaatgtggcagtgagtcaacactatccatcagataccttcattaaatcgatattcagacacgccaacattgtctcctattccagcaattatcaagcactggcttctgttgccaaaagtgaaaacgactacttcattggcgacaatatcgccagcaactttctcatcgctcgcgatttttatcaaaagctagacattgttaaatactggcgttcaccgttaacgggtagctattttatcgcacgagaaaatcagtccaggctcgtcgagataatcaataaattcatttccgccttagatgcatcgacacatatccggatctcccatacctgggtggatgacggtaacctcacttttttaactaaaccactatctttaacgccgaaagaaaagcgttggatagaaaaaaatccggtcctcagaactctggtcaatccttattatgcccctttcaccgtactggatgaaaaccgggaaattcgtgggttagtaggagatattctcaatcttgttcaattgcagaccgggctgcactttcaacccgttatcgcaaaatccaacagcgatatggcagagattatgcgtaaaggagactgggatatggtgcctacagtaacctatagcccggaacgtgaagatgagatggccttcacgcagccatttttttccacaccttatgtagtggtgagccgcactgaaaataagcaaaaagatattttccaagccggttcaacagtcgctatacctgcttattattccttacgggataagctgattcagaagtatcccgacgtccattggatcatcgttgagaataccagtaccgctctgagtagtctcaatcttggcaaagtggatagcgtggtgaccacccaactggcagctcgatatatcatcgatcattactatcccgaaacaatgagctatcagcggatccccaatcagccttctgcgcaaattgcttttgctgtacctcgtgataaacccgagctacaaagtattctaaacaaggcgctggccgaaatcccccccaaagaaacgctaagtctggcgggcaagtggattaaaatgcctgaggtaaaaatcgatacctgggatctctatagccgtcctttttatattttgacggttagtgcggtactgctcattttgagtagtttactctggggcggttatttgctacgcgccattcggcgggaaaaggcctcgcaggcagcgctggaataccagctgagtttacgtcagaccttatcgaattcgataccggtcccggtctatattacgacgccggaaggagaaattgaaagttacaaccgtgccttcaacgcgttttttacgccgcaacaaagagaggctatacattattccctttttgatcgccgaagcccgcttgtgcatatctttccggttattcagcaggaaatgcagcaaggattggcaccggatacggtggcatcacatcaatttacactcaacaacggtgccgaagaccgtactattctgcactggatgacattgtgcccgctgccagtgccattaccacctgtactgatttgtggctggcaggacataactgaatcccgcaaactcatggaggcgcttcaggtcgaaaaagataaagccattgaggctagccgggcaaaaagtagatttttggccagaatgagccatgaaatacgtaccccggtcagcgctattatgggttttctggaattactggcaacggggccgcaaagcgaacgagaagcgcaggaatcacttcagttggcttatgctacagcgcaatcgttgattggactgattggcgatgtgctggatatggaaaaaatagaatctggtaattttgagctgactccagaatgggttgacatcgaggcattaacccaagccacgatggccaattttgctggccttgctcgccaaaaaaacctgcagttaacggtaagttatcagttgaatgccggaggcatattgtggctggatccgcaggccattaagcaagtgctcgccaatttcttaagcaacgcgatcaaatttacggtgagcggtggcgtagagattaaggtggaaacacaacctcgtgaaaatgatgcggctcagctgatgctaagcgtcaaagacagtggcgtagggatcagcgaagaggaacagcagctactgttcaaacctttcagtcaggccagctgtggtaagaagcaaatgggctctggtctcgggttaaccatctgtaaggagctgatggatcgcatgcatggcaccatttcggtggccagccaccctggcacgggcacaacaatgagcatatatgttcagactcaagtatccgatcgcgcccctgcagatttaaataatcaggaaatggcccttcctgtatcatctgggctacgggtcatcattgctgacgataaccctaccaaccggttattactgcgccgtcagttagatattctcggttattatgtagatgatgtcgaagatggcgaacaggcattcagtttgatcaaacgacgacagtacgatctgctgataacggatctcaatatgcccggaatggatggacttacactagcccagcaggtaaggaagattaatcccgccctagtcatttggggcttaacggctaatgcgcagcctgacgaaaaagcacgttgtttggccagcggtatggatttgtgcctgattaaacccgttaatttgccgcaacttgctgcagcttttaacagcataacgcagcgtctggaaaatccaactcagactgaaatatcggcgtcattaaacacacaattggatactacagtatgtaatgaactgattgatatgcaggcactacgggctaacgcaatggatgatacggcattcatgcttgaattaattaatcaggcataccatgagaatgtcaaagatctggcggcgcttaaaaaagcgatgttcagccatgatcgagatatcgttcgatatcatctacatcgaattaatggtacggcacagttaatcggcgcaacgtcgttacatgtgcttgcagataaattagaaaatgcactggcatcagagcaaccgctttctcttttcggggaggatatgcagctgcttgaacaacaattgattgcattagggaaagcaatggacaattttcttaaaagggaagggcttacctcaagggaataa

SEQ ID NO: 217306 - DNA, 870 bp, Klebsiella pneumoniae
atgcaggaaccggcatcagggagtattgcgtcttttggtgcctatatgctagtgatttctttttcagtattgcctgtgaaaaacccccttcagcaagtattaattgcggccggaataatgatctttttcgcgacgctgggtttcagcgccccaggcggctcaatttattttttcctgttcgccatcctggcagccctggcacaaggcctggctgaacttcgcggagggaatctacgcctgccggtctcaatggctgcccttgttttttttctggcgcacgggcaatcatccgctgaaacgcttagtcaatatattttttcctttggtcttggttgcctgtgggctatcccctttattctaatctttataccaaaagaaacgttgtcaccagcgcgcgcccccctttatcccatggagtcaccgacacaacgccggtttctattgggcattaccttcaccgcgttattaggaagtatcgccgtgtcgcttagtacagtggcgcatgcatgttggatccctgccgccgcactgcgggtggttaaacctgggtgggaggaaacgcgatatcgcatacaaaccagaagcatgggaacgatgctgggagccatcgtcggaagcataatcctggtatgttacccttaccccttgtttcacatagccattgttggcgggatgttcctgttaatgttacagtttggggccaaaaattacttccgctggtcattttgtctgaccacaattaccctggccttcaatccagtcgtcggcagcgatattttttcattagctcaggaacgagtacttttcactatcgaaggaatttcgatcgcgttcattatgatgaagatattttcgtacaagcgatcttag

SEQ ID NO: 217307 - DNA, 675 bp, Klebsiella pneumoniae
atgccagatttaaatgatggagatctaaccgaagagagaaatatcagcgtggtccttattaatcgttatcccctggaatctatagccataaaaacccttctggaaaataaaggaatgtctgttactggtgaggcgataaatggtatggacgcccttagaatcgttgaccagttgaagccaaatacgattattgtcgatgtcgacctgccagatatcgacgggatcggactggttgagacgttacgtaagcgcctttataagggaagcatcattgtgacctcgaataagtacgagtatttttattcgcgatgtactgccagtgctggaggtaatggttttgtgagtaaaaaaggatcgattaatattattctctccgctgttcaggctgcgcataatggttattcttattttccattttcgcaacatagggtttccggagaaggaacgtatgcgaggaataagctacaagccttatccgagcaggaaatcatagttttgcgacatttactggagggggctagtaattttcatatagccgccaaaatggatataagttcaaaaaccgtttccacttataaaagtcgtctgatgaaaaagctaaattgtcaaacgcttgtagaactcatcggatttgctaataaatttagaatcgatgaatcttttatctctgattaa

SEQ ID NO: 217308 - DNA, 534 bp, Klebsiella pneumoniae
atgagtctagaaaaattattaatcaaagacaggaagtgcggtacctgttctgtttgttgccattcgttacgaatcgagcaacctaatcttaagaagctcgccgatgtgccatgccagtaccttagaccacaaggaggatgctcgatttataatgcacggccagatgtatgccgtacctggtattgcggatggcgaataatggatgttggcccagaaatgagacccgaccggagtggggttctgatccgtttcgatggctccgcactctgttttcaacccgtagataaagatcgtgtatcgtctttgctcgattcagagccgctgcgcgttttgggtgcctccatagccaatggaatgaaggttgaaatatcagtccccacgaaggaagggtattgctcagccaatttggacgttactgaacttatgtcagaggtcgttaaaagtagagagtatgataaaatgcggtccgcactgcttgcggctatccagtttgcgtcacattcaaagacagaccctgtagaaccactggagtga

SEQ ID NO: 217309 - DNA, 153 bp, Klebsiella pneumoniae; identical to SEQ ID NO: 208482

SEQ ID NO: 217310 - DNA, 477 bp, Klebsiella pneumoniae
gtgacggaataccagaaagaaaatcacttcaccttcctgacagcggaagggcaggagtttgccgttaaccacctggcaaacacacagtttggcaacgggttcaaaattgatcacagcggtaaagtattcatcaacgacgcattcattggtggtgaaatttacgcttcggaactcgaagcgcctcagtcggtgaccaatatctacaacatcagctttggtgttcgcaatgataagcctgtgcagaacaaggtaaccatcagcgccgataagttcgaagttaaatctgatatttattccaatctcgaagtggtacttgaaaacacgctgaaaaaagctgctaagagcgcggcaatggatgttgtaaagcaagtggcagcagaccagaaagcgctggatgaactggcagaccacattcgcaaagctattcacaatgaatgcttagcgggtggaattatttggcaaagattcagccgatag

SEQ ID NO: 217311 - DNA, 234 bp, Klebsiella pneumoniae; identical to SEQ ID NO: 208480

SEQ ID NO: 217312 - DNA, 351 bp, Klebsiella pneumoniae
atgccagcgttaatccctcgcgcatgtcgcaagagaggttgtccaggtacgactacggaccgttcaggctactgtgagcagcatcgaaatgagggctggcagcagcatcagcagggtaagagccgccatgagcgtggctacggcggcaagtgggatatcaagcgtgcccgcatcctgaagcgtgataatcatctgtgtcagaactgcctgcgtactggacgcgctgtcgcggctacaaccgttgaccatatcaaggctaaggcgcatgggggtaccgatgatgattcgaacctcgaaagcctgtgctggccatgccatcgctcgaaaacagggcgcgagcgcttcaaatga

SEQ ID NO: 217313 - DNA, 498 bp, Klebsiella pneumoniae
atgccaggaccaccgaaaaccccgacacatctggctttagtgaaggggaacccatccaagcgcccgatcaataagaacgagccaaaacccccgtcaggggtccccccaataccgaaacatttcgataaacagggtaagtactggttcaagcgtattggtgaggaacttgatgccgtcggcgtgttgaccacgcttgatgctaaagcgctggagttattgatagaagcctatgttgaataccggcatcactgcgacacgcttgatcgtgaaggttacacctatgccgtctacagcgaagatgattcagatgaaggaggggagcgggaaatcagaatgataaaaccgcaccctgcagcagtcatgaaggctgatgcgtggaaaaggatcagagcgatgctgagcgaattcggcatgacacctgccagtcgatcaaaggttggtgcaaaaggcccggcagaagccgacccactggaagaatttcttaaaaagcgcaaatga

SEQ ID NO: 217314 - DNA, 1752 bp, Klebsiella pneumoniae
atggcaaccgttgcagatggattccgctacgccgagcgcgtggtatctggcgatatcgttgctggcgaactggtgcgtcttgcgtgccagcggttctttcatgatttagagcacggcccggagcgcggtgtttattttgatgaaggccgcgcccagcacgttctcgatttttataacttcgtcccccatgtgaaggggcacttgaccggcaagccgatcgagttgatggactggcacaccttcatcctgattaaccttttcgggtttgtcgtcccgctgattgatgaaataacgtttgagagcattcttgacgacgatggcgaccccatgtttgtgcgtcgctttcgtaccgcctatgacgaagtagcgcgtaaaaatgcaaaatcaacgctttcgtctggcatcgggctttatatgactggtgccgacggtgagggtggttctgaggtttattccgcagcaacaaccagggatcaggcccgcatcgtgtttgatgatgcgaagcgcatgattaagctggctccgaaaacactgggacggttgtttggtagtaacaagctgaatattcaccaggagcggacgggctcaaaattcgaacctgtagccagtgatgcgaataacctcgacggccttaatattcactgcgggatcgttgatgaactgcacgcacataaaacccgtgacgtctgggaagttctggaaacagcgaccggggcgcgcctgcagtcccttatttttgcaatcactactgcgggttttaataaagaaggtatctgctacgagcaacgtgattatgcaatcaaggttctgaagaactttgataaccctgacccactttcaattaaggatgacagctattttgcgctgatttataccctggatgagggggacgatcctttcgacgaggcaaactggccgaaagcaaatcccggcctggggatatgtaagcgttgggacgatatgcgccgtctggctaaaaaggcgaaagagcaggtggcggcgcgtgtcggtttttttaccaagcatctcaatatctgggtgcagggtgaaaaagcatggatggatatgtcgcgctgggaaaaatgccgtgacgactgggacgactccacttcggccaactggtcaatgtggctcggcgttgacctttccaacaaaattgatatttcagctgcagttaaagtctggcttgctccaaatggcgatgtttatgtccgctccagattctggatacctgaaggtcggctggaagcctgttccaagcagcaggcggacctttacagaaaatggaatctcgctggattccttgagtttaccgatggcgatgtcgttgaccatgcagtaattaaagaggaaacgatcgaatgggcgcgaggtaactcgctgaacgagtttgcatacgacccgtggagtgccactcagtttgctttgtcggtagcagctgaaggtgtaccgattgttgaagtccctcagacggttaaaaacctgtctgaagcaatgaaagaggtcgaggcaaaaatttacgccgggcgttttcatcacgatggcaatccagtgatgacatggatgatgtcaaacgtcaccgtcaaaccagataaaaacgcgaatattttccccaacaaggccacgcctgaaaacaaaattgacggtcctgtcgcgatgtttattgcgatgagtcgcttgcttgttaacggtggtggtgaagttgacttcctgtccactatcgatcctgacgaagaccttttacttctatga

SEQ ID NO: 217315 - DNA, 162 bp, Klebsiella pneumoniae; identical to SEQ ID NO: 135193

SEQ ID NO: 217316 - DNA, 1227 bp, Klebsiella pneumoniae
atgctgcttgatgctctttttcgcagtgaaccactggaaaatccggccacgccgatcacgagtgaatcggccgaaaccgataacgtgtttgcccgagacgtatttgtcagcccggaaacggcgatgaagctggctgcggtgtatgcctgtatttacgttatctcttcgaatatcgctcagatgccgctgcatgttatgcggaaaaccaataacaaggttgaagctgcccgcgatcaccccgtgttttacctggttcacgatgagccgaatatgtggcagaccagctataagtggcgtgagttaaaacagcgtcatattttgggatgggggaatggttacacctgggtgaagcgttcccgtcgaggtgaagtttccgggctggaatgctgcatgccctgggaaacgacactgcttaacacgggtggtcggtatacctatggcgtttacaacgaagagggggcgtttgccgtcaatcccgacgatatggtgcatatccgggcgctgggtaacaaccagaaaatggggcttagcccaattatgcagcatgccgagacgataggcatggggatgagtgggcaggcttataccagttcattcttcaacggtaatgcgcgacccgctggcattatttcggtgaaaaaccagctgaatgaagaaagctgggggcgtttaaaaagcatgtggcaaaaagctacagctgctttgcgcagccaggagaataaaacaatgcttctcccggcagagctggattacaaagcgctcaccgtttccccggttgatgcccagatcattgatatgtcgaagctgaaccggtcgatgattgccgggatatttaatgttccggcgcacatgattaacgatctcgaaaaagccactttctcaaatattacacagcaggccattcagtttgtccgctacacgatcatgccgtgggtaacgaactgggaacaggaactcaatcgccgcctgttcacccgtgctgaactggccgccggatattacgtcaggtttaacctgacaggcctgctacgcgggaccccgcaggaacgtgcccagttctaccactttgcgatcactgatggctggatgagccgcaatgaagcgcgagccttcgaagacatgaatccggtagatggcctggatgaaatgctggtgagcgttaacgccgcgaaccccgcagacgattttaaggcacctaaaaccgacgaggaaaagtccaatgaatga

SEQ ID NO: 217317 - DNA, 600 bp, Klebsiella pneumoniae
atgaatgaccgtgaaacgcgctgttacagcggggaggttagagccgagcaacgcaccgatgaacctacccgcattctgggctatggctcggtgttcaacagccgttctgaacccctatggggattccgtgaaatcatcaagcccggagcatttgacgatgtgctgaatgatgatgtccgcgggctgtttaaccatgaccccaactttattctcggacggagtgcttccgggacgctatccctgtctgtcgatgagcgcggcctgcgttacgacattacagcgccggatacgcaaactatccgcgatctggtgctggcgccgatgatgcgcggtgacattaaccagtcatcttttgccttccgggtatcccatgacggtgaaaattggtaccaggacgatgaagggatcgttattcgtgaaatatcgaagttttcccggctgtttgatgtcagtccggtgacttatcccgcatatcaggaggccgactccggcgtccgatcgatgaaagcctggcaggaggcgcgcgacagcggtgcgctaaagaacgccattaatcaacgaatggcgcgtgagcgcctgctgacccttcttaacgcgtaa

SEQ ID NO: 217318 - DNA, 1239 bp, Klebsiella pneumoniae
atgaaactgcatgaaatgaagcaaaaacgtaacaccatcgccaaagatatgcgtgccctgcatgacaaaattggtgatacaccctggaccgatgagcagcgtactcagtggaacgctgcaaaatcggagcttgacgcccttgatgagcgtattgcgcgcgaagaggaactgcgccgccaggatcaggactatatccacgaaaacgagccggaacagcgccagcagcagaatcgtgatccagcaaacccggaagcacaggctaacgaacgtcgtgctgcggcgtttaatgcgtttttgcgccgtggtcttggcgagatgagcgctgaagaacgccaggctttaaaggagctgcgtgctcagggcacgacgccggatgaaaaagggggttacaccgtaccaacccagttccgcaataagatcgtcgaagcactgaaagattacggtggaattgccagtgtggcgcaaattctgaataccgccaacggccaggacattgactgggctacctctgacggtaccactgaagaaggtgaactgctgggcgaaaacactgaaaccagtgaagaagacgtgtctttcggcggtgcaacgctgggggctaaaaaactgtcctctaaaatcattcgcgtatccaatgaactgctccaggacagcggcgtagatatcgaggcgttcctggccgcgcgtatcgccactcgcatcggacgtggtgaagcgaagtatctggtattagggaccggcaccggcaccccgctgcagcctaaagggctggctgcgtcggtaactggcaccaaaaataccgcagcagcgaccacctttacctggaaagagctgaacgcactgaagcactctgtcgacccggcataccgtaacggtccaaaggtgcgctgggcctttaacgatgcaacgttgcagctggtggaggaaatggaggacggacagggccgcccgctctggttaccgaacattatcggtggcgcacctgctactgttctgcaggtgccgtatgtcgttgaccaggctattcctgatatcgcggctggtgccaaatttgcctacttcggcgattttaaccgctttatcgttcgtcgcgtcacttacatgacgctgaaacggctggttgagcgttacgcagagtacgatcagactggcttcctggccttccaccgcttcgactgcgtgctggaagataccggcgcgattaaggcgctggtgggtaaaccggcatctggcggctaa

SEQ ID NO: 217319 - DNA, 318 bp, Klebsiella pneumoniae
atgagcacaacgattgagatgttgcgggcgcagtgtcggatcgatattgacgatgcaaccgaagatgaattgctgacgctgtatttcaccgctgctcggcgtcgcgcagagaacttcattaatcggaaactgcatgaaaactctgtgcctgataccgatccagacgggttaaaaattgctgacgatatcctcctggcgctgatgcttcttgttgggcattggttcaacagcagggaagaagcttccgatgtaaataaaatgagcatccccttcggcttcacttcgttgcttgaaccctaccgatatatcccactttga

SEQ ID NO: 217320 - DNA, 198 bp, Klebsiella pneumoniae
atgaacgagcaacaggtaaacgcgctgatagcagcgctgagcgaacaaacagcagcacagagagagcagacggaagcgataaaccgcctggctgagtctaacgtcgccctgtccgatgtgattatccagtcgcttgccggcgatctcgatgaggcaccagagcagcaaacctatctgagcgggaaacccagggggtga

SEQ ID NO: 217321 - DNA, 333 bp, Klebsiella pneumoniae
atgcaggccggaaaattgcgtcacaggatcaccctgcaggagccggtaaaagaacagaacccgacaacgggagccgtgattaatacctggcgcgatgtcgcaaccctttgggccgaagtcgctcctttatccgcacgtgagtttatcgccgcccaggcctctcagggcgaagttaccacacggataacgattcgttaccgtaagggcgtcacccgcaaacatcggatcctgtttcgtggccgcatctacaacattgagggcgttttacctgacccccggagcggcagggaatacctgacactaccttgttcagagggggctaacgatggctga

SEQ ID NO: 217322 - DNA, 540 bp, Klebsiella pneumoniae
atggctgatggcgtagaagtaaacctgactggcctcgattccgtcctggggaaactggatgccgtctcacaggttactcgcgataaatccggtcgtgcagcgctgcgtaaagcggcgaacgtcatcagggacagagcgcgcaataatgccgcgagggttgatgaccctctcaccaaagaggctatctacaaaaacattgtggtcagtttcagcagcaaggcatttcgcagaaccggcgatccaacgtttcgtgtcggggtgatgggcggagccaggcaatacgccaatacaaaggccaacgtccgaaaaggcagggcgggtaaaagttttaacactgccggagataaaggtaatcccggcggggatacctggtactggcgattcctggagttcggcacagaacatgctacagcgaggccaataattaggcctgcactgaatggggtcgatgccgatgtgattaacgtttttgctgtggagctggaaaagtccatcgatcgcgctgtgcgacgggcggctaaaaaaggaactccggtatga

SEQ ID NO: 217323 - DNA, 366 bp, Klebsiella pneumoniae
atgattgctccaatatttgcagtttgcgcagccagccaggcagtcagggatttgttaggctctaatcccgtgcggctttatccgttcggtatgcaggacgataatatcgtttacccctatgcagtctggcaaaacataggtggctcgcctgaaaattatctgaaccagcggccagatgcggatcactattctctgcaggttgatgtctatggcgatactgacaccgacgtgatcgctgctgcccgtgctttacgcgacgcaattgagggcaaggcctatatcacccgatggggtgaacaaagccgcgatcctgacacaatgcgataccgctattccttcgatgttgactggataacgcccagataa

SEQ ID NO: 217324 - DNA, 492 bp, Klebsiella pneumoniae
atgtctgtattaacgcaaggcacgcagttttttgtgctcaagtctggcgtggtcagcgaggttgaatgcatcaccagtttcaaccccggcggcaaccctgccgatcagattgaagatacctgtctgagtgagcgggattccagaacctacaaaaaggggcttaaaacgcctgcggccgcaaccgtcgggcttaacgctgatccgacgaacgccagccacattatgttgcatggcctcgctgaagcgaatgaccagacgccgttaacttttgcggttggctggtcagatggaaccagtgtcccgacagccgccgcttctggcgctgaggatgctgttgatggcctggtactgccatcggatcgcacctggttcattttccagggttacgtttccgatttcccgtttgatttccagggtaacgctgttgtgacgacctccgccacgatccagcggtctggctcttccgtatgggtgccaaaggccgcagcgtaa

SEQ ID NO: 217325 - DNA, 384 bp, Klebsiella pneumoniae
atgcaacttactctcgatacgttaaaagaaaccggtgcttttaccgggcgtcccgtagaaaaagaaattaagtggaaaggccgtgacgggaaagagcatatcgcaaccgtctatgtgcgcccaatgggctaccacaccactaaagctgaactgctggcgtacaacgggaaatctgatccggtggctgggcgtattgctgcccatatttgcgatgaaggagggaagcaaatctttactgaggctgacattctcggaactgcatctgaagaccgtggcgcgctagatgggccaatcgttattgctttgctggccgtcatcaaggaagtcaacgatctgggaaagactacgaactcacaggagaagacgagttctggtgtgagttag

SEQ ID NO: 217326 - DNA, 264 bp, Klebsiella pneumoniae
atgaacggcatcggcgggcggaccattgcggaggctcaggagcgaatgagccttcgtgagtttcaggtgtgggtaaagtaccgtaataagtatggtcagcttaacgttatgatgcgaaccgagtggggggcttcgctggtggcttctgtcctggctaacatcaataaggcaaagaactcgcctccgttcaaggttagtgactttgcaccgcacatcaaagaagcgccgctttctctggaagaagctatgaaaagttgggcctag

SEQ ID NO: 217327 - DNA, 2535 bp, Klebsiella pneumoniae
atggctggcaaatcccttggtacattaacaattgacctaatcgcaaaggttggtggatttgttcagggaatggataaggctgaaagagcctcgcaaaaatggagtgcccaagtaaaaaaagacgccaaagaagttggtgcttctattgttgcaattggtgcagcagctgccactgcagctgtagggattggtgccgcaggtttagcagttgtgaaaaatacagcacagcaggtaacagaggctgaccgctgggcaaaatctcttaaaatgtccactcaggacttacttgcatggcaatatgcagctgaacaagctgggctaaccggcgataatattgcagatatatttaaagacattaatgataaagttggtgatgcggtactgaataaatcaggtgaggccgctcaggcattagatacgctcggactttcagctgagaagctgtcccagcaatcccctgataagcagttactggctattagttcagctttacaaaagataccttcccaggcaggtaaaacaaatattcttgaaagcttgggcaatgacctgtcaaaaatgcttccgttgtttgataataacaatgagaagctgaaacagttcatccagctatcaaaggattttggtatcgcaccgccgcaagaagatattgataacctcgttaaggttaatcaattttttcaggatatagagactagtgcccgtggtcttaaaatggaaattgcctctgggctggctaaggtggacctttcgccattgcaggatgggttagatgacattcgtgatgttttcaccgaccctgctattcttcaggggttatcagacctcgtaggcgaggctattagccttgccggtgtcgtaggtcgtattgctggtggtttgggggctattgctacctatacacggtcgcggataggtgctgtatctggcaattataatgctgctgatgaaggtgatattgcacagcgcattgagtttcttaacaagcgaggtgaccaaagtaaggaacaaaaggatgaattagagtttttatctaaacgtcttcaatttcttcgggcgattaagtcaagtatgaccccagaggaagtcgaaagaggagccaaaggattatcatcactcctttctgatatgggattgtcgccaactgataatgattataaattaggaaaaggtgaatcaaatcagaaaataaccacaaaaagcaatccaaccgacaatgcttttaaaagcaggcttcttgatctgcaaaagcaagcagcacttattgagacgacaggcaaaaaaactgcagaagtaacagagcttgaaaaagtaaactttgatattaccagtggtaacttaaaagcattatcagaagcgcaaaaagagcagctccggtatgcggctaaaatcattgactcaaaaaaagaagagttacggctaaatcaggaaaacgcaaagttagctgaatttgtttctggtcttgataggcagaataaaataataaggcaagggtatgacaatgatctggctggtcgatcattgggattaaaagaccgtagccgaatgcgtgaattaaacaacattcaacaggactttgaatataaacaagctgatttattaaaacagtatcaatctggtgatattaccaagtcactttatgagtctgaaactgatgcgttaaaatcgtcacttgaagagcgcctgcagattcaagaagattattatcatgagtctgatggtttacgtaatgactgggagtcgggcatatcaagcgcattatctgatttcgcggatagttcaagtgattattatcagcaagcggctgatgcaatgacatcaatattaggttctgcaactgattcaatttctgaacatttatacgatgttatcagcggtactgaatcaatgggtgaagcaataaagggaattttttcagacctcgggaagtcagtgataaaagctctggttgatatggctgcacaatggatcgtgtatcaaggtgttcagatgctggttaataaaagtgcccaagcctctgctattccttcaatgatcgctaatgctcaggctacagccttacaggctcaacttgctgctttcgcatcaactgccgcaatcccaattgtcggaccgggattagctccagccgcgatggctgctgcagcggctataacagaacctatggttgctgctatttctgccgcttccctttctggcatggcccacgatgggattgatgcagttcctgaaacaggtacttggttgcttcaaaaaggagagcgggtgaccaccgcagcgaccagcgccaaacttgatgccactctggatcgagtagcaaaccagtcaaccggtggtggaactatttattctcccacgatcactatccccatcaatggtaacccttccgatgcaacgttggcgctggtccgtaaagctgcagatgagggggcagaaaggggataccggaaggcagttaactcagtcgcaagcggtcagggtgatttgcataaggccttgatggggaaaactacctcggggaggaaaattagctga

SEQ ID NO: 217328 - DNA, 2325 bp, Klebsiella pneumoniae
atgacgccgttacgcgtttttcgtaaaacaacacctttggttaacgccattcgtctgagcctgctgccgctggccggtctctcgttttccgcttttgctgcacaggttgatatcgctccgggatcgctcgacaaagcgctcaatcagtatgccgcacacagcggaattaccctctctgttgacgccagcctgacgcgcggcaagcagagcaacggcctgcacggagattacgacgtcgagagcggcctgcaacagctgctggacggcagcggactgcaggtaaaaccgctgggaaataacagctggacgctggagcccgcgcccgcgccaaaagaagatgccctgaccgtggtcggcgactggctgggcgatgcgcgtgaaaacgacgtatttgaacatgctggcgcgcgtgacgtgatccgccgtgaggatttcgccaaaaccggcgcaaccaccatgcgtgaggtgcttaaccgcatccctggcgtcagcgcgccggaaaacaacggcaccggcagccacgacctggcgatgaactttggcatccggggcctgaacccacgcctcgccagccgctcgaccgtcctgatggacggcatccccgtcccctttgccccttacggtcagccgcagctttcactggctcccgtttcgctcggcaacatggatgccattgacgtggtgcgcggtggtggtgcggtgcgttacggaccgcagagcgtgggcggcgtggtgaactttgttacccgcgccattccgcaggactttggtatcgaggcgggggtggaaggtcagctcagcccaacctcttcacaaaacaacccgaaagagacgcacaacctgatggtgggcggcacagcggacaacggttttggcaccgcgctgctctactccggcacgcgcggcagtgactggcgcgagcacagcgccacccgcatcgacgacctgatgctgaaaagcaaatatgcgccgaatgaggtgcacaccttcaacagcctgctgcaatattacgatggtgaagccgacatgcccggcggcctgtcccgcgcggattacgacgccgatcgctggcaatccacccgcccgtatgaccgcttctggggccgtcgcaagctggcgagcctgggctaccagttccagccggacagccagcataaattcaacattcaggggttctacacccaaaccctgcgcagcggctacctggagcaaggcaaacgcatcaccctctcgccgcgtaactactgggtgcgcggtattgagccacgctacagccagagctttatgatcggcccttccgcgcacgaagtgggcgtgggctatcgctatgtgaatgaatcaacgcatgaaatgcgttactacaccgccaccagcagcgggcagttgccgtccggctcaagcccttacgaccgcgacacgcgttccggcaccgaggcgcacgcctggtatctggatgacaaaatcgacatcggcaactggaccatcacgccgggtatgcgtttcgaacatatcgagtcataccagaacaacgccatcaaaggcacgcacgaagaggtgagctataacgcaccgcttccggcgttgaacgtgctctatcacctgactgacagctggaatctttatgcaaacactgaaggctcgttcggcaccgtacagtacagccagattggcaaggctgtgcaaagcggcaatgtggaaccggaaaaagcgcgaacctgggaactcggtacccgctacgacgacggcgcgctgacggcggaaatggggctgttcctgattaactttaacaatcagtacgactccaaccagaccaacgacaccgtcactgcacgtggcaaaacgcgccataccgggctggaaacgcaggcacgttacgacctgggtacgctaacgccaacgcttgataacgtttccgtctacgccagctatgcgtatgtgaacgcggaaatccgcgagaaaggcgacacctatggcaatcaggtgccattctccccgaaacataaaggcacgctgggcgtggactacaagccgggcaactggacgttcaatctgaacagcgatttccagtccagccagtttgcggataacgccaatacggtgaaagagagcgccgacggcagtaccggccgcattcccggcttcatgctctggggcgcacgcgtggcgtatgactttggcccgcagatggcagatctgaacctggcgttcggtgtgaaaaacatcttcgaccaggactacttcatccgctcttatgacgacaacaacaaaggcatctacgcaggccagccgcgcacgctgtatatgcaggggtcgttgaagttctga

SEQ ID NO: 217329 - DNA, 1230 bp, Klebsiella pneumoniae
atggcgatcaacaacaatcagtacctttttcaaaaccgtacaggcctttgggtgtttcaaatcttcgtacctaaatacatgcgccacgtcttcggacataaacgcgcctggcgcaaatccacagggacaaaggatattgttaaggcccggcaattcagaaaccaccttttgattgaattcaataaattgaaagaacagctaaggccagataccgaagagaaacgcatctccggggctattgcagcgctttatcaggaggtgagcactaatcagcagattgagggcagattcagccagcctgtagacaacaaaaacacttcccctactctctgccttatccgtgatgaatacgcagagagctataagaaccggcgatcatattctacattgagcaaatcagcgcgggctgtagagatctttctggcaaccatccaggaaactgacatcaagatcgatatgattgggcggcgcatggtgacgcagtttatccggtcacaacaggaacaggttgcaggtcagacgttacagaactggttaacgtgtttagggagcctctatgagtttgcactgaggacctatgacgccatccctgagggaaaccctttccatggtcataatctggaggctcgcagaactattgagagctacgaaccgttcaccaccaaacaactggtaacgctcgtagagaatggtgaggatgaattacaaggggtgatcctgattgggctatacagtggaatgaggcttgatgaaatagcctctctcaagcgggatgacattgtagaaatagacgggatcagagtgtttagtgtcacgaaatcaaaaacgaaggctggtataaggtgcgttcctatacattctaaagtgcttcccatcgttgataggtggctctccttaaaatctggtgaatatctcctgccaacggctaacagaattcaacgtgcagacggtaaaaaggggccgtattactcccaagcattcaccagactgagagacaagatgatcccagaagctacaaatcgtcaatgttatcatagccttagaggacattttataacgtgtctggacagggacggggtagaagaaacgagaatcggcactatcacaggccaaattgagaagaaagctaaaacagaggcatttaagacgtatagcgcagggccattaatgaaggaattaaaacaaataatagagcttgtatcatatccagaaatagaaaaggggctttaa

SEQ ID NO: 217330 - DNA, 432 bp, Klebsiella pneumoniae
atgggaaaaacagaagataatcaaaataagttttttaaatcatattacgacatttttaaaatcaataccatcaacggcaagaagttttcaatatctgcaaaatctatctacagttacctaaaaagttttagcgatgctggtctcaaggtatttcccagtcataacgaaattgctgacacttttggtattacccgaaatgctgcgataaaacagatagaaaaactgattgaactaggtttgatcgaacgtgagacacggcccggtaattgcaataattaccacgtcctgaccattcaaatagaggatacatctggacggacatattcggaaaacaagggaaccaggcacgaggtcaaaggcgattttgggaataagtctgaatcaatcccaggaatagtattaattgaagatgatgatgatttaccatggtaa

SEQ ID NO: 217331 - DNA, 180 bp, Klebsiella pneumoniae; identical to SEQ ID NO: 111590

SEQ ID NO: 217332 - DNA, 327 bp, Klebsiella pneumoniae; identical to SEQ ID NO: 182607

SEQ ID NO: 217333 - DNA, 897 bp, Klebsiella pneumoniae; identical to SEQ ID NO: 101398

SEQ ID NO: 217334 - DNA, 1077 bp, Klebsiella pneumoniae
atgaacaaaactcctgtatcagcagagaaaaacggattattgacgttgcgacggcctgacgattttcacctccatctacgtgacggtgaaatactaaaggctgttctgccctttactacaaagcagtttgcccgtgcggtggttatgcctaacctgaatccgcctgtcacaacagtggctgcaatggaagcctatcgcgaaatcatccttgccgcggtgccgcaaggccatgattttacgcctttgatgacgctatatctctgcgatgacactctgccggaagtcatacgtgtcgggcatcagaagggcattctgaccgccgtgaaatggtatcccgcaggggcgacgacccatgcagaatacggtgtcacgtctgttagtagaatacgcggctgtctcgatatacttcaggcgttggggatcccacttctcatccacggtgagagcactcgcccggacgtggacatttttgaccgggaacgcgtttttattgaagatacggtgatggaactacggtgcaattatccacagttaaaaatagtgcttgagcatattaccacccaggatgctgttcgctacatacaagagcaagaggatggcctgactgcggcaactatcacgcctcagcacctgcttttcaaccgcaatgtgctgtttaacggggggattcggccccactattactgtctgccggtcttgaaaagagagtatcaccgtcagtcgttgttgaaggccgcaacctctggtgaccgtcgtttttttgccggcacggattccgcccctcatcctcgtacggccaaactagccgcttgtggttgtgccggtattttcaatgctccatcagcactcgaatgttatgccacggcgtttgaagcggcgggtgcactgccacatctgcaagccttcgtcagtgaatatggggcaaggttttacggactgccgttaaacacggggacggtcaccttagcgcgacaaccgttgattctgcctgaaccgctggtagtgactgagcatgttcagatagacccatttcccggcgaggtctccttaaactggcgtctggtcggcaacgaataa

SEQ ID NO: 217335 - DNA, 1257 bp, Klebsiella pneumoniae; identical to SEQ ID NO: 101400

SEQ ID NO: 217336 - DNA, 942 bp, Klebsiella pneumoniae; identical to SEQ ID NO: 139831

SEQ ID NO: 217337 - DNA, 849 bp, Klebsiella pneumoniae; identical to SEQ ID NO: 182612

SEQ ID NO: 217338 - DNA, 1257 bp, Klebsiella pneumoniae; identical to SEQ ID NO: 101403

SEQ ID NO: 217339 - DNA, 1266 bp, Klebsiella pneumoniae
atgcgctataaaatgatatcggcagctgtatttttttctatatatatgcagggagcggttgcggatcctgttgacagtaatgcgtgctcaacaactaatagccagagcctgattcaggctattggttgtggcagtattcacggcagcgcccgactgttttcttactcaacccacaacgcctatttcgcacgtggactcaatcaggactccaccactcttggcggatatatcacgtataccacagcacctttttatggttttcaggctgccgtgggagtagaaggacaaaccaacctgctggcaggctcggactcggtcgctgaactggcccatgacagtgggggcgttgatgaagcttacctcaaatggcgccagggactgttgtcgatcaccgccggtaaccagcatcttaacttgcctttcctcggcgactattccaatgcccgggtactaccttacctttatcgtgcagttgacgtgaagtatggtaatgacactgattttatccgcgtgacacgggttttcagttataaaagttatgctgattcaacattcacccgcacatcacgtctggctcaggacaataccttcagcggaaaaactgatggcctgatcgcgctggggctcgcgaaaaaacgcgatcttggtcaacgctacttcacttctcagctatggggtgagaaatacgccgatattaccaatattgtctgggctgaagtgcattacgtagcccctgatattctgtggaaaccagatctggggatacagggattttatggcaaaaataccggtgacagtgtgctaggaaaaattgagaaccgcacgctcgggatgcaactggtcgtttacccgctgaacactctcagttggcaggtgggctacgataaaatatttcccgaagccgacgcttacaagaatggcgcgttggttacgccttatgcctacaaaacctcttccgacccttattttgcaaaaccctatttcaccagcaccccgatgaccggtgccggaaatgctttttcgacgcaacttacatggtcttattctgataaatggacgctaggatctcgttattcctttctggatgtcaaacccgcgaaagatgccaaaagcatcaaccagtctgaatatctgctatttgcacgttataactttagcaatgagttgaaggggctgagtatttcagattacttcggcatccagacatcgccattatatgagcgcgagtttattcaaaatagagtgcaattagcatatgatttttga

SEQ ID NO: 217340 - DNA, 1047 bp, Klebsiella pneumoniae; identical to SEQ ID NO: 210740

SEQ ID NO: 217341 - DNA, 858 bp, Klebsiella pneumoniae
atgaagaacaccagtaaattccagaatgtggtgatcgccactatcgtcggttggctggtgctgtttgtcttcctgcccaacctgatgatcatcgccaccagctttttgacccgcgacgatgccaacttcgtcaaactggtcttcacgctggataactattcgcggctactggatccgctctattatgacgttctgctgcattcgctaaacatggcgctgctggcgaccctcgcctgcctggcgcttggctatccgtttgcgtggttcctcgcccggctgccgcagaaggtacggcccctgctgctgttcctgctgatcgtccctttttggaccaactcgttgatccgcatctacgggctgaagattttcctcagcactaaaggttacctgaacgagtttctgctgtggctgggggtgatcgacaccccgatacgcattatgttcaccccctcggcggtgatcatcggcctggtgtacatcctgctgccgtttatggtgatgccgctctactccagcattgagaaactggatcgcccgctgctggaagcggcgaaagatctcggcgccagcaagctgcagacctttatccgcattatcatcccgctgaccatgccggggatcatcgccggctgtctgctggtgatgctgccggcgatggggttgttctacgtttccgacctgatgggcggcgccaagaacctgctgatcggcaacgtgatcaaaagccagttcctcaatatccgcgactggccgttcggcgcggcaaccagcattaccttaaccctggtgatgggcctgatgctgttgatttactggcgcgcggcgcgcctgctgaataaaaaggtggagctggaatga

SEQ ID NO: 217342 - DNA, 1137 bp, Klebsiella pneumoniae
atgggacagagtcaaaaattgaatatacaaccgcgttcgcgttcgccgctggtgcatctggcgggaattcgcaagagctttgatggtaaaacggtcatcgacaaccttaacctgaccatcaacaatggtgagtttctcactctgcttggcccctctggctgcggtaaaaccaccgttctgcgccttattgccggcctggaaaacgtcgacagcggacagatccatctcgaagatcacgatatcactcatgttccggcggaaaaccgccacgtcaataccgtattccaaagctacgccctgtttccgcatatgacggtgttcgagaacgtcgcctttggcctgcggatgcagaaaaccccggcggcggaaatcaccccacgggtgatggatgccttaaaaatggtgcagctggaggcgtttgcccagcgcaaaccgcaccagctctccggcggccagcagcagcgcgtggccatcgcccgcgcggtggtcaacaaaccgcgtctgctgctgctcgatgagtctctttcggcactggattacaagctgcgcaagcagatgcagaacgaactgaaagcgctgcagcgtaagctcgggatcaccttcgtcttcgtcacccacgatcaggaagaggctctgaccatgtccgatcgcatcgtggtgatgcgtgatggcaaaatcgaacaggacggcaccccgcgagagatctacgaagagccgaagaacctgtttgtcgccagctttatcggcgagatcaatatctttgacgccacggtaattgaacgtctcgacgaacagcgcgtgcgcgcccgcgttgaaggacgggaatgcaacatcaccgtcaattttgccgtggaggccggccagcgtctgcatgtcctgctgcgcccggaagatctgcgcgtcgacgagatccaccataacagcgacgccgacggcctgatcggctatgtccgcgagcgcaactataaaggcatgactctggagtcggtggtggaactggagaacggcaaaatggtgatggtcagcgagttctttaacgaagacgacccggatttcgaccactctcttgaccagaaaatgtctatcaattgggtggaaagctgggaggtggtgctggccgatgaagaacaccagtaa

SEQ ID NO: 217343 - DNA, 492 bp, Klebsiella pneumoniae
atgtctgattatcgtcgcagttatatccctggcggctgctggttcttcaccgttaacctgcaaaatcggcgcagcgatctcctgacgcgacatattgttcatctgcgtgccgctatagcgtctgttaaaagcaaaaaaccttttctgattaacgcctgggtggttttaccagagcatatgcactgcatctggaccctgcctgagggggataccgattattccggtcgctggcgggacattaaaaaaatgtttacccgagcgctggcgcagcgccatatctggcagccgcgattctgggaacatgccatccgtaatgaagaagattaccgacggcatatggattacgtttatatcaatcccgttaagcacggtcatgtccgtcgggtgcaggattggccgtattcgacctttcatcgcgatgtgcgccggggatggtatccgtcggattgggcgggtgaggtaagcgaatttgatgcaggcgagaggcgataa

SEQ ID NO: 217344 - DNA, 1083 bp, Klebsiella pneumoniae
gtgaaaccagtaacgctatacgatgtcgcagagtatgccggtgtctcttatcagaccgtttcccgcgtggtgaaccaggccagccacgtctctgcgaaaacgcgggaaaaggtggaagcggcgatggcgcagctgaactacattcccaaccgcgtggcacaacaactggcgggcaaacagtcgttgctgattggcgttgctacctccagtctggccctgcacgcgccgtcgcaaattgtcgcggcgattaaatctcgcgccgatcaactgggtgccagcgtggtggtgtcgatggtagaacgaagcagcgtcgaagcctgtaaagcggcggtacataaccttctcgcgcaacgcgtcagtggtctgatcattaactatccgctggatgaccaggatgccattgctgtggaagctgcctgcgctaatgttccggccctatttcttgatgtctctgaccagactcccatcaacagtattattttttcccatgaagacggtacgcgactgggcgtggagcatctggtcgcattgggtcaccagcaaatcgcgctgttagcgggcccattaagttctgtctcggcgcgtctgcgtctggcgggctggcataaatatctcactcgcaatcaaattcatccgatagcggaacgggaaggcgactggagtgccatgtccggttttcaacaaaccatgcaaatgctgaatgagggcatcgttcccactgcgatgctggttgccaacgatcagatggcgctgggcgcaatgcgcgccattaccgagtccgggctgcgcgttggtgcggatatctcggtagtgggatacgacgataccgaagacagctcgtgttatatcccgccgttaaccaccatcaaacaggattttcgcctgctggggaaaaccagcgtggaccgcttgctgaaactctctcagggccaggcggtgaagagcaatcagctgttgcccgtctcactggtgaaaagaaaaaccaccctggcgcccaatacgcaaaccacctctccccgcacgttggccgattccttaatgcagctggcacgacaagtttcccgacttgaaagcgggcagtga

SEQ ID NO: 217345 - DNA, 303 bp, Klebsiella pneumoniae
atgcgaacagcgcacggcgttaaagttgttctgcttcatcagcaggatatcctgcaccatcgtctgctcatccatgacctgaccatgcagaggatgatgctcgtgacggttaacgccgcgaatcagcaacggcttgccgttcagcagcagcagaccattttcaatccgcacctcgcggaaaccgacatcgcaggcttctgcttcaatcagcgtgccgtcggcggtgtgcagttcaatcaccgcacggtagagattcgggatttcggcgctccacagtttcgggttttcgacgttcagacgtag

SEQ ID NO: 217346 - DNA, 432 bp, Klebsiella pneumoniae
atgctgacccaaaacggcgtcccgatgagccgttaccgtgcggggcgtctgatgaaacatctgaacctgagcagttgccagcctggaaaacatcagtacaaaaatgcccgtcaggagcatacctgcctgcctaatctgctcgagcgccagttcgctgtgcccaagccagaccgggtgtggtgcggagacattacgtatatctgggccggaaatcgctggtgctatctggcggtcgtcatggatctttttgcccgcagggttatcggctggagtctgtcagtacatgccgataccgcactgataagcagtgccctgcggatggcctatgaaacacgtggtcaaccgcgtgatgtcatgttccatagcgatagtaataatgccgatgtcagtatttaccaccacttagtttgccgtttaaccagattggtgtga

SEQ ID NO: 217347 - DNA, 312 bp, Klebsiella pneumoniae
atgaacaagaaaactaagcgtactttcacccccgagttcaggatggaatgtgcacagctgattgttgataagggctactcctatcgacaagccagtgaagcgatgaatgtcggttctaccacgcttgagagctgggtacgccagctcaggcgtgggcgccaggggattacgccctctgccacacctattactccagaccagcaacgtatccgcgagctggaaaagcaggttcgtcgcctggaggaacagaatacgatattaaaaaaggctactgcgctcttgatgtccgactcactgaacggttcacgatag

SEQ ID NO: 217348 - DNA, 597 bp, Klebsiella pneumoniae; identical to SEQ ID NO: 195642

SEQ ID NO: 217349 - DNA, 993 bp, Klebsiella pneumoniae
atgaaaaagacgctacaggtcgccactgttcagttcacacatcacgctaatgataagcaatacaacctgtccgtaatggaaacatttatccttcaggctgcacaggaaggaactaaaatattggcttttcctgaaatgtgcatcacaggctactggcacgtcactgatctcacggctgatgaggtggtatctctggctgagtccgttgatggcagcccatcactggagcgtataactcaattcgccagcacctttgatatggcaattggcgctggattcattgagctcgggtgcgacggaaaattgtataattcatatgctgtttgtatgccagatggtcaacggcatgttcatcgcaaactacatgcttttgagcatcccgttattgaaagaggtaactgttataccgtttttgatactccctggaatgtacgtgtgggaatactgatctgttgggataataaccttgtcgaaaatgcgcgcgcaacggcattgctaggggcggatattttgatagccccccaccagacagggggaacgaactcccgcagcccacatggtatgaaaccgatccctgtatctctctgggagaaaaggtatcaggatcctgaagcgctggtagctgcatttcagggaagcagcggacgcgagtggttaatgcgctggttaccagcaagagcacatgataacgggatgtttattctgtttagcaacggtgtagggctggacaacggtgaggttcgcactggtaatgcgatgattctggatccgtatggaagagttcttgaagagactctttcttttgaaaatgcgctagtgtcagcttgtcttgatttagaacttttagcaatgtccactggacggagatggattcatggtcgtcgtcctgaattatacgatattttaagccaaccacagggctatgagcgcgattcacgaagtgcgcgtttctcacaggaaatccctcaatttgcagataggaaaagccaataa

SEQ ID NO: 217350 - DNA, 858 bp, Klebsiella pneumoniae; identical to SEQ ID NO: 195644

SEQ ID NO: 217351 - DNA, 1758 bp, Klebsiella pneumoniae
atggataaaaagaactcaacatctaaagtaattaaaatccttaccaggaatggcctgagaaattttgtcattgtgttttttctttcggttttttcgtcagcgttattatcaattactccggtttatatatcgtccattacggggcgtttaacaaataacaaccctcaagggatcgaatcgatttatgttatcggagccatgtatgtcatcacacttggaatacaaaagtgtttgcaattcctttcagtatactgccagagccatttaagaattgacgccataataaacatttcgcgtgcctatctgcagtcattatacgaaaaagaaagaacgctggctccggatgaaaacactggggatatcagtcataagttaaatcaggcgactaacgatatctatgtcatcatcagattgcttgctacaaatctatttccttctgttttgcagattctgatatctgttgttttcatattcagttcaggcgatgtttttacctcggttttatttttgctgtattcatttgtatttattgttgttaatacttatttcagcaaaagaatattaaaaagcaaacgagttttacttgatagtgggcgaaaaacatatagtcttatcaccgatagtgttaaaaacatatcacttgtcagaagcatgaacacctttgattttttcttcagtcgatttcgtgctactttagagaatgaccgtaattcccaacgggactactggcatttaaatatcaaaagtcagatagcctccgggcttctaaatttgattgtgtttggtgttgtgtttttcaaggtgttaaatgatacggtaaatggtttagttccactcagtcattttatactgattacatcttacattattctttttattactcctctggaggggttggctcagtcacttattgaattaaaagaggcgagttctaatcttaatgaattcctgaaaaacatgaatcatgggaaggaaagtaaaaatcttgtcagaatggacggcagcattgatatcttcgccaaaaatattgagtatacatataatgatcaaaatgcgcagcaaaatttcaaacttggccctgtaaacctgacattaaaatcaggtctgttttacagtttaaccggagagaacgggtccggcaaatcgacttttataaaaatattaaccaggcaattaaaaaattacagtggtcaattgacaataggaagcaaagattaccagtctatcctggatgatgatttttataatattgtatcgtatgtgtcccaggatgatttcatttttatggatacgttgagatttaatcttcagattgcgaaccccaaagcaacagaagaacaaatgctgcaagcgcttgagctatctggattgagcaacatgaatgacaccagtctgcttagcagatcaatcgctgacggcggtgttgatttttccggcgggcaaaggcaaaaactgtcccttgctcgtttattactgcgcaatcctaagatcatcatacttgatgaagtatcctcttctatggatataaagacggaagaacattgttttcacactatcaggagcaaattccctgacgcaacaatcattaatatcactcaccgtccagcctcactaatattgtctgatgaaattattgtctttcaggatggtaaagtagttgagtcaggtactgtagatgacctaatgaatgcagggcattatatttcagatcttatgagaaagtatgcctctgaaaaaagtggaagagtaaaggtttga

SEQ ID NO: 217352 - DNA, 1590 bp, Klebsiella pneumoniae; identical to SEQ ID NO: 195681

SEQ ID NO: 217353 - DNA, 618 bp, Klebsiella pneumoniae
atgttcaacatgactcattatctgcgctttagcatttataaaaatgacttggttgttattgatataaataatgatgagttctttattatgaacgacatcaatcatgaaaatataaaccggcttaccgacattgaggaggagttattggctgcaggactaatacaatcactaacaccgattagcgataacaatgaaaatttctatgatgaacgatggttaccaagaaaagcagaactgcacagaattaatcctttcttgttattaaaggcatacagcatttttttaaaatgcaaaaaaaatcttgaccgcaatggttattacggaattatatacaacctgaacaatatcaaaaaaaatgacaggtgggttaaatactcaccggaagctataattaactgccttaattttataatgccatttatacactgtgaaaacccatgcctgatttattcttatgtattagttacgatgttaagaaaagcaactggtaaggggactctggtcgtcggagtcagaactcgtccctttataagtcatgcctgggttgagtttgacggtgaaataatttccgataatgtttacttacgggataaactcagtgtcatcatggagatttaa

SEQ ID NO: 217354 - DNA, 138 bp, Klebsiella pneumoniae; identical to SEQ ID NO: 195679

SEQ ID NO: 217355 - DNA, 1515 bp, Klebsiella pneumoniae
ttggtgaatatcgataacgccaccgtgagggagttagcagagaataacatcttcagggaaatgacccgtgcggatattaacacgatgctcaacacccctggtgccgaagtcgatgttgaatacgctttacaggctcttatcgatgagggtcacaaatcaatactctttccgcatgatgttaagggcatttatattcttgctggaaacgtcaccgtacccgcccctgtaacgttgatttcattttctccttgcgttaagccatacacaattacggacgattcgtcgtttctcaataaaggcgctgtcattcgaaaagcggcaggagctgattatatttttgggccgggaaccgtcccgcgcttttacggcttgcttcttgacggcagggacagcagcagccccctgtttaatcagcaaaatcagacccgtggaggcatactgtttaactgcggggtataccgctttttatacggtgttggtagctatgcatatacttcaattcaggtgggtatgtcttccatatgcgccaaccaggacggagtttataacctgattgattcacgcttgattaactgcactattaacgccaatacccggcatggtgtttatctgcgcaacggtgccaataataacctcttccagaatattcgaaatgaatggaatggtggtgtgggatatctggctgatggctcagtcggaaacatcatcaatggtgagctggttgaccgtaacggctcggcaaattttgccgtgctaaatggcggcgggttccttattggtgatgtgttctctcagcgtccaggaagaacatcagcagtcggatcctcctataacacccatttttatatggaaggcgctggcagttacatcatgctcagcaatgtcatcacgcgaaccggcattgatgatgacggtcagggaaccctgacgccagaacgggtgctgacaaccggcggtggctccacggatatgacctttgttgcaaccggttgcgatttgtccggatataccctgtccgcgcttcggcaaattaccactgccgagaaaatgattatcaggggaaataaaggcctggctgacctgataacgacgggtctgtatcagttccagaatggccgggggaatgtgggtggcgtgaagagcaatcaggtgctgacgtccggcgttggcgctgtactgacccttagttttcaggaaacaggattagccgaccccgcgacagcacaggcaacagttccgttatgcagaacgctactgattgagtcgctaacatcaggcggggtatcaggaaaattcaaactaccgttccagataaggcgcgtggtacaggccgctaatgttgacctgtacacctctgaagcccgttcatcgcccacgggagcctacgctgtcactggcgcgacaggtgtcaatgtatcactggcagttaatgctgatgccacactgacaaccgtcacgctcaccagcgttgacggcatcgggcggttccttcgcgtgacaattctggataactaa

SEQ ID NO: 217356 - DNA, 195 bp, Klebsiella pneumoniae
atgagcgatgctttttttgaagagttaatggatggcgacaccattcccgaccagtcacaatttgatatctggtatgaggaattatgtacttatgcgcttgatcatggtggacgcgccccttacaaaatgtcctggctggagtatttcgagcatggaatgacgatagaggccgcgtttgagagattttacgaataa

SEQ ID NO: 217357 - DNA, 270 bp, Klebsiella pneumoniae
atgaaaaatattaaagtgataacactctttcatccccatgaaaaaacaccatttatgatctgtattgtaaacaaagtagaagatacagaacacggtttaaaattaactcttgaaaacggaaatagcatttgcgtcaataattatagccattatctgttatcagagtctgtaagtcgttgtgataaaaacaggttgaaaaatatttatattcgcttggtttcagaactcactcagatgagtgaagaaactataaaatcacagatgttataa

SEQ ID NO: 217358 - DNA, 984 bp, Klebsiella pneumoniae
atggaaggtaagttaattttttgttccgatgcaatactacggtttcagtccgattacgatgaaaccgctgccgttccattgctatccatccagaacgcgatagccaataccgatcccttctttcttctccgtttcttccaccacaccgttctgattgaagaaggaacaacgctggcaaatatcttcttggcaatagaaccgtggaaggcactgttagcggcttatctggacagagatgttggtgcttatatagatgaggtaagaaaaccgtccgggccaacgacatgggatatcgaatggatcggaatcgaccgtcgaagctcggtttatcgcgcttacaagcgtcaggatatggaagaaggagaagatttttcgacctattttaatcgcgagcggttccctactgatgagtttgacatagaaagtagctgtgatgcttccggctttatcaaaggggataaagaacgctggagtatcagtggtgatgttcaacaaattaaaaacctgcctgtaatcctctatagcaaacagacattgatgacttcgtcgaacgacggattgttgaagaagaacgtatcaggggtgcagagttccaagcatagctgctttgtttatggcgatacctcgttttctttcagtgaggtaatggtagccatcttcattagcgggctgttcttctatgcaccaaaagatgccgccagtagtcttgatgagctgaaagcgagtctggctgggctggaagaagaactggccgaagtaccaaaagtggattcgactggcaatgaaacagataaagaaccttctatagtcgtagccgaaggtgcttttgattcggtcacagctcacatggaaacagaagctgaggagtggcaatccattaagaagctgtgccagcgagaaggtgagctacccatacgcatcggtagtattaagatggctgagcctgctgagctacgcttgtgcgggaaaattatacgtggatag

SEQ ID NO: 217359 - DNA, 918 bp, Klebsiella pneumoniae
ttgaacattaaagcaacaccaatattaatctcacttgtctacgaagctcttttaagatccttttggcgtaaaccggccctgaagaaatttttattgtcttcacatatttccgaaaacttcatttcaacgtggagggaggatgagtcaaagagggttttcttagatcgtttattccctaaactgcaaagtaatgcaaaaggtaataatgttatttgtctgatggcaattaatctttctgaacagacttcttttcctgatttaagaggctgggaggattccttacaaatgatccagttggcaaccaatgctgtgagagatttgaaatcctatattacaaaacaaaatgaagagcatcagaatgaaaaagaaaaacaagaattcagggtacgagcagaaaaagagagggctgaaataaaacgttccgaaacggatttgattaagttaaaaactgagtttgaatgtttgcataatgaaattggaacacaacatggtggctatgagtttgaaaaatggttctttaagcttgtagactactgcgaaatcgtttgtaaaaaaccatataagactgatggtaggcaagtagatggagctataactattgatggtacaacttatcttgttgaattaaaatttcaaaaatcacagtctgatgctacagatatagattcattaaaagctaaagtaagtaaaatggcagataatacaatggctgtaatgatttctgtatccggttattcttctgttgctataaaagagtcatccggtagccgaactcctctaatattattggactttaaccacttgtatttatttctttctggtggcatgaaattcgatgagataatcacacgtataagacgacattcatctcagactggagaagcttacctacctgtaaatttattcgggggattttaa

SEQ ID NO: 217360 - DNA, 465 bp, Klebsiella pneumoniae
atggcatttttgattatcaggatggataagccgatgaagaagattttactcgttgctggcgcagctatggcactggcgggatgtggtgagaaaggtgattttgagaaagcaatcaatgacaagattgggcaggacaaatactgcttctcgctggataacaataacaccagcttccccatccgtcttgccaaaccacggcttgattcgaccggcacagggaccaattcagtgatcctcgatggatttatagagcagggaatgatggtcttcgagcagggctatgattcgaacgtattagggataacagaggaaggcaaaaaagccaaagtctggagcacaacagacggtgcctgtgttggtcgtcgtgccgttgacgagattaaggaatggactgagccgggaaacggtaatcagaaagtagttcgcgtgtcttatacgtggaagctggttgacgttccgggctga

SEQ ID NO: 217361 - DNA, 864 bp, Klebsiella pneumoniae
atgaaatcgttactttctctactgggccgctatttgctgacgctcagcgctgtggcggttgctacgcttttggcttttattctctggaaacattatgtgcaaaccccctggacccgcgatggtcgggtacgtgcggatgtggtccagattgcgccggatgtctctggaccggttctgaatgtggccgtccgcgataatcagtgggttaatcggggcgatgtgctctattccattgacccgcactggttgaggttggcagtggtcagcgcccaggctgatgttgaggcgaaacgtcacgaaatgctgatgcgccaggatgcggcgaggcgacgctctcagattaaaggggtgatttccagcgaggatttacaacaaacagccagcgcagccagcgtcgctgcggctaattaccacggtgcactggctgcgctggaccttgcagagcttaacttatcgcatgctattgttcggtcaccggttacgggctatgtcacacatttgcggcttcgccctggtgactatgccacagcgggagaaactaaagtttccatcattgatgccaatagtttttgggtggttggctattttgaagagactaagttgcaacatatccgcacgggaaatactgcacacattacgctgatgggatttaagccggtgatcacgggtcatgttgagagtatcggacgcggaatagatgataacaatgacgagaccggggggcttggcctgcctaatgtcgagccaacctttagctgggtgcggctcgcgcagcgtatcccggttcggattcatattgacagattgccggagggagttgaattagtggctggactgtctgcgagtatatccatcacaccataa

SEQ ID NO: 217362 - DNA, 216 bp, Klebsiella pneumoniae; identical to SEQ ID NO: 80291

SEQ ID NO: 217363 - DNA, 1977 bp, Klebsiella pneumoniae
atggcttctccttcactactgaatgatgcgaacgctctgctctattcggcgaagagttttaccgctgcgatgctcgcatactatattgcattatcaattggcctggagcggccttcctgggcaattatcaccgtatatattgtttcccaaacctccgtcggagcatcgctaagcagaagtttgtatcgtctggtaggaacggtaattggcgctggcatgacggtattaattgtacccacgttcgtgaattcccccgtattttgcagcgtgatactggcaggctggattacattctgcctctatttgtccttgctggaacgtacgccccgggcctatggttttgtccttgctggttacactgcgagtctgattggcttccctgctgtatccgatcctggcgcgatttttgacatcgctatcactcgggtacaggaaatcatgatcggtatcttctgcgcggcacttattcatcgctatgtattgcccgcgcgcatctcaggccagttcaacagtaaattatcgcagacgctgctcgcggcgcgacagcgtatcgcagagactttaacaggcaaacccgatcctgtttcctcgccgctgcatatggcactggcattgcagttcctgcagggtatcagccatcatatcccttatgattttgcgttctctgtaccggtccggcaagcgagaaaaaggcttcatgacaggcttgcgcgattagtcattgttaactgtgagttacgtgaccgtttagcactgatagcgaagatacctttcgatgtgcaaattttaatggatgatgttgaggtctggctggcctgcaaagatcaaggaaaatttaaaagcgagggggaagcgctcaaaaaacgcagtgaaaaattactgcagcgctatgtcgtacatgagttgacgtttgtagaagcactgaatgtaagttttatgcgctacctgacagaggccattgtcctcgtgcagcagtgctatcgtctttcggatgccattcatcacgcgaatcagatgcctgcgcactcagaaatgaataccgtgaaagggtatgtattccaccgcgatcctcttactgctgcccgcaccgcattgggcgctttcaccatcattttgagcggctgcatggtgtggattttctcggcatggcctgatggcggtacggcagtatctatccttggcgtttgttgcacactgtttggcagcttcgatacgcctgccccgcatattgtgaaatacatcattggttccctctggggagttgtgataagcctgatttacagcttcgttctcctaccgcaagtcagtgattttatcgtgctggtagtggttctagctccggtatatctgcttgccggatcgctccaggcaaggccgcccaccacgtttatggcgatggggatcacactgacgctgcctattttgtgcgagctgggtgctcattacagcggggattttgccgtggcggtgaatacctctatcgcattattttctgcaactggctttgcggtattcagcatgggctttctgcagactgtgcaagcagatgcggcaataaatcgcctgcttaaattatgccagcgcgatattaaccgcagcgtgaaaggtgtgttgaatactgatgaaactctctggatcaacctgatgatcgatcgggctgcgttgatactgccacgtttgccgcgcagcggacagtcatcagaacaggcattgaatcatcttttgcacaccctgcgtataggcctgtgtgtaatgcgattacgccgatgggatgcgcatgcagacaaagaaataaaagaggttctcaattgtcttacacactcgacggatattaacaccttacttgaacggattgtcagcctgactgagcgtagcctgtccgtagcagatgaactatcgcggcatcatgttaatcaactggttgatctgtactgcgcattaagcactcaggaaatggagcctgtcgatgatcaatga

SEQ ID NO: 217364 - DNA, 807 bp, Klebsiella pneumoniae
atgttacccccactcgccaatacgctgttcgatccggataccacctcctgccccgcagtcgcgcgtcatttggattttgtcgattacgcggccgaagtgcctgtgcatacgcaccgcaaagggcaattgattattgccctctatggagcggtcatttgtcgcgccgaaaatgatatctggatcgtgccgcctgattgtgccgtctggatccccgggggagtgccgcacagcgcaaaagctacctggaatgcgcatctcaactatctttttatcgagcctggagccgccgcgctgccggagcgatgctgcactctggccatttctggtctgatcaaagaactcattgcccgtttaacccacgagggcgtcggatacccaccagaaagccatctagccagactgaccagagtaacacttgatgaattagccaccatgcctcagcagaaactgagcctccctgtgtcgtcgcatcctaaaatccgcgccatggccgatgctctggtcagtcaacctgatgaccgaagcacattcaaaacatgggcaaaaagactggcgcttagcgagcgttctctcgcgcgtttaatgctgcgcgaaaccgggttgacgttcggacgctggcgtcagcaactgcaactgataattgctctccgggaactggctagcggcgtttcggttcagaatgttgcagctaatctggggtatgaatcggttaatgcgtttatcaccatgttcaaaaaaaccatgagcagtacacccgcacactattttgccgaacggaaaacaagcgcacacttaaccgatagttag

SEQ ID NO: 217365 - DNA, 930 bp, Klebsiella pneumoniae
atgaaagaaaaaataaaaaaatttggcctcccttggatatgcctttttattgtctactttgtatgttttttagtagtcgcagccactattatcaggcatgtaataaatacaaccgaagagataacattaaccacatatataacgccaatatttggactcgccagcttatttgttgctatggtaaccatacgatacaatgctgttaccaataaagaaaaaaatgcattggatttcgtaaaagaattcaaagaaaaagaaatacatgatgcaatggttgaaatatataaaacaagaagaaagtataaaaacaaaacaaacaatagattaaacagaaaagacatctcaccttactgcgaaaaagccgccgccatatctcaggatgatataaaagtaatcatacccgcagaaaaaaaactagaacttgctgagcaaatagatctactcactgaggagatgaaatacacttcatccccaagcgcaaaatcaaaaatcagaggaaaaatatcctcactccaaaaaaaactcaatgatagcaatgaattagaacaaatttgcaaattcagatcagctctaattaaagtgttaaatttaatggagcgatgtgcaaatggtgtgagatatggtctatacgatgaaggtcttatatataactcatatggaacccagttcattgaaatatatgagctcgccttctcattcataaaaagaaggcaggatgatgaagataagttattcataaatgctgaatggttagcagtaaaatggactctccaaaaagagattcaggaagacaagccaacatttatgactaatcaaaagagagctatacaacatgctaacgaagggctgaaatcacacctgaaagcaccagataaaagcaaattagaaccattgcttaacaacttacaaaaactgaaattcccgcgataa

SEQ ID NO: 217366 - DNA, 192 bp, Klebsiella pneumoniae
atgacgaaacaacagaaaacagcgctgaacatggctaaattcatccagaatcagtctctgctcctgctggagaagcttaacgagcttgatctcgatgttgaggccgacctttgtgagaaactccacgatgatgcggagcatcttttccgtacactgtcctcgagactggatgaattacaggatggtaattga

SEQ ID NO: 217367 - DNA, 144 bp, Klebsiella pneumoniae
atgaaaatgcattggcaggggaaaagaattggttacgtttacagtattttaattgttggggtgataattcaaacgaagatacctgactatgcatgggttattgctccattgctggcaataatattaagtattgaaaaggattaa

SEQ ID NO: 217368 - DNA, 873 bp, Klebsiella pneumoniae
atgaaacgaggcgtagtggcaataccagctatactggagaaatataaagctggttttaatttggaacgaagtattttccctgaggaggtgaattattatgccttgtactgggattatatagcaatgccaactaataatttcatggaaataaatgtttggatgcaggatgaattagttgattgcggtctattaattaggcctaaattaaattattctgatatgtcaatggataaattcgctgacttttatattgagtctcaatttctggtgctggatgaactaaggcgtgatagatttgaagtcgactggagagctcatcagattggaaatgatgttttgatgccagcatctttagccgaatcgtcggctttaaaaaacaatatacggttaagtcttgacaggttacttcctgtaccatcaggtgaagttcatttgcatgatattctagagtttaaattaagacgtaaagcagaattgatagcgctgcatacatactgcgacgatttatatctagaaattgttaattcagcggacaaaaatctattgcatgctaaaaattttgaaaaattaaagttggctatagaggatttagataaagttagttctgagggatggcagtttccaattaaatttaacctggatatatcacaagagtttgatatttcacaatcaagggcaggcattgcaacaatgcttttagctttaaattctcctaatcctgtggaaaatattggcgcaggtgctgtaatttcagttctagagggctttgttaaaatcaaggctgagatccgaagtttcaggaagtcgtcaaggaaaaacaatgacttcatctatctttcaaatgctataaaagaagatattataaagaggtga

SEQ ID NO: 217369 - DNA, 240 bp, Klebsiella pneumoniae
atggcactcattacgtatcgttcaaacaaaacagttcaggcaatgcttattgaaaacattgctattaaccctgattacaccgccaccataaccgacagtaacgggcaggaactggcggtttcatcagattatgttttgcgtgagaagccgagagcgggaggttactacatgctgaacggagagggctttgaaagctttattgataaagatatttttgaaacggaattcgctgtaaactaa

SEQ ID NO: 217370 - DNA, 1323 bp, Klebsiella pneumoniae
atggaattccgtacttgccgcattatgtggaaaggatggtcattatctggtcctggtttaaatgcttatatgggcgtcaagctcggggaagtttccacaataagtgcagtgcgtttgtcttatgttgaagatgtaaaaataggttggttcagtaacccattcgtagtaggccatgcttgggactcaacctttgtgaatttacatattcaaaactggggacgcaatggagtttatattcaggaacgtgcagatgataactccaacaacttgactttcattcatctgcaccaggagccaactgaatataatgctggagatacgtgccgtggttttgtttgtatgggaggggcgacttctaacaacaaaaaccatagtattcgtttaattcagcctcatatagagccgaggaactggaactgtcaacatttctatatttcaaactgcgtaggcgtgcttgttgatacgccaagcgtaaaccgcaataacagcctcgtggatgaagatgggaattcgctcgtggcgaatgccaacattgcgccagcgattcatatcatttccagcgttggcgtccatttcaatggcggacaaataacgcacattgggccaagagcagatgatgtagctccgattatcaagattgagggcattgtaaaagatatcaggttcaacagttatattgatacggggcgtgcatctgtcgcgaattttgcaggaggcattgactttagcaatagccccaatgcagcgcgcgaagtttatattgatggtgctcctgttgggtcttacacgtcatattctagcgttcggaacatgtggcgactgtctgttatggcaaatattcagaggacagtatcagctcttgcagaacagtactccatagccggaacaacagataccgggaccgtgctcaaatttctgatgggtaatacagcggacccgtcaacagcaccaacggaaatcatgcgtctgtatagcgagggatatctgtataacaaaggctatgtgtcgcctacggtaactatcgcggccggagcgacgtacacacatattgtgggcgcgggggtcaacaaccgccgtggtgagtacaaaattacgggcctggaagatgacaacacccttttcggctcgttctttaacgtgcccaacaaagcgccaaaacccaccggaattattggtgatggagtaaatctttcacaggcgcagcctgacgcgtcagtcacaaacaaactctgcgtgtaccagagtgggcagtatatcgttttagaaaaccgtcgcagcacatcagttacgctggcaattcgtttcgattcaggtatcagttga

SEQ ID NO: 217371 - DNA, 147 bp, Klebsiella pneumoniae; identical to SEQ ID NO: 94144

SEQ ID NO: 217372 - DNA, 627 bp, Klebsiella pneumoniae
gtggttgtctggcgaaagatacctctgcagaatgagacaatcacctttaaacatgaccttaattttagccatcacaggctactgaacccggatccggtgagcgctctggctcacataagaaagaagcatatagaagaccaggctatgcgtactcataaactgaacaagtcacgtaaactatatcgcagtgacaatacaactacgcggcattattcaattaatccggggggggagtatcgctgggggcgaaaccgtaaaaaagccgaagacgagctgctggcaaagcgcgagacaatgcatggcaggcaaaagagaggccgtgactataccccattgttttactttctcgtcaaacagattggccaaccgtgggataaggtattcagcgaagtatgtggtcgtcttgatacaacagagcctgttttctggttggtcgcgctgcatgagcatcagaaaagagatttggtacgtatcggtgacagcagcttttatccgggcctgtttgttgatggaaatggaatcttacaacaggtaaacccttcgattacgggaaaggacgttaaggtaatttgccgttgctgtacccacacctatatgggggagccagtcccagggaagtatgagtaa

SEQ ID NO: 217373 - DNA, 180 bp, Klebsiella pneumoniae; identical to SEQ ID NO: 108002

SEQ ID NO: 217374 - DNA, 444 bp, Klebsiella pneumoniae
atgaaaacatttagtttgtcctcaactccagccagaccacagcgcctctggcaggttgccgggttaaataatgctgatggcgtagcgcttctgggccaaataaatgaaggtctggacgggaaggtggcgaaccggataactgactgggccagaataacccagaatgacctgagaaaaatgtccggtatcccgtcaaccacatttagccgcagtgtgaaggcacgttttaacccggaacaaagtgaacgtctggtacgtattatccgcgtcattgatcgggcggtagatttgtttgaaggcgacagggaagccgcacagaagtggttgaacgaacctaaccgggcattgagctggaaagtgccagcagacctgatggcatccgaaactggagcctatgaggtcattaagctgattacgcgtctggagcatggggtgtactcgtga

SEQ ID NO: 217375 - DNA, 1470 bp, Klebsiella pneumoniae
atggcgattttccatctggattttaaaattgtgaaacgaagcgaaggcatgacttccgttgcgaaagctgcctaccatgcccgtacacgtattacggatgatcgtattggagaaacatttgatttcagccacagaacagatcttcatggtcatattatattggcacctgtttccgcacctgcccacattgttgaaagctgctcagcactctggaatgaagttgaaagagtggaacgccagaacaacggtcaaacagcccgttattttgatgttgctatccccgtagaactcagccatgatgacaagaaaaaattagttgccgaatactgccagaagaactttgttgataaggggatgatagctgatatcgcattccacgatttagacggtaagaatccccatgctcatgttatgttaaccctgaaaaccattggtcccgaaggcttcggtaaaaaagacagaagctggaatgataagaagataatgctccagtggcgtgagtcgtgggccacgatatcaaacagctaccttgaagccgcaggcagtgaagaacgtatcgatcaccgttctctcaggacacaatttgctgatgcccttacccaagcagaagaagcattcagcgctgaagaaaaagcattctggcttgccaaagcaacagaaacaaaccgcccagcaatgcaacgtgttcatcgtgccaaatggaatgacaccgagtcacaggaacaacgagctagggaacaagctcaacgcgatcatcaaattggggaagcaaagaaggtctacaccacattcagtgagctaccactggaaatcgttgttgatgtcagaagcttcacgattacacattttgctgaacccgaagagattgttcttccagactcccctgcaacagtagaacagcaacctgctatggagacacctaccacaagcagaagaccagcagcaaaatcttaccgtgatcccaataaagtcagtaaggttagtgctgcagggaacaaatcctctgttctggttgttcctgaaccaaataaatccactaaattgaaaaccccatctcttcaaaacaccagagcgatgaaccgtgctcctgtgaggagtaggaaacagactaagccccgtcagagcggtttgtttaaacgtttcacgctattcatcgtggatttcttgaaagagagatttgtatgggccaaaaggaaaaacgataccattgatcctgaccatgataagcgtatcgcagagaactatgtctatgatgaagtgttgggagtctatgttccacgctcagagtttgaaaaacgtaccaaatttaacgatagtaactataaattaacacctaatgagatcaagcgtttcccaagccgtcctaagcgagttcaattagagtcagagagcggtatggatgtcctccctaaaaataatcaatttaactcgtcaaaaataaacgtcgtcaaaccaaattttagatcataa

SEQ ID NO: 217376 - DNA, 312 bp, Klebsiella pneumoniae
atggcaaagcatatgcaagacaaagagagcatggccggaatcacctggctggctctgctgatcattgctggttggggcggccttgtccgattcctgatggatgtgaagcagggcaaagcaaaatggagctggataaatgcttttgcgcagattgtggtttcggcttttaccggggttattggtgggctcatcagcattgaaggtggcctgagtatttacatgatactggctactgccggtattagtggtgctatgggttccgtagcgctcacgtatttctgggaacgaatcaccggagtgaaagcacaatga

SEQ ID NO: 217377 - DNA, 240 bp, Klebsiella pneumoniae
atggctattaccctgcatcataaagaaatcatgattctcatgacggaccccaacttaaaagtgccggtccaacataccagcttcccttttgagcatccctacaaaattgattcggctatagaacagctataccaactgggatacattacagcagtgcaatcaaaagctgactctcattggatcgccacttctattacttcaaaaggcttctcctttcttaaagaggaaggattaatttaa

SEQ ID NO: 217378 - DNA, 579 bp, Klebsiella pneumoniae
atgattaacccgtccgaggttggaaaagctggtgaaatggtcaggctgaaaacgctggaggccatctggattcaggggaagctgcgcatgtggggccgctggtcctacatcggcggcggtagtggtggaaatatgttcaaccagttactggcctccgggaaagttaccaaaacagccatcaacgaagcattacgccgaatgaagaaatcgggtatctcgaagccagaactagaggcgttttttcgtgaaatactcgcagggaaaaacaaaagcggcctggctttctgcacagacgatgagggactgctgattgataaggtactgggggcagtcctcattacgggtggtcacaaagagctataccacctgctggtggagcattaccggttacggaagagcaaacgccgcatagcggaagagctctatgaaaagcatcccgactggtgctttatgacctgtagacgcagagttgatacgtggctaagtttggcagaatcgatgctgtacgcaccaatgtgtgacacattcggcataaatggcgacagattttacttgcaaagtgagccagaaactgcttga

SEQ ID NO: 217379 - DNA, 162 bp, Klebsiella pneumoniae
atgggtacgaaagcgcacgatttgtttgtgttgccgctttgcagagcgcatcacgacgagttgcacgctgacaccgtggcatttgaggagaagcacggctcacagctggagctgctgtttcgatttctggatcgttcgctggcaattggcgtgctggcatag

SEQ ID NO: 217380 - DNA, 1086 bp, Klebsiella pneumoniae
gtgcagcgcgataccgttggcgatagcggtcataccgaactcgcgcacgccgtagtggatgtagttcccggcagcgtcttcgttgatcggcttagagccagaccacagggtcaggttggacggcgcgagatctgcggagccgccgaggaattccggcagcagcgggccgaaggcttcgatggcgttctgcgaggctttacggctggcgattttcgccgggttggcctgcagcttcgcgatgaactcgttagctttcgcgtcgaagtcagacggcatctcgcctttcatacggcgggtgaattcggcagcttcctgcgggaaggctttggcgtaagccgcaaacttctcgttccatgcggcttctttcgcctggccggcttctttggcatcccactgggcatagatgtcagacgggatgtcaaacggcgcgtgtttccagcccagcgcttcgcgggtcagggcgatttcggcgtcgcccagcggcgcgccgtgggagtcgtgggtaccggctttgttcggcgaaccgaaaccgatgatggttttgcacatcagcagggacggtttgtcggtgaccgcccgtgcttcttctaccgcgcgtttgatggcgtcagcgtcgtgaccgtccacgccgcgcaccacgtgccagccgtaggcttcaaagcgtttcgcggtgtcatcggtgaaccagccttcaacgtggccgtcgatggagatgccgttgtcatcatagaacgccaccagtttacccagtttcagggtaccggccagggagcacacttcgtgagaaatgccttccatcatgcagccgtcgcccatgaaggcgtaggtgtagtggtcgacgatatcgtgtcccggacggttgaactgcgccgccagggttttctcggcgatagccatcccgaccgcgttagcgataccctggcccagcggaccggtggtggtttccacgcctgcggtgtagccgacttccgggtgacccggggttttggagtgcagctggcggaagtttttcagctcttcaatcggcagatcgtagccagtgaggtgcagcaggctgtaaatcagcatcgaaccatggccatttga

SEQ ID NO: 217381 - DNA, 141 bp, Klebsiella pneumoniae; identical to SEQ ID NO: 36145

SEQ ID NO: 217382 - DNA, 924 bp, Klebsiella pneumoniae
gtggcaaagcaaaagttcagaatcaccaactggtccacctacaacaaagctctcatcaaccgtggctctctcactttctggctggatgatgaggcgattcaggcctggtatgagtcggcaacgccttcatcacgaggaaggccccagcgctattctgatctcgccatcaccaccgttctggtgattaaacgcgtattccggctgaccctgcgggctgcacagggttttattgattccatttttgccctgatgaacgttccgttgcgctgcccggattacaccagtgtcagtaagcgggcaaagtcggttaatgtcagtttcaaaacgtccacccggggtgaaatcgcacacctggtgattgattccaccgggctgaaggtctttggtgaaggcgaatggaaagtcagaaagcacggcaaagagcgccgtcgtatctggcgaaagttgcatcttgctgttgacagcaacacacatgaagttgtctgtgcagacctgtcgctgaataacgtcacggactcagaagccttcccgggccttatccggcagactcacagaaaaatcagggcagccgcggcagacggggcttacgatacccggctctgtcacgatgaactgcgccgcaaaaaaatcagcgcgcttattcctccccgaaaaggagcaggttactggcccggtgagtacgcagaccgcaaccgtgccgttgctaatcagcggctgagcggaagcaatgcacggtggaaatggacaacggaatataaccgtcgctcgatagcggaaacggcaatgtacagaatgaagcagttgttgggagattcactgacgctgcgtgactacgatggtcaggtagcggaagctatggccatggtgcgtgcgttgaacaggatgacaaaggctgggatgcctgaaagcgtgcgtattgcctga

SEQ ID NO: 217383 - DNA, 522 bp, Klebsiella pneumoniae; identical to SEQ ID NO: 99908

SEQ ID NO: 217384 - DNA, 786 bp, Klebsiella pneumoniae
atgtcccgtagcacgtggtattacaatatgaatgcactgaagcaaggggacaggtatgcgggtcttaaagagaacatcaggaagatataccactatcacaaaggtcgttatggctaccgcaggatcacgctcgcactgagaaaacaggggctgcggataaaccataaaacagtgcagcggctgatggcagaactgtcactccggtctgtgataagggcgaaaaaatatcgtgcctggaaagggagaacgggcgaggccgcgcccaatatcctgagccggaacttcggtgcgtcaaaagccaacgaaaaatgggtaacagatgtgacagagttcccggtacagggaaaaaagctttacctgtcgtcagttctcgatctgtttaaccgagaggttatcgcctacagcctgtcggaaaggccggtgatggagatggtgaatacgatgctggacggtgcgttcccgaagctcagaccgggagatgctccgctgctgcactcggatcagggctggcattacaggatgaggagctatcaggaacgtttaaaggcgcatgggatgacgcagagtatgtcgcgtaaaggaaactgcctggataatgcagtgatggaaaacttcttcgggaccctgaaatcggagtgtttttatctgagggagttcaggagtgtcagtgcgctaagaaaagccgtagaggactatatccattactacaacaacgagcggataagcctgaaattaaaaggcctgagtccggtagagtaccgaacccaggctctgagagccgcttaa

SEQ ID NO: 217385 - DNA, 723 bp, Klebsiella pneumoniae
atgcaccactatcttaacgcacaaggtgagggctggagcgtgcttgacggtatacgtgctgcgctcactgaatttccgcttaaaaacgaactggtactggttggccagtctcagggggcacacgccgcctttgctgcagcaggctatcagcccacctacgcaccagagctgaatatcatcgggaccgtgctaactggcaccccctatttttctgcagagagcgatgttgccagcttattcaccaaaagtgatgataaaaatcagtcatctggcgatcctaaaataccgtatattttttatatatggcaatcggctgcggatactaaccctacgctgaaggcggagaattacttccagaacgctgccttagcacagttggatgaggcaaaagccctctgtatcaccccgttaacgcaaaaagtgatgcataaccgcctgaatatgaacaatagtctgacacctaacatccagtcactgctgactaatgcgctcccttcactttcttatccgacgctgaaaatcacgcatccggtatttattggcattggtggagacgacattaatgtaccaacagctatgcaacagcagtttgccaaagacgtgcaggcggcaggtacgcatactaatattcatctctaccccggacttgaccacagcggcgcggtaaatccttctctacgcgattccgtaccgtttgtcctgggattgaaagataaaccctga

SEQ ID NO: 217386 - DNA, 786 bp, Klebsiella pneumoniae
atgaagaacaagaaatccattccagatgaaggacactactttgagttagttaaaagaacaagtatggcattaaaagaaattgatccgaatattaaagtaattgcaggatcgtttaatcctactagcagtaaaggtcgtatcttaaaatataaggatatagattggtttatgaaactggtgcaattaggaatattgaattatattgacggtgtgtccatacatccatattcctttttgaattctaaccttaaactacgtacaccagaggataactattctaatattgtgttacttgaaaagaaaataaaagaaactgcaaagtcagataaagagataccaatttatattacagaaatgggtgtttctaatttctcaggaaatggtggtgtttctgaggaagtttctgctgactttattgttaaatatacagctttgatcagtacattaccatatgtaaagggtatttggtggtatgacctagttgatgatggcgataataagaatgacaaggaacataactttggtttttacaaaaaagatttaagtaagaaaaaagttgttaatgagtttagaaggttaatcaattctaattcagttgataaaatgacttcttgcaatgtggatatttcccaaaaacgtgtggaattcattgtgaaagatattgataataatagtcgatgttctcaattagaatgggagagaataccgttgcaacaatataataggctgtacagagattttgaaaaatgcgatggttgtaataaaattagcatagacaggaattga

SEQ ID NO: 217387 - DNA, 507 bp, Klebsiella pneumoniae
atgagctctgggcaaattgctattctagctcaaattggcgccatctctgactctattactaaactgtcagatagaggtatcagatcaatactactattaatagatgaaggggacgcttttttacatatcgattggcaaaggaaatatatttctaatttaaataaaatgctaggctcattaaaaacatctctgggcatatataatttacaacttattctagcctcgcactctccattgttagccacagacgttcccaaagactttataactagactaccaattgaaaatgctacgttaagtggttttgcatctcctctttatattttactaaatgaatcttttggaactaaaaccattggagaatttgcaacaaataaaattgaaaccatcatcgacaaaatacctaacaaaatactgactgaaaaagattattatcttataaataatatagacaaccctctaataaaaagcgaaatcgaacgcttaattatgcagcataaagattga

SEQ ID NO: 217388 - DNA, 981 bp, Klebsiella pneumoniae
atgagccatcaactcaccttcgccgatagtgaattcagcactaagcgccgtcagacccgaaaagagattttcctctcccgcatggagcagattctgccatggcagaatatgaccgctgtcatcgagccgttttatcccaaggcgggcaatggccgacggccctatccgctggagaccatgctgcgtattcactgcatgcagcattggtacaacctgagcgacggtgccatggaagatgccctgtacgaaatcgcctccatgcgcctgtttgcccgattatccctggatagcgccctgccggatcgcaccaccatcatgaatttccgccacctgctcgagcagcatcaactggcccgtcaattgttcaagaccatcaatcgctggctggccgaagcaggcgtcatgatgacccaaggcactttggtggatgccaccatcattgaggcacccagctctaccaagaacaaagagcagcaacgcgatccggagatgcatcagaccaagaaaggcaatcagtggcactttggcatgaaggcccacattggtgtcgatgccaagagtggcctgacccacagcctagtcaccaccgcggccaacgagcatgacctcaatcagctgggtaatctgcttcatggagaggagcaatttgtctcagccgatgccggctaccaaggagcgccacagcgcgaggagctggccgaggtggatgtggactggctgatcgccgagcgtcccggcaaggtaaaaaccttgaagcagcatccgcgcaagaacaaaacggccatcaacatcgaatacatgaaagccagcatccgtgccaaggtggagcacccgtttcgcatcatcaagcggcagttcggcttcgtgaaagccagatacaaggggctgctgaaaaacgataaccaactggcgatgttattcaccctggccaacctgtttcgggtggaccaaatgatacgtcagtgggagagatctcagtaa

SEQ ID NO: 217389 - DNA, 531 bp, Klebsiella pneumoniae
atgaaatctgcattaatcagcccgctgctggcgggtctgctgctgttaaccggctgcgcgcagcctgccgcacaggccggaggcggcggtggcggaacaataaaagccatcaaccacacaaaatgggcgatcaaccacttcagtgtcaacggccagtcgggcatcgattcaataggcccgtttcaggggggcggaggcggctgctgcttcagcgtgcccgcccgctggacgccgggtatgacggtgcgcgttgaatgggaaaccgggcagggttcatccgcgggtttcccggggtttgctgatgaggcgaaataccttgcctggaaaaaagggattgatgcccaaaagaggcagcacagcaaaaccgttccgctgcccgactataacggccaggatgtgtgcggcattacggtgcactttttaccctgcgatgacgtgaaggtgaccaccagctgctggtcaccgagaaatgcgaactatccgataaaagagcccgtcaggatgaaggagcccgccgtatgtccgaagtag

SEQ ID NO: 217390 - DNA, 198 bp, Klebsiella pneumoniae
atgggctttgtgctggtgttcctgctgctgctcattttcgccatccggggaatgtccctcgccgtcaaccgcctgtttcctgagccgcccgccgcccccaaaccggcgccggccgccgtcgcgcccgccgacgatttcgcccgcctgaagccggcgattgtcgccgccattcaccaccatcgccgtcttcacccttaa

SEQ ID NO: 217391 - DNA, 720 bp, Klebsiella pneumoniae
gtgagtagtctcattcttccattacctttttttgttcgaattatccatgagccccagccgggttcttactctgctcgtaacacagctattaggcattccaaagggaaataccttgctttcaccgattctgactgtctcgtatcaccttcctggcttgagaatggtcttcgatacttagaagaagggaataccagagtcgcaggtaaaatagcgttatatgataaaaataataacggtaatactcttgcgtcttattatgagaaaggatatgcatttaatcaaaatcagttggcaaaagaaggtatttctgttacagcaaatctaatgataaggaaagagcatataaatgtagtaggcctttttaattcatcccttttctcaggaggagatattgaatggaatcgaagagctatattatgtgatataccaattatttatgctagtgatgtcgttgtatgtcatccgattagagcctgcctggcagagataaaatcaaagagaaagcgtgttattggtggtacttactcaaaaatgggatctttatctttgcttaagttactttttcctcctttcaagagtataaaggtcttacgtggaaataatgaattaaatttagctcaaaaatttttatcttggtctgtttgttattatttaaaactatattcatttaaaattgcttgcttgttaaaattaaaaataatatcgccatcaagaagttag

SEQ ID NO: 217392 - DNA, 540 bp, Klebsiella pneumoniae
atgacagcagaccagattatcgaggggatcctcggaaaagaaggtggttatgttgatcacccatctgataaaggcgggccaacccgctggggcatcacacagaccacagctcgcgcacatggctacactggtgatatgcgaaacctgcccagggaaacagcaaagcaaatcctgctgagcgattactggaccggcccccggttcgaccaggtggcgagtttgtctacgttactggcagatgagctttgcgacactggcgtgaacatggggccatctgtcgccagtaagtttttccagcgctggctgaccgcaatgaatatgcgcggaaagctgtatcccgaccttatcccggatggcgccattggtcccagaactatcaccgcgcttaaaggatatctttcagcccgcgggaaagagggggaacaggttctgttacgcgcgctgaactgcagccagggtgccagatacctcgaactggcggagggccgcgaagccaacgaggattttctctacggctgggttaaggagcgtgtcttatga

SEQ ID NO: 217393 - DNA, 294 bp, Klebsiella pneumoniae
gtggcgcacgtcttcggtgaacgcactctggccacactggagcgtcttctgagcctgctgtcggcctttgaggtcgtggtatggatgacggatggctggccgctgtatgaaccccgcctgaagggaaagctgcacgttatcagcaagcgttacactcagcgcattgagcgacataacctgaatctgagacaacatctggcaaggctgggacggaagtcactgtcgttctcaaaatcggtggagctgcatgacaaggtcatcgggcattatctgaacataaaacactatcagtaa

SEQ ID NO: 217394 - DNA, 270 bp, Klebsiella pneumoniae
atgagctttgaaattattgctgggctggtggttgtcatcctgggtgctatcgctggcacgttcggcattggtcatgcacgcgggaccagtaaggcggaagccaaagccgctaagcagcgtaccgaagagaacgctgccgccaccgtcgccgcggcagaacgtaaggcggaagtcatgaaaggggccagtgatgtacagcagactgttaatcatcttcctaatgacgatgttgaccgtgagttgcgcgaaaaatttacccgcaaaacctga

SEQ ID NO: 217395 - DNA, 306 bp, Klebsiella pneumoniae
atgaataatgaaagtaaaagatcgagaacagaaaaaacattaaaacaaaaggtggcatttgctcaacttgaacttaatcgtcttaagtctctggaaaaatcagagcaaaagaaagttgaaacaaggctcaagattattcttggcgcggaagtggctaaagccatgaattgcgatatcgaacatgtggataaagaacttgttatggggatattgctttcagcatctgagttgaatgatatggaaagaataaagtatataaaagcaggcagaatgtttctcgcacaaatgaatgggagacaaaaataa

SEQ ID NO: 217396 - DNA, 594 bp, Klebsiella pneumoniae
atgcgtgataacgcccgtcgtctgcttacgatactgaccgtcatcctggccctgtggctggtgctgggcttctggccgctgtccatcggcaaccaggtgatcttcagtctgtgcatcctgctggcgggcggcgcggcgctctggcgtcagcgtcgccgggcagtcagccgtcagcgatcggaaatcgtcctgccgcccgaggattttcagggggcggtggttctggtctgcggggataccgacggtctgtttcccgggcgttcggcgcacggcgaaacccgtcacggctggtatctccggggtgacagcgcggagcagttgccgcggctggcgcagtacctggcggcggcgcgtccggcgctggtatcgcaggtttccgtgctgctggcggtggtaccggagcaccacccctcccgggagcatctggcgcagtcgctgcgtgactggcggcggagtatcgttcagtgccgaacctggctaaacggtctgccgccggtgtggagcgtgttctgggtgacgccgccaggcggcaggccgcggaaagccgctggtttaccgtcacgccggagaggcctggtctccaggtgcagctga

SEQ ID NO: 217397 - DNA, 1953 bp, Klebsiella pneumoniae
atgatgccggagctgggcaactttttattgtgtctggcggcggggctggcgctgctcctgagcgtttatcccctgtggggcgcggcgcggcaggatcggcggctgatggccctggcgcggccgctggcctgtgggctattcgcctgtatcggcggcgccttcctgctgctggtgcacgcctttgtggtcaatgactttaccgtccgctatgtggcggaaaactccaacagcgcgctgccggtgtggtatcgggtagcggcgacctggggggcgcacgagggctcgctgctgctgtgggttctgctgctcagcgtctggaccttcgccgtcgccatcttcagccgccggatgccgctcgacgccgtcgcccgggtgctggcggtgatggggatgatcgcctttggtttcctgctgtttatcctcttcacctccaatccgttcagccgcggcctgccgcagtaccccattgatggtcgcgacctcaatccgctgctgcaggatatcggcatgattttccatccgccgatcctctatatgggttacgtcggcttctcggtggctttcgccttcgccatcgcctcgctgctggcgggccggctggatactgcctgggcgcgctggtcgcgtccctggacccaggcggcatggatgttcctcaccctcggcatcgtgctgggctcggcgtgggcatactacgaactgggctggggcggctggtggttctgggacccggtggaaaacgcctcgtttatgccgtggctggtgggaaccgcgctgctgcactccctggcggtgaccgaaaagcggggcagcttccgcgcctggacggtgctgctggccatcgccgccttctccctgtgcctgctgggcaccttcctggtgcgctccggggtgctggtttcggtgcatgccttcgcctcggatccgtcgcgcgggctgtttattctggtactgctgattgtcgccatcggcggatcgctgctgctgtacgccctgaagggcggccgggtgcgggcgcgggtggaacatacgctgtggtcgcgcgagacgttcctgcttggcaacaatatcttgctgatggccgcgatgctggtggtgctcctcgggacgctgctgccgctggtgcataaagagctgggcctcggcagcatctccatcggcgagccgttcttcaataccatgttcaccgccctgatggcgccgtttgcgctgctgctggggctgggaccgctgatccgctggcggcgcgatgacgtcgccaggcagattaagcgcctgattatcgctctgctggtgacgttgtcactttctctggcgctgccgtggctgctgcaggaccgtatcaccgccatggcggtcataggcctgatgatggccctgtgggtgctgatcttcgccctgatggaggttcacgaacgggccacccatcgccacggcttctggcgcggcctgcgcactctgacccgcagccagtgggggatggtgctcggccacgttggcgtggcggtgaccgttatcggcatcaccttcagccagaactacagcgtggagcgcgatgtacggatgcgccccggcgacagcatcgatatccaccgctatcactttgtgtttaacggcgtgcgcaatatcgtcggccccaactggaccggcggcgaaggcattatcgccgtgacccgcaacggccgcccggaagcgacgctgtatgccgagaaacgcttttacaccgccagccggatgatgatgaccgaggcggcgatcagcggcgggctgacccgcgatctttacgccgcgctgggggaagagctgagcgacggcagctgggcggtgcgtctgtactataaaccgttcgttcgctggatctggtacggcggggtgctgatggccctcggcggtctgtgctgcatgctcgatccgcgctaccggatgcgtaagaagctgcaggaggcctcatga

SEQ ID NO: 217398 - DNA, 546 bp, Klebsiella pneumoniae
atgacagcgccagcagagaaaaacccggatggcggcgtatggcgccttatccgggctacgctctggtgccgtatttttgccgggtggcagctacgccttacccgacccggtgatttggcgctcaattcgcgcccttcgcaggcccgcgcaagcgtagcgccgccgggcaagggcagcgggtgcggagccgcttttgtgccgggtggcggctgcgacttacccggcctacggtccgtgcgacttgtcgttaatttattcaccattgttgctgaaactgccggtgctggcggcctcaaaatcgctgagacgttcccggaaggccggggcagcccgcatggatgcgggctgagggccgtgttttgcacggacgctgcctcggcccgacccgaagcctgcagggataagtcgaagggaccgcgtagcggcgattttgctggccggagcccgggggtacagggggcggcggcgactggccgccccctgtgcgctccctgcgccatgccaggcataacgcagaagattaaccgggagcgcaaaatacgctga

SEQ ID NO: 217399 - DNA, 927 bp, Klebsiella pneumoniae
atggatcccttttctgatgttttgaatctgctgtctgcccgcagctatgccactgcaggtctttccgccggcaatcactgggctatgtcttttcccggatataacggactcaagttcatttttataaaaaaagggatgttctggttcagactggaagcggaacctgaatggacccagctgagtgaggggcaaggcctcgtgctgacccgatatgcccgctttttaatggcgacggacgttaacatcccgccagctgagtcctctgagaaaaaaaggcctcgcgttaacgagaccgtcaactatggaggtgacgaaaacctgttactggctggaaagatggaaattgatcttacttcttcagatattctgcttaacggcctgccgcttgttcttcattttaatacgcagaccgatgacagttctgcgctgtgcacgcttatgtcgctgttctttagggaaaaggcagctaataagccaggctctgttcaggcctgtgactaccttatgcacctgatcatgattgaagtgctgagaagtggatacgaaaagtcatctgaaggctgcgtagtcatcgacaaatttagcgatgcccgtataaacaaggtacttagcgcaattcatcaggaaccagaaaacaactggagtttgcttgagctggcaacaatatctggtatgtcacgagctggcttttcaaaaaaattcagggaggtaacgggactcacgcctcttctgtatctgacaaactggcgtatgcggcttgcgagtaaatccctgagatatacccgtgagtctgtaaagctgatttgttttaagctgggctacagttcagaaagtaccttcagtagtgccttcaagcgcgtttatggcgtcgcccccagaatttatcgtgatcaacactttcaggcaggcttaaaaaaagacgattaa

SEQ ID NO: 217400 - DNA, 852 bp, Klebsiella pneumoniae
atgaaatttactaccctcaataatggcgttcagatgcctatactcgggtttggcgtctatcagatgcaggacttgaaagaatgtcaggaagccgttcttggtgctcttcagacgggttatcgtcttattgatactgctgctgcttatgagaatgaaaccgccgttggcgcggccattcagcaaagcgggatcgcgcgagatgaattgtttatcactaccaaattatgggtacaggacgcgggttatgaaaaagcccgcagcgcgttcctgcgagcacttgatcgtcttaagctggattatctggatttataccttatccatcagccttactctgatgtacacggtgcatggcgcgccatggaagagttatatgatgaaggcctgatcaaggctatcggcgtgagtaattttgctccggaccgattgaccgatttggcaacgtttaatcgtattacgccagctgtcaatcagattgaaatgcaccctttcttgcagcagggacaaaacgttgagttcatgcagagtatgaacgtgcaggcacaatcctgggcatcatttgccgaaggaaaaaacaacctgttcagcaatccactgcttgcctcgatcgcccaggtttataataaaagcgtagcccaggttgttctgcgctggctgatccagcgtaatgttatcgttatacctaagtcagttaatctgccgcgcatccgtgagaactttaacgtatttgatttctcaatcagcgatgctgatatggagaaaatcagccagcttgataccggtaaaacgttgtttacagcacataccgatcctgagcgaattaaaaccgttggcacaaaaatctttaatacctga

SEQ ID NO: 217401 - DNA, 1158 bp, Klebsiella pneumoniae
atgaaaaaaaaatttgatgcgtcaatcttgccattgatggcagcagctctgctgctgccatcggtcagcaacgcagcagatatctcccgctacgataaagcagcacggccccccattgtgctgacagacatgggtagcctgatgtttgcgggaaaaaccgatacggatgaggaaggtaatacttttcattacgatcatggttatgctcagtattttattcctcagagcagtcacagcctgcctgtagtgatgtggcatggtggaggtcaatcaggcaaatcatgggaaacaacgcctgatggacgtgacggtttctggcaaatgttcacccgtgcacactggccggtttttataattgaccagccgcgccgtgggagggcaggaagaacagagccggcctccgcagtatcagatattcccaccgaccataaagaatccatcgcatggaatacgttcagactgggtaaatggctcccgccacaaaaaccggtttttttcagcgactctcaatttcctcaaaacgagcgtgccattgagcaatttttaagatggcagaccccgaataccgggcctgagccctcaccggatattcaggaaaggcaatttatggcgaaatccatgactgctttgttgaaacaaacgggacctgccattctgatgactcattcactgagcggacagtatggatgggagactgcaatggagtctccgaagttggttcgaagcattattgctttcgagtcaggggcgtttgcgtttccttcgaatgacctccctaaaaatgttaaaacctcactgtcatttgtaggaaaagcaacagccccgcaggttgtttcccctgagcgattcagagcattaacagccatccccgttatggtcatcattggggacaacgttgtacggtctgagagtgcgagttttggtgaggaactctggcgcgttaatgaaatacgtgcgcggcaattcgttgatactctcaaccgacatggtgggcaggctacgctctttattcttcccgagcatggaatacacgggaacactcattttgcgtttgcggataagaataatcagcagatagcagatattgtagagaatttcctccactccagaggcctggacagcacacaccagtatcattttcagcagaatttacagtga

SEQ ID NO: 217402 - DNA, 708 bp, Klebsiella pneumoniae
atgcagcgtagagattttattaatgcaggtagcgcaatgctgggcgcaatagctttaggtatgtccgcaactgcaaacgcagataacgaaataaaagaatctaataatcccggattatcaggaagcagcaaaatggataacaggttcagcgttgaaaaagatgatgccgtttttatctttgctgatttacatcccggcctggtaagtacatgtaatacgatatctcccgagtctttgactgcaaatgtaggggggcttgcaaaatgtgcaaaagttgtttccgccccttcttactttctgacggttactcaaaatggtaaaccgggcgagctggtaccttcgctcagggagtatgccgatacgcacaacaccatttttcgtaaaatagccgatccattccaggtttctgagattactgacgccattaaacgttctggccgaaaaacccttatagtggctggctacactgctgaagtggctgtcttacttacaaccctgggtggaattcaggctggttacaatgtattcattccagtagactgcatcggtagccgctcttcgagaacagaagacgcagcgctcaggcaggctgagcaggctggaggtgtgattacttctttaagcactcttgcagcgcagtttgctccagatttttctcaggagcccggtaagactattctctctgtgattgcatcaattaaagcctga

SEQ ID NO: 217403 - DNA, 1203 bp, Klebsiella pneumoniae
atgtctgcattaggtcacacccgggcacactggagcggcgtcctggcgatgacgctctgcgtatttgtgctcattgcctcagaatttatgccggtcagtctgttgacacccatcgcgggtgatttacacattaccgagggattagccggtcagggcattgcgctttctggcgcgctggcggtactgaccagcctgacgatatcccgtcttaccggatcgctggaccgtaaatggctgctgctggggctcacggcgttgatggcagcctctggggtgattattgccctggcgtccagtttcccggtttatatgctgggcagagcgctcattgggatcgtcatcggcggcttctggtcgatgtcggcggcaacggccattcggctggtgccgcaacgccaggtcccccgcgcactggccatctttaacggcggcaacgcgctggccaccgttgtggcagcgccgctgggcagctacctgggggccaccgtcggctggcgcggcgcctttttatgtcttgtcccgctggcggtgctggccttcgtctggcaatgcattagcctgccgtcgatgaaaagtccgcgcgcaccacagcggcagggatcggtgctgcgtctgttccgtctttctacgctatccctgggattactggcctgcggactgttctttatgggacagtttaccttatttacctatgtgcgaccgtttctggagacggtgacccaggtcagtccttctggtctgtccctgatattgctgacaatgggtatcgccggttttatcggcacgctgcttattacgaccgttctgaatgcccgattttatccgacgctggtggctatcccgttgttaatggccgcgattgccggaacgcttctgctggccggacaccacacgggatcggtcgccgtactgttaagcctgtgggggctgctggcgacggcggcgcccaccggctggtggacatggattgcgcggacgctgcccgaggatgcggagacgggcggcgggctgatggtcgccgtgatccagctatcgatagccctcgggtcaacggtaggcggcctggtgtttgatagtctgggatggcacagcacttttgcactgagcggtctgttactgctgggcgcggcaggggtgacttttctgctctctgtcaaaatcagatcatctcagcgcactgcgattaatgaattgaatgcataa

SEQ ID NO: 217404 - DNA, 870 bp, Klebsiella pneumoniae
gtggaatattcagtattaagtaacgctcgcaaaatgccgatgctgggtttcggcgttttcaaggtgaccgataaagcggagtgtaagcaggcggtgttgaacgccattcgcaccggttatcgcctcatcgataccgctgccgtctacgataatgaagatgcggtgggtgaggccgtgcgcgaagccatcgccgaaggtctgtgtacccgcgaggcgctgtttattacctccaaactgtgggtccaggacatggccaacgccgggatggcgaaagccgggattgccgcgtcattaaaaaaatcgggcctggaatactttgatctttatttgctacatcaggcgatgggcgattatttcagcgcctggcgtgcgctggaagaggcctatgaggccggtaccctgaaagcgatcggcgtctccaatttttacccccatgtgttagctaacttctgcgaaactgtcagaattaaaccaatggtgaaccaggttgaactgcatccttatttcgcgcagcccgcggcgctggaagccatgaagcattatcacgttcagcctgaagcgtgggcgccgttaggcggtggcagacataatccgtatcaagatgcattgcttcgggggatcgccgatgcgcaccagaaaaccattgcgcaggttgttctgcggtggaacgtgcagcgtggcgtcacggtgatccctaaatccacccgccaggagcgcattgaagaaaattttgctatctgggatttcgtattaacagacaacgaaatggcgcaaatcagcgccctggatttaggctatgttggcgaagcggtaaaacacttcaaccctgagttcgttcgcggatgtctgggggtgaaaatccacgactga

SEQ ID NO: 217405 - DNA, 2199 bp, Klebsiella pneumoniae
atgatcgctagacgtcttctgctgctggtcatttgcctgccgctggcgcacgccggttctgcgccggtgacctggtcactggccggacaatggcgggtgcatgacgccaacgacagcgccttcgccggcgcgcaggcttcggacggcgactggtgcacactgcgggtaccggcaaactggtacagcgccggatacgatcatcagggcgccctgtggtatcgccatcaatttaccctgcatggcctgacgccggacgccatggctacgctggtgtttgacggcgtcgattactttgccgaggtggcgctcaacggcaagacgctgacccggcacgaaggctattttcagcgcttcccggtggacatcaccggggccgttcgccgccataatcagctcgccgtgcgggtcgacagcccctatgaagacccgcaaaaaatctggccactgcacaagacgctgatgaaagggatcctcaatcagcacgatacccgtccgggcggcgcctggtcggttcaggggcaggatgccaactccggggggatctgggcgccggtgaggctccatctgagccgcggcgtcaccatcgacgaggtgatcctgcgcccggactggcaacaggggctggagcagcccatgctgcgtgccgaaatccgctatcgggctgtgacgcccggccccgtcacgctacgcctgacggctaccccggacaatttttccggcccacgttttcaccaggccttcgcggtcactctggagaaaaccgcaggcgtcctgcacgtctcgctgcccatgccgtccgcgaagctctggtggcccgtgggcgcaggcaagccgaacctctaccgggtgcgcgccaccctaacggatgaccgggggatgatggataccgccgtcacccgcaccggattacgtaaggtggaagcgctggcggacaatcagggctggcgcatcaacgacagacggctgttcattaagggcagcaactatattggctccccatggctaagcaccatgacgcggaaaaagtaccgtcgggatttcaggcttgtcacggcgatgaacgccaacgccatccgcgttcacggccacgtggcgggccgcgcgctgtatgaggtggctgatgagatgggactgatgatctggcaggatgtccccctgcaatggggttacgatgacagcgccgccttcgccgagaacgctgtgcgccagacccggacgatgatggaccagttcggcaattcgccggcgattattgtctggggcggccacaacgagccgccgtggaactcgccgtggatggaaaaacgcttccccgactggcgtaaaaccttaaatcagaccctgacgcagcgggtgggcgatgcgcttgcggaagatacctcccgcatcgtgcatcgcttttccgctgtcgaagagcactactgggcaggctggtatttcggcaccctgcgcgacctgctcgccccggcgaaaaccgggattattaccgagtttggcgcccaggcgctgccccggctctccaccctgaagaccattatcccggcccgtctgctgtggccgaaaaccaccgctgccgacgaccccggctgggtgcgatggaagtaccataattttcagcctttccagacctttaaatttgccggtattccacgaggcaacaatattcaggagatgattgaaaacacccaagcatatcaggcccggctggtggcgctggcggcggagagctatcgccgccagcgttatcagccggtgaccgccctgttccactttatgtttgtcgagacatggccctccatcaactggggggtggtggattatctgcgccagccgaaggccggttactatgccctgcagcgcgcctatcagccgatcctgccgtccatcgagccggtgaccgccagctggcgtcagggaagcccggcgacggtgcgcctgtgggcgattaacgatacctgggcagcctgcgaggattgccgcctgacctggcaggtcaggcaaaatggccagatgctcgctcagggagaaacctcgctgaccctgccgcccgacgctggccaaatggtcagggagttgaccgtcacccccgccggcccgcagcccgtgacgatcgtctaccgcattgacaaccgtcgcggcaaacacgtgggtgctaaccagcataccgagcccgtcgccgcggcgcaggcggggagatga

SEQ ID NO: 217406 - DNA, 435 bp, Klebsiella pneumoniae
atgaagttttatcgcgatctctttgaagccagcctgaatcgcgtcgtaccggagcgcgacaaacagcgcttcttccaggccttctacagcacctttatccatatgtcaccggaaaccgagcagcacttctcccaacgctccggcgaggaaggccagcagatgatctttaagagctttttcgccatgctggcggtcaacggcgacctctttgtacccgattttctggaacggttggcgcgagcgcagagcgaggaaggcctgcgtctaccgccgcggttttttgccctctggcgggaagcgatgctcaaaaccgtccgcgcctgcgatccgctgtgcgatgaggagatcctcaccgcatgggcaatggccatcgcccctgggctcgagtatctgcgccgccaggcggagctccactatcaaactgttggccagtaa

SEQ ID NO: 217407 - DNA, 1395 bp, Klebsiella pneumoniae
atgcttaaaaccctagctcgctggctgaccgtcgccatcctcctgctgcttatcgccctggcgctgttcagtcgcgaaggcgcgtggtggcgctggctgaccaaaggcggctggcacaccaccgcccgtatcagcagcctgacgccgcaggagcggacgtgggcgcagatcgcctggcggtacgtcgagaacaatacccagccgcaaaccggcctggtcaacggcagcgacaaacagccgcgcgcgacgctgtggcagatgggcgacacccttatcgccctgctcgccgccagagagctggggttggtaaaggaagcggaattcgacgcccgcctgacgcccctgctcggcaccctcaatcgcctgacgctgaccgacggcggttcgccgggcaggctatactccactcagacggcgacccctgtcgacttcagcggcaaaccggcggccagcggctggtcagcaaaagatatggcccgactgatgctcgccctgcggctcaccgccgaacgcgcgccgcagtatggtgaatacattgataaaattgtcctgcgctggaacttctgtccggttatcgataaagacggggagctgtggtccgcctcactgcagaacggtcagcggacgatccgcgaggagctccggctgggagacagtgaatacgccgccagcgcgtttcgcctgtggggatttccggccggcaaggccctctcccccccggcgcgccatgtgattatttatcagcgccgcctcgccgttgacgaccgcgacccgcgaaccacctggcaacccgtagtgctctctactctgcccgccatgctgcctggactggagttcggctggcagccgcccggcgtgccggagatggcgcaaaaagccatgcgcgagcgggcggaagggatatggctcagccagaaaacgcgctggacgcaggataaggtgcttaccgcccggaccgatttttcgcttacccaggcgccctggcacgtggaagacaccgtctgggggaatggctacgcctggaatacgctcggggacgacgggaagtactacccccggctggcgcaggtgaccaccaaggcggtctttgtcctgtggacgctgtgggaaaccgagtataccgatgcgctgatggcggtcactacccatcttaacgacccgcagcgcggctggtttgaagggcgggtcgaggccaccggcgacgtcaacgccaccctcaccctctccactaacgccatggtgctggaggcgctgttttacaaacacaacgccgggccgttgttcaaaaacggcctcgcggatgacaacagctactttgcccgccgcgcgacggacgaatttaacccgccccgccgctgcctgccgggcgaacgggtcatgaggagcgcaccatga

SEQ ID NO: 217408 - DNA, 1548 bp, Klebsiella pneumoniae
atgaagctgacctatttttcccgttttcctctgctggccggactcatggcgctgtggctctcactctccggcgcgcagtccgcgaccggtctgccggctgcggaatacgccccgcgtagcggggagctgacgccgagggagatgactatcgccagaaatgcctggcaatatttcgtcgccaactttcagcccaccaccgggctggtcaatgcggtaaacaaatacccctcgaccaccatgtgggacagcgcctcctatctggccgccatgaccgcggcccgtgagctggggattattgataaggcggagttcgaccgtcggatgctgaagtttctcgccacgctgaataagctcgatttattccgtaacgaattgcccaacaaagcctataacaccgtgagcggacaaaaggtgaactaccagaacaagccgggtgaaataggctattcggcgctggatatcggcagaatgctgatctggctgaaggtgatcaaggagcgctacccggcatacagcaacagcatcgataacgtggtgctggggtgggacttcagccatgttgtcgacccctgcggcacgctgtatggggcttatctggaaaacggccagcccaaatacgttcaggaaggacgcctcggctacgaggagtacggcgcggcgggctttcaactgtggggatttaatacctgtcaggccagccggccccagccttatgagctggcggaaatttactgcgtgatggtcccctatgattctcgcgacccgcggcaaaccagccagcataactatgtggtcagtgaatcttacgtgctgtatggcatggagtttggctttgataatcctgctgaccggaacgatagcccgcgcgagtactcccatccatggatgaaaaactttgccgaccgggtctaccaggcccaggagaatcgctacgccatcaccgggatcctcaccgctcgctccgagcatcagctcgataaatccccgtactttgtctatgacaccgtgttcagcgacggttttaactggaacaccataaccgacaaaggccagttcgtaccgaacagcgccgcggtgtcgctcaaagcggcgatggggatgtgggtgctgtggaactcgccctataccgatcgtttgctggacgccattgaaaatgcgaacgaagcgggaaaaggctattacgagggactgtatgaaaacggcgacgggccaatcaatgagttcaccgccaacaataacggcatcatgctggaagcgctgctgtttaaaaaagaaggcaaactgctgcagttttccagcgacaatccgaaaaaccgcgatttcgcgccgtcgctgtgggacaaaaagctggtggatctctttgagcccaataacggcccgcgcaaccgccccttcctgagcaatacccctgccgtcaagacatggtgcgaacagaccggaaccacgcagcgcacccaacccgcctgccaggcctgccagtgcgccgcctgcaaggctgacgagcccgttaaacttccgccggtgaccgcgcaatgcttaaaaccctag

SEQ ID NO: 217409 - DNA, 1332 bp, Klebsiella pneumoniae
atgaggatccgcgacgccctgctctccgcccgcagctatctcaccatcctcattggcttcctgctgggttttgcgattgtcgtatgggtggaaaaacaaatgcctgcgcgcgtcgagagcagcagtgggatgacgttgagccaggattttccgccgctccctgccccgcgcgagctgacctttgacgaggcgatctgggcgcgagtggcctggcagtattatgtgaataatactcagccaaacggtctggccaacgcgcacgatgacgaaccctggcttagcctgtggagcgtcggcagctatcttttcgccgtggtcgccgcagagcagctgcatattgtgaccgccgccgaaggcgatgagcgcattgccgccgccctgtttacgctcggtcaactgcccctcaacgcccagggattgcccgccgctcagtaccatgccgacacgctgcagatcctcggcaacccggactcctccgccatcggtatgggacgcctgctcaccgccctgcaaacgctgctctggcgctatcctcagcacgccgccgcggtgcgggatctgtttaatcagtggcgggtcggcgcgctcatcagcaacagccccgccagccaggccgcggcgccgctgcaccactggacgctggcggcggatgaaccgcgggacagctttggctaccggctgtatgccagccatacgctgcggctgatcgacagcgccgcggggctggcggtgaccaacccgccgcaggggcagcagatgatcgacatcgacggcatcatggtgcccgacgaggggctgcgcacgccgtgggggcggcaaccttcgctgatcagcctgccgtacctgctcaccgggcttgagctgggctttgacgcgcagagtgcggagatcgcctggcgcatcatgcaaatccagcagcgccgtcatagcctgagggtcagcaagccgccgatcagcaccgactacgccgagcccgcgccggattatgccagcgcgctggcggaccggcagccgcagagcgccttcgccccgcgcagtgccaccccggagcaaacggcgatcacctctacccgcaccgcctttgcctggtacgccctgttccgcaatagctggagcgaagcgcttcgccagcaggtccagacgctgcaggtcccgggcaagggctggcagcgtgggttaaatctcaaccgcagcgtcaacgacgttgttgacggcgataccaacgcgatcgtgctggaaagcctggcctacatttcccgggggcagatgctgtgtctggcctgcctgagccctgcccctctaccctcgtcctcagcaggagcaacgccatga

SEQ ID NO: 217410 - DNA, 1818 bp, Klebsiella pneumoniae
atggatttttatttttcccgttttgaacatcgtcgaccgcctgagccgctcagcactccgagctgggtaagaatgatctggcaggtattcgctgtggccgccctggttcttggtgccaattatatttactggcgctggaccgcgtccttaaacactgacgcactgtggtatgcaatccctctggtgctggcggaaaccctggcgtggattggcacagttctgttcaccattaatttatggcaggaaaaagatcctccgccaggcgtccccccgacggagatcaacgactgtctgcgagcggatgaagcggtggagtcgaggccgattaaagtcgatctgtttatcgccacctattccgaagacgtggaactggtcaggctgtcgatccgtgacgccatgcagatgacctatcccggtccgctcgactataaggtgcatgtccttgacgacgggcgtcgcccggaaatgaaggcggtctgcgagcaggagggggcgaactacatcacccgtcagagtaatatcggctataaagccggtaacctgcgcaacgggctggaacataccgatggcgactttctgatcatctgtgatgccgatacccgcgttttcccaaccctgctgagccacacgctcggctactttcgcgatccggacgtcgcctgggtgcagaccccgcagtggtttttcgatctccctgagggggaggatctggcatgctggcttcggcgtaaagctggcggcgcaggctatggcgtgggctggctggcgcagaaaatcgtcggtccggtgaccatcggtcgcgatccgtttttcaacgatccgcgcatgttttacgacgtgattttacggcgccgtaactgggctaacgccgcgttctgctgtggcgccgcctccgttcaccgacgggaagcagtgatgcaggcggcactgcgcagctacgtctggagcgttgatgccgagatcgatcgtcatacgcgggatattcgcgacccggtaacgcgggaagcgctgcaggacgccatgcgcccccacgtggcctttgatactgaactgacgccctataagttccacgtctcagaagatatttatacctccatcctgctgcacggcgacgctgctcgccgctggcgctcagtaatgcacccgcggatcgagtccaaaatgctctctccgcaggatatgctgacgtggatgatccagcgctttaagtatgccgccggatcgctggatatcctgttccatgacaacatcttcagccgacgccgctttaaactctcgctgccgcaaacgctgatgtacgcgaccaccttctggtcctatctggcctgcgtgtggaacaccgtgttcctgatctcgcctgttatctatctcttcaccggcattcccccagtgtcggcgtggtctacccctttctatctgcactttttacccttttttattgtctccgaactggcctttatgttcggcacctggggcatttctgcctgggacggccgggcctcttacctctcctttttctcgatgaatctgcgggcgctggacaccgttttgcgcggggagcagattaaatttcacgttacgccgaaagagcgacagacgggccgttttctctatctcgtcaagccgcaaattgccatcgttttgctcaccctgacggggctgatatggggcggcattcaggtggcgcgcggtgaggttgacgacccctccgggtacgtcatcaacattttctggggcgcggtgaatattgccgccatgctgccgcttatctttgccgccatgtggacgccccccgaagagcaggaggcgagccgatga

SEQ ID NO: 217411 - DNA, 1218 bp, Klebsiella pneumoniae
atgagccaggttgcctcagcgatttcgcaaaaagaaacttataaatcaatggcctggcgttattctctggcgggtgaacgcgacctgcgtatcgactttatgcgcggcattgctctcgttatgatggtggtggcgcatactgaagtgatgtcgatatttaatattttcagctgggagcgttttggtttgaccactggcgccgagggttttgtgatcctgtcgggctttatgttagggatgctaaatcgtgccagattacaaaaagctgtattactgacggtgggctggggactttatcttcgcgcatggaaaatatatcaggttaatattattattattgtcacttttcttttgctgagatattttccgtttattaatgcctttgaagtcactcactttaccgatcgtttttccgggaccagctggtcgctctatccactcaccccgcaaataaaagagacgtggtttaacattatcctctatctgcagattggcccacaccaaacgcagatcctcggtctctatatttttctgttgttgctcagcccgttgtttctgggaatgctgcaaaagggtcacgtctaccccttactgggcgtctcgctgctgatctacggctgctggcaacgttggccggtacgggtgacgccctgcgaatttgaattcgcctttcccctgctggcctggcaatttatctttgtgctcggaatgtgctgcggctggtacaaagcggaactgatctctttcgcccgcacgccacccggcaaagtcgccgtcgtggcgctggtgttcatcgcgcttatccttgcgtttgtcgcccagaaccataccaatccttttatgccgcccgcgctactgatgcacgtgatccctccggcggagtttaacgccttttatcatacctgggcggcgaaaaacggcctcgggccggtacggatcctcaatgatatcagtcttatggtcactatttatctgttattgacctggtgttggcgtcccctgaactggctggctggctggttcctgatcccgctcgggcagcgttcgctctacaccttcattttgcatgtttatatcgtgctcgccgtaagccagttggtcaccttcgatctgtggcgccaggcgtggatagtgaacaccttgatccatgccgccgcgctgggcgtactgtggctgatggccaaataccgcgtcgccgcacgctggatacctaactaa

SEQ ID NO: 217412 - DNA, 900 bp, Klebsiella pneumoniae
atgcgggagaagtatatgctggcctgcgcgctatggtgcgccatcgcaagtgcggaaggagcagagaagaacgacgcacaaccgctgcgtgataaaaatggtgaaccggtgcaggccggcgtgtttaccagccgctggggacggcttttttccgggaatgacaaggtgttttcgggagcgctgagctttagttcgggtttaaaagagcagtggatgaccgtccccaacagctcagacagcgcagaacagaagaaaaaatataatcagacgctgaacctcagcctgcaatactcgccttacagcttctggttcgccaacgtgacatcccgtttaccggtgactgataccagccgctataccgccgattttcgctatagttttggctacgacgactggcatgccaataccgtcagcctggtttacagtaactatggcgataaccacttctggacctcaggcagcaagcgtcacacctattttgagcagggagccatcactctggcatataaattttccctgccgaagcccatggagaatacgctgcttatcaacaaaggcgacgccatcatgtgccaggtgggctacagttgggtgccgcgttattacgatctggcgagtgacgatatacgcaaaaacaaaaacgtactgctcggggggtgcggatatacctttaagcaacatttctttatccgtgcgacggcgttctggtaccccgacagcagccagcagcaaccgtggaatggcgactacagctacagtttcggttacgcgggctatacgccaggatcgttctctgtgcagtatgccaactatgccggtacccgctatccggggcacgacagcggcagcggcaagtttcgtgaaggtacgatcagccttatctggttcttgccgatttag

SEQ ID NO: 217413 - DNA, 1215 bp, Klebsiella pneumoniae
atgtcggcacagcacgtcctgattgttgaagattcgctggtttatcgtcggttgctaagccggatgttgacgcagtggggctatatcgtcagtgaggcggaaaacggcgtcgccgcgctggcgatcctggagaaccagcccgtcagcctggtgattagcgactgggaaatgccggagatgaatggcctgatgctgtgccgggaagttcgccgtcgccagtttggtcactacgtttatctgatattgctcaccgctcgcgaagatccgggcgatttaacgcaagggtttgcggcaggggccgatgattttctcagtaagccggtggagcagagtgaactgcgggcgcgactgcacgccggggcgcggatcctctcccttgaagccgacctcgccgcgcgcaatacgcggctaagtgaagcgctgcggcagattgaacaggatctggagctggcggcgcgcattcagcaatcggttctcccggctcatcagctgtgctatcagggttttttctccgactggattttcctgccgtcggcctgggtatcgggggatatttttaatgttttcccgctgggggagcatctcggattttactgcgtggatgtctccgggcacggcgtgggggcggcgatgatgtcgcttgccgtcgcccgccagtttctacatggcagggcggttgagcgttttcttttctctgctgataaccagccggcatcacctgccgaggtagtgcagatcctgaatggtcgtttttgtagcgacgaggcagagattgtcagctatttcaccctgatctatggcgtcatcgacctcacaaccggtgaggggaaactgtgtcaggccgggcatcccacgccgtttatcgtcaccgtggatggaggtgtgcgctcggtcggcagcggtggggcgccggtggggttgataaaccatctctcatgggcagatgtcagtttctcgctggcgccgggagagcggctttgcctgttcagcgacggtatcaccgaatgtgaaaaccggagcggtgaacagtttggcgaagtccgtttacaagcgtggctgcaggacagtgtgacgcagccgctgcccgcgctgctgccgcggtttgcccggcacttgatccactggcgcaatggcgacgcgcaggagacccagtcgatggccgatgatgtttcactcttgattattgaacgtacaggggacagtgatgaaaattga

SEQ ID NO: 217414 - DNA, 339 bp, Klebsiella pneumoniae
atgaaaattgaaaccgaacggcaggcctcggtgacgatcctgacgccggcggtgcgtcggctggatgcttccgtcgcagtagcctttaaatcggcaatcgcccaggagataggcgaagcgcccggcgatctgattgttgatttcagcgaaattgattttatcgacagtagcggtctgggaaccctggtttctctgatgaagatgatgaacgggagaggggagatgacgctgtgcgcgctgaatcctggcatccgcaatatgttcacgctgacccgtatggatcgtattttccgcatttgcgaggatcgcacctcggcacttgcgcagttaaatgagtga

SEQ ID NO: 217415 - DNA, 471 bp, Klebsiella pneumoniae
atgagtgacgtgcccgtgaatagcaacatgatgtttcctgccgaactcacctcgctttcaccgctggcggagtggcttgcccagcaaatggcttcgctgcctgttgcggacgagtggcgtttcgcgctcgatctcgccgcctgtgaaacggcaacgaatattattcgctatgcgctgcatgaggatcgggaaagtcgttttggtgtggaatttagggtcgcggaccgacgggtgacgctgcgctttaccgacgcgggggaaacctttcccgccgagcgcctggcgatggcgcgtggtgatgagcatttcgatgtcgatccgttagcggaaaacggtagaggcttgcggcttattctgcgtgcggtggacttttttgacgttgaaatgaatgcagggaaaaatattaccaccctgatgaaagcgttgcctgatcccgctgttaattattcaaccgacaaaaacggaggttga

SEQ ID NO: 217416 - DNA, 915 bp, Klebsiella pneumoniae
atggataaactggatactctgaccttgtttgtgcgcatcgtcgaacggggctcattcagtgccgccgccgcggatctgggggtttcccggccagtagcgaccgcggctattaaagcgttggaggtcagtctcggggcgcggctgctacatcgtaccacccggcacgtacggccgacggcagaaggctcgctgtattatcagcgctgcgtgtccattctggcggcccttgaggaggccaaccgcagcgccggggggagcatctccggcaccattcgggtagacgtggcgggcaacctggcgcggaccctgctgctgcccgcgctgccacagtttctcgcccgctacccggacattacgctgcagatcggggaaagcgagcgtgacgtcgatctggttcgcgagggagtcgactgcgtcattcgcggcggccatctccccgacagcgagatgatctgccggccgctcgccgggttgcaggagatcacctgcgccagcccgacctatctcgcccggtacggcaccccgcatacgattgaaggactgacgggccacgtgatgatcgggtttgtttcatcgcgcacgcaacgtaccttgccgctgagctttacccaggatggccgtcagagcgaggtcagtttgccctgtcggttgctgacttccgatgccgacgtcggcgccgaagcggcaaggcttggctttggcctctatcaggcccccttgccccgccttgaggccgatctggcgtcgggcgcgttaacggaagtgctggccgattttcgccctgcgccgctcccgctctccctgctctatcccagtaatcggcagctctctgcccgggtgcaggtatttatcgactgggtgacggcgctgatgaagcctcccctggcgcagcaggcatccggaaggctaaaataa

SEQ ID NO: 217417 - DNA, 1533 bp, Klebsiella pneumoniae
atggattttgaaaatgaattgaccagtaagatccttgatcccattcacggcactattcgtttgacgacactcgagattgcctttatcaatcacccccttttccagcgcttacgcaacattaaacagaacttttttttatataaggtgtttccctctgcggtgcacagccgcttcgaacactctctcggggtgctgcatttatcaagtgaaatactcaataatttacgcctgaatgcgatacggtatcaaaagaaatatgatgatggccatgtgtttggtcatatcgatcagataccaaaacacaacattcaggagttgagactcgctgccctgatgcatgacatcgggcacgggccggtatcccaccagtttgagagttttatgccttgtaagcacgaattctccgatgttctccccacggcctaccattcaatcattgatgtattaagcaagccagaacagaaagttgaacatgaacagctttcgctgttgttcagcctgatgatttatcatgatctgagaaaacaaggtaaggtcgatgacgaaataaatatcgaaaatgtgttaaaaattatcgaaaaaagatacggtgaccaacagatcattgaggaaattaatggaaaggcaacagatatcctgccgttaatgacctcgatcatctcttcctgtccgatcgatgccgaccggatggattacttgctcagagatggctatttctccggcgtcaagtgtggcatctacgattacaatcgcttgtttatgtcaattgtcccggtcgaggaacagggaaaattgtaccttgcttacaaagagagtgggattgattcgatcgctgagtttattggggcgcgctccagccttttttcgcaggtatattaccataaaacaaaccgcgcctttgcgacgatgttgagcacattatgtgagattatgcaaagcaaggatccacaaaatgtcattatcgctgacgttaccgaccgtatcgttgaccatagcgatgaaagcttcatcgacgcgctgaaggagttttatttgtcgtgcagtgatgattattttttgaatgacaaggttggtgaatggatagatatcagcgataccgaggcggttaataaaaaaatacttgatgacattattaaccgacacccatggtcgaaggtctatgaggccaaacactctgtgtataaagctaacatcgttgacaaggaaaataaggcgtggaagagtcaactcaccgggttattgacttctgtattacagcctcatttcaaaccacatgaatttgccgttgatattgtctccgactgcgcctttaaagacctggataaaaccgaagttaagcttttggtgaaagatcttaagaaccgctacgaaataaaaccgttaattgaatgtggtgataagttaaatcagtatcaaatcatcaaatattgcattcgggtatttgttgaccgcgatatcaaagaacgcgtaactcctgaaataacctataaaatcaatgacatagtggtcaaacagatcgcgttgctgaattga

SEQ ID NO: 217418 - DNA, 567 bp, Klebsiella pneumoniae
atgagcaagaaaatcctaatgctggtcggcgattatgccgaagattacgaaacaatggttccttttcaggcgctgcagatgattggccaccaggtcgatgccgtctgcccggataaagccgctggcgactatgtcatgaccgcaatccatgactttgacggcgcccagacttatagcgaaaagccgggccatcgcttcacgctgaacgctgacttcgccgcagtaaaggccgagaactacgatgcgctagtgatccccggcggccgggcgccggagtatctgcgcctgaacgaggaggttattaaactggtacaggcattcgacgccgcgcgtaaacctatcgccgccgtctgccacggcccgcagctgctagccgccgccggtattctgcagggccgcacctgcagcgcctatcccgcctgcgccccggaagtgcgtttgagcggcgggcactatgcggatattggtatcgaccaggcgcatgtggacggtaacctggttaccgcccccgcctggccggctcatccacagtggctggcgaaattcgccgccctgctggcggaataa

SEQ ID NO: 217419 - DNA, 336 bp, Klebsiella pneumoniae
atgaaatctccctttctctttttagttacagcggtattgctgttaacgggctgtaaccagcctgctgaatctgactcagtcagcggcggtggcggaaccattgaagccatcaaccatacccactgggctatcaaccactttagtgtcaacgggcagtccggtgtcgatattatcggcccatggcaaggcggcggcggtgctggttactttggtgtacctccaaaatgggaaccgggaatgacggtaaaagtcgagtgggagacaggtgttggtggttcaaaaggttttcctggatttgcagatacgaaaaaatatttggcatgggaaaaaaaatga

SEQ ID NO: 217420 - DNA, 198 bp, Klebsiella pneumoniae
atgaaatctcaaaatcgagagcatagcgaaattgtgcctgttcctgattataacggccaaaaaacctgtggcatcaaaatacacttccttccgtgcgataaggtaaaagtgacaaccagttgttacgattacggcaatccgaattacccgattaaggatccgatcaaaatggaggagccaaaagtatgtccagaataa

SEQ ID NO: 217421 - DNA, 1086 bp, Klebsiella pneumoniae
atgaaaaaaacctgtcgtattgccgccatcccgggtgacggaattggcaaagaagtgctgcctgaagggattcgcgtgctgcaagccgccgcacagcgttgggatctgtcattgagcttcgagcagatggagtgggcaagctgcgaatattatgcccatcacggcaagatgatgccggacgactggcgcgagcagttgcagggcttcgatgccatctacttcggcgccgtcggctggccggataccgttcccgaccacatttcgctgtgggggtcgctgctgaagttccgccgcgagttcgatcaatacgtcaacctgcgcccggtgcgcctgttccccggcgtcccctgcccgctggcgggtaaaaaggccggcgatattgatttttacgtggtgcgcgaaaataccgaaggcgaatattccgccctcggcggccgcgccaatgaaggcaccgagcatgaagtggtaattcaggagtcggtctttacccgccgcggcgtggaccggatcctgcgctacgccttcgaactggcgcaaagccgcccacgcaaaacgctgacctccgcaaccaaatccaatggtctggccatcagcatgccctactgggatgagcgggtggaagagatggccaaaaactatccggatattcgctgggacaagcagcatatcgatatcctgtgcgcccgcttcgtgctgcagccggagcgtttcgacgtggtagtgggttctaacctgttcggcgatattctctccgatctcggcccggcctgtaccggcactatcggtattgcgccatcggccaatctcaatccggagcgcaatttcccgtcgctgttcgaaccggttcacgggtcggcgccggatatttacggtaaaaatatcgccaacccgatcgccaccgtttgggccggggcgatgatgctcgatttcctcggcaacggcgatgagcgctaccacgccgctcacgatggcattctggcggcgattgagcagacgatcgcctgcgggccgaaaactccggacatgaaaggcagtgcctcaacgcagcaggttggcgaggctatctgcaaggccattttggcgtaa

SEQ ID NO: 217422 - DNA, 1608 bp, Klebsiella pneumoniae
atgttgagcaacgtaaagaaaaaagatgtgccgctgattgccatcagcctggcggccattgttttcatcgccgctacattaagtctcttcccccagcaaaccgcgcaggcggctgattcgatttttaacggcgtgacccgcctgctgggttccacggtacaggtactggtgctactggcgctgggactggtgttgtatctggccaccagcaaatacggcaatatccgtctcggcgaaggtaaagtcgaatacagtaccctctcatggctgtttatgtttatctgcgccggtctcggctcctccacgctgtactggggcgttgccgaatgggcttattactaccagaccccgggccttaacattgccccgcaatcgccgaaagcgctggaatacagcatcccttactctttcttccactggggcgtaagcgcctgggcaacctataccctcgcctcgctgatcatggcctatcacttccacgtgcggaaaaataaaggcctcagcctctccgggatcgtttcggcgatcaccggcgttaatccgcaaggtttctggggccgtctggtcgatctgatgttcctgatcgctaccgtcggcgcgttaaccatttcgctggtagtcaccgccgccaccttcacccgcggcctgtcagcgctgaccggactgccggataacttcaccgtgcaggcatttgtgatcctgctctccggcggtattttctgcatgagttcgtggattggcatcaacaacggcctgcagcgcctgagcaaaatggtcggctggggggcgtttctgctgccgttggtggtattactggttggcccgaccgaattcatcaccaataacgtcattaacgccgtcggcctgacgacccaaaacttcctgcagatgagcctgtttaccgacccgctcggcgacggcgcctttacccgcaactggaccgtcttctactggctgtggtggatctcctataccccaggcgtggcgatgttcgtcacccgcgtctcccgcgggcgcaaaatcaaagaggtgatctggggactgctcctcggtagcaccgccggctgctggtttttcttcggggtgatggaaagctacgccatgcaccagttcgttaacggcgtgattaacgtaccacaggtgatgcagactctcggcggcgaaaccgccgtccagcaggtcctgatgtcgctgccggcaggtaagctgttcctcgccgcctatctgttcgtgatgattgttttcctcgcctcgcacatggatgcggtggcctacaccatggcggcgaccagtacccgcaacctgcgcgaaggcgaggatccggatcgcggcatgcgcctgttctggtgcgtggtgatcaccctcatcccgctgtcgattctgtttaccggcgcttcgcttgagaccatgaaaactaccgtggtgctgaccgccctaccgttcctggccattttactgattaaaaccggcggcttcgtgcgctggttaaaacaggactacgcccacgttccggtccatcagatagaaacccatacccccgagcccattattaaagccgagacgctgccggttagcgcggtactcaaaggcgacggccagtcgctgtaa

SEQ ID NO: 217423 - DNA, 2502 bp, Klebsiella pneumoniae
atggctctggtcgttgaatttacatgtgatttgcccaacggcgtgcatgcgcgtccggccagtctggtcgaaacgctgtgtaaccgtttttcatcagcgattgagtggcggaacttgcgccgcgggaccggcggaaatgccaaaagcgcgctggcgattatcggcagcaataccctgaagggcgacgcctgccagctgcttatcagcggcgaagatgaagctgaggcattcgccgcgataacggcctttatgcgcgatgagtttcctcactgtgacgcgccgctgcccgctgcgccaacgctggatgtccagccggtgccagagtcgctttcgcggctgaacccgacgctgtttcatgcccacccggtgtgcgccggcagcgcgggagggacgctggttcatctcaaatcacgcgatctgcacgagctgggcgaactgcccgtcgccgtcagtcccgaacaggagcaggcggcgctggataatggcctgcgcctgctggtgaaagatatcgagctgcggctgctggacaatgacggcaccgccagcgcgatcctggaagctcaccgttcgctggcgacggatgcctcgctgcgccagcacctgcttggtggcatcctcaccggcctcagttgcgcccaggcgattgtcgccaccggcgaccacttctgcgcccagttccgcgactccggcaacagctatctgcaggagcgggtactggatgtacgcgacgtttgcttccagctgttacagcatatctacggcgaagctcgtttcccggcgccgggccagctgcgggaagcggccatttgccttgccgacgagctgacccccagccagtttctggaactggataaaacgcatctcaaaggactgctgctgcgcagcggcggcaccacctcgcataccgtgattctggcacgctcattcaatatccctactctggtgggcgtggatttagccgcgctgctgccgtgggtggatacgcaggtgcagattgacggcaacgccgggctgttggtggtggatccgagtccggcggtagcgcgctactatcagcaggaggcctggctacaggcgcaaatccggcaacagcagcaggtatggctggataaagccgggcagacgcaagacggtatccgcgtggaaatcgccgccaatatcgcccattcggtggaagcggtggcggcattcaaccagggcgcgcagtcggtagggttgttccgcactgaaatgctgtatatggatcgcccgagcgcgccgtcggaagatgagctgtacaacatcttctgccaggcgctggaacccgctgccgggcgcagcattatcgtgcggactatggatatcggcggcgataagccagtggcctatctcaacatccctgcggaaaacaatccgttcctcggctaccgcgcggtgcgcatttatgaagagtatcaggcgctgtttcacactcagctacgggcgattttacgcgcctcggcacacggctcgctgaagattatgatccccatgatttcatcaatggaagagatcctgtgggtgaaagagcgactggcggaggccaaacagtcgctgcgcgtcgagcagatcccgtttgatgaaaagatcccgctcggcatcatgctggaagtgccgtcggtgatgtttatcatcgatcagtgctgtgaagaggtggatttctttagcatcggcagcaacgacttaacgcagtatctgctggcggtggatcgcgataacgcgaaagtgacgcgccactacaacagcctgaatccggccttcctgcgcgcgctggactatgccgtgcaggcggtgcatcggcaggggaaatggattggtctgtgcggcgaactgggggccaaaggatcggtgctaccgctgctggtaggcctcggtttagatgaattgagcatgagcgcaccggcgatcccggcaaccaaatcgcgcctggcccagctggacagccgcgcctgccgccaactgctgaatcaggccatgcagtgccgtacctcactggaagtggagcatctgctggcccagttccgcatgcgtcagcaggatgtcccgctggtgagcgccgagtgcattacgctgaatagcgactggcgcagtaaggaggaggtgctgaaagggatgacggataatctgctattggccggccgctgtcgctatccgcgtaagctggaggccgacctgtgggctcgcgaggcggtgttctccactggtctgggctttagcttcgccattccgcacagtaaatccgagcatattgagcagtcgactatcagcgtcgcgcggcttgcgcagccggtgatatggggcgatgaagaggcgcagtttgtgattatgctgacgctgaataagcactcggcgggcgatcagcatatgcgtatcttctcgcggctggcgcggcgcattatgcacgcggagttccgtcaatctctggtatccgcggagagcagcgaggatattgccgacctgctgcgccgcgagctggaactgtaa

SEQ ID NO: 217424 - DNA, 1077 bp, Klebsiella pneumoniae
atgaacgaactggtgcaaatactaaaaaatacccgccagcatctgatgaccggcgtgtcacatatgatccccttcgtggtctccggcgggatcctgctggcggtgtccgtcatgttgtatggcaaaggcgcggtacccgatgccgcctccgaccccaacctgaagaaactctttgatatcggcgtcgccgggctgacgttgatggtgccctttctcgccgcctacatcggctactccatttctgaccgcgccgcgctggccccctgcgccatcggcgcctgggtgggcaacagttttggcgccgggttcttcggcgcgctgatcgccggcatgattggcggcctggtggtctattacctgaaaaaaatccccgtacataaagttctgcgctcggtgatgccgattttcatcattcccatcgtcggcacctttatcaccgccgggatcatgatgtgggggcttggcgagccggttggcgcgctgaccgctaacctgaccggctggctgcaggggatgcgcgagggcagcatcgtggtgctggccatcattatgggtctgatgctggcctttgatatgggcggcccggtgaacaaagttgcctacgccttcatgctgatttgcgtttcgcagggcgtctacagcgtggtggctatcgccgccgtcggtatcgccgtaccgccgctgggcatggggctggcgacgctgattggccgcaaatatttcaccgccgaagagcgggaaaccggcaaagccgcgctagtgatgggctgtgtcggcgtgaccgaaggggcgattccctttgccgccgcggatccgctgcgcgtcattccggccaatatgattggcgccgccagcggctgcgtcaccgccgcgctgatgggcgcccagtgttacgccggctggggcgggcttatcgtgctgccggtggtccagggcaagctcgggtttgttgccgcgctgctggtcggcgcctgcgtcagcgctgcctgcgtcatcctgctgaaagccttcgccaaaaagaaacccactaacgtcgccactgacgatgaactagaccttgatttcgaaattaactaa

SEQ ID NO: 217425 - DNA, 321 bp, Klebsiella pneumoniae
atgacccacattatcgctgtcaccgcctgcccgtcgggcgtggctcacacctacatggccgctgaatcgctggaaagcgccgccaaagccaaaggctggcaggtcaaggttgaaacgcagggttctatcggcattgaaaacgaactgccggcggaggagattgccgccgccgatatggtcattctgaccaaagatatcggcatcaaattcgaagagcgttttgccgggaaaactatcgtgcgcgtcaatatcagcgatgcggtcaagcgcgccgacgccatcatgaacaagatagacagccacctttcccagagcgcctga

SEQ ID NO: 217426 - DNA, 2298 bp, Klebsiella pneumoniae
atgacgaatcgtacccaacgcctgaaagccagcctgttcgcccagccgcgcgaaatctcccttgagcgcgcattactctacactgccagccatcggcagacggagggcgagccggtgattatccgccgggcgaaagccaccgcgtggatcctcgataaggtgatgatttcgattcgtgaggatgaactgatcgccggcaaccgcaccgtcaaaccgcgggcagggattatgtcgcccgagatggacccctactggctgctcaacgagctcgacgccttcccgacccgcccacaggaccgcttcgcgataagcgaagaagataagcaaatctaccgcgaaacgctgtacccctactgggaaaagcgttcaatgaaagatttcatcaacggccagatgaccgaagaggtcaaggccgccgtcaacacccagatatttagcgtgaaccagaccgataaaggccagggccatatcatcatcgactatccacggctgctgaatcatggccttggcgccctggtctccgagctaaaaacgcactgcgcccggcaaccggagaaccccttttatcaggcggtactgatcctgctggaagcttcccagcgccatattatgcgctacgccgcgctggccgaggagatggcagggcactgtcaggacccgcagcgtcagcaggagctgttaaccatcgccgctatttcgcgccacaacgcgcagcatcggccaacggacttcccccaggcctgccagctgttctggtatatgaatatcattctgcaatacgaatccaacgccagctcgatttcactcggacgctttgaccagtacatgctgccgttttatcaggcatcgctgaatcagggtcaggatcccgcatatctcaaggagttgctggagtcgctgtgggtgaaatgcaacgatatcgtcctgctacgctcctccagcagcgcgcgctatttcgcgggttttcccaccggctataccgccctgctcggcgggctgacggacaccgggcgcagcgcggtcaacgtgctgtcatttttatgcctcgacgcctatcaaaacgttcagctgccgcagccgaatctgggcgtgcgggtcaacgagctgattgatcgcccgttcctgcgcaaaactgccgaaaccatccgcctgggcaccggcatcccgcagattttcaacgatgaggtggtcgtgccggccttccttaaccgcggcgtgtcgctggaagatgccagagattacgcggtggtcggctgcgtggagctctctattccagggcgcacctacggcctgcatgatatcgccatgtttaatctgctgaaggtgatggaaattgtgcttcaggaaaatgaacatcagcctgacgtcagctgggacggccttatctgccagatccgcgacaaaatccgccattacatcaagctgatggtcgagggcagcaacatttgcgatatcggccaccgcgactgggcgccggtcccgctgctctcctcgttcattgaagattgcgtgcagcacggcaaagatatcaccgccggcggcgcgcgctataacttctccggcgttcagggtatcggaatcgctaacctgagcgattcgctgtacgccctgaagggtatggtcttcgaccagcagcgtctcagctttgaccaactgatggccgtgctgaaagccaatttccagacgccggaagggaaaaagatccgcgcccggctgattaaccgttttgacaagtacggcaacgatatcgacgatgtcgacaatattagcgccgatctgctgcgtttttactgcaaagaagtcgagcagtatctgaacccgcgcggcggtcattttacccccggctcctacaccgtctccgcgcacgtgccgctgggttcggtggtgggcgccaccccggacgggcggctggccggagaacagctggcggacggcggcctgtcgccgatggttggtcaggattcccaggggccgacggcagtgctgaaatcggtcagcaagctggataactatctgctgtcgaacggtacgctgctgaacgtcaaattcactccggcaacgctggccggcgacggcggcctgaacaaactggccgattttttacaggccttctgcaagctcaagctgcagcatattcagttcaacgtggtcaatgccgacaccctgcgtgaagcgcagcagcggccgcaggactttgccggtctggtggtaagggtcgcgggctacagcgccttctttgttgagctgtcgaaggagattcaggatgacattatccgccgcaccgcgcatcagctgtga

SEQ ID NO: 217427 - DNA, 876 bp, Klebsiella pneumoniae
atgacattatccgccgcaccgcgcatcagctgtgaggtcatcgacacgcgcgccgaccgggcgcgtatttttaacctccagcgctactcgctcaatgacggacaagggatccgcacggtggtcttttttaaaggctgccctcatacctgtccgtggtgcgccaatcccgaatcaatttcacccaggattcagaccctgcgccgggagagcaaatgcctgcgctgcacccgttgccagcaggacgttgccgaatgtccatccggagcgtgggaacagattggccgcgatgtgacgctggataacctgttgcaggaggtgctgaaggatgaggtcttctttcgcgcctccggcggcggagtcaccctctccgggggcgaagtgctcatgcaggccgggtttgccgcccgctttctccagcgcctgcgccagtgggggatccgcaccgccatcgaaaccgcgggcgacagcgcttttgaccgctttctgccggtggccgaagcctgtaatgaagtgctgtttgattttaaaatcatggaacctgagcgggcgcggtcgctgctgcgaatgaatcagccacgggtgctggacaattttcgccagctggcggcgagaaaaatcaacctgatcccgcgggtgccgctgatccccggctacaccctgaataccgataattttcgccagattctggcgttcctcgcccctttcgcgctaaaagaaatgcacctgttgccgtttcatcaatatggcgagcccaaataccgtctgctgggcaaaccctggacgctggccagcgtgaaagcgcctgacgaagcggaaattcaaccatatcgggtgatggccgaagcggccggtttccacgtcactatcggcggttaa

SEQ ID NO: 217428 - DNA, 342 bp, Klebsiella pneumoniae
atggacttcaatattgtcgccgtcaccgcctgcgtcagcggcgtggcgcatacctacatggccgccgaacgactggaaaaggtcggtcatcatgaaaaatggcacctgaaggtggaaacccagggggcgctcggcgtagaaaatcggatcaccgcggaagatatcgcccgcgccgaagtggtgctgctggtgacggatatcgaaatcgacgaccctcatcgctttcgcggcctgcggacgattaaaaccagtatcaagagcttcctgctgcagccgcagcagatcgtcgaggccgtgaaaagcatcatgaaaaagccggtcgtctatgtagaacttccctga

SEQ ID NO: 217429 - DNA, 768 bp, Klebsiella pneumoniae
atgaactcatcatcggctaactttctcgatgcgttaggcgccagccaggcgctcagcgcgcaaatgaaacacgagctcgacaccctcggctacaccgtcgtgcataacgtcgttgacgcccagtggctgagcgaaatgcgcctgctcattgacaccctggttgaacgcgaaggcgataatctggcgatggagcaccatcaggaggcgacggcgacgcggatcgctaacctgattaataagggggttatctgggagaaagtctggtcacacccgctgatcctctccgcttgtcgctatatcttcaacggggattttaaagtctccagcctgaacgcccgcgaggcgctgtataacggcggccaccagccgctgcacgccgactggaaaaagccgcgcccggattttcccaaagtccacctggtgaataccatctgggcgatagacgatttgagcgccgccaacggtgcaccgcggatcattcctggtacccacctccgccccgagttaccggaggaggtgctggccgacccggaacaggcccatcccgatgagattgtgtttgccgcgccggccggcagcgtgatgatctacaacgcccacgcctggcacggcggcacccgtaatcgtgaaggcagcagacgacgcgtactgcatgggttatatatcgatcgtgcggatacgccgcagcaggaccagcggcgctggctcacgccggagacggcaagtcgcctgacgccggcgcaaaagtggctgctggatgtagaataa

SEQ ID NO: 217430 - DNA, 834 bp, Klebsiella pneumoniae
atgattgaagatctgccggatatactgcatcggttaatcggtcaaaaagatcacctacaggtgagatttcctgagccggatatctccgtgcctgccctcgccttcaacgtgccgtttccgcgtctggaaattgtgctggagggccaactgaatgaacagggactgccgctggccgcctcgacgttaaccacactccaggtactgtacgtgcaggcggggaagtggacgctgccgcagtggaccggtccggccactaccctgagcattctgtttggtcggcagaaactgggattcagtattcagcgctgggacggaaaaagcctgcacacggaaaaacagagcgtttcccggcttgggccgcgcgtgggttcctacctgttgctgagcctgaatgaagtcagcctgcagcccgatccgctgaccgcgcgactggtggttgccgcgctgctgagtcattgtcgtgaacagctggtcgggctggagatgcgcgtcagccgcagccgggatctgtttctcgccgtccaggactaccttgaggaaaatctcagtctaccgctgacgcgggaatcggtagccaaacgttttcacatcacgcccaactatctttcgcatatttttcagaaatcaggctcggtgggatttaatgaatatctgacccgtgtccgtctggaaaaggcgaagcagctattgcgcggctatgacctgaaggtgaaagagattgcgcataattgcggctttgtcgacagcaactatttttgtcgggtttttaaacgctacacagaacgctcgccatcggagtatcggcgacactgccgtagcgcgcagcaggcctaa

SEQ ID NO: 217431 - DNA, 921 bp, Klebsiella pneumoniae
atgcctgaactccatactcctgcgaatcgccccggcccggccgctgtggcccgggtgacgctcctgcctgcgctgctggttatcgtcgctgttgctgtcggctgcgccctggtgtcgcctccggtcggtacacgacacgagatcctgactaaccccggcctctatatcgatctgctggcgttgttgtttctggtgtttatgctgtggagctcggcgaaggtgcggatgagccatattgccgtcaactgggtacgctatgggctgctgttgtggattgccggcggcacctttgacgtgatggatgagatcgtggttcagccgcgctggatgggctactactgcgaagatctgctgcgcctctccgggatgctgctgaccgtggtgggggtctacaaaattattgagcgaatcaatttgctgtacgtcgatgcgcgctcgcaatccctgaaggatgaactgacccagttacccaaccggcgttttttcattgataccattcgcgagaagtccgggcatgcgctgggactcatgattctggatatcgatttttttaagaaaatcaacgatagctggggtcacctggtgggggatgaagtgttattttcactggggaaacagctggcgaaactaaccagcgagcaggtccagccggcgcggatcggtggggaagagtttgccattatcgtcgatggcctgtcggagcccgagctgcacgctctggcgcaggcgatccttgctaacgcccgcaccatcctgatcaatcatcagacgccgctgtcgatcagcattggcgtcggaacctggcggccaggcgaagcgcaggagacgtttatccgtaaagtcgacgaggcgctgtacaaggccaagcataacggccgcggccgcgtggagtgggcgccatctgccggtgcggcaggttag

SEQ ID NO: 217432 - DNA, 1575 bp, Klebsiella pneumoniae
atgtctgttctgagtttgtcgctcggaaagaaaacaggacgcctgcccgagcgcaggcgtcctgcatttccgatggtggcgttagcgctgctgttttcattgctggcgctgttgccgttagggtttgtggtggcggttgggttcgacaccggctggccgaccattaaagcgctggtctttcgtccgcgggtaggggagctgctcagcaataccctgtggctgacggtggtggcggtccccatcagtattgtgctcggcgtgacgctggcctggctgacggaacgtactgcccttgccggtcggcagctgtggtcggcgctggcggttgccccgctggcgatcccggcctttgtccagagctacgcctgggtcagtgccgtgccttcgctgcatggcctctccgccggggtgtttctctcggtgctcgcctactatccgtttatttatatgccggtggcggccgtgctgcgccgcctcgatcccacccttgaagatgtcgccgcgtcgctgggcacgccgccgtggaaagtgttcttccgggtggtgctcccgcagctgcgtctggcaatctgcggcggtgcgctgctggtggccctgcatctgctggcggaatatggcctgtatgtgatgatccgcttcgataccttcacgaccgctatttacgatcagttccagtcgaccttcagcggtccggccgccaatatgctggcaggcgtgctggccttgtgctgcctggcgatcctgctgctggagagcgcctcacgcggtaaagcgcgttacgcgcgtatcggcgccggggcggcccgcgagcagaagcggcttgtgctgggtaaaggggccgcttttggcgcgcagctactgcttctgctgctggtgatgctggcgatgggggttcccttactggtcctgtgccgttggctatggctgggcggcatcgacaactggctgcatgccgatctctggcattctctgcgccagaccctgctcctgggggcgggcggggcgctgctgacaacggtctgcgcgatccccatcgcctggctcggcgtgcgctacccgcgcccgctgtttcgcctgctggaggggtgtaattacatcaccagctcgctgcccggcatcgtcaccgcgctggcgctggtgacggtcaccatccactacgcccgtccggtgtaccagaccgaagtgacgctgtttctggcctatctgttgatgtttatgccgcgagcgctgattaacctgcgcgccggtatcgcgcaggcgccggtggagctggaaaacgttgcccgtagtctcggacgcagtccggcccgcgccctgtggagtatcactatgcggcttgccgcgccgggcgcggctgcaggtgccgcgctggtgttccttggcgtcagcaatgagctcaccgccacactactgctttcgccgttaggcacccgcaccttgtcgaccggtttctgggcgttaaccagtgagatcgactacgtagcggcggcaccgtacgcgctattgatgatcgtcatttcgctgccgctgaccgcggttctttatatgcagtcgaaaaaaatggcagggttgtaa

SEQ ID NO: 217433 - DNA, 1017 bp, Klebsiella pneumoniae
atgaaatttcgcttatcgcccctccgtacggcagcgctggttgccgcttctctgtttctggcgccgcaggggatggcggctgacgctcagaacgggattgtggtttacaacgcccagcacgaaaatctggtgaagtcgtgggtggatggattcaccaaagagaccggtattaaggtcacgctgcgcaatggcgatgacagtgaactgggtaatcagctggttcaggaaggctccgcgtcgccggccgatgtgtttctgaccgagaactcgccgtcgatggtgctggtcgataatgccaaacttttcgccccgctggatgccgccaccctgcagcaggttccggcgcagtaccgtccgcagcatgggcgctggatcggcattgccgcgcgcagcaccgtttttgtctacaacccggcgaaaatcagcgaggcgcagctgccgcattccctgatggatctggcaaaaccggagtggaaagggcgctgggcggcttcgccatcgggggctgatttccaggctatcgtcagcgcgatgctggcgctgaagggtgagcaggcgactctcgactggctgaaggcgatgaaaaccaactttgtcgcttacaaaggcaatagcacggtgatgaaagcggtcaacgccgggcagatcgacggcggggtgatctaccactactaccgcttcgtcgatcagtcaaaaaccggcgaaaacagtaaaaacacccaactgtattacttcaaacaccaggatccgggcgccttcgtcagcatttccggtggcggtgtgctggcttccagcaaacataaggcgcaggcgcaggcctttattaaatggatcaccggcaagcaggggcaggatgcactgcgcaccaataacgccttcgagtatgccgtgggggtagatgcggcctctaacccgaaactgaccccgctgaaagatctggatgcaccgaaggtagaaccttcctcgctgaacagtaaaaaggtcattgagctgatgacgcaggctggcctgctctga

SEQ ID NO: 217434 - DNA, 1536 bp, Klebsiella pneumoniae
atgaaagagataaagcggcgaaatgcatggattgccttttctctggcactggtggtatttcttgctggcgtgtttgtcattaactggcaattgtggcattcagaccaggccacccatgtcgccgccgcccgtcaggcggcgaaaaagatcgcagccattctggatgaggctcgtgaagcgacggccacggcgctgaacgttagccgcagtggttgctccggccagggtcaatttcagctcggaacggaagccgccctgcagccgcacctgcgtaccattctgctgataaaagatggccaggtgtggtgctcgtccctgcccggcaatcgggtcctgacgctcagccctgagtctttgcctgacgaacctctgctgctgctcccggccagaatgatggtcaataaacggccggtactgatctatcaggcgcgcgtagcggcgatccgggtgattgtcactatcagcgacatccatctgcgtgatgcactatatagcgataccgataacaacgggctggcactctgggtgcagaaccaaatgattgccagatatggcgatgttaagccgctggctgctgacccacaccagggcgtctttacctcacctgcctatccatttcgcattacctaccctgattcacttttctttagccccggccgcttagtccataatggctccggtctgttgatctttattttctcagtttcgctgctgttttatttcctgatgcgtaaatatctcaatgtttatacctctgaagaggaaagactgcgctacgccatcaatcagggctatatcgttccctactatcagccgctggtgaatgggaaaaccggagagatatacggcgtggaaattctcgcccgctggcaaaacagcacgacgccatcgcgctcgccagcggaatttattccgctggccgaacgtaccggcttaattattcccctaacccgcagcctgatggcgcaggtcaacgcgcagatgagaccactctttagtaaactaccggatgggtttcatattggcctcaatatcagcgcgtcacacattaacgccccaacgtttatcgatgactgcctgcactatcagcgcggctttgaggggaaagcggtgaagctgatgctggagatcacggagcaggagccgctgttgctcaacgacgcggtcgtggacaagctcaatacgttacactcccgcgggttttccatcgcgctggacgactttggcaccggctattccgggctttcctgtctccacgagctgattttcgactatatcaaaatcgatcagagttttgtcggccgggtaaccggggaggcgccgtcaagcaagctgctggactgcgtgatagagatggcccggacgctgtcactgcgcatcattgccgagggtgtcgaaacccaggtccagctggagtatctcaatcgccagaatattcatctgctgcagggctactatttctggaagccgatgccctacgtcgcgctggtgatgctcctgctgagcaaaccgaaggcgcggattgtcgaagaataa

SEQ ID NO: 217435 - DNA, 339 bp, Klebsiella pneumoniae
atgaacgttgaattacataccgagcagggcgtaaaaattattgtacctcttgtgcgccgactggatgcttccgtcgtgcaggcgtttaagcagcaggttctggaggctatcgacccggataccaaaaacgtgctgctggatctgaaccacgtcgatttcatcgacagtagctgccttggcgcgctggtttccattctgaaaagcgtcaacggtcagggcgagctggcgctgtgttcactcaatgacacgattaaaaatctgtttaagctcacccgcatggatcgcatcttttctattaaggagactcgacaggatgcgctgaacacgttcactcagtga

SEQ ID NO: 217436 - DNA, 2427 bp, Klebsiella pneumoniae
atgcctgacattaacccgcaaaatatcaaagaattacgggcgttggttgaacagcaattacagtacacattgtgtgttagcttaaataaagctacgcatggcgatatttttaacgcggtggcgctggccattcgtcattttcaacaggaccattttttgttgagccagacgcggcaacgtgaagagcataaaaagcgcgtttactatctgtcgatggagtttttactgggacagtcgctgcgtaataaccttttgaatatgaatttactggcggagatgcaccaggtggtgaatgacctggggtttgatcttgaccaccttcttgacgaagagcccgacgccgcgctgggtaacggagggttagggcgcttagccgcctgttttatcgattcgatggccacccttgatattgccgcatccgggcatggcatcaaatacgaatatggtctttttcgccaatcctttcaaaatgaccagcagatcgagcatccggatgactggcattccatgcactccccgtggctggtcgaacatcatgctcagcaaatcctgatcccgctgggaggctatattgaacacagcgaagatgttgatggcaattacaatccaatgtggctgggctggaaaacgattatcggtataccccatgactatttcgtttccggttaccgggatacgacgaccaacaagctgcggctttatagcgcggtggcctctgactcctttaatatccatattttcaatcgcggtgattatatcaaggcggtgagtgataaaatcgcgtcggagaatatttcaaaaatactctatccatccgatgaggtgctgaccggaaaagagctgcggctgacgcaagagtattttctggtggcctgtacgctgcgggatatatttcgcgactatgccgaggttaatgacgatattactttcctgccgcagcatgtggcgattcagctgaatgacacccatccggcattagcggtggtggagctgatgcgtatcctcgtcgatgaataccggctgccctgggagcaggcgtgggagataacgcaaaacacctgtgcctacacgaatcatacgttgatgccggaagcgctggagacctggccggtgacgctgtttgaaaaactgctgccgcgtcatttgcaaattatatttgagatcaaccatcgcttccttgaagaggtagcccggcgctggccggataaaaatcatctgttatcttcgctgtctttaattgacgaacatcacgataagcaaatccgcatggccaatctggcgattgtcggtagccatcgcgtgaacggggtagcatggctgcattcggaactggtcaagaaacaactggtgccggacttctattttatgaccccggagaaattcattaatcagaccaacggcgtcacgccgcgacgctgggtgcagcaggctaaccccggcctggcagcatttttgcaccaacagctgggggaagggtggccaaccgatttacccttgctgtccagtctggaaagcctggccgatgatactgctgttattgataatatccgggccattaaatttgccaacaaaaccgcgctcagccagctggtcgctcaacgctatggcatcgccctcgatccgctggcgatgtttgattgtcaggtcaaacgtattcatgaatataagcgtcagttgctcaatattcttcatgtgatcgcgctttatctggatatcaaagagacagggaaaactatcgcgcctaaggtgcatttgtttgcgggtaaagcggcgccgggctatcggatggcgaagctgattattcagttgattaataccgtcgcccggaaaattaaccgcgacccgcaggtcgccggacagcttaaagtggtttttctcgaagattacaaagtctcgctggcggaaaaaatcattccggccacagacctctccgagcaaatttccaccgccgggaccgaggcgtccggcaccagcaatatgaagtttgccatgaacggcgcgttaaccatcggcacctatgatggggcgaatatcgaaattcgcgaggccgtggggatcgataatttttatctgtttggcgccgtggcggaagagattgaagagagccggcgccttgggcatcaccataatttctatcatcagaacccggctatggcgcgtgttgtcgataccctcgtgtctgggttgttcaccagcgatcgtgagctgtttgcaccccttcaccacatgttgactgagggcgatcattactgtcatttactggatttcgacagctattgccaggcgcagcagcaggcgatgatcgattttgaacagccggaacaatggcaccgtcgggccttactcaatatttgccggatgggcgaattttccagcgacagaaccatacgtggctacgcccgggatatttggggtatcaccagctaa

SEQ ID NO: 217437 - DNA, 3309 bp, Klebsiella pneumoniae
atgctcagatatacctgtcatgccctatttcttggatcgttagtattattgagtggctgtgataacagctcttcctcttctacctctggctcaccgggttcaccaggcaatcctggcaacccaggcactcccggcacgcccgacccgcaggatgtcgtcgtccgcttaccggacgttgccgtcccaggcgaagcggtgcaggcttccgccaggcaagctgtcattcatctcgtcgatatcgccggcatcaccagcagcacgccggccgactatgcgacgaaaaacctctatttatggaacaacgaaacctgtgacgcgctgagcgcgccggtggcggactggaatgatgtcagcaccaccccgaccggcagcgacaaatatggcccttattgggtgatcccgctgactaaagagagcggatgcatcaacgttatcgtccgcgatggcaccaataagcttatcgacagcgacctgcgcgtctctttcagtgatttcaccgatcggacggtatcggtcatcgccggcaacagcgcggtctatgactcccgcgccgacgccttccgcgccgcctttggcgtggcgctggccgatgcgcactgggtcgataagactactctgctgtggccgggtggggaaaataaacccattgtgcgcctctattacagccacagcagtaaggtggccgccgacagtaacggcgaatttagcgataaatatgtcaagctgacccccaccaccgtcagccagcaggtaagcatgcgcttcccgcatctcgccagctatccagcctttaaactgccggatgatgttaacgtcgatgaattgctgcagggcgagacggtggcgatagccgcggaaagcgatgggatcctgagctcagccacccaggtgcagaccgccggcgtgctggacgatacctatgccgccgccgccgaggcgctgagctatggcgcccagctaaccgatagcggcgtgaccttccgcgtctgggcgcccacggcgcagcaggtcgagctggtgatctatagcgcggacaagaaagtgatagccagtcacccgatgacccgcgatagcgcctccggcgcctggtcctggcaggggggaagcgacctgaagggcgccttctaccgctacgcgatgacggtctaccacccgcagtcgcgtaaagtcgagcagtacgaagtgaccgatccctacgcccacagtttgtcgaccaactcggagtacagccaggtggtcgatctcaacgacagcgcgctgaagccggaaggctgggacgggctgacgatgccgcacgcgcagaaaaccaaagccgatctggcgaaaatgacgattcacgaatcgcatattcgcgatctctccgcctgggatcaaaccgtgcctgcggagctgcgcggtaagtatctggcgctcaccgcccaggaaagcaatatggtccagcatctgaaacagctgtcggcctcgggcgtgacccatattgagctgctgccggtcttcgatctggcgacggtcaatgagttcagcgacaaggtcgccgatattcagcagccgttcagccgcctgtgcgaggtcaatagcgcggtgaagagcagcgagttcgcgggctattgcgacagcggttcgacggtcgaagaggtgctgacccagctgaagcagaacgacagcaaggataacccgcaggtgcaggcgttgaatacgctggtggcgcagaccgactcctataactggggctacgatccgttccactacacggtaccggaaggatcctacgccaccgatccggaaggcacggcgcgtattaaagagttccgcaccatgattcaggcgatcaagcaggatctgggaatgaacgtcattatggacgtggtgtacaaccacaccaacgccgccggcccgaccgatcgcacctcggtactggataagatcgtcccctggtactaccagcgtctgaacgaaaccaccggcagcgtggaatcggctacctgttgctccgactcggcgccagagcaccggatgttcgccaagcttatcgccgattcactggcggtatggaccaccgattataagatcgatggcttccgcttcgacctgatgggctaccacccgaaagcgcagatcctctcggcctgggaacgcattaaagcgctgaacccggatatctacttctttggcgaaggctgggattccaaccagagcgatcgctttgaaattgcctcgcaaatcaatctcaaaggcaccgggatcggcacgttctccgatcgtctgcgcgacgccgtgcgcggcggcgggccgttcgactccggtgacgcattacgccagaaccagggcgtgggcagcggggccggcgttctgccgaatgagctgaccaccctgaccgacgatcaggcgcgtcacctcgccgatctgacccgtctcggcatggccggtaaccttgcggactttgtgctgatcgacaaagacggcgcggtgaagagaggcagcgagattgactataacggcgcgccaggcggctatgcggctgatccgacggaagtcgtgaactatgtgtcaaaacacgataaccagacgctgtgggacatgatcagctataaagccgctcaggaggcggatctcgatacccgcgtccggatgcaggcggtgtcgctggcgacggtgatgctcggccaggggatcgcctttgaccagcagggctcggagctgctgcgctctaaatcctttacccgcgattcgtatgattccggcgactggtttaaccgcgtggactactccctgcaggacaacaactacaacgtcggtatgccgcgcagcagcgatgatggcagcaattatgacattatcgcccgggtgaaagacgcggtggctactccgggtgaaacggagctcaagcagatgaccgcgttttatcaggagctgaccgcgctgcgtaaatcgtctccgctgtttaccctcggcgacggcgcgacggtgatgaagcgcgtggacttccgcaatactggcgccgatcagcagacgggtctgctggtgatgaccatcgatgacgggatgcaggctggcgccagtctggacagccgtgtcgacggcatcgtggtggcgatcaacgccgcgccggaaagccggacgctgcaggacttcgccggcacatcgctccagctgagcgctattcagcaggcggcgggcgaccggtcgctggcgagcggcgtgcaggttgccgctgacggttcggtcacgctgccggcctggtcggttgccgttctcgagttgccgcagggcgagtcgcagggcgctggcctgccggtgagcagtaaataa

SEQ ID NO: 217438 - DNA, 891 bp, Klebsiella pneumoniae
atgatgaacccaactctgataacccgacgccgcctgctgatcgcgatggcgctctcgccgctgctgtggcagatgcgcggcgcgcaggcggccgacgtcgacccgcagcgcgtggtcgccctggagtggctgcccgcggagctgctgctggcgctcggcgtgacgccctatggcgtggccgatattcccaactatcgcttgtgggtgaacgaacccgcgctgcccgactcggtgatcgatgttggtctgcgtaccgaacccaaccttgaactgctgacgcagatgaaaccgtcgtttatcgtctggtcggcgggctacggcccgtcgccggagaagctggcgcgtatcgcgcccggccgcggtttcaccttcagcgacggcaaacggccgctggcgatggcccagcgttcgctactggaaatggccgatctgctgggcaaaacgcagcaggcgaagcgccatctggcggagttcgacgcgctgatggaaagcctgcgtccgcgttttgccgggcgcggcgatcgtccgctgctgatgatctctctgctcgatccccggcacgtgctggtgtttggcgaaaactgcctgttccaggaggtgcttgatcgctttggtattaaaaacgcctggcacggcgaagcggcattctggggaagcgttagcgttggcatcgacaggctggcggcatttaacgaagccgatgtcatctgtttcgaccatggcaatgagcgagatatggctcaactgctggcgacgccgctatggcaggcgatgcccttcgtgcgcgcgggccgcttccagcgcgttccggcggtctggttctacggcgcgacgctgtcagcgatgcattttgcccgcgtgctggctgatgcccaggggagtccggcatga

SEQ ID NO: 217439 - DNA, 1176 bp, Klebsiella pneumoniae
atgctcatcgcctacgggatcagtaaaggcgtaatgagcagcctcgcggataaagccagcccgaaagtctttatggcctgtggcctggtgctgtgcgccatcgtcaacgtcggattaggattcagtaccgcattctgggtcttcgctgcgctggttgtcctgaacggcctgtttcagggtatgggggtcggcccctcttttattactattgcgaactggttcccgcgccgtgagcgtggccgcgtaggggcgttctggaacatttcccataacgtcggcggcggaattgtcgccccgatcgtcggcgccgcattcgccattctcggcaccgagcactggcagagcgccagctacattgtaccggcctgcgtggcggtggtattcgccattagcgtactggtgctgggtaagggttcgccgcgcgaggaaggtctgccttcgctggcagagatgatgccggaagagaaagtggtgctgaagaccaaacacggccagaaagcgccggagaacatgagcgcatttcagatcttctgtacctacgtactgcgtaacaaaaacgcctggtatgtctcctttgtggatgtgtttgtctatatggtgcgtttcggcatgatcagctggctgccaatttacctgctgacggtgaaacatttttccaaagaacaaatgagcgtcgcattcctgttttttgagtgggcggcaattccgtctactctgctggccggctggctctccgacaagctgtttaaagggcgccggatgccgttagccataatctgtatgacgctaatcttcatctgtctgattggctactggaaaagcgaatctctgctgatggtcacggtattcgcggcgattgtgggctgccttatttatgtcccgcagtttctggcctcggtccagaccatggaaatcgtccccagctttgccgtcggttcagccgtgggtctgcgcggatttatgagctatatctttggcgcatcgttaggcaccagcctgttcggcgtaatggtcgataaaatgggctggcacggcgggttctatctgttgatgggtgggatcgtctgctgcatactcttctgctacctctctcatcgcggcgcgctggaacttgagcaacagcgtaaaatcaccgagcaggaagaggcccgactggcactggctgacgcacagtaa

SEQ ID NO: 217440 - DNA, 450 bp, Klebsiella pneumoniae
atgggattattaaattttgtgaaagaagcgggcgagaaaatatgggatgccgtctccggcgacagtaaagaagatcgggccgataagctgaaaaaacatatcgatggacttaatctgcctggcgccgaaaaggtcaatattgatgttgcggaagatggcacagcaacggtcactggtgatgtcgcttcgcaggaggataaggaaaaaattctggttgcggtcgggaatgtcactggcgtaggccaggtcagtgacggcgttaaggtgacgcaaagcggggcggaaagtcgtttttacacggtcaaatccggtgacactctgagcgcaatctcaaaagcgatgtatggctcggccaatgagtatcaacgcatttttgaagccaataaaccgatgctgacccatcccgacaaaatctatccgggtcaggtgctgattatcccggcgaagtag

SEQ ID NO: 217441 - DNA, 1113 bp, Klebsiella pneumoniae
atgaccgcgactcttgagctcgcccggcagctgctgggctttaacaccatcaacccgccgggcagcgaagccgactgcatgcggttcttcgccgactggcttgacgatagcggttttgaggtttcgctgtcgtcgttcggcgaaggacgctgcaatcttatcgccagcctgcccggggcgaagagcggtaaaccgctggcctttaccggacatctggataccgtcccgctgggaaatgcccgctggcagtacgatcctttcggctcgcagatggaagacgggcgtctttatggccgcggatccagcgatatgaaagcggcgatagcggcgtttgccgtcgcctgcgttcatcagcgggaagcgatcctcgccggacgcggcgcggtattgctgataaccggcggagaagagaccggctgcgacggcgcgcgggcgctgatcgcctccgcaacgttgccggaggtgggcgcgctgatcgtcggtgaacccaccgccaactatccggttatcggccataaaggcgcgctctggctacgctgcgaaacgcgggggaaaaccgcccacggcgcgatgccggagctggggatcaatgctatttatcttgcggcggatgcgttgggtaagattcagcatttttcgccaggcgcgccgcatccgctaatgaagcaacccaccctcaacgtcggacgcatagaaggcggactcaatattaattccgtaccggaccgcacgcgttttgatgtcgatatccgcagcgcgcccaatttacagcacgccactatccgggagcgcttgacgacgctgcttggcgaaagcgtcaccgtctccacgctggtcgacctgcccgccgtcctcagccgggaggatcatgcgtggattaagcaggtttatcaacgctgtcagccgctgcacgctgagccgattgcgccgcgcgtggtgccctactttaccgacgcctcgctgctgctgcctgccctgggcgatccgccctgtattattctcggccccggcgagccgtcgatggcgcatcaaaccgacgagtactgcctgctcagccggctggcggaggcagaacagctatacggtgacctgattcgcgactggatggcatga

SEQ ID NO: 217442 - DNA, 1209 bp, Klebsiella pneumoniae
atgccactggtcaccacaacatttaatcaaaagacgctcattcggattgctatggtaatcgcttttgtccagtttactaatgcgctggaatatatgatgttcagccctgtttttacatttatggctgcagatttcgctgttcccgtcaccttctcaggctatgtatccggtatgtacacatctggagccgtcctgtcgggaattatcgccttttactggattgatcgttgcaataagaagcattttttaatcgctaatatggtactgctagccatggcgacactgttgacgacattcactaccagttttcctcttcttcttacattgcgcttcttcgcaggactggttggcggtacgacaatggctgtggggatcactattttgataaaccacacaccggctgacttgcgcggaaaaatgttggcgacggtgattgcgtcattttcgatggtcagcatcgtggggatgcccgctgtactatttttgtgtactcattacggttggcatgtcgcattgtggttaatttgtacactgtgttggttggcattgccactgatcgtctccatcatccctcaggatcccgtcactttcgacacgtcccacgcgctgcccctcgatgtagatactttactgtttgcttccggtaatgcgctggtacagtttagtccaatgctgatcattcctgtcctggcgccattaatgacgcagctgttggggacttctcaaggtctgctgccctggttgttcttcggcgggggcctggcggggtatctgtctaccagaatgacaggcgcattaacctctcgtgtttctgctttgagtttggcgaccgggtcgaccctcgtttttatcctgagcttactgatacccctgatgggctatccgcatccagcgctatttattacgttatttctcggcgcagcttacagtcgtctggtgtcatcgtcggcggtgacgattcagtttcctgataacaagcaacgagcgggattttcttcattacagacatccatgatgtatctgatgacgactgccgcatttttcctgtctgcttttttgttacccgaccatcgcatggcgctacaaaatatggatacgctgttggcggtatgtgcaattaccgcatcaggaaccccaattattgtcatcgttttgcaaaagaaactggctaaacgtacgttcgcgcgtgatcgttacagcactcagtag

SEQ ID NO: 217443 - DNA, 630 bp, Klebsiella pneumoniae
atgtcctcttcagaaagacctcacaaaggttcaccctacgcgcaagagctgattactcacttacagccgtattgcacaccacgtaaaaccgaaagaggggagcaactggatttcaaggtgaacggccagggggtgtgttacctgatcctcgagggaaccgtagcggtttatcgccgaaacgataatatgatgctgtccactgcacgcagtcccgccgtgtttggtcttgccaatctgacggatatttacttcgatgactatatcaaaaccataaacccctgcctgattggcgagatctccaccgctcgtgttaatgacattattaaagaaaaatcgttatggggactgctctcaaagcaactgatgtttgtgtatggccgactttacaacaacgtgatgccgcagggcgctccgacggcgtacgaaatgatccgccagcagttgctcaatctcatagaagaagatgagagttatcgcgcggcagtcacagcagaactctacatccgcgagaaaacccatctgtctcgcagcggtgtcatgcgtattcttgcggatttaaaaacgggtggttttatcgaaatggaggagggaagactcatcaaaatccataagcttcccgccaggtactaa

SEQ ID NO: 217444 - DNA, 660 bp, Klebsiella pneumoniae
atgaacacgcgcttaacccacccggaaaaccatgacaaatcacttgctctggaattaaaaccattccggcacattgaggcattgataaaacatgtgttgccagcagcagaaagagtcgtgatcggcagaggtgacgtcgtgcattattataaagatgatatccggcagtgctttttgctattgcaaggtagcgttgcgctgcaccgtcgcggcgatggcattgttttaaattctgaatcagcaccgtttattctgggcgtcagtagtcagttttcctcagagcatctttatgtgagagcgctggagacgtcagagatcgcccgtgtgccactggattgttttaatcacatcgtggcacaactggatctgtgggagcatttttcgaaactcctcatttacactgcctcccgggtgtatgagcattgcgcacaaatctcgcagatgtcagcttatgacatcatccgctttcagcttgttgaactcatgcaagagccggatgcgatacggcaaaaaattacggctgcagcctatattaagagccgaacctatctttcacggagcgggattatgcgaattctggccgagctacgaaccgggaagtacatcaccatggaacggggtatactgcttgatatcaaccatttgcctcgaaaatactga

SEQ ID NO: 217445 - DNA, 531 bp, Klebsiella pneumoniae
atgaaaaaaagtcttattttagttgcattgaccgcaactgcagcgctgtcaacatctcacgcttttgctgccgctggcaccgtaaatttcgttgggaacattctggatactgcctgtgaagtcgacgtggcatcgcaaaaccagcaggttaacctcggtaatttttataaaagtgaatttccgaacagtggcacaaaagcggctgcaaaagattttaatattgtgcttaaaaactgtccaaccacggtaacttcgacaaaagtacgctttgatggcacccccgatctgaccaaccctaacctgctggctattgatacctcagcctccagtgcggcgtcaggagtggcgattaacctgatgactgccgataaagtcgatctgcctttgcacggtgagaacagctataactacgtgcttagcagcacccaggacaatacgctgaaattctatgcgcaatatatctctaccacggcaccagtaacgccgggtacggccaactccgttgctaacttctccattgtatataactga

SEQ ID NO: 217446 - DNA, 678 bp, Klebsiella pneumoniae
atgaatgttcttcgcagtatcttgctcaccaccacgataatgagtattggcttatcttttgctcaggcgggtgtcgttattggtggcacgcgcgtcatttttgatggtaataaaaaagaagcttctattagcgtaaacaacccggataacatcccctatcttatccagtcatggatcgaaaccccgggtgatggggccgggaaggcacctttcattattaccccgccgttatatcgactgaataatggccaacaaaacgtcgagcgcattgttgccaccggcgcattacctcaggataaagagagtctgttttggcttaatataaaagctataccctccgcatctcaagttgacaatacgctgcaaattgccattaaaacccgaattaaactcatctaccggccggcgacgatgaaaggcgcctcccctgaagaacaggccgataaattacgctggcaacgcgtagggaataaaatacaggtaaacaatccgactcagcatgtcatgaattttaatgaaatctctctttcaggtaaaagagtgcctgatgtcagttatgtattacccggcagtacggcgacattcgatttaccctccggcgtaacgggcgggccagtgacattcaaaattatcaatgactatggcagtcccggggcagagcacaaagccagtctgtag

SEQ ID NO: 217447 - DNA, 2535 bp, Klebsiella pneumoniae
atgatgatggcaatggattatataaaagtacgatctccacggttggcattgttgataaccatcgcgctcttcggtaatacacaaaatagctatagtcgcgatttttttaacccagagctggttgaactggataatccagggacagaaagagtcgatctttcaggttttgaatctggtgcgcaagcccccgggaattatcatgttgatgtcgtcctggacgatcagttagtcgatacccgcgatattatgtttgttttgctgaaagaacctggcggtgatgaaaaattagtcccctgtttatccattgagcaattagcaagctggggagtcaagactggactttttcctgcgttaaagggcgaaacctcctgtgcgaacctgtccgccattcctcaggccagtacagatttccagtttgccatgcagcgtctggtattgagcattccgcaagcggcaatctcagcgcaagctcgtggatcggtgccaccggatcgctgggatgaagggattaacgccgccctgcttaactacagtctgagtggggcgaataactgggccaaaaataacaacagcagcaacagtgatagccagtatgccaacctgcgtccgggagtaaacatcggcccctggcggttaagaaattacaccagctggtcgcgagattcacagggccacgatgcctgggacacggtttatacctatgcacaacgtacgataatcccgttaaagtcgcagctcacactgggtgacagttctgccccggcagatgttttcgacagtattcctttccggggaggacaacttgcttccgatgatgacatgctgcccgactcccttaagggctatgcccctgtggtgcgtggtatcgcccggaccaatgcccaggtgatcatccgccagaatggctatcagatttaccagagctttgtggcgccgggcgcgtttgaaattacggacatgtatcctaccggcggcgccggcgatcttgatgtcacgattaaagaggctgatggtagtgagcagcactttagcgtgccatttgcctcacttcccgtattacagcgtgaaggccgaataaaatatgcgttaacaggcggccaatatcgttcgtacaacggcagcgtggataaggcaccctttggccagatgagcgttattctcggcttgccctacgggttcacgttttacggtggattgcaggagtcgagtaaatatcagtcgcttgccgcgggcgtgggtaaaaacatgggtgactttggcgctatctccagcgacatcacccagggctggtccacgccgtacaatatgccgaaatccaacggtcaatcctggcgggctcgatacagtaaaaactttgcttcaacaggcactaactttgcgattgccggctaccgctattcgaccagcggctactatggcatgcaggaggtccttgattcttatggtgacagtaatgcgctccaggatagacgccgcaaccgtgcggagctgacgttgagccaggggttgggagataatctgggatcgttgatgctgaacgcctcgcatgaagattactggaattcaggtaaggcgatggaatcctggagcgttgggtataacaactactggcacagtatcagttacggtctgacatggaccctgagcaggaatggtagtacgggatcgtacagcgctcaccagagcgacggtaaaaaccagatgctggcgctaaatatcagcatcccgctggaaaaactcttgccgcagacatgggcaaactatggcatgaatgccagcaagcataacggtacgacacacagcgttgggttgaatggcgttgcgatgccgaataatgcgcttaactggaatattcaacagggttacggcactcacgacgtggcctataccggcaatatgaatggtgattatcgaggcacctatggcgaactgacggccgggtacagctatgacaaaaataccgaccgtctgaattatgggattcagggaggcgtggttgcgcatgccaatggcgtgacgttctctcagccactgggtgaaaccaacgtgctgattgctgcccccggggctgccggtgtaggaatccagaatatgaccggcgcgacaaccgattatcgcggatacacgcttgcctctaacttaatgccttatcgcaaaaatgatgtgtcattaatcactgaaacattgccggctaacgttgagttagaacaaacggtcaaaaccgtggtcccgacgcgtggcgcgattgtcagggcgaactatctggcaagcgtaggcgttcgcatgttgatgaccttgacccagcaaaacggccagtgggtaccgtttggtgcaattgccagcattgaaggtgcagaacacagcagctttatcgttggcgaaagcggtcaggtgtatttgacgggcctggatccccaggtcaacctgaccgtgaaatggggaaatcaatccgcaaacacctgcagggtgcattattcgattaatatggcgaagctgaataacgatgtgattatcgatactgctgcttgccgttaa

SEQ ID NO: 217448 - DNA, 1008 bp, Klebsiella pneumoniae
atgcgacttttccgatctgcattattaatgctggctttgttgtttcccttgagtggcatctgctgtaactataatttcatcggctctccctatactgtggattatggcaatattatcgttcagcgcgatgtccccgttgggcaagcaatcagcaatgagatatatggctccttagcacatgcttattcctgcattacaaccggcaatgaagggtcaagctcagggatgaaaagcggggttttaccctatgtcgcgacgtacggggcgcggcgcgtttataaaaccaatgtgtctggggtaggtatttctttcggattttatttgaattccagagcaggcgtttcgacttatagcggcaccgattatattaaccgcggtaacgattcattgtccagttggtcatcaaaccctggagagttagttagcgatgactatcagccgattatacaattctggaagattggtgatattacatccggctcagtgacggggcaacttgcatcgtttgtcgctttcacaatgcaatatctcggcggagaacaagctcctgagatacctgtaaatgcgggggccggatctattacccaggtggcatgtgcggtaaaaacatcgaatattttatttgaactgggggacgtcttggttagtgaattcgcctctgcggtaggcacaacgcccgctaatgcgcagaagacgcagaatctcattctggactgcgatgccggagccaatattaacgtcatgctcaccgggccacaaaatcccgacgtcagcgataataccgtgctggcattaaccggtcagggcagcgcaggcgtcgcccgtggggttggcgtgcagctggtttataacaatactcccctcacccttggcaataatctggttttgaagagaaccacgggtggccaggagatgttcccgttaacagcacgctattatcagaccaatacaacggtaaccaccggcttcgcaaacgcatccgcaacgctgagccttacctatcaataa

SEQ ID NO: 217449 - DNA, 513 bp, Klebsiella pneumoniae
atgaaaatgaatatactagtcttgctgatggcatgtgcaacagcattacctgcgctgtcggcagacaatgtcgatattaaagtcacaggccgtattatcgcagcaccctgcgtttttaacggtggaaattcaaatatgaatatcgatcttggtaatatccaggcaacaaatatgttcacacctggatcttcgtccgatccggtttcttttaacctgctatttacccgctgtccgccgggtacgctgagtgtgacgacccgttttagcggaacgcctgacccggaagcgggcatgaattattaccaaaacagcggcacggccacccgcgtggcgattgcgatgtctgatgctactacaggtttgttgatgggcaatggatccagcatcacccaaaatattgccgcagacagaacggcgaagatgccgatgaaagcgatggtcacttctgtggcgggaagaccgacaccaggttccattcgcgctgtcgtcgttttgacaatgcagtacaactga

SEQ ID NO: 217450 - DNA, 654 bp, Klebsiella pneumoniae
atggttaatattgtaataaaagagccggataccctctttcagcgtggactgacctttttatttagtgatttcttttcccaacacaataccaaagttgatttcaattttaactttacgtcggaaagtgtgaaggtagcggacgtcattgtgctggcattatgtccaggagagtgttttatttgctgtcctgaactgcaggagcgaaaaaaagggattgtgattggcgttgttgatgatgatacgcgtgttacggctttaccttcttgttttcaggatattatctttatttctcgtcgggattccgtcacgcggttacgtacagcattgcacggtgcctggctccggttgcagcagacaaatacgcgacagtcatccatgtcctgttgtgattgccagcccaccaggctgtctccacagcagatccgcatcatgacctgtttatatgaggggatgtcggtcatgcaaattgcagacgaactcatgattagtgagaaaacggtctatgcgcataaatatatggtcatgagaaaatttaacttacgcaacgattatgagctaatgctcctgctcaataaactgaccaaaaattgcgcctggccaggtggctttataaatatatatctcaatgatagcaaaggtgataaaaacaactga

SEQ ID NO: 217451 - DNA, 243 bp, Klebsiella pneumoniae
atgtgcggcaccagggcggtgcaaatgaattatcgcggtgcgctttacctgctaactggcgtaggagacatcgtatatcctggactggcgctagacggacttcagtgcaaagccgcccaggcgggtcgaggctacgaaatcaccgcctggggcggctggcaagataaacgggaaatgaggctggcggtttacccgcttagtagcgaaaaaacgctactgtcccgactattttttgctttatga

SEQ ID NO: 217452 - DNA, 1497 bp, Klebsiella pneumoniae
atgccacattcatcccacacggagcagacgaagactcacgaggcggccgccggctacagtccgcggctatgtaatgacgatctggcgccgacccgcgaccagaactggagctggtacaatatcttttcattctggatgtcggacgtgcacagcatgggcggctacgtagtggcggcgagcttctttacgcttgggctggccagctggcaggttctgctctgcctgctggtgggcatctgtattgtccagctgtgcgccaacctggtggcgaagccgagccagatggccggggtgccttacgcggtgatttgtcgtcaggcgtttggcgttttcggcgccaatatcccggcggtgatccgcgggctgatcgcctttgcctggtacggcattcagacctatctggcggcgaatgccctgatgctggtcctgctcaagttctggccctccctagcctcgctgaccagcagcagctttctcgggctgtcgcccctcggctggctgtgcttcgccactatgtggctgctgcaggcgatggtgttctggcatggcatgaacgccatcaaacgctttatcgatatcgctggtccggcggtttatgtggtgatgctggcgctggccggctggattgtatacaagactggtctggacggtatctcctttaccctcgccagcaaatccctgagcgccggcgagcagacctggcagatgatcaccgccacggcgctggtggtctcctacttctccgggccgctgcttaacttcggtgacttttcccgctacggcaaaagcatgggcgagatccgccgcggtaaccgctggggactgccgtttaacttcctgctattctcggtggtgaccgtggtgattgtctccggcacccagtcgctgtttggcaaaatgatcaccgacccgatcgaaaccgtcagccgcgtgggtaacgatctggcggtggccatcggcctgctgaccatgatcaccgccaccatcggcatcaatatcgtggctaacttcgtctcgccggccttcgatttttccaactgcgcgccgcagaaaatcagcttccgtaccggcgggatgattgccgcggtgggctcgatactcctgacgccgtggaacctgtttaactccccggagctgatccactataccctcgacgtgctgggcgcctttattggcccgttgtttggcatcctgatcgccgacttctacctgatcaaacgcggccgggtgtcagtggacgatctgtttgacgatacgccgcagggtaaatactggtaccgcaacggctttaacccgaaagcgattgccgccctgctgccgtcggtgggcctggggctgattatcagctttattccggccctgcatgaagtggcgaacttcagctggtttatcggcgtcttcctcggcgccaccacctaccgctggctggctcgcgacgagcgcgaagtgcaggcgaaagctgccttccgctccggcgcggtggcgcaaaaagagtaa

SEQ ID NO: 217453 - DNA, 1911 bp, Klebsiella pneumoniae
atgccccttttgagagacgaaattcgcgaccactccgcggaagagatgctgtttatccgccgggccgcaattgcttttctgctggtggtggtctgctttggcgtgctgatcgttaacctctaccatctgcaggtggagcagcacgatttttaccagacccggtcaaaccagaacgacatcaaaatgctgcccatcgcccccagccgcgggctgatattcgatcgcaacggcattccgctggtgcagaatatcaccctgtatcgcctgcaggtgatcccgagcaaaattcccgatatggccgcgctgttgcagcagctgacgcctatcgtcgacctgacgccggacgacatcgccagctttcgcgacgatatgcaccacatcagccgctacaaagcggtcaccctcaagtcagacctcagcgatgtggaggtggcccgcttcgcggtcaacgaattccgtttccccggcgtgacggtggagagctaccaacaacgggaatacccctacggcgcagagctggcgcacgtggtgggctatgtgtcgaaaatcaacgacagcgatctgcagcggctggcgaaaaacggcgaagaggagaactacgccgccgaccgcaatatcggtaagcaggggatcgagggctattatgaaaaagcgctccacggcaccaccggctatcaggaagtggaggtggataaccacggccgggtggtgcgtctactgaaagaggtgccgccggtggccggaaaaaacctctatctgactctcgaccttcatctccagcagtatattgagtcggtgctgaagggacagcgggcggcggtggtggtagtcgacccgcgggatggcggcgtgctggcgatggtctccagtcccagctacgatcctaatccgttcgtcaaaggtatcggctatcaggcctataaatcgctgctggagaatccggaccggccgctgatcaaccgcgtcacccaggggctatatcctccggcttcgacggtcaaaccctatatggcgctgtcggcgctctccgctggggtcatcaccccgaacaccaccttcttcggggcgccgacgtggacgctgccgggcacgcaacgccgctaccgcgactggctgaaaaccggccacggcatgctcaacgtgactaaagccatcgaagagtcagcggacacctttttctatcaggtcgccttcgagatgggcattgaccggatccatgaatggctgagcaagttcggctacggccagtccaccggcatcgaccttaatgaggagtacgccggggtgctgcccagccgggagtggaaacagcgggtgcataaaaagccctggtatcagggggacaccatctcggtcggcatcggccaggggtactggatcgccaccccgatccagatggtgaaggcgcttaccactctgctgaacaatggtaaggtacaggatccgcatctgctctattcgatgaagcagggcaaccatgtggaacgttatcagcagccggcgaacctgccgcaggtgggtgacccgaaatccccgtactggggcattgtgcgcaacggcatgtatgggatggcgaatcagcccaacggcaccggctataagctgtttcatactgcgccgtatcagatcgcggcgaagtccgggacctcgcaggtctttagcctgaagcaaaaccagacctataacgccaaaatgatcccggtgcgtctgcgcgaccatatcttctacaccctgtttgccccttatcagcatccgaaggtggcgatggcgctgattctggagaacggcggcggggatggggtggtggccggaccgacggcgcgcgccatcctggaccatatttttgtcccgcagcaggcatcttcggcggcagccgatgtgccgcagcgtgacagcgccgatgcccagtaa

SEQ ID NO: 217454 - DNA, 633 bp, Klebsiella pneumoniae
atgcctgaattcgcttcattaatggcctttgccgcggtggcgctggggttggtgttaaccccaggccccaacatgatgtatctcacttcgcgttcgatttgccagggaaaacgcgctggctttatctcccttgccggcgtggccgtgggttttttcttctatatgttgtgtgccgctttcggcatcaccgcgttggttttcgcggtcccatacgcctacgatgccttgcgtttatgcggggtcgcttatttgctctatctggcgtggcaggcgatcaaaccgggagggcggccgatatttgcggtgcgcgacttacccgcggacagtgggcgtaagctgtttctgatgggattcctcaccagcctggcgaaccccaaagttgccatcctgtatctgtccctgctgccgcagtttatcacccctggactcggcagcgtgctcagtcagtcgttaatattaggctgtacccaggtgatgatcagcgtggcggtgaacggcatgattatcttgctggccgggcaggtggcgttatttcttggtcggcggccgggctggcaacaatttcaacgctggctgatggcgacggtactggcgggaatggcggttaagatcgcttttgaggccagaaaataa

SEQ ID NO: 217455 - DNA, 2178 bp, Klebsiella pneumoniae
atgagcacgtctaacgacccatccaacaatgcatccgccgggaagtgccctttccacgccgagacgccaaaacagagcgccggcagcggcaccgccaaccgcgactggtggccgaaccagctgcgtgtcgatctgttaaaccagcactccaatcgctccaacccgttgggtgagaattttaactacagggaagagtttaaaaagctcgattactccgcgctgaaggctgatctcagagcgctgctgaccgattcgcaagagtggtggccggcagactggggtagctatattggcttgtttattcgtatggcctggcacggcgccggcacctaccgcaccgttgacggtcgcggcggcgcaggtcgtgggcagcagcgctttgcccccctgaactcctggcctgacaacgtcagcctcgataaggcccgccgtctgctgtggccggtgaaacagaaatatggccagaaaatctcctgggccgacctttacatgctggcgggtaacgtcgctctggaaaacgccggcttccgcacctttggctttggcgccggtcgcgaagacgtctgggaaccggatctcgacgtcgactggggcgatgagaaagagtggctggcccaccgtcatccggaaagcctggcgaaacaggccatcggcgccaccgaaatgggtctgatttatgtcaacccggaaggtccgaacgccagcggcgagccgctgtccgccgcggcggccattcgcgccaccttcggcaatatggcgatggacgatgaagagatcgtcgcgctgatcgccggcggccatacgctgggcaaaacccacggcgccgcagaaaccagccacgtcggcgccgagccggaagccgcgccgctggaagcgcagggtctgggctggcactccagctacggcagcggcgcaggcgcggacgccatcacctccggtctggaagtggtctggacgcagacgcccacccagtggagcaactactttttcgaaaaccttttcaaatacgaatgggtgcagacccgcagcccggctggcgcgatccagttcgaagccaaagacgcgccggagattatcccggatccgtttaacccggagaaaaagcgcaaaccgaccatgctggtcaccgacctgaccctgcgcttcgacccggagtttgaaaaaatctcccgccgcttcctcaacgatccgcaggcctttaacgaggcgttcgcccgggcgtggttcaagctgacccaccgtgatatggggccaaaatcccgttacctcgggccggaagtgccgaaagaagatctgatttggcaggatccgctgccggcagcgacccatcagccgagcgcggaagatatcgccagcctgaaaaccgccatcgccggcgccggcctgtcggtcagtgagctggtctcggtcgcctgggcgtccgcctccaccttccgcggcggcgataaacgcggcggcgctaacggcgcgcgtctggcgctggccccgcagaaagactggccggttaacgccatcgccagccgggtgctgccgaccctgcaggcgatccagcgcgcctccggcaaagcgtcgctggccgatattatcgtgctggccggcgtggtcggcgttgagcaggcggccgctgccgccggcgtcagcgtcaatgtgccgtttaccccaggccgcgtcgacgctctgcctgagcagaccgacgtcgagtcgtttgatctgctgcagccgctggcggatggcttccgcaactatcgccgtatcgaaggcggtgtctcgacggaaaccctgctgatcgataaagcgcagcagctgacgctaaccgccccggaaatgaccgtgctggtcggtggcttgcgcgtactgggcgcgaactacgacggcagcaaacacggggtgtttaccgaccgcgtcggcgtgctcagcaatgacttcttcgttaatctgcttgatatggctaccgtctggaaagcggccgatgataacgcggagctgtttaccggcagcgaccgtaaaaccggcgaagcgaagtacagcgccacccgcgtggacctggtgtttggctccaactcggtactgcgcgccctggcggaagtgtacgcctgcgccgacggtcagcagaagctggtgcatgacttcgttgccgcctggaccaaggtgatgaacctcgaccgcttcgatctgtaa

SEQ ID NO: 217456 - DNA, 681 bp, Klebsiella pneumoniae
atggtatttccttatatgacacatttactcgcggcaatgttgttgggggcgctgatcggcgcggaacgacagtggcggcaacgtatggccggtttacgcaccaatgccctggtggccaccggcgcggcggtgtttattctcagcgcgatgtcggcctcgccggacagcccggggcgtattgcagcgcagatcgtctccggtatcggcttccttggggcaggggtgattatgcgtgatggcatgaacgtccgcggcctcaataccgccgccacgctgtggtgttcggccgggatcggcgtactctgcggcctgggacagttctggaacgcgacggcggctacgctgattattctgtgcgccaatatcctgctgcgcgaggcggcgcagcgcattcatgccttgccgggggccggtgacgaagagaaacgctatgtcttacgcgtcacctgtctgcgcgaacatgaaaatgccgtgcgtcagctgttgctgaatattgcgcagcagcagcggtttaccctgcagggattgcagtcggcggcggcggacacagcggaccatctggagatttgcgcgcagctgattagtcataagcagcaccaaaaaacgctggcgcaaattatggcgcaaatgggcgttcagcagaacgtcacatcggtgcactggcgtgtcggagaggcgtag

SEQ ID NO: 217457 - DNA, 1407 bp, Klebsiella pneumoniae
atgtctaccacccaggttctcggcgaaacgccctatgcttcgccaggacaaccgcacgccagcttaaccggacgcattgatgcgctgcccgcctcatttgggttatggtcgtttattaccctgctctcacttggcggcttctttgagctctacgatctcttccagaccgggtatatcagcgcgggcctgctggcggagggcattttccacaccggacaggcgggcatcttcggcatcgccgaccaggcggccttcgcctccgccacctttatggggctgtttatcggcgccagtctgctggcgccgctggcggacaaactgggccgccgcctgacctttatggtggcgctcgcctggtacggtcttttttcgctgctgatggcgacgcagagtagcgcggaaggggtgatcttcttccgctttctggtggggatcggcctcggcattgagctggtgaccattgatacctatctcagcgaatgggtgccaacccatctgcgcaataaagcctttgcctttgccttcttcatccagttcctctcggttccggcggtggcgctgatgtcctggatgctggtgccgaccaccctgttcggcctcagcggctggcgctgggtgatcatctttggcgcactgttctcgctggcgatctggtttatccgcaaaaagctaccggagtcagcccgctggctggaaagcaaagggcggcatgatgacgcgcatacggtgatgtgtgagatggaagcccgctgcggcctgacgccgtcgccgaagcatgcgcatgcggcacagagcgtcgtcaaacgcggcaccttccgcgaaatctgggcgccgcagtatcggcagcgcaccctgatgctgatggtgatgaacttcttccaggcgatcggtttcttcggctttggcaactggctgccggcgctgctctccggtcagggcgccagcatcacccatagcctgctgtacgccttctttatcaccctcgcctatccgctgggctgtctgttctgcacccgcttcgtgcatcgttttgaaaacaagtggcagattgtcctctccgcgctgatgaccgttatcttcggcaccctgttcgctctgcaaaacaacccgattctgctggtgatctgcgggtttatgatcacctggtccaacgcctggctgaccatcagctaccacgcctaccaggccgaggtcttcccgacccatattcgcgcccgcgccgtcggcttctgctactcgttcagccggctctcgaccgcggtgaccagcattctgatcggcattattctgcaatacgccggcacgccgggagtaattagctttatcgtcgtcagtatgctgatggtgatgatgtcggtggggatcttcggcccgagaacgcggggcattcgtctggagaatatctga

SEQ ID NO: 217458 - DNA, 315 bp, Klebsiella pneumoniae; identical to SEQ ID NO: 216788

SEQ ID NO: 217459 - DNA, 153 bp, Klebsiella pneumoniae
atgcaattacgtaaactggccacggcaatgctggtaatgggaatgaccgctggtctggcgcaggcggaagatgctgccccggcggctggccagaacaccctggataagatcgccaaaaacggggttatcgttgtcggccatcgtgaatcttag

SEQ ID NO: 217460 - DNA, 1023 bp, Klebsiella pneumoniae
atgccatcgttctccactcaccttacccgcctgctgcaggggctgtttacgctgctgctcacgctgttcgggctgttgctggtcaccttctcgctctccgcgctgtcgcccgtcgaccgcgtactgcagatcgtcggcgaccatgccagccagtcgacctatgaccaggttagccatcagctgggtctcgaccagccgctgccggtgcagttctggcactacctggtcaacctggcccatggcgatcttggcatcgccagcgccaccggccagccggtgctccacgatctgctggcggtcttcccggcgacccttgagctggcgaccctggcgctgatcgtcggcgcggtactgggcatcgtcgccggggtgctgtgcgcgcgttacgccggttcgccgtgggatctggcggttcgcacctttaccctgttgggcaactcggtgccgatattctggctcggcctgctgatgctggccctgttctacgcccggctgcagtgggcgccgggcccgggtcgcctcgacgatatttatcagtacaccgtcgagccacgcagcggttttgcgctgatcgacacctggctctccggcgataccgcggcgtttaaaaatgcgatcggccatctggcgctgccggtgctggtgctggcctattactcgctggcgagcatcacccgcctgacccgctccgcctgtctgagcgagatgaacaaagagtacattctgctggcgcgggccaaaggggccggagagatgacgattctgctgcgccacgtcctgcccaatatccgcggcactctgctgacggtgaccgctctcgcctggacctccatgctcgaaggggcggtgctcaccgaaaccgtcttctcgtggccggggatcggccgctacctcaccacggcgctgttcgctggggataccacggcgatcatgggcggtacgctgctgatcggcgtgagttttgtgctgatcaataacctgaccgacctgctggtacggttaaccgatccgagggtgcgctga

SEQ ID NO: 217461 - DNA, 1194 bp, Klebsiella pneumoniae
atggcgcgcattacacgcccacttactaacaacgaaatacttaaagctaaaccacgtgaaaaagacttcaccttacatgatggtgatggcctgttcttgctcgtcaaaactactggtaaaaagctctggcgcttccgctatcaacgtccgaactgtggcagcagaactaatctcagcctcggctcatatccggcccttacgctggcaacagctcgtcagatacgcgaccagcatttaaccacactcgcacaaggcatggatccacagcagcaacaagagctagcgtcagaacaacatcagattgagctggatagcattttctcaacagtagccgcaaactggttccagattaaaagcaaaagcgtcacagaagattatgcaaaagacatttggcgctctttagataaagacgtgttccccactataggttcgatacctgttcaggagataaaggccagaacgattgttgaagcactagagccaattaaagcgcgtggtgcacttgagactgttcgtcgtttggtacagcgtattaacgagataatgatttatgcggttaacaccggtctgatagatgtaaatccggcatcaggtgttggtatggcctttgagaaacccaaaaagcaaaacatgccgacgctgcggccagaagagttgccgaggctaatgcgttctctggtgatgtcgaatctctctgttgcgactcgctgtctcattgaatggcaactccttacgcttgtgcgcccttctgaggcctcaggtgctcgttgggcagagatcgatctcgatgccaagctctggactattccagccgaacggatgaaggccaggcgagagcacatcgttcctctatctcaacaagcattagatattctggaactgatgaagccaatcagtgctcagcgtgaacatgttttcccaagtagaaatgatccaaagcaggcgatgaacagccaaacggctaatgccgctttgaaacgtatcggctatggtggaaaacttgttgctcatgggctgcgctctatcgcaagcacagcaatgaatgaagctggtttcaacccggatatcattgaagcagctttagctcatagtgataaaaatgaagttcggagagcatataatcgttcaacatatttagtacaaagacaagaaataatgacatggtggggtggattggtaaaagataaacattaa

SEQ ID NO: 217462 - DNA, 3105 bp, Klebsiella pneumoniae
atgagcctaccgcagacacttatagataaaataaaaagaggaagagttgttctatttctaggttccggtgctttaattggcgcgaaactaaaaaaatatgatgtgcctaaagggaatgatttaggaatatatatatctgatagattccttaacggtgattataaatatgaatctttgactcaaattgctgatttggcaatatcagagcatggaataatagatgtgcaagagtttattagggagatatttgaggaccttgaagttaacgattttcataaaataattcccgatttccaatggaaagctattttttcaactaattatgataggatgatagagttttgttacgaaactaaaaagacaaatcaaactctttctatacatttatctaataatgatggctttaatgagggtgagaagacaactgatatacttaattttataaaattgcatgggtgcataaccagaaccagagacccagagttgccactcattttgactgttgaacaattcaatgattacgaaaaaaatagaaatttattgtttaaatacttatatgagttggctatagaatatagcattgtatttgttgggcatagtttacaggatgcaaatataagacatataatatcaatggttaataataatgtaccccaaggacaaaggcattatttattgaagccaggtataaaagatcccgaaattaatttatgggcttcaaaaaaaataaatgctttaaattttacctttgaggcctttttgagagaggttaatgatgtaataccttggtctgaaagattcaactatcttattacgccagttcagaataatgctatacaaaaaatatttgtaactactgcacctccatccgaagagcttaatagaattctaacagatagcatacaatatgtgcattctgatatgaatactgaacaattcaacccaaaggaattttataaaggttctgatttgggatggtatgcacaaagtgcagaattagctattaaaagatctttattagaccgtttcttagaggaagtaatactaaaacctgaaactgaaagaagtgataccgccgagttgattttgctcaaaggtgaagcagggtcaggaaaaacagtttttctccggcaagttgcttgggaaatgagggttatggattttggatgcccactttgggttaataatggagataatttaactgttgaaatcatcaaagaggtaatagaaaaaaccaatgaaagagtttttctttattgggatgatgcatcattacacgtaaacaagatcgctgcgtttatgaataacgcaataaaagccgagttgaaaataacgataataacagctgaaagatataacgaatggagtcaacgttgcgactcacttaaagagttaataacagaagtatattctttgcataatcttagtgagtctgaagtgacaaacttagtcgagaaactagagtttcatgattgcttaggccctaacctcataaataaaaataaagctgagcgtatacaggagtttattgttaattcagagcggcaattattagttgctttgcacgaagcaactatgggggaaccatttgaagatattatcttcagtgaatacgagtctatctatcctatacaggcaagaacaatctaccgaacaatttgcacattgaataggctacgagttcctgttagagcaggcctaattgctagaattttcggcatcaatttcactgagttcaaacagcagttttttactccattggagaaaatagtattgtgggattcagaggggaatgatgattatcattatagagctcgtcactcggaaatagcggaaatagtattcaatcgtgcatttagcaatacattagaaaaatataatgaatatactcaaatattggataagataaatattgcatttgaatctgataggatttcttttagacaatttatgcgagcaaaatctcttaatgagatttttcccgattatcaagatgtaattagcatttatcaacaggctctcaaaaccataggggaagatccctatttgttacagcaaatggcaaactttgagaggataaggccaaatggaaatttaactcttgcgatagaattacttgagaatgcgaaggaaaaggctccttatgacagcagtataattcacaccatggcaacagtatggcgagataaagccaataatagtaatgaagcctatgataggataaagtttcgtggagaggctcgccatttattacaggaagcacaaagacgatggggagggagttcgtacatctcaacaactcttcttgagctttctatcgataattttgaagataatattaaggatgataatgtttctgggaaaattatagatgatctaatccgtaggattgaagaagaaattaccattagcaagcaaacatatccggatgaagcaatgctctcaaacctggaagcaagatttgccggaattatgagtgatgatggaagaatactaagttcattacttgctgctttcagtgataactctagggatccctttatagcgataagactttcgaaaatatatattgataaaggtgactttaatgaagcttctaaggttttgacgcaggctttagaaagaagacgaaacgaccatcggttgaattatcagtatgcggaattgctaagattaatggacccctctaaaagagctcctttgatttactattatagaagggcatttactccgagcgataaaaactttcatgctcaattttggttcgctcggtttgcatatgagtcaagtgatcctaaagaacttgcattatctgctgatattttcgagtatcttcggacttccagagtgtcaaaagatgaccggttcaaaattagagattatatcggtggtgaaatcaacccaacaatatttagggggagtttgaaaagaatcaacagcggatttgggttcgtaacggtcgatggaagtggaaaagatattttttttccacgatctgaggttcaacatgacctttgggaagcattgaaggtaggtgataggctgaagtttaatatcggtttcaattatgctggtgcggttgcatgtaatatcgtcccatcatag

SEQ ID NO: 217463 - DNA, 246 bp, Klebsiella pneumoniae
atgatgcactgtccgttctgcaaaaagtcggcgcatgcccgcacctcccgctatctgtcggagaacgtcaaacaacgctatcaccagtgcaccaacattgagtgctcggcgacgttccgcaccactgaagccatcgacgaggttatccggcccccggcggagaaaacgccacctgtcgcggagccggtcacacctccggcaccccgtaaagtacagggctgctacagctcgccataccgtcattaa

SEQ ID NO: 217464 - DNA, 195 bp, Klebsiella pneumoniae
atggctacgaccctcactccgtcacacccgcagtttgtctttgtgtttgccgctgtccgtcgcgcagaccgtcagccccgtatctgtatgctccgcaccgttgccggtgacgagcacgccgcacgcctttccctcgttcgcgattacgtcctctcgtttgccggtcgtctgccggtggcggaggtgcgcgcatga

SEQ ID NO: 217465 - DNA, 321 bp, Klebsiella pneumoniae
atgaaaacgcctctgccgcccgtattgcgtgccgccctgtatcgccgcgccgtggcctgtgcctggctgaccctgtgcgaacgccagcaccgctatcctcacctcacccttgacgcgctagaaagtgccatagctgccgagctggaggggttctacctgcgccagcacggcgaggaaaaaggccgtctgattgcctgtgcattactggaagatttgatgcaggccgggccgctgaaagccgccccgtcgctttcctttctcgggctcgccgtgatggatgagctctgcgcccgccatatcacatcgcctgtactgcactga

SEQ ID NO: 217466 - DNA, 2343 bp, Klebsiella pneumoniae
atgaaaatgaacgtaacggacacggtaaaacaggcgtgcggccactggccgcgcattcttccggcgctgggaatgaaagtgataaaaaaccgccatcaggcctgcccgatttgtggcggtgatgcccgtagcgaccgctttcgctttgatgaccaggaagggcgcggcacatggtactgcaaccggtgcggcgccggtgacggcctgaaactggttgagaaggtgttcggcatatcggcacctgaggccgcccggaaggtgaacgccgtcaccggccacctgccgccggtagccccggaggtgattgcagccgcagacgccggaacggaggccgaccgtaaagcagcggccgcgctggccgtcagactgctggagaaaacgcgcccggccaccggcaacgcctacctgacccgcaagggctttgccggtcgtgagtgtctgacgctgaccacaccgcacaaaaccgggggcgtggcctaccgcgccggtgatgtggtggtgccgttgtatgacgggaccggcgcgctggttaacctccagttcattaacgctgaggggctcaagcgcaccctgaagggcgggcaggtcaaaggggcatgccacaccttcgaagggcagaaacaggcgggaaaacgcctgtggatagcggagggctatgcgacggcccttaccgtgcatcacctgaccggagaaaccgtcatggtggcgctgtcgtccgtgaacctcctttctctggcgagcctggcccgtcagaaacacccggcctgtcagattatcctcgccgctgaccgtgacctgaacggcaccggccagaacaaagccaccgcagccgctcaggcctgtgagggcattgtcgccctgccgccggtatttggtgactggaatgatgcgatgatgctgaacggggaagacgccacgcgtaaagccatttatgacgccatccgcccagcggcccaaagcccgttcgacactatgagcgaggcggaatttaccgccatgggcgccagcgataaggcgatgcgggtgcatgagcattacggcgaagcgctggccgtcgatgcgaacggccagctcctgtcccgctatgaaaacggcatctggaaggtgataacgccgtctgattttgcccgcgatgtggccggactgtttcagcgcctgcgcgccccgttctcgtcggggagaattgcctcggtggtggagaccctgaaactgattattccgcagcaggaggcaccggcacgccgtctgattggttttcgcaacggggtgctcgataccagctcaggtatattcagcccgcacagcaaatcgcactggctgcgcacgttgtgcgatgtggatttcaccccgccggtggaaggggaaacgctggaaacccacgcgccgaacttctggcgctggctcgaccgggcggccagtggcaacccgacaaaacgtaatgtaattctggctgcgctgtttatggtgctggcgaaccgctacgactggcagctctttctcgaagttaccggccccggcggcagcgggaaaagtattctcgccgaaatcgccacgatgctggccggagaggataacgccacgtcggccgatatcgacacgctggaagacccccgtaagcgtgcctccctgattggcttctcgctcattcgtctgcctgaccaggagaaatggagcggtgacggtgcggggctcaaggccatcaccggcggcgatgcggtctccgttgacccgaaataccagaatccgtactcgacgcatattccggcggtgattctggcggtcaacaataacccgatgcgcttcaccgaccgcagcggcggcgtgtcacgtcgccgggtaatcatccacttcccggagcagatagccccggaggagcgcgacccgcagctcagggataaaatcgcccgcgagctggccgtgattgtgcgccagttaatgcagcagttcagcgacccgatgagcgcccgcgctctgctccagtcgcagcagaactccgacgaggcgctcagtattaaacgcgacgctgacccgacgtttgatttttgcggctatctggaaatgttgccgcagacaaacgggatgtttattggcaatgccagtatcatcccgcgtaattaccgtaaatatctctatcacgcgtatctggcctatatggaggccaacggctacaggaacgtgctcagcctgaaaatgttcgggctggggctgcccatgatgctgaaagagtacgggatgaactatgagaagcggcatacaaagcaggggatacaaaccaacctgtcgctgaaagaagaaagctacggcgactggctgccgaagtgcgatgaacccaccgcgacttaa

SEQ ID NO: 217467 - DNA, 729 bp, Klebsiella pneumoniae
atggcaactgagcaacacctgcgccagcagctggccgccgcctaccggctggcggcgctgttcggctgggaggataccctctacactcacttctccgtgcgcctgcccggcgacggcgagccgcgttttttaattaatcccttcggcatgatgtttgacgaagtcaccgccagcaacctgatcgtagtggatatgcagggcaaggtcgtagcgggcgacgcgccggctaactcggcgggctttaccatccatagcgcggtgcatatggcccgggaagacgcccactgcgtgatccacacccatacgctgccggggatggcggtggccgcctgcgaggatggcctgctgcagctcaaccagatcagcaccgagttttaccagcgcgtcggctaccatccctatgaaggggtggcctttgacctcgacgaacgggcgcgcatccagcgctcgctggggaataatatcgccatgatcctgcagagccacggcctgctgtcggtgggccgcaccgtggctgacgcgttttacatcatgtactacctgaaccgcgcctgcgagatccagatggccgccgcccagctggcggccctcagcccgatccacaccatcgctccgcacctcagccagcacgcctgcgagcagctgatgggcgtggagcatgaacgtcaacaggtctggcaggcgtggctgcgccgtcttgaccgtctcgatacctcttacaaagactaa

SEQ ID NO: 217468 - DNA, 621 bp, Klebsiella pneumoniae
atgtctctgttacgaagcttgcttttctttttcggcgcggcggtcgcggccgccctcgcggtactctgcctgtgggtggatattcgggtgtttggcaacgacatcccggaggtgtcgctcaccgaagtggtccaggagagcgtgctggccgctatcgtgctggttcatctgctgctggcgcggaaatatgcccacttgcgctatagcaatatcctcatcggcggcttctttctcgccatgctgatccgtgagctggatggcctgtttgatttactctcccacggcagctgggtgtggtttgccctgctggccaccgcggggtcgctgctgttgccgttgcgccatctgcgtcagaccctgtcgcagctggcggagtatacccgcaccccgtattacgggatgatgattagcggcctgctggcgattctggtcttctcgcggctgtttggcatgcacggcctgtggtacgccgtgctggaagagaactacgcccgggtggtaaaaaatacggtcgaggaaggcagcgagtcgtttggctatatgctgtgcctgaccgccaccctcggctacgcctgctactttcgcggtctggcgcgacaggcactgtcgccgcagcgctaa

SEQ ID NO: 217469 - DNA, 552 bp, Klebsiella pneumoniae
atgaaaataatcacgctgtgtctggcgacggtctttgccggactggccgccgactctgcactcgcggcagagggcaagctgaatttcatcggcaaggtcgtgaacgcctcctgcaagctcgaaggggtgagcgacagcggggtcatcggcgtcagtatgggcgctattccgctgtcgagactgaaaaacagtcagtctgggaccgggccggcggtcggcatcgacattcgcgttaaagattgtgagaaaggcacttactatattgtggttgacggcccctcgcctgccggcacgcctgaaaaccgcgtgctggcgctcgacggcagcggcaagccggccagcaacgtaggtattctgctcacggaccgcacgggcaccccactcagcctcgatgaacgccttgatccgcaacacgatcctcgcatagagatctcggtggacggcggctccggaaccttcaggctgaacgccttctattacacctgggacaaagcccacgccgatcccggcgacggcaatgcgacggcccgatttaccattatgcaggaatag

SEQ ID NO: 217470 - DNA, 771 bp, Klebsiella pneumoniae
atgaaaacacagctggcggttctgctctgcgcagtgacctttcaggcctgcgccgggatcaccattaatgccacgcgggtggtctattccgggaaagaaaaggtcgccagcctgaacattcacaatcgcagcagcacgccttataaagtgcagatctggctggacgccggactcaatacctcgcgcattggcctgccgatactggcgacgccgccgcaggtctatttatcgccgcaacaatccgcccagctgcgctttatctatctcggcggcgggctgcccggcgatcgggaaagcgtgtactgggtcaatatccaggagacgcctcccgcagccgtcggcacgcatacgctgcaatttgtcgtccgtacccgcctaaagctcttttatcgtccgcccgccataaccaccaccctcgccagagaggtgcaaaagctgcagtggcagcagagcgggaataacctgcgctttaccaacttaggcccactgcatatcaccctggtcaacggggcgctgatcgataataaaggccacctctcgccgataagaaacgtgatgctccggccatacagcagccataccgtgatgaccaccgacagcactcgcctgtaccagttgaactatatcgacgactacggcgcggtggtgcccatccccctgcagaatgcccatgtgccgccccaggctagttatactccagggcgaaagtcaccatgctgttggccgtaccggctcccaccgtggcgtcagtctgcacatactgggcgttga

SEQ ID NO: 217471 - DNA, 1095 bp, Klebsiella pneumoniae
atgaaatctgtttttcgtctacttcctttcctctttctgctggggctgagcgcctatcttcccggcgtgcgggctgaaacctgccgcgcaaatatcggccagaccacggtcaatattcctaatatcaagtatttacccacgctgccggtcaatacccagatgaccagcgcgatggcggataacggcagcgggatccctttttcctgcgacctgcagctgccgacggcgagcgccaaacgcatcgtctataagcagctgaaaaccggcggctcgccgatggtgattaacggacagcatgtctaccccagcgctatcgacggcattggttacgccctcagcttccagtgcgccggcggcccgatgcgtgccgtcgatggcagccactccgccggcggcgagtcggtggtgatatgcgacagtgcgacgctcccggcgctgatgacgcagcagcaaaccacggtgaggattgcggtaaccttctataaaaccggaacggtgcaactggcggacgggacgcataccaactcgccgccgctgccgcaggtgggggagatgaccattgaacagcagaccagcgcaagcgccagctttgtcgccagcgcgccggtcagcatcgatatcgccgccctgaatgtggacattggcagcagcggcagctgccaggtagcgacatcgacgatccaggtcagtctgggtacggttaaccggggggagtttcatggcaaagggactaccggcggccaggcgaagcgcttttcgattccggtcttctgtccgacgccgaccgacgtgcgcatcggctttttcggcgtcagcgtggagagcgataccctggccctgagccaggccagcaacagcgccagcggcgtcggcgtgaagctgacctacggcaataaccccggtgcggcagtgcccgacggcaccagcgttaagatcaatgaggccagcaacttgccgatcctgaaaagggtgaccggcgccagcgccggtaccgccgaggcgatcaatttcaacgcccagtatgtgcagactgacgccacggtgggagccggtacggccaacagcatggtgactttcgccctggagtataactag

SEQ ID NO: 217472 - DNA, 471 bp, Klebsiella pneumoniae
gtggtcgcgcatccgcacggcgtcaccttcggccagacggtgggtgagagcttcgccatcgtccgggcgccgggggccgccggcgtggtggtgcaaaacggcaacaatgtgcacaccgactggcgcggctatgccgtggtgccctctctgaccgcctaccggaaaaatgtcattaccctcgatacggagtcgatggccgacgacaccgacgtcgaccagcaggggcagaccgtgatccccggcggcggcgcggtggtgatggccaactaccagacccacattggcaaccgggtgctgtttaccctgcgcaatgcccaggggccgctaccgtttggcgccagtgcgcggctggtcaaggaggaggagagcggcaatccgccgggcggtatggtggccgacggcggccaggtgtatctcagcggcgtgccgcaggagggaaccctggcggtgagttggatcgtcaacaattag

SEQ ID NO: 217473 - DNA, 1155 bp, Klebsiella pneumoniae; identical to SEQ ID NO: 189589

SEQ ID NO: 217474 - DNA, 1875 bp, Klebsiella pneumoniae; identical to SEQ ID NO: 129498

SEQ ID NO: 217475 - DNA, 192 bp, Klebsiella pneumoniae
atgattaataataaaaaaatactatatctgttggcttttatgttcctgttatcattcatatacacttttttcgttaatgaactattagctaacagcaatagtcttggtgaaacatttataattttactacctatatattatattattgtattcccttttgttttctttcctgtaaaaaagtgtagcaactga

SEQ ID NO: 217476 - DNA, 2727 bp, Klebsiella pneumoniae
atggctacgattcatgtagacggcaaagaatacgaggtcaacggggcggacaacctgctagaggcttgtctctctcttggtcttgatattccctacttttgctggcacccggcgctagggagcgtcggtgcttgccgccagtgtgcggtgaagcaatatcagaacgcggaagacacgcgtggtcgcctggtgatgtcctgtatgactccggcatccgacggcacctttatttctatcgacgacagcgaagcgaagcagttccgcgaaagcgtggtggagtggttgatgactaaccacccgcacgactgcccggtctgcgaagagggcggcaactgccacctgcaggatatgacggtgatgaccggtcatagcttccgccgctatcgtttcaccaagcgtacccaccgcaatcaggatctggggccgtttatttcgcacgaaatgaaccgctgcatcgcctgctaccgctgcgtgcgctactacaaagattatgccgacggcaccgatctgggcgtctatggcgcgcacgacaacgtctacttcggccgcccggaagatggcaccctggagagcgagttctccggcaacctggtggaagtctgcccaaccggcgtcttcaccgacaaaacccactccgagcgctataaccgtaagtgggacatgcagtttgcgccgagcatctgccagcagtgttccatcggctgtaacatcagcccgggcgaacgctatggcgagttgcgtcgtatcgaaaaccgctataacggtaccgtgaaccgctacttcctctgcgaccgcggtcgtttcggctatggctacgtgaacctgaaagaccgtccgcgtcagccggtacagcgccgcggcgacgatctgatcacccttaacgccgagcaggcgatgcagggggcggcggatatcctgcgccagtcgaagaaagtgatcggcatcggttccccgcgcgccagcattgaaagcaacttcgcgctgcgcgagctggtgggcgccgacaacttctataccggcatcgccaaaggcgaacaagcgcgcctgcagatgatgctgaaagtgctgcgcgagggcgggatccacacgccaagcctgcgcgatatcgaatcctacgatgcggtactggtgctgggcgaagacattacccagaccggcgcgcgcgtggccctggcggtacgccaggcagtgaaagggaaagcacgcgaaatggcggcggcgcagaaagtggccgactggcagatcgccgcgatcctcaacatcggccagcgcgccaagcacccgctattcgtcaccaacgtcgatgacacccgcctggatgacatcgcggcgtggacctaccgcgcgccggtagaagatcaggcgcgtctcggctttgctattgcccatgcgctggacgacagcgcgccggcggttgacggcctgagccaggacctgcagggtaaagtcgacgttatcgttcaggcgctggccggggcgaaaaaaccgctgatcatctccgggaccaacgccggcagcatggagatcatccaggccgccgctaacgtggcgaaagctctgaaaggccgcggcgccgatgtcggggtgaccatggtcgcccgggcggttaacagcgtcggactgggcatgatcggcggcggctcgcttgaagaggcgctggacgaactggaaagcggcgccgcagacgcggttatcgtgctggaaaacgaccttcaccgtcatgcttccgccgcgcgcgttgacgctgcgctggcgaaagcgccgctggtgatggtggtggatcatcagcgcaccgcgattatggacaaagcgcacctggtgctctccgcggcaagctttgcggaaagcgacggtaccgtggtgaacaacgaaggccgcgcccaacgtttcttccaggtttacgatccggcttactacgacgcgaaaaccgtaatgctggaaagctggcgctggctgcattcgctgcacagcaccgtcaacaaccgtcaggttgactggactcagctggaccacgtcattgatgcggcgattgcggcgctgccgcagctggcgggcattaaagacgccgcgccggatgcgaccttccgcatccgcggccagaagctggcgcgtgaaccgcaccgctacagcggccgcacggcgatgcgcgctaacatcagcgtgcacgagccgcgtcagccgcaggataaagacacgatgttcgccttctccatggaagggaacaaccagccgtccgccccgcgttcgcagatcccgttcgcctgggcgccgggctggaactccccgcaggcatggaacaagttccaggatgaagtgggcgggaaactgcgccacggcgatccgggcgttcgtctgtttgaagcgtccaccagcggactggagtacttcacggcggtgccggccagcttccaggcggaagagggcaaatggcgaattgcgccgtactaccatctgttcggcagcgatgagctgtctcagcgcgcgccggtgttccagagccggatgcctgagccgtacatcaagctgaacccggcggatgccgcgaagcttggcgtcaacccaggcgcaatgctctcctttagcgtggaaggccagaccctgcgtctgccgctggttatctctgaaggcctgaccgcgggacaggttggcttaccgatgggcatgccgggcattgcgccggtgctgaccggatcgcgtattgattcactgcaggaggcgaaagcatga

SEQ ID NO: 217477 - DNA, 1809 bp, Klebsiella pneumoniae
atggtgaacaatatgaccgatttaaccgcgcatgacgccgcaccagcctggcaaacccgcgatcaccttgatgacccggtgattggcgaactgcgcaaccgctttgggccggatgcctttaccgttcagccaacccgtaccggcgtaccggtggtatgggtgaagcgtgaacagctgctggaggtgggtgatttcctgaagaaattgccgaagccttacgtgatgctgtttgacctgcacggcatggacgaacgtctgcgcacgcaccgcgatggcctgcccgccgcggatttctccgttttctatcacctgatctccatcgatcgcaaccgcgacatcatgctcaaagtggcgctgtcggaaaacgatctgcatctgccgaccttcaccaaactgttccccaacgccaactggtatgagcgtgaaacctgggaaatgtttggcattaccttcgatggtcacccgaacctgcgtcgcatcatgatgccgccgacctgggaaggtcacccgctgcgtaaagattatccagcgcgcgccaccgagttcgacccgtttgagctgaccaaagccaaacaggatctggagatggaggcgctgacctttaaaccggaagagtggggcatgaagcgcggcaccgacaacgaggacttcatgttcctcaacctcggtccgaaccacccatcggcgcatggtgcgttccgcattattctgcaactggacggcgaagagatcgtcgactgcgtaccggatatcggttatcaccaccgcggcgccgagaagatgggcgagcgtcagtcctggcacagctacatcccgtataccgaccgtattgaatatctcggcggctgcgtcaacgagatgccgtacgtgctggcggtggaaaaactggctgggatcaccgtaccggatcgcgtgaacgtgatccgcgtgatgctctccgagctgttccgcatcaacagccacctgctgtatatctcgacctttattcaggacgtcggcgcgatgacgccggtcttcttcgcctttaccgatcggcagaaaatttacgatctggtggaagcgattaccgggttccgtatgcacccggcgtggttccgcatcggcggcgtcgcgcacgatctgccgcgtggctgggatcgcctgctgcgtgagttcctcgagtggatgccgaagcgtctggactcctatgagaaggccgccctgcgcaacaccattctgaaaggccgttccgtcggcgtggcagcctataccgccaaagaggcgctggagtggggcaccaccggcgcaggcctgcgcgccaccggtatcgacttcgacgtgcgtaaatggcgtccttactctggctatgaaaacttcgacttcgaagtcccgaccggggggggcgtctcagactgctacacccgcgtgatgctgaaagtagaagagctgcgccagagtctgcgcattcttcagcagtgcctcgataacatgccggaaggcccgttcaaagcggatcacccgctgaccacgccgccgccgaaagagcgcacgctgcagcatatcgaaaccctgatcacccacttcctgcaggtatcgtggggcccggtgatgccggccaacgaatctttccagatgattgaggcgaccaaagggatcaacagttactacctgaccagcgacggcagcaccatgagctaccgtacccgcgtgcgtacgccgagctttgcgcacctgcagcagatcccgtcggcgatccgcggcagcctggtatccgacctgatcgtctatctgggtagtatcgattttgttatgtcagacgtggaccgctaa

SEQ ID NO: 217478 - DNA, 360 bp, Klebsiella pneumoniae
atgctcgtcggcggctggtaccttggcggtcgcgcgcgcgcgcgtagtaaaaacacgccgtttgaatcggggatcgactccgtcggttcggcccgcttacgtctttctgcgaagttttatctggttgccatgttcttcgttatcttcgacgtggaagccctgtatctctacgcatggtcgacctctatccgcgagagcggctgggtcggctttgtggaagccgcaattttcattttagtgctactggctggtctggtttatctcgttcgcatcggcgcactggactggacgcctgcgcgttcccgtcgcacgctggttaacccggaaacagacagtcccactaaccgtcatatgcagtaa

SEQ ID NO: 217479 - DNA, 1533 bp, Klebsiella pneumoniae
atgcattcatacgaggaccggattcgggccgtcgaactctattaccggtacggaaagaaagtctccgttgtcgtcatggagctgggatatccttccacaaaacagctgggccgttgggttcggatttatgaagagaagggcgatttacccagggaattaaaaccaagagaacgctattcacgtacacagaaaattgctgctgttgagcattatcttactcacggtggttgcctgtcgtacactcgccgagccatcggctaccccagtaacgaaattctaaagcgctggattgaagagttttacccaaatgcgcgtcccctggtcattcgctcaggcacaagcaaatgcttcagcccgcaagagaggtctcaggccgtccgggagctctgtaaccgacgtggaaccgcgcgtaaagttgcacaaagcataggcgtcagcgtcccggtcctgtacaaatggaagaaagaccttatcagtgacgaggcttatcaatccatgcgcaaacgaaaggcagcccctcaggataaaaatcaggatgctttactcggtgaaatccagcatctcaggaagcaggttcatcagctgcagctcgaacgtgacatactgacaaaggcgaatgaactgataaaaaaagatctgggcatcagctttctgaaactgaaaaacagggagaaaaccctgatagttgatgcccttaagaaaaagtaccccgttgctgagttgctaagcgttctgcaacttgcccgcagctgttatttttaccacaaagccagcaaacgtctgtacgataagtatgcggaaatacgcgtgatcatggccgatatctttgaggagaattaccgctgttacggctaccggcgccttcacgcgatgcttcgcagtaacaacagggttatttctgaaaaggttgtccgcagactgatggcagaagagcagctcgttgttaagcgcaccaggcgacgacgatataactcttactgtggcgaaatcggtccggcaccggaaaatttactcgcccgggattttagttcctgcaggccaaatgagaagtggctgaccgatattacggagttccagcttccggctggaaaagtctatctgtcgccggttatcgactgctttgatggccaggttgtaagctggtcgataggaacacgcccggacgcgacgctggtgaatacgatgctcgatgacgcactcgatacgctcaacgaacatgataaaccggtgatacacagcgatcgtggtggccattaccggtggccgggctggctcgagcgtatcaacacctccggacttataaggtccatgtcgcgcaaaggatgctcgtcggataatgctgcgtgtgaaggcttcttcgggcgtatcaaaaacgaaatgttctatggcagagactgggcgggtatcacgctggaaaaatttatctgcttcctggacaggtacatacgctggtataacgagaaacgtatcaagctatcattaggtgcaatgagtcctgtgaagtaccggcagcatcttgggatcacaacataa

SEQ ID NO: 217480 - DNA, 852 bp, Klebsiella pneumoniae
atggctcaatcacccagtattaaacgcgaaaagtggatccggctctctctcacctggctggtggttattctggtctcggtggtgattatctatccgctggtctggacggtcggggcgtcgctgaacgccggcaatagcctgctcagtacctcaatcattccggaaaatgtgtcgttccagcactatgccgatctgttcaatggcaatgtgaattacctcacctggtactggaactcgatgaaaatcagcttcctgaccatggtgctgaccctgattagcgttagctttaccgcttacgccttctcccgcttccgctttaaagggcggcagaacgggctgatgctgttcctgctgctgcagatgatcccgcagttttccgcgctgattgccatctttgtcctgtcgcaactgcttggcctgattaacagccatctggcgctggtgctgatctacgtcgggggaatgatcccgatgaatacctggctgatgaaagggtatctcgacgcgatccctaaagacctggatgagtccgctcgcatggacggcgccagcagctttcgcatctttatcgagatcatcatgccgttgtcgaggcccatcctcgcggtggtggcgctgttctcgttcactgggccgctgggggatttcatcctctccagcaccatcctgcgtaccccggataaatacacgctgcctatcggtctgtataacctggtggcgcaaaaaatgggtgccagctacaccacctacgcggcgggggcggtgctgatcgccgtaccggtggcgatcctctacctggcgctacaaaaatacttcgtctccggcctgacctcgggcagtactaaaggataa

SEQ ID NO: 217481 - DNA, 1233 bp, Klebsiella pneumoniae
atgaaaaagaacacgcttgctgcactgatccttaccaccctggcggcggggcaactcgccagcctgcaggcgcatgccgccgggcagctcaacgtctgggaggacattaaaaaatccgctggcatcaaaaccgcggttagcgattttgaaaagcagtacaacgtgaaggtcaatctccaggagatgccctacgcccagcaactggaaaaactgcgcctcgacggcccggcgggcattgggccggacgtgctggtgatcccgaatgaccagctcggcggcgccgtggtacagggactactctcgccgctcagcgtcgttcaggcgaaacaggatgcctttacgccagcctccatcaatgccttccgcatggacaacgcgctgtatgggatcccgaaggcggtggaaaccctggtgcttatctacaacaaggacctgatcgacaagccgctggacagcctgcaggcctggctggactactcgaaaacccagcgcgagcagaacaaatacggcctgctcgccaagtttgaccagatctattacagctggggggcgattggcccgatgggcggctatatctttgctaaaaacgacagcggcggctttaacccgcagcaggtgggtctcaatacccccggtgccgtcgaagccgtcaccttcctgaaaaaattctatgccgagaaggtctttccggcggggatcctcggcgataatgggctgaatgccatcgattccctgtttaccgagaaaaaagcggcggcggtgatcaacggcccctgggccttccagccgtatgaagccgctggcattaactatggcgtggcgcccctgccgaccctgccggacggcaagccgatgagctccttcctcggcgtcaaaggctatgtagtatcgacctggagtaaagacaaagcgctggcgcaacagtttatcgagttcatcaaccagccgcagtatgtgaaagcccgctatgtcgccactggcgaaattccgccgctgaaggcgatgattgacgatccggtgattaaaaacgaccaaaaggccagcgccgtcgccatccagtcggcgcgagcggtggcgatgccgggcattcccgagatgggggaagtgtgggggccggccaacgccgcgcttgaactgagcctcaccggtaagcaggcgccgcaggccgcgctcgataacgcggtgaaacagatcacgatgcagatcgaagcgatgcaggccagcaatcagtaa

SEQ ID NO: 217482 - DNA, 1131 bp, Klebsiella pneumoniae
atgacggccatgggcagccggcagcacatggtgatgatcgaccccgtctcctttattgatgtcgttcccgccagcgaagagaagatccataccatgctgtttggcctggaccaccagaaaatggtgatcagcagtcagccgctgccggcgaaaatctggcaacgcattaaagatccgcatgtggatatgcttactctggataacacagtctaccggatccagcgcattcccgagctgggctctggcatcgtaacctggtcttcaaccttgccgctgcagcagcgcattcgacagcagctgttcttctggctccctgccggcattttcaccagcctgctcgccaccgggctgctgctgcgtctgctaaggcacctgcgctcaccgcgcaacagcatgctggacgccctcaattccgaagcgattcaggttcactatcagccgattatttcgttgcaggacgggaaaattgccggggcggaggccctggcccgctggcagcagcccgatggcacttttttatcgccggatatctttattcccctggccgagcagaccgggctgattacgcaactgacggaagatatcgtcaggaaaatttttgccgatctcggcccctggctgcggcagcggccggaagtgcacatctccatcaacctgtcggtagatgatttacgctcgcccaccctgccgacgttgttgcacaatcagctacagcactgggggatcgccgccgaacagatcatccttgaaatcaccgagcgcaggtttgtcgacccggagacgactatgccggtgatcgctcactaccgtcaggccgggcatcggatctcgatcgatgactttggcaccggctactccagcctgagctatctgcagaaactggacgtcgacacgctgaaaatcgataaatcttttgtcgataccctcgagtaccggccgctgacgccgcacattattgaaatggccaaagcgctcaatctggccaccgtcgccgaaggggtggaaaccgaaagccagcgcgactggctgcgccagcatggcgttcagtacgcccaggggtggctttacagcaaagcgctgccaaaagagcagttcattctgtgggcagagcataacctccatgcgcattaa

SEQ ID NO: 217483 - DNA, 900 bp, Klebsiella pneumoniae
atgaacgattacacttcccttctgcagcagggcaatgcctggctgtttatacccagcgcaatactgctcggcgcgctgcacggtctcgaacccgggcactcaaaaaccatgatggccgcctttatcgtggcggtgcgaggaaccttaaaacaggcggtactgctggggctggcggccacggtttcgcatacggcggtggtctggctgatcgccatggccggcctgtggtttggccgcggctggaacgcccaaacctctgaaccctggtttcagctggtctcggggattgtcattgtgctgattgcctgctggatgctctggcgcacctggcgcgaatcgcagcctcacacgcaccatgagcaccaccatgaacatgagcaccaccatgaacatgagcaccaccatgaacatgagcaccaccatgaacatgagcaccaccatgaccatgatcaccgccatgaccatgatcaccgccatgaccatcaccatgcgtcctcatccgccgcgccgctggtggcggaggagtggcaggacgcgcatcagcgggctcatgctcaggagatcaaccggcgctttgatggccgccaggtgacgaccgggcagatcgtactgtttggcctgaccggggggctgatcccctgcccggcgtccattaccgtgctgcttatctgtttacagctgaagaaattctcgctgggcgccacgctggtgctgggctttagcgttggtctggcgctgacgctggtggcttccggggccatcgccgccctgagccttaaacatgccacccgccgctggccgtggcttaacgacctctcgcgcaaggcgccctggttctcaggcttactgattattgtggtggggatctacatgatgcttcatggcctgagcggcctgtaa

SEQ ID NO: 217484 - DNA, 1395 bp, Klebsiella pneumoniae
atgaatgaagaaagccaaaaatatatcgccgtgatttttaaggaatggttaccgctgtatgacagcctgacgccggacgtccgtgcattacttaaaaaaatggccgatgagcgatcgtcgatgttagcgacccgcttttacgattttatttttcaggatccggatatcgccagacacctctcttatgagctggttgaggaacgtctgagccgctctctggcgggatgggtacagcagatcctgacctgtgaaaaagaagatcttcaggctcttgcggagcgccagtatcagatcggcagcattcattcgcggattggcatcccggcagaggcggtgctgcgcggcgcgcggcagataaaatccgggctggtggaggcgattcgtgacagccaggtcgcgcgggacaccgggatagcggctatccattacgcgatcatggcgatgaatatggcggtggagatgatgtgtcacgcctatacgctgtcgcattatcgggctaccaaaaatgaagaagcttttcgtctgtacagcctgatggataacgtcccgatggagtatggcaagcagcaggcatcgctttcgggttgggaaaatagtgcgatttttaatatcgtcagcgagaacaggacggaccttaacgcaacgttattatctgaatccgaatttggtttgtggtttcgccataaatgcgttcgctattttaaccacaatccgcagatggcggagattactgagttgatcggtcaggtggatgcgctgattaccgaatggcgtaccgcggaacaggatgctggttataaaaatactcagagcctgctgcaaaagatccatatccattgccagcacatcagcagccagctgggagtgttattcagtagtctgtcgcagatgcaaaacggcaaagacgcactgaccagcctgcttaaccgtcgctatctgcctgtggtgctcaagcatgaagtcaccctggcgattgagtatgacctgccgctgacggtagcgattatcgatattgatttctttaaagagatcaatgacaaatggggccatatggtcggcgaccgcgccattaagcacgtagccgatctgctcagcgataatattcgctccagcgactatctcttccgctacggcggcgaggagtttctgctggtgctggtggagacccgcgcggcagaggctttccctctccttgaacgtctgcgcaaaaagattggccagctggcgtttaacgttggcggcgacacgcagatcccgatcaccgccagcattggctttgccgcccacaccggtcaccccgattacaacctgctgctgcgcgacgccgataacgcgctgtatgccgctaagcgcgaggggcgcaactgcgtgaagatgcacaaaggcgggggataa

SEQ ID NO: 217485 - DNA, 957 bp, Klebsiella pneumoniae; identical to SEQ ID NO: 210294

SEQ ID NO: 217486 - DNA, 1485 bp, Klebsiella pneumoniae
atgaatagtcatgtctttttagtcggctttattatttatgcgttagccatgatttggcttggctggtacgtgtcgcgtcatcaaaaaagcggtgaggattttttactcggtggccgttctttgccgctgttcctgacgctggggtccaccgtggcgaccatggtgggaaccggttcaagcatgggcgctgtcgggttcggctacagcaatggatgggccgggatgctttacggcgtgggcggcgccatcggtattttactggtggcctggctgtttgcgccggtgcgaaagctgcgctttatgaccatgagcgaagagctttcttattacacagggggcagccatttaattaaaaatctcgtcgggataatgatatttattgcctcaattggctggctgggggcacatattcttggcgggagtatgtatttagcctgggcgacaggaattaatctgacggtggcaaaaattattattgccatggcgtttgcgatttacgtcattatcggcggttattctgctgttgtgtggacggacaccattcaggcattaattctgtttttcggttttatcctgatggcgattctggcggtggttcacgtcggggggtgggatgccatcgttcaggcgatggatccaaaggcgatgagcctgtttgcggtcgataagttggggactattccggcgctatcgctggcgatggtcatcggcgtcggcgtgctggcaaccccttcctatcgccagcgtatttactcgggaaaagacgtctcttcggtgcggcgctcgtttgtctataccggtgtgctgtatctgtttttctcggtgctgccggcggttatcggcatggcggcctggacgatgaaccccaatcttgagaacagtaactacgccttcctgttcgccaccagcttcttaccggcgatcctggggctggtggttctgattgccggactttccgccaccatgtcttcggccagctccgatgcgatagccgccgtggccatcatgatgcgggatgtctataccctcgttaccggaaaaatgccgccggcgcataaggcgataacgctctctcgctggatgctggcgttcgttatcggcctggcgatgatcttcgccctgacctcgaacgatatcatcagctatatcaccaaaatgatttccatgctgatgtccgggctcttcgtctgttccattctcggccgcttctggctgcgctttaactggcagggcgcgctaaccgcgctgctgagcggcatgctggtgtctattgtggttctggttaaggccgactggctggcttactggggcaatccgtgcattccgtcggttgttggcagctttgtttccgctatttttgttaccgtcatgacgccagccagcaaaatcagccgtcagcaggcgctggaaatgattacccaggagcgggaaggggaggcgatcccggcgaagacggtagtgcaggtctcaggagaaacacaatga

SEQ ID NO: 217487 - DNA, 600 bp, Klebsiella pneumoniae
atgaacaagattaagctggtggcgattttacgcggtattcagccaggtgaggcggcggagcatatcgccgcgcttatcgaggcgggttttcgctatatcgaaatcccgctcaattcgccggactggcagcaaagtattccggcgatggtgcgtcagtttggcgagcgggcgatgattggcgcgggaacggtgctgaaggttgaacaggttgattttctcgctgaagctggggcgaaacttatcgtgacgcccaatacggccccggcggtgatccgccgcgcggtagataaggggatgctggtgtgcgccggctgcgcgacggcctccgaggcgtttagtgcgctggatgccggggcgcaatggctgaaaatctttccgtcatcagcattcggcgcggactatattcgcgcgctaaaagcggtgttgccgccggaggtgccggtgctggcggtcggcggcgtgacgccggaaaatctggcgacctggatacaggcggggtgcgccggtgccggtctgggcagcgatctttatcgcgccggacaggccgtggaacgtacccgcgagcaggcggagaggtttatctccgccagtaaaagttag

SEQ ID NO: 217488 - DNA, 864 bp, Klebsiella pneumoniae
atgtcctggtcaatcgatattatttcctgcataaccgatcgctttgtggaactcacggcgaccgaaaaacgcatcgcgcagtttattctcgatgatgtcgcggcggcggcggagctgcccatcgccgagatagcgcgtctgacgcaaaccagccaggcttcggtcacccgttttgcccgggcgctcggctgtaaagacgtccgcgagctgaagatgaagcttgcgcaatctcttgcggtcggccagcggtttatcctcgatgttccggatctcgaaggcgtccaggggatctatgagtcaatcatcagcgtactggagaccaaccggcgggcgctggatatcgaggcgctgaagcgcgcggtgagctggctgagcgatgcgcggcagatcctcgccctggggatgggcggcggttcgaccatctgcgctcaggaaattcagtatcgcctgtttcgcctcggtctgccggtagtcagccagagcgatggtctgctggtacgcatgatgagctcggcggtgacgccgcaggatgtggtgatcgtgctttctctgggcggctatacccgggaaatcatcgagagcgcggcgattgccagccagtacggcgcgaaggttattgcgattacccccgccggaacgccgctggctgaacaggcggatctggtgctaccgctgctggtacgggaaaacgactatatctttaagcccagcacttcccgttacgcgatgctggcgatggtcgatgtgctggccaccgaactggcgatggccaacaaaacccaggcaaaaggcaaattacgccgtattaagctggcgctcgacagccaccgcggcggcgtcgatcggcagccgctgggggactaa

SEQ ID NO: 217489 - DNA, 534 bp, Klebsiella pneumoniae
atgaaaactaacactataactgccggtgccgtattacgcctgactcaggagagcgatatcgcccttctgcccgccattgaacgttctgccgcccaggcatttcgccagatcccttctctcgcctggctggcggacagcgaggtgattagcgttgcgcgccatcatgattatctggaaacggagcatagcctgctggcggtagccgccgggcaacccgttggctttattctgaccgaaccgctcgacgatgcgttatttatcgtcgaagtcgccgtccaccaggcctggcagcaacagggcatcggccggatgctgctggagcgggttattgagagcgcacggcagatgggctacccgacggtaaccctcaccaccttccgcgaggtgccgtggaatgcgccgttttatacccgtctgggattcgccatgctcgatgagctgaccctgcccgccggactggcggcaaaaagggaacaggagtcccggcacggcctgccgcccgagtcgcgctgcgccatgcgcctggcgttgtag

SEQ ID NO: 217490 - DNA, 837 bp, Klebsiella pneumoniae
atggagctgaccgccgttcccgccacgcagttcagcagcgtgcagttaacggatattctcaacgcctgttttgaagcctacctggtgcctgttacccagtcggtagagggatttgttcagcgttttagcgccgaggggatgagcctggtcgattcccgcgtctggctggccggagatgaaccggcggcgatcgcgatcgtcgcgcgccgggggagtgccgctcgcctggcggcctttgccctgcgcccggcctggcgcgacaaaggcctgggccggaaactgatgcaggagctgctgatgcttttgcaacagcaggggatcgagacggtattcctggaggtgatccgcgataaccatgcggccgtcgcgctgtatcagtcgctgggctttacgcgacgctatgggctctgcggctacctgagtacagaacttctggccccggtgccgggcgtattacagctttatcccaccctgtccctgcttcgacgcgccattgaggagagtaacagccagcttccctggctgctggatccgctcaccttcgccactctgccatgtcaggtcgtgacgctggaacagcgcgccttcgcggttctaacgacggcgggctcgcgccctgtactgtcgtttttgtgggtggagcccgccggccgccgccaggggctggcgcgtgagctgctgatggcgctggcgcagcagttcccgggcattggtacttcggtgacggtcccggaaacttttacgccgctgtttgccgcggccggctatgccgctttgacactacaacagtatgagatgagcgcaacgatgaatgccctgcggtcggcagggcgttaa

SEQ ID NO: 217491 - DNA, 1362 bp, Klebsiella pneumoniae
gtggaatcacaaaatataaccatagacccgcagaccgactttaaagaggggaaagcggaacccctttcagttcccttagaaaatacgctacaacgtagctctcgtattaaaaagattcaaacaacggcaatgattctgttatttctggcggcggtgattaactacctcgaccgaagttcattgtccgtggcaaacttaacgattcgccaggagttagggctcaacgccactgaaatcggggcgctgttatcggttttttctctagcctatggcattgcgcaactgccctgcggccctctgctggaccgcaaaggtccacgcatcatgctagggctgggtatgtttttctggtcactatttcaggcgctctccgggatggtgcacagctttacccagttcgtcctggtgcgcatcggcatggggatcggcgaagcgccaatgaacccctgcggcgtcaaggtgatcaacgactggtttaatattaaagagcgcggtcgcccaatgggcttcttcaacgccgcctcgacgatcggtgtcgcggtcagcccaccaatccttgccgcaatgatgctgatgatgggctggcgctggatgtttatcactatcggcatactagggatctttatcgctatcggctggtatatgctttatcgcaaccgggaggatctccccctcaccgccgatgaacaggcgtaccttaacgccggaagcgtcaacgttcgccgcgacccgctgagctttgccgaatggcgcagcctgtttaaaaacaaaaccatgtggggaatgatgctcggcttcagcggcatcaattataccgcgtggctgtatctggcctggctgccgggctacctgcaaacagcgtataacctcgatctgaaaagtaccggatttatggccgcaattcctttcctgtttggtgccgccggtatgctgatcaatggctacgtcaccgactggctggtcaaaggcggcatggcaccgatcaaaagccgcaagatctgcatcattgccgggatgttctgctccgcggcgtttacactgatcgtgccgcatgccactacctctttcgcggcggtgttgttaatcggtatggcgttgttctgcattcattttgccggaacgtcctgctggggattgatccacgtcgccgtggcatcaagaatgacggcttccgtcggcagtattcagaatttcgccagctttatctgcgcttcatttgcaccggtggtgaccggatttattgtcgataccacccattccttccagctggcgctggttatatgcggctgtgtgaccgctctcggcgcgctggcctacattttcctggttcggcagccaattagcgatccgcgtaacgactaa

SEQ ID NO: 217492 - DNA, 939 bp, Klebsiella pneumoniae
atgaacaatgaactgtccggaatgaaagcctttgtcactgttgccgaactaggttcatttagcaaagcggcagaagtacttaacctgacgcaacctgcgttgacccgaaagatacagaaaatagaaaataacctaaataccacccttttcgaacggacaacccgtaaaatcaccctcacgcaggcagggcaaatgctccttcctaaggcaaagtcactgattgccagcctcgatgccgccatttttaatctcagcagcctgacttgtaatgtacatgatacggtaacgctttcttgtatcccgacggcggtattttattttttacctcgcgctatcgttcaatttaatcagcgctatccccatatcaaagttcgaatttatgaacaaggtatagaaaattgcatggcctcggtgagaaaaggcgaagtcgattttggaataaatatgaacttcatcacatatcccgatatcgaatttagcccactggttaacgaacccttcgtgctggcttgcagacaggatcatccgctggccagtaaaaaattagttgaatggcgggagctcgtctcgcaaaggttgattggcgtaaggcgatcgagcggtaatcggcaacttattgaaagttgcctgcaggataaaccgtggaaattagattggttttatgaagtcagacatttatccacctctctgggtctggtggaggcggggcttggcatatcggctctaccctgtctggccatgccgcatcacgccaacagcgctgtcgtcagcgtgccgctggttgaaccggtcatcaggcgcacgctgggtatgattcgcgttaaaaaccgtccactttccgccgcggctgaacgcttcgcgtcattattgctactcatgtggacggatgaagcgagcgagttatggtgtaatgtagtcgattcacaccagcagctataa

SEQ ID NO: 217493 - DNA, 1056 bp, Klebsiella pneumoniae
atgaaacaaattccgtgtgttctcatgcgtggtggaacatcaaaaggcgctttcctgttagcagatgatctaccagaagatattcaaaaacgtgatgaaacattattaaccatcatgggttctggtcatgaactggaaattgatggtattggcggcgggagtccgcaaaccagtaaagtcgctattgtcagtaaatcgaccagccagcaagcggatattgactatttatttgtacaggtcattgtcaatgaacgccgggtagataccacgcctaattgcggcaatatgctgtgcgcagtcggcggatttgctatcgaaaaaggacttgtcgcggcgaattccccggtaacgcgggtgcgaatcagaaacgtaaataccgacacctttgttgacgcggatattcaaatacctgacggccaggttatttatgaaggagatacccatattgacggcgttcctgggcatgcggccccagtaggcctgacattcttaaacgcagccggggcaaaatcgggccagctgttcccaaccggcaatcgggtcgatattttagatgatattcgcgtcacgtgtatcgatatggcgatgccgatggtcattattccagcgcatagcttgggtaaaaccggggatgaatcggctgcggaattagatcaggataaggaattttttcagcgccttgaatcaatacgtaagcaagcaggcgcggcgatggggttcggcgatgtctcgaatatggtaatacctaaaccggttctggttgccccaccacaacatggtggaacgctgagtgttcggtatttcatgccccacaactgtcataaatcgttggccattacgggcgctatcggtctggcgagttcttgtattattgctgataccgtagttaacgagttgacgagaatgtcgggagaagggctaatcagagttgaacaccctagcggtagtattgatgtgagtttaagtaatgctaatgaagctcctgaaaatattcgcgcatcggtgattcgtaccgcgcgtaaaattctttctggcatggtttatctccctgaataa

SEQ ID NO: 217494 - DNA, 1434 bp, Klebsiella pneumoniae
atggataaaaaaacattatgcaagctattagtgcttgttgccattccattgcttattagtctatttccggccccggctgggttgactgaacttgcgtgggtactgtcaggtatttatctggctgcaattgttggtttagtaattaaaccattttctgaaccagtaatactgttagtcgccgtggctgcatccatggttgttattggcaatttaggtgatggttcaataaaatcatctagcgtattaagtggctatgcgtcggggactacctggctggttttctcagcgtttaccttaagtgccgcttttgttattactggtttaggtaaacggattgcatatattcttattggcaaaatagggagcactacgctcggcttaggctatgttaccgcctttcttgatctgattctttcccccgcgacaccgtcgaatacggctcgtgccggcggaatcgtcttgcctatcatcaacagcgtggctgtcgcgctaggatcggaaccggagcatacggcaaaacgcgttggtcattatttaatgatgaacgtctatatggttaccaaaacgaccagttatatgttctttaccgccatggcgggtaatatcctggcgctcaaaatgattgaggatatttgccatattaaattgagctgggggggatgggcgttggccggcatattgccaggcttaatcatgctgttactaacaccgcttataacctataagttatatccgcccgaattaaaaaaagtagataataaagcaattgctaaagaaggtcttgagtctttaggaccaatgaccctgcgtgaaaaaatgctctcctgcttgtttgtgatggcattagctggttgggtatttagcacttcgcttggggtcaatgaatcaacggtagccatttgcgttatggcgctaatgctgattttgaaaattgttacctgggatgatgtcattaaaaataaaggtggctggaacacactaatttggtacgggggtataattggtttgagttctttgctttccaaagttggttttttcttgtggttggccgaactgctgaaggagaacatttcatttggcagtcatagtacgctggctttcgttgtcatcgtcgcgctgagtatactggtccgttatttctttgcctcgggcagcgcctatattgtggcgatggttccggtgtttgctatgctggcgaatgtttccggcgcgccagttatgttaactgcactggcattattattcagtaactcatatggtggtatggtcacccattatggtggcgcggctggcccggttatattcggggttggttataatgatattaaatcctggtggattgttggcggtatattagcgctattgacttttatcctgcatatcaccgttggggtatggtggtgggaattattaatgtactggaaagtcatttaa

SEQ ID NO: 217495 - DNA, 1263 bp, Klebsiella pneumoniae
atgtcaccagtagcaattacattgtcactgttgttattttcaattgtgatgtttgtttgggaaaaaattcctttagccgctacggcgatgatcgtctgtattactttagtggtaacaggcgtttttgatgtaaaaacggcttttgcgggttttattaatcagaacgttattttatttgtggcaatgttcgtggttggcggtgccttatttgagacaggagtgacggataaaattggcggaatcgttacccgttacgctcgctcagagaagcaacttatcgttattattatgttggtctgcggaatactctctggctttctgtctaatacgggaacagctgcggtactgattcccgtggtcatcggtgccgccatcaagtctggttatgcacaatctcgtttgctaatgccattagcgtttgcttcggcgttgggcggcaacttatcgcttattggttcgccgggtaatctgatcgcccagtcggcgcttgaacaagttggtcaacgcttcggatttttcgagtatgccaaactgggtatccccatgctgctttgcgggatcatctactttttgaccatcggttataagctgttgccagcgcaatctgtgagtactgcggggaaatcagaaaagagcaggaaagttggctgtccaaaatataagcaagtaattgctgttttagtgttggtatttaccgtactggggatgatttttgagaacgtcattggtttgccgattgcgattatcggttcaattggcgctttatttttggttattacacgagtgattactgaaaaacaggcgtatcagtcaattgactcgcagacgattttcctttttggcggcacattagctttagcgaaagcactcgaaaccactggcgctggtgcaatcatggcccgctcaattatcaatctgcttggtcaacaggcttcaccgttcttattgttaagtgccgttttgattatttcctgcgtattaaccaattttatgtcgaataccgcaacggcggctttacttattccaattggcttgtcaattgcaaattcaatgggggccgatccacgagcggtattgatggctattgtcattggctgttcatgtgcctatgcgacaccggttgggacgccggcgaatatgatgattttttccgcggggggatatcggtttatggattatgtcagagtcggattacctctgattgtcatctcggtaattgtcagttttatttttctgcccatattgtttcctttttattcgtag

SEQ ID NO: 217496 - DNA, 2286 bp, Klebsiella pneumoniae
atgatcaaattacatgatcaaggagtatatttgtcccatcagtacgggattgttccagaagaggaatgtgcaaatcctgtcgctaaagatattgcgcggaagggaaccatcgcttggtcaatattgtcatcgcataatatttctggcgatgaacggaaattaaaaataaagtttgattcgatggcctcccatgatatcaccttcgtgggtatcatccagacggcaaaggcctctggaatgacgcgctttctcttgccgtatgttttaaccaattgccacaattcactttgtgcagtgggcggaaccattaacagcgacgatcatatttttggtcttacatcagcacagaaatatggcggaatttatgtaccgccgcatatttccgttatccaccagtatatgcgtgaaatgatggcgagttgcggccaaatgattctggggtcggatagtcatacccgttatggcgcgctggggacgatggccgtcggtgaaggtggcggtgagctagttaaacaactattgggaaacacctgggatattgattatcccgaggtagttgcggtgtatttaaccggcaaacctgccgctggcgttggtcctcaggatatagcgctggcattaattggcgcggtattcaaaaaaggttatgtgaagaacaaagtgatggagttcgtcggtcccggcgtggccagtatgtcgacagactatcgaaacagtattgacgtcatgactactgagaccacctgcttatcctccatctggcagaccgatgaagagacgaaaaaatttttgcggcttcatggtagagagaaagactatcgggcgctgtcagccaaagatatggcttactacgatggctgcatcgagatcgatttaagcactatcaggccgatgatcgcactaccgtttcaccctgccaatgtctatgaaatagatacgcttaatcagaatttgccggacattttacgcgaagttgaaattgaatctgagaagatctcccttgggcgcgcgaagctgtcgctgttagacaaaatagagaacggtaaattacgcgtccagcaggggatcattgccggttgcgccggaggtaactatgtcaacgtggcccaggcggctcaggccctgaagcaccatgcctgcggggacaatattttttcgctctctgtatatccttcctcgcagccagtgctgatggcgttaaacaaaaagggattaattaacgatctcatgagcactggcgccattgttcgcacggcattctgcggcccgtgttttggcgccggcgataccccgatgcataatggtttaagcatccggcacacgacgcgtaattttcccaaccgcgaaggttctaaaccgggaaatggccaaatgtccgcggtggcattaatggatgcccgctcaattgctgcaacggccatcaacggcggacttctgacgtcggctgcggaactcgattgctggcaggacgtatccgactatgaatttgatgtatcaccctataagagccgggtttatcagggcttcgtgaaaggggtgacgcagcagccgctgatctatggcccgaacatcaaagactggccggagatgaatgcgctaacggaaaatattctgttggtggtggctgcaaagataatggatccggtgaccaccaccgacgaactgatcccttccggtgaaacatcgtcgtttcgttctaatccattaggtctggctgaatttacgctatcccgtcgcgatccggaatatgtcgggcggagtaaagccatcgccgcaatggagcaacagcgcgttaacggtgaggatctatatcgcggttatccgcagctggaaaatattttttcacggctgcgacggctgcctggccaggaacatattaccgttgagcagacggagattggcagcatggtctatgcggtcaaacccggcgatggatcggcgcgcgagcaggccgcgagctgccagcgggtgctgggtgggttggctaatatttgccaggagtatgcaaccaagcgctatcgctccaatgtcattaactgggggatgctgccgctgcagatgaaacaggtacctgactttgaggtcggcgactttatctatattccagcgataaaaagtgcgctggcaggcgacctgaacgatatcaccgcctttgtcctcagtgataaaaagccgattcagcagattagcctctatatggaaacgttaaccgccgctgagcaagagattattaaagccggtggacttattaattataataaaaatcaattaactaatagtcattaa

SEQ ID NO: 217497 - DNA, 930 bp, Klebsiella pneumoniae
atgaatctgaacctcctgcccgacctcgctcttttcgttcagatagtcgaccagggcagcttctccgccgtcgcccgccagaacggcattaccccttcagccgttagccgcagcgtgtcacggctggagcgagagatgggctgcaaactgctgcagcgtaccacccgcaagctgcgtcttagcgatgccggggaaacgatatatcagcatgcccagcagatgctggaagcggcgcgacaggcaatggattccgcaggcagtcgccaaacggtcgcccagggaaagctgacgctcagcgtcccgaaagccgtcggccgctttgtgatccacccgctgatgatggcgtttttccaccgctacccgcaggtggacgtctgcctgcggctggaagatcgccctctcgattttatcgatgacggtattgatctggcgctacgcatcaccgataccccctcccccggcctgcatggcaaaccgctgatgccaatcaggcacgttatctgcgccactgaggcctatttacagcagcacggtacgccgtacacgccgcaggatctgcgcgcgcatagctgcattagccttggcgaaacgcccgccgatgcgcgctggaagttccgtcgggaaggcaaaacagaaacggtgcaaacctacgggcggtacgccgccaaccataccgccgtacgcctcgacgcggtgagacagcatttagggatcggcagcctgccgctgttcaccgcccgtgaggcgctggcgaacggcgatatcgtgcaggtgctgcccgagtgggaattcatcagcagctactcaggcgacctgtggctactgtgggcgggagataagcatatgcccgccaggatgcgggcgatgatcgattatctcagcgagacggtgccggcgctgaacgcaggcagcacagagccagcgaaataa

SEQ ID NO: 217498 - DNA, 2070 bp, Klebsiella pneumoniae
atgtctgagaatacttttctggtggaaatcggcactgaagagctgccaccaaaagcgctgcgcagcctggcggaatcttttgctgcgaatgtgaccgcggagctggataacgctggccttgcgcacggtaaagtggaatggtttgccgccccgcgtcgtctggcgctgaaggtggccaacctggcggcggcgcaagccgatcgcgaagtggaaaaacgcggcccggctattgcccaggcgttcgatgccgaaggcaagccaagcaaagcggccgaaggctgggcgcgcggctgcggtatcaccgtcgatcaggccgaacgtctgaccacggacaaaggcgagtggttgctgtatcgcgcccatgtgaagggcgaaagcaccgaagcgctgctgccgaacatgattgccagctcgctggcgaagctaccgatcccgaaactgatgcgctggggcgcgtctgacgtccacttcgtgcgtccggtacacacggtgactttgctgctgggtgacaaagtgatcccggccactatcctcggtattccgtccgatcgcgtgattcgcggccatcgctttatgggcgagccggagttcaccatcgaccatgccgaccagtacccgcagatcctgctggagcgcggtaaagtcatcgccgattacgaacagcgtaaagccaaaatcaaagctgatgcgcaagaggcggcgcgtaagattggcggtcaagccgatctgagcgaaagcctgctggaagaggtcacctcgctggtggaatggccggtggtgctgacggcgaagttcgaagaaaaattcctcgcggtgccgtctgaagcgctggtttacaccatgaagggcgaccagaagtacttcccggtctacgacaacgccggcaaactgctgccgaactttatcttcgtggccaacatcgagtccaaagatccgcagcagatcatctccggtaacgagaaggtggtccgtccgcgtctggccgatgccgagttcttcttcaataccgaccgtaaaaaacgtctggaagataacctgccgcgtctggaaaccgtgctgttccaacagcaacttgggactctgcgcgacaagaccgatcgcatccaggcgctggcgggttggattgccgaacagattggcgctgacgtgaaccacgcaacccgcgcgggcctgctgtccaagtgcgacctgatgaccaacatggtcttcgagttcaccgacacccagggcgtgatggggatgcactacgcgcgccatgacggcgaagcggaagacgtggccgtggcgctgaacgagcagtatcagccgcgatttgctggcgacgcgctgccatctaatccggtggcctgcgcggtagcgattgccgataagatggacaccctggcgggtatctttggtatcggtcagcatccgaaaggcgataaagacccgtttgcgctgcgtcgcgccgcgctgggcgtgctgcgtatcatcgttgagaagaacctggatctcgatctgcagacgctgaccgaagaagcggttcgtctgtacggtgagaagctgaccaacgccaacgtggttgatgatgtgatcgactttatgctgggccgcttccgtgcctggtatcaggacgaaggctacggcgtcgacacgatccaggcggtactggcgcgtcgtccaacccgcccggcggatttcgatgcgcgtatgaaggcggtatcgcacttccgtactctggaagagtcctccgcgctggcggcggcaaacaaacgtgtctccaacatcctcgcgaaatccgatgagacgctgaacgacatcgttcacgcttcggtgctgaaagaagcagcggaaattaagctggcgggtaatctggtggtgctgcgcgacaagctgcagccgtatttcgccgcaggccgttatcaggatgcgctgattgagctggccgcgctgcgcgagccggtggatgagttcttcgagaacgtgatggttaacgctgaagacaaagatgttcgcatcaaccgtctgacgctgctgtccaaactgcgtgaactgttcctgcaagtggcggatatttctctgctgcagtaa

SEQ ID NO: 217499 - DNA, 996 bp, Klebsiella pneumoniae
atgcaagaaaagatacactggatcaccaacctgcgcggcatcgcctgcatgatggtggtgatgatccacagcaccagctggtatatcactcacccccatgcgattaccctgctgcaatgggatatcgccaatctgctcaattccgcctcccgcgtcagcgtgccgctgttttttatgatctcgggctacctcttttttggggaacgcagcgcccagccgcgccatttctggcggattggcctgtgcattgcgttctatagcgcgctatctctgctgtatatcacgctgtttacccatatcaacgtcgagctgtcgttaaagaatttgctgcagaagcctgtcttctaccacctgtggtttttctttgctatcgccgtcatctacctgctctcgccgctgcttcaggttaagtccaccagtagcacaatgctgctggcgctgatggcgatcctcggcattctggccaaccccaatatggtcagcgttaaagccgccgggattgagtggctgccagtcaacctttatatcaacggcgacaccttctactacgtgctctacggcgtgctgggcagagccattggcaccctggacaccgataaaaaatggctaacaccgctctgcgccgcgctgttcatcgccgccgtgtgggtcatttcccgcggcacgctgcatgagctgcgctggcgcggagacttcggcgacacctggtatctctactgcggaccggcggtgtttgtttgcgcggtcaccctgctgacgctggccaaaaactggcttaacgcgcgtcccctgcccggtatcgcctgcattgcgcgacattcgctggggatctacggctttcatgccctgatagtgcatgcgctgcgcgccagccatctggagctatcccgctggccgctgctggatattgtgtggatatttagcgccgccctgctcggcagcctgctgctgtcaggcctggtgcagcggattgatagccgccggctggtcagctaa

SEQ ID NO: 217500 - DNA, 1182 bp, Klebsiella pneumoniae
atgtcgaagaacacgtcgtctgaaatcaaactcaccccaaccgcccccgcggccctgccggcgctgaaggggctgaatctccaggtcttcgtgatgatcgccgccatcgtcgtcattatgctgtttttcacctgggttaccgatggcgcctacctgagcgcacgcaatatctccaacctgctgcggcagacggccatcaccggcatcctcgccgtcggcatggtgtttgtgattatttcggcagaaatcgacctctccgttggctcgatgatggggctgctgggcggcgctgcggcgatctttgacgtctggctcggctggccgctgccgctcaccattctggtgacgctggtgatgggcctgctgctcggggcgtggaacggatggtgggtagcctatcgcaaagtgccctcgtttatcgtcacccttgccgggatgctggcgtttcgcggcattctgatcggcatcaccaacgggaccaccgtctcgcccaccagtccggcgatgtcgcagatcggccaaagctacctgccagacggcatcggcttcggcatcggcgttgtcggcatggcggtgtttatcgtctggcagtggcgcgggcggatgcgccggcaggcgttaggtctggcgacctcgtcctccaccgccgccgtcggccgccaggccattaccgcggtgattgtgctgggcgcaatctggctgctcaatgactatcgcggcgtaccgaccccggtgctgatcctcgccgccctgctgctggcgggcctgtttatggccacccgcaccgcctttggtcgccgcatctacgccatcggcggcaacctggaggcggcccgtctgtccgggattaacgtcgagcgtaccaagctggcggtgtttgccattaacggcctgatggtcgctattgccgggctaatcctcagctcacggctcggcgcggggtcgccttcggcgggcaatatcgccgaactggacgccatcgccgcctgcgtcatcggcggcaccagcctggcgggcggcatcggcagcgtcgccggggcggtaatgggggcgtttattatgtcggccctggataacggtatgagcatgatggacgtcgccaccttctggcaatatatcgttaaaggcgccattttgctgctggcggtgtggatggactctgccaccaagcggcgcgcataa

SEQ ID NO: 217501 - DNA, 486 bp, Klebsiella pneumoniae
atgaaccagtttcttattgccaatgcccagcggtgcatcggctgtcgtacctgcgaagtggcctgcgcggtggcgcaccagcaggcgcaggatgtcgccgccctgtcgacgaaccatttcgcgccgcgtatccgggtggtgaaaagcggtgacatatcgacggcgatggcctgtcggcagtgcgaggatgcgccctgcgccagcgtttgcccacagggggcgattcagcgcgacaatgacgtctggtgggtcgaccagcggcgctgcatcggctgcaaaagctgcatggtggcctgcccgtacggcgcgatgaccgttacggtaatgaacgagcaggcgcaggcgttgaaatgcgatctatgccatcaccgcgccgaaggaccggcctgcgtggccgcctgcccgacgcaggcgctgcgggtgatggttcccgcggagctggaagcgctatgcgcgcaaaaacgccagcggctggcgctggcgtga

SEQ ID NO: 217502 - DNA, 1842 bp, Klebsiella pneumoniae
atgattattgccaccgctggacatgttgaccacggcaaaacgacgctgctgcaggcgataaccggcgtgaatgccgatcgtttgccggaggagaaagcgcggggaatgacgatcgatctcggctatgcctactggccgcagccggacgggcgggtgctgggatttattgacgttcccgggcacgaaaagtttttgtccaacatgctggcgggggtgggcggtattgaccatgcgctgctggtggtagcctgcgatgacggggtgatggcgcaaacccgcgaacacctggcgatcctgcagctgaccggaaagccgacgctgaccgtggcgctgaccaaaacggaccgcgtggcggccgccagggtggcggaggttcaggcagaggtcgagcagaccctgggcgagctgggctttgacgccgtcgctttctttcccaccgcggcggcggaaaacatcggtattgcggaactgcgcagccatctgctgcagcttgcggagcgcccccgcccgcagcagcagcggtttcgcctggcgctggatcgcgcttttaccgtcaaaggcgcggggctggtggtcaccgggacggcgctctccggcgaagtacgggtcggggataccctatggcttaccggcgtcaacacgccgatgcgcgtccgcggcctgcatgcccagaatcaagcggttgagcaggcgcacgccggacagcgcattgcgctgaacattgtcggcgatgcgcaaaaagaggcagtgcaccgcggcgactggctgctctcctcaccaccgccggagccagcagaacgggtgattgtcgagctgcagtgccatacgccgctcagccagtggcagccgctgcatattcaccatgctgccagccacattaccggccgggtgtctctccttgagggcaacctggcggagctggtgctggatactccgctgtggctggcggataacgaccggctggtgctccgcgatatctctgctcgcttgacgctggcgggcgcacgggtggtgacgcttgatcctccgcgtcgcggcaaacgtaaaccggaatatctgcagtggctgcacgccctggcagcggtcggcgctgacgatgcgcaggcgctggagctgcatctgcagcgggatgccgtccggcttgagcacttcgcctgggcgcggcagctcagcgaagccggaatggcggccctgatccagcgaccggactatctgcaggccggacagcgcctgcttagcgcgccgcttgccgcccgctggcagcgaaaattgctggatgcccttgcgcgctaccatgagcagcatcgagacgagccgggccctggccgggagcgcctgcgccgcatcgcgctgccgatggaagatgaagcgctggtgctgctgctgattgagcagatgcgcgagagcggcttagtccacagtcatcacggctggctgcatttgccggagcataaagccgggtttaccgacgagcagcaggcggtctggcagaaggtggagactctgttcggcgacgatccgtggtgggtgcgcgatcttgcgcgcgaagtccatgttgaagagtccctgatgcgcgcggtgctgcgccaggcggcgcagcaggggatgattaccgcgatcgtcaaggatcgttactaccgcaacgatcgcattgtgcagttcgcccagcgggtgcgcgagctggatcggctgcgcggttcaacctgcgcggcggatttccgcgataccttaaacgtagggcggaagctggcgatccagatcctggagtatttcgatcggattggcttcacccgccgtcgcggcaacgatcatatcctgcgcgataaggcattgttccggtaa

SEQ ID NO: 217503 - DNA, 1677 bp, Klebsiella pneumoniae
atgcgtaaaggagggtggtggctggcgttagggatgttctctgccagcgcgctggcgacgtgtccggactggccgccggccagaggaagacaggagacatcacgccttcatcagcaaattgtcgcctggaaagaggcttactggcggcagggcgccagcggagtgagcgatgacgtttacgaccagctcaccctacgcctggcgcagtggcgacaatgctttccgggcgcgacgcctgaggatgacgatctgcctccgcccaccggcgatgcgcgtcatccggtggcccataccggcgtgcgcaagctggcggatgaggacagcgttgcccgctggatgaaaaataaatccgacctgtggatacagcctaaagtggacggcgtggcggtgactctcgtttatcgccaggggcgtctggttcaggccattagccgcggcgatggtctacgcggtgaggcatggaccgcccgagcgcggcagatcccggcgctggcgaaagtgatgaccggtgaactggccgacagcgtactgcagggggaactgtttctgcgccgggacggccatgtccagcagcaggccggggggatgaatgcgcgggcgaaagtcgccgggttgatgatgcgagccgacgcggcggcggcgctcagccaactggacgtctttatctgggcctggccagacggcccgtcggatatgcgccgtcgtcagaagctgctggcgcaggcggggtttaagtacagcggacaatatacccatccggtgtcgcgcatcgagcaggtggcgcagtggcgccagcgctggtatcgctcgccgctgcccttcgtcagcgacggtgtgattgtgcgcgaaggacgcgagccgccggggcgagtctggtcgcccggaaagggcgagtggctggcagcctggaaatatcctccggcatcgcgggtgatgcaggtacgggcgatccgtttcagtaccggccgcagcggcagactcaacgtggtggccgagcttgagccccagcggctggatgataaacgcgtgcagcgggttaacgttggctctgtgtcccgctggcagatgctggatattggggttggcgatcagctgcagatcagtctggcagggcagggtattcctcgggtcgacgccgtcgtctggcggacggccgagcgccataaaccgacgccgccgccggcgaaatttaatgcgctaacctgctatttcgccacccctgagtgcagcgaacagtttctttccaggctgatctggttgtcatcaaagtccgccctgaatgtcgatggcgtgggggaaaatttatggcgcgtcattcagcagcaaaacccgatgacgcatatcttttcctggctggcgcttaccgttgagcagctgcaggcggtgccagggatttccgccgcccgcgggcagcacctctggcatcagtttgatctcgttcgcaaacgaccttttatccgctgggtgctggcgatggggatcccggtgccgcagggggcgctggcgcagctcgaaagcgagaactggcatctgctggcggcaaaaagtgaagcgcaatggcgcacgctgccgggcgtgggggagatcagagcccgccagttggtggctttcctgcaccatccggacgtggtggcgctggcgcaatggcttagcgggcagcgcatccccggattttaa

SEQ ID NO: 217504 - DNA, 2082 bp, Klebsiella pneumoniae
atgtcaggccgcctgttagatgccgttccgctcagttcactcaccggtgtgggcgctgcgcagagcagcaaactggcgaagattggcctgcatacggtacaggatctgctgctgcacctgcctttacgctacgaagatcgcacccatctttacccgatagccgagctgcttcccggagtttatgccaccgtggaaggtgaagtgctcaacagcaatatcaccttcggcggccggcggatgatgacctgccagatcagcgatggcaccggcatcctcaccatgcgctttttcaacttcaacgcggcgatgaaaaacagcctcgcgaccggtcgtcgggtgctggcctacggtgaagccaaacgcgggaagtacggcgccgagatgatccacccggaatatcgcgtccagggcgatatgagtactccggagctgcaggaaacgttaaccccagtctatccgaccaccgaaggcatcaagcaggcgaccctgcgcaagctcaccgatcaggcgcttgagctcctggaaacctgcgcgattagcgaactcctgccgccggagctggcgcaggggatgatgagcctgccggaggcgctgcgtacgctgcaccgcccgcctccctccttgcaacttagcgagctggaaagcggcaagcacccggcgcagcagcgtctgattctggaagagctgctggcgcataacctcagcatgctggcgctacgggcaggcgcccagcgctatcacgccctgccgctcggcgccaacgataccctgaaaaaccaactgctggcctccctgccctttaagcccaccggcgcgcaggcgcgggttaccgccgagattgaacacgatatggcgctggacgtgccgatgatgcgcctggtgcagggcgacgttggctccggtaaaacgctggtcgctgccctggccgccttgcgcgctatcgtccacggcaaacaggtggcgctgatggcgcccaccgaactgcttgccgagcagcatgccaataacttccgcagctggttcgaaccgctgggcatagaagtcggctggctggcgggcaaacagaaaggcaaagcccgtcaggcgcagcaggaggctatcgccagcggcgaagtgcagatgattgtcggcacccacgccatcttccaggagcaggtgcagtttaacggcctggcgctggtgattattgacgaacagcaccgcttcggcgtgcatcagcggctggcgctgtgggagaaaggtcagcagcaggggttccacccgcatcagctgatcatgaccgccacgccgatcccccgcaccctggcgatgaccgcctacgccgatctggacacctcgattatcgacgagctgccgccaggccgaactccggtgaccaccgtcgccatccccgacacccggcgcagcgatattatcgaccgcgtgcgcaacgcctgtacccatgaaggtcgccaggcctattgggtctgtacgctgattgaagagtccgatctgctggaagcccaggcggcggaagccacctgggaagagctcaaactggcgctgccggagctcaatatcggcctcgtccacgggcggatgaaaccggcggagaagcaggccgtgatgcaggccttcaagcagggtgagatgcatctgctggtagccaccacggtgattgaagtcggcgtcgacgtgcctaactcaagcctgatgattatcgaaaacccggaacgtctgggtctggcgcagctgcatcagctcagagggcgcgtcgggcgcggcgcggtcgcttcccactgcgtgctactctataaatcgccgctctccaaaacggcgcagaaacgtctgcaggtcctgcgcgacagcaacgatggtttcgtcattgcccagaaagacctcgaaattcgcggtcccggcgagctgctcggcacccgccagaccggcaacgccgaatttaaagtggcggacttactgcgcgatcaggcgatgatccccgatgtccagcgcattgctcgccacattcatgaacgctatccgctgcaggcccaggcgcttatcgagcgctggatgccggaaaccgaacgctattccaacgcgtag

SEQ ID NO: 217505 - DNA, 1329 bp, Klebsiella pneumoniae
atgactgatcgcattatcgcattgtgcattttatgcctcgtattcgggctgccgttcggtgtcgcagcggtatttaccggcgagcttatcctcgactttgtctttttctggccgctgtttatgtcagtgttgtggatcaccgggggtctctacttttggtttcagctggaacgtcactggccgtggggggaggataccccgccgccgacgctgccgggcaatccactgatctcgatcctgatcccctgctttaacgaggagaaaaacgcccgggaaaccatcagcgcagcgctggcccagcgttacgccaatcttgaagtgatcgcgattaacgacggctcttcggacaacaccgcccaggtgctccagcagctggcgcaggaagagccgaggctgcgggtgatccatctggccgccaatcagggaaaagcggtggcgctcaaagcgggcgccgccgccgcccgcggcgatctgctggtctgcatcgatggcgacgccctgctggaccgggataccgcggcctggctggtcgcgccgttgatccattatccgcacgtcggggcggtcaccggcaatccgcggatccgcacccgatccacgctgatcggccgcattcaggttggggagttctcgtcgatcattgggcttatcaaacggacgcagcggatctatggccgggtctttaccgtctccggcgtaatcgccgccttccggcgccaggcgctggcggacgtcggctactggagcccggatatgatcactgaagatattgatatcagctggaagcttcagctccgccactgggacatctttttcgagccgcgagcgctgtgctggatcctgatgccggagaccctcaaagggttatggaagcagcgtctgcgctgggcccagggcggcgccgaagtctttctggtcaatctgcgccgcctgtttcactggcagcatcaccggatgtggccgctgtttctggagtatgcctgctccacgctgtgggcctttgcctatgcgatcaccattctgctgtttatcctcagccgcctgatgccgctgcctgacaatctggcggtgcatagcctgtttccaccggaattcaccggcatgctgctcggcctgatgtgcctgctgcagttcgtcgccagcctgtatatcgagcggcgctatgagaaaaaggtcgccaaatcgctgttctgggtgatctggttcccgatggtctactggatgatcggcctgctgaccacgctggtcgcttttccgaaagtgatggtgaaacgtcaacgttcccgcgcgcgctgggtgagcccggaccggggaaaaggaagcctgtga

SEQ ID NO: 217506 - DNA, 201 bp, Klebsiella pneumoniae
gtgaaaagcgttcgctatttcacccttaacttttttggcttcacgaccgccgcctgtgaaaaacaggggtatctgcgccttatcgccggcgaccatgtcttttataccgataaacgctattttaacgacccctcgctttttgaccacctgacgatcaatcagcctctgcatcctggcgcccgtagctattgctcgcgctga

SEQ ID NO: 217507 - DNA, 1026 bp, Klebsiella pneumoniae
atgatgcctcgatctctttcgcaaaccggcccggagaagcgacgcttcacctggccgaagggcaccccgcagattattgccctgctgctggttctgctggtagacagcctggtggcgccccatttttatcaggtggtgctccaggatggccgcctgtttggcagcccgatcgatattctcaaccgcgccgcgccggtggcgctgctggcgattggcatgacgctggtgatcgccaccggcggcatcgacctgtcggtaggggcggtgatggcgattgccggcgcgacggccgcctcgatgaccgtcgccgggcacagcctgccggtggtgctgttggccgcgctggccgcgggcgcgctggccggattgtggaacggcatcctcgtggcggtccttaagatccagccctttgtggcgacgctgatcctgatggtggccgggcgcggagtggcgcagttgatcaccgccgggcagatcgtcacctttgattccccggccctggcgtggctcggcagcggatcgtttctgctgtttccgacgccggtgatcgtcgccgccgctacgctgctgctgttctggctgtttacccgtaaaacggcgctgggcatgtttattgaggcggtagggatcaacatccgcgcggcgaaaaacgccggcgtcaatacccgcatcgtggtgatgctggcctatgtcctgagcggcgtctgcgcggcgatcgccgggatcatcgtggcggcggacatccgcggcgcggatgccaataacgccgggctatggcttgagctggacgccattctggcggtggtcatcggcggcgcctcgctgatgggcgggcgctttaacctgctgctctcggtggtgggggcgctgattatccagggaatgaacaccgggattttgctctccggcttcccgccggagctcaaccaggtggtgaaagcggtggtggtgctgtgcgtactgattgtccagtcgccgcgctttatcggtttactgaaaggggtacgcggccatgataaaacgtaa

SEQ ID NO: 217508 - DNA, 1209 bp, Klebsiella pneumoniae
atgaaaaagacattggttctgacgacgttcgccctgctggtttccggctcggccgcggcaaaaacatgggtgctgacgaacgctgaagaggggatggataaaggaaactggcagatcaacagcgatcagctgaaggtgaaagatcatgcgttcagcattgagcagaaagtcctgcacggcggtaagcaggaaggcagcaaaatcctcaccattcatagtaaagacggcctgaccatcaccctgagcccgacacgcggcatgaacttgctgcgtattgagggtttcggcagccggatgggctgggattcgccggttaaagaggtcgtcaacccggcgtttatcaacctggaaagccgcaatggcctcggctggctggaaggattcaacgagatgatggtccgctgcggctatgaatggaccggccatccggtgaccgcggacgggcaaatttataccctacacggcaaggcgggcaacacgccggcctctctggtggaggtggaggtggccgacagcgcgccgtatgaaatccgcatccgcgggctggtgaaagaaagcacctttaaaaaagccgatctgcagaccctgaccgaactgcgctacgtgccgggtagcaacagcttcagcttacatgacgtcttaaccaaccatgccgactatccgcatgattatcagatcatctaccacagcaacttcggcaccccgatcctcgaagaaggcgcgcgcttcctcgccccgatgtccagcatcagcccgttcaatgattacgcgaagagcgggttaaaaacctggcagacctatcagggaccgaccaaagattttgacgagatggtatttaatattcagccgctggccgatgaaaatcaccagaccctggccgcggtggtcaacaaagcgggcgataaaggggcctctattcagtttgatacccgtcagctgccggtcctgacgctgtggaaaaacaccgataccgtcaagcagggctatgtcaccggtatcgagccggggaccagctacgcctatccggtgaccattgaacgcgaacaaaaacgcgtgaagcagctgcagccgggcgccagcgcgcagtttgatctaacctacaccctgctgcacgacagcgcccaggtagccgccgttgagcagaaaatcgctaagattcagggcgataacaaagtcgcggagaacgagacgccgatcgccaaagagtaa

SEQ ID NO: 217509 - DNA, 2709 bp, Klebsiella pneumoniae
atgctgaaaaattatacccggcagctgttcgcgcagcttagccgccatctgccacgtcgtttagtccagcgcgatccgctgccggacgcccgccatctggcgagtggccccattcctgaatcgcttggtcagcattgcctgaacgtggcggcgatggacgaccaggagatctggcgcgcctttgacagccaccctgaagggctcaatgaaggcgaagtggcggcgaaaatcctcaaacatggtgacaaccagatcccggcgcagaagccctccccgtggtgggtgcatctgtggacctgctatcgcaacccgttcaacctgctgctgacggtgctcggcatcgtctcctattccaccgaggatctgttcgccgccggggttatcgccctgatggtggggatctcgacattgctcaatttcatccaggaggcgcgctcgaccaaagcggcggatgcgctgaaggcgatggtgagcaacaccgccaccgtgctgcgggtggtgaacgagcagggggagagccgctggctggagctgcctatcgaccagctggtgccgggcgacattatccggttgtcggcgggggatatgatcccggcggacctgcgtatcctgcaggcacgggatttattcgtcgcccaggcctcgctgaccggcgaatcgctgccggtggagaaagtggcccgcagccgcgatccgctgcagcaaaacccgctggagtgcgacaccctgtgctttatgggcaccaacgtggtgagcggctcggcgcaggccatcgtcttcgccaccggcggccgcacctggtttggccaactggccggccgcgtcagtgaacaggagagcgagccgaacgcctttcagaagggcatcagccgggtcagcatgctgctgatccgctttatgctggtgatggccccggtggtgctgctgatcaatggctacaccaaaggcgactggtgggaggcggcgctattcgcgctgtcggtggcggtcggcttgacgccggagatgctgccgatgatcgtcacttcgacgctggcgcgcggggcggtgaagctgtcgaagcaaaaggtcatcgtgaagcacctcgacgccattcagaatttcggcgcgatggacatcctctgcactgataaaaccggcaccctgacccaggataagattgtgctggagaaccataccgacgtctccggcaaggtctgcgagcgggtactgcatgccgcctggctcaacagccactaccagaccggcctgaaaaacctgctcgacaccgcggtgctggacggggttgagctggatgccgcccgcgggctggcggaacgctggcagaaggtggatgagatacccttcgacttcgaacgccgccgcatgtcggtggtggtgaagaaggatgacgccgcgcatcagctgatctgcaaaggggcgctgcaggagatcctcaacgtctcgacccaggtgcgctacaacggcgatatcgtaccgctggacgacaccatgctgcgccgcattcgccgggtgaccgataccctcaaccgacaggggctacgggtggtggcggtggcgaccaaatacctgccggcccgcgaaggcgactaccagcgcgccgatgagtcggacctgatccttgaaggttacatcgccttcctcgatccgccgaaagagaccaccgccccggcgctgaaggcgctgaaggccagcggcatcacggtgaagatcctcaccggcgacagcgagctggtggcggcgaaggtgtgccatgaagtgggactggatgctggcgaagtggtgattggcagccagattgaagccatgagcgacgacgagctggcggcgctggccaaacgcaccacgctgttcgcccgcctggcgccgctgcataaagagcgtatcgtgacgctgctgaaacgcgaaggtcacgtggtgggctttatgggcgacggcatcaacgacgctccggcgctgcgcgcggcggatattggcatctcggtcgacggcgcggtggatatcgcccgcgaggcggcggatatcattctgctggagaagagcctgatggtactggaggagggggtaatcgaaggccgccgcaccttcgccaacatgctcaagtacatcaaaatgaccgccagctccaacttcggcaacgtcttcagcgtgctggtggccagcgccttcctgccgtttctgccgatgctgccgctgcacctgttgattcagaacctgctgtacgatgtttcccaggtggcgatcccgtttgataacgtcgatgatgagcagatccgcaaaccgcagcgctggaacccggccgatctcgggcgctttatggtcttctttggaccgatcagctcgattttcgatatcctcaccttcggcctgatgtggtgggtgttccacgctaataccgtggagatgcagaccctgttccagtccggctggtttatcgaagggctgctgtcgcaaacgctgattgtgcacatgatccgcacccggcgcattccgttcgttcagagccgggccgcctggccgctgttcgccatgaccctggtggtgatggcggtggggatcgcgctgccgttctcgccgctggcgagctacctgcagctgcaggccctgccgctgagctacttcccatggctggtagcgatcctggcgggctatatggtgctgacccaggccgtgaagggcttctacagccgccgctacggctggcagtga

SEQ ID NO: 217510 - DNA, 387 bp, Klebsiella pneumoniae
atgagcaaaactattgcgacggaaaatgcaccagcggcgattggcccctacgttcagggcgttgacctcggcagcatgatcatcacctctggccagatcccggtcgacccgaaaaccggcagcgtcccggaagacgtgtccgcgcaggcgcgccagtcgctgaacaacgtgaaagcgatcgttgaagccgcaggcctcaccgtcggcgatatcgtcaagaccaccgtattcgtcaaagatctcaacgatttcgctaccgttaacgccacttacgaagcgttcttcaccgagcataacgccaccttcccggcgcgctcctgcgttgaagtcgcacgtctgccgaaagacgtgaagatcgagatcgaagccatcgccgtgcgtcgctga

SEQ ID NO: 217511 - DNA, 453 bp, Klebsiella pneumoniae
atgattattggcaatatccaccatctgcagccatggctgcctgccgcgctgcgcgaggctatcgaacacgttatcgctcaggtcagcgaggcgacgccgctgggtaaacacgctatcgacggcgacaacctgttttatctgatttctgaagacaccaccgagccgcaggccgcgcgccgcgcggagtaccatgctcgctatctcgatatccagattgtgctccgcggcagcgaggggatgaccttcagtaccttgccgccaggagagccgcagaccgactggctggcggagaaagacatcgcttttcttgccgaaggccagcaggagaaaacggtgatccttaacgaaggggactttgtggtgttttatcccggcgaagtgcataaaccgctgtgcgccgttggcgccccggcgaaggtgcgcaaagcggtggtgaagatgctgatggcgtaa

SEQ ID NO: 217512 - DNA, 1005 bp, Klebsiella pneumoniae
atgtctgcgttttaccagaagcattttttaaagttactcgattttacgcctgcagaaatcaccgccctgctcgagctggcggcaaagctgaaagccgataagaaaaacggtatcgaagtccagaaactggcagggaaaaacatcgcgctcatcttcgaaaaagactcaacccgtacacgatgctctttcgaagttgccgcatacgatcagggcgcccgcgtgacctatctggggcccagcggcagccagattggccataaagagtcgatcaaggacaccgcccgcgtgctcggacggatgtacgacggcattcagtaccgcggccacggccaggaagtggtagagaccctggcgcaatacgccggcgtgccggtgtggaacggcctcaccaacgagttccaccccacccagctgctggcggacctgctgaccatgaaagagcatctgccgggcaaagcctttaaccagatgacgctggtctacgccggcgacgcgcgcaacaacatgggcaattcgatgctggaagccgccgcgttgaccggtctggatctgcgcctggtggcgccatcggcctgctggccggaggccgcgctggtggagacctgcaccgcgctggccaaacagcagggcggcaacatcaccctgacggaagatatcgccgcgggggtgaaaggcgccgattttatctataccgacgtctgggtctcaatgggcgaggcgaaggaaaaatgggccgaacgtatcgccctgctgcgggactatcaggttaacagcgcgatgctggcgctgaccggcaacccgcaggtcaagttcctccactgcctgccggcgttccacgacgaccagaccacgctgggcaaacagatggctgccgattacggcctgcacggcggcatggaggtgactgacgaggtgtttgagtcggcggcgagcgtggtcttcgatcaggcggaaaaccggatgcacaccatcaaagcggtgatggtggcgacgctgagcaaataa

SEQ ID NO: 217513 - DNA, 423 bp, Klebsiella pneumoniae
atggcaaacccggaacacctggaagaacagcgtgaagagacgcgtctgattatcgaagagctgctggaagatggcagcgatccggacgcactgtacacgattgagcatcacctctctgcagacgatttcgaaaccctggagaaagtggcggttgaagcgttcaagctgggctacgaagtgaccgagcccgaagagctggaagtggaagagggtgacatggtcatctgctgcgatattctgagcgaatgtgcgctgaacgcagacctgatcgatgcccaggtggaacagctgatgacgctggcagaaaaatatgacgtcgagtatgacggttggggcacctattatgaggacccgaacggtgaagacggcgacgacgatgacgaagagtatgtcgatgaagacgacgatggtgttcgccactaa

SEQ ID NO: 217514 - DNA, 765 bp, Klebsiella pneumoniae
atggattacccgcagattctttccccgattatcaacttcctgcactgcccgacgccgcaggcgtggattgacgaagcccgcaagccggaaaacctgccgctgctgctgaccgaccatatggtgtgcgagctgaaagcggcgcagaacgccatgctgctggtgcgtcgctacgtcgcggataaagctgacgccgacgaactgttggcctgcctgaagccgtacgaagacttcacctaccgccgggggccggagccggattttgtcaccctgcataaacggatcaacaaaagcgccatgccgcagaccgacgacccgtggggccgccagctgctggacagcatgattttattgattaaagaggaactgcatcacttctggcaggtgcgggagatgatgctggcgcgcgatatcccctatgtcaaaatcaccgccagcaactatgcccgcggcctgcggcgcgaagtgcgctcgcatgagccggtgatgctgatcgataagctgatctgcggcgcctatatcgaggcccgctcctgcgaacgctttgccgccctggcaccgtggctggacgacgatctgcaaaagttctacctgtcgctgctgcgctccgaggcgcgtcactatcaggactatctggatctggcgcagaagattgccggagaagatatcagcgagcgggtgcgccagctcggcgaggcggaagcggcgctgatcctccgtccggaggccgagttccgcttccatagcggtgtgccagccgcggcgtaa

SEQ ID NO: 217515 - DNA, 573 bp, Klebsiella pneumoniae
atgccgccatccggcacaaaaatggctacggtatctgcggtgtcctgcccggcggcgctgcgcttgccgggcctggtgtatagggacttacgggaggatcccgtaggccggataaggcgaagccgccatccggcacaaaggcgggtatggcgccggaggtgtcctgcccggcggcgctacgcttgccgggcctggggtatatgcgcctgcggggtaccggagataatgttattgatatgcaaccctattaatccgggtaaagcgtttgtcgcattgatttcagcgcacattgcgctcccggttaatcttctgcgttatgcctggcatggcgcagggagcgcacagggggcggccagtcgccgccgccccctgtacccccgggctccggccagcaaaatcgccgctacgcggtcccttcgacttatccctgcaggcttcgggtcgggccgaggcagcatccgtgcaaaacacggccctcagcccgcatccatgcgggctgccccggccttccgggaacgtctcagcgattttgaggccgtcagcaccggcagtttcagcaacaatggtgaataa

SEQ ID NO: 217516 - DNA, 1470 bp, Klebsiella pneumoniae
atgaacacgcttcgtcaggactctctcgccggcatcgtcgtcttccttgtcgccctgccgctgtgcctcggcatcgcccaggccagcggcttaccgcctttcgtcggcctgctgaccggcatcatcggcggcctggtcgtcaccgccctcagcccttcccgcttcgccgtcagcggccccgccgccggactggttaccatcgtcgtcgccgccattgaatccctgggttccttctccgtcttcctgatggcgctggtgctggccggcgtgctacagctgctgttcggcatcctgcgcgccgggcgctttatctcgctggttcccgccagcgtcatcaaaggcatgctggcggcgatcggcatcctgctgattatgcagcagatccccgtcgcgctcggcacggcggaagagaccggacttgccgaagtggttcagggcaacgccgctttctccgtcactgcgattgccgtcgccgcgggcggtctgctagtgctatggctgtggggttcgccgcttatccgccgggtgaagagcctgcgctggatccccgggccgctgatcgccgtcctgctcggctgcgtgaccactctgctgctgacccattttgcgccgcagcagctggccgctctgccgcgtattaccctgccggcgttcggcagcctcggcgacctgctgggcgagctggaatctccggcgtggagcgcgtggcgcaatccgtcggtgtgggtggtggcggtaaccctggcgctggtcgccagcctcgaaaccttgctgagccaggaggcgctgaaaaagctgcgcccgcaaaatccgccgccttcgccgaaccgcgaaatggtcgcccagggcgtcggcaatctgctctccggcgtgttgggggcgatgccgatcaccgcggtgatcgtccgcagctcggtgaacgtcagcaatggcgcgcagagcaagctgtcgatctttatccacggcgtcctgctgttaatctgcggcctgtggttcagcggcctgctgaccttaatcccgctcgccagcctcgccgccgtgctgctgtataccggctataagctggcgacgccgcggctgtttatcgagcagttccgccagggtgcggcgcagtacgttccgttcctcgccaccatcggcgggattatcgcctgcggcatgctggcggggatcgggattggtcttgccacccagatggcgttcagcctctggcgcagccatcgccactcgctgcagctggcgcgctacgatgaccactacgtgctgcgcatccagcagaatctgacctttatgcacaatccgcatctgctggccctgctggcgaagattccggaaaagagcgtggtgatcgtcgagcacgacagcgtcggctacctcgacccggacgtgcgggcggtgctggatgattttgccgagaacgccccgcagcgcggcatccgccttaatcagtggccgctggccagccgctga

SEQ ID NO: 217517 - DNA, 363 bp, Klebsiella pneumoniae
atgacaacaccaatggagcataagcggcataaactgctgtctgaggttgctgaccatgtcaccgagacaggcgttgattacggtttgtcatccgagcaggctgaacaattggggctggctgtggcagattttctggcatctcactttggcgggcaaaacttcacttttcctcgtgactacgcgtataaactatctctacgcgatatgcagatttatgaagagttccgggggaataactgggctgagctaagtacgaaatatggcattactgaacgggggttgcgcaagctgattcaccgtgtacacaaacaagtgatggctcaccgtcaaccacagctgttttccttcggtgataacgagtaa

SEQ ID NO: 217518 - DNA, 435 bp, Klebsiella pneumoniae
atgacccgttcccagctgattaaaatcatccatgtggcaaagcgcgagctatgcatggatgaggatacgtaccgccagttgctgaatacctacgctggcattgaatccacgcgtgaaatgaatctcgggcaactgaaccagatcctcgatgcgatgaagaaaatcgggttcaaggtccggacccagaagaaagagaagctgacggccaccgacgaccagtcgaagaaaattcggtcgctgtggcttgaaatggctgacgaaggttttattcgtgactgctccgaacgggcaatcaacgtctatgtgcaccgcataaccggcatcagccgccttgactggctcaatactcgggcagcaagccgtgtgattgagacactgaagcagtggcagactcgcgaacgtaaggcgcaggaaaccctgcagagtgtaaagtga

SEQ ID NO: 217519 - DNA, 525 bp, Klebsiella pneumoniae
atgaccagcaaattaaccataaccagagagcagttaacaaattgggtttcacagcttgatagtgatggtggctgtgatgcaactgatcgccagttagaagctcttattcgtcagtcgctggcgacaatggacagcgagcctgtggcgtacatcgacaaacagtggatgttggtctattacgttccaccaatgagtttggggctaaaaattggcgataatttatatcgccagggacaaccagctcgggatagttgcgcgattgccgatattatcgctgaacgtcaacggcagcagtctgtagagggattttcgacagagcaggatgatacgtatgttggttgccaactggcggcagctgcaatctgttatatcgaaccgatggaggcgatgagttattggcccgctgactggcatgacgacagtttcaagccgacaaacgagcgacggaatctagtaaaagcagccgcactcattatcgctgaaattgagcgtatcgaccgcaaatcaaatgggaggactgaataa

SEQ ID NO: 217520 - DNA, 186 bp, Klebsiella pneumoniae
atgatgtggattctaattatctggatgttcgggagttacagctattcagaagctaaaccgacaataacaactcaggaatttaatacagaatcagcctgccgtgctgcgtttgccaaaattaaagagcttaacggtggtgagctagcgctgcgtggtgtgtgtacgcccaaaggagccaaccaatga

SEQ ID NO: 217521 - DNA, 129 bp, Klebsiella pneumoniae
atgaataaaaaactcatcgctgaagcctcccggtttcagtcatcacatgagcgtaaaggattctggtggttaattattggcacgttaaccgcagccttaacgctctttattcttttcaatttccagtaa

SEQ ID NO: 217522 - DNA, 126 bp, Klebsiella pneumoniae
atgaaattaaccatcggcaacattcgtttattgctcgtgctgggctgtatcgtcttctgggtggctgttgcatttatttgttaccccaccgttacttcagcctgggattactttcataagccgtaa

SEQ ID NO: 217523 - DNA, 720 bp, Klebsiella pneumoniae
atgagtgaatctgaaaaatatctggccaaaattaaaaaactactgaatctggcccggcgcagctccaatcctcatgaagcagcaacggctctgaatcaggcgcaggcgctgatgcataaacataagctgagccagactgatatcgatctgatggatatcaccagtaaggccagcaaaggggccccgtcccatgcgcaaagtatccctcgttatatgacgtttctgggccagttaatttgtcgtgcaatgggcgttaactgctattactcgttcagccgcaattatatgaacggccagaagcaaaataccgtcattttttatggtcctgacgagcgacctgaaatcgctgcttatgcctttgatgtgctttcgcggcagatggtcaaagcccgacgcacctttattgcttctctgcgtaagaatattaagcctgcaaccaaaacggcccgcgcagaccagttctgcgaaggatggaccgaaggtgcttatcaggcgatagagccatttatcgtaacggaaaccgaaaaaacattgatggcaaatttcctggcaaagatgaagaaagagcaggatttatccgatctgaaaccccgtgaagctaaaaaatgtcgtggtgatcaggatgcagcggaagcgggatttaacgagggattaaaggcgcgtttaaatcacggcgtatccggtaaagattcatccctttctctggagtacaaaccatga

SEQ ID NO: 217524 - DNA, 195 bp, Klebsiella pneumoniae
atgctgacattagccggttttattttactggtatcagcctgcggaacagatgcctgtgacgcactgcctgttactgaagatatctatctgaataagcagtcctgcgagctggtcgcagaaatcattcatgagcgccagcctgatgcacaattgatttgtggggaagtctggagggaggaagaatcaaatgagtga

SEQ ID NO: 217525 - DNA, 612 bp, Klebsiella pneumoniae
atgacgacgattaatcagcacgaatacatgaaagaccgtaaaggtcgcctggttccgataagtcagatttctgattatgatctggcaatggacagttttgtccgggaacaggtttctgctgcaaagataaagcgtgatgaactcagcgagtttaaacgtcgcgcctttgatgaatgttatgcctggcttgaccttgtggctgaaaaatatggcagaactcgcggcggcgcaaagggtaatgtgacattcagcagctttgacggtagcgagcaaatcactattcgcgtacaggaaacgctgacgttcgggccggagctacagattgctaaagatctgtttgatgaatgcgtcactgaatggtcgaaagatgccaatgttaacctgcgtgctattgtgagcgatgctttccaggttgataaagagggacaactgaacaccggacgtattctgtccctgcgaagggtaaaaattcaggatgagcgctggattaaagcaatggatgcgatagcggaatcgctgcaggtggccatgtccaaaacctatattaatttccgggagaaagataagtccgggaagctggttaatataccgttagatatcgctgctatttaa

SEQ ID NO: 217526 - DNA, 216 bp, Klebsiella pneumoniae
atggcaataaagattgagatttatatcgcgctaaccccggaaggatttatttattgcaaaatgtcgggcgcaaatacaaaagacgcgagcgaaagtgagctggcgactcttgagtcattaaagcccgttgtaaatgaatctgttctcaacaaactgaaacagagcggatatcgggttgcagctgattatctgcagccttccggcaaatcacattaa

SEQ ID NO: 217527 - DNA, 273 bp, Klebsiella pneumoniae
atgaaaacaataccgaacgttaataaacagctggctgatttgatgaatgccattgcggcactcaatgcaatgaatacgcctgtcaccagcatcatgatttattcaggaaagccggttattcgtgtttctcgcgacagtccgtgcgtcagtcatttcagggggaaaaagtcgggttataccatgaccggtattgaccatcaggggcgttaccgtcagggggaagttgagatgtatggttgcagagttatctggtcagagtcattacttcactga

SEQ ID NO: 217528 - DNA, 1170 bp, Klebsiella pneumoniae
atgctggtactgaaagacctgatgaaacagcacggtattgaacagacggaagtcgctgcagctgcagctgtttcgcagcccgccgtttcacagctgattaaccacggcatctggccgaagcgtcgccctgaagaagtgcggcagaagattatgacattcctggcatcacgcgggctcggggaggaattatcccgggcgtttgatgaggtactgacggcggaacccgccagtacctccgtcccgcaacaggcaaataacgaagaggacgaaaatatgttactggcaaaacaggtgttaaatccagtcaccaaaaagcaattcggcattttccgtgacccgttcgcggatgacgccatgcagagttcagaggacgtgttcaccacgccggatattcgctacgtccgcgaggcactgtatcagacagcccgttttggcggttttatggcggttatcggggaatccggcgcggggaaaagcacgctgcgccgcgacctgattgagcgtattcaccgcgagaatgcgccggtcatcgtcattgaaccctacatcatcgcgatggaagacaacgacaataaaggcaagaccctgaaagcagccagcatcgccgaagccatcattaataccattgcgccgctggagaatgtcaaacgcagtcaggaggcccggttccgccagttacaccgcgtactgaaggactccagcaacgccggttacagccacgttctggtgattgaggaggcacattcactgccgcttcccacgctgaagcacctgaaacgcttctttgagctggagcatggctttaaaaaactgctgtccatcgtgctgattggccagccggaactggcgatgaagctgtctgaacgcaaccaggaagtccgtgaggtggttcagcgctgtgaagtggttgaattgctgccgctggacacagagctggagcgctttctgaagtttaaattcgaacgtgccggaaagccgataactgatgtgctggataacaccgctgtcgacgctatccgtgcccgcctcagtaacaatatcggcggtcgcagaggggttgtcagcctgttatatcctctggcggtcagcaatctggtgattgcagccatgaatatggcggcgcagctcggtgttccggttgttaatgccgacgttattaaggcggtttaa

SEQ ID NO: 217529 - DNA, 1875 bp, Klebsiella pneumoniae
gtgcagggcctcaacgagttttctgaaggcaaaacccagggcttcggtactttctgtcataaaaacatcctcattttttatgggggcagaatgaatccagtactgactcaacgccttgttgccatcgccgaagcggccagtgttgccgggcatggcaaaaaagaagcagtgtatcaggccgcctgcgaggaattgtgtatgtcacgtgcaacgttgctcaaaaaactgaacgccgtccgcctgcagaagccgagaaaacagcgctctgacgccggtgactccgcgctgacccgcgaggaggcgatgaccatttccggcactctgatggaaaccattcgcgggacgggcaagcgtaccctgagcgtggaaaaagccatcaacagcctgcgcgataacggtctgatcatcagcggcaggcttgatgagaccaccggtgagattgtgccgctgtcggccagcgccattatccgcgccctgcgccagtaccgcctgcaccctgaccagttgcgggcaccggctccggcagtgcagctggccagccgccacccgaaccacgtctggcagctggatgcgtccatctgcgtgctctattacctcaagaacccggccaaaggggttaaaggtgataccgggctgcgcatcatggatgagaaggagttcaacaagaacaaacccgccaacgtggccaaagtcgtcaatgaccgcgtctggtcttttgaaggaaccgaccacactaccgggtggatctacctggagtaccggttcggtggcgaaaccaccgagaacttcacctcggtgcttatcaatatgatgcaggagcgcggcggcgctgacgtgctgcacggggtgccgaaggtgctgttcaccgaccccggcgcagctctgaagtcccccacgatgggaaatctgtgccaggcgctgggtatcaggctgattgcgcacaaagcccgcaacgcccgggccaccggctcggtggaaaaggcccgtgacattctcgaacgggatttcgaacacggcctgcgcttctgccgggtggagagcatcgacgaactgaaccgcctggcgcgtctgtggcggatgaagttcaaccgcacggctattcacagccgttacggcatggcccgcacggataaatggttgctgatcaccgaagagcagctggtcaaggccccctctgttgaggtctgccgggaagcagcggtgtcagcgccggtcagctgtaaggtggacagctttgtccgggtacgtttccgggggcggcagtacgacgtttccgctgtgccgggtgtctgtgtgaatgaccgggtgatggttgcacgcaacctctaccgggacgatcaggctcaggtcgtgatgaccggcgaggacgggctgaaatccttcttcctggttgacgaggtgcagaaagacgaacacggctttgctgttgatgccccggttatcggtgagagctttaaaccactgccccagaccgttgcccagcagcatcttgatgaagttgagcagcatgtcttcggcacggccagtaaagaagaaaccgaggctgcgagaaaaggcaaagccctgccgttcgggggacgtttcaacccatatctcgatattgaacgcgacgatcacccgacctacctgccaaaacgcggccaggaaagtcaggtgcgtggcccgcgcatcgagcagcgcccgttatctcatgttgaggcggctaaattgctgcgtgagcgcctgacggctgctggccatagctggttcccggaacactacgcgcagctggtcagtcgctttccggaaggcgttccggttgaagatattgacgccatcgcgcaggagctggccgggaacaaagcgccacgactcagtatcgttaacggccattaa

SEQ ID NO: 217530 - DNA, 717 bp, Klebsiella pneumoniae
atggataaaaccaccgctgttattgactcaccagaggcgctgggcgctgccctgtgccgccatgtacccgatatggccaacggtttcaccatcaccacccgggacagccagctgcagctgactgtaaccgccgaagataccagaccctttatggtggcaatggaacggctgctgaagggcaaaatccgccagatccagcgtgggcatcaggggcgcgttctgaacagtaagctcgctttgatcaaccagagtggcgagaaactgactgccgccgaaatcgcccagaaatactgccagcctcagacaactcaccagttgtcggccatgcagaagcgtgattatgcgacccggcatatgagccaggaagaactgaatacaattctggattacgcccttgaacagggtatgccggaacagatgctgtcaccgttccggaatggcgttaaaacccgggagcaggcccgaaagcttgagctttcctactatgcatgggtcgcattagaaaacatcagggattttcatcgtcagaggtcccgcagggacgatcagaaagagacgtccgaagtatcgggtcaagatgccgggtcccccggctgtagtcagcaagatcccgtacagcccgaagcaggtggtcaggagccgaatgattctccatccccatcagacaaaggtccaggtacccggcaaagtccaggcgatcaaacgaactctctttga

SEQ ID NO: 217531 - DNA, 939 bp, Klebsiella pneumoniae
atgcctcgcaccaaatctcaacctgttgaacttataccggatgtaacactaaacccggagctggaagctacccagaacctgatggcaacagtaagcagccagatgaataacgaacgtgacctgctgaaccagctactgggccaggctcagatggctgatgcgtttgctcaattttccaagaccgtcttgacttctaagatggcatttgtaaaggaaaataaactttatcaatcgcttaaaggaaagaaaggtcaagacggtcttgagttttcaggtacatgggctgaattctgtaatctgctcggatacacccctgaacatgctaatgaatcaatcaacaacctccaatccttcggtgaagaagcccttgaatccatgtcccgtatgggtatcggctatcgcgagctgcgccagttccgtcgcctgccggaagaccagaaaagcgccctgatcgaggtggcaaaagaaggcgacaaaaccgcgctgcttgagctggccgaagagatgatcgccaaacatgcccgcgagaaggaagagctgaagaccgaccttgaaatcagtcgccagatgctggccgagaaaaaggaagaactcggcacgatgcgcaatgaaaaagaagaactcaagtcccgtctggttcgccgcaccaccactgaaacaccggacgaagaaggcgtggcgcttgagacggaagtcaccggctttaaaagcggggttctcagcgcattctttgaccttaaaagcggtttcaacgcgctgaccgaacacaccgaacgcaccggcatcaatcataccggcatgatggcgggcctgctcgatgaccttcaggcgcagtttgaagagctgcgtcaggaattcagcctgccggaagcccgcgagaccagcgtgataccggactgggtaaaagaagcacagcaagaggatgaaaataatggataa

SEQ ID NO: 217532 - DNA, 306 bp, Klebsiella pneumoniae
atgaacaaggtaatcacatccacatccggtggtcgcatccttcgggtgctcaaagcgctaaaaggtgcctcactaacaggacgctccaacagtgagcttgctaaagcactagacgaatcaccggctaatatcaaccgcgcactcaacacccttattgaagaaggattagcccagaaactcgacaacggtcgtttcgctctgagcgttcagcttcttcaaattgcccttgctcacagcaatgaaatggcccgcgctcagggccgaatcgatgaaatgaaccagcgcatagtctccggcagtcactaa

SEQ ID NO: 217533 - DNA, 189 bp, Klebsiella pneumoniae
atgaccgcagaacaagtcaaatcactctttcgccagagggggatcacattcacccagtgggctgaagagcatggctactcccggaacgaggtctaccgggttctcaatggccagaccaaagccaattacggcaaatcgcacgaaatcgccgtcaagcttggcctcaaatccggcaacgttgcagcctga

SEQ ID NO: 217534 - DNA, 591 bp, Klebsiella pneumoniae
atgaggactctcggatggtgggtgcttgcggttggtgttttttggctgataatcgcgctcaatatggatacgagtgttgagagcaggcctggtgttcgggttatgaactttagcctgatagcacaacaacagaatcaattgcttcttggggccttgatctcttttgcaggattgatgtgtgtaatttttgggaaaaaaaatgaattggtaaatatgtctgccaatgtgaagtgtccgttctgtgcagaacttatcaagtccgatgctatcaggtgtaaacattgccatagtgaccttcccgccaagccttctttggcggataaagaccgccttctggctgagtttgagcgctttacttaccttaatttttttgatgaaaacgatgttctctgtgaatccaaagttcaggagtttgccgatattgggctcaggtatctggacgctgttaagcagatgaatggggataaagcgatagcagagaaaaggttgcttaggaagatcgatgagcttgcctccatgtttaacaacgacgtagctgagcaattttatcgtctgtgcgtcaaatattcgccgtggttggttatggggtaa

SEQ ID NO: 217535 - DNA, 321 bp, Klebsiella pneumoniae
atgggtgaacaaacgcaacagttgtccgaagcaataaacaaactcacagagttaaataactccctgcaaaaaagagttcttgtccttgaggccaatgctgcaattgacgaggcagctcacgcatgtgctatcgccagcgactccccctctatcaggctcacaagctggaaccagtgggtggccgacaggattgcagagcatgcagtaaaaaccagctcttcaggaaagcctgaggagccgctggtcaaacttgttattgaggttcagttgaaacgaattgagcactggagcgaactttttcgtaaagggaatggagactaa

SEQ ID NO: 217536 - DNA, 240 bp, Klebsiella pneumoniae
atgagtaaatttgaagagatttgcgcagcgcacaaagagtttcagagtaactcttatgcctataaagtgagttgtacgcatttcgcgtcaggactgggagataagtacattcagtaccttgggattaccgaagaggactacaggtgggttccagcatctgacgatgcgaccgaaaaagaagatttcagcattccggatgccatgcattttgatgacgatacctactggcatatggggtaa

SEQ ID NO: 217537 - DNA, 579 bp, Klebsiella pneumoniae
atggaggaagcacaagataacatcaccaaaaaatggcatcacttgctgtttgatatccgtcgttctgtaaggtatcacaaccgtcgtcgggctttttacgacaggttagatcaattcagcaatatgctttccgtgatgctgggttcgactgctatttacggggtacttgaacaatcgtggaaaaccgttgcgcttgtggctcttggacttgtcactggtctatcggccattaatctggtgctgggttcttcccagagggctcgcctccacttcgatctggcacgtcaatttgttgaggtcgaaaaagcgatgatgaaaactgatccctcggaggaaaagattgcggagtttacagataaacgcctgaccatcgaaatggatgaaccgccagttctccgtgtactggatgcgttgtgttataacgagcagcttcgagctatgaactatcccaattcagaaatggttagcataggttggttccagcgtaagatggctccctttattgacgttcacagcgatcaactgaggaaaataggtcaaaaaccgcaaaaaccgcaaaaacctcaacaacagaattaa

SEQ ID NO: 217538 - DNA, 366 bp, Klebsiella pneumoniae
atgtcgttacttcacaaggtccgtcaccagcggctgcgcaactggataatcctcgctgttgctctactggccgtaatggccgtcatttcccctgaacagctcggcgtcacgctctacaagctgtctctggtgtccatcgccgccattctcggctaccacctcgaccgggcgctgttcccatacgccagtccgggtagctatttgattgatgactggaaagagaatctcggcaagccagtgccagtgagccgccatgaacctgaataccccgtggcaacaggctatgagctgatttttgcggctgttctgctgcgacgtgcgctgattgtcgcggcgatctgcctcggcgtgacgatggggctctga

SEQ ID NO: 217539 - DNA, 633 bp, Klebsiella pneumoniae
atgacacgactcgcgctgtccctcatcctgctttgcttgctgagcgggtgtcatccggttatcgcggccagcattcctgttgaggcccgacaataccagcgcgagctgacccgcaatgcccgcgttgtctgggggctcaacgctccggtatccaccttcgctgcccaaatccaccaggaatcacagtggaacgcccgggcccgttcaccggtcggggcgcaagggctggcgcagttcatgcccgccactgccagctggattgccggtatttaccctgagcaactgaaagaccatcaaccttacaacccgtcatggtccatgcgggcactggcgcagtacaacctgtggaactggcagcgcatcccgggaactgccagcgactgtgagcgcatggcattcgtgttatcggcatataacggtgggctcggatgggttcagaaagaccggaagctggccaccagtcgtgggatggatgccagtcgttactggaatcacgttgaaaaggtgaatgcgggtcgcagcgctgccaactttcgcgagaaccggggctaccccctgaaaatcatctacacctggcaaccgctatatctggcggcaggctgggggccgggagagtgctatgacgctgactga

SEQ ID NO: 217540 - DNA, 276 bp, Klebsiella pneumoniae
atgcactcaaaaaaacggcgtctcagcgtgttatgtgcgtgtttgatgacgatgttatgcggctgctccgggaagccagacaacgcgccgcaaccgcagcagcagatggtctttccggcagagatgaccgtaaagtgcccgcccccggaggaggcggacgataactcaatggatgccagcgcagtagccctgaaacgactgtacgacctgtacggcatctgcgcgggcagacacaccgatttaattcagtatattcagaacctgcaggggaaataa

SEQ ID NO: 217541 - DNA, 303 bp, Klebsiella pneumoniae
atgaaatttgaggaattacagttcagctggcaggtgctgcagtgggccgttctttccgccatcgggatttacagctggattgttggtcgtcagtcggccagtaaccgcgaactgcttgagctccggacccgcctggcctctattgaagcgcaggtggcccagatgcccacccagcgacaggtctccattttactggagaagttgtccagcaccgaagccagtatcaccggtatgaacaaccagatgtcggggatggccagccgactggagaccattaacaactacctgctgaacaccaagtga

SEQ ID NO: 217542 - DNA, 297 bp, Klebsiella pneumoniae
atgagcttttctgattatctgcgtaccgacatgcgtctggtgatcctgcgtatcctttcagaaatgccgagctacagttctaacagctctgttatctggtcggtactgacacgttatggccattcaccgagccgcgatcaggtgaaatcagaactgcgctggcttgaagagcaaggtctggtgacggttgaggatatcgagacggtactggttgcccggttgaccgagcgaggtgctgatgtggccaccggtcgtgcagtcgtgcctggcgtgaagcgtcccggcgcgggaggctga

SEQ ID NO: 217543 - DNA, 549 bp, Klebsiella pneumoniae
atgggccgtaaatcgacaatccatcgccttgaaccagacgttcgggctcatatcgagcgccgcctgcgtgaagaccgcatgacgctcgatgagctgctgtccgatatccatgagcacttccccggagaagaaaccccgagccgcagtgcgctgggtcgctacaaacagaactttggcctgctggttgacaggatgcgccagcaggaccaaatggcccgtctgctggtcagcgaactgggagagaacccggacgaacgcgctggtgccctgatggttcaggctgttaccacgctcaccacccacgccgcctttaccgctcagcaggaagaagatcctgatatcgacacagtgcgtcaccttgccagggcagcaaaagatgtcctgcagtcgcgtaaggccagtctcgacgagcgccgcgagattgagcgtgccgcgcgtgagcgcctgttgcgtgagcaggaagagaacctgaaagagaccgcccgggcacagggactgagtgaagaccaggtgcagttctggcgtgaacgtgtgctggggatcaagtga

SEQ ID NO: 217544 - DNA, 1683 bp, Klebsiella pneumoniae
atgaaaccattagcgtccactatccgcaccgttgaatgggatgagcttccggcgcgggcccgggaaatcccgttcggcttcaacccgtttgccgacggcgtgctgatggcccaccaggtcgaatgccttaagtatgacgtctctattctggctatcccgaaggggcgacgaaccggtatcacttttgcctgggggcttaactcgaccctgatagccggggcgcagaaagccgctggcggcgacaacgtctactacatcggcgacaccaaagagaaaggtctggaattcataggctacgtggccaagttcgcccgcgtcatcgcggcccagcaggtgcaggatgtctcgtcgattgaagagttccttttcgaagaccaggacgaacagggcaatacccggatgattgcggcctatcgtgttcgcttcgccagtgggttccaggtggcagcgctctcgtcccgcccggccaacatccgtggtctgcagggcgtggtggttatcgacgaggcggcattccatcaggatgttcagggcgtactggatgcagcaaccgcgctgcttatctggggtggtcgtatcgttatcatcagttcccataacggtaagaacaacccgttctgtcagttctgtaacgatattgaagcgggccgctatggcgatgacgccgccgtatttaccgtgacctttgatgatgctgtcgccaatgggctgtttgagcgggtctgcgccatgaaaggcgaagaggcaaccgtcgaggggaaaaagacctggtataaccgcatccgtaacgcctatggcccgcgtaaagcggcgatgcgcgaggagctggacgccatccctcgtgacggtaacggtatctgtattcccggtgtctggatcgagcgggccatgccggaggaacgtcccgtcatccgtctcgcgcttgatgatgactttatccatatgaccgaggcagagcgcgcggcatggggtaatgactggattgacagggagctgcgcccggtgatggctgagacccttaacccggagctgcgtcacgtgtttggtatggacttcgcccgccaccggcatttctcctccatcgtgccgatggccatcatgcagaacctgtgtcgcgacgtcccgttcctgatggaactgaacaacgtgccgtcggcgctgcagcagcagatcctgttctggcttatcgagcatctgccccgccagtcaggcggcgcgatggatgctaccgggccaggtatggtactggccgagtataccgccgaccgctatggtcgcccgcgcatcgccgaaattaccctgaaccgcaagtggtatggattctggatgccgaagttcaccggcctgtttgaggacagcatgatcatcctgccgcgcgatgagaacacggcgcaggaccttcgggcagtggaaaacatcgatggcgtgccgatggtggccagtctggagaaaaaagacctcaaagatccggagctagtgcgtcacggcgatacggcgattgccggttgtctggctaactatgccgctctgaatctggccaccgagattgcgtttgaatcgaccggcgagcgcgacattttccgtgtgctgtcaggcttcggcgacggcagcagtgccggtgaattcactgacaccgggttcggtaccgtgcgtggcattaatgactttggaggattcctgtga

SEQ ID NO: 217545 - DNA, 1515 bp, Klebsiella pneumoniae
gtgagtcgcaaaaaacaaaaaagacaaatgccatcaaaaccctcagccacaccgcgtcctgaactggggcgcgagtttgcctcaaccggtgacgggcgcgatatcacccgtccgtggatcggtgcgctagcgttatcagatgacagcgttctgcagcatcgcggtgcccccgacctgaagatttaccgcgaggtactgagtgacgatgaggttaagtcggccttcagccagcggcaggatgcgctgatatcccgtgaaattaaggtcgaggccggaggagaacgtccggtggatatcgaggcggcagacgccatgcgccagcagatagacgcgctgggtttcgaccgcattacccggctgatgcactatggcgtgttctatggctatgcggtatcagagctgatttatggtgtccgggataatttactgtggattgacgacattaaggtccgcgaccgtcgccgcttccgtttcagcccgaaaggcgaactgcgtctgctgaccccacagaacatgatggccggtgagccctgcgaggggccgtatttctggtcattttccaccggtgcagaccacgatgatgaaccctatggtctggggctggcgcactggctgtactggccgacgttcttcaagcgcaacgatatcaagttctggctgattttcctggacaagttcgggatgccaaccgtcgccgggaaacaccccgaaggggccacgcaggagcagaaacgtaacctgctggcgctgacccgggccatctctaccgacagcggcgtcattatgcccgaggggatgagcgtcgaactgatgtctgctgcccgttccggtgccgctgactatcaggcgatgtacaacgcgatgaatgaggccatccgccgcgtgacggtgggtcagatatccagctcaggtggcgcggcaaaaggtatcggtggcaacgagtccctgcaggacaaggtactggactccatcgtcaaggccgatgcggatgttatctgcgagtcctggaaccgggggccggggaaatggtttaccgagtttaatttccccgatgccgcagtgccggtggtgtcccgcgtcttcgaagaagcggaagacctgaaagaccgggccgaacgtgacaaaaccatcagcgaaaccaccggctatcgtccgacgctggccaccattaaagagacctatggtggcgagtgggagccgaagcctgagccggtatccgttccccggggcgctgcgccatcgtcattcgcggagcatgacccggaccataacgataccgccacgctgatggtcggtcgcctcaacaccgaactgcggccggtcatggacggttggatcaatcagataaaagcgctggtcgactcagcagagaccgctgacgagctgcgtgacggcctgactgcgctgatacccgatatgtcgcttgatgactatgcccgtattctgggcgaagctatgtccgctgctgccctggcgggacgtaacgatctgctggaggaaatgaatggccggtaa

SEQ ID NO: 217546 - DNA, 1218 bp, Klebsiella pneumoniae
atggccggtaacgtcagctatggctcgctgccgttcagcgagcagatcgccttcttccgtcggaagttcaacacgaagaccgatgcctggacagatgtctacggctccgcgcatgacagtgagtttatggtggccggggccaaccgcgatgcgctgctggcagacctgcgtaacgcagtcgagaaaagtcttgacggtggtacgctggaaaccttccgcaaggacttcgcggccatcgttgcccgctatggctggagctataacggcggatttgagtggcgatcgcgagtcatttacgagaccaacctgcgcagttcttacatggccgggcgctaccagcagctcatggccatgcgggatacacatccctactgggagtacgtccacagtgatgtggtcgaacacccgcggcaggaccatctgggctggaacggcatggtactgcgggcggatgacccgtggtggatttaccatttcccggtgaatgcctggggctgtcagtgcagtgtgattgcccgcaccgaagacgaactgcgacgcatgggcaaagacggcccggatactgcgccaccgattaaattcattacccgcgtgattggccagcgcagcccgggtggcccgaggaccgttattgtgccggaagggattgatccgggttttgagcatactccgggccgcagccgcgtattttgcgaggtgccgcctccccggagccagaacccggtcagcgacgggccgttcacgccggtagcagaacccccggccacaccagcaccgctgccatcgccacgtccggctccggtgactgaagccgagaccgacccggtggatgcgttcctgcagctgttcggcgcgaccgctgaccgtgatgcggcgttccgcgacccgacaggccagcgcctggctatcggccacgacatgttcgcgtcgtcggaggggcagggtcagacccccctgacgctggcacaggcactgcagctggcagagaccatccgcaaccctgatgaaatctgggcgcagattgtctggctgccggaagaacagcagtcgctggtccggcgctattacctggcacgcctgcagcaggaaggtgaagtggacccgctgtcggtggtgttcgccacgggccgcgatggctgggccggaaatatttcaactgacgatacgctgctgcagtcgctgcgccagggtatccggctgtggtcgcgggaggactga

SEQ ID NO: 217547 - DNA, 561 bp, Klebsiella pneumoniae
atgtcgggtgtgacgctgacgttcaatgctcaggatgccctgagcaagctgtgggatgcccgggaggatatgatgcgcccggaaccgctgcttcggtcgatgggcgaacgcctgcttgaatttcatcagcaacgttttcgtgatcaaacgtccccggagggggtgaaatggaaagagctgtcctggcgatacaagcaacgtaagcgaaaaaaccgggaccagatactgacccgcgatggctatctgcgaaacaccctgcgctggcaggtgaatgctgatgagctgctgttcggtactgaccgggtctacggcgctatccaccagttcggcgggaccatcgaaatcgctgcccgcagccagcaggcatattatcgccagaaaaaagacggtgagatcgacaatcagtttgttcgtaagaacaagtcgaactttgcacagtggcacaccattccagcgtataaaatctccatacctgcacgtccgtggctgggagtctcaaaagcacagggagcaacccttatcgatatggcgaaaaaataccttcagggggcgtttaactga

SEQ ID NO: 217548 - DNA, 1128 bp, Klebsiella pneumoniae
atgacgacgagcacagctaaagcgacacttgcggtttttgcccccggcacccacaccgcgatggatggacggaccatcacgttcacccctgaagactgcattgatctggccaacagctatgacccttcagtatcagaggctccgtttgttatcgggcatccgagcctgactgctccggcctacggctgggcagagcgtcttgaattccgtgacggcatcgtctttgccgcgccgcgtcaggtgaatccggcctttgcgaaagccttcaacgcgggcagctacaaaaaacgctccctttccatttatcagcctgacagccccggcaacccaaaacccggtcatttctatgctcgccacgtcggtttcctgggggccgtccctcctggcgtcaaagggctccctgatgcgcagttcgcagaggccagcggcgataacggcccgctggagttcgcgttgccttgggaagccgacaatctggccagcctgtttcagtcgatacgtgactgggtgatccaggaaaaaagtatcgagcaggccgattccatcattcctcagtggcgtatccagtcaattctggactccgccactgatgaccgtaagtcatctatctcaccactggcatatgccgaggagaataatgtggacccgaaccaaacgaccaccgttacggcggaggagctcacccggcgtgaaaccgcgctggcagagcgtgaagagaaactacgcaaggatgaagaagccgcaaaactacgcgatgcgaaggtgcgccgcgacgcggttgtcagctatgcagacgggctggttaaagcgggatctatcctgccacgccagaagaatactgtggttgaggtactgctcagccttgataccacgccgctgtcttttgccgatggtgatgccacggtgaacaaaaccccggaagagctgctgcgtgatgtgctgagccagaagcccaaagtgatggacttcagcgaaaaaaccggcacggctgatgctccggtcgatttcgccgacgcttccgcgctggccactgccgcacagaactatcaggcagagcaggctaaacagggtcgcaccatctccatgacggacgcagttaaccacgtgaagaaaggagcccagcaatga

SEQ ID NO: 217549 - DNA, 381 bp, Klebsiella pneumoniae
atgaatattccgggtctgattacctgccataaggcagaagtggcactggctgcgcgtcgtatggtcacgcatggcacggtgccagacgaaatcactctggccgtcgatggcagcaagctgattatcggtgtcaccaccctcgttgctgccagcgtcggtgaacccgctgatgtggttcgcagccagctgaccccggtcatctatggtggtgatgttgtcgccggtgacccgctgacggctgatgctgacggtcgtgcaattccggctacagcgggtcagttctatctcggctttgcggagtatgacggtgccgaagacgatctcggctctgtctggattgcaccgggtcaactggccgctgcagcagccggtggtggttga

SEQ ID NO: 217550 - DNA, 930 bp, Klebsiella pneumoniae
atggccaaagcaccgtttccgattgacccccacctgacggcgattgccatcgggtaccgtaacctctccctgattgccgacagcgtgttaccgcgcgtgccggtggggaaagccgagtttaaatggtggaagttcgatctcggtcagggcttcaccgtaccgaccaccacagtcggacggacgtcacaacccaatcagattgagtttgatgcagaggatgagacctcctcgaccaacgattacgcccttgatgcaccggttccgcagtccgatattgacaatgctcctgccaattacgatccgctgggccgtgcgactgagcgcgtgtccgatatcatcatgctcgaccgcgaagttcgcaccagtaaagaggtgtttaacgcggccaattaccctgtgggtaataaagaaaacctggctgctgctgaccagtgggacaacgatgcgagcaaaccgattaagaaaattgtcactgcgctcgacaagatgatcatgcgcccgaacgtggcagtactgggacgctctacggcaacagccctgcgtcagaacccgtcggtcgtgaaagcctataacggcacactgggtgaagatggcctggtaccgctggacttccttcgcggcctgctggaactcgacgaaatcgtcgtcggttcggcgttcgtcaatatcgcccgaccgggccagaagccggtactggtgcgtgcctgggccaaccatgccgcctttatctaccgtaatctgctggccgatacccagggtggcgtgaccttcggctttaccgcgcagtttggctcccgtgtctccggctccattcctgatccggacatggggatgcgcggtggccagcgcgtccgtgtcggtgagtccgtgcgcgagctgattgtggctccagactgcggctacttcttccagaatgccgtatcggcataa

SEQ ID NO: 217551 - DNA, 525 bp, Klebsiella pneumoniae
atggccgtgacctggtatatctcccttgctgaactggctgaccgcccgggcgcggtcgagctgtctcaggtgactcagcttccgggcaagcctccggcccgaccggagctgctggatgcggtattgcgtggggaagagaccacgtcatggccaccggctgaagtggccgtggcccttgaggtggtggagcgcattggcggtgcggtggaagaagcccagaacctgattgacggttatctccgccagcgcggctacaccctgccgctggtgaaggtccacccgattctgagcagctggggccgctccgtcgtgcgctacaagctgcatcagcaccgtatttctgatgaacgtaccgacccgattgtccgtgattaccgcgatgcgatgaaactgatggagcagttggccaacggcaaattcagcctcggcgcgaccgacacgcagaaacccgctggcggtccgccgatggtggatggtccggggcgcacgttcagcatggactcactgagggatttcggaaaatga

SEQ ID NO: 217552 - DNA, 447 bp, Klebsiella pneumoniae
atgagcagcgaaccgttttccatcagcctgatcgtcgagcgcctgcagccactgacgccgtccccgctgagctttctcggcaccatcgttgagtacagcaaggtgcaggagttgtccggttttgcagtccccggggcgtatgtcctgatggggccggagcgcggtgttccggggaacgggacccgggcgcaggttgccgaggcggtcttcggcgtggccgtcgccgttcgcaactatggccagggtgctgacggtctgacgcatgaaatcatcccgctgataggccagatacgcgatcagctgattggctgggtccccggcaaactcgcaaccaccggtatccagtggctcaagggcgacattctggactatgacggcggcaccctgctctggatggataccttccaggtcaatcatgttatcggaggcagacgatgcccgacgtaa

SEQ ID NO: 217553 - DNA, 204 bp, Klebsiella pneumoniae
atgcccgacgtaaaactcctgcagccgcatacccatcagggtaagcgttttgcagccggtgaaaccatcaccgtgaccgaagccgaagaagtctggctccgggaccatcaacttatcggggttgccactccggtcgtcagcgacactcagggcaaccgtggcaaaagcaaacaacaggagccggaagacaatggcacagcttga

SEQ ID NO: 217554 - DNA, 753 bp, Klebsiella pneumoniae
atggcacagcttgaaacctactactacggccaggggaaagtgtttctggcccgtcgtctggctaacgggaagcctggtgcattccgctgggttggcgatgtgtcggccttatctctggcgctgacggttgagcgtcttaaccacaaagagagttattccggacgccggggcacggtgcgcagctttgtcaccaatcaggacggtacgctgacgtcaacctggcacgatctggccccggagaatctggccgtggtgctgtacggtgagcaggtagtgatccccgcaggcaccatcaccggcgaacttcttcctgcaggtattgtggcgggtgaacgctacattctggaccatcagcgcgtcagtgacgtggttatcggtaccctggtggaagggaccgactacgaagtggattacacctacggggcgatcaccttcctgaccgctcaggcaacggcaccgtccgtgaattataagtatgcaggctcggtcaataccacgctgttcacgcagcagccggaagatttttacctgcgtttcgagggaatcaaccttgccgaaggcggtgcggcgaagattctggagctttacaaaatctccttctccccggcctcagcgctggcgctgattcagggcgacacctcgctggccgggctggagaccacctccaccgtgctgtacgacaacgcccgtccggacgacccgaccatcggtcgctttggccgcgtcattgatgttgcggagcctgtcgcatga

SEQ ID NO: 217555 - DNA, 483 bp, Klebsiella pneumoniae
atgagcaagcagaaacccgccgataccgaagatgagctgagcgtgctgctctcgacccgcaatatcaccattgcgggccgggggctggttatccgcgaatacaccctggtggatatgctgcagctgggcgacaagctggatgcgctcacccacagtctggcagaggtcatgcgtacaccgtggccacagattgaagagatcgagacagttctgcgaaaacatgccggtgatatccctgaactgatcgcctgttctgtggaccagcctgttcagtgggtcgcgttgctgcctgccggtgaggggcagagcctcatagactggtggtggacccagaaccgccgtttttttatgaacgctgtcgtccggctggaaaccatcagggcaacacgggcgaaattgtcggcttcggcagcatcttcgcaaccctcatccgggccggacacgacccgggaaggctcggaacctacactctccgccagctga

SEQ ID NO: 217556 - DNA, 3606 bp, Klebsiella pneumoniae
atggccgataactccaccctcaatttaatgctgaaaatccgcgccgacctcgcggatgccagccgtgccctgcaggggctggccggagatgtggaagacgttggctctgcagcaacaaccagctcgcagaaactcgacagcgccgcccaggctcagaatcaggtggccgacgctgcacgtagccaggcacaggcagaacagaatgctgcctctgcgacctctcagacgggagatgcggttcagcaggttgcgaccgaatatgccggatatcaggcagcgctggcccgtacccgggcagagatgggttcgctccagaacggcatggacggtaccacagcagatatcgatgcccagcggaccgcactgaccgctctggtcaaccgtatcgatccggttgtcgctgcctatggccgactggatgatatggaagagcaactgaatgcgtttcgtggtgcgggtctggttggtgatgatgattttgagcagtattccacccgtctgaatgagatgcggctccaggtcgagaaagccgctcatgccgcgaccgaagccggacgacaggaggctgcagcagcacgggaagccgcgcaggcggaagctcagcaggcggcaagcaaagagcagttcatcaaccggctgcgcgagcaggccgagaccatgaatttcagtacccgcgagttactggaatacaaggccgcgcagctgggtatctctgacgaagccgcaccgctcattcagaagctttctgaacaaagcagcgcgatgaagtacggctccatcagtgcgggccagtacgctcaggcaatgaagtatctgcccatgcagatgacggacgtcgtcacctccctggcatccggtatgccgctctggatggtcgccatccagcagggtgggcaaattgccgactctttcggcgggctgggtaatatctttgagatcattgccagcaagtttcgtgatgtgtccacgtcttctgaagatgccggagactcacttgctgatacggcgggtgatgcggcggaaggtgcggaacagttccggtcattattcagtggtgtgacactcgcccgcgtggggctcgttggtgtggcagcggtcatcgctgcggtcgggtatgccgcctacagtgcgtccggcgatcaggataaattcaacgaatccattgcgaaaagcggcaactttgcgggtacgacagccggtcagctcgaagatatggccgtcagtatcggagggatgaaaagcaattacggtgatgttcgcgatatcctcaacggtctggtcagcagcggtaagtttaccggcgaaacactgaactcggtggcgcaggcggccagtatgatggccgaactcagcgggcagtcagccgatgaagtcgtctctcagttccttaaaatggctgacagcgcaacgtcgtgggcagccaacactaatcagcaataccatttccttaatctggaaacttacctgcgaatccagaatcttgaaaatcagggtcggaaagaagaagcaatagagcttgcatccaaagcctttaatgatgcctcgcaggaacgcctccagaatattgaacagcatctaaatttggttgctcgtgcctggggcaatgtaaaagacgcggtcactgatgcctggcagtcaatccgtagtaaagcaagtggagctcttgggcttgatgccccagatgaagagctcaaaaaacaaattcaggatttagaaggaaagatagctagagcaggtagcgagtcttttgttgctatgcagtcccgtgaataccaagaatctgtaaagcaatataaagcagacttagctgcacttaaggaaaaacaagcagccgaaaatacagctgcgactacagaggcaaaacgcaaacaaactgacgctgatactattgtcgctgccgataagctccagaatatctggaaaggtaatcgctcagagcttgagaaaacagcagatgctgtagaagaaacccgtaagaattatgaaacattatggaagagcgccactgggcgggatatgttgcaatcccgtggggtcatttctactgatggcaaaaatttttctggtggtcagtgggatatcgatgtcaaggctctggataaatccgctcagggtgccgagcagtacaacaaacaactccagcagacgctgaaccagaaaaaagctatcaccgagctggatcgcgttgaagccgatattcgcaacggtgccctttctgatgccagtaaagccgagcaggataaagcccgggcaacggcaaaacagattgatgctgctgaagcggcccgcaaagcctcacaggaaggtgcccgggcgacaaagcaggaggctgaagaaaaccagcgttttgttgaacagctccagaagcaggccgataagcgtgttgaaggcgctgcggccacacgcgctcaggagattgcgacccgcaacctgaccgccgagcagcgccgtcaggctgaagcggcgaacgcggccatcactgcccaggagtttaagggccagaacctccagctgcagctggagtatctgcgcgataccggcgataccgctggcgcatcgatgctcgagctgcagaaccgtgtatctgacctgcgccgcgaatttgaagccagcggcaacacagaggggctgaactggctcgataagctgctgccggtcgctgaaaccaaaatccgcgtcgatgacctcaaaaagcagctcgacgacctgttcacctatcagtcccagcaggaaaccagcattcagtcgcaggttcagggtggcctgcttaatgagattcaggggcggcagcgcctcgttgacctccatcaggaggtgggcgacaaaatcaaaggatacctcccgcagctgaaggagctggccaccgcccccggtgaagccggtgacaaaatccgggagatgatccgccagctagaagaacagctgggcaaactgaatcaggccgggaatgagctgacgcaggcatttcgtgacggcctgcagagcggtatcgagagttccctgatggggctggccaaaggcaccatgaacctgcgtgatgcggtgaaaaacctcgccctcaccatcattaacagcatggcgcagctggccgcacagcagctggcgcagatggccacctccagccttatcgggagcagcggcggtatcggcggtcttcttggcagtgtgtttgcggctgatggcggtcaggttcgcggtccggggagcaccacctcggattccatcccggcgatgctctccgaccaggagtttgtgacccgggccgctgtggttcagcagcccggtgcgctggacttcctgcacacgttcaaccgccacggtatggcggcggtcgagggctggctcccgcgcgttcgtcatgccaacggtggtctggcgggtatccccgcacagaatatgccggtcccggcctcggtgcctgaaaccgcgatggccacacctgccgctgcgtcgcagcaacccatcagcctgcagcagcaactggtgctggacccgtccgaggtttataccgccggagcgcagacgctggctggccagcgccagttcaccacgtcgcttaaggcccaggtaccgaccctgaaacaatggctggggctgaataaatga

SEQ ID NO: 217557 - DNA, 1185 bp, Klebsiella pneumoniae
atgacgacgttatttccctggctggctgaccccgactggtcccgtggcgtgactgagacgctggagtggaagaccgatgtactacagtcgccaaccggcgctgagcagcggatttcccgtcgactttcaccgcgccggacgttcgagttcacggctatgctgtatgacaccgcccgccagcgcttcgaacatatgctctggcagggctgcgcgggtatctgggccatgccggtgtatccggatgtttatgcgctgccggcagcggtgtccagtggcgcgaccgcgctctccattccgaccgccgggcgcgacttttctgttggcggaacggtgttgctgaaaaccagtgagtcccctgatgcaaccagccggatggccaccattgccggtataaccggggataccctgcagctgggctccccgctgaccgacagctggcctgctggctcgctggtgtatccggtgcgtccggcagtgctgacagagccgccgtcgctgtcccgcctcactgatatcgtgacgaccgcgcaggtgcgcttccgcatcgcagagcacaatgccttcagcgatgcgccgatgctcacacagtaccgtggccacccggtgcttgagtccgaaaccgactggggtgagtcggtcagcggcagctaccagcctctgatccgtgagctggataacggcagcagcgtgccatcccgcattgatactgcaggtcgtccgttctggcggcagacgcgcagctggttcaccgctaaccgtccggcacagacttccctgcgccagcttctctggtacctccgggggcgtcagcgcccgatatgggtgctagggcagacgctggacttttccccgacgtccgctatcagcggcaatgctgttgatgttgttgaggcgggctttaccgagctgggtatccgcccgggtcgccgggatatctgtattttactggccgacggtacgcggtattaccgccgcattactgctgccagcctggtcgccggtgcggagcgtcttgcacttgacggcgacgccatctctgcaggtcagcatcagattgtgtccatttccctgatgaccctggcccgccaggactctgacacggtgtcctgggagcatgcgaccgacgccgacggcgtggcgcgggtcgccaccacctttaccggagtacgtgatgagctggagtga

SEQ ID NO: 217558 - DNA, 816 bp, Klebsiella pneumoniae
atgagctggagtgattttgaatattccgtggccgatggccagccgctgacgctgtatgagttccggctgggcgacagcctgttctggcgttacagcaacgccgacaaagatatcgattttgctgatcaggtctgggaggctcaggccatcagcaacagcggcctcagttctggcagcggcgacgggatggatatcacggtcccggccagtaatccggtggcgcagctgtttcgcgccacaccaccatcgcgcgccgtcagggtccgggtgatgcgctggcacgcgacggatgcctccggtgagtttcgggtcgtctggattggggaaatcagcagcgtcaaacgcgagcagattgagtcctgcaagttgatcaccatcagtctggccagcacgttttcccgggtcggactccgtctcacatggggacgtcagtgcccgtatgcgctgtacgatcataactgccgtgttgaccctctccagtttgcggtcagcagtgtggtggtcaccgccctcgatggctcatccatcaccgcgagtctgccagccggactggccagcgactggttctcgggcggttacattgagtttgaccgcaacggctataccgagcggcgcggcctccgtgagcaggacagtaacacgctgcatctgtttggcggcaccacagggctgcaggtcgggcagtccgtcacgctttacccgggttgcgaccgcacgattgcgacctgtgacaacaagtttgccaatcatctgaactacggtggccagccgcatatgcccggtaagtcgccgtacaccatcatcaaactgttttag

SEQ ID NO: 217559 - DNA, 246 bp, Klebsiella pneumoniae
gtggatccgttcagttgggctgcggtcgcaaaatttgtggcggtgctggttgcatcgtatgtcctcaataccgcgctggccccgaaaagcaaaaactccacgccggaagcggccacggaggacgactggaatatgcccatgcccgatgagggtactccgcagtgcgtcttctttggtgactgctggacggcggactggttcgtcctcgggtacggcaattatcgttatcaggccatcaaaaaataa

SEQ ID NO: 217560 - DNA, 204 bp, Klebsiella pneumoniae
atgttgataacgatggagcatattcgcgccggtggtggctgtgcatgggggctgcggaccttttttgcccgctataacctcgacctgcaggcgttcatccgtgacggcgggattgactcagacctgctggccggaaccggcgacgcgctggcgattcagatcgtcgaactggcgcaacagactcagaaagaagcgggagcataa

SEQ ID NO: 217561 - DNA, 2709 bp, Klebsiella pneumoniae
atgggcggtaaaggttcaaaaaaagtcaccgttggctatcgctattcctgggatgtacaggcggggctggggcgcggtccggttaacgaaattgtgtcgatcatggccgataaaaagacggtctttgccggtacgccggggcagatttcatccagcacctcggtgtacatcgacaaacccggcctcttcggcggcgacgataccggtggtgagggaggcatacagggtcagctcgatatcatgatgggcgaaccggatcaggttccaccggcatcgctcctgaagttgctgacaggactggtgccgggatttcgtggcgtggtaaccactttcttcagtggcctggtcagttgctacagcgccagccccaaaccgtggttatatcgcgttcgtcgcaccacaaaaggctgggacggtgatgtctggtacccggaaaaagccaccatcatgcttgagaataccgagggccagctggatgacgagagcgatctgctgccggaccagattgccaatctgcgggccattcatgccatgaacccggcccacatccttgtggaatgtgccactaaccgcgactgggggcgccagctgacgcttgccgatgacctgaacctcgacagttatcgcgccgctgctgatacgttgtatgaagaaggctttggcctgtgcttccgctataaccgtcaggacgggctggatacgttcgttcagcaggtactcgatcatgtcggcgctgtgcaatatgccgacctcgaaaccggcaaactgaccctgaagctgctgcgcggggattacagtgtcgatgacctgccgctcttcacctacgataacggcattatcgccgttcaggatgacgacagcgccagcaccacgtcgaacccgaatgagattgtcgtgacctggaatgaccccgtcacaaatgctgatggtgaagtccgggcgcagaatctcggggcgatacagaataccggacttaacagcagttcggtcgagtacaaagcgatccccacgcattcacttgccgcccgcgtagcccagcgagacctggaaacggcccagtctgaactgacccgcctggtcatccagttcgaccggcgcggtggtattctgcgcccgggtgatgttttccgcgtccagttgcccgaccgcaatatcgacaatatggtgctgcgcgtggggaaaatagaggaaggcgacaccggcgtcctgacgctgacggtggttcaggatgttttcggcctgccagccacgtcatacagttctggccagcaggatagtggctggacgccaccggataaaacggcccgtccagtcaccatattgtctcttatcgatctgccctatgcgatcctggcgggtacgctcagtcaggcagacctcagttccctgaaacccgaatcgggtcatctgggggtgatggccgtcgcgccgacgtcgctcagtatcaactatctgctgcagacccgtgctgcgggagcgacgttcgccgaccgtggccagggagactggacgccatcaggaacgctgacggctcctgtcgggcgactcgataccgtcctgcacgtcagcatggccatctatccgaccacaggcgatggtctgatggttaatgatgaagttatgcgtgtggacgcggtcgatattcctgcaggcacgatcaccgtcggtcgtggttgcatggactccctgccgtcagggcacgttgcaggggatcggtgctgggcgtatcaggatgcgctggactcggacgggctggaatacctgtccggtgaaacggttgaggcgcgtttgcttacccggaccagcacggagacgctggcagaatcagccgccccggtggccacgctgaccatggccgggcgtcaggccagaccgtatctgccagggaatatccgtgttaatggcgtgatgtatcccgatgtggtggccaacgccgatactttcgcgctggcattctctcatcgtgatcgcctgctgcaggctgaccgcctgattgactgtaccgaaaacagcatcggccccgaacccggtacagagtatgtggtgaaactgattgctcagatcaccggcgtggaggtctggtcactggccaccagtgacgccagcatcccgatcccctatgccaccggcggcgatgatgctgatgtacataccctgacgctgcagagcaaacgcgatggtctgatgtcgctttatacgttccgggcagaactgccttctggtcgctataaggcgttccctatcaccgtcaccctgtccctgaccatcgtggatggtaacgactgggccacagcaacgccggaagataccgaaaccggcgcggtgccggagctgcatgccatcgctgatgccgcaggggtcaccgcctggtatccacccgacctggtggccagcggcctttctattcctgccgatgatattgaatggccatccggaacctggccgacgtcgccgtggtcgttcggtacccatgcggtgctggccatcgcacagtggactgaaaccagcgggccactgaccgtgctggcgctggaaggcgatgcatctgcgctgctgctggattctgcaaccgggtcagcagcggctatcgaatggggcgccggtatttatctcgcagaaatggatatcactattttcacgacagacggtcccgttttgaacgagggcataatctccctgaaactgactgaacggagtatcggaccatga

SEQ ID NO: 217562 - DNA, 795 bp, Klebsiella pneumoniae
atgagggaaaactattattatggtcagggtaaggtgttcctggctccgagagataataagcgtgcatttcgttgggtcggtgatgtttcaacattgaaaatagcgttttcgtatgagcaacaaataacaaaagcatcacgtggcggacagctctatcagaatcagcgaatcattaccggagccagcggctctatcagttcaacctggcataatttctcggttgaaaatctggcattgttattgggtgctcaaccggtggatgaaccgttttcatttaatgagcagttcgccgtacctgatggagtggttaaaggggatattatcgcgctgccccataccacggtttataacgtcagtattaatggcctggaacgcgatacagattatgttgttgaccgccagttcggcacgattgagtttcttgaaacgccagaatctacgggcctgattgcggcatacgaacacctgtttaaccagtggctaccgtttttctctgcgaaaacgcaggagttttatttacgttttcagggggtgaaccttgccgaagattcggcacctgtgctgctggaactgtaccgggtctcagttgaccctctggcagcgctggagatgattagcagcgggaatgatatttccggtatggatatgacctcattaatactccctgattttgcccagaaaagtacgtctgattttagttatttcggacaactacgaattgttactcctcaaccctcattggtctataacggtcaggctaaacatgatggtaaatatcagtacagaggtaagtga

SEQ ID NO: 217563 - DNA, 2157 bp, Klebsiella pneumoniae
atgcctaacattaaagaaaatgctgtttgggttgatgatatctatctgttatctgaggaaaccccggtacttggaaaagtagcaggagcagccgatagcggcccatctaaccttcaggctgagcaactggcaaaccggactcaatggttgcgtcagactttggatggtttgcaggccggagatgcgccatatccgtcacctgaagcagctcaggatgcaattaatgcgggtagtattcctcttgacgccaggttttctgtgcgggtagatgatgcaaatatatgggtggctgagtatcagaatgttaacggagtggccacaccaaccggtaaggtgtacccctcaaaagcgtttgttgatacgttatctgaaataatccggtctctgttcacccaactcgcgccagctggcatgtcactggcgtttatggataaacgaaaaaactattcaaccgggctggatgatgctggccgattcttaactggctggattagggcgaataaagcagagttaaaagaattatctaccgaagagtttatttcatcaattatttcgtcatcccgattaaatcttggcagcgctgctttatccgtggtatctgacggaaatgcagtatctttatatgattcattaaaacagctttgttttgctttaacgaaaaagggggtgctgaaatcaggtaaagcagagattaataacctggctattgccaatcttctgggattaccggctaacacaagtatttcatcagcaacacttcatgattttgtcatggcctggcgtgatgttctcaagcgtccggcagtggggatcaaaaccagcggggcatttgctgccggaaaaattgaagcgaatcgtgtagatgtaaaaactctcaaatcggagacgctggaagttaaagcgatcatttccccggcatttttacgttattttaatcagacgatttattcacgtctgcctgatattgcccataaaatcggatacggtcagtcactcgcggcgggggtgaatactcaggcattgatcacgattgcggcgttgtataccgcattacggtttattggcggcgtccgcgcccaggacggttccggcacctcagcggaaaaccacgcgcaacttgtgccatatgttgaaacctataaaaacacagcgaatggcgcggcgtgggaaacgcctatggctggcagtatccgtggctggtatgagctactgattgcagagaattatgggtttaatccggacgatctgatcatcctgggttccgttccagccgagggtagccagtccatcgcatcactcacatcgggtacatatttgcagcgtgtttatgacgatattacgtatggatatgcccgcgcacaggaactgggtaaaacataccgacctgttgctatgtatctcatggtcggggaaacagatcagacgctcggtacaacggcagaatcgttcagtgccacctttgatctgttgcagcagcgcgttgatactcacgcctcagcggtttgcggtgaaaacattcgtgtgcctatttttgtttaccagttcagcagctgggttaaccggacgccaaatacgtcatatcccactattccaatggcgctgctggagctggcaaaaacacgtgaaaatgtttatctcaccaacccgatgtatatccacgattacaccgataacgctcatctcacggcccgcagttcatttattcacggcctgtatatttctgtaatggaaaaacgagtactggttgacggtaaaactgatgctaaacccctgatgccagttgactataaacggcaggggcgcgctgctacagtctggctgaatcctgtaggaaggctggagcttgataccagcgtggtgtccgatccaggtaattacggcttccgtctgcttaatccggatacactcgaagtgattccactgacagatgttagtgtccgctatgacgctttaacgatatcaactgccgatgatattcctgctggggcaattctacagtatgcatttcatggtggaaccacagggcagtcaccagggcgtctgcacggccccagaggatgtctgcgtgacagtcagggcgatatcatcagctttacacttaatggtgaggttatccgtatggataactattgcgtaatgtttgaaatcacgttgtga

SEQ ID NO: 217564 - DNA, 717 bp, Klebsiella pneumoniae
atgtctaatcaaggtttatctattaatgtggatgcagtctgggatgatgattgcattattggttctagttacccgcagccatctattgccagtattgctacattcggcagtcaaaactttggtgctatctttggtaacgaaccaacgatagtgggtagcccggtgattgatacgcactggtttacaggtggcgtgaatgtggggggttatgaccttcacgtcactgacaatgtcatcaaaacgatgatggttttatttcgacctaaaaataccgtcagatcgttaggcctggggaactatctggggtcaaccgtacaaccgcagggagatacttttgtgtttgaaccggctattcctcagataagggggattgtggggcggtcaaatgggatagcgacggcaacattagcaacaccacttgatacaaccaagtttcatcttgcattcctggatgttaataactcgatggtacagcttcataaattcacgaacaatgagctactgtccagtgcgcaggtggcggtttcttatcgtgcaatacctgcccctaataaatctatctatgctggttactcatatatcacttctgattttttaggaagcgttgacattgcaatgacgggagtatgggtcggaggaacactgtctcagactgaaaaaatgaccatgctggatctggtcacgcaaagctacgatggcattttgtcgctggcctga

SEQ ID NO: 217565 - DNA, 915 bp, Klebsiella pneumoniae
atggcctgcgtatttaataaacaacttttacacccgcgtaactggctgacctggttcgggctcggcatcctctggttaatcgtgcaactgccttatccgctgctgcattttatcggcaccagcgctggtcgcctttcccgtcgctttcttaaacgccgcgaacatatcgcccggcgtaatatcgaactctgcttcccggacatgtcgccagcggcgcgcgagacgctgatcgatcaaaactttatgtcgctgggaatggggcttatcgaaaccggcatggcctggttctggagcgacgaacgggtcaaaaaatggtttgatgtcgaggggttcgccaaccttaatcacgcgcttagcggtgggaaaggggtaatggtcgtcggcgtgcactttatgtcgctggagctgggcgggcgcgcgatggggctgtgtcggccaatgatggccacctaccggccgcacaacagcccgctgatggagtgggtgcaaacccgcggtcgcctgcgttcgaacaaagcgatgatcgatcgcaacaatctgaccggtctggtgcatgccttgaaatccggtgaagcggtgtggttcgcgcccgatcaggattacggtcccaagggcagcgtctttgcaccttttttctccgtcccgcaggcggcgaccaccaacggcacctatgtcctgtcccgcttatcgggcgcgaaaatgttgagcatcagcatggtacgtaagctggatcgccggggctatagcctgcatatcagcgaggtgatgaatgactatccgggtgaggataaacagatcgccgccggctatatcaacaaggttattgagcgcgagatcctgcgcgctcccgagcagtatctgtgggtacaccgtcgttttaaaacccgcccgctgggcgaaccttccgtctattaa

SEQ ID NO: 217566 - DNA, 1014 bp, Klebsiella pneumoniae
atgtcagattttattcttgcccgggtgtcgcaaaccctcgcagcggaacagtccctggaaaccttggtgcgccagctgctggagatgctggaggcggtgacccgaatggagtccacctacctcacccgcattgataccaacgcccagcggcagcagatcatgttcgcccacaacagcagcgaaatgcagatcccggaaggattttccgtcccctgggatgaatccctgtgcaaacgcgcccttgaggatcagtgtacgtttagcaatgacgttgccaaccgctggcactcctgcatcgccgcccaggagctgggaatcgctacttttttaagcattcccgtccgcctggccgacggctctctgttcggcaccctctgcgccaccagccggcaacaacagccttataacctcgaaggcgaacaggtcatgggcctgtttgcgaagctcatttcccactacgtggaaaaagacaccctggtgcaacagctgcaggcggcaaacgtcgcgctggagctgcactcgtctaccgatgagctcacccagcttcccaatcgccgcgcgctgtttaagcagctggcgttacgctttgcctccgcccgcgcccagcagcagcaggtctcgcttatttttatcgatctcgatggtttcaaagccattaacgatcggttcggtcatccgtgcggcgacagctttctggtacaggtcggcgaacgactcaccgccgtcgcgcgccgggaagatatcgttggccgccttggcggcgatgagtttttgatcgtcggtagcgcccagcaacctgccgcgcagcaggcgtatgtcacgtccctgcgtcaggctctgtgcggcgtctacttcctcggcgaacagcgtatcgactatgagggcgccagcttcggggtggtcacctgcgatccgcagagtatcgatgttgaagcggccttacgcgctgccgatgaggcgatgtaccaggataagaagtcccgccgccaggagaatttcattcatattgactaa

SEQ ID NO: 217567 - DNA, 984 bp, Klebsiella pneumoniae
atgactattaagaaactcgatgatggtcgatatgaagtggacatcaggcctgctggtcgcaatggaaagcgtatccgcaggaagtttgataagaaaagtgaagctgtagcgttcgagaagcatacgcagttcaaccaccacaccaaagaatggttatcaaaaccgacggataagcggcatctgtctgaactgatacagctttggtggaatttgaaaggcaagcatgaggagcacggtcggataaaccgcaacaagttagatattttttgcaggattaccgacgatccttgtgcttttcagattacaaaagcgctgattagtcagtattacgcggcaagaagaagccagggcattaaagcttccaccattaaccgtgatctcaacagcatcagtggcatgttcacagcgcttatcgaggccgagttgttttcgggtgaacatccgatcagagggcggaagaagttgaaagaagatgtccccgaaactggctatctgacagaggacgaaatcaagcacttgctctttaaactggatggcgacaacaagaagatagctgttctgtgtttaagtactggtgctcgctggggcgaagcggctcgactcaaggcggaacacatcatacagaaccgtgtgacgttcgttaaaaccaagagtaacaagcagcggactgttccagtttcagcggaagtggcaaaactcatagcggatggtaaacgaggattgttatttggtaaggcgtcttattctgacttcaggcagatactcagggaagtaaaacctgatcttccgaccggccaggcgacgcatgcactacgccacagtttcgcgacgcactttatgattaatgggggaagcatcattacattacagaggatcctaggacatgcgcgaattgagcaaactatggcctacgctcactttgcgcccgaatacctccaggatgcaatctcacttaacccgctgagaggtggtgctgatgcgtaa

SEQ ID NO: 217568 - DNA, 279 bp, Klebsiella pneumoniae
atggtaaagcaaatcacaagcacgaccgatgcggttccttatcaggaatttgccagactcatcgggaaaacgccggctgcggtaagaggaatgatcgagaaagggaagcttcctgtaatcgagatgaccgatccccagtctacttctggccgtgccggcgaatactgggtttaccttccagcctggaacaacggcatgaaactggcctacgaaagtcgtcctaaggagatcagggaagggtggttgatgtggcttggtctcggtgagccaggtcgatag

SEQ ID NO: 217569 - DNA, 219 bp, Klebsiella pneumoniae
atgaagaacggtagccgcggatcagtatcacagctcaatagcaaaaccagcctctactgtggttttactattctgaaactcccacgcaaaaaaccgtacaaccgccagcgctatcaaattacgcacacaggccattattacggcattgactttgctttatcagaagcatgccgaacgattgacagaatcatgagtaaaaagcggtttattgctttttaa

SEQ ID NO: 217570 - DNA, 378 bp, Klebsiella pneumoniae
atgaaactcgaatatgcagacaaaattaactcgcttttacaatgcttccatttcaataaagagtttctggaatggaatcatgattactctctccagcttttacgccacggcgtatcccacctctatcatttcgcgatgcttcaaggcgagaatgatgaatgcactcttgaagaactccgcaacatcattatttccgtcaccgatggtgatatccctaaaccatacgacctgctatctctggacgctgagcaactgaagaaggctatgaagtttgttcagccgcaggaggtaaccgtagaggttacaccggagatcctggaacacctgaaactgggagctagagcctcctggcggctggagcccactcgctttaactga

SEQ ID NO: 217571 - DNA, 264 bp, Klebsiella pneumoniae
atgttcaccgaagaaaaaacatcttgggaacaggaaatgctgattagagaagcagtggaaagtgccgagcaggggttcactgtacatctaaaaaatggtgctcgtatcaccattagttcaaaaagcccgtctaaagatttaataatttacgggctcgaaaaagcaattcgcggtaatcacgatcgcgcgcgaatgacctttattgatttcatgtattactggcatgaaaggatattcaagcagattaaaagaaaatcgcgctaa

SEQ ID NO: 217572 - DNA, 225 bp, Klebsiella pneumoniae
atgtcggttacgtcaataaagccggaaggcggaataagcgatccagagtttatgggaatcagcaccaatgcgcgcaaaggcgagcgcgcccacttactcggattgctgcgcatccgcatgggcctgctgaaagagcaaggccttacccccgaagagatttattcagcacttgagcagtggatagccaaccacgaaacaatcaccagcgagggcagtagaccgtga

SEQ ID NO: 217573 - DNA, 567 bp, Klebsiella pneumoniae
gtgaatcacttaatgatcgatttgattaacgttgataagaaaccgtcatcacctctgtgtgccattgaagctgtgttttttgaaccctcaacagggcagatcggaaaggttttttattcttcgatagacattcgtcaatctgaaagcttgaagggccgtatcagcattagtacggcattcgactggatgaaaaaagactctcactggcgcgccgaagtgatgagcgcaaccgaagctgaagaagatgcactttgcagccttgctgctttcatcgccgacaacacctgtccccggaacgcggcgttattcgtatggttcaaaggtgccccggaaaaactggtttcacttcgttatgccgtggatcgcttagaggtgtcaggcattttccctgaaggcacaaaataccgctgcattcgttcacttctggaccttgctgctgccacagactatgcgcctcatgcgagaagcgccctggcgcgttacacgctcactgacgcgcgatatcaagcggagcaagtctgcgaaatctggcagcgcctgacctctccacacattggatcgctatga

SEQ ID NO: 217574 - DNA, 228 bp, Klebsiella pneumoniae; identical to SEQ ID NO: 182835

SEQ ID NO: 217575 - DNA, 957 bp, Klebsiella pneumoniae
atgaataagtcacctcttaagtgggctggcggtaaaacccgcgtgttgccggagctgctgaagcacttacctaaagccgattgcttgattgagccctttgtaggcagtggcacagtctttatgaatacggaataccgccgctatgtgctttgtgacagcaatcgtgcattgatcaatttcttccgctcgctcagggaagaccctgaaagattgatactgatcgccaggaacgtattcagaaatggcaataacgaagataggtattacgaagagcgcaagttgttcaaccacctgtcgtgggatgacgagtgtgcagatgattacgttgtacggtgggcggcctcatttttatacctgaaccgccactgctttaacgggctttatcgcaccaacagggatggcggtttcaatgttccatttggcagctataaggcgccttattttccagaagcagaaatgcgcctatttgccgaaaaggcgcgggatactcacgcgctctttctttgtaatgattttcgtacttccattccgtacgtcaccaggaatcgcctggactccgtgatttactgcgatccgccgtacatcccgactagcaaaacagccaattttaccgcttacggcaagccatttaccctggacgatcaccgcgctttggttacggcgctactggacgttaattgccagcatggcacgcgctcggtcatctcgaatagcgacacaccagaaacacgccagatctactccgctttcaatctccacgccttcagagttcgacgttccgttagcgccaaaacccgccatatggccggtgaagttattggcgtacttcgcgtgtgcggcggttgcggtcgttctggtggtggaggttgcccggactgtggggcggtgatgggcgatgcggcatatgccgaaatgtttggcgtgccggcttgttgtggcgtagcccaggcaaaataa

SEQ ID NO: 217576 - DNA, 2628 bp, Klebsiella pneumoniae
atgcctgattccacagccctggcatggagctggaatgcccaacggcgggctattaatccaagcaacgccgaagagtctgcaattgagtatctcaccccaaaaggcgagcgtaaggcacttgcctatagcgatcttgttgatgttgtttatcgggtaccgttgcgccctcgtgatggggaggcgcgcagggcatttgatcgcacaagactggcgcgtcatctgcggcgccgcgtccaggctctcccttcgtttatccgcaagcgtttttcaatgcacctggaaactctggaccgtaggaacccgaaagaggctgtacgctggttattcaacacgtttgagcgccatgtattgcgtcgagttgatgcggtaaacgcacaatatctgccacaaggtaatctgcctgcaattttctttccgctacgtgatgattttcatctgctgccatgggcagataaaaagcgcctgaaacgactggcctataggctcgccaatctgatgaaaagcgagtttatgcgcgagtttgattttcggtacgagaaaacggcagatgtggagttttccacgatctacgcttacggcgctattgccagtaaagcgacctcactcaatattgcgatccctggctggaaacagtattgcgatgaagtactgacagcagaagatgcattgcgtgttattgccagacttcaaaaggaaaagtggtggctaggtaagctccgcaaaattcatgaccgctggcgtgagcacctcatgatcgccactagctatgtcagcaaagtggcatccccttattgctctgaaccttgccttagggagtgggtagctcaaaaaaaagccaactttgaataccttcaggcgatggagctggaagaccaggacactggcgagcgtagctccttgctcgataaggtcatgggcagcgtttccaacccgaagatcgcccggcatgaattgatggtccgcatgcgcggttttgaggatatggctaacgagatgggactggttggcatgttctacacgttgaccgcaccgtcacgttatcacgccacgcatgtgcattccggcaagcgcaacgatagatactgcaatgccagcccacgcaaaactcaaaagtacctttgcaacgtgtggtcacgtgtacgcgccaaatggggaagggaaggcatccgcacatttggttttcgtgtagccgaaccacatcacgacggaacgccgcactggcacctgctgttatttctccgcccggaagaggtggagcttgccactgaaatttttcatgagtacgcactccagatggatggaagcgaacccggcgcggctcagtatcgttttactgccaaaccaattgatgaagagtttggatcggcaacgggatacatcgcaaagtacatctcaaaaaatatcgacggttatggaatggatggcgagtttgatcacgagtcaggcaaacccgttaaagagatggcaaagcgcgtgcgggcgtgggcttcacgctggagtattcgccagtttcaacagattggcggcgcgcctgtatccacctggcgcgagctaaggcgcctgggaagtcgtgagcttgtcttgcatccggaacttgaagctgcccgcgctgcggctgatgcccctgattggccgggatacgtcaacgcccagggcggcccgtttgtaactcgcgattgtttgcgtgttcgcctcaattacgaatacaccgaaaacggcaatgattatggtgacacagtagccaaaatcagcggcgtctattgtccgtttacgatcagtgaatcggtcatttatacccgtaccaatgattacaaaatcgtaccgaagcgtaagccatcgtcggtcgagagtttgaccttagaaggccgcgacgcggccccttggagttctgtcaataactgtactggccgcgccgattcggacgaaaaaccaccgtcagaaacggcggtgtcagttgataaaaccgcgccagacgacagttcagtgacagaacttccgctgaatatcgatgctttgagacgatattcacgccagcaaaggcaggagatcactagcaggctcagaaaatccccccgcgaaagctcagatcaagccttcatgcgtaccgcgcgcggtctgcgcacgtcgattaatgacgaaaccgcgctggcatggggaccaaaagtcaccgctgcgaaaaatatgagcctgacgccggaagaggcagagcagcgctggcgcgagcagccacgggttgaggcggaacggcgcgcggacagttacgccgcagtggcttcggaattccaaaagaaaaagtcagagtcagcattgtttcaacagaacggcacggcagcgaacggtcaagggcgaaattcaccgcagcaaggcattagcgggatctcgcaagaactgcctgaccacgcgatcgtcgaactgaatagacgtaatatcgttatcagtgaccgggaggttaaattgttagtaggtggctgcattctgtcgcgtggcgaaatggaatttgccatcagagaaggggagttaatagtggagcgccggttgtttaaacacgccaacaacgctcgggcatcattgaccagacaaagtgagctgcttgatcgctgccaaagggctatcaggaagaaattatga

SEQ ID NO: 217577 - DNA, 276 bp, Klebsiella pneumoniae
atgacctcgttcactgtagaaattcatgaagatatcgttacctggcttaaaaggagcactcgccatgagatagtcctggatctgccatcagtaccggagccaggcgatacattatggctgaagagtatgcgaggtatgcaaattgtcgaaacagaaaggtgcatgatcgtagagtcgcgccatgtttcgcgtctgcgtccgactgtgcgcttagtattggtgtttagcattgcaactagtcatgggcatgataaatgtatgctctcttcagaatag

SEQ ID NO: 217578 - DNA, 699 bp, Klebsiella pneumoniae
atgagttttattaagtatatatataagaagaagtcttctgaattatctgagcttaccgaggaagaatactatgacacgttagtaaacatatgtccagctaaagcagagagagcctttgagaaagcttgggcaacaagaaacttcgaaattgaaatgtattggaaaagagcgacatatttttgggcatttattgcaagtatatttgtaggttactttgctttggtttcatcagagaactatgtcaaatatgatagatttaaccatgttgaagtgtactttttaatatgcatcggtttcgtactttcggtagcctggcacttaactaatatgggtagtaaatcgtggcagcggcattgggaagttcatgttgatttgcttgaagatgcctttacaggtccattgtataaaaccgttcatccccaagtgacatattctgtttctaaaataaatgaaattgttagttttgtttttgttttcatttggcctcttctaggtattaaatatttgtttgaccagaacctaattcattctcttgaagagactaaatctttaaattggtttgttgtgataagtacgacaatgtcatttctcgttgttttttctatgttttttggtcatggcagggggcgttttggaacaaggtcaataaagatgtacagaagaagtgtttcttacgaaaataaaggaaagtcaatgtga

SEQ ID NO: 217579 - DNA, 1050 bp, Klebsiella pneumoniae
atgcttgaacagaaatttattgaaatactacgagataaaaatatcccagagaaattgataaatgatgtaatagattccggctatatactcaggaattttcatgacccattctcaggcttccaattgtggagagttagtgacaagatgtatggtaataaacagcattccagtttgtttaatattgatgattttgttaaatatatccaaggagataatgtattcgaaaaattacctagttttacggaaattacagtgaaaaattataaagatatagaaagttttttatctgagccaaggaggaggcgctatattaatgaaggtagactttcattccgtggtcaagtatctcaatatacttataagagaaaaatcccgaacccagtaagagcggatgaaaacggaaatgaaatatctatattccctggtttatatagacaaaaaggagatatttattcattcagtattattcaaaatgaaaaaaaaagtatccttagtttcctgcaagaactcgaacctaataatcctaatatatactctgacaattcctatgcactcgacattatgcaggtggagcagcattatgcaactcaaacagcgggtttagatatatcatttgatattgaaacagccatattctttgccactcataagtttctttttaattcggatggcaaggcatatcatagcaaggttaaaaagggtgagcataacggtgttatttatggcttttgttttagagatccaccagtcaaaaaaaccgagtttttaattgaagaatttgatttgtttaaaacatacagacctgagagggttataagacaaggctgtgctttaccattattttctgactatgaacgtaacatagcaatcactgatttggattttataatatatctcgataatgattttgactatgagggtaaaagagaacctcgctatatgtttccgaatataaaagaagatagattctatggaaaactgcttgagctaaaggataggtatccgcatttacttgctaatgttgtcgaatatgaaggtagtcgggattaa

SEQ ID NO: 217580 - DNA, 750 bp, Klebsiella pneumoniae
atgactgcaacgacagaccacgaatgctttacccaaccaaacactgaaaatatttcactctggaaatacatggatttcactaagttcatggcattaattacttaccaaaagttatatgcatgtagatcagatctatttgatgatccctatgaaggaacttatcctagaaagatcatgaaatatatacaggagttgaaggaggaagaggttgaagataatgctaagttcgcgagagctatctatgatttcaataaaaagttaagaaaagctacatacataagttgttggcatgcaaatgattttgaatctgctgctatgtgggatctatatagcaaaaatgatgcttcggtcgcaattgaaactacatactcagatttaaaaaatatattgccttcggaagcaatgcttggtttggttaattatatagattatgacaaagaaatattcccaatgggaaatgtattttatgcttttactcacaaaagaaaatcatttgagcatgaacgggaagttaggtttttgattcagaatcttcctatcgataaaaaaaataacaaagtggattttgattgcgctgtgactccaaatgtaatttctatcgatgttgatataaataagtttgtcaaaaaaatacatttatcacctcgctcaccggaatggatgctgaatttgttgcaagatatagttaataaatattcaataaatgtagaggttaggcgttctaatttgtatatatctcctgtttattaa

SEQ ID NO: 217581 - DNA, 1062 bp, Klebsiella pneumoniae
atggtaactttgaaaaagaaatacggtaaaaagccgatagccagcaccgccggccctgacattgtggagtcactgaaggccgatcccgcgttgacagcgttcagctttgacggaccttatcccgtgcgggatatggccgatttgctggacaatctctattgcatggataacgggcgatactatgagacaccagtagatttttacggactggctaaagctccgcgccagagcgcctggcatgagtcggcgttgtatttcaaacgtaatgtgctcaccggctgttttatcccgcacaaactgctcaatcgccagaccttttccgcgtttgcgctggactggttcacgtttggcaatgcctatctcgaattgccgcgtaatcgtctgggcggcccgcttcccttcaaacactctcttgcgaagtacacccggcgcgggagcacagatctcgatcaatactggtttatccggcgctggaaagaagagcacacgttcaaatcaggaacggtttgtcacgttctgaaccctgatatcaatcaggaagtctacggtatgccggaatatatggcagcactgctggccgccagcctggcccactccgctgacatgttccgtaagctgtactacgacaacggatctcacgccggatgcattgtctatattggcgccgggcaggttgacgataaaagcatgaaggcagtcaaggagacactcaccggcgcgcgcggtaaaggcgcatttaaaaacctgctgctgcatgcaccaggcggcggcaaagacggcgtgcaaatcctccccttccagcagatcacggcgaaagatgagtttatcaacattaagaacgccacgcgggacgacatactcgcggcgcaccgtatcccgccgcagctgatgggcgccatgccggagggaaacggatctttcggggatatcgagaaagccgcccgggtctacgctatcaacgagctgacgcccgtaatggaggcgctgaaggtggtcaacgagtggctaggagaagaggtgatccgtttcaacccatatgcgttgcttacccctgagaaataa

SEQ ID NO: 217582 - DNA, 1728 bp, Klebsiella pneumoniae
atgattcaggatgcgtttattcgattaagggcaaagcagctctactggcagggttacccgcccgccgaaatttcgcgactcatgggtatcaactcaaacacggtttattcctggaaaaaacgtgacgagtgggacgacacaacgcctatcaaacgggtaacgcaatccattgatacccgtctatgccagctgagtgcgaaggacaataaaaccagtggcgatttcaaagagattgatctgttaacccggcagttgaaaaggctggataccgggcagaccaccactaccaccggcgttaaaaaaaccagtcgtcgcaagaagaaaaatcacttctccgaggagcagatcgaggcattgcgctcaaaaattctcgactctctcgcatggcaccagcgcggctggtacgaacagcgcgatcagcgtaaccggatgatcctcaaatcgcggcagatcggggcaacctggtactttgcccgcgaggcattactgggcgcactgagaacggacgttaagcacgactatcagcgcaaccaaatttttctgtcggcgtcccgcaagcaggcgctccagttccgcaacttcatccgtaaagcggctgaggaggtggacgtcgaacttaaaggcggtgagcaaatcacgttgtcaaacggcgcggagctgcattttctcgggacgtcggcggcgacggcgcagtcctatacggggcacctgcgatttgatgagtttttctggacaggaaactttatcaacctgcgcaaagttgccggcgccatggcaacgctcaaaggcttaacacgcacgtacttctccacgccatccagcgaaagccatgaagcctatcagttctggaccggcgatcgatggaatgcgaaacggcctaaagcgcagcgcgttgactttgacgtttcatggaagaaaacccatagcggcgtgctttacccggataaaacgtggcggcagatcgtcactattcaggacgctatcaacaacggctgggactacaccgacattgatgaaatcagggacgaaaacagccccgatgaatttgaaaacctgtacatgtgcgagttcgtcaaagacggcgaaagcgcgttcaatcttagccagttactggggtgcggcgctgacgggtatgacgactggcccgactggaaaccgttcgccagtcgccctatggggcaacgtgaggtgtggctgggctacgacgccaacggcggcagcggcaatggtgatgccggtgctctgtccgtgacggtccctccccttgtggccggcggccggtttcgaacggttgaattgaagcaactgcgagggcttgagtttgaacagcaggcggcggtcatcaaagaggctgccgagcgctacaacgtcactcatatcgccattgacgggcaaggcgtcggggaggcggtctggcagattgttaaaaactggttcccggcggctatttgctatcagatgagcctttcttccaagcgcgcccttgtcctcaaaatgttgcaggtcatacgcgccggccgctgggaatatgaccgcagcgagcagggtctggtcagagcctttaatgctgttcgcaaagtcgttacgcccggcggtttcatcacttacgaaactgaccgatcacgcggcgtaagccatggtgatatggcgtgggcaaccatgctttcgattattaatgaaccgttaggccaggaaagtggcggcggtggtttcgcaatgggatggtaa

SEQ ID NO: 217583 - DNA, 840 bp, Klebsiella pneumoniae
atggccagcacgactaaacccgcccgcaaaaagtttcgcgttgcggtttccggcgccaccgttgacgggcgcgagatccagccgcagcacctccgcgatgcggcggcgagctacaacccggccgtttacggcgcccgcgtgaacgtggagcactatctctccatgcttcctgacagcaattttggcgccatgggggatgttgtggcattaagcgcggaggatatcaccgaagggccgctggccggtcgtacggcgctctatgccgagatcgacgcgtcggcacgaatgaagcagctcaccgatgaaggaaaaaaaatctattccagtattgagctgcatccgcagtttgctcttaacggcaaggcgtatgtggtcggcctggcgatgaccgacactccggcaagtctggggactgagcgccttaaatttgccgcgcagcagcgcgcgcaggtgatggccttcaataaccagcagatcgaggcgccgctgttctctgatgcgcttgaagctgaagtgatcgaactggcagctcatcgcagcgaggagagcgtcaactggttcaaccgcgtgatgggcatccttggcaaaggccagaaaaccgacgatcagcgtttcagtcagttgcatcaggttgttgaagccgttgctcaatctcaggcagaccagattgaccggttcagtgccctggaacaggaccgccaacaggataaagccaccattcagcaactgaccagcgaacttaacgagctgcgcggtcagcttcagctccagcccgcagaaaattacagcgcacgaccggcggcaaccggcaacagcagcgcgcagcttgcagacttctaa

SEQ ID NO: 217584 - DNA, 1035 bp, Klebsiella pneumoniae
atggaaaaccagacccgcgaactatttgataagtacattgtgcgccaggcacatctgaacggtgtctcaccctcagccgttgccaatcgtttcagcgtcgatcctactatccagcaaaaactggaacaggccgccatggagtcggatgacttcatgaagctggttaaccactttggggttaaagagcaggaagggcagaaagtaaaaattggcagtaagggaccgatggcgagcaccaataacagctcggacggcaccaaccgccgtaaccctgcaccgaaccataacaaagagccgcagaactaccactgccgcaaaaccaactatgactatgcgctttcgtatgcggagctggacgcgtgggccggtcaccctgaatttcagtcattaatcagtaatgcgatggctcgtcagctggggctggatcgccagatgattggctttaatggcacgcattactctgaaaactcagaccgcacgacctacccgttattgcaggattgcggcgttggctggctgcaaaaaatccgcaatgaagcgccgcagcgcattatgccgggtatcacgctgacctcccgtgatgagaataacgcggtaattgcgtcaggcacctacggcaatattgatgccgccgtgcttgatgcgcgtcacagccttatggatccctggttccgccgcgctcccggcctggtgactgtgctctcgtccgatctactgctgaaagtgaacctgccgaaagtgaacgcgctcagccagaccaatccgaataccgaactgctggccgcgcagctcattgtcagccaggaaaagatcggcggtctgccgacggtctttgtcccgggtattcctgaagatgtagtgctgatcaccaaccttaaaaacctctctgtgtactaccagaaaggctccctgcgtcgctctatccgggaagagccgcactacaaccgcgtggcgacttaccagtccagcaatgatgactatgtcattgaagagtacggcatgattgccatgatcgacggcgtgacattcgcctga

SEQ ID NO: 217585 - DNA, 858 bp, Klebsiella pneumoniae
atgctgacaccggcacaaagacactttcagaaggtcatggcagagaggcggggcatcagtgatgagcgtgacgcggagacgcgcaccgcgcatgagcagatcctctttcgcctgcatatgcataaatcttcgctaagccaaatccagtcccgccaggcgaaggccgctgtaaaggccagcatccttcctgaatttcagggatggattgacggcacgatcgagggcgacagcgggcgcgcggatccggtcatcaccacgctgatggtgtgggcggtggactgctccgactatgcgctggcgctgcgtatcgggcgctatgtcgttaagcatggcctgagcatgccggatgacaactatcgccgcccggcacccacggtactggccgaggaaatctgcaatcccattctgaacctcgccaccacggacgccggagccgatttgtcaggctatatccccatgctggacgagctggccgaaattgtggctgacagtgatatgccggatgaggtccgcgcgaagctgtgcaaggtgagggcgttttgccgtcgcgccacggaagacgcggaaaccaaaggcgaagcgctgaaactcttccgggaagccatgagcctgaacccgggtgccggtgtgaaacgggagatcgcttctctggtcagcgctttgaaaaaggctccgcagaccagcgcggcaagtggtgatgcggaagatgagacttcatccagcgatacagcagcaaccgaaacacccgcaacagaaaaagcaacacgaacgcgcaagcagacgaaaacggcggccggcactcaaagagccacccgcaaaacggcggcaaaaaagacaacgaaaaccgccacaaagtaa

SEQ ID NO: 217586 - DNA, 516 bp, Klebsiella pneumoniae
atgagttttatcgcacagcgccccgtcagacctgctgaaagtgatgtgacagacgtggacgacggcggcgcacagattgccatcggcactttctggccgacggtaaaactccacgatctgcgcctggctgcccgcatcgccggtgacattacaacatcccgattaatgcatatggcaacggaggccgcgctgcatgtcgcggatcaattgaaggactggcgcaagcaaagggaagcggaaggtgcggaatctctggcctctgtgctgctgacttctgtcggtgaacctgtcgagcagattaacggcgaaagcgcaaaagtttaccgcttccggcgtgcggtctactccttcacgcgcgccagtgttctggagggttacagggatgttggcactacgccaaaaggtgacaaagacgccgaagccctggacaggcaaatagatgatctctggcgggacgggcgctggagtatcgctgacattcgggaagaagcccggatctatgcggagctgttctga

SEQ ID NO: 217587 - DNA, 201 bp, Klebsiella pneumoniae
atgaaagtcagggcgctgcaaaacgacacggttgatcagctttgctggcgtcattacggcaaaaccgcaggtgtcacggagaaggtgctcgaagccaatccgggactgagcaaccagatatttttgaatgccgggcaggagatcgaaatgcccgtgataaccagcgaggtggaacgggtaaccgtccagttatgggaatga

SEQ ID NO: 217588 - DNA, 279 bp, Klebsiella pneumoniae
atgactctggatcgtattaacgaatattttgcgtttgcaacatccgccctggtgaccggcgtgggcgtcatgaccgtcagcgaaaaactggcgctggctggccttcttatggggattgtttccgccgtccggctggcgattcaccgccgccgcattgagcaggccagccagcgccgtaacgatttgatcgagcagattctccgccaggcgcaaacccgcaacctgtcggaccgtgagcggcagttgctggagcaactgcacggagacaaacctgcatga

SEQ ID NO: 217589 - DNA, 546 bp, Klebsiella pneumoniae
atgaagaacatcatcaaaaaatgttcgattgcggtgatagtggctctgggcatttcgctggcgcccgggagcgtcagaacatcgaaagaagggcagcagaaaattgcaggttgggaagactgccgcagcacgccttattactgcacggcgggggtgttgacggttggcattggctccacgggcggcgtggaaaaccgcgaatacagcaaccaggaaatagcgcggcgctggatcaacgatctgcaacgggcggagaactgcatcaataacaatttccatggtgccgacatgccgcaactcacctttgaggctatgacggatgcggccctgaatctgggctgcaccgggctgatgtggttcaccgataaaaacggacgcaagcagaggaccacgatctggaagcatgcccaggccagacaatggccgcagatgtgcaacaggctgactgatttcgtcaatgtgggcggtaagcgctccgccggcctggttaaccggcgcaatgattttaaagcctggtgcctgctgggcctgagtacgccgtcatga

SEQ ID NO: 217590 - DNA, 321 bp, Klebsiella pneumoniae
atgcagaaggggagcaccgacgtgaagcaatgcaggccgcgttcaatggtgacgcgtgcgctgttactcctgtgcctgacgctgtcagtcgtagcctgcaaaaacgcgccgcccgcgccggtcattcagctggtccgtgaacccgtcccggagagtctgaccgaagagacaccacgcccggcgctggataagccagtgacctggggcgcggtggcgatattcagcgacaggctgatggatgcgcttgatgcctgcaatgctgacaaagcggcgatccgccagtgggacagcctgcgccagaacacccgaaaggagccataa

SEQ ID NO: 217591 - DNA, 636 bp, Klebsiella pneumoniae
gtgagcgatcgcatgttcagcgagctggatcaggtctttcaggacattctcgacggcgtcagcccggcggggcgcacccgtaccgcgcgcaaaattggtctggcactgcgtcgcagtcagcagcgccgtatcgcgtcacagaaaaacccggacggcagcggctatgccgtgcgccgccgtaaggtttaccgcacccagcaggggatcaagttcttctggaataacgaggtgcgggcgctgaaaaactggcgcggcgggcgcggtaaatatggccggacaatcacgggttttgacgagaagcgccgggatatccgcaccttctaccgggccgatatcgagcggtatctggaaatcaaaacgcaatcagctacgcattcagagacaaaaaaagcaccgatgtttacccgcctgcgcaccctgcgttttatgaagctcaggccggacgcgggcggcgtcaccgtaggatttgatggcatcgctgcgcgcattgcccgtattcaccagtacggcctcaaagacgaggttggtccgggcgcttacgcgcagtacccggcgcgtgaactactgggcataactccggcagacctgagcgctacggaaaacgccgttatcagcagtctgggcggtgcgtcatga

SEQ ID NO: 217592 - DNA, 588 bp, Klebsiella pneumoniae
atgaatgccgaactgatgcgcctgctggaaaacattctgcgccagggtgtggtggagcaaatcagcgccgacaagaaagcggtgcgcgttcgctccggcaggttgctgaccacctggatccgctggaacgtcacccgcgcaggggcattcagcatctggctgccgccctcgataggggagcaggtctggatcggttgtccgggcggcaaccctgaaaacgcgtttgtgattggctctgcatacagcgcagataatccgccaacgggcagcaacctgctggaaatcagcatcaccgcaccggatggcgcgcgcctgcattacgacgccgccgccgatgccggagcactgtccgtgaccggtattaaaaccgcgcatatccaggcagagacccgcgtcacgctggacacaccggaggtggaatgcacggaacacctcaaaacgcgcactttcgaactgacccacggcggcacgatggccggtgatgtgttccattccggcggcgtgttgcagtcaaacgggatcaccgtacatgaacataaacacggtggcgtgcagtctggtgggagtactacaggaggcccgcagtga

SEQ ID NO: 217593 - DNA, 351 bp, Klebsiella pneumoniae
gtgacagccagttacacggggatgaacccggaaggcaccggttcgctgaccgatcacgatcagctctggcagtctgtgacaaaaatcctcaccacgccaataggctcccgtgtgatgcgccgggactttggcagcgtggtacctgatttactcgatgcgccacagaacaccgtcacccgcatgcagctgatgggcgccaccgctattgcgctggcgcagtgggagccgcggatcagtctgaccaccgtcaatgtggtgttttcagaaacaggcgcggtgactgctgaactggccggcactatcacggaaaccatgacagataccagcaacaccatcaggttaaggagctag

SEQ ID NO: 217594 - DNA, 924 bp, Klebsiella pneumoniae
gtgcaaacgtccgtcgatttatctcagatcccgcagcctgatatcgtcgaggtgccggattttgaaacggtgctggctgatatccgagcgcttatcgtggcggccatgcctgcggaacttcaggcttctgtgtctgctgcgctgttgcttgaatctgaaccgatggccgcgctggctcaggcattcacctatcgcgagatcaatctgctgcaacgtatcaatgaagccgtgcgcgcggtgctgctttccagcgccctgggggcggatctcgatcaggtcgcgggtaattttgacactgaacgtctgctgattactgaagccaccgacgaggcagacgccgtatacgaaagcgacgaagagttgcgcgcccgcgcgctgctctcatgggcgcgcctgagcacggcgggtgcccgtaatgcctatcactattttgcgcgcggggctgatgcggatgtgctcgatgtgcgcgcctatggccctgaaacccataaccaagaaggacgcgtttttctctacgtgctgtcacgtaccggagatgggactgccccgcaggcgctgcttgataaagtcctgtcagcggtaaacccggaagacgtgcgtccgattacggattatgtggctgattatgtccgctccgctgtgattgtgagttatcaggtggttgctgatatttacgtcccttatggcgtggacaccgccacggtgctggaaaaagccaccgcagcactgaacgaatacactgcctctgtgcatcttatcaacgccaccgctgcacggtcaggcatagacggggcgctgcatcaggacggcgttgtcaccgtcgatttgcactcacccgtcgccgacgtcgttgcgacgatgggcgaagccccgcattgcacctccgttaaaatcaatcttgtggtgatggaccatgaccgctaa

SEQ ID NO: 217595 - DNA, 213 bp, Klebsiella pneumoniae
atgaaaacattcaatcaattaaaattcctgatcgacttttgccagaccgatgtgtttttccttgagcacctgaaccggcttcagatcgccggcgtgatttatcttgatgaaggcgatatcgatgctgaccgcaagaccgtaagtgatgatttttatgatcgccttgccagtgtgtacggcattgagccagcaacaaaaaatgtggaggcataa

SEQ ID NO: 217596 - DNA, 1098 bp, Klebsiella pneumoniae
atggccacgggactgacactaaccacggcgggcgccgccgaaatcgaggccgcgtatcaggcgggggaggttgtggatattaccgctgtactgatcggcgatggtggcggcgtgacattgccgaccgatcccgatgacctggcggcggtgacggcgctttttggacagtttggccgtgaaacctttgactctgattcaagctatgaggggtttatcagcggtcagatcgttatcaactgtcaggattatccgggtaaaacgctcagagaagcggggctggttagcgctaaaggtacgctcattgcttacggcgcatacccggcgacatacctcccggcgcaatcagattccatcatcaaagagatcattttgacgctggtgttgacgctgacgcacagctcaaatgtacagctcattatcgatccgacgcttgccacactcacgcaggaaacaggtgataaacgctatctgcggcgagcgcaaaatctttctgatttaaacgataccaaagaggcccgggagaatctggggctggggaactcagcgacacggaatgtaggcaccgatgcggagacggtagctgcgggggatgactcgcgcattaccggcgcacttcagaaagaaaataatctttccgatctgaacgatacatccgaagccctgaaggcgctgggactcaacagcaacggagcggcctatagggctattgttgacgctattttttacgttgggatcatcatttcaggtgaaaaaagcccagcagagcgtttcccttggcagacgtggacggatttaagcgaaacctttgctgatagggttgtcaggattggttctcagtatggcgtgactggtggtagtaacaaaataaaactcgaagctgataacctgcctccacattggcaccgctctggtgacagatctcccggtgcaacgtgggatccaaacaccactcacggcactgataaccagaaaaacggtccgcttgcgctcactgagggaacttatactgatgcggcagggctgaaagagtccacaaataaggcagtagatgtaactaacaaatataccacattgtgcatgtggaagcgaatggcataa

SEQ ID NO: 217597 - DNA, 198 bp, Klebsiella pneumoniae
atggaacagttaacagcaagctcacttcatgggttagaaggttttatctctatgtttgataaagactcactgtttcggggacaacttgagcactacggtgagcctaacaatccacatgttattgcttcatttgaccgttacgattgcataccctcagaaatgatgaagtggatgcgttattctagtaaagtccgataa

SEQ ID NO: 217598 - DNA, 1644 bp, Klebsiella pneumoniae
atgaatattaatactgaaaaattcaaatcctcttcgattcaagatgcttggaaatatatttgccagcttcgtgttcagctttgcaagaataaagcaagcttagttttgggggcggggattagttgggatcttgatttgcctctttgggataagttaattgaccgaattaaagtctcaatgcaagataaagctccagaagtaaaaactgtaaacgacgcgccaggcaaagcagcgcttgtattatttgaaatgttttgttcttatagaaaaaaggaaatacaagagaataatcaatattctagtgatgttttaatcgaaaggaaaattctggctgattggcgagaaatcattcatcaagctctatatgaagacacagatgctaacaagagaaaagatgttattaataagcatccttacttcatcgaaatgatagagtttattaaacactcagaattaactgttaattataattttgatgattatatcgagtatggtttgtcttgtgaagacctaaatccgacacgaaacgaacgcccttaccagacagtttggtcacatcactctcaatttaccaaagacaagtgtgttatatatcatccgaatggttttttaccattggacagaaaaaaatttcagagtgaggagttgatattttctgatggtgcttttgctgatcagttgctcgacggtatcggcggaaatttatctaccttgcttcatgttctgacaaaaaaaacgagcgtgctgattggccattcattgactgactctactcttttacatttactacgtaaagctagttccattagtcctggtaattataattactatataaaatacattggtgagaattcatgtgagttagaaccaaaaagtaagtcagcaatttttgaagcgaactttaataattataatttaattactttattttttaatagcgaggagattaaatgttttttaaaggctattactatgcctgaagaagattttatgcgaatatcagatatcttaggtcttcctacgaaatacaattactatcttgtgggggccgttggtacgggaaaatctacagtagttagtcagtttggtaatcttattacactcgatgaatggtttgatgagcgacctgctgatatggctctgtcaccagaccatctttcctcaacaaaaacaatgacaatagattcttggactaatgagcagtttggcaagaaaaatagctatttacaaaataaaaaaataggaatttatctcattgatagatcaccgttagatccactgtcatttgtggtgaatatttctgaaagtgaaagggccagacttatgttggaacaaggtattagaccaggtaaatcaaagatgaagattgcatctggtgaaattatccatatgattggcgactctgatgaaatatggtcgcgattaataacaaagagaaaagaaagcgattggccgcaagataaaattaatgatctgcagcagaagagcatgaagatttatggacctcttaatccgaaactaatctactctactaatagaaaagaaaatgatgttattcgtgatgttgcgagaattatattctcatcatcgtaccttccatccgacttaaacggccatatggagaatattgcaaatggtagctaa

SEQ ID NO: 217599 - DNA, 429 bp, Klebsiella pneumoniae
atggtagctaaaaaaaacatctatctggcggcacctttgtttaatgaggccgaattgtcatataaccgagagcttaaaaagtatttggaatcagagtttaatgtttttttgcctcaagaagatggtttgttgttgagggatattatggcggaaagtgcttctctcgatgttgctgagaaaaagatttttgaagcagatgtaatggcaatgaataatgcggatataattttggttgttctaaatggagcacatattgatgaaggggttgcttttgaattagggtattgttttgctgctggtaaacgctgtgtcggtttaaaggaagatatacggcaggcgctacctacgggaaataacccaatgataaataaaagttgtgaaagaatttttaataacaaaaattctttacttacatggcttatgtcatag

SEQ ID NO: 217600 - DNA, 498 bp, Klebsiella pneumoniae
atgatgatggtgttcggactttttgtatttgaactcaggacgctgccctatcagcaattgcagctgtctcgtaactggcggcacgttaaaaatgatcgtgtgggccgtagtgcaaaatggcagtacgttggcgctggtgagaaccagctgacgcttggcggactactgtatcctgaaatcactggaggcaacctgtcattgggtgcggtctcgacaatggcttacaccggactggcctggccgctgattgatggcgtcggctcaatttacgggatgtatgtaatcacgggtttgcaggaaacgcatcaggagtttgatcgctacggtaaggcgaaaaaaattgagttcactctttcattgcagagggttgatgaggatatcagagaacgactgaaaagttcttcagttagcgatctgattgcaacactgaaggacggtgccgaaagcacgttaaatactgcacagaagatggttagctatccatataatgagcactag

SEQ ID NO: 217601 - DNA, 2976 bp, Klebsiella pneumoniae
atgaagagtcttgatatccgcgttgctttcagcgctatcgacagatttacccgccccgttaatgctgcccgccagagtgcgggcggcctatccgactccctcagaaaaacacaatccaccctgaaagggctcgataagagcggtgccacttttcagcgaatgaccgcggccgtcggcaaaaccgaccgttccatctcacgtgctcgtacccgctttgatggcttatcagaagcgcaacgtaaaaacggaacgctgacggaaaaacagcaaatactgatgtcgcgactgggtgagcggcttgatcggttgaccgcaaaacgcgtgacggaagtggctcgccttcgtgagagtgcatcagccctgcgccagcatggcgtcatgctttccggtagtagcgccactataggtaacgcgatacaccgcacagaacaatacaaccaatcccttgaacgggaaaaacggcaacttgctgcggtcactcaagctcgtaaacgttacgagggtgcgcagcagatggccgggaagttgcgctctggcggtgccatagcattaggtacagcaaccgcagccgggtacggcgccggacgcttcctgtcacctgcggttggttttgatgaggaaatgtcaaacgtccaggcgctgacgcggctcgataaaagcgattcacaactagccgccctgcgtgctcaggccaaaaaactcggcgcggaaaccgccttcaccacgcgtgacgccgccagcggccaggcctttctggcaatggcgggcttcacaccagatgctatccgtgcagcactgcccggcgtgctcaatatggcgctggcaggcagcatggaactgggtgaaacggcagacatcggctcaaacattctttctcagttttccctcgatgccggagaaatggaccgcgtcagcgatgtgctgacaggtacatttacccgtaccaataccacgcttagcagcctcggcgagacaatgaaagttgtcgggccggtagcagcaggacttgggattagcctggaagaagccgcagccatgaccggcacgctggcgcgcgtgggtattcgcggtagcgaggctggtacggcaatgcgtcgctcactctcccgcctggcctcccccactacggcagccaaaaaggcacttaaagagctgggagtggaaactgccgacgcgagcggaaagatgcgacgtccgttcgatattcttctcgatctacaaaaacgcgtttcccgctttggtgaggtggatcaggtttcatttttcaaagatatcgccggagaagagggttttacgagcctccagtctttggtcaacggcgcaggtgatggctacctccagtcactctatgaacaaatcgctgaagcgcataaaaatcaggaggcattcgccgtcgctaacaagaagaaagacaaccttggcggcgatttgaaggagctggacagcgcgtgggaggcgttccgcatttctgtggctgagacagtagacggcccattgcgcagactgacacaggggcttagtcgggttattggcactattcaaagctgggtagaagaaaaccccagactttcacgaacgttgttactcgccggtggtactgcactggcattaaccgcagtaattggcggtctgtcattagctgctggtctgctgatggggccgcttgcaaagctcaggctggggtttgcgcttctgtccggcgggagcggaatcggaggtacggtatcagcgttccgcatgttgagtgctgcgggcggtagctcactggtaaaaattagcggatggcgtgctttactcagcggcctggcaggacgcatcggcgtattaaccagaatgatggtacccctgcgcggtgcgttacttggcgcctttacctctccggggactgctatcagcgccctgtcaaaaagcattggcgggctggcattgcggctaaccgggatccctgctctcttcggcattgtaaaaggcggtattgcggcactgggcggcggattatcaatgctcttgagcccaatcggtttagtgggtgctgcgtttgtagctgcgggagtactgatctggaaatactggggaccaattaaggccttctttagcggtttttttacaggcgtcatccaggggttagcgccagtttataacgcattttcccggctggcgcccgttttcggggtcattggggatggcgtcaaaaacgtctggaactggtttaaaaaagtattaacgcccgttgaggagagtcgcgaggcactaaacaaatgcgccagcgccgggcagatatttggagaggtcctggggtctgcacttagcgtactgctttggccgcttcagaagttaatggaaggtgttggctggttactggagaagctcgatctcatccccgatggcattgaaagagccaggctggaagcagccagactcagggctattccggttatgtgggaatgggatgaaaaatccggacgcatggttaaaagggagtggcaatggtcgtctgaaaagcctgcaagcaaaggcagcgccccgccgcccaatgtgctcgggggcaactctggaacagagcggcggctgggccaaatcgcggataacaccaaaggccttttagatgaggaaaagcgcaaacgtatcgggccgggtgacattgtatttaaaaatctccctccagcccttgcagtacgtggtgaatggcaggagtcgaagcttgtccgccagtctgtcagtgctcgcccggttattgccgctggcgaaccattgataaaacagacgcaggcatggcaaccggtacaccgaaatcaaagcacccacacggcggctgcggcttcaggttatagtttttccggtgatattcatgttcatctgcatggcattcagaacagcaatccgcgcgaactggcgcgacttgttggcgaagcggtccgcgcagaaattgacaaacagctacgcgctgcccggggttcgttccgggaccatgattaa

SEQ ID NO: 217602 - DNA, 318 bp, Klebsiella pneumoniae
atggctaaaaaaactaaaaacctgttcacgctgatgcagccggtagttcgtaaagacagtgagatcggtcaggtggaaatcaccggcgctatcagtcaggccggatcgttgcgtggcctgaatcttatccgcgttgccaatatggatgcagactcaattgccacgctgttgacgcgagtcaccgcgcctgctctgacacaaaaagaaatcaacgaaatgcacactctggactttatcgggctggcagagcttctggtccctttcttgaatccgccggagcctggagcgtcgaacgtggcggagacggagagcgagtaa

SEQ ID NO: 217603 - DNA, 516 bp, Klebsiella pneumoniae
atggctattcctcacaaactgcggctttttagctgctttgttaacggcgacaactatctgggaaaagtgacctctttcactcgccccaaactgtcacgaaaggtagaggactatcagggcggtggcatgctgggtgcggtcggggttgatctcggccttgaggctggcgcgctggattcctccattgtttttggcggcgtcattaaggctctgtttctcgaatacggagcagaaattgacggcacgcggctgcgctttgcgggtgaatatttcactgatggcgaaagccagcttgtcgaggtggagctgcgcggacgatttactgaacttgacggtggagattcaaaacagggagaagacaccgaggaaagctacacctttaaatccacctactacaaattctccatagatgatcagcccattatcgaaatcgatctgctgaatttcatctacaaaaagaacggtcagaacatgttcccggaccgcatcacctctgcccttggcatgggcaattga

SEQ ID NO: 217604 - DNA, 1173 bp, Klebsiella pneumoniae
atgtctgaaactcgttttcacggcgtccgctctcgcgaaaataccgacctacagcaggcaatcaatgacattgattccagcgtaatcggtattgttgcggttgctgatgacgccgatccggaaaccttcccgctcaatacgccggtactgctgacacgggtgcgtaacgtcctcggcaaggcaggtaaaaccgggtcactttacaaaactctcaaagccatttccgatcagtgcagtccgcgtgttgtgattgtccgggtggaagaggcttccggtaacggccccagccagtctcaggccgttattggcggaacagatggcgacagctacacgggaatgtatgccctgctgacagcggaagccaaaaccggctatcggccgcgcatcctggcggtgccggactacgacaccgaggaagtgacgtcacagctttgcgtgattgcccagaacctgcgggcttttgtttatgccggttgtaacggctgcgcgaccatggcggaggctatcgcttatcgcaaaaccttcgcttaccgcgagcttatgcttatctggccggacttcatcgcttacaaccccctgacggatgataacgaaacgtttcctgccccggcatacgcctgcggcctgcgcgccgctattgataacagccagggctggcacaaatcactgtccaacgttgtagtgaataacgttctgggtatttcgaaagatgtgttctgggcattgcaggcagaagacagcgacgccaacgagctgaacaacaacgaaatcacaacgcttatcaagcgtgacggtttccgcttctggggtaaccgcaccacggacaccgaaacctacactttcgaggtgttcacccgtaccgcgcagatcctggcggacagtattgcggaggcgcaatttacctctgttgacagcccgctcactccggccaacgtgaaagatgtggtaagcgtcatccgctctgctctcagcaaaaaagtcactgccggccagcttatcggcgctgactgctggtatgacacgctggacaacggcaccacggatttgcgccaaggaaaactgattgtgcgctatagctacagcccggtcccaccgcttgaagatctgacgctataccagacctttactgatgatttttacgaaccggcgttcgcgtcgctcgggggtgaataa

SEQ ID NO: 217605 - DNA, 1140 bp, Klebsiella pneumoniae
atgtcgatagcagacacgctgacaacagcagccgaagcgtatgtagataaattaagtgaggtcgtaaagacaccggattttagcatcacgctgggtggggttgccctgaccgaactggccgaccgcatcacctcgctatctgttacagataacaacggttttgatgctgaccagctaaccctgtcagtagatgactctgacggggtaacagatttacccccacgtggtgcggagctggcggtgtccatcggctggctgggtgaggcgttgatctacaaaggtctctacaccgttgacgaggtggggcatagcgggccgccggatgttatcgacatcaccgcgcacagcgctgattttcgcgaagagatgaacgtcaggcgggaggtgtcctggcatgatgtgacggtagagcgggtggtatcggccatagcccggcgctatgacctgaagccgatgattagcgaggccctgatcgacattgagatcgaccatgcggatcagaccgaagagagtgacatgtcgtttttaacgcgcatggcggagatgttgggggccattgccaccgtgaaaaatggctgtctgctgtttatcctgcctgggggcggtgtcagtgcatctggtagggcgctgccatcggctgagataacccgtgccagtggagatcgccacaggttccgcattgccgatcgcgatgcttacaccggcgtgcgggcgtactggctggatcttaatttcggtaagaaaaaaccggtcaaggtcactaagcgcaaaacaaatactgccagaaaaaagtctgaggagaaaagcagccgcccggaaggggattacatggagggcgctgaaggtaacgtgtatgttttgcgtaaaacctatcagaacgaaacggcagccaggcgcgcagctgcggcaaaatggatacagctccagaaaggcgcggcacagttttcgataaccctggcgcgcggccgcgccgatttatacccgggtatgcatctgaccgtgtcgggctttaagcctgaaatcgataatcaggattggatcattgccagagcggaacatgtgatcggtgataatggatttaccacgaaaatggagcttgaggcgaaaataagcgactggattgcagaaactgaacagtag

SEQ ID NO: 217606 - DNA, 768 bp, Klebsiella pneumoniae
gtgcgccagcatcgtgccggtgggcaaaatgaggtactatcgccagccactccttcttcgggccgcctgatgtccaccattatcgatacctttgtcgcgccgccgtgccgcgaacagatcaccctcttgtatcaggacgaacacctggtgctgatcaataagcccgccgggctgctgagcctgtcgggcaaagatccgcgcaacctcgactccgtgcatcaccggctggttcagcgctttccgggctgcaccctggtgcaccgcctggacttcggcacctccggcctgatggtgatcgcccgcaacaagggcattaacgccttgctgtgccaacagttcagccagcgcacggtggacaaggtctatacggcgctgttgtgcggccatctggcggaagatgaggggatagtggaggcggcaatcgccaaagatccggcccgtttcccgcgcatggcgctctgcgcccgccacggcaaaccggcgcgttcgcgctatcgggtcatagaccgcctgtatcaggcgcgagaaggcgagagggcgctggcgttaacccgggtgacgctcaccccggagaccggacggacccatcagctgcgtattcactgccagctgctgggctatccgatccttggctgcgatctgtacggtggccgggagctgcccggcacggaacaggctccgcggctgatgctgcacgccagcgaactgcgctttgtccaccccgtcagccatgagccgatgcatatccagcaggcgagcccgttttga

SEQ ID NO: 217607 - DNA, 720 bp, Klebsiella pneumoniae
atgagccagcctttgcttgcctttaatgaggtggatgtcttctacgggccgatccaggccctgaagcaggtctccctcaccgtcaacgagggggagacggtggcgctgatcggcgccaacggcgccggtaaatcaacgctgctgatgtcggtcttcggccagccgcgcattgccggcggggagattttctatcgcggggaggcgatcagccggaagtcgacccactttatcgccagcaacggcatcgcccaggccccggaagggcggcgcatctttcccgatatgaccgtcgaggaaaatctgctgatggggaccattgccattggcaaccgctatcaggccgaggacaaggcgcgaatgtaccagctgttcccccggctggaagagcggcggggacagcgggcgatgaccctctccggcggcgagcagcagatgctggccatcgcccgggcgctgatgagccgaccgcgcctgctgctgctggatgagccgagcctggggctggcgccgctggtggtgaagcagatttttcagatcctgcgcgagctgacggctcaggggatgacgctgtttctggtggagcagaatgcccgccatgccctcaacctgtcggaccgcgcctacgtgatggtgaacggccagatccgcctgagcggtagcggccagacgctgctcaacgacccggaggtgcgtaaggcatatctggggatcagcggctga

SEQ ID NO: 217608 - DNA, 444 bp, Klebsiella pneumoniae
gtgcgcttaacctcgcagggggaaacctatttacgcgatgacgttattatggcgaatgccatcgtctactcttttggtaacgacgtctatagctacgaaaccggggcccactccgattttgaatctatccgtacggttctgcgaccggcttatatctgggataaatataaccagaccggcgtcgagctggggtacttcaaacagcaaaacaaagatgttaccggcaagaaatataacgagtccggctacaagaccacgctgttccataccttcaaagtcaataccagtatgctgacctcgcgcccggaaattcgtttctatgccacctatattaaagcgaaggatattgacctggataaggccgcgaataataccaccagcatttttgaagacgggaagaacgatcagtttgccgtgggggcgcaggcggaaatctggtggtga

SEQ ID NO: 217609 - DNA, 1167 bp, Klebsiella pneumoniae
atgaaacgacatgcaatttatttcgccctggcgctggcgggcgcggcgtttaccctccaggcggcgccattacccgcgatgccggacccaagcctgccggtgagccactttatcacccaggttaacgcggataagagtatcacttaccgcttgtttgcccctgatgcccggcgggtctcgatagtgactggcgccacgccggactcctttgtctcgcacgacatgaccaaagcagcggacggagtctggacatggaaaagcgagccgatgaagcccaatctctatgaatactatttcgatgtggatggcttccgctcggtagataccggcagccgctatcagaagccgcagcgccaggtgaacaccagtttgattctggtgccgggcagtattcttgacgatcgggaggttgcgcatggcgatctgcgcaccctcacctatcactcgaaggctctgaacgccgaacgtcgtctctatgtctggacgccgccgggctatagcggaaccggcgatccgctgccggtgctctatttctatcatggctttggcgacagcggcctgtcggccatcgatcaggggcggatcccgcaaatcatggataacctgctggcggagggcaagattaagccgatgctggtggtggtcccggataccgaaaccgatatcccggaagcggtcgcggaaaacttcccgccgcaggagcggcgcaaaaccttctatccacttaatgcgcaggcggcggataaagagctcatgcaggatattattccgctgatcgatgcccgatttaacgtgcgtaaagatgccgacggtcgggcgctggcgggcctctcgcagggcggttatcaggcgctggtttccggaatgaatcatctggagagctttggctggctcgccacctttagcggcgttacgactaccacggtgccgaatgccggcgtggaagcgcagctgaagcagcctgacgcgatcaataagcagctgcgtaactttaccgtggtcgtcggggaaaaagattctgtgaccggtaaagacattgctggtctgaaaagcgagctggaaaaacagcagattaaatttgattaccaccagtatcccggcctgaaccatgaaatggacgtctggcgcccggcctacgcagagtttgtgcaaaaactgtttaaataa

SEQ ID NO: 217610 - DNA, 720 bp, Klebsiella pneumoniae
atgaaaatgattgtgaccgaagattatgaagagatgagcctggtcgccagccatcatgttctgggctatatcacggcgccgcggcgggtgaatctggcggtgacggcggggagcacgccaaagcggatgtatgagcatttgaccgccgccgtgaaaggcaaagcattctatgatcgggtgcactattacaacttcgatgagatcccttttcgcggccagtcgcgagaaggcgtcacgatatctaatttgcgccagctgttttttaccccggcgcagatcaaagaagagaacattcacaagctgacgctggacaacgccgctcagcacgatcgccagctggaagaggctggcggtctggatctgatggtgctggggctgggggccgacggccatttttgcggcaacctgccgaataccacccgctttcatgatcagacggtcgaagtgccgattcatggggaaatgattgctcttatcgctaacagcgagatgggcggggatatctcggcagtaccagacagctatgtcaccatggggccgggaagcgtgatggcggcgaaaaatttattgctaattgtcagcggtgcggcaaaagcgcacgcgttaaagcaagtggtggaaggtccggtcagcgtgcaggtgccggcttcagtgctcaaattgcacccttcactggtgattattgccgataaagcggcggcggcggaattgcagcaataa

SEQ ID NO: 217611 - DNA, 567 bp, Klebsiella pneumoniae
atgtcagataccttgaaagtggttacgttactcggcagcctgcgtaaagggtcgtttaatggaatggtcgcgcgcaccctgccaggcatcgcgccagcgggcatggatatctccgcgctgccgtcgttcggtgatatcccgctgtacgatgctgatatgcaggaggaagaaggttttccgcagcgcgtgcaggagattgcgcaacagatccgcgaggcggatggggtagtgatagtcactccagaatataactattccgtgcctggcggcctgaaaaacgccatcgactggctgtcacgcctgcccgagcagccgctgtccggcaaaccggtactgattcagaccagctcaatgggcgccatcggcggtgcgcgctgccagtatcatctgcggcagattctggtcttccttgatgcgatggtaatgaataaaccggaatttatgggcggcgtcatccagaacaaagtggatccgcaggcgggtgaagtggtcgatcaaagcacactcgaccatctgcgcggccagctgaccgcctttggcgactatattcggcgggttaaagcataa

SEQ ID NO: 217612 - DNA, 945 bp, Klebsiella pneumoniae
atgaataacaacgcaataaatgcattactctcttgtaaaactccaaaagacattcaggcttgcattaatgcaggctccgatattaatacactggattcgtttggaagaaatatactgttttactgtaaaaacccaagaatgattgacactctggttaaagcaggaatagattttaaccatgctgacaactatggtcacaatgttttgtttaaccagcgaaatcctcacatactgaaaaaattgattgattccggcgtagatatacaccacaaaaatggtctcggccaaacctgtttatgctcgttagctgataatatatcctgttgcaaaaccctgatcaatgctggaattaatgtcaacaatgtggataaatgcggaagaacaatacttttttacgtaaaaaatcactctatctttgatttgatggttcaggccggttgtgatataaaccacagagataaccagggtcacggtatttttgaaatttgctattcattaggcgatttcaaagccaaaatgctcattcgtcatattagtatgaaggatagcagtccagtaattttcaactacctcaacagcgaaagtctgcagataatggatttgcttcagaagaaaaaccttaactttactatctctgataactgccaggtttatctaagtgccaatgaaaatgaaatgagctctttcttcagtgaactaaagaagaagacagatatcagcaacacacattttcgccatattgtactgcgaggttatgatttacgcggggacattgaaaccattaaatggtttatccgcaatgacatcaaaatagataaaaaacaactggaacagcatattcgacatgatgagatttgtaaatatatagcagaacatgagagaaagaaacttagcgaaattatgaaacaaacaatctctttaatgccagtaaaacgtagattgtaa

SEQ ID NO: 217613 - DNA, 225 bp, Klebsiella pneumoniae
atggcatctctcaacaaactcccaccggtattacctgaaatcaatcgtgaagcatgggttaaactcggcaacctttcacaggatttaaaccgcctgctgaatcatctcgacagcaaaagccctgacagcgaactgacccgtacagaactcttcgccctgcgcagacaaatcaaaactctcagggatcaccttattccatcaacctttctggagcaagaccagtga

SEQ ID NO: 217614 - DNA, 1218 bp, Klebsiella pneumoniae
gtgaaaggcatgcagaaaataaagcggggtaaacagtttgcaggtgtggttctctatagccttaagtcaggatctcaccacaaaatcacgccttatattatcggtggcaacatgacgggaagcactgctgctgaacttatcagtgaatttgaaggcacaagactactgcgccccggtgtcgccaaacctgtctggcataattcgcttcgcctgccaaagggagaaacactgtcagtcagacaatgggcggcattcgctgacgattatatgacccggatgggattcactgaaacccatcttcgctgctatatcatgcacgatgattcggacgggcagcatatccatataatagctaacagaattaacatggtcggtgggaagctgtaccttgggaaaaatgaaaatcttatcagtacccggattatcagcgagctggagaaagtccacaaactcactcaaaccacatctgcaatcagtagtcatagtcaggagaaaagaaagccttcccgcaacgagctgatgatggctgaaagaacgacaactccctgccccaggtccactctgcagagcctgattgataatgcgttaaccggccgccctgatttgctgacttttatcgctatgctggaaaaggtagacgtcagctgcaaacccaatatcgcctcaacgggaaaaatgaacggcttttcatttcagtaccaaggtattgcctttaaagcctctcaattgggtaaaaaatatggctggtcttccctgcaaacattgattgatttcgtaccggaacatctgactttactgaaacaagcacaaaagccaacagtacctgcacctgtgccattaacagtgccaatgccaatgccatcatgcgagtctgaagaacaggctgcaaaccgggaaacgattctggagaaaatccatcagcttgaagaaaaaattcgtctggaaagacaacaggagacagtgggtatcattcagctcaggagcaagctgcacaatacaacccgtcagataccccgccagcgtcgcctgaaggcgtggcttttactactcagccaaattgttgtacttctaaggcgcaagggactgtcactgctgcatgccacaatacatcatttccgcaagattcttcatctgcacctattagaacccattcctttcacagccggtcattcccttcaggaacaatcagttagtaataaccagcacctcacaccataa

SEQ ID NO: 217615 - DNA, 273 bp, Klebsiella pneumoniae
atggataataaaacgattagctgccccttctgctttacacaaagcccgcacggcgtgcggatttgcaaaggctgccatgcaaaagtggcctatggtgaaagtccgctcagtgtggcattcctttttcaattcgtggcattagctctcgcctggttagtattttcattgaccggcagtactcctgtctcagtcattacgttttttgccagcgttattattcttatctgcataattaaaaagacctatgcagacagagttatctttatacggtga

SEQ ID NO: 217616 - DNA, 387 bp, Klebsiella pneumoniae
atgaaaaaattcattacttctgcgttttttatttccgctttacttatttctggctgttcgacatcaggcaatcagcatctcaaaaacgaaacatcacaaagtctgcagtcaaaaatcatcaaaaataaaacaacgaaatcagaaataattaccgcattaggcgagcccgaaaccaagactacacttgatagtggaaatgaagaatggacttattcgatggataacaatcagtttgatgccaccacatttattcccgttgtcgggctgctgacggggggctcacagacgcaggccaaaacgctggaaatcgaatttaaaggagaaacggtcagcaaatggtcgttctctgaaaatacaagcagaatgaatacaggtctgattcaataa

SEQ ID NO: 217617 - DNA, 321 bp, Klebsiella pneumoniae; identical to SEQ ID NO: 129668

SEQ ID NO: 217618 - DNA, 426 bp, Klebsiella pneumoniae
atgagtgctattgatgttttatctcaggaggaaaagtttatacatgttgttgataaatttataacccatcatcacaacagcgttaataacaatgtcttttacaaaaaactttatgttctcttcgccgggtatcatctgaagtatttttattcacgggcgcagtatcgcaattcatgttatcacgttgataatattatgcagatgtttacaggagtcgtttcaaccctgaacacaactctgctcaggaagcttgcaaacagcaatacattgctgcattgcctgaattcacttgtgaattatatttcaggcaatctggacgaagcagagcatatttatgctgatttgctggctcagtatgaaaagaaacgcattgcaggctctctggcttatactccgccaggctcagtgatcaggaaaagactttga

SEQ ID NO: 217619 - DNA, 567 bp, Klebsiella pneumoniae; identical to SEQ ID NO: 189700

SEQ ID NO: 217620 - DNA, 576 bp, Klebsiella pneumoniae; identical to SEQ ID NO: 129506

SEQ ID NO: 217621 - DNA, 1455 bp, Klebsiella pneumoniae
ttgaaaacaactctcaatcaggcttttattatcaacaagttaagtattaatgttaagcctgagctcagtagctctggaaaagtcgttttcgaagtcaaccctgaccaaaaaccttacatagtttttgacgatcatcgagattcacccgttggcttcggtgtgaaggtcagtttgacgaaaaaaacctatgtaatccagcgaagagtagcctcttcagatcgtaatgtcagtgagggtaagaagccaagctctgtcttgaaagtaaaggttgggaatgtgtccgattttccgagtatcgatcaagcccgtgaggcagctcggcagttggttcagacaatgattgcaacaaagagaaatcccaacaagattaaaagggaactcgatctggctgaattgaccgtgagtgaagcttttgcccaatacaggagtcacttacttggcagaaccaaacctgctaaaccaaacactctcaatgtgttagacaaagctgagaatcggttgaaagaatggcaaaaccttcgaatcaaggatcttactggtaatgaaatccttcgaaagtttgacgagattgcttcaagagccagaacagcagcagaacagacttttaggtgggccaatgttgctgtaaaacacgcaatcgagattgaagctgggaatgctcagacccagcaacgacaaccttcgttgtcctataatcctttttcaattttaaaggtacagaagaagttcagaacacgatctgagctggaagatagctatcgtgccaagggcgtacgaaatccattgtcccccaaagatactttgggacggtttctagctgcattacacaataagagaggttttaatcgtttgggttgtgattatctgttgctgaccattttgacaggagccaggaaagaagagacagcaacactgtgctggcgagaggccctgacagaagaggaagtcagaacgacaagctatgtcgatctcgaaaaccgggttattcgcttttacgacacgaaaaatcgtaacgaccatgagcttccaatctgtgatgctacaaagcgaattctggaagaccgacgagatatcgtcaacgataccgaaatacgggcagataaacgcaaatgggtttttccggctcgttcatcacgaagcaaggttggacattattctgacagtaaaagcttgcgcgagtatatctgtcaggaagctggaataatgaagctgggaatgcacgatctgcgaagaacttttggccgtgttgcagaagaactaacttcgtatgcagtggtgaaaagattgcttaaccaccgtaataccacggaccctactgaaagatatgctgagcctgataacgagcgagtttttgaggcacttcaacggattgagcttcatatgctgatgacagtacctgagttgtataatacacttttggcttcggcgaaatatcaaccattgccaacaaattag

SEQ ID NO: 217622 - DNA, 1428 bp, Klebsiella pneumoniae
atggcttttgatgatttgcgcagctttttgcaggcgctggatgaccagggacaactgctgaaaatcagtgaagaggtgaacgctgagcccgatctggcggcggccgccaatgcgaccggacgcatcggcgacggtgccccggcgctgtggttcgataatattcgcggctttaacgacgctcgcgtgacgatgaacaccatcggctcgtggcagaaccatgccatctcgctgggcctgccgcctaacacgccggtgaaaaagcagattgatgagttcattcgccgctgggataacttcccggtgacgccagagcgccgcgccaacccggcgtgggcagaaaatactgttgatggcgatgatatcaacctgttcgatattctgccgctgttccgcctcaatgatggtgacggcggtttctacctcgataaagcctgtgtcgtttcgcgcgatccgctggataaagataacttcggtaagcaaaacgtcggtatctaccgcatggaagtgaaaggcaagcgcaagctcggcctgcagccggtaccgatgcacgatatcgcgctgcatctgcacaaagcggaagagcgtggggaagatctgccgatcgccattaccctcggtaacgacccgattattaccctgatgggcgccacgccgctgaaatacgatcagtctgaatatgagatggctggcgcgctgcgcgagagcccgtatcccatcgctaccgcgccgctgaccggctttgacgtgccctggggttcggaagtgatcctcgaaggggtcattgaagggcgtaagcgtgagatcgaggggccgttcggtgaatttaccggtcactactccggcggtcgtaacatgacggtagtgcgtatcgacaaagtctcttatcgcagcaaaccgatttttgaatcgctctacctcggtatgccgtggaccgagattgactatctgatgggcccggcgacctgcgtaccgctgtatcagcagctgaaggccgaatttccggaggtgcaggcggtcaacgccatgtacacccatggtctgctggcgatcatctccaccaaaaaacgctacggcggttttgcccgcgcggtgggcctgcgggcgatgaccactccccacggcctcggctatgtgaagatggtgatcatggttgatgaagacgtcgacccgttcaacctgccgcaggtgatgtgggcgctctcctcgaaggttaacccggcgggagacctggtgcagttgccgaacatgtcggtccttgaacttgacccaggctccagcccggcaggcattaccgacaaactgattatcgacgccaccaccccggttgcgccggaccttcgcggccactacagccagccggtgcaggatctgccggaaaccaaagcctgggctgaaaaactgaccgctatgctggccaaccgtaaataa

SEQ ID NO: 217623 - DNA, 216 bp, Klebsiella pneumoniae
atggccctaatccacaaaacggaaataccggaatcctggcttaccgataacggtaccagtcttgatgaacgcagagttttgtacatggaagctagcgatattctgacaaaagatatcgtaagagaaattcgaaaaacggtgaaatcccctcaggaccaattacaggtttatcgcataaatgatcagatcataaccctcgaaatgatggaaaagtag

SEQ ID NO: 217624 - DNA, 618 bp, Klebsiella pneumoniae
atgcaaaaaactcacaaacatttgaccaaaatagttacaatttctctgtcattagcgtttgcagtgcttgttgttcatggtgtccttacatcacctccgaaccatgacacagaagctccagatgttaaagcaacggtaactcaagtacctctaaaaccagcagaaccggaaatggtcaacgttgttaatcggatacatactcctgaagaggtttacaggcgtttccaggacaacgaattcagggctaccaatcacttcagaacttgccgattaatggtcacaggtagggtaaagaacattggaacagccacctttaccaaagatccattggtcactatagctatccctggctcagacgaagggatgaagtttatctttgagaacacctcaagtgactggaatgaagttgcggcattggaaattgatgacattttgaccatatcgggaatggatacccggaaaggccagtttggaggcttgtttctttcaaatgcagaaataatgaacactttgcattctagaaacagtagagagatgatggttgaacgtaatggtttctacgaccgtattttatgtgagaagagagcaatccaagcagatataagtgactataattaa

SEQ ID NO: 217625 - DNA, 540 bp, Klebsiella pneumoniae
atgaaagataaagaaatttttatttctgtagatattgaatcatcggggccaattcctggagagtatagccttctatcaattggtgcctgcttgctctccgacccaaaggaatcgttttatacagaattaaggcccgacagccaaaagcatgatccagaagctgtagccattacgggtcttgatctagcatctcttaccctgtctggcttaccaccgctcgaagcgatggagcaatttaattcatggatcaattccgtgtccaaaccaaagcaacgaaccatttttgttggttttaatgccccatttgattggtcgttcatcaactattatttccataaatatctaggttttaacccatttggatttaccgcaattgatataaaagcatactatatgggacttaataagtgctcttgggaagacacgaaatcatccaaaatagttgaaaaactacgtccccatcttcgaaacaatcacaacgcattagaagatgctaaatttcaggcagaactattttcattaatgcttgttactgattga

SEQ ID NO: 217626 - DNA, 1104 bp, Klebsiella pneumoniae
atgcatatgagcagttactggaagcatcaattttctaagatattggattatctgacacgccaaaaaaagccagctgttgtattgatgactgttgggggaactatcctcggagggcagaaagtactcaactttgttgttaccggcaagtttagttggggttcactcacagtaggtacaaacgacgggaatttcatcagtgattacatcgtacccattgttgcgattatacttattgtcatgggtggcatactgatggtcttaaatgagtacttagcatttaaacagaactcacataagcgtattatcctggtggcagggaatggtctacgaacgacatctgaaacagggttggataagaaggttacttccatactgaaaggtaccatctatccagttgatattgatataactcagcaattcagagatgggtatgtctttgagcccgaactgactttcataagaaaaatattgccctctaaggataatctggcccaactccttgccaagggcagcgctgaaagtatacaggttggctacggtggttttttacccgtaccttttaccttttttataggtaatgtgcttgatgataaaagtaatgtgagtgtgtttgattgggatcgtgagaacgaacgctgggagcatatctcagagaagcacatcgacgacggcgagagtttcattagtgaaacaattcgtaccggagaattggacgaaatcgtacttgttgtttcatgttcatacagggtaaaaatgctacaagttggtgagtgttttaaaggacttggcattgaacatttgacactggaaaccattgcatttgataatcattggtcattggtaaaacaacggcgtctttcaattcagtttgcagagaagattaaatcgctttcagatatggggatcaggacgattcacttgatactggcagcacagagcagtgtagtattgaatttggggcgacgatatgatagtagaaacatgtcagagcttattgtttatcagtatgagcaaaccaataataacccttatccatggggaatttatgcactttctcatgggcatgaaaatggtggtttcattacacgtagcgaagaacagtag

SEQ ID NO: 217627 - DNA, 486 bp, Klebsiella pneumoniae; identical to SEQ ID NO: 152566

SEQ ID NO: 217628 - DNA, 1281 bp, Klebsiella pneumoniae
atgagcaattcagtatcagttctagctttgagtacagagcaaaagcagtatgtaggtgatttcctggattgcatagtaggaagcctagacttatcagaaacacagtacagcttaatcaagagggcctatgaatcggtgggggcttatcttgctgggggagacgatcctatcctcgttggagcggagatttattctcaagggagtgttagattaaacactactgttaagcctaaaggaagcgaacagtatgacgtagatctgctttgttatctgccaaacgcaagtgttgcatccggttgggctgaagttcttgaagccgtgcgtgcacgacttgcaagtcatggtacctatagcgaaatgcttacccctttgccaagagggcaccgcattatgtacgctggcgaataccatctggacatcacacctggaattgacttgggttataactcttcagagcacaaccatcctctcttggttcctgattcgcgtctccaggattggaaggaatctaaccctgcaggttatgcgacatggtttgataacattacagagaaattaccgatatttgtaaggcttgaggttgcgtctgaaagcttcatcaaatcagcggcagtcaggccattacccgatcatacccgtaagaaacttctgaaccgaatcgtgcaaattttcaaacggcatcgggatgtatgggctgctgaaggtgggaaagagcggattgatttaaaacccatctccgccatcattactacgctcgcggggcatgcctatagcaaaatttgtgatgaaggcaggagctattccactgactttgatgtactgctggatgtccttgagctgatgcctgactacatcagatacagttacggtctgtattttgtgcctaatccgagcatgccagaagagaactttgctgaaaaatggaacgttgaagagtccaggaaaggagaaaaactcagaaaaaattttgagttatggcataaaacgatcactgataacattatagaaattgcatcatctgttggagaagatcaacttcttgataatcttagtaaatacttcggagaaagacctgtcaaagcagttcgtgaagctatggttggaggtgttaacgcggcacgtgatagcaatgatttgcgtgttttagcccttacaggagcgcttagcgcgggtgcagcaaatgtgcctgcaatggcacggacagtcccagagaatacattttacggtgggaatgctctttcttctgcccctgtgaaaaagaatacattttttggggactaa

SEQ ID NO: 217629 - DNA, 780 bp, Klebsiella pneumoniae
atggatattaatgagttccctccgggagtaatcgaacatcttggttggtatgtatatcgcctgattgatccacgagatggaagtactttttacgtgggtaaggggaaaggtaatcgcgtttttgctcatatgcgcggtgaagtggctgccgctgatgatgatgaacttctcagtaacaaactcaagcaacttcgtgagattagattagctggtctggaggtcatccatgttatccatcgtcatggtattgccgatgaaaagactgcttacgaggttgaggctgctctaatcgatgcttatcctggtttaaccaacatcatgaatggtgctggcagtaacgagtatggtgctgcacatatcaaagaattaatcgcaacgtaccagcctgagactgtcgagtttaagcacaaagctctgatgatatctgttaacagaagttcaaaagatgttgatctctatgatgcagtgcgcttcagttggcgtgtaagcctcgaacgcgcaagcaaagctgaagttatcctagctacagtaaaaggaattgtcaggggggtatatatagctgatgagtggttaaaatcaacccgtgataactttcctgaaatgcgccaatgggatgaagatgatgagtttgaagctactcaaagttcacgctttggttttcggggacgtgcggcatctcctgaagttacacagctttatcttggtaagaagatccctgatgacctcagaaagaaagggtcaatgtctcctgtgaagtattctccgaattttgattcctga

SEQ ID NO: 217630 - DNA, 552 bp, Klebsiella pneumoniae
atgtcaactatcggatatgttcgtgtaagtacagatgagcagacgacagagaatcaacaacaacagatagccgaacgctaccatattgacaaatggtttatcgatgaagccaccagtggcacgacaaaagccatagggcgtgatggatggtcatcactgatgaattatgttcgtgaaggagatacagttgtatgtgtcgctgtagatcgtattggacgaaacacaatcgatctattacaaacagtcgaggcattaaaagaaaaaggagtcagtgttgtcagcatgcgtgaaggcttcgatctaagcactcctgctggggaagccatgcttaccatcatggcagcattggcaaaaatggaactgtctgtattagatgagcgtaggaaggcaggaattaaacgcgctaaatctcaagggatccattgcggtaggcctgccaaggcgacgactgaagacatactgttactgattgcacaaggtaagagccgtagagagattgaaaaggaacttgggattagcaaggcaacatacttccgtctcaaaaaattttag

SEQ ID NO: 217631 - DNA, 888 bp, Klebsiella pneumoniae; identical to SEQ ID NO: 97727

SEQ ID NO: 217632 - DNA, 1401 bp, Klebsiella pneumoniae
atgaaccttaaaccacgcaactttgatgaagtcattgaaaatgtattagttgataaaggtgtttgcacctctgatatattgaataaatattcaaaaaaagagaaatcttattactttaatcagtttctgatcggagccaccaacaggagaaagcatcccaaagatgagtacgctttcttactttattcctctgagagacgaaaacatataccgagagcttcgagatttgatgacatgataaaagatattcctttaatcaaaaaaagttgtaattactgggcagataattggcctaacggctatagagtaactagtgctggatataacattttttcggcatgttgcaaggcagttcctagtaaatgcggtctctataacgaaggaaaaccatacaacccacctcggaatggcatccgctcccaattaaaaaatagcaataaatgtaatgtagaagccaaggtccctaaagaaattcctcttaatgagttttctctcaggcgatacctgaagagactccagcagagaggcaatcatagaaatatgattagtcaaattgaatacctgttaacgcttgcgaaagcgagtaaaagtggtttattaccgataacttacgtgcaaagtaacgggggacgtttatatgcagaaggcgctgtaaatctacaaaattgtaagagagagattcgtaaaactgcgttagctggcatgtttgatgtggatatcgagaattgtcactacaacttactggaacagatgtgtactcggatcggtataaaaacgccgcgtataagccattatgtccgtaacaaaaaacaggtccgtaaagaagtagccactacgttacaatgcacagaagaacaagcaaaggtagttttgattgccctgatctatggcgccaatctagggcctcgtggggtactaaaaaagctggacattgataccagtgacgaggctctcaaagacacctggattagcaaactaactgaggaaatcaccaatgtgagacgttatgtgattgaggattatacagcgcggactagaggctattgcaaaatcaaaaacgacgcagggatgattgttaagaccataacagaaaacggagaatcggttaagaaatcaaaattattagctcatcttctccacggtgcagaatcactgatacttcagtacatgattagctttcttggtgataatgttgtcttgcttcagcatgatggtgtcacatgccccaatcctgtagatacagatgaactcagtgactatatcgcagagaaaacaggctatcgtgttcaatttgatattgagcagctgaaaccagacttcaatgttgatgccactgatagatttcaacaacaagacatggaagacatttttgaaatctttaaatatgaaatggctgcgtga

SEQ ID NO: 217633 - DNA, 1764 bp, Klebsiella pneumoniae
atgcctcaactttacagctatatccgttggtcctcggaacggcagcaaaaagggacgaccagacaacgccaggtcatcggtgcgaaggagtttgctatagctaatgggttagaacttgttgaaattgaagatcctggtgttagtgcctttcgtggtaagaacaccacccacggtaaactgggggatttcattgatgctgtgaggcagggagctataccaccggattcgtggctatatgttgaaaacttagatcgactcactagacaagaagttaccacagctcagaagctgtttattgaattgctggatttggggttaacgttggttacagggatggataaacgggtttatacccttgagtctgtgaacaaaaatccaaccgatttgatgatttcgcttttactgtttagtcgagcaaatgaagagagtaaaaccaagcaagctcgcacgataggtaatgttgaatcgttgatcgaacgtcatcgccaaggattgccggtgaacattaaatcatgtggtaaacacccattttggatagatgattctggttcacagtatgaatccgttaagcgtcatgcaatttattgggagatagcacgagaagcgattgaattgtttttatcaggatatggtatttacaaagtgaagcgctttcttgatgaaaagtatcctaacggcttgaatggtaaagaatggggctatcaagtactcaaaaagatgcgtgagagtagagccctcattggagaaaggcaaattaacataggctcacatacatatacattacgtgattactatccctgtctatgtaaaaacgaggttgaattcctgcatttacaagagttaaagggacaaaacagctacaaatcgaagaaaaaccccttaaaggaacaaatcaagttattatccggtctggcaatccttagatgtagtaagtgtggtgggactatgtctagtttcatgaataaaggtaaaccaagatatatctgtcttaatggtcgacatttacaaaaaggttgtgttggttggtcgcttactgctcccttagttgatcattgtgtcattattgcattacttatgggctatatggatgcaaaccgtaaggaaaggcaagatacatcagatatttccgcattgattgaagcgaaaaatacgagcgttggagaattgaatgtaagtattacgaaccttgttgcggttattgaagctggtgtgaatgtatctgagctagcaagtaggttaaaggttctatcaacagagcgtgagacatttctgaaagaaattgagcgattaaaggaacgaaaagcattaattgatagcaaaggatcgtttgaagtatcaatgatggatttcattaatctgatacattggaatgtattctcagactatgcacatgaatcacgtgataagattcgctcgacaatcaataaaattattgaacatgtaattattgataaaactgatggctgtataacaatcaagattaaatgtcgtggttcagatgaacaattgattttttgtggtattgggcgcaaacctcactggaagtttgatattgcgttatatgttgaacaagacactgatggagatacaaccttcgaagaaaaatctattttgccaatggcaaaccagttgatggaagaggctacaaagcagtttgcattgataagagaaggctacattagctactttgacaaaatatgtaaaattttagctgcaattggttatccagatattgatggttcagccttctggcctaatagatag

SEQ ID NO: 217634 - DNA, 522 bp, Klebsiella pneumoniae
atggcgcagggagcgcacagggggcggccagtcgccgccgccccctgtacccccgggctccggccagcaacatcgccactgcgtggtgccttcgacttatccctgcaggcttcgggttgggccgaagcagcgtccctgcaaaacacggccctcagccagcatccatgcggcctgccccggcctttcgggaacgtctcagcgatgttgaggccgccagcaccggcagtttcagcggccccatgtccggcggcgattcacatattgggactggaccccgtaggccgggtaagcgtagcgccacccggcaaaataaccgcgcaacagggctgcctggaaggtaatcaatgcttgcccgcggcgctgcgtttgcgcggacctggggggggggagcctacgggaggaccccgtaggctggggaatgcgctaagccgctatccgggaagctggactagacccgggtaccccacaggtcgtattcgtcggcgtgctcgactttcacccgcaccacgtcgcccggcttaa

SEQ ID NO: 217635 - DNA, 318 bp, Klebsiella pneumoniae
atgttcagattggttgtgcatgtggacgttaaaaaggaattgcaagcgcttccgcccattgtccaggcgaagatgatccggcaattagacaagttacgccaaaatcccaccgcgctgagagaacctgacagtaaaccgctggggcaggggctatttgaaattcgtgcgttaggttcggtacaggggcgagggatctacgtttttcagcaaggcaagacgctctttctgctacgggtttttgtcaagaaaacgcaaaaaaccccgtcatcggaaattcgcctggcgctgaagcgattagaggagatgcgcaatgagtaa

SEQ ID NO: 217636 - DNA, 288 bp, Klebsiella pneumoniae
atgagtaaaaagatcattgactgggatacgttaaaaacagaactgcttggccagcctgaggttcaggctgcattcgatgcgcaagaacgtcaacagcgattacgtactatgctggcgcaatggcgcgagcaggcggggctaacccgagcccaggtggcgcagaggatgggggtgagtgcgccgacagtctccagaatggaagccaatatcacccgcgccagtctggataccttaacgcgatacgcgttagcctgcggtataaagcacccgcaagttttactttactaa

SEQ ID NO: 217637 - DNA, 582 bp, Klebsiella pneumoniae
gtggctcgtccaaagagtgaagataaaaagcaagcgttactggaagctgccaccgcggctttcgcccagtccggcatagccgcctcgacgtcggccatcgcccgcagcgccggtgtggccgagggaacgctgtttcgctatttcgccaccaaggatgagttgctcaacgagctgtacctcgcgattaagctgcgcctggtgcgcacaatgatcgccgggctggatccggacgagaagcgcccgaaagagaacgcgcgcaatatctggaacagctatatcgactggggcgtgcgcaacccgatggagcacaaagcgatccgccggatggcgctcagcgagcgcatcaccgacgaaactcgccgccaggtaaaagagagctttccggagctcaacgaaatgtgccagctgtcggtgaaagagatattcctcagcgaggcgtaccgcgcctttggcgacgccctgtttctgtcgctggcggaaaccaccatcgaattcgccagccacgatccgcagcgcgcccgggagattatcgccctcggctttgaagccatgtggcacgccctgcatgaggcggacgcctaa

SEQ ID NO: 217638 - DNA, 3348 bp, Klebsiella pneumoniae
atgctgcacacgatctccaggcaacgcgccacgttcatctttattatcacgctgctctgttttattggccttttcagcccagtccagggccgcgccgcggatctccccgatcgggcagaggtgcagagccagctcaatacgttaaacaagcaaaaagaactgactccgcaggacaaactggtccagcaggatctgactcagacgctggaaacgctggataaaatcgagcgtatcaaaagcgagacggcacagctgcgacagcaggtcgagcaggcgccggcgaagctgcgccaggcggtggagagcctcaataacctgagcgatgtcccgaacgacgacgcgacgcgcaaaacgctaagtacgctctccctgcgtcagctggagtcgcgcgtcacccagacgctggacgatctgcagaatgcgcaaaacgatctggcgacctataacagccagctggtttccctgcaaacgcagccggaacgcgtgcaaaatgcgatgttcaacgcctcccagcagctgcagcagatccgcaatcgtctgaatggcacctcggtgggcgacgagaccctacgcccgacccagcaggtgctgttgcaggctcaacaggcattgctcaacgcgcagatcgagcaacagcgcaagagcctcgaaggcaacactatcctgcaggataccctacagaagcagcgtgactacgtcaccgcctggagcaaccggttggagcatcagctacagctgctgcaggaggccgtgaacagcaaacggctgaccctgaccgagaaaaccgcccaggaggcggttacccccgacgaaacggcgcgtattcaggccaacccgctggtcaagcaggagctggatattaaccatcagctcagcgagaagctgattcaggcaacagagaacggtaaccagctggtgcagcgcaatatccaggtcaaaaactggctcgaccgcgcgctgcagtctgaacgggatattaaagagcaaatttcagttctgcgggggagcctgctgctgtcgcgtattctttaccaacagcaacagacattaccgtcggcggatgagctgcaggatatgaccaaccgcatcgccgacctgcggcttgaacagtttgaggtgaaccagcagcgcgacgcgctgttccagagcgatgcctttgtcgccaaactggaggaggggcacagcagcgaagtgaacgatgaagtccacgccgcgctactggaagtgatcgacatgcgtcgcgaactgcttgatcagttcaacaaacagttgggtaaccagctgatgatggccatcaacctgcagatcaaccagcagcagctgatgagcgtctcgagcagtctgaaggaaattctgacccagcaaattttctgggtgaacagcaataaaccgatggactgggagtggattaaggccttcccggaggcgctgaaaggtcagtttaaggcgatgaaaatcaccgtgaactgggaaaaagcgtggcctgcggtgtttgtcgctttcctggccggtttaccgctgctgttgattgccggcctcatccgctggcgtctgcagtggctcaaggattatcaggcaaagcttgcttcccaggtgggacagctgcgcaacgatacccagctgcatacgccgaaggcgatcctgatcgatctgatccgcgccttaccggtggtgctgttgattctggctatcggtctgatcttactcaccatgcagttaaatattagcggactgctgtgggcgtacagtaaaaagctggctatgttctggctggtatttggcctgtgctggaaagtgctggaaaagaacggcgtcgcggtcaaccactttaatatgccggcgcagttgaccagccactggcggcggcagattgttcgcgtcagcctggcgctgctgccgctgaatttctggtcggtgatttccgaactgtcgccgctgaacctgatggacgacgtgctggggcagttggtgattttcttcaacttactgctgatcgcggtgctggtttggccgatgtgccgggaaagttggcgcgataaagagtcgcacagcctgcgcctgctgacgatcacggtgttgtctatcgttccggtggccctgatggtgctgacggcaaccggctacttctacacgacgctgcgtctggcgggacgctggatcgagaccgtgtatctggtgatgatctggaacctgctgtaccagaccgtgctgcgcggcctgagcgtggcggcgcggcgtatcgcctggcgccgcgcgctggcgcgccgtcaacatctggtgaaggaaggggcggaaggcgccgagccgcaggaagagccaactatcgctctcgagcaggtcaaccagcagacgctgcgcatcaccatgttggtgatggtcgcgctgttcgcggtgatgttctgggcgatttggtctgatttgatcaccgttttcgcctacctcgacagcattaccctctggcactacaacggcaccgaggcgggggccagcgtggtgcgcagcgtgacgatgggcagtttgttgttcgccattgtggcgtcaatggtcgcctgggcgctgatccgcaacctgccgggtttgctggaggtgctggtgctgtcgcggctcaacatgcgtcaggggacctcctacgccatcaccaccattctcaactatgcgattatcgctatcggggcgatgacggtattcggggcgctgggcgtctcctgggataaactgcaatggctggcggccgcgctgtcggttggtttaggttttggtctgcaggagatcttcggtaactttgtctccggcctaatcattctgttcgaacgtccggtgcgcattggggatacggtcactatcggaaccttctcggggacggtaagcaaaatccgtattcgcgccaccaccatcaccgacttcgatcgcaaagaggtgattatcccgaacaaggcgttcgttaccgagcgcttgatcaactggtcgctctccgacaccgtgacccgggtggtgatccgcctcggcgtcgcctatggctcagacctggataaggtgaaagaggtgctgctgaaggccgcgcacgatcatccgaaagtgatgcaggagccggcgccagcggttttcttcaccaccttcggggccagtaccctggatcatgaactgcgtctgtatgttcgagaactgcgcgatcgcagctacacggtggatgagctcaaccgcgccatcgaccgcctgtgccgggagaatgacatcaacattgcctttaaccagctggaagttcatctgcgcaatgaaaaaggcgatgaagtcaccgaagtgaaacgggacgggaaaggcgacgatctggcgcccaccaccgcgtcctga

SEQ ID NO: 217639 - DNA, 912 bp, Klebsiella pneumoniae
atggaaaaagtcagtcaaaccccacacgacgcggtgtttcgccagatgctcatgcatcaggcggtcgcgaaggattttttgcagttgtacctccccgcgccgtttctggcgatctgcgaactggattcgctgcagctggtctccggtagctttgttgaagaggacctgcgcgccagctattccgatatcctttactcactgcgcacgcgtcatggaccgggctatgtgtacgcgctgattgagcaccagagtaccccggacaagctgatggcgtttcgcctgctgcgctatgcgctggccgccatgcagcgtcatctggacgccggccacgacacgctgccgctggtggtgccgattctgttttatcacggcaaagtgagcccctggccctgggcccgcaactggcaacagctattcgccgatccggcgctggcgaaggcgctctatagcaatgattttccgctggtggacctcaccgtaatgccagataatcagatcgcccgtcatcggcggatggccatgctggagctgctgcaaaagcatatccgccatcgcgatctggccgagctgcaggtgccgctgattgcgctgatgacgcaaggctatctgacagaagcgcagctgaatacgctgctgcgctatatgttgcaggcgggaaccacggaacatccgggggcgctgatccgcacgctggcggcgcagtcgcccaggcataaggagctgatgatgaccattgccgaatggctggaagagaaaggccgtaaacagggacagcaagagggtgagcaggaaggtcgagaagccgccactcgcagcatcgccgccagaatgctggcgcgcggcctcgaacgtcaaaccgtgcaggagctcaccgggctgagcgatgaagaactcgccgcgctggcgccctga

SEQ ID NO: 217640 - DNA, 192 bp, Klebsiella pneumoniae
atgaacagagcctctcccgttgatttaagaaagagcctcgaagctgcgcatatgctggcaagcatcggcatccgttttgtgccgatcccggtagcgacagaggaagagttccaggaactgtctgtcgagctttcacgaaagcttgagcagatggcggttgaagcggaaaaaagcgaaggcggtgcagcatga

SEQ ID NO: 217641 - DNA, 624 bp, Klebsiella pneumoniae
atgactaagcaaactgaaaaaatcgtgttgatggacagtgatgaagcggccagcatccagaccttaactggttgggtttcgcgtgatggtcgattttggggtgatgacgagcatatggctcgctggagtggcgcgacacaccgtaagtgcaaaaataaacccgacgatcaccctattcatagaactcatagctattgcgaagagtgccatcgagaaagtcgccaggccaagttcgctgcacttgagcgcgccgtgtgggctggcgagcccctcgttatcttcgacgatgacacctatttttttgacgtggaatcgctggttgattactgctgggaaaactcggcgtttccgagcgaactgcaattactcatctgcgaaccaaactaccctccagaattcgacctggcacagcattgcgaagaaattatgccggaaggtgatgattacttctgcctgccacaggcaatacgtgatgctgccgaagcactgaataaggccatcaaggaaagctcgccagtatcgtggtccggtagtgaccgcgcggccatcgtgtcagatgacattctcaacgatgagcagaaggctgacatcatggcagggcgcgttgaaggcggtgcagcatga

SEQ ID NO: 217642 - DNA, 345 bp, Klebsiella pneumoniae
atgagtaagtcattaaacgcgcgttgcattcgtcgctgggaagtggaattcaaacctttctgcgattcaaaagttaacccttactggcgcaagcgtgacctgcgcgggtatatccgcgaagcggcgctcactaccgcttacagcatggtcgagagcatggctgaacgtaacgccaaggttgactatgacggtgagccgaacggctggagttatgagttctctctctggtatcgcttacgccgggaaaaatatctcaaagaagctcgcgactacctggacgaagacgctaccaacgaagaaatcgacgaagagattgagaacgaactggaggcctggaatgactaa

SEQ ID NO: 217643 - DNA, 222 bp, Klebsiella pneumoniae
atgacgcctgaagaaaaagaaaacgctctccgcgcccaggctcgtcgctgcgcagaagagataaccaaagcgatgagcgtaaagcctaaaccgaagtggaacgctgtctgcccccccatccttcgcaagcactacgagaaggtaaagccgatgggtgtcagcctggtgaaatttgtcagtgttattggccgcatgaatgggcggtatggagtggaatcatga

SEQ ID NO: 217644 - DNA, 771 bp, Klebsiella pneumoniae
atgagcaaaggaaccattatctgtctgtgcgatatcactggcgtcatggctgagccatgggtcgaagcgggttatcgcgccgtcctggtggacccgcagcaccctgagacttcgatcgacggtcctgttgagcgcatatctgcaaccatccttgaggcgatgccgaggctatctcagattatccgctctgagaacgtcgtcatcgtcatcggcttcccgccatgcacggacgtggctgtttccgggtcccgctggttcgagtccaagcgcgccaaagacccgcatttccaggccaaggctgcgctggtcgctgagcaatgccggatggttggcttggcggccggctgcccgtgggcattcgaaaacccggtgagcgtgttcagtagcatcttcggctcggccgattacacgttccatccgtaccagttcactgggctgtgcgcggatgacaactacacgaagcagacatgcctctggacgggtaacggcttcaaggcgccggcagagaatatgcacccgatggttgaagcggctatcgacgccgtgaagctggcctgcggacgcatgatgccgaagaaaaaggcgatcgaggccatatccggaacgtcctttgccggattggtgactgactggtatccggacaaccgaattcatgaatgcccacccagcgacgagcgcgccaacattcgcagtgctactccccttggctttgcaagggccgttttcctttcgaatgcaccccacctcaataagaagcgggaggcagcatga

SEQ ID NO: 217645 - DNA, 528 bp, Klebsiella pneumoniae
atgactgatttcggcggatcgaaaactccaaaaaatgaacgtgactactggcaaacgccgattgaaattttcaacgcgctcgaccgcgagtttggcttctggctggatgctgcagcctctgagagtaatgcgctatgcgctcactacctcactgagctgtatgactcgctgaacagcgaatggacgtcatacggggcgatatggtgtaacccaccctattccgatatcggcccgtgggtagaaaaagctgctgagcaatcccgggcgcagtctcaggccgtagtgatgttgctaccatctgacgtctctactggctggtttatttcagccatgcaatcagctgatgaactcaggctgataaccggcggccgtgttcagtttgttccggcatctgttacaggaaagcgccatagcaaccccaaaggctcgcttctgtttatctggcgcccgtacatcaccccgcgacacatcatcacgaccgtatcgctggctgagttaaagcggatcgggactctggaggcagcatga

SEQ ID NO: 217646 - DNA, 285 bp, Klebsiella pneumoniae
atgaacgcataccgcgcatatgacgtgatcgaagagcgtaagtgggctgaacagttgctcaccgaagagaaggaaaagtggattgaagatcgggcaaaagaggtctttgacagccttccagaggatccttacgcggcactgcgccagtctgcatcgtccagggcgtttccatatgaaggcctccgtagcgataaggctgtcgaggtatacaacgatttacgcacagcaatagcttacgcccaggcggaatacgactgggatcaccgcaccggctgcccgttttaa

SEQ ID NO: 217647 - DNA, 972 bp, Klebsiella pneumoniae
atgagcgaaataatggatttagtcgtcatcgagaaaaagaacgcgatggcggttttcaccaataacgaccagctcgacccgcttatcgaagcgatcgaaaaagaggctcgcagcctggtgccggacgtgaccaccaaaaaaggccgtgacgctatcgcatccatggctcacaaggtcgcgcgctctaaaacctacatcgacaacgcaggtaaagacctggtcgctgagctgaaggctctgccaaagcagattgacgaaagccgccgcgttgttcgtgagcgtcttgatgcgctgaaagatgaagtgcggcgcccgctgaccgaatgggaagccgaacaggaacgcattaaggccgaagaagccatgaacgcactgcatgccgaagcgctggccatgaatgaagagttcaatcggcagctggctgctcggattgagtctgaccacgaaatggctctgctgatgaatgacgctttcgatcgtgagcaggcagataaagcggcagaggctgagcgccagcgcattgcccatgaagaggaaattaagcgaatggcagccgccgcagcagcccgcgaagttgagcagcgcgcacagcgtgaacgtgaagaagcggcgcatcgtgaagctgtgttgaaagcacaagctgagcaggcagagcgagatcgcattgcagccgagcagaaagctgaggctgacaagcaggccgctatcgaagcggagcgccgcaaagctcaggaagaagccgatcgcatccgccgcgaggcagagcaacgcgaacaggcccgcctggctgaggagaaacgcaaagccgatgagcaggcgcgacgcgaagccgacgttaagcaccgcaaggctgtaggcactgaaatcatcaaagctcttctggccaataccagccttacccgggatcaggctatcgaggttcttaccgcggttaaagacggccgcattccccataccggtatcagttactga

SEQ ID NO: 217648 - DNA, 195 bp, Klebsiella pneumoniae
atggctaactcaattcctaacaacggacgcgccgtgatgatgcgcaacgctaaaactggcgccacctggaaggtttcacgtgactacctgagagaaaccttctggttcgagcctcaaggcaaccttcgccacattcgcacggcatttgaggcacgcgacctgctgccgaacctggttccagccgggacgcattaa

SEQ ID NO: 217649 - DNA, 633 bp, Klebsiella pneumoniae
atgagccttgcagatcgcgtaaagcaaaagagaattgagctcggtctaacgcagaccgaggcagcgttgaatgccggaataactcagcagtcatggcagagcattgaaaagggagacaccagaaaaccgcgtaacattattggcatagctaaggcgctaaagtgcgatcctgactggctaatgaatggcggagcctttatgcctattgctgaagttagcagcaagaaggtgcctctcataagctatgtccaggcaggggctctcgcagaaaaaaatcccattgaggcatttgatgggagttttgagtacatccttacagacaacgaagtttctgattttacttttgctttacgcatcgaaggcgattcgatggagccagacttcaaggctggagatgtgatcattgtagaccccgaagttgagccaacccccggagagtttgttgtggccaagaacggtggggctcaagcgacctttaaaaaatatcggcctacttacacggatcacctgggctgccagcatttcgagcttgtgccattgaatgatgactacccgattatcagtagcgatcatcaaccactaacaatcatcggcgtgatgattgaacacagaatctatcgaagaaagcgctaa

SEQ ID NO: 217650 - DNA, 216 bp, Klebsiella pneumoniae
atggaaaccatttcgcaacgcctcaaaaaaaagcgcgaagagatgaatctgtctcaggcgcaattagcaaaaaaagttggcatgagacagcagtctctgcaggcaattgaggccgggacaaccaagcgcccacgttatttgttcgaactggcaactgcgctccattgcgaccctaagtggctgctttatggcgagatgccatctcaatctcaataa

SEQ ID NO: 217651 - DNA, 321 bp, Klebsiella pneumoniae
atggagaatgcaatagcccgcaacttagaaccgccaatcctcaaaccgattgagctggaaggggttttactcaaccgcctttcatccatcgggcagaaggtttacgcggagatgttgggtatcagtgaatcaacagtcagtcgcagaaagggggaagggcatttcgccgacatagcaaaagagctgtcagtgcttggtctgcaggttgtaccgcctgaagcagtagtagtgtcccggcattacctgcagtcggtagaaacgctggcagatatcggattacgtgctgagcggtgtcggcctggtccgcttgggtgggactga

SEQ ID NO: 217652 - DNA, 303 bp, Klebsiella pneumoniae
atgaaaaagaactcgggcaaacaagctgttattaacttcatcggccagcatcctggctgcagctttcaggatatccgccgcggtaccggtcttgactcttcagtggtcaactcctccctgtggcagatgcaccgtgacggccaggttaagcgagaaggtgagtgcaggagctaccgctacaccctgattgacacaacagccgtaaccgaaagcgatccgtctgttcagtatcgccagcgtcctggcggtgtaaacccaatgaccaacctgtttaaccagtgcctggcgggagtaagaaaatga

SEQ ID NO: 217653 - DNA, 390 bp, Klebsiella pneumoniae
atgaacatcgaaacagtaaacgagctcatcgcctccctggagagcgcaggcgagctgtcgatcagagagcagaagttcctgaagctggcgaaagcgtttaagcagatggctgcggagaatgtggcgctgaaggaaagccgaaataatttggctgaattcatccatgaagaacttgatgctgattacccgctgaatatgaatctggaaacacatgccaccgatcgcttcgtagccgggattaaggctgatggggtgggggagttcattggtcgcctgcagcagtgtgtcgatgagggtgattttgtaggcgatgaagttgccgtaattgttggcgccatcgactgcggcaaggaattttgcgagcaactgcgcgagggggtcgacaaatga

SEQ ID NO: 217654 - DNA, 261 bp, Klebsiella pneumoniae
atgagcatcgccacttatctcaataccggtttagccattcttggatgggcatacatcatggttaaaacaggccagtggattacaaagaatgctctgaggcagtgggacaagcgtcgtaaggaatctcgccgccagaaagctgtgaatgagttttatgacgcctttgagcttaacagcctggagcctggctctaccgttcgtctggccactaaaggcgacctgacaatcatgatgttccgcagcgagggggccgacaaatga

SEQ ID NO: 217655 - DNA, 552 bp, Klebsiella pneumoniae
atgacaactgatatcaccgaactggcgcagcaagagctggctcaactgcgcgctgagctttcaaatcaggcaattggcagtaaagaccatctgcgaaaaatcgcgttatcgttggtagataaactggagaaatgtcgagatcgggagattaggtggctggccttgtcagacgagaaatcaaaaatcatcaccgatcaagaagaggcgctggagaaggcgcagcggcgcaacgcagaacttgaagcgcaaaacgaatatatccgtaagcgctatcagcagctcgatctgctgatcgggaaaaatatcctggttatgcaggctgcaatcatcgaatggcaggccactggcgatgctaaaaacgggctggcgtggatttataacacgctcttcgggccaggcgaattgcctgatgaagcggagaaagacgcacaggcatatttcgaccgcaaatatgctccgctcgatgaagagcttatggcgcttcacaagtggttttgggaacaaagcgaggctgaacgtgccgccgctggcatcaaggtggaggctgagtga

SEQ ID NO: 217656 - DNA, 381 bp, Klebsiella pneumoniae
atggcactgaccaaaaaacagcgcgcagagctgcgcatgaaatttggcggacgctgcgcttactgcggctgtgagcttagcgacaaatggcacgctgaccacgtcgaagctgtacgaagaaacatcagtaacggctacgcaatggacaggccagaaaacgatacggccagcaatatggttccggcatgcatcccctgcaacctgttcaaaatgtgcagcacggttgaggattttcgcaatcgcattgctactcaagttgatgtgactcgccgagcatcgagaagctaccgcacagcggaatcattcggcctggttcaaccaactaacgcgccggtagtgttctggttcgaaaagtatcaggcagaaggagccaaccaatga

SEQ ID NO: 217657 - DNA, 468 bp, Klebsiella pneumoniae
atgaccaaatcaaccataaccagagagcgcttggaacaattcgctgataacaacactatctgcaaagtttcatgggatgagcggatcgaactggcacaaatcgcgctggccgcaatggacagcgagtctgagtgtctgccgcttgactacctacaggggcacaaagacggtctggagtgggccgcccaactggcagaagccaatcaccctgacaccggagactggctttacgatgaccctatcgagctggcaaaagccattcgcaaaggtccagatatgccgccagcgcagccggtagaggacagcgatccggatcgcaatcctgtgctggcgtatgccgacagttatcgtgatatggcgaaacaaggcgtcgagtcagtcccaatatggagcgtcattaccgacctcgagcgaaacattgctccgctctatcgccgcgccgccatgctcagcggaggtaagtcatga

SEQ ID NO: 217658 - DNA, 495 bp, Klebsiella pneumoniae
atgatcaaccgcaacaaactggagcacattctcgaatacgccaaacagcagaggtacatcggccagtcctgcaaggttccgccagaagatatggtcgaaatcatggaacgattgctcagcgcttgcaactctccggcaattccggatggttacgtgatggtgccgaaggagccgacagcggaaatgattttgtcagcgatgcgagacaacgaaactggagaggtggcggaaatttatgaattgatgctcgcagccgccccgcagtcactcggcagtgaaccggccaccgtgccgggtaaatggattccggtaagcgagcgtattcctgataatactgagcctgttctttgtattgaaaaacgtgctgattttggtacttacggacaaccattcgtttgttggcatgatggaggtggatgggttggaaaaacaaattaccgtccaatcgtaacccactggatgccgctgccggccgccccgcaggaggtgaaatga

SEQ ID NO: 217659 - DNA, 192 bp, Klebsiella pneumoniae
atgatgccgtacttcttcctgattttcgtcatcagcagccaatcatcgaatatgcaggtggttcctatgcagagtatggagcagtgcaaagcagccattaaggcgatgaaagttgcagatgataagaggtcctgggacgacgtttcgccgagcgtagataatattcaatgcgtagaggtgaaaggtgcctaa

SEQ ID NO: 217660 - DNA, 597 bp, Klebsiella pneumoniae
atggcgcaaacactgcaatttgagaagagttatcaaaacgtactgattcccgcagagccgggaaccagcgaatacctgcaacttatccctgtagggcaactgctttgcggtgagttccgcaagccccggaattacgcattccacaaaaagttcttcaagcttctgactctcgggtatcactactggaccccttccggtggtctcattgagcccgcggagcgtaccctcatatccgggtttatcgacttcctttcatccgaactcgatcagcgtgctgcgctccagaacgccgcggagatgtatctatcctctgtcggtatttcccgttcccgcgatatggcgcttctgaaacacttcgaatccttccgcgagtgggcaactattcaggctggcttttacgacgaataccagatgcctgacggcagccgtcgtcgtgtcgcaaagtcgatctccttcgccagcatggacgacagccagtttaacggcgtctacaaatcagtgctgaatgtgctctggaactacattctgcgtcgcaagttccactcgctggctgaggctgaaaacgccgccagtcagctgctgagctttgcggggtga

SEQ ID NO: 217661 - DNA, 642 bp, Klebsiella pneumoniae
atgaaacgcgcagaccaaaataccgaatggtcagaattagctaaggttcctcgtcgctcataccttggcaaatatcgacgcctgaaaccgtcgcaagaacgatggattcgctcattgctgagcctgtggggggctgtttatggtggcagtggtacagaacacctttccggcggtgggatgtggtcaatgatcatcaccgggtggagcggtgaacaacaggaaaagattgctgacgttttaaccagactcaaaaaaataggttactcaggtgagaacctgttggttatggcaagggccattttgtggcctaaaaagtcgcttagtgatgttatctcagatgccattgatcgcgatgaggctgacttcatggaagctctgatactcaaatctttccccgtcgagaacatgatttataaggtcggcaaacgctattactcaagcagacaaccattggttgatatggcgagatggatgcaatatcgctatgcaccattcctgactgaaaaacagtgtatcgaccgcatcagatggtgtgtcgatttgttcaattctgctgtcttcttcacgcttattgcagaactcagcatcgaaaatgaagaaaattgcaaaaaagacttgaaaacaagttttgaagctgcataa

SEQ ID NO: 217662 - DNA, 540 bp, Klebsiella pneumoniae
atgagcgaaagaaagtatccatctcaggataccgtcagaaagtatttcatttatgaaaacggaagcctgatccggaaaaagagggcggaagctgagttttccacctcgggcctatgtgaaagatggaataccttgtatgccggtacgcatgcaggaagtctgagcaccaacggatatgtttatataaagcttaatggcctaaggtttatggctcacaggcttgtctggatataccacttcggagatataccggcaggaatggaacttgatcacatcaaccatcaaagggacgataacagtatagaaaatcttcgggtggtcaccaggaagcaaaactgtcggaatctatctttacctaagagaaataagtctggggttgtaggtgttacatttgataactctttgaaaaagtggaagtcacaaataaacatagatgggaaaaacatgaatcttggaagtttttccacctttgaaaaggccgtgatagcaagaaaatctgccgagaatttttacggcttccatgaaaaccatggccgttaa

SEQ ID NO: 217663 - DNA, 225 bp, Klebsiella pneumoniae
atgtatcgcatggaaaagataaccactggtgctgcctatggcgcttcagccgggagcatccttaacggcatgctaaatgcctatagccccgagcagtggaatgccatcggcgtactggtgggcattgtcatcgccgtacttacgtatctgacgaatttgtatttcaagattcgcgaagacaaccgatgtagcaggagccgagatgaacccgacgctgaggaataa

SEQ ID NO: 217664 - DNA, 495 bp, Klebsiella pneumoniae
atgaacccgacgctgaggaataagctgattggtgcgatcgccggcggttcgggcgcgatcgcaattgcttctgtcatgcttggtaatgccgacggcctggaaggaaggcgttattacgcctatcaggatgttgtcggcgtctggactgtttgtgatggccacactggcgccgatattcgccgcgggcatcgttacaccgacagggaatgcgataacctgctgaaggcggatctgcggaaggtggcaagcgccattgacccgcttatcaaagtccgcattcctgatcccacccgcgccgcgctttactcattcacctacaacgttggctctggcgctttcgccagctccacgttgttgaagaaactgaatgctggagatgtgccgggcgagtgcaaggaactgcagcgctggacgtatgccggtggcaagcagtggaagggattgatcaccaggcgcgagattgagcgtgaagtctgcgagtggggccagaaatga

SEQ ID NO: 217665 - DNA, 351 bp, Klebsiella pneumoniae
atgagccgattaaccgcaatcatcagcgctgtagtcatcctgctgctttcctgctttttctcgtggcgttctggctggaattctcacgctgaccatatcaacgccctcgcggcgaagaggaaagagaaagccgaaaagactatccagccggtagagcaaaaggccgctgccgctacagaagagggcaaggtcatttaccgaaccataacccgcgacgtggtgaaatatgtccagtccccgaatcgtactgtgtgccggtttgacgatgatgctgtgcagttgcgccagcgagctatcgacgctgccaacgccatccccggatttgatgagccctccgtgcaaagcaagtga

SEQ ID NO: 217666 - DNA, 258 bp, Klebsiella pneumoniae
atgggtttaaaagaaaaggcaatggctatttttgccgataaaatctcacaggtaagtgaagagaacacagtagattccactatcagcaacctaaaactgttattgaaagagcggccagaccttaagcacctaatcaaggaactaaaggctggcgagttgacgaaagaagattttatctatacgtgcgtaacccatctcacaaaagagatgattgagctgcgtgaagagaaaacaaaccgcttcttgcaaacctggtag

SEQ ID NO: 217667 - DNA, 651 bp, Klebsiella pneumoniae
atgagcaaacccgactgggaggccatcgagacggcgtaccgggccggggtgatgtcccttcgtgaaatcgcatcgcagcacggcatcagcgaaggcgctatccgtaagcgagcaaagcgtgacgactggtcgcgcgacctgaatgcgaagattcagcaaaaggctgacgacttggtacgcaagcgggaggtacgcaggacggtacgcaacgaaagcactttgaccgaacgcgtactgatagaggcgacagccgaggttattgcaacggtacgcatggagcaccggggtgacatccggcgggctcgcgaactgaccaatacgctattcgatgaattggccggagagtgtggcaacgtggccgcgcttgaagacctgggtgagatgatgcgatcgcctgatgacaaaggcatggataagctcaacgatctctaccacaaaataatcagtcttccttcccgcgttaaatccatgaaagacctgagcgacagcctgaaaacgcttatcggcctcgaacgagaggcatacagcattgagaataaggctgaaacgaaagaggtcacgcataacgtcatgctggtaccaaccagcgataacgtggatgactgggaggcggcggcgcagaaacaacagggtgaggtgctcggtggatga

SEQ ID NO: 217668 - DNA, 1569 bp, Klebsiella pneumoniae
atgaattacaaagctgtatggaagccactgcctggatcacagtctctggctctgagttgcccatgtaacgaaatacttttcgaaggtactcgcggacccgttaaaactgctgcccagctggcccggttccggcgcaatgttggcgtgggctatggctcgttctggcgtggcgtcatcttcgataccgaatataagaaccttgccgacatcatcacgcagtcgaagcgtatgtttcgtctgttcaacgatggcgctcgatatctgtcatctgcgagcgaattacgatgggtatggccaacaggcgaggagcttctattccgcttcggcaaagaggcagacgactactgggattttcacgggcaggaattcccgttcattggctttaacgaactgacgaaacagcagtcccctgaattctacgaaatgatgttctcctgccgacgctcatcgttcaggccggaaaactacccgctggataatggcaagttactaaagccgatcccgctggaaacattcagcacgaccaacccgtttggcattgggcatacctgggtgaaaaaacgcttcattgagccagcgccgcgcggaacagtgcagcgcgaccggcaaatggtattcaaccctcagacagaacgagaagaggaaatcacgcttacccgcgtagctatccacggatcgtttaaagagaacccgtatctcgacccgcagtacatcgcgaccctgatggccatcaaagacccaaaccgccgcaaagcgtgggtggagggctcctgggatgtgaccagtggcgggagatttgaccatctgtggaatgaagcgctgcacgtcattaagccgttccgcatcccggatagctggaccgtcgatcgctctcatgactggggtgagtcgaagccgttctctaacctctggtgggctcaggccgatggcacagccgccgagctgtctgatggtcgacagttctgcccgcctgccggttcccttatcctgatcggtgaatggtacggatgcccgcctgaagagctcaacaaaggcctgaatatgtcatccaccaacgtcgcgaaaggcgtagcgtggattgacaagcggctggttggcgaagacgtcgacgagccggaagagattcaaatcgacggtgtcacacagggccagttgcacattatgccaggcatctgtagcgaagtgattcccggcccggctgatggggcgatattcaacactggcgataacgagttgtcgatcgcgcagaagatggaagcgcagggcgttacctggttgccagctgataaaaagccaggctcgcgtatcaacggcgcatctctttttgcggatatgctcgaagcggtggttgaaggcgtgaagctggaatcaggcatgcctgagaagccagcattctacgtttttgactactgccgtggctggataagccgcatcccggtgctcgttcgtgacgataaaaaccctgatgacgttgacactcagcaagaagaccacgactgggatggaacacgttatcgcgtactgcattcaccacaaaaaatcaccggcatgttggtgcgatcgcgctga

SEQ ID NO: 217669 - DNA, 1452 bp, Klebsiella pneumoniae
gtgaccgaaagcgaaatgaaacaacatcgcgccaccaattccagcactgaaagggagcgtaataaaaacctctcaatgctgtttaacggcaccagtaataccaaacgccagcgactctatcaggagttcggttacccgttacacctcacgtttgatgacttttaccgggcgtacaggcgtaatgcggttgctggcgctgccgtgacgcgcatgcttgatgggtgctgggaagactacccagatgtttacgaaggcgaccagacaaaggacgcatcgaagcaaacagcgtgggataagcgagtcaacaagctcctgaagcgctgctgggagcagattaaaggcgcagaccgccgtaacctggttgggcgttactctgcgatcctgcttcagattaaagatagtaagaagtggtctgaacctgttgacaccaccatcgtgggaaggcttgaggaaaaggctctcgttaagctgattcctgcatgggaagcgcaaatcgacccgattaactgggacgataacccggacagtgaaacgttcggcgaagtgacgatgtactcgttcactgagttgccggttgacggaaactttgacgcccgcccgggccgaatcatcaacgtacacccggatcgcgtaatcatcctggcagagggctctgatgatggcgtgatgacgtcaggaaagtcgctgcttgaggctggctttaacaagttactggatatagagaaggtgagcggcggtgcgtctgagggattcctgaagaacgccagtcgccagctcaactactcattcagtgagaagacgaacttctccgctctcgccaaggcccttggcgtggctgagggtcaacttgctgaagcgcttgatcagcaggtccgtcgccttaacgacagcaccgacagcgccagctttatgcaggctggtaccgctgaggtgttgagcgttgcggcagccgacccagaaccgacctggagaaccgcgctgagcgaattctgcgcgaccgtccctatccctgtgaaagaactcgttgggatgcaaacgggtgagcgcgccagcactgaggatgccaaggggtgggggagaaccaggatgagccgccggaaaggatttctgaccgacgtaatcaccgatgtagtttcgcgcttctggacccttggaattattccgccggctcagaatgaagaaattaccgtaggttggtctgatcttctggcgccgagtcaggcagagaagattgccaacatggacaagctcgcggacgtggctgtgaaatccacgaatgcctttggccgttctgctatcactgagaacgaaattcgcgctgcgggcgaactgcaaccgctgcctgagcttgatgatgaggatctgccagatggcaacaaaccaaaacctgatcctctggccgaccctcagtcagaagccgaaaagtccggtgataccacggtcgaaagttga

SEQ ID NO: 217670 - DNA, 285 bp, Klebsiella pneumoniae
atgactggcaatgagctttatgaactctacaaagcgtcaatccgcgccgaacaagcatcaccaaatgaaaaagatttagtagatgcaagtgagtatttgggctatgtaaccggcgtgtgggacgcgctagaaggctttgccgtttgcactggtgacaaaatcacaagagggcaaatcggcgacatggtcggtgaatatctaaaaagcaaccccggcatccgagataaacaggctagctccataatcatggtttacctgaatgctaaatatccatgcaaaaaataa

SEQ ID NO: 217671 - DNA, 1380 bp, Klebsiella pneumoniae
atgaaccttaccagtattcatgttaaatccctcgccatcaacgcctccaacatctcaacgacaaccatcaatggccaggagcactacgtcattcgtggtgctgttccgatcgtcgatgacattgtgatgaatggaggtctgtacccggcggaggaaattaacaacagctaccagacgatggaaggcaagctgatgcctcttccgcacccgatggtagatggcaagtatgtcagcgccaatgacccgcgggccattaacagctatcacgtcggagcatgggcgcagaacgtcagcaagtcaggcgaccaggtcgtcatggacgtttatatcaataaggcggtcgccgagacaaagcctgacggtaagcgtctgattaatcgcctagatgagatgatcgccggcaccaacaccgacccgatccacctgtctaccggattactcacgaacaaagagagaaagtcaggcgagtcgaagcagaagaagtactcatggatcgctcgcaatatgcagttcgaccatatcgctatcctgctcgatgagccgggtgccggtactccagaagaaggcgtcggcatgttcgtgaatgccgatggtcaggaaggcgaagtcgaaactgcaagcctcgttgaagccgcaaatagcctcaaagatggcctgctgaacaaagtgaagttcttcctcacccacaactcagatgcctcattcgatgaaatctaccagatgctgcgtgaagccattcgcgcgccgtcaggcagcgatgtgtatcgctatgtcgtgaccgtgtggccagacaaattcatcttcgaagaaggtaataagctcttccagcaaaaatacctcatcgacgacagcacagtcacgctggtcggcgatccagtagaggtcgtgcgcaaacccactgagtacgaagtcaaaaccaacggagaaacaaacccgatgaaagagaagatgatcgccgcgctcaatgccgcaggcgttaaaaccgaggggctgaccgacgatcaggtctgggatgcctataaccagcaggttcagaagaaagcaggcgaccagccgggtactcagattaactctgacgcgattactgcggcagtaaatctggcaattaagccgctgactgacgagatcagcacgctgaaaactcagctgcaggccaacgctgaaaaagacctcaagaccaagcgtgaagcggtcaaagcgaaattcccgttcatgaccgaagcggcgatcaactcgctggccggcgaagcgctgaacgacatgtatgcacagtgccaaaccagcacaggtttgaacccatctttccagcaggccaatgctgaaaatgaccagtggaaagactatgacctcaacgctggcatcgatcaggagaaaaaataa

SEQ ID NO: 217672 - DNA, 435 bp, Klebsiella pneumoniae
atggctaacgtcatctatcgtggcccggtcgagcgtgagccggaaaccatcaaccttcctgtcgcatctgctcttaatccgggtgttgccgtaaaaatcgcttccggcaagttggcggcatctgcagacactaccggccgctggttcatcctcggaaatcggcgcttcatcggtcaggcgattactactgcctacgcagctaacgagactggtgtggcatatcgcgtggagggggagcaggaatacaacgttcgcctggcagcagcagcctatacggtaggccaggagctgaccattggtatcggcggcgtattcaaagcggccgcaaccggcaaccaggtcgtcgcaacgttcgacgaaaaagcagggcgcactctggcggcggaaggtttcgccgacgtggtgatcctctccactccgtacgccaaggcataa

SEQ ID NO: 217673 - DNA, 1032 bp, Klebsiella pneumoniae
atgttaaagtttactccacagcagcaaaagctgattctcaatgcccgccgtcgctgggacatgatgcagcgcaatatggctgcacagcatggctttgcagtcaacgatgcgaacggtcagttcattgcgtttgatgagcttgtcggtaacgcctccgtgctaccgaaagacgtctggggcgaatgggaccgctcggctatcaccgtacagcgtgacgtgctgtcagtgtttaacgacctggctgccagcgtttcccgccctatggcgctcggtaagatcgtccattacttcatgaccctgtccgattccggcgatgtaaacatcagcctggatggacgcggcaaggcgaagggtgatcagcctgtcatggattacgaaggtacgccgctgcctatcatcgacagtgagctgacattcggctggcgccagatgctggctgctcagactgaaggttattcgctggacagtgacgctctttccaaccatcagcgcaaagtcgctgagaagctggaagacatggtgctgaacggcgatccaaacatcaacgtcggaggcgcgaccatttatggactgcgtactgcccctaaccgcggaaccggaactcacggcctgaccctgaacggtgccagcggcgcgcagtgggttgcggcaatctccgacctgattaacctgctgcataacgaaaacttctatgcaccggtgacgatctacctgaactacaaagactggttctacgcatcggttaacgactatgccgcgaactatccgaagaccatcctgtcccgcatcatggaaattccaggcgtggccgcgctggttccggcctccagagttccgaccgatgaactgcttggcgttgttaaacgccctgacgtcgttcagatcctgaatggcatgccgatgaccatgcgtccgaaagcacgccttaacccggaagatgattatgtcttctcggttctggccgccgcggctccgcagttcaaacacgatgcaaatggccaggctggttacgttcagctgaccaaagcataa

SEQ ID NO: 217674 - DNA, 288 bp, Klebsiella pneumoniae
atggctggtaaagaacaacaatggctgctcacccatgacagccacgaacttaaaaagggcgaagtttacaaaggtgaaactctcccgctttggctggttggtaaggcaatccccgtgggagatcaggtgctggaggtagcgaccccggccgatctgcaaaagctgcaggctgacctcgacgaggctaacggcaaagtagaatcgctaaccgctggtaatgccaagctgcaggctgaactcgacgaggctcagaaacaaatcgacgagctgaagaaaaaggcgaaataa

SEQ ID NO: 217675 - DNA, 381 bp, Klebsiella pneumoniae
atggctgacccaatcacagcggcagacgtgcaggcgttcctcggtgaattgggttactccatcccggccgctctgctcgattcgattctctgcgtggtgaacaagattatcccgtgccttgatggtgcgggatatgacgactgcacggcaaagctcatcctgatgtatgccgctgcgctcatggcgacgtcatccggcgccaggcgaataaaatcgcagggggcgccatcaggagcgtcgcgctcgttcgactacggtgacgacggcattacctggctgcgtgactcgctggcgaaactggataccagcggctgcaccagtgaactaccgatcagcgccggcaacagtgtgggcctgtttatggtggtcgggggctgctaa

SEQ ID NO: 217676 - DNA, 174 bp, Klebsiella pneumoniae
atggcgtgggtttcagttcagcaacggctgccgcggacgtttacccgggtgtgggtgatcaccgatacaggccaacaaacgacggcgtacgtgaaaagcaatggtgagtggtacatcaactgcgaccgcatacgcgccacagacgccgttgtgctgcgatggagggatgactga

SEQ ID NO: 217677 - DNA, 363 bp, Klebsiella pneumoniae
atgtcttcggtagctaattggtcattcaccgcgacggcgacagtctggcggcgcatacgcgatgccgacggtagcgataccgacggtggaggtcagccgtatgggtgggaagcgccgatggctatcctctgcgactaccagggcggactctctgcaaaaatcggtgaccttggccgggagctcgttgttaaaaacacgatatggaccgagtacgcaacggcgcgggagggagattacatcctgattggcgcttcgaccgatgcagcaccgccggatgaggccgatgagattcggcagatcgtccagttcgcagatacgttcgagcgactggcggacgatttcgcactgattacgggagtctga

SEQ ID NO: 217678 - DNA, 369 bp, Klebsiella pneumoniae
atgggcgctaaagttcgcggcatccgccaggccaaggccaacctcgatcgcatcatcaaagacgtccagggacgtaaagtcgtgcgagcaatccagtctgcgatgcttatcggcagtgcgcaggcagcactttacaccccgatcgatacgtcgacgctcatcaacagccagttccgcgaaatcatggctaacggcaccagggtaaccgggcgcgttggttactccgccaactatgcggtgtatgtccacgacccggcagtgaagcagaacttccggcgagcaactgcccgcaaggagttcttaacgaagggcttcgaagatacccgcagccagattgacgcggcggtgaagaaggagctttcgctatga

SEQ ID NO: 217679 - DNA, 384 bp, Klebsiella pneumoniae
atgacccctcctatgtatatgcgcctcaaagacctgtttgtggctgaggggcttaccgcggggtttaaggtccaatggcggcaatggcgcgataccggcaaagataccgatcagttcatcgtattcaggtcttcaggcggtaccgatatcacctttgacctcggcggagactggtatgtgatggttgatgtgatctcctcgaaggcgaatcccgatgctgctgacgccgcggtaaacgccattgtcgagtatatcagcgcgcaatccggcgccgatgattgcgtaggcgcgctacggcttgtcggcaatgtcccggcgccgatccccaccgaagagggccggttagtaacccggctgctcgtatcctgcacatacggcgaataa

SEQ ID NO: 217680 - DNA, 765 bp, Klebsiella pneumoniae
atgcaaggctgcgctaatgacaccggcaagctgattggtaaggtggccgtgctccgcatggcttttggctgtgctgatacggttcctgcgctttccgaatggaagcgactcggcgccatgaccaccaagggctttgactactccatgaataccgtcacctctgaggctgacgatacgaaggggctggttgagaacctggtcaacaatatggacttcaccatctcaggagaaggtgagttccgcaagaaagacaagacgacggaagtcggcgctattgccatctcgaaatatattttcgatgaagtgcaggccggccgtcagccgacagtctgggtccgcttcgactttactggtgaagacgctggaacttatatcatggggtacttcaacactacctcctggtctggtgatttcggcaccacggatatttcgaccttctccggggaatggaaagtggctgatgcagacaccgtggtatttgaagtcgctccgccggcgctggcgtttaccactaacctgccgacgaccaagagcgtggcggccggatcggctctgaatatgtcggtcgtggttgagggtggcacttcgccttatacctatgtctggaagaaagacggaacggttgtcagcgggcaaacaacggcgaccttcaacaaggccagcgctgcttccggtgatgccggggtttatacctgtgaagtcaccgactcttccgcgacaccagtcaagatcacgtctgcatcctgcacggtcactatcagttaa

SEQ ID NO: 217681 - DNA, 714 bp, Klebsiella pneumoniae
atgaccccgattaaagaattaggcgaatgcgttatcggtaccggtgaccgggaattctttttccggccgtcgtttcgcaacatggcgcgaatcggtgaacccgaggagattgttcaggcgttctatgacctgtgcaatgacgaggcgacgccattcgcgcagcgcgcagctgaggcctatatccgcgatgagtacagccgccttcctgattgtgtactgcgatacatccagagtgggctgttgacccgcaaagcgatcatggccgcacatacggtactgacagcgtgctgcgacgacgatatcggagatctggttggctggatgaagccgggaaaggcccgtaagcgtggttttgtctggcgcccgggcagcatgccgccggaaagcatggtcatcgtcgcgcaaaacctgatgatgcacggcatcatcggcaaagcgaaggtgcgtaagcttcagcgttacgaaacgaacgagacaaccgcagaattccgtgctgccgactacatcatggctgcccgcaaccatttcggcataagccgggaagaggctgagaacctcacgatgacagagttcgccatgatgattaacgccaaatacccaaatcagaacggcttcacgcgcgaagagtacgacacggtcatggacgaagacgatcgccgctggcaggcgatgatggagcaggagcattccaggacaacccccacgaagaattaa

SEQ ID NO: 217682 - DNA, 552 bp, Klebsiella pneumoniae
atgaaatatccaactgtatcagtgaacggtgtctccgttcgtgtcgacgatgagggtcgctatagccttaatgacctccatgcagcagccgtggcaaatggggaggctacagagtcccagcgcccaagcgtattcctcagaagcgcccaaataaaacgcttcattaaggcgcttcaatccaaagcactaaaaagtgcttcggaacaaaatcaaccgcttaaggtgataaaaggcggctctgaatcaggagcgtggggcgtcgagctacttgctattcgctacgccgcctggattaagccggagttcgaaattgaagtgtatgaggtatttcgaaccgttgtccgtttggggatcggcgccatgtctaggctgaacaaaatcgaccatatcatcaacactgaaaccaaagcaatcagccagtgcgcgagccagatggcaaagtggggtgtaggtggccgcaagcaattgctacatgctgcgcgcgatcgagccgctgatgaggttcagttatatctgccgggaatagctgtagaatcaacatcatgccgttaa

SEQ ID NO: 217683 - DNA, 474 bp, Klebsiella pneumoniae
atggataagtttgaccgcataatccagcgagagctactccaacgtctctgcgacatttacccagaatctgccgatagtagcttctcaaaggagttttcagaaaaatttggaggcattaatatctttactgccaacttactttatcttgctggtcacggactcattgagataagacttagcaatgaaataggccgacgactgccatctgtaatggactctttcacgaaaatcaccagcaaaggcatagatttcattcgcgatgacggcggtttgggcgcaattctgaacgtacaaaccattaagtttcaccgggacgctgtcgtcgtactcgaagacctgatcgccatttcaaacatgaacgacgagcagaaggaaaaagccaagtcgactctcggcgaaatgtcgacggaagccattaaaactgtggtacaagccgtaacgaccgccgggttatcaaagctactcgggcaatga

SEQ ID NO: 217684 - DNA, 1773 bp, Klebsiella pneumoniae
atggcagaagtaccgttaccaactcccacagataacgctgttccgagcacggatatccgtgacgcagtttatgccggcgccatgctggataaggttgtcaccagtaccgacctgacatacaccgatcgcctcggcggtgagcattacaccgtagacggaatgaaggcggaaggggataaagtcgttgaagaaacgcggcagaacctgatccctctcagccggcagtatatgacgctggctgatgctcaggcagacatagcgaatatcccggtgggttctaccacgtattaccgtagccctgatgatagctcgctggcaattgaagtcattaataacggagggactctggagcctactgggcgccaaatgccatcaaccaagaccgttgatgataaaattaatgagcgcctcgtcccaggtgaatacaggcctggttatttcccggccttctttgacaggaatagtatggtgccagcatggtttgatggcggcaaatttgatgtggccggactggggccaaatgttacacaggttgtttctgaaattccaaacgaatgggcccagaagtttataccgcaaggagacttttcaccttattactttccttttttatatgaccaacaagggaacgtatatgcgtggtttcatggtgggctattcgatgctccaggtcttggcccggtattgcaggaatatgtaaaaaaccttgtatctggtggggaagttgatgcggtacgttccttcatcgaaggagatcagtacaagttccttttcaaaaatagccgtatttttgctggccagtctaccagcctaaacattgcttttaccggcgattcgtggacagagaaaaacaccattcctcagtctttaattaatattcttggtggtacatacaaagaccctggctggattagttgttcaaacagaacagatggtgtcatgtctggaatatcaccagtaaccgcaacaaactttacgaaatatgacggtggcagcaataacacgaacattccgccgtatggctgtggccctgatggcaacggatactacaacaacaacactgttggttcgctcgtatggacgggcgtgactgtaacaaatctttcggtattttactatgatgggtctggaacgttcaccatcaccatcgacagcaatgcacctgtaacaatcacgggagggaatacagggactgccaagaagtatgattttagcggacttagcgctactgcacatacggtgacaatccaaagcaccggtactggtgttgtttccattcttggtatgtatggtaaaaataactcaatatcatcaggggtgactgtatccaggatgggtaatggaggagcatttgcaagtgactatttcaacttttcatcatggataaagccagtagctcaataccttgatatagacctcctttttattattcttggaacgaatgacttccggatgagtcagggggtaactgagtataaatctgggattattgaaatcattactaaatatagaagcgcaactcctgatatttgcatttgccttatgtcccctgcacagtgtaacgccacaggaacacccgcactgtcagaatacgataaagcaatgagggaaatagcggttgaatataatgtaaatttcattagtggttatcaattattccccaaagtgtatagcagttcaggaggtgcgtgggaagatgccttgcatcttagcgccttgggcgcatatgtactaacgagaaagatcaaaaaagaattttttctgggagcttaa

SEQ ID NO: 217685 - DNA, 759 bp, Klebsiella pneumoniae
atgccgatatcagctatttatatagacgccactcttccagttatctctggaatgaaaactttatctgactttgatgtgtcaaactggtttattggcctgccaaccacaggtgcaacaccttatgctggtttctattttggggaccccgtaaccgacataacctacaactcttataacaaagattctccggcagtcattcatggaaatgtaaacaattctcctggatatatatctgtaaatacaacagattacatggatactaatcagaaggctactctgtcattatctgtttgtggagttgccaagcgcaatccagcaggcgcatcacttaacgctcatatgattgcagattttgctggcagtgggtctgcagcaagtggtttttcggtagggtttacaaacggcacaggaagtcttttttgtgttgggcaaaataacggacaatcttcagctggttatgcttacgctacattcccaaccgcaatcgcagtcggagatatgtttgcattttgcgcctcgataactcaaggctctgttacagtagatatatttaatcctgaaactggaactcttatttccgggagtgcaacatttcccgggaccagggtggcaggtactaataatgtattgcttggtagaaaaactgataacaacagtgaaacaagtaccaagtacattaagtcttgcctgttgatgaacggcattcttacttcagcagaaaaaatatctgtctctcagtttttactggcgatgcaataa

SEQ ID NO: 217686 - DNA, 927 bp, Klebsiella pneumoniae
atgattaatacaacacgtcccatactcaacctcgatctcgatctgctgcgtacctttgtcgcggtcgctgatttgaacacttttgccgccgccgccgccgcagtgtgtcgtactcagtccgcggtcagtcagcaaatgcaacgcctggaacagctggtgggcaaagagcttttcgcccgccacggccgcaataagctgctgaccgagcaggggatccagctgctgggctatgcccgcaaaattctccgttttaacgatgaagcctgtatgtcgctgatgtatggcagcctgcagggggctctgagcatcggtgcgtcagaagaaacggctgacaccatcctgccgtttttgttaaaccgcatcggctgtttctatcccagaatgacgttggagatcaaagttcacccccatgccgccatcatggagatgttggccgaggggctggtcgatctggcgttgaccacccatcagcctcccggctttacctcttttaccctgagaacatcacctactctctggtattgtgcagcggaatatgtgctggcgaagggggaatctatccccctgatcctgctcgaagagccaagcccattccgccaggatattatcgccgcgctggaaactgctcgcgtcagttggcatctggcccacggagcttcctcgctatcgggcgtgaaagcggcggtgaaggccgggctgggcgtgacggcgcgcccggtcgaaatgatgagcccggatctacgcgtggctggcatcagtgaggggttaccggcgttgccggacacccggtacgtcgtcagctgcaatccgcggacggtgagcgaactgccgcaggcgatttttcagtctctgagccaggagatccatccctgggaaacgggcacagcacttactccggaagagggagggaataccttggttttgtaa

SEQ ID NO: 217687 - DNA, 660 bp, Klebsiella pneumoniae
gtgcagtgtaaaggtttcctgttcgatttagacgggacgctggtggattccttgccggtggtagagcgttcatggtgcaagtggggggatcgtttcgccattgaccatgatgaaattctcagttttattcacggcaagcaggccattacctccattcgccattttatgccggggcgcagcgaggaggatatccaggccgaatttcgctacctcgagcagatagaagccactgatattgagggtatcgtcgcgctgccgggggcattagccctgttgaatacgctcaatgaggccgggatcccgtgggcgattgtcacctccggctcgattccggttgcccacgcgcgtcacctcgcggcgggcctgccgatgcctgaggtgttcgtcaccgccgagcaggtgaaacacggcaaaccggcgccggacgcctatctgctgggcgccgagcggctgggtctgcctgccggggagtgcgcggtggtggaagatgcgccggcggggctcctctccggactggcggccggctgtcgcactatcgcggtcaacgtgcccgccgatgcccctcgcctggatgaagccgacctcgtgctgagcagcctggaagatctggtggttgaacgccagactgacggcgtggtaaatgtgcgtcttaaagcgtaa

SEQ ID NO: 217688 - DNA, 738 bp, Klebsiella pneumoniae
atgaaatttgaaaaatcacttaaaatcatggcgatactagcgttttcagtttcagtaagcgcaacagcgtctaacgccaccgtatacgcacttcctgatgcaaaatcatttggcgtcgccagcgaagaccaaaaaggtttgatgtttctaggaatggacaggaatgcggacctaaagggtgtttgtttcgccatgctgaaacaggctgagtcaaacatcccttatgctgatgtcatcgcaaccacaaataataaagacttccgcatgcatggcctgcgtcccaacattcgtgacaataccaaagaggtcgtatgctcctttggttccgatgcattcgactaccttgataacctgtcaaaatccagtatgagtttggtcagtattcgctttaatgatgaacagcgtaatttcagttttaacaccagctctttcagtaagttactgacgcccagtggagccaaaatcgcagaacaagccgctgatgattataagcgaggtatccgcgctcctgtcttttacaacaaggctccatcttcagtcacagaaaatgaggacaggtatgcactaagtgaccagaaacttaatgaaatctggaacaaactcccctcagaaacccgtagaaaattactgccatcgcagcgggagtggattaagcaaaaagatacctgccgtagggacacagaatgccttaccgacatgaccaacaaacgcatcaagatactcgaggtggcaagataa

SEQ ID NO: 217689 - DNA, 1212 bp, Klebsiella pneumoniae
gtggctcttatgatgcatgacgctttttcccttcgcggcctcgcggcaggttgcgcgctgttatttcttgtcgcacctgcggtgcaggctgcggaacaactccccgacgccccttcaattgacgctcgcgcctggatcctgatggactatgccagcgggaaggtgctcagcgaaggcaatgccgatgaaaaactcgacccggccagtctgacgaagatcatgaccagctacgtggtagggcaggcaataaaagcgggaaaaatcaaactgaccgatatggtgaccgttgggcgcgatgcctgggcgaccggcaacccggcgctgcgcggctcatcggtgatgttcctcaagcctggcatgcaggtttccgtagaagatctgaacaaaggggtcatcattcagtccggtaacgacgccagcattgcgattgctgactacgtagcgggcagccaggacgctttcgttagcctgatgaacggctacgccaaaaaaatggggctgaccaacaccacctttatgaccgtccacggccttgacgcgccggggcagttcagcaccgcccgcgatatggcgctgctgaccaaagcgatgatccacgacgtaccggaagagtacgcggtacataaagagaaagagttcactttcaataaaattcgccagccgaaccgcaaccgcctgctgtggagcagcaacctcaacgccgatggcgtgaaaaccgggaccaccgccggggccggctataacctcgtctcctcggccactcagggtgatatgcgtttgattgccgtggtgctggggaccaaaaccgaccgcattcgctttaacgagtcagaaaaactgctgacctggggcttccgcttctttgaaaccgtgacgccgattaaaccagatgccaccttcgttacccagcgcgtgtggtttggcgatagcaatgaagcgaaactgggggctggcgaggcgggctctatcactttgccgaagggccagctgaaaaacctgaaagccagctataccttaaatcagccacagcttaccgcgccgctggagaaggggcaggtggtcgggactatcgactttaagctaaatgataaaaccattgaacagcgtccgctgattgtcatggagccggtaaaagagggcggcttcttcagccggatgatcgacttcgtgctgatgaaactgcacggctggttcggcagctggttctcctga

SEQ ID NO: 217690 - DNA, 1233 bp, Klebsiella pneumoniae
atgcaaaattattcgctttcaggccgccgcctcggaaggcaggcgctgttgttcccgttatgtctggtgctgtacgaattttccacttatatcggcaacgatatgattcagccgggcatgttagccgtggtgcaggaatttcaggtgggtaacgaatgggtacctacctcaatgactgcctatctggcaggcggcatgtttttacagtggctgctggggccgctgtcggatcgtattggccgccgtccggtgatgttgaccggcgtagtatggttcatcgttacctgcctggcgacgctgctggcgcagaccattgagcagtttaccctgctgcgcttcctgcaggggatcagcctgtgctttatcggcgcggtgggctatgcggcgatacaggagtcctttgaggaggcggtgtgtatcaaaatcaccgccctgatggctaacgtggcgctgatagccccgctgctggggccgctggtgggcgccgcctgggtgcatatcctgccgtgggagatgatgtttgtcctgttcgccgtgctggcggccatctcgttcttcggcctgcagcgggcgatgccggagaccgcgacgcggctgggcgaaaagctgtcggtgaaagagctgggccgcgactatcggctggtgctgaagaacctgcgcttcgtcgccggcgcgctggccaccggctttgtcagcctgccgctgctggcgtggattgcccagtcgccggtgattattatcagcggcgaacaggccaccagctatgagtacggcatgctgcaggtgccgattttcggggcgctgattgccggcaacctggtgctggcgcgcctgactgcgcgccggaccgtgcgctcgctgattatcatgggcggttggccgatcatgtttggcctgatcctctctgcggcggcgaccgtggtctcttcccacgcttatctgtggatgacggccggtctgagcttctacgccttcgggattggcctcgcgaacgccggcctggtgcgtttaaccctgttcgccagcgagatgagtaaaggcacggtctcggcggcgatgggaatgctgcagatgctgatcttcaccgtcggcatcgagctcagcaaacatgcttacgagctgggcggcaacgggctgttcagcctgtttaacctgctgggtggggtattatggctggggctgatgatttactttctgaaagataaaagcgtcggcaattcgcagcaggggtag

SEQ ID NO: 217691 - DNA, 3234 bp, Klebsiella pneumoniae
atgttcaaaggtttgtttggtaaattatttagagacaaaaaaagcaattctgctcctaccatcccgttatatggactacagcctgagggggtgctctttccctttagcattgccgaaaatgaagataactggcttgtagtttcatgcctggaacaactccatgaagaagattatgtatcacattggtcggattgctggtttctcagttgggatgatttctatcgcatactgaaaaatgaagattatgccagtagcctggcaattttcagcttccctcaacagcgtaatctgaccgcccatcttactgcgacagggagcatcagcaatgacacctttcgagttttcattgataaatggacccagcctgacgattatcgccccgtagagatcactaacctgggggccagcttttcctcaccggaaggcacttttgtgctcagcgaagaaaactggcagcttctggactcactacagcagctcagattacagcagcgacagacgccgggtgaaacggtaaaccaaaccgggtgggcaaaaatacgtcagctggctaaaaaggcagaggcaacactggatgattatcttgctaaaacgatagttatcaggcctgaggcattgcagttaaagttgcggaaatttcttgtggcggatacccgcgtgctggaaattgagccggtttttgacgaacaacctgcaaactggctgcagagttttgatcgtacacagcaggtacaagatcgttatcgtgttttaggtgatgacggtgaattaaaccacgtcattctttctcctgaagttaaagatgtgcttgcctctgtacatgccattaccggccgtcgagttgctggtgatgatgcgctttcgttcgttcgcaatccgtatacctggattggtgaagaagccagccaggtacttgatcccgaggtctatgagcagaatctacaggatgcagggatctacttttatgattttcgcctggagcctcaggttgatgaaaacatgcagattaagtctgtttcgctgatcctgagccccaggactgaacagcctgtgccaaatgaaacatacgtgtttaatcgaccaattgaattggctgcgttgattactgaattagaacaaaagttagcggcgcatcttcctgctggtgtctggcagggctatgacctcgagctgtccagattcacgcaggatgaattgcaagaatatcaggcattgctggaagactggcggaaacaggctgcgggattgaatttttctcacgtactcgatctcaacaagtacagcgacagggtcatagggataggagagtttgagaaaatcagttcaccgtatctcgtcaaaaatgaaagtgaaaattggcttccagataatctcgttaaggagatgtgtgaagacatgttctcgggctgggacctggataatcatcaacattttcatgaactagaaacgcgtctggaagatgcaaaagcctctgatgctcctgaagtcgctatgccctggaacgagaaccttctaccacgagaagaagcagaggttttccacgaaaagtggaaaaagaaaatcgatgctgagacaagcgatactgcgaatgctaagccggtgagtcgggctgtcctgcttatcgaacaaaatattgagcaggcactgtatatcaaacagcggcgaacatccttgctggaagcacacttggctgaagccgagcttcctataattctcaaggactctattcagctacgtgagcatcagtgtaaaggcgttgcctggctccagcagttgtaccttaaatccccaacagagacgacgggatgcttgctggcagacgatatggggctggggaaaacgttacagattttaaccttcctcatctggcatcgtgagcgtttccccgatgctccgccctctctgattgttgccccggtttcgttactcgacaactgggagcgcgaggtcggtaattttttcctgcgcgagcaggtatcgattttaaagctttacggcaatgaactcagagagaaaaagtgcgctaaggagagtatccctttggcgttaaagagtaaggggattaaaaacctgctgcaaaatgactgggttggagaagctcagatcgttctgaccacatacgaaacgttacgcgatcaggaattttctttggctcgccaaccctggtccatcatggtttgcgatgaggcacagaaaattaaaaatccggcagccctaattacccagtcagctaaggcaattcaggtgcaattcaaagttgcgtgtactggaacacctgttgaaaatacgctagttgatctatggtgcttgtttgactttgttcagccaggtctcttgggagcactgaataattttggcaaagattacctgtggccgatcgagcaagagagtaatgataaggtgcttgaatctctcagaaaattgattgaaccacagacactgcggcgcactaaggaagaagtggcgaaagatcttccggaaaaaattgaagataaatcctgtaagcagcttagtatgttgccgttacagcgggacctctatactcactcggtagtgagctggcagaaccaacaggaaatcagcgaaggtctggatcaacgtggtgcaggtatgcttggactactccaccgcctgaaactgatttgtgcatggccttattccgtgagtgctgatctacgcttacgtaacgatgccccgaaagtgaaatggcttttggatactttgaataatattcgccagtcatcagatgataaggtcattatctttactgaactgcgagatattcaacgtgaattgcagcatctggtctcgcagcattttggattcaagccttttatcattaatggtgataccagcacgaaatccggaagtgaccaaaaccgtcagagtttgatcgataactttcagtcatcgccgggttttaacgtcattatcctatcgacaatagccgttgggtttggtgtcaatgtacaaaaagcaaatcatgtcatccattttactcgctgttggaaccctgccaaagaagatcaggcaactgaccgggcttatcgcatagggcagcaaaaagatgtctacgtttactatccaactgtgcgtgatagtcagttaatgactttcgaagagaccctggatgaattactgaaccggcgcagagctctggcaagagatatgctcaaagcttcaaccgatctcattgctgctgattttgaagcggtacttacccgagccccgtag

SEQ ID NO: 217692 - DNA, 1353 bp, Klebsiella pneumoniae
atgagtgaagcgatagtgccactatcaagcattgatgcagcggagatccgcgaacgcgttcgggccgctggcgtcgtaggagccggtggcgcaggctttccgacccacatcaaactgcaggcccgggtggacaccgtgctggtgaacgccgccgaatgcgaaccgatgctgaaggttgaccaacagctgatggctcagcaggctgaccgactgattcgcggcctgggttacacgatgaccgccactggcgcccgggaagggatcattgccctgaaggcgaaatatgctccggcgattgcggcattaaccccacgactcccggaatgggcccggctgcatattctgcctgacgtctatccggccggggatgaggtgctcactatctggctggcgacgggacgccgcgtaccacctgccgcgctgccggtcagcgtcggcgtggtggtcaataacgtgcagactgtgctcaatatcgccagagccgtggaacagggctatccggtgactcgccggacgttgaccgtcaatggcgccgtcgcccgtccgctgacgctggccgtaccactgggtatatcgctgcgcgaggtgctggatctggccggcggcgcgacggttgacgatccggggtttatcaacggcggtccgatgatgggctcgcttattacctccctcgagacaccggtcaccaaaaccaccggcggcctgctggtgctcccgggcaaccatccattgatccagcgacggcggcaggatgaacgaacgctgctcgccatcgcccgcaccgtctgtgaacagtgccgtttatgcacagatttatgcccccggcacctgatcggccatgagctttcccctcatctgctggtgcgggcggtgaactatcgccaggcggccaccccgtcgctgctgctcagcgccctgacctgttcggagtgcaacatttgcgagagcgtcgcctgcccggtgggtatttcccccatgcgcatcaaccgtctgctgaaacgtgagctgagggcgaaaaacctgcgctacgacggaccgctgcgtccggcggacgagatggcaaagcaccgcctggtgccggtcaagcggctcatcagcaaactgggacttgatccctggtatcaggaagcgccgctgacggcggtggagccggaggtggcctgcgtcaccctgcccctgcgccagcatatcggcatcagcgccgtgccctgcgtcgcgccgggagagcgggtaacgcgcggccaggtgctggcggatatccccgccgacgccctcggcgcgccggtgcacgccagtattgacggcctggtctccgccatcacggagcaggccattacgcttgtaagaggttaa

SEQ ID NO: 217693 - DNA, 636 bp, Klebsiella pneumoniae; identical to SEQ ID NO: 26189

SEQ ID NO: 217694 - DNA, 234 bp, Klebsiella pneumoniae
atgtcgaaaatcggtccgcctcagttgagagcgaagctttacatgtctgcgctgtgcggaaaaatctacaataagcggatgcgtaatatttacgacgagatgtgcctgcggggtaaacctaaaatggtggccattggtgcgctgatgcggaaactggtgcactggtgttatggcgtcctgaagaccggaatcgtttttaatgatgaaggcctgaaacaagtactgtcaacctga

SEQ ID NO: 217695 - DNA, 2988 bp, Klebsiella pneumoniae; identical to SEQ ID NO: 67328

SEQ ID NO: 217696 - DNA, 462 bp, Klebsiella pneumoniae; identical to SEQ ID NO: 200687

SEQ ID NO: 217697 - DNA, 507 bp, Klebsiella pneumoniae
atgaattcatccatcaccactccggccgtctacgtgggcacgtatcaccagtacaactgcggcagcatttttggcaaatggtttgatttaaccgatttcgacgacgaagacgcgttttatggcgcctgccggacgctgcacgccggcgaggaagatcccgagctgatgttccaggacatcgagggcatcccgtcacagtttgcctctgaatcctctgttaagtgggcgtttattgaggctttccggcaggcacaggacgacgggcgcgccgccgcgtttgtggcctgggcggagtataccggcgagtgcgactatgacgcctttgatgacgcgtattacggcgaagcggaaagcgaggaagattttgcttatggctttgtggaggacaacggcctgttaaacgaggtgcccgaatccctgcgcgtctatttcgattatgaggcatacgcgcgggatttattcagcgacgggtatgtgttccatgacggttatgtcttcagaaactga

SEQ ID NO: 217698 - DNA, 192 bp, Klebsiella pneumoniae
atgaaacttgcaccacaaagccgcgatatcctgcgccagtacaaaactctgattaacgcacgccgccgggatgccgggcagcgggaactgaccaccgcccaggtaatggatgaaatctgctattacatgacctgtcagtgtgccgtctacatcggcggacacttcatcttacagggtggaaaaggccagtaa

SEQ ID NO: 217699 - DNA, 558 bp, Klebsiella pneumoniae; identical to SEQ ID NO: 213976

SEQ ID NO: 217700 - DNA, 249 bp, Klebsiella pneumoniae; identical to SEQ ID NO: 213975

SEQ ID NO: 217701 - DNA, 405 bp, Klebsiella pneumoniae; identical to SEQ ID NO: 203623

SEQ ID NO: 217702 - DNA, 393 bp, Klebsiella pneumoniae; identical to SEQ ID NO: 139382

SEQ ID NO: 217703 - DNA, 660 bp, Klebsiella pneumoniae
atgatagcgggccgggataagctggaagccacccttacggtaactgttgagcacctgctgctcggtagcgagagaggcctctgcgttatcggcggtatacgtggtgatgttaaagaagtaggacaccagagaggtctggttggtcgccagtcgctggcggatatcgccccactcctgcatttcctttatcacgttcggaaagtacttcgcgtaggaggttttgcttttcttctccacgtccatgaatttcaggttggcttcgttctgggtcttcacctggtcctccaccatcagcgtcagtgtgatgacaaaggggcaggagatggagagctccgggttcagcaggttggcgtagttgtccgcagcggtccagagaaaggcgatttccgggtcacactccaggtgatagttcgtcacccgggtcacgcactctttcccgtcccgccccaggcggccaattttcagatgaccggcagtgacctgcatgtcaaagctgtcatccacgcactgatagttcaggtcctgatacgggtccagcttgtacggcacccggtacatctcatgcggatccgggttaatcagctcccgcatcagttcgaccatcccggccgcatcgaggatacgcgtcgggatgtaagccccgccgagcgatgcccgtaa

SEQ ID NO: 217704 - DNA, 483 bp, Klebsiella pneumoniae
atgaactatatcgccactgtaaacactcccgcgcatggcaccatctctgttacatactccgatattgaaaagaacatcctgggcgcctggcgcgaagaagagaccatccagctgtccgggaaagagaagcagcagatcgccaaagacatcatttgcaaccgtcgattcacgcgggtatttgagaaagcgtatgtggtaaattctgggtttggaacatttgtcttcccggtgcgctccgggagattctgccagtccaagctgactgagtttgcctcgcagatcgctatctggattaagactcaatcgtcgttcgattttagcgatgatgaagcaatagcgcagggtatgcggatcgccaacaatgcaattaaatgcaaaaacatcacgtatgccgctggcgttgactcatggaaactgttttgcgctaactttatgctgaatgtatacgccagcaatcggattcacatactggctggcaagtaa

SEQ ID NO: 217705 - DNA, 552 bp, Klebsiella pneumoniae
atgcagattaaaaagactttcccgatttatgagggcccagatctgcgccgccgctggactacagaagccgaatggcgagattggcttcgtgctcatggcgcgtatggttttcgcgttaccccatatttcaatcgctgctgtgtcgtctttggtgaaagacgttatgtcgagacgataaaacagctctatggcctcgatgaaagcgagttcgtatatggggttggcggcatggtgacaactctgggctatattcaggccgacacgatgcttcattgcgtctacctgccagaaaattacgatgaaacagtctactggcatgaggcactacatgtggcgctgatgaccgcagaatatcacggcgtgcagctccatgatcaggaggcattgacctacctgcagggttatatcgcggaagagttcaatcgttcccgactacagtttatggccgacaagaaagctggtggactgcctgcgatcgagggaatagtgactcgtccagcatccactatctgccgtggcggtttttgcaatcgtaaggtggtgatgcgatga

SEQ ID NO: 217706 - DNA, 1719 bp, Klebsiella pneumoniae
atgtccataacaaaaattttagatgaatttttggcttctgatgacagggttgcagtaattaaaggtgaatggggagtaggaaaaacacatttttggaatcgttactacgaaggtaaaagaaataaaagagaaattgatcagattgcatattcatatgtttctctatttggtcttaattccattggagaaattaagaaaaaactattcccttccacaataccgcttaatcaaaaactttatagagaggatttactagagaaaaaacaacaaatgatggagaggtttttctcgggagtatataagtgcgtaaggtataataaagtaagtaaaaagatctttaataactttagcatagggataagcggttttggccttaaatcctccgaatttacaatttttgatggttataattatgtaaataaatatttaatttgttttgacgatcttgagagaaagggtagctctttagagataaaagatttcatggggttagttgatgaccttgcaagatcaaaagcatgtaagataatattaatttacaatgaaaataacttaactaagaatgacgaagaaaaacaatttatagaatatcgagaaaaaattgtcgatcgtgatattatgtataaacctgacgtcattgataatgtcagaaaaatattttcacataaagatccgaattatgaatttctacttagtgcggcggatgctttaaatttaaaaaatattagaatattaaacaaaataaaaaagactctttacgcatttgagtctgaattcacaacagcgcgtagagaagtacggaaagattttactttcagagtagtgctttttgcatatgtattttactcaggggttggtgaattgccctatgatgaatttttcaaaaaaatacaacccagagcaatggctgatagttatcatactaatgatgacgaaatgtctgacactgaaaaattcatagagcagttagatatttcatttacaaattctgataatttatttgattatgggattgattattactttaagcatggatatttgctttccagtttcacttttgaaagtgcggtgaaggctaaaaataaagattatgaagatatagagataaatagaaagttagatgaaatatggagtgtttttagagattctttcaatgcaaaccaagatgattttgttaatgcattgaaaggagcaatagaggagtatatgtcaagaatacctcttagcaaggtttcctcgatttttattattttagaggagttaggcgttaactgcgatagttatattactcaatatgttgatgatcttattagtagaggttcacttaataaagaatataatttattgatgaacagcaccattgagcataaaggcttatatgaattgattaatgataaattaaatcaaataagaaaggccgaatatgatttagatgagttgcttggccggttatcgaacaataataattactcttcattgcatattgatgctttaaatgcatacagtgaagatgattattacaactggattattacctgtaacgaagatgttttagataaaattaggcatggccttcttaaatttgacgaccatgttgcacctatacctggccagactcaaataactgataaagcaatggcggcaattaaaagagtggcaagaacttcgcaattgaataaaatcagagttgaaagattgttaaagataaatattgattaa

SEQ ID NO: 217707 - DNA, 180 bp, Klebsiella pneumoniae
atgatgctcggttggatgattgtttttttgggtgtcggcttcgtcatcggaactctggtgatgctcagctgcatcaacgattacgtgaagcgcgggctgatggaaagacgtggccgcgtataccgtatcatcgacattactaacgggctaaaggagactggcgatgatcgtcctgagtaa

SEQ ID NO: 217708 - DNA, 216 bp, Klebsiella pneumoniae
atgatcgtcctgagtaagcgagagaaggaaaccctgcgtgaaatcagccaatggtcatgtttctacgctaactggaaacccaagacacgagccaaactcgaacagatgaacctggtggccaatgtcgaaccggaaggaaaggtggagaactaccagctgacgaataaggggcgagagctgctggagcaactgattgaagcaggagaatactcatga

SEQ ID NO: 217709 - DNA, 660 bp, Klebsiella pneumoniae
atgtcacccggagatgatgactggagagatagtgcaaaccatgattttccgtatgaaatagaacaaataacccaactattaatcaaagaactccctttggccttaagggattggatcaacgctatcgacctttctcgtgctttaacaccgccttggtatattccaactatcaacagagatagttactttttcaccttcaattatacaaacacattgcaggatatatatggtattccagatgaaaacattctgcatatccacggtaatgcaaaaataggacaaaatttagttattgggcacgatgtattctacgaaaacactcttaatactgattacgggccagatcaagatattcgggttagtgatgcctatgatcatatagataattactttaaaaactcatataagccaacagatgttattatcgattttcacaaagagcaattcctccgttattcagaggttgatgaggttctagttctgggacattcgctggctagtgtagatggtccctattttactaaaatatcgcagtctatttcaaaaaatgccacttgggttcttgccaagtatccaggagaaacgaaggcgggaaaactaagtgactatggaataaatcctagcaatatatttgaaaaaaattacgaagacttggtttaa

SEQ ID NO: 217710 - DNA, 387 bp, Klebsiella pneumoniae
atgactgacatggaaatcgaaaaagaaatcgtggccaagggaaaaacggccgcgcgagtaaccccagaacgtatccaaagcgttatccgcgccgaacattattttacggcctttgatggcagatctggcgccctggcaagtgggacctatgccggcaaagaggtgccagttgctggcgacgctgatcttgagtcgcttaaattactgacgttttgtgtactggtgttggagaacggattcatcgttaccggtgaatcagcttgtgcaagcccggaaaactttgatccggagatcggtcgtaagattgcgcgccagaacgcagtcgctaaaatctggccacttgaaggatatctcttaaaacaaagatttaacaaggcaaaacaatga

SEQ ID NO: 217711 - DNA, 606 bp, Klebsiella pneumoniae
atgcatttagaaaattgcctggaagatatgaatgtcattagcaatgctcttgctaccgtgacttctaacgcttcacgcttttctacttcaaaagttacctctaagcgtgaaggcgcaatgccgagcatctatcgacatactggctatggtcttaagccggtgcggcctggttttgccggggctaatgacttcaaaatgcctcaaactgaaggcattccggttcaagagagtagcatggctgctcaattggctgaaattgaacaaaggcttgaagagctgacgacgaaacatgttcggttaacgcatcacatttcagggtacagcgcagaacaaatccgcgatatgttcggtgaaagccggtatgaagatctgaaaaacattgatctgaccatccgcggattagagggctttgttaacaagttcatccgtgacgtcgatcagccgcatccctacatgaaacgcttgagtgatgctatcactgagtaccgtctggcagtttctgacctcctgatgattctaaatcagtgctttaacgaggtagaagttatcgaatcgcagacaggtctcattgatgaggacgtcttcgcaaacttctccttccattaa

SEQ ID NO: 217712 - DNA, 2286 bp, Klebsiella pneumoniae
atggcaaccaaacccagcaaaactgtactcaaagaggtacaggacttccgcgattccgtaaaacgcgtcgttggtcttctttcgggcaagaacattcctgtagctgaatgcggagacacagcatacgttcgctacaataaaaagggtgaaccagtcatggttaacatcccatccataccagatgacgcgagccctgcgcttatgaatgccatacgtggattccttgatcacgaggttggccatctccttttcacagacgaaaaagtcgtcaagaaaatgcgcaacacaaaggcattcggactctggaatgccctggaagacgtctacatcgaacgtcgcatgagtgaagtgttcaccggcagccggcgcaacctattgtccacacgtaacctcatgattgataaatattttaatccccacattaaaaaggcggtagcgatgtgccgcggggatcaacgcgagttgtttctaaagttcttcctctgtccggttctacgggcgtgggatggccaaccaacttttgctgatttcatggaggagcactggcacctcatcgataaacctattgccgttctgaaagagtttggcgtcgatgaagctgtccgtcgtatggatagcactgaggattgcgtcaaggttgcagcagcaatggctaagatcctgcgtgaaatgactgagatgccagaaggcccgttacctgaacgtgagtcctctttaaccaaaaagaccgaaccagaagaagacagttcagatgagccggctgctggagacgatactgaggtttgtgacgaagaggggctcgatagcactcctgatgagtttagctctgacgatgaagatgatgaaaaatcagacaaattgataagtaagtacatacctaacagtgatgaagtaataaatgatacagaaaataaacctgaagatggcgatttaggccatgaaaatgttgacgacttgcctgacagcgaagaaacgacagctgatgatcctgttacatctctgggctcagatgcaggggaagaagtggatgatgaaggtgattacaacccatccacgaatgatagcgctaaggacgggcccggcagctcctctgatgatagcgaagctgtcgaggacggtgaaggtgaaggcaaggcagacaaagacggtggcaaggagaaggatgaaggggatcgtgatacctcggatgaaagcgatgccggctttgccccacacgctgacgatatgtctcttgatgatgctctcaaggcattagaaaacgtcgatgaagagataggttcttcaaccgaagatgcgctggcgtcggcgatcaagtcggagctagccagcgcgtcactatctgattaccggccatacaatcgctcctacgacttcctggggccaattgacgaggcagaagagcatattaagcgcgccagaaaagcttttggcgcaatccctatgtattcgcccgtagatcgctaccgcattgttccagaaggcagaaaactgtttgagatgaaggtggagagacatctgtcttcctcggtgtcatctaccttggccaaagacctggagcgcgcgatcgccagtcgtaaccgtgttcagttcatccctggccagcgtcgtggacgcgtacatggggcgagtctttaccgactgtcgatgaatgacgatcgggtattccggagaaaagaagaccacaaggccgtgaacgcgtgcgttcaacaggtcatcgatttgtcaggttcaatgggcggccgaaaaatcgagctcgcgctggcatccgcatacacactggctgacgccctagatcgtatccacgttccgaacgtcattaccggcttcactacttatggcaatccggatgtagcaactatgtcgaaacgtgggtttagccgctttgaagcgcttatgctgccgattattaaaaactggcatgagaaagcgaactcaccagagatacgtgctcgtatgggctgtgtggcggagactttccccctgctaaacaacgtggatggcgagagcatcgcacagctggcttctctgtttgcagggcgtatggaagacaagaagatcatgattgtgcagagcgacggcgccccatgcgctgcgggggatggctttagtaaccatctgcgctctgtaacgaatgacatcgaaaacacaagtgacatcaacctgttggccattggcattcttacggacgcgccgcgccggtattacaaaaactatgcactggtgaataaggtcgaagagttgggtacgtcagttgtcagtgagttatctcgtatcattttagagtaa

SEQ ID NO: 217713 - DNA, 3519 bp, Klebsiella pneumoniae
atgaaagcactgatggtcaggactgatttttccctgggagaatcagcactgaaagcagagcacgcagtaaaggtagcaaaggaggctggctataccgcggttatctctgctgacacgatgaatatcgccagcgttatccccctgcagcgagcagctggcgatgagatggcggtgatctgtggtgttaagctgaatgttgtcgacgatccaacatacgagtaccgggctaaactggccaaagagtctaatggatgtatggaatcattggagcgtggacgtaactactgcttcaccgcactgattaaaaacgagcaaggttatcgcgacatttgcgaactaatgactttagccaatacacgcgagcagttttacttcgtaccacgcctggcgctcgaacagctggcggctacttacgctaaaggcaatatactgttgctgacttcggatatcggcagcgtattccagcgcccggacttccctaaaattattagcgcgctgattactgccggcggacgcgagaatttctacagcgtagtttatccgcaccctacgccattctatgaccagatcaacgtgcgagccatgaaagtggcaagcgcactgaaaatcgagcctgttgcgttttacccagcttattacgaaggggttgatgacgctgacatcaaagacatcgcccacatggtgatgaacaatatcaaagtcgatcagccacaccggctgcgtatcccccaccagcgcgacaatgcaataaatggtcgccgtcatctgctgcaggctctgaaagagttttctgtccgaatgggcgtatctgtatctgccgccatggcttctacaacgcaagactccatcgttaaggcgtgcgaatggcgctggcacgagatggcgccggcgctgccaaaaatggcagacgatgagcctgcaacgttgatgaaactggctgtcgcagggcttcgaaaacgtctcagcaacaaagaatttggctacacgccaccagcttccgagcaccgcgtttacgtcgatcgcctcaagtatgaaatggaaacgctcactcgcctgggattctgcggttatttcctgatggttcgcgatctgatgaatcatagtcgcgagactggtattcctgtcgggccaggtcgtggttcatccgccggctctctggtggcatggtgcatcggcattactaacgttgacccaatccgtcatggtcttctgttcgaacgtttcattaaccctgagcgtctcgacttgccggatgcggatttggactttagccaggcgcggcgtcatgaggtgatcgagtatctgaatgcccgatatggcgaagagtatgttgcaggcattccgaacttcacttatctgggcgccgcttccgcactgcgcgacacagcgcgtatttatggagttgatgcggcggatatggctgtttccaaggagctaaagaccctggaggatgacagtctgtctctgtcggagctgcgcgagcagctggccagtctggacaagtacgccaccaaacatccggacgcatttaaggcggcgagcaagttgcaaaacctgatgcgtggcttcggccgccatgctgcagggatgattgtcgctggcgtacctctgacggaacgtacccctgtagagcgacgtggagacgcgcgttgcatcgcattcgataaacgatactgcgaggcaatggggctgatcaaactggacgttctgggcctggccactctcgatctgctggatagcgcaaaacgttacatcaaagagagcaccggtaaggacatcaacctcgatgccatcccactggatgatcgcaaagtacttgatggattcgccgcggggtatacgcaaggtgtgttccagcttgagtccggccccatgaggaagctactcaaagatctgggtggtggtatcgagccaatgagcttcaaaaccgttgtggccacaactgcgcttttcagaccaggtccaattcagtcaggcatgttggacgactatgttgctgtggccaagggcttcatgccaccgcaatcacttcacccggtacttgacgagctgactgctgaaacaaacggcgtcattctctatcaggagcagacgatgaacgctacgcgactgctggcaggctttaccatggccgaagctgatggtgtgcgtaaggcgatcggcaagaaggatatggagaagatgaagagcatgggcgagaaattcatcgttcaggctcaggctgggtggatcgacgtcgttatggaggatggcacggcgcagcgcatacaccgcgcggaacattttaaatgtgaagacggcaagttgcggacagtagaagaggcgctggatgccggcgttaagctgccgatggcagttgttagcgtgacagggtcacatcctgggttatctgaaacaaaagccagtgaaatctggcaagccttcgagaagaacggtgcgtatcagttcaacaaatctcactcagtagcgtattcgttgatcagctatcaatccatgtggctgaaaacgcatttccctgcagagttcttcgccgcagcgctcaccattcttggcgaggacaagcaccagggactggtaaaggatgccttaacctatggcatccgcgtactgccacccgacattaatatgtcctcgaatcgcatcgagatccgcacgctcgaagatggcagccaggtactttacgccccgttctctgcggttaaaggatgttctgaaaatgggtgccaggccattatgcgagcgcgtgagaaagttggtggcaagttcgagtcgctggcgcaatttgaggaagcggtcgagaagagagcctgtaacagccgagtacgtgagtctctgcaaaaggttggagcattcgcctctattgaacctggcagtatgccggcgaccgatccggtacgtctgcgcgaccaggcagagctgatgggcaatctggtgatcgatgcggtgaaagcttcacgcccatttgaaatgaacccaaaacgctctgcagaggtcaatgtgctgatgactcgcatggccgcagaaatgggcctgggcgatgagttgatacgaccaagcatcggcattaagccaaaaattatggtcatactcgacaacgccaatggcaatgatgcacgtaccggctacttcatggagaacggctacgatgacttcaaagccaagttgctggtttctggtgacctgcgtatgggggatttgtatgtcactggcgtgtgtaaaaaggtaaaggataaggaaaaagactacaccaaagatgagatcggccagtttatcgactttatgcgggaagagataaatctagttcgtccaacctacgtgctgacgtgcggcagccgggcgacatcgctgttcaataacaagagcaagccatccgatcttgttgggcgcaaagaatatctgccagacctggacgtgaccgtgttctatggatttaacccgaatattttgtacttccgtcaagaggaaggagaaaagctggaagccattctggcagaggtagcggagactattaacaaatga

SEQ ID NO: 217714 - DNA, 381 bp, Klebsiella pneumoniae
atggttggctgtgctggcatgaagataccgaattatgatgaggtcaaaacaagcccgcactacactgaatgtcgtgagttcgctgccgatgtttacaagaataatggatacagtaaagaagccaacacggtgatttttaacatggacgaccgcaaggcccaagcgattgtttcaggatgcgtcgtgacaatgagcaagaacagcatcgaagaagcaaaggcagacttaaacaaaaaggctgcagcttatgggatgatcagcggtgcttgttataacacatcatgtcgagtcgacactgaacagcagttaaaggcttatacccttgggagctattacgcttcatctaagaaatttcctgagcagatgaaacctgaattttga

SEQ ID NO: 217715 - DNA, 300 bp, Klebsiella pneumoniae
atgccccgcacgattaaaggcatagccatcgtcgctacctcactaatactttccggatgcgccttcccagacaaggatggcgactttggtgcatatgtacacagctgtcaacaatacgcctatggtaaagcctatgcttttgaacatagagatttagcttataagatttgcaaagatgcggcgaaactctggggcgacgaagtccctgcctatgttattcggcaaatcaagcttcaccccgaaatcccagaagatgagattaaatacgcggcaatggccgggtcattgggaaataactaa

SEQ ID NO: 217716 - DNA, 336 bp, Klebsiella pneumoniae
atgagaaaaataacgctactgctggccgccctctccttttctctgctggcggatacccgaatttaccaatgcgatatgaccgtatcgcaggtgaaaaatgatcaaatcagcagacctactaaagctgacttcggcgcgctggtcgttgatagcggagagcagttctatatcgtccgcggcgatgaggttctctcatctccatatctggctaaacgcaacggtaaattggttggcgttggcgaggacgagcttatctacaacaaatcccacgacgtctacggcgttcatagcaaaaaccaaagtttctttttcgacggatgtaaggaggttggttaa

SEQ ID NO: 217717 - DNA, 1275 bp, Klebsiella pneumoniae
atggataaaaacaataaaaagactctttcccataagaaaaatgtaggttttactaaaactgaaagaaaacttgcagtgatttgtgataaaacttttctaaagctctggtcttggactagtttgtatagcgacgaaggtatcaataaaaatagaaaaggcaaggaaatctgcgatcttctagtatattatagaaatacagttattattttttcggataaagaaattacatacacagaaaatcatgaaaaaaatattcctgaaaaagatggaacttctgtagcctggaaacggtggctaagaaaggcagttaacgaatcaatcaagcaaattgaaggtgccgagaattggattcgcgcacattatgaccgaatatattttactgaacaatgtttatcgagtgataagtttccatttataaatagcgaaaatatcaatcaactaaaaatttatcgtgtggctatagctaacggttgcccatatccgctttatctaggtaatggtattcatgatggcattatcaatagctgtagagatcgacatggtaactatatacacgtgtttgatggttcgacgattgaaatactaagtcaagaacttagtactgtacatgaattcgtaggatatcttgaggaaaaagaacgcatagcgaaggaaggttttttgaataattacgacaaattgatagaacttgatttgttagcgacatatatcctcagcccatccatgactagaggcgcaggtttttacaccaaagataacgattttaaaatagataggtttaatgaactaaacaacgcaagtgattacttgaatggaaaacaggaggatcaggtttcacttatttttgatgatatgattgagtgtatttctgatcaatttgtgaaaggagaagttttctgcacaggtttttctaagtttgaagcaaaccaaaaagtgttagaggttctgtgtgattttgatcggttatctcgtagagaactatcccgaaacattatattaaagtttaaagaaacctcaggacgagctattagtagccgtgctatacttgtgggagagaatgacccatatcatactcataattccatttttgccgtggttatttttccaaaagcagtttgtaaaaaaatgagtacagaggagtatgtgagggaaaggcatttagttgggcaggcttacgcaatacattatcaaaagagaatgtcaatgaatagagacattgtggtggctgtatttgataatatttcagaagttccaggtgaatcgccacgggtttaa

SEQ ID NO: 217718 - DNA, 2304 bp, Klebsiella pneumoniae
atgataaggattgtcaaacgtaatggctccacagagccgctatccgaagagaagtacaaccgcgtcgtgatgtggggggtagaaggtatacgtaacgtaagcgcctctgccgtagccatgggcgccgccgcgagcatttttgacggcatgacaacttcgcagcttcatgaggcattggttaagtcggctgcagatctgatttcgcctgaaactccgaactactcccaggtcgcagcacgtctgaacatgttcaaaattcgcaaagatgccttcggcgaattcgcttacccaagtttctatcatcatatcgtcagcaacgtcagccgcggcgtttacgatgaggatttgcttaagttttactcccgcgaagagatcgcagaacttggcgtgtatatcaaacctatgcgtgacgaactctttggttatgccgcaactgttcagctggcgagtaagtacctcgtccagaaccgagtcactggcgaaatttacgaagccccgcagcagctgtatatgctggtgggtatgtgtcttttccagaattgggaagatggttgtgccggcaaaacacgtctggaaatggtgaaggggttctatgatgtcaccagtacattcaaattgtctctgcccaccccaatcatggccggcgtccgtaccccgacgcgccagttctccagctgcgttctgattgagtccgaagacagtttgaaagggatcagcgctgcgtcctctgccattatcgattacgtgtcgcgtcgtgctggcattgggattggttttggccgactgcgtgcattggggagtgagatccgcaatggagaagccacccacactggcgtaatcccctttctgaaacacttccagaccgctgtgaaatcatgctcgcagggtggcgttcgagggggcgcagcgacggctttctaccctatttggcatttggaagttgaaagtctgctggtattgaagaataaccgcggcatcgaggagaaccgtgttcgtcatctggactatggcgtaatgatcaaccgcctgatgtatcgccgcctggtacgcaacgagaatattacgctgttcagcccgcatgatgtaccggggctctatgatgctttctttgttgatcaggacaaattcgaagcgctgtacctgcaatatgaagctgatgagagcattcgcaagaaatccgttcccgctgttgatctgttctcaaacctgatgcatgaacgagcctctaccggccgcgtgtatattgcgaacgttgaccacatgaacgaacacggcgccttcgatccgaaagtcgctccagttcaccagtcaaacttatgcatggagattacgctgccaactaaaccgctggcgtttaccgatgaccctgatggtgagatcgccctttgcacactgtctgcgtttaatctgggggcattacgctcactggacacgctgaaagaggttgcattctatgcggtggctgcgctcgattccctactcgactatcaggattacccgatggccgcagcggaaattccggcaaaagcacgtcgtagtttgggcgtcggcgttaccaatcttgcgtactatctggcgaagaacggatttaactactctgatccggccggcaaccagctggtgcatgaaacgtttgaagcgatccagtattacctgcttgatgcaagttgccggctggcggaagccaaaggtgcctgtgattggttttcccaaactaaatatgcccagggacagctgccgattgaccattaccgcaagtcgcttgacgctaaccctgatacgtcctttgagctgaaaatgccttgggaagagctgcgcgaccgcatacgcgaatatggtctgcgtaactctaccctgacagctcagatgccgtgcgaaacgtccagccaaatcaccaactccacaaatggtatcgaaccgccgcgtggtcctgtttccgtgaaatcatccaaagacggcattgtgaaaatggtggttccggactttgctgagctgaaagatcagtacgagtacctttgggatatgccggataaccgcggctatctgaccaaagttgcgatcattcagaagttctttgaccaggctatttcagctaacaccaattatgaccctactcgcttcccgggcgacaaggttccaatgatgaagttgcttgaagatctgctcttcgcttatcagcaaggcgtgaagacgctttattaccacaacacacgagatggtgccggtaagcgtgaagacgatgatctggcctctgttgcgttggttgagccagaagatgagtgcgatggcgcatgcaaaatctaa

SEQ ID NO: 217719 - DNA, 558 bp, Klebsiella pneumoniae
atgacaactattgttgctgggcttgatattgaatccacagggttggactttagggctaaccacaagattattgaaatagccattacccgctatgaactggagacccagaagctcatcgatagcctggcgatgcgttttaacccgcggcggagtatcgatccaaaagcccaggcagtgcatggcatttcgctggaagatctttccgcagagccactattgtctgaacatgccggtaaaatcgctcgctatattagcgatgcaagcgttttggttgctcacaatggtgaagcgttcgacctcccctttattcgccatgaatttgcagagtacggcgtcactctcccagagctgcctcttgtggacactatgttatccggattatgggcgacagaagacggcaaacggccgcgactggaggaactcgccttctcattgggttttgtctatgacaaggctaaggcgcacagcgcgctctatgataccgatctgatgatgcactgctttttcaaagcacgggaaaaatacggcttctataagctcccattcgaaagcgcctga

SEQ ID NO: 217720 - DNA, 588 bp, Klebsiella pneumoniae
atgacgacaagcacacacgccagacgaaaaacggcagccggccgtgagcagcaccagtatcaaaaacacccccgcaaaaacttcaaaacgccagttgtcgaatttaatccccgctttaagacggtcaaagttttcagtgatggctcttgtctcagaaacccgggcgggcccggtggatatggcatcgtctttcagttccgcggcgaagaacgcgagttttccgacggcttccacagcaccacaaacaatcgcatggagatgatgggcgccctgatagctttggaacgcctaaaattctcctgcaacgtgatcctgcactcagatagccagtatctcaaaaatggtatgaccctctgtatgaaggggtggaaacaaaatggttggatcactgctgacaagaagcctgttaagaatgtcgacctctggaaacgactcgatttagccgccagtcgccacaatgtccggtggaactgggtaaagggtcacgccgggcatcgagaaaacgaaatatgtgacaggctggccaagatcgcagcatatgcggcagctgatactccacacaaaaaagatgctggttttttggtataa

SEQ ID NO: 217721 - DNA, 495 bp, Klebsiella pneumoniae
atggcacgtcaaacgcctttcacttctttcaataaacgtccccgttcaattcgcctggttctggccgagctgtttggcggtcgtgtttctgcacgccttgcggaactggaagaacgagtgtttgagctggagaagcgcattgatgcgcaagctaccgccatagcaaatctgggtgcgacagtaggcatggggaaggtgcgtgattccgtcgcctctcgtgtgttgcgtgaatcccaagcacacaaggacagttctcatggaaaattttcaacgaaatcgactgaagccaatggcctacggagtaattttagcaaccctggcagcggtagccgtaccagccggtcagagtctgttgataccggacacaactacttccaccacaaccttgcagacgacacccctgccagaacgacctcctgtctctctggatgggatgctgctggacacgattctagctcgacctgcaactccggatcttccttctgctgtgactga

SEQ ID NO: 217722 - DNA, 2070 bp, Klebsiella pneumoniae
atgaaaggtaacgttctaggggatatcagagcagaacacgatgccaaaatgcttgaagcctcattctggcaaacaactgattataaagctcttttagagtcgtatgatcgatgcatagttgtaggtcgcagaggcactggcaaaagtgcattagtgcatatgctgtcaaaacattggcacgcaaaacctaaaacgcatgtgatgaccattagccctattgaagaacaaattattggtctaagagatgttgtctcacttttcggtgaaaattatttgcatattaaagccggaagcaaactagcttggcgctatgcgatttatatggaattactttccgaaatagcaagccactataagatgaaaaatgatctagactataaaagtgtagagaaacacttattatcttggggagctaaaagacaaaacataagtggtaaaataaggaaaaaattaatatctatccttgatactggaaaagatgttaaaccggctacaagaatatcagatttatcagataattttgaattagatttactagaagaggttttattcgaagctatttcaaaatcaaaccatcaattcgttatttttgctgacaggctagatgaaggatacactccagatgatttaggggttgctatcgttgacggtttcattcagtctgttattgatataaaacaaaatttgcaagaaaaagttatcgcatttgctttcgttagagacaatatccatagagccatatctaaaatggatcctgattttaccagaaacattgaaggacaggtattaagattacattgggacgaatacaatctcttcaatttggtttgtaacagaatgagagttgcatttaactcaaccatagaaaataacacgcgagtttggaatgcgtacaccgctaatgaattacagtcaaatacgggttttaaagaagcacttaagcttacattatatagaccgagagatatcttggtattattaaatgatgctttcctgagggccgcaactcacgatcgcacaaaaataataattgatgacataaaagccactgcaaacacaatatctcaaaacaggcttaacgacttactaaaagaatatgaaaatgtattccctgcactagatatatttacatcgctttttggcaataaaaaaccagatttttccatcgcggaagcctctgaaataataagccaagcatttgatataaaagaagttaatgacaaaatgaaattacaggacatccttttgtttgaaggtcctgttcaggtgatccaacgtttgtatagtgttggtttttttggattatacaatcagcagtcctcatcatatgtgttttgtcatgatggaaaagaaccagaaaaagagtttacaccaggctccaagcttctgctacatccttgctattggcttgcattaagtgtacatgagtcagacattacacctgaaacagctgacgatatccacgatgaatacgatatcgaagttagctccgtatcagaagaacaacgaaaacaacggatcggtgctcttcttcaagaattaaataatatcccagaaggtaaggaaggggctgttgattttgaagcatgggctttgaaagctattaaaatattgtttgcgacgaatttgaccaatattgaactccattcaaacaaaaatggtctacagcagcgagacattattgcaacaaaccttgccgacacacctgtctggaaaaggatattgactgattaccaatctcgacaagttgtattcgaaatcaaaaactacaaaacgttaggtgctgatgaatatagacaagtaaattcatatttatttaaagattatggtaggctagctttcattataaatagggatcactctgaaaacttagaaaaacataaagagctaatctgggtaaaagaactttatgacaaccataacaaattggttataaagttgccttcaaaatttcttgagcggcatctttctaaaatgcgtagccctcaaaaacatgatgaagttaacaaacagctaagcaagttgcttgatctatatattagaagctatttaaataacaagtgtaagtaa

SEQ ID NO: 217723 - DNA, 1686 bp, Klebsiella pneumoniae
atgaatacagccctttccatcattgacgctatcaccccaaacactgatatcgactaccggcaggaaatgaacgtcatccacgaaattgtggccgagtgcgagaaagagatcgcattcatgcatcaggttcacgacttcgtttatggcgacgaacgccacaacatgattaaccgcctgctgcgactcaaccaccggccggatgacgagcgcacacgctttaacagagcctggctggacaaagtcgacctggaatgggtgaaacagaatatctgggccgagtactggaagaaggtcacggatatgacaaacgttctgctgatcatgccagcttcccgccgcgacgagtggcgtgagcagttcatcgagggcaagcaggagaccatcaaaacagacagaaccggctaccagatgaaggtgaaggagttcgttggtgtgccggagttcaaagcagaaacggtcatcccaacgatgctcaatctgctgaatgacaggcacaaatatctctctgagcgcgtgtatggcttgtttaaagcgctgagtcctgcccacaagaccaataagacgaacggctttagcgagcgtctgatcatcgccaactgcatttccgagttctggcgggacagcgtcagcgtgaactaccggaaagaggactacatcgacgacctgcgtgtcatgcttcatttcttcgcacacaaagagttcatcaccatcaaccgcacaactgagatgctatcagctgcgtaccgggcaaacgactgccagaccggtgactggatgaatgtcgacggaaacctgatgcgcgtgaagatgttcaagaacggcaacgttcactttgaaatacatcctgacgtggcctggaagctgaatgaggtgctggcttacagtatgcctgcagcaatcccggcgccatgccgtactgcacccaaaatacgggcaccaaaagagttcgggttaatccagaagacgatctccgagccggttcgtaccgcgctgcgcgacgggcgattcagcaaagacaaaggcgtctggtacttctctgattccaacctacagaagtcacaggtggaagagcttgagcgcacactgaacttcattggcggcgtgcaggagaaaaagcactggcagttcccgcatgagatcggccatacgctcaatacgattgtggccaccggcttaataccggatacaaaatcacaccagttctaccctaccccacgtttgatagcggagtacgttgccagagccatcgagctgaagccaggtgagaagctgctggagcctgaagccgggcgcggagatctgttggcctgcatcgacgccaatccggaagacgttacctgcatagaagtcgcacctctcttcgctgatatcctgcttggcaaggggtacacaaatacggtctgctgtgacttcatgaagtggtctgaggacaacgcaggctatcagttcgacaaaatcgtcatgaacccgccctactctcttggccgtcacagagagcatacgctggccgcgctggagcatcttaaagtcggcgggcgccttgttgctgttttgccgggggactcaccaaccctgaactggatgatgctggagaatttcgtctacgccaaaggtaagtcgttcacaggcgagtttgatgacacggggataactgtcagtgtgtatgtcttcaaacgcataaaataa

SEQ ID NO: 217724 - DNA, 729 bp, Klebsiella pneumoniae
atggaaagcaggaataaagccacttctatggatatacaggctgtatcaccgatgaacacggggactcctttcagattttgccttcagggcaacaacccaaccgctgtgggcacgattattgtcgataagggtaaggtctcatttgaaggcgacgccgacgaatcagcgctgatttttattgagtacctggtgcgtcgaacgagtcagcagtgggcagagctggagaaacgcgccagacattatgatgagtttatgaatgtcatagaggctgcgcgtgccgctcttgctgctggcactcctgtagatctggaatcgttgtttaacggagagctggcctctgccatgttcgccaccatgttcgccggcgaatttgttcgacacggtgcaaaaaactatctggaattgagctacgacgtccctgaacttggatatttcactgttacgactcaacgtaaggggtgcaaaacgccaggcgatcgcatcgcagagctggaggctgtagtcgaccaacgcaatggagaatgcgtgcggcttatgaaagagcgcgacgaactgctcagtgatcagctaaccaaaggctcaaacattcgcgcggcagccgacgtttactttcaactcatggaagagtgcctaataccgccaagcggatctctcgttgagtatgtgcgtgagcttgaagaacaggtcaagacactgcagcagcaaaacctacacgccaccgcatcatga

SEQ ID NO: 217725 - DNA, 264 bp, Klebsiella pneumoniae
atgggcggaaaagacaccagttatcaggtcgtatacagaggtgagacacttaaacatttcaagcctggccagtgcgtctttttccagcgagagagacagtatggtggcggctattggttgggtaagacacatgtggacggttttgagttcctgctcgaacaaccaacctctctaagagaggggatgttgtttctgctcactcttgcaaaggtggaagccagacatatggagttcgtcgatttcgatgacttcaatttaacgtag

SEQ ID NO: 217726 - DNA, 360 bp, Klebsiella pneumoniae
atgacgtctgaacagtttgaacgaagaaaacaaaaagccatcgcgctgatggacagcagaaaaatgtggcgaagcaactatgctccgcccctgcttcgggggttgtggaagctgggtctgaagatacccccgactccgtttatgtccttcaggcatgtgctggtgcttatgtcggtatggtatagtgtggtctgggggctggtgatgtacttctgtacttggcgtgcgcagggaatgccacctcttgtcgcctgtgttcacagtctctgtgccggtctgttcttcgggttttttatggcgctgtttcacctgtggcgaaaaaaggtcaacggccttcctgactggagcgagctggactga

SEQ ID NO: 217727 - DNA, 747 bp, Klebsiella pneumoniae
atgaaagatttagatgatcacaaaaaaatagcggtactaattgatgcggataatgctcaatattctaaagtaaaagcaattctaaatgaaatttcagcgcatggacacattgttataaaacgagcgtatggtgactggtctagtgaatacctcaagaattggaaaggtttcttaaatgaattggcaatccaaccaattcaacagtttgcatatacaactggtaagaattcgactgatgcgtcaatgattatagatgcaatggatttactctattcaaataaatttgatgcctttgctctggtttcaagtgatagtgactttacaaaactggcttcccgtcttagagaatcagaaatatttgtgttcggtgtcggagaaaacaaaacacctatttccttcaggaatgcctgcgatgactttatttttactgaaaatttaaacttagaagccatagcagaatcatcaggtatgcctaaagaaacgtccttaattggacagcaaaatgctgtggagttgattccaatacttagaaaagcgtgggaacagtatcaggatgatgatgggtgggcaaatgtatcatcaaccggttcttttgtaaaaagatcaaagccagactttgatccaagatcttatggggcgactaagctgcctgagataattcagaatctcagtagtgattttgaaatgaaaaaatacaaaggtaaaggaactgttaatatcatagcttatagaccagtgacaatttaa

SEQ ID NO: 217728 - DNA, 318 bp, Klebsiella pneumoniae
atgttgaaaatcactgaagcctacaagacagctgttatcagcactgctcacgttaccgcggaagactccgaacagttgccgattgcctgttttgacccaatcaccgatcgaggtcttaactgggtacacggcacagaatatggttggattgttcgtgtcggaatgcgtgacaatagctgggcagatgaactgcgtacattcaacatctccgaagcggcgatcgccaatatcaagatgatactggatgccggttacgacgtggttcactttgaccgtgatgccgagctggtggatggaatgccagcctgggactggtaa

SEQ ID NO: 217729 - DNA, 1152 bp, Klebsiella pneumoniae
atgacggacaccgctttttcgaaatcgctacaaaaggaagtcgaccccgagcaatacatggagttgaaggggcttgacgaaggttcagtacatgccgttgctcgtgaagatgtcatctgtcctatttgcaaagttggaggcggcacgttcgtgagagcctctcgaagcgaggggtataacaagaaagctcatttcaggttcgcaggcgaaaatggggaaggccaccatccggcatgtgatttctatggtgatcgactctcagttgaagttagccaacacctaatcagattcacaacagaccggacaaagtattctaaagtaatcagaaaattggtgtgcgcaggccttcaggaagggatattcactcaagaaaacatgcgccaaatgagggagtggttcttcaacaaacgaaagaaatcctcctttgaaatcttgctggatgaagaagacttgggatggcttgagtacattgccgacatacgcttttctcacttggcatggacagattccgatattctgccatttgccccaattcaggctacagttccaggatttttgtggcggcgagcaatagatatagaaactgttcgagttcatcaagcaacacttcagaaattacgtgaactctctgttttcaaacgtgacatatcatcaattcttgagcacctgactaaaaatcgaggtcgaatgatattagacccggagcttctggaagttgagataaggaaaacgcttaaactgaccgcttttattcgagaaaattacgtcgaatttaagagcaaaactgtaaacgaaaaatcctatgccgaagataagttccttgcttttgccgcactgttactatttgtctctgggtgggatattgacacggcgatcggtaaattttcgacgatagcgcgtgtgcgggaagtcgacgatatgctggcaggtaatttcataggcttgaacccatacctccgttacgatgttgcaagcgctgtgaaaaggttgcaagacgcatggcctattgagtataaaaaggtcgaacttcatgatgttgagcaggctatgcgaaaaatgtatgaaaaatacaaccaatcattgagatttccagttccgcctttagggaaggtgcgaataagcaggtcatttcttcccaagctgactcgctga

SEQ ID NO: 217730 - DNA, 1389 bp, Klebsiella pneumoniae
atgacgctcttttccagtcaacccggcgacgaaggactgcctggcccggcgcgcgcacgggtgatggccgcaataatgaccaccaccttaatgggcgtgtttgatggcaccatgatcaacattgccctgccctccatggctcaggagatgcaggtacctgccagtattgccgtctggttcgccaacgggtatctgctggcggctgcgatgacgctggcgatattcgcggcgcttgcggcccgtctgggttatcgccccgtatttctggcgggcctgacgacctttaccctgacatcactgggttgtgcgctggcgaataagcccgaagtgcttatcggtatgcgcgtgcttcaggggatcggcggcgcggcgacgctgagtattgcccccgcaatactcaggtccgtatttcccggacgcttacttggccgcattctggggttccatgccctgctcattgcctcgagctccgctatcggcccggtattgggcggtacgatccttcacacccttagctggcaatggctgtttgcgataaacgttcttcccggcaccctcgccttactgctggcggtcagagcgctgccgcgggatgcgatccgtatgcaggcgcccttcgacaccgtgggcgccatattgtcggcgctgctgttgggttcgacgatcatggcggcgaacagcctacagaacgctacttctcaattcggcagcctttgctggatggctctcgctgcgctgagcggcatggcttttatctggcaaatccgccgcacgggtcatcccttactgccgccgagcatgtttaaaaatgaacgttttaccctcgcggccttcacgtcgatggttgctttcgtcagccaggggatcacctttattgcgctacccttcctgtttcagagcgaatacggctacagtccggtagtgtctgccctgctgtttacgccgtggccattagggatcgtgctgattgcgccgcatgcaggccgttgggcggacacgatatcagccccggcgatatccaccctggggctggtgatatttgtcgtcggtttgatcctgctggcgacgttacccgccagcccttcaatgtgggatatctgcctgcgaagtctggtatgcggaatagggtttggctgctttcagagtcccaataaccgggaaatgctctcaaacgttattcgtgagcacgcgagttatgcgtccggtgttttatccattatgcgcactttcgggcagtgcctgggagccgccgccgtagccgttctgctggcagcagatgaaaggtcaattcatgttgcgctgtggagcgccgccgcggcctctgcggtatcggtcgtcgtcagcgcgagccggttgcgaaaaattactcatcctgcggaaacaggataa

SEQ ID NO: 217731 - DNA, 804 bp, Klebsiella pneumoniae
atgaaaaacgtgattgccgcggcagccttgtcgcttgtgctgtctgattttgcttatgcccacgaacaaagagatgaagctatgatgaaaattaccccttccacccttgcggacgctgatattcaagcggtctccccggcgctggcgcgcttcggccgcgaggccatcagcaacgacctctggcaacgtgacgccctgtccgcccgcgaccgtagcatcgtgaccgtagcgatgctgattgcccgcaaccagccaggcgagctgaagcactatattgccgttgcgctcgatagcggcgtgacgccagcggaagtgtcagagatcattactcacctcgccttctacgctggctggcccaatgcgatgtcagccgtcagcgtcgctaaaaccatctttgaagccaggggcgtgacggcagaggccctgcccgccgcctcgccaacgctgctgccactcaatgaacaggtagagaaacagcgtgcagacaccgtggaaaaaaatgtcggccccatttcgcctggcctggttaaatttaccgccgacccgctgtttctcgacctctggcaacggcccgcgcttacgccccgcgacagaagtctggtgacggtcagcgcgttaatcgccgccggacagagcgcgcagattggctaccacctaaacagagctatggataatgggctttcggctgaagaggccggagaagtagtcgcccaggcggcgttctacgcgggatggccaaatgcgtttaccgccgccccggtggtcggtgaggtattgcgagcgcgcgagagcaaagctgaataa

SEQ ID NO: 217732 - DNA, 255 bp, Klebsiella pneumoniae
ttgatcctctccttcaccacgggagcgccacaggggctctataccgctgacggtttctttggccatgccgttgaggagtatctccttcccttcgagaccacggccaggctgtgcaatcttgagctgctggcgccggtttatacctgcggtattagctacgccgaccgggatgccgacaaaatcgctcagcaaaaaacgcttgcccgggaacacgcggccagactgatcgcgcggcttaatactctggtggaataa

SEQ ID NO: 217733 - DNA, 573 bp, Klebsiella pneumoniae
atgcagccgtactttcactggatcaatgaacctgccgagtggcgccgcgattccgacggcctgacggtggtcactaataagcataccgacttctggcgccatacctggtatggcttcgagcgcttctctggccatctctatgccgcagaagtggcgggcgattttaccctgcaggcaaaaatctgtgcggatttcaccacgctttacgaccaggctgggctgatgatgatggccgacgagcagacctggctgaaggcgggaattgagtttaatgacgatgccccggccatcggcagcgtactgacgctaacccactccgactgggccaccgggcttttccccggcgacccgcgcaccttctggctgcggctgacccgcaagggcgacgcgttaaggctgcagtattcaaccgacggcgagcgctggccgctgctgcggctcggctactttccgccaggcccggtgaaagcgggcgtcatgtgctgctcaccggagcgtggcggactggcggttgcgtttcaggatattcagctttccccgccgctggacaaagcgctgcacgatctgagctga

SEQ ID NO: 217734 - DNA, 816 bp, Klebsiella pneumoniae
atgcatacgcaaaaagaagattatattaaaaacaacattgttgtttatacggctctttttggtgactacgatgaactaatcgaaatacctgagggaatgcataagtgcgattttatttgctttactgaccaaaaaattgaaaataataaaggttgggaaattattaagatagaaaatagtagtggtagtaatgtcttgcagaataggaagtataagattttacctcatgtttttttgtctgaatatgaatatagtgtctatattgactcaaatattcgattattgaaaagccctgaatctttagtgataaagtatctacaggatgttgatattgcacttccaaagcattttgaaagagactgcatatatactgaaagtgaaatgtgtatatctagtgggaaggctattccaaaagaagtagagctattagttgatgaaataagaagtgctggttttccagagaaatatggattagctgaaaataatataattatgcgccgacataattcagaaagtataattaaactcatggagtcatggtgggatattttttctaaaagtggatatccaaaaagagatcagctttcattaatgtatttattatggttgttgaatatagaatataaatacatggatgagtcatctcgaaataataactccttttttagatttaaaatgcataaaaatgcgaacagcatgccttttttaaaaagaatcgcattttatataagctcaactagggatcagaatatgttgcatagattggctttcgaaataataagcatattgtcaaatattaagaaaaaaatcaactga

SEQ ID NO: 217735 - DNA, 1407 bp, Klebsiella pneumoniae
atgacaagattatctcatcacgtgcgagccaaaacaaatgcgtcattgatatcaatggttcagcgtttttcagacataataataattttgtttgggctatatttagtattctatttaaatagtaaagactatggatataatcaaattttagcgagtatgattgttctggtcttatttcaaatgacgggaggaataactgatttttaccgttcatggcgtggagtaaagttctcatcagagtttattttagttcttaaaaattggaccgtaagtattttattatcattaggggttctttcatatctcaatggattatggcttccttttcacatttttatagagtggttcattttagtatgtttttgtttgcttttttcacgaatgtcaatacgagcaggggctcgtataatcaggcatttaggatataatacaagaaatgttgctattgctggttctatgcctgttggtttaaatcttgctaagagttttatagaggaaccttggttgggatttaaggtggttggagtttatgataccaaaaccttagtcgaagaagctgaagtttacggcattgaatataaaggtgattttcattctttagttcaagatgcaagagctggcaacttggaccgtatatatattgcaatgagcatgagtgaagaagcgaaaatgagagggttaatcaaatcgcttactgatacaacatgctcggtaattttaattcccgatattttcacttttaatatattgcaatctcgaacagaagaggtaaacggcgtaccggtggttccattatttgataccccccttaatggaattaatatggtgtttaagagattggaagatattatcctatctttatttattttattactaatttcgccattgctaattattatatccttagctgtaaaaatcacatcacctggaccagtaatttttaggcagacgcgctatggaatggacggcaagcctatcaaggtatggaagtttcgttcaatggttgttatggaaaacgatacagaagttaaacaggcaacaaaggatgatgttagagtaacaaatgttgggaaattcttgaggagaacctctttagatgagttacctcagtttttcaatgtgctatttggggagatgtctattgttggtccaagaccacatgcagtatcgcacaatgagcaataccgaagcttaattgaggggtatatgcttagacataaagttaaaccaggtattactggttgggcgcaaattaatggatggcgtggagaaaccgatacactagataagatggaaaaaagaattgaatttgacttagaatatatcaggtcatggagtgtttggcttgatctaaaaatcatcgttatgacaatttttaaaggctttgtcaataaatctgcatattaa

SEQ ID NO: 217736 - DNA, 909 bp, Klebsiella pneumoniae
atgaaagcttatattgctattcctacatataatggtggttcagtctgggaagaatctgcgaaaaatatcagtctatacgcccctaaagatactttggtacaagttatagactcttcaagtagagataatactgttgacatagcgctgaattatggatttcaggtattaaagattgatcccgctaatttcaaccatggtggaacacgaaatttagctgtagaattacataaaaatgaatttgatgttgttatctttttaacacaagatgctattcctgaatcggacttttttgaaaatataattactgcgttccaggatcctaacgtagcatgtgcttttgggcgccaattaccgcataaagatgcaacagctattgccaagcatgcacgttattttaattattctaataataagtatatctcttctaaagataaaatatctgaattggggattaaaacagtattctcgtccaattcattttgtgcttatagaatatctacatttatgcatctaggtgggtttcctgataatactatattaagcgaagatatgtactttgctgcgaaggctataatggaaggtcataagcttgcgtattgtccagatgccagagttcgtcattctcacaactataatagtatagaagaattcaaaaggtacttcgatattggtgtgtttcatactgatgaatcttggataagagaaaattttggtggcgcagggggagaaggtcttcgttttattaagtctgaatttaattttcttattaaaaacaaacccactgaaatattatctgctggagttcataacttcgccaaaattgtaggatataagttaggacagaactataaaaaaataccgaaaaaatatctaaagaatttgagtatgcataaacgatactggagttag

SEQ ID NO: 217737 - DNA, 2160 bp, Klebsiella pneumoniae
atgtcatcaattaaaaataagccagaagtaaaagattcagaagattttgatattggccgtttgctaggcgaaattattgatcatcgtaaattgattatttccataacttctctttttgcgtttactgggttgttatatatactcttgtcaacccctgtatatcaagcagatgcgttaatacaggtcgagcaaaaacaagcaaatgctattttgggtaatttaagtcagattttacctgatagccagcctcaatcagccccagaaatagcgttgctgcagtcgcgaatgatcttagggaaaacagttgatgatcttaatctccagatcagagttgaacaagagcattttccaattattgggaagggattgtcacggctacttggacaaaaagatggcacattaaatatcgccatattttctccggttgaccaaacagaagatatacagaaatttaaattaacggttgagggaaatgggagttatgatatatatggggaaaatgtagaattaaaaggtaaggttggtgaaaccttagaaaaaaatggttttacagtaaaattaagctctatacaagcagagcctggtaccacatttactgtaacttatgtttcaaagttaaaggcgatatctgatattcaagagtctttaacaattaatgaccaaggtaaagatactggaatattagcaatatcattaaatgggacaaatcctttacttattaaggatattattaatagtataagccaaaactatttggctcagaacattgcacgacaagcagcccaagatgctaagagtctagatttcctaaaccagcaacttcctaaagtacgtagtgatttagacgaagcagaaaataaattaaacgattatcgaagaaaaaatgattcagttgatttatccttagaagctaaggctgtcttggatcagatagtgaatgtcgataatcaattgaatgaattgactttcagagagtctgagatttcacagttatataccaaagaacatcctacttataaggctcttttagaaaagagaaaaaccttacaggaagaaaaaggtaaacttaataaacgagtttcagcgatgcctgaaacccagcaggaaatattacgtcttagtcgagatgttgaatcgggacgagcggtttacatgcagttgcttaatcggcaacaggagctcaatatctctaagtctagtgctatagggaacgttagaattattgataatgctgttactcagcctaaacccgtgaaacccaaaaaagttatcacactgctggcaagtataattttaggattatttgtagccgtcggagtagttcttttaagagtctttttaagacggggtattgaaacacctgagcaactagaggaactaggtataaatgtttatgccagcattcctgtatcagaaacattctcgctcaagaaaacggtgaagaaatctaagagaaatagctacagtgatgctgaaatatttctggctttagaaaaccccgcagacttagctattgaggcaattcgtgggcttcgtactagtctccactttgcgatgatggaagctaggaataatattttgatgatttctggtgcgagcccaaatgcaggtaaaacatttgtaagtacaaatttggcagctgtaatttcacagacgggaaaaaaagttttgcttattgatactgacatgcgtaagggatatacgcacaagttatttaatatcaataacgatcatgggttatcggattttctgtctgggaaaaacgatattaacaaaacgataaaaactatcgatgttgcaggttttgattttatacctaggggaatagtaccacccaatcctgcagaattacttatgcataaacgattcggtgagttattgaaatgggctaatgaaaactatgaccttgtaatattagacacacctcctattttagcagtaactgatgccgcaataataggtaattatagcggaaccactttgcttgtcgctcgatttgagcttaattcaccaaaagaaattgaagtaagtattaaacgttttgagcaaagcggggtacacatcaaaggttgtattcttaatggtatggtcaaaaaagctagcagttattatagctatggctatagccattatgggtactcttatactgataaaaaataa

SEQ ID NO: 217738 - DNA, 294 bp, Klebsiella pneumoniae
atggccgttaaaatcgcagagaagcatggcctttctctaagcgggcataacggaaaacaatttacatcccaattagctaggaactatgatttgattttggttatggaaaaaaaccatattgaacaaattgggaggttagcgcctgaagccagagggaaaaccatgctatttggccattggatagagcaacgagacatccccgatccctatcgtaaaagtgaagaagcatttgcttcagtatttcaactcatcgagcaggcaggtaaatgctgggccgaaaaactaggtgtttaa

SEQ ID NO: 217739 - DNA, 651 bp, Klebsiella pneumoniae
atgggcatggtggcgcacgaatttcgcaccccgctggcggtgatccaggcggcgctggagaatcttcgcctctcggcggcctcgaccagccaggaggcgcgcttcgatcgcatcggccgcgccgccacccgcctggtgcagctcaccgataactgccttgccgacgcccggctcgcctcccacgatctgcacgtcgagcgccagcagaccgccctgctgacggtgatcaacatggccgcctcggtggtggccatctcccatgatcactacctgaacatccgccagcacggcgcggtggaaagcccgcagctgcaggccgatgccggcctgctgtgcatcgccatcgctaatctgctggataacgccgtcaagtattcgccccccggtgaaatcgccatcgatattcattccgatgccgggcaaacggagctacgcattcgcgaccacggcccgggactccccgccggacaggcggaactgatctttgagcgctaccgccgcggcgagcacacatcgccggtgccaggcggcaccggtctcggactgtatgttgcgcgtcagatagtgcaggctcatgatggcaaactgtggctggccgagcatggcccggacggctgcacctttattctcaccctccccacggttgcttaa

SEQ ID NO: 217740 - DNA, 702 bp, Klebsiella pneumoniae
atggctttacggctggcgataattgaagataacgccgatctgctggatgaactgctggcctggctgggctatcgcggcttcgaggtgtgggggacgcgcagcgccgaagccttctggcggcaactgcacagccatccggtggatatcgtgctggttgatatcggcctgcccggcgaggatggcttcagcgtactgaactatctgcatgagctggggcactacggtctggtggtggtcagcgcccgcggccagcagcaggataaactacaggcgctgagccttggggccgatgcctatctgatcaaaccggtaaacttcgcccatcttgccgagaccctcaccgccctcggcgcgcgcctgcgtcaggaccgtccggcggctccgcctgcggaggcgatcggcacgccgccggccgtctcccccggcagctggcgtctacacgaggataaactgatttcacccgatgcccggacgctggaattaacccagcgggaatatcgcctggtggagctcctgatgcgcaatcgcaacgaagtgtgcagcaaactggatctccatgcctgcctgttttcccatgaaagcgagcctgacctgcaccggatcgacgtggtggttagccgcctgcgtcacaaggcacgccagcaggggatccacctgcccgttcgcgcaatctttggtaagggactggcctttatttcctga

SEQ ID NO: 217741 - DNA, 612 bp, Klebsiella pneumoniae
atgagaaacattaatgtcaccatcaacacccgcaacgcctttgtccgtgaatcgctggtggccatggtcaatgacctcacccggggcgatctgcgggcgcgtttttcctggcgtaacaccgatctgtcagctgaagatatcattatctgcgaagtgatccccggggaaatatacctgtgtaataccctgattaagaacagaaaaagaggaagttcgctgattatcctccatagctatgaccagctgccggaagatgagttcatgattaactgcctgaaaggggtcatttttgtttcgctaaaaacggccagtattccgcaattgctggcgatcattaaaagcgagcttcagcattgtatgacccccacggctaccgacgccgcaggccaggaactcagctgcgccagctgtccgcatcgcgtgttatcgcgatcgcaaaccgccgtagtgcacggtattctcgaagggctggatatgagtaaaatcgccgccctgcagcgtgtgagtccccgcaccgccccctatcataagaataagatcatggaaaaatacagcctgaataataatcatgaatttttccagtttatgaatcttttacgagagcgctggtag

SEQ ID NO: 217742 - DNA, 1275 bp, Klebsiella pneumoniae
gtggcaaacgcaaacaaactcacgctcttcatcgtcatttttatgctgatggggatcctctccggcgcggctatccatgcctacgcgacgccaaccaccgtatccgcctgggcggacaacattacgctgcttaccgatctgtttctgcggttgatcaaaatggtcatcgcgccgttggtgttcagcaccctgacggtcggcattatgcgcctcggcgagacggcgaccatcggccgggtaggcggcaaggcgatggtctggttcatcacctcctcggtattatccattctcgtcgggctggtgatcgtcaccttccagcacccgggcgccgggttaaacctggcggtgccgaaagaggcggtggataccggcctggcggtcagcggcatgagcctgaaaggattcctgtcgcacaccatccccaccagcatcaccgaggcgatggccaacaacgagatcctgcagatcgtggtgttctcgatgttcttcggcatcgccggcgcgtcgctgggggagaagtttaatgctccgctggtggcggcccttaacgtggtgtcgcacattatgctgaaggtgacgggctatgtgatgtacgttgcgccgctggccatcttcgccgccatctcatcggtgattgcctcccaggggctggggatcctgctcaactatgcttcgttcatcggcggctattacctggcggtgctgttgaccagcgcggtgctgattgccgtcggctatatggtgctgaaaaaagaggttttccgcctgctgaacatgctgaaagatccggtgctggtggcctttaccaccagcagctcggaagcggcctatccgaagaccctcgagcgactggtgaagtttggctgctcgcgcaatatcgtctcgttcgtcctgccgattggctactcgttcaacctcgttggctcgatggtctactgctccttcgccgcgatgtttatcgcccaggcctataacgtgccgctgagctttagcgagattacggtcatgatgctgaccctgatgctggcctcgaaaggtatcgccggggtgccgcgttcggcgctggtggtgctggcggcgacgatccccagcttcaatataccggtcgccgggatcctgctgctgatgggtatcgaccatttcctcgacatggggcgctctgccatcaacgtgctgggtaatggcatcgccaccgcgatgctgtcgaaaaatgaagggttgctgaccgacgaggaagcgcagccggactgggaagtggagaaagcggaagcctga

SEQ ID NO: 217743 - DNA, 3123 bp, Klebsiella pneumoniae
atgcaggtgttacctccaggccgcaccggcggcccgtcccggctgtttattatgcgtccggtggccaccactctgctgatggtggctatcctgctggccgggatcatcggctaccgctttctgccggtctccgccctgccggaggtcgattacccgaccattcaggtagtcaccctctatccgggcgccagcccggacgtggtgacctccgccatcaccgccccgctggagcgccagttcggccagatgtcaggcctcaagcagatgtcgtcgcaaagctccggcggcgcctcggtagtcacgctgcagttccagctgaccctgccgctggacgtcgccgagcaggaagtgcaggcggccattaacgccgccaccaacctgctgccgagcgatctgcccaacccgccggtctacagcaaggtgaacccggcggatccgccgatcatgactctcgccgtcacctcctccgccatcccgatgacccaggttgaggacatggtggagacccgggtggcgcagaagatctcccaggtttccggcgtcggtctggtgaccctcgccggcggccagcgcccggcggtgcgggtgaagcttaacgcccaggccatcgccgccctcggcctgaccagcgaaaccgtgcgcaccgctatcaccagcgccaacgttaactccgcgaaaggcagcctcgacggtccggcccgcgcggtgacgctttccgctaacgatcagatgcagtccgctgaggattatcgccggctgattatcgcttatcagaacggggcgccgatccggctcggcgatgtcgccagcgtcgaacaaggggccgaaaacagctggctcggggcatgggccaaccagcagcgggccatcgtgatgaacgtccagcgccagccgggggccaacatcatcgacaccgccgacagcattcgccagatgctgccgcagctcaccgagagcctgccgaaatcggtgaaggtgcaggtcctctccgaccggaccactaacatccgcgcctcggtgcgcgacacccagtttgagctgatgctggccatcgccctggtggtgatgatcatctatctgttcctgcgcaacgtgccggcgaccattattcccggcgtcgcggtgccgctgtcgctggtgggcactttcgcggtgatggtgttcctcgacttctcgatcaacaacctgacgctgatggccctgaccatcgccaccggcttcgtggtggatgatgccatcgtggtgatcgagaacatctcgcgctatatcgaaaaaggcgagaagccgctggccgccgcgctgaagggcgcgggggagatcggcttcaccatcatctccctcaccttctcgctgatcgcggtgctgatcccgctgctgtttatgggcgatatcgtcggccgcctgttccgcgaattcgccgtcacccttgccgtcgctattcttatctcggcggtggtctccctgaccctgacgccgatgatgtgcgcccgcatgttaagccacgaatcgctgcgtaagcagaaccgattctcgcgggccagcgagcgtttcttcgaacgggtgatcgccgtctatggccgctggctgagccgggtgctgaaccatccgtggctgacgctcggcgtcgccctgagcaccctggcgctgtcgattatcctgtgggtctttatcccgaaaggctttttcccgatccaggataacggcattatccagggtaccctccaggcgccgcagtcggtctccttcgccagcatggccgagcgccagcggcaggtggccagcattatccttaaggatccggcggtggagagtctgacctccttcgtcggcgtcgacggcaccaacccggcgctgaacagcgcccgtctgcagatcaacctcaagccgctggatgaacgcgacgaccgcgtccagacggtgataagccgcctgcagcaggcggtggacggcgtccccggcgtggcgctctacctgcagccgacccaggacctgaccatcgacaccacggtgagccgcacccagtatcagttcaccctgcaggcaaactccctcgaggcgctgagcacctgggtgccgccgctgctcagccgcctgcaggcccagccgcagctggccgacgtcagcagcgactggcaggacaaaggcctggccgcctatatcaaggtggatcgcgacagcgccagccgcctcggcatctcaatggccgatgtcgataacgcgctgtacaacgccttcggccagcggctgatctccactatttacactcaggcgaatcagtatcgcgtggtgctcgagcaggataccgtggcgacgccgggcctcgcggcgctggagaatatccgcctcaccagcagcgacggcggcatcgtgccgttgaccgccatcgccacggtggagcagcgctttaccccgctgtcggtgaaccacctcgatcagttcccggtgaccaccatctcgtttaacgtcccggacaactactcgctgggcgaagcggtggaggcgatcctcgccgccgaacagtcgctggatttcccgaccgatattcgaacccagttccagggcagctcgctggccttccagtcggcgctcggcagcaccgtctggctggtggtagccgcggtggtggcgatgtatatcgtgctgggggtgctgtacgagagctttatccatccgatcacgattctctccaccctgcccaccgccggggtcggggcgctgctggcgctgtggctggcgggcagcgagctggacgtgatcgccatcatcggcatcattctgctgatcggcatcgtgaaaaagaacgccatcatgatgatcgacttcgcgctggccgctgagcgcgagcagggcatgccgccgcgggaagcgatctaccaggcctgtctgctgcgttttcggccgatcctgatgactaccctcgccgccctgctcggcgccctgccgctgatgctgagcaccggcgttggcgccgagctgcggcgtccgctggggatcggcatggtcggcggtctgatgctcagccaggtgctgaccctgttcaccaccccggtgatctatctgctgttcgaccgcctgtcgctgcacctgaagcgccgcttcccgcgtcaggaagaggaggcgtaa

SEQ ID NO: 217744 - DNA, 2445 bp, Klebsiella pneumoniae
atgatgattttgagtattgttgcaaccgtcgttttactcggcgcgctcttctatcaccgggtcagcctgctgctcagcagcgtgattttgctcgcctggaccgcggcgctcggcgcggccggagtgtggaacatctggctgctgctgccgctggcgatcatactgttgccgtttaactttgcgcctatgcgtaaatccatgatttccgcaccggcgtttcgcacattccgcaaggtgatgccgccgatgtcgcgcacggaaaaagaagccatcgacgccggcaccacctggtgggaaggcgatctgtttcgcggcaatcctgactggcaaaagttacataactatccgcagccgcggctgaccgccgaagagcaagctttcctcgacggcccagttgaagaagcctgccggatggctaacgacttcgccatcacccacgaaatggccgatttgccgccggagctgtgggcctatctgaaagagcaccgcttcttcgcgatgatcattaagaaagagtatggcggacttgagttctccgcttacgctcaggcacgagtactgcagaaactctctggcgtctccggcatcctggcgatcaccgtcggcgtcccgaactcgctgggcccgggcgaactgctgcagcattacggtaccgaagaacagaagaatcattatctgccgcgtctggcacgcggcctggaaatcccttgcttcgctctcaccagcccggaagcgggctctgacgccggcgccatcccggataccggcgtggtgtgcatgggcgactggcagggtcaacaggtgctggggatgcgcctgacctggaacaaacgttatatcacgctggcgcctatcgccaccgtgctggggctggctttcaaactctctgacccggatcgtttgctgggcggagaagaagagctgggtatcacctgcgcgctgatccccacctccaccccgggcgtggaaatcggccgtcgccacttcccgctgaacgtgccgttccagaacggtccaacccgcggcaaagatatcttcgtgcctatcgattacatcatcggcggcccaagcatggccggtcagggctggcgcatgttggttgaatgtctatcggtcggccgcggtattactctgccgtccaacgccaccggtggtctgaaatccgttgccatggcgactggcgcttacgcccatattcgccgccagttcaaaatctccatcggcaaaatggaagggattgaagaggcgctggcgcgtatcgccggtaacgcctatgtgatggacgctgcggcgtcgctgatcacctacggcatcatgctcggcgagaaacctgcagtgctgtccgctatcgtgaaatatcactgcacccaccgcggccagcgctccattatcgacgcgatggatattaccggcgggaaaggcattatgctgggcgaaggcaacttcctcgcccgggcctatcagggcgcgcctatcgccatcaccgtggaaggcgcaaacattctgacccgcagcatgatgatcttcggtcagggggcgattcgctgccatccgtacgtactggaggagatggccgccgcgcagaataatgacctgaacgcctatgacaagctgctgttcaaacacatcggccatgtcggcagtaataaagtgcggagtttctggctgggcctgaccggcgggcgcaccagcagcgcgccgactcgtgacgccacccgtcgctactatcagcaaatgaatcgtctgagcgccaacctggcactgctgtcagacgtctcaatggcggtgctcggcggcagcctcaagcgacgcgaacgtatctccgcccgtctgggagatgtgttaagccagctgtacctggcctcggcggtgctgaaacgctatgacgatgaaggacgcaatgaagccgatctgccgctggttcactgggggggacaggacgcgctgcaccaggccgagcaagccattgacgatctgttggacaatttcccgaaccgtctggtggcaggcgtaatgcgcctggtcatcttcccgaccggccgtcatcatcatgcgccgtcggataggctggaccaccaggtcgccaaaattctgcaggtgcccagcgccacgcgctcccgcatcggtcgcggtcagtatctgacgccgagcgagcataacccggtaggcctgctggaagaggccctgctggaagtgatggcggccgatcctatccaccagcggatctgcaaagagttgggtaaaaatctgccgttcacccgtctggatgagctggcccacaacgcgctggccaaaggattaatcagtcaggatgaggccgccattcttacccgtgcagagcatagccgtctgcgcagcattaacgtcgacgactttgcgccagaggagctggcgacaaagccggtaaagctgccggaaaaagttcgtaaagttgaagctgcataa

SEQ ID NO: 217745 - DNA, 573 bp, Klebsiella pneumoniae
atgttatatcaaaaggaaaagtgtatgaaaattaaaactctggcagttatcactatgtctgtattgtctttaggttcagtagcagcaaacgcagcaacagtatctgtacaaggcggcgatgtacattttcgtggctctgttgttaacgctgcttgtgccgtaagtgccgacactatcaatcaaacagttcagatgggtcaggttcgtgctgcggatttgagcgctaaaggtgatgtaagtgatgcaaaagactttcaaatcaaactgttagactgtgatacctctgttgccagcaccgctgcttttgcattttcaggcgttgctgttgattccgctaaccctacagtactggcacttcagggttctgcagctggtgcagccaaaaatgttggtgttcagatcctggattatagaaaacaggctctgaatcttgatggcgcaacgttcagcagcgcttcaaccttgatcaacggcacaaacgtgattcctttccaggctcggtactatgcgactggcgcagcagcagcaggtactgctgatgctgatgcaactttcaaaattcaatatcagtaa

SEQ ID NO: 217746 - DNA, 543 bp, Klebsiella pneumoniae
atgctggggaacaagtctagtctgttgaccttgctgttactgccatcacttgtcttagctaataacatctggacggtgacgctgggaggtggcgatgttcgctttagaggggtgatcattgcggagtcttgccgtgttgaagctggagacaagcacatgatcgttgatatggggcagatcagcagcaatcgatttcaccatgttggagaggatgtaaatcctgttcctttcaacatccaccttcaggaatgtaatacggctgttagtgatcgcgtctccgtgacatttcatggcatcgcagatgaaaaatacccagaagtattatctatcggcgacaaacaagatagtgcgaaaggtgtaagtattgcattgtttgacaatgaagatcgcttaataccacttaattcaacaccaattaactggaatcgactatacaagggaccgaaaacccttaactttgttgcaaagtatcgagctacaagcaatgtagttaccggtggtattgccaaagcacatgcctggttcgcattaacttatcaatag

SEQ ID NO: 217747 - DNA, 711 bp, Klebsiella pneumoniae
atgaagaatctacagaacatgacccgtttcttacttgctggactactgttagtcaccatttcaggaatggtttctcaagcacaagccagcgttggtttaggtgcgacgcgcgttatttatcctggtggttccaaacaagtgcaattgccggttacaaataatgatgaaaaaaagactttcctcatccagtcatggatagaaaatgaggaaggtaaaaaagatggtcgttttgtaattactccaccgctttttagtatgaagggaaagaaagagaacactttgcgcattattgatgcaactaataatcaattgcccaaggacagggagtcattattctggcttaacgtgaaagccattccttcaatggataaagagcaagccaataaaagtcagaatactttgcaattagcgattgtgagtcgtatcaaactgtattatcgaccagctaatttagaactggcaccagagcatgcagcagaaaaactaaccttcagtcgagcagggagttcacttacacttaataatccgacaccgtattatttaactgtcactgagcttagcgcgggaggccgtccattggaaaatgcactggttcccccgttcggtagtgcgtcagtaaaaataccttcagatgcaggcaacgaaattaaattccgaaccattaatgatttcggcgctcttactgacccaatgaagattttgattagataa

SEQ ID NO: 217748 - DNA, 783 bp, Klebsiella pneumoniae
atgaaactggaagcatcgttaaagcatttcagcccgcaggggatgcatatcagcgacgacgtgaaaagcacatcgccgaatcgcctgaattgcacagacattatgaccgggatcggtgtgaccagcagcagggcacgcttcggcctggccgctttcttcggaaaggctggtatcagcaaaacggatgaacagcttgcaattcaggcgctggcgcagtttgccatcaaaaacgctcctaaaaatgtccgcaaagccgccggtgacaagctcggcgcctgcatgttgacgctggcacaatttgcctttgcggagtactcacgttcggcggccaccagcgcaacgtgtcacagctgcagcggaaccggctttatttccagccatgaagatgtaattaagcaccctggtattttcgatgctgacggtgtcgaagtgaaggccccaaagattagaaatgaactggtgaaaagggtctgtggagtgtgcggaggaaagaaagtgatccatgcgcgatgcaggtgtagtggtaaaggggaggtcttagatcgcaaagcgaccaaagaacttggcgcaccggttttcaaaacatgtgaacgctgctctggtaatggcttctctgttgtaccctctgcgacggtacaccgcgccattctgaagcgtctcccggatctccatcagtcttcgtggtcacgcaactggaagccgttctatgaagggctggtggatatgcttcacaaaggagagagacaggcagcggctgaatttgagaaggcgaccatttattga

SEQ ID NO: 217749 - DNA, 369 bp, Klebsiella pneumoniae
atgaagatttttaacattacaccaatgggcaagccgaggatgacccgggcagacaaatggaaacagcgggaagtggtcatgcgctacctggcattctgcgatgaggtccgtctgaagaacgttgctatgccggagcagggcggacacataaccttcgtggttcccatgccaaagagctggagccagaagaagcgagtaacgatgaacggacaggcacaccagcagaaaccagacgccgataacatgatcaaagcgctgatggatgctctgtttactgatgacgcacatatctgggactttcgtgtaacaaaagtctggggtgaatccggacaaattttaatttctgatatcggagaagtggccgcatga

SEQ ID NO: 217750 - DNA, 1380 bp, Klebsiella pneumoniae
atgacaccagtctggcgtaacgacgaacttgaagaggcggtcatcggcgcattgtttttgcgcggagatgatcctgaggtgctggatgttctctcccgactgcctgcaagcaccttctctgttcgtcagtatcgggaaatttacactggcatctgccgacaggcccgcggcggcggagtaattgatccgttactgctttgcgagtcgttgccggcactccagaccacaattctggcagccacccgtgtcagctgggcgaaatccgcgttgttatcttacgttgatgtgctgcggcgcaatgctggtgtacgtgatgccgaagcagcactggaaaaagtgctggagcaaatcaggagcgcgagcaacggagaatcagccctggccgcccttgaagctgcgaagctgactgtatcggcgatcgacatttcagcagataccgtccagcccgttcacatctccgaactgctcaccgcagtggcggacgaagttgaatcgcggagccaggggaaagaagagaccaggtgcctactcactggcattgaggagcttgatgctatgaccggcggcattgaatcgacagatctggtgtttatcgccgcgcggccatcgatgggtaaaaccgaactggcactggatatcatcgacaaggtttccgctcagggccatggcgtgctgtttttcagtatggagatgtcagacacgcagatcaccaagcgcatggtttccgctgcaggcgggatgtcgatgtctcgcctgaaagccgtggataaattcgaggacgaggactgggcgcggttctttaacggcatggaacgcatggcaacccgcaatatctggatcactgacgccacggggctgactatcgaccagatacagcaaaccgccacgcgctaccagatagcgcatccggaaatcgcgctggtggtcatcgactatctggcgcttatcaaaattcagagtgctgcgcggtacgatctggccgttggcgaagtatccaaggggcttaaaaacctggctaaatcaaataaaacccctgtccttgcgctgagccagctatcgcgcggtgtcgaatccagacccaataagcggccaatgaactccgatatgaaaaactcgggggaaattgaggctgatgctgacttgatcctgatgttgtaccgagatgaggtttataaccctgaatcgccagcaaagggtattgccgaaatcaatgtgacaaaacagcgtaatggagagctggggaccatctatcgtcgattctacaacggtcatttcctgccaattgatcaggaggaagctcgccaacgctcaacgccgcaaccaaaggcacatcaacgccgttacacgaaagggagccgggctggccatgaagatttttaa

SEQ ID NO: 217751 - DNA, 879 bp, Klebsiella pneumoniae
atgttgaatttgaatcagctcaaagagcgtgaagacctgagagcgcaacaggaaaaactcggcgatgaactgactttcgctgaagagcataaacttccatggggcttcgagggctggaactcgaattacacctgcacgatatcctgtccggagcatggagactacgaacagttcacgctggtgggcaaagattttcgcggagcggagactttcaaacattcccgctgtccggcctgcatccgggcggagcagaccagagtcaaatccagcctgcgtaaacttcacgtggccagcctgctgaacgacgcgggtattactcgccgctttggtgactgcgagtttgaaaattatctggaactcaaccctgaagcctcccgcaacctcgcagcctgcaggcgctacgcaaacaactggcctgacgttctggacgccgggaaaagtctggtgctgacaggcagctgcggcacgggaaaaaatcatctggcggtctctctggcgaaaaacatcatccgcaaccatctcgccaccgtggaactgaccgatgtgatgcgtctgactcgtgccgttaaaagcacctggcgccacaatgctgacacaaccgaagagagcgtactggatcactacgcttcgctggatctgctgattatcgatgaggtaggcgtgcagttcggaagcccggcagagatgactatcctgcacgaagtgattaacgcccgctatgaaagcgttctgccaaccatcctgatcagcaatctgccacctgagcagctgaaagagtttatcagcgaccgtatttttgatcgtgtgactgacggtgggcgcaactacctggtattcaactgggcaagttttcgtgggaataacggggggcatgcatga

SEQ ID NO: 217752 - DNA, 831 bp, Klebsiella pneumoniae
atgagcatggatctgatggttcaggctatgaaaattaaggtcggaaaccctttgcgcaaattggttcttcttaagctggcggataacgccagtgatctcggggagtgctggcctagttaccagcacatcgctgaccagtgtgaaattagcaagcgttcggtgatgaatcacatcgaagcgctttgtgagtgtggactgatcaaaaaagagcttcggacaggaccaaaggggaattccagcaacgtgtatcagctcaatttacgtagtgcaggagattcaccagggggtagtgcaaatcgttcactacctggtgcaggagattcactacctggtgcaggagattcaccagggggtagtgcaggagctgcacccagaatcagtcactcttttgaaccagtcattgaatcagtcaatgaacctataaaacatactggcgcatcggctgacgcctctgcaccggctcgttctgcaaaacaggattattcccctgaattcgaaacagcctggcaggactaccccaagcgagcaggtggcaattccaaggcggcagcctggaaagcctggaaagcccgcctgaaagacggggttaaccctgaagcgatgctggcaggcgttaagcgctatgcgacctacgcccgtgcaaccggcagtgtcggtacacagtacgtcaagcaggccgctactttcttcgggcccgatcgtcacttcgaagaatcctggcaggcgccatccgctcccggaggtgggcacaacagcactattgcccgcctgtctggactggggcgcatgtccgacgattttggcgagtctggtgagaacctgaatttttga

SEQ ID NO: 217753 - DNA, 717 bp, Klebsiella pneumoniae
atggttcaaaatgaaaaagtgcgaaaagagttctccgagaggctggcactggcctgtaaaaaagcggggatcgatacacatgggcgtggtgtagtcatcgcttcggctctgtcgttaacgcctaaggctgtcagcaagtggtttaatgctgagactatgccgcgccaagataaaattttcttgctagccaaattccttaaggtagacccgctctggcttcaacatggcgatattgctgaaacttcaaccaggcatggttcagatacaattgagtacataggtcaaataaaaaatggacttgtcagggttataggtgaagcaatgttaggcgctgacggcagcattgagatggtggaagaaaatgacggctggctaaaaatttacagcgatgaccctgatgcatttggcttgagagttaggggtgacagcatgtggccacgcattcaatcaggagaatttgtgttagtcgagccaaacaaaaacgtttgccctggtgatgaggtgttcgttagaactaagagcggacacaacatgatcaaggtattaggctatgaccgtgatggtgagtaccagtttacaagcatcaatcaagatcataggccaataacaatgccttaccacgaagtcgagaagcttgaatatgtcgctggaatactcaagcaatccagacacatagaagatgatgatttggaaagcaagctaaaccccagccactaa

SEQ ID NO: 217754 - DNA, 213 bp, Klebsiella pneumoniae
atgaaaatgtcagttgctgaattcaaccagtttaaagaagctgcggaaaaaacattccaggcagaattaatttgctcactgctggaagatcacccgcatcaactagcggattctgaactttcttcaatcgcctctcttattaaaagactcgcgggggatgcttacgtttatatgagcgaggtcatttatcaacaagagagggctgagaaatga

SEQ ID NO: 217755 - DNA, 177 bp, Klebsiella pneumoniae
atgaatgactttgaagacttacctcttaacgctacggatgccctcaataacatccatctgcttatcggtgtggctcgcgtgctcgatggtaccgctacgcaaagagagctcagcataaacataattgagtttgttgatatgtatgtctctgccgccatcgaagaaataaaagggtag

SEQ ID NO: 217756 - DNA, 216 bp, Klebsiella pneumoniae
atgaacagtccgattcagatgttagaaattgtcgcggcggatatcgccgagaacacagttcttctggagctgatttataagcacagtaatgaagatcacgaaactgattgtgcaatggcttgcttaattcgctcaatgaagaagaccctggataccactaacgaatatatcaaatcgttaagcgactctcctgcccccccaaagggaacatggtga

SEQ ID NO: 217757 - DNA, 339 bp, Klebsiella pneumoniae
atgtcatatttagcgaccttttctaatattgttcactgtggaaccagtcataacgcaaagctcattgagcagactggtaaagcgacaggcgacatgcttatctgttctggctatcgcagcaaagagcaatgtattgaactcatccctgagttgattggcgtacgcatctgcgtgctgtgctgtcctgagtgctccatttgcttcaatgagtacagggaaatcagtacgcattgttatttcaaggttgtcttttttacgggatgcaatattcattatgctttcctcaaagtgagtgaggcctcagcaattaagccgttatttaagtcagtgttttattaa

SEQ ID NO: 217758 - DNA, 210 bp, Klebsiella pneumoniae
atgtggaatccagcaaccagcacaagtattgaagaagttgtaactgaggctaataacctgaatgaactcttagatttgatgcatctttgctttaaaaaaatgaaccctcctcagaccgaagcattgctggggttggcgctaaatatcgcatcaattatttctgtctggatagaggccgaggagaggcgccgtgaatacaaatctgattga

SEQ ID NO: 217759 - DNA, 348 bp, Klebsiella pneumoniae
gtgaatacaaatctgattgaaacgcgtcgccgtcacctcgttcgcgccaagcttgattcaatgatgcgaaggactgggagttattttcagctcgtaaaaatggacgatggaacaacgttacccgttgaacttgatgaagatattttaacaaaatcattaatcaaacttttcgaagcgatgatttatgacacccacaaacgcgagcaggcagaaaatttaatttctgaacattattcgaattgcatgggcgttaataaattaacgcccgacggagtggatttcatgaatgcactcattgcaacactggccgaacagtcattaaaagcggagaaattaactaatggctaa

SEQ ID NO: 217760 - DNA, 213 bp, Klebsiella pneumoniae
atggctaaattacccccccctattacacacgaaaaagtgcaggtcgttatgacgattgaaaacggaaaggtaatagatacccgcaaagttcgcgataacgaacttatcgcgacgatggacacctttttctggatggcagagaaagagggctatcggattcaggcccccagagtggaggagtgccgtgtcactgacagcaatacgaattcctga

SEQ ID NO: 217761 - DNA, 441 bp, Klebsiella pneumoniae
atgatcgacaaccgcactgccagcgctattgatctggcattacagaagcaccacacgccagtcggcgacctgtacgtagccattcgtcacggacgcatgaagcgctgctttagccgcggtaccgctattagctggctggcccactttctgacgtcgcatgctttcgcccgatccggctttatgcaacgtcaccctgatgtgcaggtagtccatccactgaaacctgagttgactcactggcagcgtggcgccgtcaccctggaatattttaacgccaaccagcgcacagttcgccggctgcgtcgcatcctcgcccgcaaaagagaaatgcaaaactggtgcaaaaagtgggatgccatgcacgaccgctacgtgaaggagcgcgaagagctcaaagccagcaaaccagcagaggtacgcaatggatcacacagcatttaa

SEQ ID NO: 217762 - DNA, 582 bp, Klebsiella pneumoniae
atggatcacacagcatttaacccggaaccaacgtctgccggcatccggttatctggaagcaggattattggttactccgccgctattcgtgaactggataacggtcactacgacaaacgccttgccgacggcatgaatattctggcctgcatcatggaggcggtagaaagcagctggctcacgctcactatcgagcagcaaatcatcgtctggcgctggttgctcgccgcggtattcattaccgaggagctggagaagaacgggactgtcgacgttccgaacgacgaaggcggcgttgatacagccgttatctattccggggagcacggtgcaatcagcgtctacccagggtcggaacgctttgcactcgccaaccatattgagctgggggcaatcgagaaatatgggccagaggttggccagcagctggcgctgcggatgtatcaggacatggttattgctgacgaagaatttgggttcaggttatcagcacttggccgggaggggcttaacctcctccatgacagctttatcgaacacatccagatcgaaggtgtgcccgaagcaccgattatgcattga

SEQ ID NO: 217763 - DNA, 708 bp, Klebsiella pneumoniae
atgatgaataacttgatcactaacaaaccatccatgaccagccttgagatcgccgagctggtagaaaaacgccacgacaacgtgaaacgcacgattgagaccctgattatgcgtggcgttattacttctcctcaaattgaggaaaagcctactgccgggcgccccacaacaatttacgtttttgaaagtgaagaagggaagcgtgacagcatcattgtggtcgcgcaactaagccccgagtttaccgccagactggtagatcgctggaaagagctggaagaagaacgctcccggccaaaatcgcaggcagagctgatcgctgaaatggccctgctgaatgttgagcaggaacgacgcctctaccaggttgaagaacaggtggaaaccgtagtcgaagctgtcgaaaacattaagcgtggaaatatgcgggccgggtatgtcggttatcgccaggtggtcgcaaaaagcggcatgaccgatgccaagtgtcgaaaccttgttaacgcataccgtatcccaaccgatacacacgaattcatgacgcctgatggtttactgtctcgccgggcgatcgtggagtttgaaccttttatgaaagcattccgccaaatgatggcagaagccgaaccacgtggggcccgttggtatcacccgaaaatggggctatttcaggctatcggatgggaggaaaaacattgtgaaaattga

SEQ ID NO: 217764 - DNA, 225 bp, Klebsiella pneumoniae
gtgaaaattgagtttaatgatcaagggtcggtttcagttatcacggtcaccagcactgtatttgagttccgccgacacaacagggcgattgatgtggcgttgcttctcacgcctgaaatgaccagccagcgcagcggttttttcattatgaaaacgatgttaagcggcaagacacatcacgccctgcgggcttacaagcatctgctccgggaggctacgcgatga

SEQ ID NO: 217765 - DNA, 1104 bp, Klebsiella pneumoniae
atgaccaaaacagccataaccagagagcgcctgcaggaaatcgctgaagacggtttcctgaagcatggcgaaagcaaagcgttggccggcatggtgctggccgcaatgggcggcgatcctgtggagtggatcaacggttgcaacaaatctgttccagcagccctgagatacctggctgaaaatccgcggccaataggtggagaatcgtcgttcaatacggcacatctgtaccagcttgcacgagaagtagagttaatggctgaagctccgctctatcgccacgcgcagccagcgccagaacatcccgaagtgctgccttgttcggtattgcttgagccagggttgcgctttggcaaagggattaaaaccagcaccatgcttgccgccctggcgcgcagggccgtacacgaatcagatatggcggcgctatcaccggaagagagagcggagtttcaggcgggaattgaggacttcaaatcgctgattgcgcagcagccggtagtgccggatgaaaagccaatgcctaattcgctgagcatgtacgcggttgatgctgttgcggctatagcagaggtgagaggatggaacgcctgccgcgccgccatgctgcagggattaaaaaaaagtgcaggaactgaagcaacctgcaggagtaacgaaaatgcgcaggtgctgaacaccatcaaagccccgccagctctgggttctttgccaaaaacagtcgaagtgcagaacaccaactctccggttaacgatgtcacaactggtaaaccgttgaccaatggtgactccgttacctgtaagtcgctgaccagcatcaatcccgcgccagctctggtttccttgccaaaaaacgccaagtcgctgaccggcaactccccggtaattggcattgacctggcatcaggtccagatcgcactgtcgaggttcattacgttgtacctcccggttacgttgtggtgccgaaggagccgacagacgaaatgatagccgctgctatgaactgcgaagatgtgctgttcaatagcgatgattctttttgcgtacagttcgtgaatatctatgaagccatgctcgctgccgccccgaaggaggtgaaatga

SEQ ID NO: 217766 - DNA, 261 bp, Klebsiella pneumoniae
atgaacacgatgtttttgttaatggccgaatacgggtctgctacggttccgctcagccaggtatgtgaaaagtattttgggctgaaaccggcaacagcggaaaaacgcgctgcgatgggcgagatccccattccaacgttccgagccgcagaaagccaaaaagcaccgcgcatgatccacatccaggaccttgcgaatcacattgatgcgcagctgaagaaaggccgggacctcctggaaaagatgaaaagcgatcattag

SEQ ID NO: 217767 - DNA, 435 bp, Klebsiella pneumoniae
atgggcaagtttatggccgtcgggctgacggatctgctggagagttcaggcatgaacggtgttccggcgtttgtcggccttgcgctgctgtcggcttttctgtgtatgtttatcgccagcggctcggccatctggtcgattctggcgccgatcttcgtgccaatgtttatgctgttgggctttcacccggcgtttgcgcagatcctgtttcgtatcgctgattcatcggtgctgccgctggcgccggtgtcaccgtttgtgccgttgtttctcggctttctacagcgctaccggccggatgcccgcctcggcacctactactcgctggtgctcccttacccgctgatttttctcgccgtctggctgctgttgctggtgggctggtatctggtgggactgccgatcggccctggcatctatccgcggctgtcttaa

SEQ ID NO: 217768 - DNA, 1209 bp, Klebsiella pneumoniae
atgacatggcaatccttcaaacaggcctggcttatccggttctggtctcctgtcccggcggtcattgccgcgggcattctctctacctactattttggcatcaccggcaccttctgggcggtgaccggcgaattcacccgctggggtggtcagctgctgcagctgctgggcgtccacagcgaacagtggggctattaccagctgatacatctcgaagggtcgccgctgacccgcatcgatggcaggatgatcatcggcatgttcggcggctgcctggccgccgcgctgtgggcgaataacgtcaaactgcgcttgccacgcagccggatccgcattgcgcaggccgtggcgggcggcatcatcgccgggttcggcgcacggctggcgatgggctgcaacctggcggccttcttcaccggcattccgcagttctccctgcacgcctggctgtttgccatcgccaccgccatcggctcctggtttggcgcccgcttcacgctgctgcccctttttcgcatccccgtaaaaatacaaaaggtgtccaccgcctcgccgttaacccaaaaaccgcagcaggcgcgccgccgtttccgcctggggatggtggtctttttcgccatgatcggctggggcctgctcaccgccgcagaccacccggcgctcggcctggcgatgctgtttggcattgcctttggcctgcttattgagcgcgcgcagatctgctttacctccgcctttcgcgatatgtggatcaccggccggacggtgatggcgaaggcgattatcttcggcatggcggcgagcgccatcggtatcttcagctatgtgcaattggggatggcgccgaaaattatgtgggccggtcctaatgcggcgattggcgggctactatttggctttggcatcgtgctggccggcggctgtgagaccggctggatgtaccgggcggtggagggccaggttcactactggtgggttgggctgggcaacgtcatcggctcaacgctgctcgcctggtgctgggacgatatcgccgccccgctcgccacccactggcagaaagtcaacctgctgaacgccttcggtccctttggcggactactggccacctatctactgctgctgatcgccctgctgctggtgatcgcctgggagagacattttttccgccgccaggcggcggtccggaccgtgaaggagagcgcatga

SEQ ID NO: 217769 - DNA, 999 bp, Klebsiella pneumoniae
atgagtaaacttgggattaatggatttggtcgtatcggacgtctggtgttacgtcgtttattagaagtcgacagcagcctggaagtggtggctatcaacgacctcacttcgccaaaggtgctggcctacctgttgaagcatgattcaaactacggccccttcccgtggagcgtcgactttaccgaagatgcgctgatcgtcaacggcaaaaccattacggtgtatgccgaaaaagaggcgcagcatattccatggcaggcggcaggcgccgaggtgattgtggagtgtaccgggttctacacctcggccgagaaatcgcaagcccatctccaggcaggcgcgcgcaaagtgctgatttccgcccccgccggcgagatgaaaaccatcgtctacaacgtcaacgatgacaccctgaccccggatgacaccatcatctccgtggcctcctgcaccaccaactgcctggcgccgatggccaaagttctgcaggatgccttcggcatcaccgtaggcaccatgaccaccatccacgcctataccggcacccagtcgctggtggacgggccgcgcggaaaagatctgcgcgcctccagggcggcggcggaaaacgttatcccgcacactaccggcgcggcaaaagccattggcctggtgatccctgccctgagcggtaagctgaaaggccatgcccagcgcgtaccgaccaaaaccggctcagtgacggagctggtatcggtgctggagaaaaaggtgactgcggatgaggtcaatcaggcgatgaggcaggcggccgagggtaacgaatcctttggttacaccgaagaggagatcgtctcttccgatatcatcggcagccatttcggttcgatctacgatgctacccagctggagattgtggaggccggcggcgtacagctggtgaaaaccgtcgcctggtacgataacgaatacggctttgtcacccaactgatccgcgtgctggagaaatttgcccgctaa

SEQ ID NO: 217770 - DNA, 1440 bp, Klebsiella pneumoniae
atgacagcacccgttcaacacccgatgtatattgatggccagttcgtttccggtcgcggcgacggctggatcgacgtgcttaacccggcgaccgaagcgctgctgtcgcggatcccggacgggactgccgaagaggcacggctggcgattgacgccgccgagcgcgcccagcccggctgggaagcgctgccggccattgagcgtgcgggctggctgcgcaaaattgccgccggtatccgccagcgtgccgacgagatcgccgggctgattgtcgctgaaggcggcaagatccagcagctggcggcggtggaggttgcgttcaccgcggactatctcgactatatggcagaatgggcgcgccgttacgaaggtgagatcgtgcagagcgatcgcccgggggagaatatccttgtctttaaacgcgcgctgggggtgaccaccgggatcctgccgtggaacttcccgttctttcttatcgcccgcaagctggcgccggccctgatcactggaaataccatcgtcattaagcccagcgaatttacgcccaataatgccatcgcctttgccgagattgtccatcaggttgggttgccgaaaggggtctttaaccttgtgcttggccgcggagaaaccgttggccaggagctggccggcaatccgaaggtggcgatggtcagcatgaccggcagcgtggcggcgggagaaaaaattatggccgctgcggcgaaaaatatcaccaaagtgtgcctcgagctcggcggcaaagcgcctgccattgtaatggacgatgcggatctggagctggcggtgaaagcggtagtggactcgcgggtgattaacaccgggcaggtgtgtaactgcgtcgagcgggtctatgttcagcagggaatatacgaccgcttcgtcaaccgcctcggtgaggcgatgaaggccgtccagtttggcgacccggcgacgcgagatgacatcgcgatggggccgctgatcaacgcggcggcgcgggaccaggtggcgggcaaagtggcgaaggcggtggcgcagggggcgcgggtggcgctgggcggtcagccgctggagggcaaaggctatttttatccgccgaccctgctgctggatgtacgtcaggagatggacattatccatgaggaaaccttcggtccggtgctgccggtggtggccttttcgaccctcgatgaggcgctggcgatggccaatgacagcgattatggcctgacctcctcaatctatacccgcgatctgaacgtggcgatgaaagcgattaggggactgaagtttggcgaaacctatatcaaccgtgagaactttgaggcgatgcaggggttccacgccggctggcgtaagtcggggatcggcggggcagatggccgccacggcctgaatgagtacctgcagacccaggtggtctatctgcaggcctga

SEQ ID NO: 217771 - DNA, 2544 bp, Klebsiella pneumoniae
atgccaaataagaataatggattattcaaactatccaccgtctttctcgcaatgcttccggcattgctttctggtttgaataataaagcgcaagcacgtgactttttcgatccctcattcattagctcattgaatggtagcgatccatcaaccactcccgatttatccatatttcagactcagaacgcgcaggcgccaggggattatcgggtcgatattatgtttaatggccgctacctggacaccaggaccataaagtttgtcgccaacaatcgcgccagcagcgataaccgcgaacccgctctggttccctgcctgagtctaaaagcactcgcggaatatggcgtaaggataaaagcctttccagagttagccgaggatcaaaacggctgtgcaaacttttctgtcattcctgacaccaaagcagattttgactttaccgcccagcgcttaaatatctctattccgcaggcggccttatccaccaccgcacagggatatattccaccggatcagtttgatgacggcatcaacgcgttattggtgaactatcagttcagcggctcaaacgacatgcaggccaatgatgaatactacagtctgaatctgcagtccggcctcaacgttggcccgtggcgcatccgtaacctcagcacctggaataaaaacaacagcggtgccggggactgggattccgcctatctctatatgcagcgcagcatccgctccatcaacagtaaccttgtgatgggtgagagctcatcgctcaacggtatcttcgacagcgtgccgtttaccggtattcagctggccaccgatacgacgatgttgccggaaagtatgcgcggctatgcgccaattattcgcggtatcgccagaaccaatgcccgcgtcatcattaaacaaaacggctatcaggtataccagacctatgtcgctcccggggcgtttgaaatcaccgatatgtacccgagcggcggtagcggcgacctttacgtcacagtggaggaatccgacggatcgaaacaagaatttgtcgtgccgttcgccaccctgccggtgatggtccgtgaggatcagctggaatatgagatcacatctggtaaatatcgcccgtacgatggcggagtcgatgaaacgccgtttacccaagccaccgcgacctacggcgtctccagcagcctgacgctatatggcggcatgcaggcggcttcgcgatatcaggcgctgtcgacagggcttggctataaccttggtgaactgggcgccgcctcggcagacgtcacccaggcctggtcaaaaatgaaagaggatgaaaagacctccggacagtcctggcgtgttcgttacgggaaaaacattcttgaaacgggtacaaacgtgaccatcgccggctaccgctactccacccgcggatttcatactctctcagaggtcctggatagctattctaatgacggctactacacttcgcgctcgctgcgcaaccgtaccaatttgacggttaaccaaagcctgggtaaaggtctcggtagcctgtcggtaagcggattaatcgaagattactgggatgataagcgtaccaacaagtcgatcagtgtggggtacaacggcggtttccgcaatgtgaactactacctcggctacagctataaccgctatacctggagcggagataactccgggaaagacgcccgggacgaccagcgcattacactgaccgtaacgctgccgctgagcaattggctgcctggcacctacaccagctatcagttaaccaacagcaatccgggatcaaccgatcagtcggtttccatcggtggtaatgcgctggagaacgatagcctggagtggagcctgcagcaagggtacagcaaccgggaatactacagcggcgatatgcgggcgacctataacggtgcccgcggcagcgtcaacgctggctacagctatgatcgcagcagcgagcgcattgactacggcgccaacggcagtatcgttgctcatgccgatggcatcactctgggtcaggacatcaccgacgcagcggtactggttaaagcgccggggctggataacgtcagactgactaacgacaacaccatttctaccgactatcgcggctacgccatcgtcccatatgtaacaccataccgtcgcaccgatattacgctcgacagctccacgcttggcgaagatatggagctgccggaaaccacgcagagcgtcgttccgacgcgcggcgccatcgtgcgtgcaaactatgccggcaatatcggccagcgggcctttgtgcatctgaaaaccgccagcggtcaggacgtgccttatggcgcgatggttctactcgtcggcgacagcaaatcgcagccaagcatcgttagcgatgccggtatggtctatatgtccgggttgcagcagaccgggatccttaacgtccagtggggcaaaagcgcagcacagcagtgcaatgcttcatttactttaccggccagggaaggcaaagcgaccggcatcagtcaaatcgaagcggtttgccgttag

SEQ ID NO: 217772 - DNA, 1032 bp, Klebsiella pneumoniae
atgaaaagaatatttattctaatgacgttactaatgcttggtagcgaagttgccgccgactgttcatatactggtgacattcagcggcaaggtattacactgaataatataaaaattccaaccgacccttccattcctgtagggagcattctttatacccgcaagattggcaccggtccatacaaaaattttaaatgtgataaatcgactaacgatcaatacattattgacattggcgcatcagaggtagcaggcgttacaggcattcagggcgggaaagtgtatgaaacagggatagatggcattggttttcaggtatcggatctcttacgtagtaaaaatggttctgttgttgtaggtgaagctggctcaacattgataccgatatccaaaacatcagataattattatcaatttcttactatttggttaataaaaacaaaaaacgtaattgatacaacgggaagtggctccaacccttccgtttcattttccgtaggaaacttacggactaaccctatccctaacgatcgtttgttatataaattaacaaaaatagagttcaagaatataaattatcgaactacttcatgcaatatttcaacaccgcattcacaggtcacactgaaccgtattgataaaagtaagttaatgtcgctttcccgcggagcacaaacgcctgctgaaaagaaaatcgttatgaatattgactgtccaacatcgtcgataggcaataccgttacatactggtttaaccctattggcggagtaagtacttctggcgacggcatagttgacaatatgatatctggtgcgacggcagcaaataatgtaggaataatttttaaactagccgggagtccagtcattttttatgatatggacaaatataattataaaattactaacagcagtatgctgtcaaatacaatcagcatgaccgcagattattatcgtgcgagtgataataatagcgatgtaacccttggtaatgtcaaagcaatgttagaggttgttatacaagaagattaa

SEQ ID NO: 217773 - DNA, 366 bp, Klebsiella pneumoniae
atgaaagaattaactgtatttgaaatggaagagatctctggtggctattcttgggatttttcttcctttagctctgcgcttacttctattgcatcaaatggtgttgaggctgttgccagcgctttattcggtggtgctatgttcggaatgatgggttctatcattggcggctgtaatggcggcaatggcggcggtctcttagggtttggtactcttggtatggctataggcggggcctggggtctggtggtaggtgcaattggtggtgcaattgcctctgctacgattggctgggacgccactaacgcaatgatctcagaatttgccgaaggtgcggcgaacggtaccttcaaactttggggttaa

SEQ ID NO: 217774 - DNA, 1290 bp, Klebsiella pneumoniae
atgtcaaaaaatctctatcgcaaggaagcgatcgaatacaaaaggcatcactggaagggtagagccttgttactcgcaggcttaccagcctggttgattgcctctttagcagcattatttctcattgcgcttatctgcgcactgatattttgcaaattcacccaacgtgtcgatgttaatggcgaagtgattacccttcctcactctattaacgtatttgccccccaacagggatttatcgttaagcaattcgtgaaaattggtgacgttgttaaaacgaaccaaccgctctatgaaattgacgtttcacgaagcaccaccactgggaatgttagtgctgcgcaaatagaagccattaacgagaaaatttccaattctgacgaaattatcaaaaagttggtagaaaataaaaagcagacattaaatgcgcttaatgagcagttaaaaaccacctcagcctccctgaaggaaacgaaccgtatgttggccaacgcccaggtaggtctgaaaaaaatgcacgacaatctttcaagctatgacaaatacctgagcgacggacttattactaaagaccaatataattatcagcactctttgtactttcagcagcagagtacctatcagtctttggttagccaaaaaatgcaactggaatcgcaaatcacacagcttaacagtgacaaaatcactaaagcagcagattttgacaaccaaatttccagtcagtacaaccaatccaatgattttaaaaatcagctagtcgaatccaatgctaacggtaatattattatcaaagccaccagcgatggaaaaatagagtctttatctgctacacagggacaaacagttgataatggtagcagcctggcgcagatcaagccgacgggaaacgttgaatattatctcattctatggctaccaaacagaaccattccatatttaaaaactggtgatactattaatattcgctatgatgctttcccatcagataaatttgggcaattccctggcaaaattatatcagtatcctcaatgccggcatctcgccaggagatgtctgaatatactaacgtcagtaatgggggtaatcagcagcaagaattggcgctgtataaagcaattgtcaaaattaaagacaaacagttcgaatatgacggtaaaaagctaagtctgtccaacgggcttaaagcacaagccgttgtcttccttgaagaacgccctctctatatgtggatgtttaccccggtttataagataaaacaaagcgtgagtggaccgattcatgactaa

SEQ ID NO: 217775 - DNA, 600 bp, Klebsiella pneumoniae
atgtgtatcgcccggcggcgctgcgcttgcacgggcctggaggacgaagaaacgcctgctggagggcccgtaggccggataaggcatttatgccgccatccggcacaaccgcgggtacggcgtctaatgtgtatcgcccggcggcgctgcgcttgcacgggcctggaggacgaagaaacgcctgctggagggcccgtaggccggataaggcatttatgccgccatccggcacaaccgcgggtacggcgtctaatgtgtatcgcccggcggcgctgcgcttgcacgggcctggaggacgaagaaacgcctgctggagggcccgtaggccggataaggcatttatgccgccatccggcacaaccgcgggtacggcgtctaatgtgtatcgcccggcggcgctgcgcttgcacgggcctggaggacgaagaaacgcctgctggagatcacttaagaccattacggccaaagcagtaccatcgtagtgaatcagttcccagtggacagcatggactgatggagatcctgacaacggcagacgtaatcctggacaggctgctgtataaaacgcgcgcagggtggttcagcagggtaagtcgatga

SEQ ID NO: 217776 - DNA, 477 bp, Klebsiella pneumoniae
atgtcacagcaatacaccaatgaactgaccactgatgtactggaacggctgcgtcagccgccatttaccgatgagtttctgtcagaacttgagccacagtcgcgtcagtcactcgtcgcagaaatggaatcaatgttacagcgccctgttctccatattttccggggtgcaacgattggcagcctgacccgtcatggtggcgtgatccgtgagacatccggcaaaagtacccttgacgggcattattctgcgcgggtcggagataaagttgtgtatccggatggacgtgaggcgaccattatttgcggagccggtaaaggtcgggtgatgcagggggaatcgatggcgctcgtgggcagaatgctggataacggtgatgaaatcatttcaacacctcaggggtgtcagatgtttgtattccgtgagggcgatgcactgccggatggctttttaactgtgccgggagataagcactga

SEQ ID NO: 217777 - DNA, 1236 bp, Klebsiella pneumoniae
atggcgctggaaggctattttcttttccagggagatcgtaccgtctgtggcggtaaaattatcaccggtgctgaagacaccgaatttttcgggcgatcacaggcgcgggaaagcgataaagtgacctgcggaaaacatccggggatctaccgtatttgtggtggcatgggcgacatgtacgaagtaggcggtgtaaaccgccagctagcaggctccatcgaaagttacagctcctgcccgtgtcgggcgaaattcattccgcaagatttggataacacctacgaatataactgcaataccgggctggctgccgaacgggagagggaagccagcaggaaaaaactgaatgaggcgaaggctaaagggcctgagccaatgccccttccggcgctgatttatgccacgcagagggcaatggatgactacggcgcaaaggacatgcaccacggtgatctgagcgaggaagcactgaaagagcgctttggtctgacggatgtctcggcgaaagtgaacccgtatacgctgacccttgtcccaccagcgcccgccagttcgtatggtgtattttatccgggcagcctgacgggaagtacgccggtcgtggtcagccgggaggaaagtgtccggctgatgtttgatgagttccggggacttgccaaggtattctccttccatggcccatataaaaacatcatcaccgaaatgattaatcatatgcaggggaacagcggcacaccgtacagcagcccattactggacagggcgctgaaagagcagatcctgaatgaccattcgagtgatagctcgttgttggggattaaaagggccttggatgatgctgttagctacgaatatggatttcttcctctcggtaaaaaggacgatttattcgacggaaagggcaactttaaggaagttaataaagctgttctacctaaatttgatcgtcagatcgataagactaacgggctggtgattaccgtccatgatacgtggtcgacgcatatcacgctcgagtcactggaggtgacgggcgacagctaccgggcgaaagtacactaccgggtacaggaccacttcgggcttgatgacgcggatatcctgaaccctgtttttcatcagggccgaattttccggatctggtttgtgctgcagcgctatgtgaaatacggctataggccgttcatcaccgagatgaatgcgaccgtggaaatcagcgggaggcggggtgaataa

SEQ ID NO: 217778 - DNA, 408 bp, Klebsiella pneumoniae
gtgaataagcgactgatagcgggggttgtagcggctgcggtaggtggttatctactatggcagtatctgtccccggttgagattgtggcagttcacgatggaaatacgattctggtcaggcattttccatacctgaaaagtcgtcagatagcctggtgggaagccaataaggccgtaatacaggcgaagtacgggattccacacgagggtaaagacggcttttaccatgtatggattgttgattttggggatggatatcgcacggaaccggatgaaaacctactgttttctaccgatgaggttttttgttttaacgacatcccgacagaggatcggtgtattgatagaaagcccctttttgacgttaggtggagtaggaattacgggcttaaatatgagtcgtattaa

SEQ ID NO: 217779 - DNA, 1383 bp, Klebsiella pneumoniae
atgcaacaacaacacaagccacatctgctgcgcgggctcaatgcccgacacattcggtttattgcgctcggctccgctatcggcaccgggctgttctatggctcggcctcagccatcaaagcggcgggcccggcggtgctgctggcctatctgattggcggcgcggcggtgtttatcgtcatgcgcgcgctgggcgagatggcggtgcgcaacccggtttccggctccttcggcagctatgcccgccagtatctcgggccgctggccgggtttattaccggctggacctacacctttgaaatggtgatcgtcgccctggccgacgtcaccgccttcggcatctatatgggattgtggtaccccgatgtgccgcgctggatctggatcctcagcatcatcttctttatcggcgcgatgaacctgtgcaacgtgcgggtatttggcgagatggagttctggctgtctctggtgaaggtggtggcgattatcgccatgatgctggcgggggcggggatcatcttctttggctttggccacagcttcccggccaccgggctggaaaacctctggagccacggcggctttgcccctaacggctggcagggcgttatcgcctcgcttggcatcgtgatgttcgccttcggcggggtggagattatcggcgtcaccgccgcggaagcgaaggatcctaagaaggtgatcccgcaggccatcaataccattccgctgcgcattatcctgttctacgtctgcaccctggcggtactgatggcgatcttcccgtggaacagctttggcgaacaggggagtccgtttgtgcttattttcgacggtctggggatcccggcggcggcgaccatccttaacatcatagtgatcagcgccagcatctcggcgattaacagcgatatttttggcgccggacgcatgatgtacggcatgtcgaaagaggggctggcgccgaaaagcttccagcgcatcgccagcaacggtgtgccctggatgacggtggtggtcatgggcggcgcgctgctggcggcggtggtattgaactatctgatccccgagcaggtatttgtgctaattgcttcgctggcggcattcgccacggtatgggtgtggctgatgattctgctatcccattttgccatgcgccgcggtttgtctgccgaagagcgcagccagatcgcctttcccattccgttctggccggttgcgccgctgttgacgctgctgtttatggggctggtcatcgccgtactagggatgtttgccgaaacgcggatggcgctgatcgccggcctggtctggctcgggctgctgacggtggtgtggtatgcgcgggtgcgtaaaacggcgctgcaggtagtcactgaacagtaa

SEQ ID NO: 217780 - DNA, 1689 bp, Klebsiella pneumoniae
atgtcgcaaagcaaatatcgccagctggacgtccgtgcgccaagaggcacgacgctgaccgcgaagagctggctgaccgaagccccgctgcgtatgttaatgaataaccttgatcccgatgtcgccgaaaacccgcacgagctggtggtctatggcggtattggtcgcgcagcgcgcaactgggaatgctatgacgctatcgtgaaggcgctgaagaacctggagagcgatgaaaccctgctggtgcagtccgggaagccggtgggcgtattcaaaacccatgagaactcaccgcgcgtgctgatcgccaactccaacctggtcccgcactgggccacctgggaacactttaacgagctggatgccaaagggctggcgatgtacggccagatgaccgccggcagctggatctacatcggcagccagggcatcgtgcagggtacctacgaaaccttcgtcgaagccggtcgccagcactaccagggcagcctgaaaggccgctgggtattaaccgccggtctgggcggcatgggcggcgcgcagccgctggccgcgacgctggccggcgcctgctcgctgaacatcgaatgtcagcagagccgcatcgatttccgtctgcgtacccgctacgtggatgagcaagccacctcgctggatgacgccctggcgcgcatcaaaaaatacaccgccgaagggcgggccatctctatcgcgctgtgcggcaacgccgcggagatcgtaccggagctggtgaagcgcggcgtgcgcccggatatggtcaccgaccagaccagcgcccacgacccgctgcatggctatctgccgaaaggctggagctgggaagagtatcagcagaaagccgaatccgacccgcagggcactattctggcggcgaaacgctcgatggccgatcacgtgcaggcgatgctggccttccatgagatgggggtcccaaccttcgactacggcaacaacatccgccagatggcgcaggaagtgggcgtcagcaacgccttcgatttcccgggcttcgtgccggcctatatccgcccgctgttctgccgcggtatcggcccgttccgctgggtagcgctgtccggcgatccgcaggatatctacaaaaccgacgcgaaagtgaaagagatcattaaagatgatcagcatctgcaccactggctggatatggcgcgcgagcgcatcagcttccagggactgccggcgcgtatctgctgggtcggtctggagtggcggcaaaagctcggtctggcgtttaacgaaatggtgcgcagcggcgaagtctccgcgccgatcgtcattggccgggatcaccttgactccggctccgtcgccagcccgaaccgcgaaaccgaagcgatgcgcgatggttctgatgcggtctccgactggccgctgctcaacgccctgctcaataccgccagcggcgcgacctgggtgtcgctgcaccacggcggcggggtaggcatgggcttctcgcaacactccgggatggttatcgtctgcgatggtaccgatgaagcggcggcgcgtatcgcccgcgtcctgcgcaacgacccggccaccggcgtgatgcgtcatgccgacgcggggtatgagattgccattgaatgcgcagcagaacagggtctgaatcttccgatggtggcggcaacgcaggggaacgctaaatga

SEQ ID NO: 217781 - DNA, 552 bp, Klebsiella pneumoniae
gtgcggcctgtcactcatttacccacttgcgcgactgaaactgccggtgctggcggcctcaaaatcgctgagacgttcccggaaggccggggcagcccgcatggatgcgggctgagggccgtgttttgcagggacgctgcctcggcccgacccgcagcctgcagggataagtcgaaggtaccacgcagtggcgattttgctggccggagcccgggggtacagggggcggcggcgactggccgccccctgtgcgctccctgcgccatacgagacataacgcagaagatcaaccgggagcgcaatctgcccggaattaacatagaagttgtagccctgccaaacgttgtggtcctgccaaacatagtgcgaacagggacatttccggttgtgccgccatttcgccgggtggcggctgcgccttacccggccagggggtcgtgcggcctgtcactcatttacccacttgcgcgactgaaactgccggtgctggcggcctcaaaatcgctgagacgttcccggaaggccggggcagcccgcatggatgcgggctga

SEQ ID NO: 217782 - DNA, 1584 bp, Klebsiella pneumoniae
atgaaaacacgaaaaattggactggctaactatctggcctacggcgcgggcgattttctcggcgccggcacgacggcgttaaccgccgcatggctgctctacttttacacgaccttttgcggactgaccccgattgaggccacgcttatttttgctgccgcccgcgtgctggacgcggtggtaagcccgctgatgggctttctcaccgataactttggcaccacctggcttggtaagcgcttcggccgcagaaaattctttattctgctcggcatcccctgcgtattcagctattcagcgatgtgggtcggcgagatgggcttctggtactacctggcgacctatctgctgtttgatatggtctataccatgattctggtgccctatgagacgctggtgccggagatgaccgatgactttaaacagaaaaccaaattctccggcgcgcgcatttcgatggcgcagatgtcggcgattttagcctccttcctgccggggatccttctctcctggctcggcaaagataatgccagctcgttcttctatgccagtctggtgttctcggtgctgtgcgcggtgatgctgactctggtctggtgtttcacctgggaacgaccgcgggaggcgtggtcggaagcggccctgcgggcggaagcggaaaaacaaaacttaacccttgctcagagcctcaatcgcctggtgattgagctgagttctacgctgcggataaaaattttccgccagcacctcggcatgtatctggggggctatatcgcccaggacgtcttcaatgccgtgtttacctattacgtggtctttgttctgatgcaggaagccgccgtcgcctcgaacctgctggggacgatggccatcttccagtttattgcagtaatcgccatgatcccgctgtgcattcgttttggccccgcgccgtcgtaccgcatggtggtggtcctgtttggcctgagctcactctcctacgcgctgctctattacgccggactgagcgacgtctattccttattgctgctcatctctgctgtcgccggactgggacgcggggggataaattacgtaccgtggaatacctacacctatattgccgacgtcgacgaagcgatcaccggccagcgccgggaggggatttttgccggcatcatgaccctgacccgcaaagcctcgcaggcgggggcggtgatgctggtggggatcattatgcagttgtcggggtttgtttccgggcaaaaaatacagcctgaaggggtcagccataccattctgctgatcctcagcgtcggcactctggtggtgttagcctgcggcttcctcgtctcgctgcgcttcaagctcaacctgcacacccacagcgtcctgcgcagcgagaccctcagaatgcgcgagctcggctacgctcagtcggaacagaccagtgcggaacaccgtgcggtggtcgagctgctggcggggatgccttacgactgtctgtggggcaataacaatattggctatctgaatcgtcataaacctgctgccccggcgctcattaagggcggcgctttgaattcgacatatacccgaggttaa

SEQ ID NO: 217783 - DNA, 1140 bp, Klebsiella pneumoniae
atgaaagtttggccggtcaaacatagcccattactgcgtcagcctgagcgttttatcgcccgtagcgaactgcaggcgctgatccgcaacgtgacgcaaaacctggtgaatattaaggatgagagcgggcaatttttactacgcctggatgacgggcgcgtgatcgataccaaaggctgggccggctgggagtggacccacggcgttgggctgtacggcatctatcagtattaccagcaaaccggcgatatcgagatgcgtgatatcatcgatcgctggtttgccgaccgcttcgccgagggggcaacgaccaaaaacgtcaatactatggccccgtttctgaccctggcttaccgctttgaagagaccggccgtatggcgtatctgccgtggctggagagctgggcggagtgggcgatgcacgagatgccgcacaccgagcagggcggtatgcagcacatgactctggcggaggagaaccatcagcaaatgtgggatgacacgctgatgatgaccgtgttgccgttagccaaaattggcaagctgcttaaccgcccgcagtatgtggaggaggcaacctaccagttcctgctccatgtgcagaacctgatggaccgggagaccgggctgtggtttcacggctggaactatgaggggcggcataactttgcccgggcgcgttgggcgcggggcaacagctggctcaccatggtgatcccggattttctggaactggtgaatctccccgaggggaacgcggtacggcgctatctgattacagtcctcgacgcacagattgccgccttagcagaatgccaggacgacagcggcctgtggcataccttgctggacgacccgcactcttatcttgaggcctcggcgaccgccggctttgcctacgggattctcaaagcggtgcgcaagcgttacgtcgggcagcactacgccggggtggctgaaaaagcgattcgcgggattgtgcagaatatttcgccgcagggggagctgctgcagacctcatttggcaccgggatggggtcagacctcgacttttatcgtcagatcccgcttacctcgatgccctacggtcaggcgatggcgatcctttgtctgacggagtatctacgcaagtacttctga

SEQ ID NO: 217784 - DNA, 594 bp, Klebsiella pneumoniae
atgaaagataaccagaacgaagtcgctcgcgatatgtgggttgaagcgttgagttcattgtttaaaggtgattccaaggaagaattgtaccggatttcagatgatgagattgatgccctggaggggttgtgtccggacagatggccaacggcaggacagacagaaattaactgggatctgtctgttccggggcgcaaacatacgattgaccttccgggtacatgggtattgcagcctgctgactgtgaacaaattgatctcagttctctggtgctggggaaagcctcttttgctgattttgaacctcttattaattccttctttcgactgacagattccagtctctggacgaggcttgaaccccggaagctggggatggccatacttcatatcgcaaaaggatggcctatctcgcctgtcttgttaagtttgcacgaagatggcggatttcatttcggcggtgggtcccatcgttatcaagtactgaagcggtctggatcccctcatttttactttctggctgagccagatgatgttccggccattaataagcaacttacggttcagtggatgcgcgactatcaactatcctga

SEQ ID NO: 217785 - DNA, 438 bp, Klebsiella pneumoniae; identical to SEQ ID NO: 185228

SEQ ID NO: 217786 - DNA, 468 bp, Klebsiella pneumoniae; identical to SEQ ID NO: 185229

SEQ ID NO: 217787 - DNA, 345 bp, Klebsiella pneumoniae; identical to SEQ ID NO: 185230

SEQ ID NO: 217788 - DNA, 636 bp, Klebsiella pneumoniae
atgccacgacttttcaatttaaaatataaagaactgtttgtgtgtttaggatttatttttattgcctttgcttatccgtggatatttcagacatacctgattaacacaggtattgttggtattgatatggttatccccttaatgtcttcagcgatattgataacaatcactccagtttattttcaattttataaacacacaaagggttacggtcttggcgaacggcgtattgatttatttattgtgtttatgtctttgattttatcagttcaatttatgatgtttcgttatcagtcgtcatatatacagtcccctcccttggatatcaatatcattctagttataaatatcattgctgtagtaatattagcacctttgtatgaggaaataatattcagaggtgttgtttatggattttttaaaaatacattgatgtgtagcacaatgacttccgtagttttaacctcactgatatttttatcccttcactggtattatgatatattaagcttgtttatcctgttttttatctcggtgatcctgacatatgcgagagtgctgagttacggaatattacttccttttatacttcactcattaatgaatggctttgttttattcttgcgatttcaatga

SEQ ID NO: 217789 - DNA, 2109 bp, Klebsiella pneumoniae
atgaaaagtgaagttgtcagtgtattaaaaaacaaacttgatttaggtttgaaatcacgttttcctatgatccatcaaacggagtcttcggaatgtggattggcatgcctggcaatgatatgtggttattatggaaagaatattgatatctttacgctaagacaaaaattcaatctttcgagcagaggaactgatttagcaagtttaaatgatattgctgttaagatgcatatgtctacgagagctgtgtccgtagagctggatgagttacattcagtgaagcttccttgcatattacactgggattttaatcattttgttgtattaacaaaaattaagaatggaaaattcacaattcatgacccatcagtcgggattgtgaaggttgctaagagtgaactctcaaaaaaattcacaggtattattctggaaatatggcctgacaacaattttttaaaagaaaacgtaaaaaataaaatcagccttagagccatgcttgaaaatacccatggtttatacagtgcactgacgaaaatatttttcctgtctatcattattgaaagtataaacttagtgatgcctgttgcaacccaactggtcatggatcatgccataccggcaaatgactccggtctattaacattaatttgtttcggccttgttttctttgtggcactcagaaccattactggtcttattcgctcatggacagtactgattatgtcatcatttattaatgcccaatggcaaaagggattactgcagcatttactaaaattgcctctagagtattttgaacgccgaaaatttggtgatatacagagccgatttggttccctgaacacccttcaggagacgtttacaaccagtattgtcggtgcaataattgactccattatgatcatcggattattgattatgttggtactctatggcgggtggcttacctggtttgttatcctttttacctgtctatatgtatttatccgggtactaacctacaacagatatcgtcagttatctgaagagtccttaataaaggatgcaagagctaattccttctttatggagacactttatggtattgccactgtaaaggtacaggggctgaataaacggagagaggaaaactggtttaatcttgaagttgactcgattaataccggaataaaagtatccagattaaacctgttctttggaggcattaatacactgattgcgacgatggagcagatactcatcctctggcttggagccagtttagtgatatcgggaaatatgacaattggcatgtttgttgcttttagttcctatcgaggtcagttttctgatcgaattgcatcatttatagattttttactcagacttcagatcatgagccttcataacgaaagggtttcggatatagcacttactgaagtttccccatttaaagatgatattccggtaaaaaatgacatgtgccctgtctcactgtcggcaaagaatatcagttataaatatgatagttatgcatcatatactctaagacatctaaatatagagatacaacctggtgagcatgtagcaattacaggtgcttccgggacagggaaaacgacgctattgaaggtactgtgcggattattcccggcaagtgaaggaaatatacttgtagatggtattgacataaaagaattgggtattaacaactatcaaaaattaatcgcctgcgttttacaggatgacaggcttttctccggaacattaagggataatatctgttccttttctactcaaattgatgataactggctgattgagtgtgccagatttgcacagatacacgatgatatagaaagaatgccgatgggttatgatacattaatcggagagctgggtgaaggtttatcaggtggacaaaaacagcgtatttttatcgcaagggcaatttataaaaaaccatccattctcttcatggatgaagcaaccagttctctggataatacaaatgaacaatacatcaacgatgcgataaaatcgctgaatatcacacgcattgtgatcgcgcacagaaaatccactattaactcagctgatcgcatcatcactttacaggaaaatttataa

SEQ ID NO: 217790 - DNA, 765 bp, Klebsiella pneumoniae
atgagaaattatgaacagtaccggaaaaatggattaattaacaacgatcagctaacaaaccaaatgtcgctctactatcagcaagaaaattcagtcttgtccattaaaaaccagaatatacaaaatgcattgcaaataaaaaatcttgagagagaagttcagatacagacttcagaatatgacagcagaatatatcagatgaaattgcagcgcaatgaacttaaaaaagaattaataaaatcagggctaaatagtagcattataataagatcaccgtcagatggcataatcgatacattgaatgtatctcagggtcagattgttaatgcaggtgatactctgtcgcagataataccggagagagatagaaaactatacttaattttatggatacctgatatggccgttccgtatataaaaaaaggtgaccacgtcagaatccgttatgacgcttttgcatatgaaaagtttggacaatttaatggcatcattcattcaatatctaagtctccttcttcgcaacaagaaatgttaagctatcacttattagataatataaagttattctctggccatgcttattaccgggtcatggtcacacctgaaaatgataggatatattataacaaggaagaaatacatctggagaatgggatgagagcagaattaacattattcctggaaaatcgaaagatataccaatggatgatatcaccactctatgatgtagtaaaaagtgctcagggtaatattcatgaaaagtga

SEQ ID NO: 217791 - DNA, 438 bp, Klebsiella pneumoniae
atgttcaggcaggaagcgttacaacaccgtaattctgtatggaaagcaaaagcaatattgctgccaggtatccccttatggtgtatcgttttaagctgcttcgtctttataactttttttatcgttttcatcatttctggcagttataccaggcgtattaatgtgtccgcggaagtgaccacctggccccgtccaattgttatatcaaccagtcaacaagggtatgtagtcagatcatatgtgaaggaagggcagaaaattagaaaaggggaccgtctttatgagctggatacaagtaaaacaacccgatccggcgttgtcagtgataacgaatttaacgaaataacttctcagttacatggaattgatgagatcatccgaaacctggaaaaggggagagacgaaacactgcagtcaattaaagatcagagaaattaa

SEQ ID NO: 217792 - DNA, 879 bp, Klebsiella pneumoniae
atgaaactgaaaatacaggacctgagactgtttaatctcgtctttgaaagcgatccgggctggatactcgatttctccaaccgtacgctgtcggctttttttgatgaagagctgaacattgatattgatgatgaatgttataaggaagaaggaacctcaaaagctaaacgggtaagatgtttgctgaaacaggtggatcgtgagacagccctgcgggttcttgataccctgtggcggtataaaatggagaccatgcctgagcaggccgaacaaagccgaaatgactggcttgcactgatttcacggctgaaaaatacggacgctgatacagccaaaggcgacaggcctgtgcaggcatggcacggtgtcgactggccttcactgatagccgaaatgaacgagatgaaatccctgtcgccacatccgcggggtttccgttttgaagcatggcttgcagaacttttcagtatctttaagcttgccccccgctcgtcattccgtaacacgggcgagcagattgacggcagcttccggctgaatgatgacttttacctgttggaagctaagtggcatcagaacagaacgccagcggcagatttgcacgtattcgaaggaaaactcagcaccaaggcgaagtgggcccggggcgtgttcatcagttggatggggtttactgatgaaggtctgacagccttcgtgaaaggaaaacgggtgatctgtgtcagtggttatgatctttaccattcactcagtcacggtatcgctctgcccgaccttctggacgcaaaactccgacacgcagcggaaacaggggagccttatgcccagtttgacatgctttacactcttaagggcataataaccggcacgccgaaataa

SEQ ID NO: 217793 - DNA, 417 bp, Klebsiella pneumoniae
atgaagaaaacctggatgctcgacactaacatctgctcgttcatcatgcgcgagcagccggaatccgtcctgaagcgcctggagcaggcggtgctgcgcggtgaccgcattgtggtctcggccgtgacgtatgccgagatgcgcttcggcgccaccggcccgaaggcctcgccgcgccatattcagctggtcgacgcgttctgcgcgcgcctcgatgccatcctgccctgggaccgggccgcggtggacgccacgacggacatccgggtggcgctgcgcctcgccgggacgccgatcggcccgaacgacacggccattgccgggcacgctatcgcggccggcgccatcctggtgacgaataatacaagagagtttgagcgggtgccgggtctggtgctggaagactgggtgaagtaa

SEQ ID NO: 217794 - DNA, 231 bp, Klebsiella pneumoniae
atgcgcacagtttcgatatttaaaaacggcaataaccgcgccattcggctgccccgggacctggattttgacggcgtcagcgagctggagatcgtccgggaaggggacagcatcattctgcgtcccgtccggccgacctggggctcgttcgcgcagctggacagggccgatccggactttatggcggagcgtgaggatgtggtcagcgatgaaggacgctttgagccatga

SEQ ID NO: 217795 - DNA, 450 bp, Klebsiella pneumoniae
atgattgatgtgaatctggatttttccggtttgcaggatatcgcccgagacctgcaaaccctcagcaaagccgaaaacaataaagtcctccgggattcgacccgtgctggtgccgaattgctccgcgaggaggtgattgatcgcgctcctgagaaatccggtaaactgaagaaaaacgttgttgtcgtcacccagaaaagtcgccgtcgcggtgaaatttcatctggtgtgcatattcgtggcgttaacccgcgaacggggaacagcgacaatacaatgaaggccagcaacaagcggaatgcgttttactggcgcttcgtggagttgggaacatctacagcgcctgcacatccgtttgttcgcccagcttttgatacccgcatggaagaagctacgcaggtggcgatgcagcggatgaatcaggctatcgatgaggtgttatcaaaatga

SEQ ID NO: 217796 - DNA, 339 bp, Klebsiella pneumoniae
atgcaggcaggacgattacggcaccgggtcaccattcaaaacttcacaacctccagaacgccatcaggtcagccggttgaaaaatgggaagatgggaaaaccatctgggccgaggttaaggggataagcggtcgtgagctgttagccgctggcgtagagcatgctgatgcgacaatccgagtctgggtgcgttttcgcaaggatatttcagccgcgtccagattgaacgtccgcaccggcccgtttaaaggtgccgttcttaacgttaccggccctccggttccggatatcaaaggtacccggctggaaattctctgcaaacagaggaccgaaaaatga

SEQ ID NO: 217797 - DNA, 465 bp, Klebsiella pneumoniae
atggcaggacgacgcccgaaaccgacccacctcaaagtggttaccggcaacccgggcaaacgaaaactcaacgataaagaacccacgccagctaaagaaattccaggccccccagctcatcttaccgactggggtaaggtggcatggggtcggctgactgtgcttctcgatggtatgggtgttctcaccgttgcagatactttggcgcttgaaaggctttgcgatatttatgccgatatcctgcaactgcgcgacaccatcgctgtagagggcagaacttataccgtccagaccgagggtggttttctgataaaggccaacccggcagtttcaatgctggctgatgccgaccgtcgttttaaaagttacctggttgaattcggtctgacaccagcggcaaggacgaaggtgaaagtgaatggcgaaacccccgaagaagacacgctcgacaagttcttcggttga

SEQ ID NO: 217798 - DNA, 246 bp, Klebsiella pneumoniae
atggcagagatcacttcagctcaacagattcgaatgaacttgcttgcaatgctgggctatgacacagccgcagcgaaagaagccattcaattcgtacaggacgacgatctcaagtatcaaatgttcgtccagcaatacaaccgcgtcacaactgagaacacctacgtggcaaaggccatgaaggcaattcaggagtctactgaagcattgacgctgtttgatagcggcgcagagcaggcgagctaa

SEQ ID NO: 217799 - DNA, 276 bp, Klebsiella pneumoniae
atgagctttgaaattatcgcgggactggtggtcgtcatcctgggtgctattgctggcgcgttcggcattggtcatgctcgcggggccagtaaggcgaaagccaaagctgatcagcaacgtaccgaagagaacgccgctgctactgtcgccgcggcagaacgccgtgctgaagtcacgaaaggggcaagcgatgtacaggaagacgttaagcgtatgggcgatgacgatgttgatcgcgagctgcgcgaaaagtttacccgccccggtagtcgttga

SEQ ID NO: 217800 - DNA, 345 bp, Klebsiella pneumoniae; identical to SEQ ID NO: 216364

SEQ ID NO: 217801 - DNA, 822 bp, Klebsiella pneumoniae
gtgaatcttgaaaacacagtgaaataccacttcgcaaaatccacgctgattagcgattctccgcgtgctaccgcctctgattcactgaccggcaccgacatcatggcagcaatgggcatgacccaggaacgtgccgctatggggtatagcgctttcctgggcaagatgggcataagcaacaatgaccgggatcgggctatcggactattggctgagtacgcgctgacaaaatgcgataaggttgctgcgttgcgaaagctctcgccaagcgtaaaaccccgggttatacggatcctcgcagagtacgcctttgaggattactcccgcagtgcttccagtaaaaaaacatgcgactgctgcaatgggtctggattcatcgacgcagtggcgttcaccaacaaagtaacgtatccggacggcaaaccgccgaagtgggtcaaaattacaaaggggatctatccatcatactgggaggaggtgaagtcggtccgggagcaggtccgggtgctttgccaaaagtgcaagggaaaagggactgttagcgccgcctgtaacgactgccacggtcgggggaaggtagtgaaccaggatgagacggagaagcagggagtgcctgtgatgggtaactgtaaacgttgtggcggtcgcgggtatgagcgaatcctctccactgctgtacatagggccatttgccagataacggacgccatcactctggacacctggaaaaagtcggttaaaccgttctttgacgtgctgatcactaaattcgatatagaggaggcgtgggcagaggcccaactcaaacaaataacgcggtga

SEQ ID NO: 217802 - DNA, 123 bp, Klebsiella pneumoniae; identical to SEQ ID NO: 175177

SEQ ID NO: 217803 - DNA, 357 bp, Klebsiella pneumoniae
atgaaaatctacgatatcacgcccatcggcaaacccaggatgaccagagctgataaatggaagcagcgtccggaagtaatacgttaccgggcgttctgtgatgaagctcgtctgcgcaaaattcacctgccagattccggcgctcacgtcacgttcgtcatgcctatgccgcaaagctggagtcagaaaaagagagcgcaatacgcaggacgtccacatcagtcaaagcccgactgcgacaatatgctgaaagccctaatggacgccctctatgaggatgattcacacgtctgggattgccgcatcaccaaaatatggggcgagaaagggcagatcattattggggaatctctatga

SEQ ID NO: 217804 - DNA, 381 bp, Klebsiella pneumoniae
atggaccgtcagcgcgcagctggtggaggacaaaaatccgcctcggccagactctcgctggcgcaacaggatgtgggggtgagtatggcgaaccttcgcaaagcggcccgaggtcgcgaatgtacagtgcggatccctggttactgcaacggcaacccggaaaccagcgtgttggcgcattaccgcctggcgggtacgtgcggcacaggatgcaagcctgacgatactcaggcggcgatcgcctgcaacgggtgccatgacgtaattgacggcagaaccaaaaccaccgatttcacctacgacgaattgcgcctgatgcacgcagagggggtaatgcgcaccctggaaatctggcggaaagagggactcatcaaatcatga

SEQ ID NO: 217805 - DNA, 597 bp, Klebsiella pneumoniae
atggcgcaattgcacttaataaaacaatctcaaggtatcctgatccccgcgacgccggagaccagtgattttctgcaatcaaaatgcaagctcggctccgttctggaagccgattataagcttgtccgtaatccggcgtttcaccgccgttactttgctttactcaatctcggctttgaatattgggaacctaccggcggggcgatttcgtctaacgagcgcaggcttatcacaggttacgccaaataccttgctgcatatggcgggagtgaatcggcgttgcttgatgccgccgggcaatatctcgaccggatagctgagaagcgatccggctatatcagtatttgcaaatcctttgatgcttaccgggcgtgggtcatcgttgaagccggccactatgacgccatacagctgccggacggtacgctgaaaaaacaccctcgcagcatttctttcgcaagcatggacgaatgcgagttccaggaactgtacaaagcatcgctggatgttctctggcggtggatcctctctcgttcattcaacagcctgcaggaagctgagaacgccgccaaccagcttttaagcttcgcggggtga

SEQ ID NO: 217806 - DNA, 234 bp, Klebsiella pneumoniae
atgaaagttgaagtcacaattgataaacataaaaaactccctgatggcgccatacctgcgcttgagcaagaattgctgcgccgcttgtcccagtcttatgatgactgcaaattaaccattcgacgcacaagcaacgatggccttagcgttttgggcggcgctgatggcgataaaaaacgtgtagagcaaatcctgcaagatacgtgggaaagcgcggacgactggttttactga

SEQ ID NO: 217807 - DNA, 189 bp, Klebsiella pneumoniae
atggcgtacatcttcctgattttcgtcatcagcagccaatcatcgaatatgcaggtggttcccatgcagagtatggagcagtgcaaagcagccattaaggcgatgaaagttgcagatgataagaggtcctgggacgatgtttcgccaagcgtagataatattcaatgcgtagaggtgaaaggtgcctaa

SEQ ID NO: 217808 - DNA, 261 bp, Klebsiella pneumoniae; identical to SEQ ID NO: 112066

SEQ ID NO: 217809 - DNA, 660 bp, Klebsiella pneumoniae
atgaccagcaaatttagcatcgacaatagagagctgcttcagagaatcagtagcggcgaggctgttgtgggaattgattttggtaatctaatcgtcagggatctagctgcattcaggctggccgcaatggacagcgagtctgggtatttgcctctcgactacctgcagggacacaaagacggtctggaatgggccgcccaactggcagaagccaatcaccctgaaaccggagactggctttacgatgaccctatcgagctggcaaaagccattcgcaaaggtccagatatgccgccagtgcagccggtagcggacagcgagccggtgattgttgttggcgatgatggaggggatgcgctttcttatcgccgccttatccagtcctttgagcctggcactaagctctatcgccacgcgcagccagcgccggcagtgcctggtaaatggattccggtaagcgagctgatgccggaagttggcgttaaggtcttatgcttcccggttaaagatgagccaattcatgcaaccttcaacggtcaattatggctgcaggatatttcatggagcggaagcgacgagccaattgataacgtcattactgccagcgtaacccactggatgccgctgccggccgccccgcaggaggtgaagagtgagtga

SEQ ID NO: 217810 - DNA, 456 bp, Klebsiella pneumoniae
atgactgatatcaccgaactggcgcagagcctgaaagcggcagcagatagagagatgatttgccgagatggcgccgaaacttctgaaatctgggaaagaactgtaacgccggaaaacgtcctcgcgctggtagaggcgctggagaaggcgcagcaggtagacgaagagctttgcaagctcctgcctccaggtgttgagtacatggaccctccagacggcggcgatgtcacgccgcttgaaggagtacgtcgaatggtggctgattaccgccagcgcatcgccgagttggagtcccgcgccgtcacctttaagttgccatttacaccagagccaagcgcgtattctccgtgggtagccaaagcgttttaccaattccacagggatacagttaagtcatgttttgcggtgttttcagatgcgtgcgccaccgcgggcatcaaggtggaggctgagtaa

SEQ ID NO: 217811 - DNA, 792 bp, Klebsiella pneumoniae
atggctaagaattcaatcgatgtatacggtgccagcggcaaaacaaacgtgctcaatttcgagcctgaaaacctgcacctggtcaccgataagacccacccactttacgatgagcgtgtacacctgccgatcgaggaagggatggtactgaacattgcggagctgggggtactggagccaatcatcgtctggaaagaccctgaaacggggctcacctgcgtagttgttggccgtcagcgcgttaaacatacccttgaggcaaataaactccgtctgaaagaaggcaaagacccactgcttgttcctggggtcgttaagcgcggatcagcaaatcagatggctaaatacatggtcagcgaaaacgaaattcgccgacctgatacgccgcttggccgggctaaaaaaatgtcagacgcgctcgaccgtgggctcgatgaggacgatattgcggtgttgtttggctgcagcgttcagaccgttcgagcaacgctatccctcctcgatgctactcaggccgtcagggaagctgtggaggctggcacagtcaccgttacccaggcgcgtcagttggcatcgcttaaacccgaggagcagcgggagaaggtctctgaaatcgaagcggcaactgctggcacaaccggccatgaaaaagcccggcgtcagcgtcagatcctcggtgaggcaaagcctcgcctgaaaacccgcaaagaaatcacaaaagcccttgaatctgccgagggtgaatatgcgagcgcactccgttgggtgcttggggaggccagccatgactga

SEQ ID NO: 217812 - DNA, 750 bp, Klebsiella pneumoniae
atgaaaaatatgattagtactggtagtgcgctggagcggctgaaaaaactcatccctccgggtgtagagcctaagtttggcagtgtagaggagtggagaacctggcaggccgaggaagggcgcaaacgctgcgaagaactggaaaaacaaaaccagcgtacccgtgctgaaaaaatattcggacgagcgggaattcaagatctgcatcggagctgcacgttcgcaaattaccaggtggcaggagatggtcagcgccgggcgctcacgatggcgaaaagttacgcacagaacttcggttcagggttcgccagtttcgtattcagcggagcgccgggaaccgggaaaaaccatctggcggccgcaatcggaaatcacctgctggctggtggtcgctctgtgctggtggtgactattcctgacctgatgctacgtgttcgcgagtgctacgacgacgggcagtcagaggcttcgcttctggacgacctttgccaggtagatctgctcatcctggacgaagtaggcattcagcgcggcagcagcggcgaaaaggtcattctgaaccaggttatcgatcgccgcctgtcgtcgatgcgtccggtcggcatcctgacgaacctgaactacgaatctctgacggacaccctcggcgcgcgcattctcgaccgtctccagatggacggcggcatgtgggtgaacttcgactgggatagttatcgcaaaaacgtccgccatctgcgcgtcgttaagtga

SEQ ID NO: 217813 - DNA, 909 bp, Klebsiella pneumoniae
atgcgtgactatgcaacagtcgcaccgcaattctggctaggaaaaacaggtcgcgaactgcggaaaaaaggcgctgaagcgcaggtggtctcgttttatctcatgacctcgccacacgcaaacatgctcggtttgtattacctgccaattctctatatcgcccatgaaacagggctgggattagaaggggctttgaaggggcttaaaagcaccatcgaagcggggttttgtagctatgacgaggacacagagatggtctgggtgcatgaaatggccgcctaccaggtaggcaaggcattaaagccaggtgacaaccgttgtgcgggggtcaggagtgagtatgcgtcacttacagaaaatccttttctttcattattttacgagcgttataaggatgattttcatctgaatgtcaaacgcgaatcgtgcccaacaccagaaggggcttcgaaggggcttcgaagccaagatcaggaacaggatcaggaacaagaacaagataaagatctttcggggcatggctccgccacccccccagatggtggatcctccgatgaagctccatctgaaaagccgaaaagcagttacccggaggaatttgaactggcctggagggaatacccaaagcgcgcaggaggcaatagcaaggtcgatgcgttcaaagcctggactgctcgaattaaatcaggcgcaacagcgcaggagcttaccgatggtgttcgacgatatgcggattacatcactgctgccggaaaactcaacactgagtacgtgaaacaagcgtccacgtttttcggtccctcaaagcactacgaggagttgtggagcttcgaagtaccaaccggtaaacgggatccgaactcaatatcccagccagataaattaattccgagtgggttcagggggtag

SEQ ID NO: 217814 - DNA, 189 bp, Klebsiella pneumoniae
atgtcaggaaccagtgctcaggtaaacatccagccaactcacaagtgttctttctgcggggtgaccaacatcgaggtttcgggcgttctaatcgccggccccggcgtctctatctgtcagaaatgtgtctttttgtgcgtcgaaattgtttttaaatgcgccgaaaagaccgataagccaacgtcataa

SEQ ID NO: 217815 - DNA, 231 bp, Klebsiella pneumoniae
atgaacggattagaaaaggccatcaaaaaagcaggcacagctagcaatctggcaaccctgctgggcatcaaacccatgtcggtaagtcgctggaagaaccgctacaaaggcgttgttcctcacgaccgggtattgccgatattcaacatcaccggcgttacgccgcatgagcttcgcccggacctctacccgaatccaactgacggcttgccgcaggaccgggggcaatag

SEQ ID NO: 217816 - DNA, 387 bp, Klebsiella pneumoniae
atgactgagaaaaaattacttaacccgattctcgtagagcgcctaacagaactaactcgccgcgggatgacaaaatctgatatggccagggttgcgggaattacgccgcagtccgtgaacggctggttcaagaaaggcgcgatgagtaaggaatctgcacttgcggtcgcagatgccgccggggtgtcagtgccttggttactgggagaagaggttaatgaagggagtgggctaaaggccgacgaacaacgtctgctcgaactctatcgacaattgcccgaagaagagcagcagaacatgctgcggatcgtatctctgcgcctgaaggagctcgacgagctgtacgccaagtacatggggcgcaggattaagggtgatggcgaataa

SEQ ID NO: 217817 - DNA, 204 bp, Klebsiella pneumoniae
atggggcatgaggatgagtttttcgcggagatgcacccgcagatagcgcgggttatcgggatagcggttatgcagctactggttgagaggcaggaaccgtcaagagaggcgctgatagagatgattcaggtgttgtggcaggaagaccgggccgatctggctgtggagttggctattgacgttctgtcgctaccaaaagagtag

SEQ ID NO: 217818 - DNA, 192 bp, Klebsiella pneumoniae
atgagcacgatgtttgccctggttctcaccgtcagcatgctgacgggcggtaatcaggatgtcctgctcggcgtttacgacactgagaatgactgcaaggcagctgcagaagagcaacacgtgaaagctgaatgttatccgctgaaaggtgtactggacgagcatccagccgggttcacggtgcaaatgtag

SEQ ID NO: 217819 - DNA, 3108 bp, Klebsiella pneumoniae
atggaatatttttatctgataaaagcgactcaaaaatcgggtaaagctgatgccgtaatctggcgcactaataaatctgaagctcgcgcccttctgcagctggacgtcgatctggaagacgctgggatcgaaacaggccgcggcaaagactatcaaaaaccaattcgcaccgatttcccggtattcaatgaccttccggcggaaggtgttctcgattactcatggtgcgaacgctaccagctcggcgatgatggtcgcacctgggctctgaagccaggtcaggtgcctgcggatcatcacatcgatgatgcaggagtaacctctgaggccgttactggcgagctggttgatgccaataccactatcgacgcggtacaagatgagaccgtggaaactttcggtagtgatgaatacaaggacgattctagcgcgctttttaacgtggcagaactcccctttcgcgcgcagctgctggcgcagtacatggctgaagaacgtcacgtttatcatatcagcatgcctcaccggcaggagctgtcagctcttgaaatggacactgataacgcagccgtccaggatctgattctggccgccgagaatgtccctgaaatcaaaaaatacgatatgccggcgctctggaaattcaccagcgccaataaaaaagtcttcccggaagggaaacgacatgagctcggcaaacgtatccagtttgcaaagttgtggttcgccacgaacgcgatcgaccgcggcattctcaccagggaatgggctgccggtaactgcatttcttcggttatgaaaacagatgcaggtacgaatgctggcggcggtaataaaaccgatcgcaatcctgactacacccatacccttgatacgctcgatgtagaaatagccctggccacaatgccaatggatttcgatatctacaatttcccggcatccattcatcgccgggctaaagaaattgtccagaaaaaagaaagcccgttcaaagaatggtctgctgcgctacgcaaaaccgcaggcatcctggactattcgcgcgctgcaatttttgcccttattcgtggtgccaccagcgatattcatcattttccggtaagcctgcagacctatatcaatgcgaacctgaccgagcataagcatgacgccccttctgctgagacgcttgaaaaagccggtcatgtttcatctgccgccgtcactctggacgctgtgaaaaaggctatcgatggagatgaaggtgtgcctgacctggaaactctcccaactgactttcaggtaattggcaccgaactggtgaaagaagctcaaaagaaacgccctgacgctaatcaggttctggccgccgaacgtggcgaatatgtcgaaggtatcagtgaccccacggatccgaagtggataaccgaagacctgaccaagcccaaacagcctgaagtttcaaacatgggcaatggtgttttttcgattgatggtctgatggatagccagacatcaccagcaccagcatcagcactttctatcgtggaccaggcgcgccagcgcgctgcagaagaaaaattacatccagctaattccggggaaaccaccagcaatgtgcagatggaaacggctcagccggtcgaagacgaaaatgataatgcggtatcagcaggcgaaggcgctgatgagcctcctgcgcaaacaactgccgtgaacatgagcaaaatactggctgaacgctgcccggatcttaccgccgaagtgctgaaaagccaggtttccgagagtgctcatagcgatgaagaggaagtggctgaacaagcagcgccagcatggccggagcatttcgagcctggtcgatatgaaggcgttccaaatgagatctaccacgccgctaacggtatcagctccacgatggttaaagatgcacgggtatcgctgatgtatttcgaggcgcgccacgtatctaaaaccatccagaaggtacgctcccctgttctggatatgggaaatctggtgcatgcactggcgctgcagcctgagcagctggaaacggagttcagcgtcgagccggaaatcccggaaggcgccttcaccacgactgcgactatccgcgcatttatcgacgagtacaacgccgggcttccggttttgctcagcgcagatgacatcaagagattcctggaggaatacaacgcgaccctgcccgcccaggttcccttgggtacatcagttgaagaaaccggccaggggtatatgtctttacctgcagagttccagcgcatagaagacggtcagaagcaaaccgccaccgctatgaaggcatgcatcaaggaatacaacgccaccctgccagcgactgttaaaaccagcggcagccgcgatgccttactggaacagctggcgcttattaatcctgacatggttgctcaggaagcacagaaggcgcagccgctgaaagtatcaggtactaaggcggatctgtttcaggccgtgaaatcggttaaaccggatgccgtgtttgccgatgagctgctggatgcatggcgcgagaaccctgaaggaaaagtgctggttacccgccagcaactggctacggcactggccattcagaaagcactgttgaatcacccgaccgccgggaagctactgacccacccgagccgcgccgtcgaagtaagctatttcggcattgatgaggaaaccgggctggaagttcgcgtgcgtcctgaccttgagatagacatgggcggcctgcgcatcggtgcagaccttaaaaccatcagcatgtggaacattaagcaggaaggcctgcgcgcgaagctgcaccgggaaatcatcgagcgcgattaccacctgagcgcggctatgtactgcgaaaccgcagcccttgaccagttcttctggatattcgtcaacaaagacgagaactaccactggatcgccatcatcgaggcatccgaagaactgctggaactcggcatgctggaatatcgcaaagcaatgcgtgccatcgcgaacggtttcgacactggcgaatggccggcgccgattaccgaagactacaccgaagaacttaacgattttgatatgcgccgtctcgaagcgctgcgcgtacaggcataa

SEQ ID NO: 217820 - DNA, 705 bp, Klebsiella pneumoniae
atgatttttaacgctgagatggtgcgggcaatcctcgacggtcggaagacgcagacccggcggcctatcaaatggaaacagactcggttcactgaaattggtgagcgcgaagacggtagcaaatggccgtggagcgaagacgcagagcatgcttgcgacttctggcacccatgcccgttcggcgccgtcggcgaccgcatctgggtacgtgaaacatgggcaacccttggcaacgaagacggctgctgtatcgactgggaaggcaacctttgcaaaggggatgagcgctcagctgcgaggatttaccgcgctagctgcgagcagagaccaggtgattacggcctatggtctattcccgatgacgcctactggaaaccacataccaaagagcacaagttcgaaggagcatggcgcccgtcaatccacatgccgcgctgggccagccgcattctgctggaaatcaccgacgtgcgcgttgagcgtctgaacgctatcagcgaagaggatgcgcgagcagaaggcattattgacggtggctgtcttaattgcggggaacctgagccatgcggatgcgccaacccagagcctgacgctaccgatgcttttgcctacctgtggcaatcaatctacgggcaggaaaactggaatgctaatccctgggtttgggttatcgagttcaagcgcgttgaaggcggtgcagcatga

SEQ ID NO: 217821 - DNA, 717 bp, Klebsiella pneumoniae
atgtctaatcagggattatctattaatgttgatgctgtctgggatgatgactgcattattggatcgagttatccgcagccgtctatcgcgagtattgccacatttggcagccagaactttggcgctatttttggggaagagccaaccatagtgggggcacctgtcatcaacacgtactggtttacgggtggtgttggtgcggggggttatgatctgaaagtcacggataacccggttaaaaccatgatggtgttactccggcctaaaagcactaccagagcgctgggcatgggtaactatctcggctctgctgtacaaccgcagggggatacgtttgtttttgaaccggcgattcctcaaatcagggggattgtggggcgctcaagcgggacagcaaccgccaccctcgcgactccactggacaccagtaaattccatctggttttcctcgatgtgaataactcgatgcttcagcttcataaaatgacgaacagtgagctggtatcgactgaacaggtcgctgttaccgcccgcgcaatccctgttccgaataagtcgatttatgctggctactcctatatcacgtcagattttttaggcgctgtggatattgcaatgacaggggtgtgggcgggcggaatactctctctggccgaaaaaatggatatggtagacctcgttactcagagctatgaaggaattttatcaatcgcttaa

SEQ ID NO: 217822 - DNA, 2160 bp, Klebsiella pneumoniae
atggccgaacttaacccgccattgggaacgacgacgcctgaaatcttcctggataacgtcaagcgcgctgacgaactggtgaacggtccggccggaacgattaacgaccgcggcggtgaaccgctcgatacctggcgccagatgatggcgaaaaacgatgaggtcaggcagaacctgatcccactcagtaagcagtatatgaatgaggcggcagcgcaggcagatatcgcgaatatccccgttggctccacgacctatgttcgcagtcaggacgtctgggcgctggctgatgagtacatgaataacggcgggatgctgcaacctaccgggcggaaaatgccatctcaggagctggtcaatatcatgactgaattgatcagagcaacgttcagccagaatgcgccagcgggtatgtctcttgcctttatggatgaacggaaaaattattcggtagggctggatgaggcgggccggttgcttgccgggtggattaaggcgaataaagcagaattaaaaaagctctcagcggatgaatttatttcgtcgatcatctcgtcgtcacgtctgaatatcgggaattccgctttatctgtagtggctgacggtaacgctgtttcagtttatgacacacttaaacggctttgctttgccattaataaaaaaggggtactgaaatcagggaaggctgagatcaacaatcttacgattgccagtatcttagggttaccagccaacgccagcatttctactgcgacattccgcgatttcgttatggcgtggcgtgatacgttaaatcgtccggctgtgggtatcaaaaaaaacggggcatttgctgcggggaaaattgaagcgaatcatggagaggtaaaatcgctgaaagccgaaactctggaagttaaagcgattatttccccggaattcctgcgctattttaatcagtccatttactcacgcctgccggatattgcccataaaatcggattcggacaatcgctcgctgcgggcgtaaatactcaggcgctgattacgatcgctgcgctgtataccgcattgcgttttatcggtggggtacgggcacaggatggctccggcacttcggcagaaaaccatgctcagctggttccctacgtcgagacgtataaaaacaccgataacggccaggcatgggaaaccccgatgggggccagcattcgcggctggtatgaactgatgattgccgagaactatggctttaacccggatgatctgatcattctgggttctgttccggcggagggcggtcagcccattgatgtgctggcggcgtatcccggaaagtacatgcagcgagttttcgatgatatcagttatggttacgcccgcgctcaggagctggggaaaacgtaccgccctgttgctatgtactggctgcagggagaggccgaccagactaaaggcacgccaaaagcagtttatcaggccacttttgacaaaatgcagaaactgatcgacgaccacgcatcggcagtgtgcggcgaagaggttcatgtgccgatttttgtttaccagttcagcagctggattaaccggacaccgaacacggcctatccgacaatcccgatggcgctgctggagctggcgcagacgcgtgaaaatgtctatctcactaacccgatgtatatccacgattacacggatggcgcacacctcaccgcccgcagctcctatattcaggggctgtatatttcagtgatggaaaagcgggcgctgattgacggcaaagcggcaaaacctctgatgccggttagtcatcaacgccagggccgcgccgctacggtgtggctgaatccggtgggtcggctgagctttgataccagcattgtttctgatccgggtaattatggtttccggctgctgcaccctgacacacgcgcgattatcccgctgaccagcctcaatatccgttatgacgcggtgactgtctcaacggcagcggatatccctgccggggccattcttcagtatgcctttcacggcggcaccaccggccagtcaccgggccgcctgaccgggccgcgcggttgtctgcgtgacagccagggcgacattatcagttttacccttaatagcgaggttatccgtatggataactattgcgtcatgtttgaaatcacgttgtga

SEQ ID NO: 217823 - DNA, 153 bp, Klebsiella pneumoniae
atggcgaaaaatgcagcggcaaccaaacgcaacaacagtaaaattcacgctcgtaagtttctggcgacaccagagggcaaagcatggcttgagcggaagaaggcagaagaggcggagttgaaaatggtcgcggaggccaagagatttatatag

SEQ ID NO: 217824 - DNA, 267 bp, Klebsiella pneumoniae; identical to SEQ ID NO: 192545

SEQ ID NO: 217825 - DNA, 219 bp, Klebsiella pneumoniae
atgaccaaccaagccaggcacaatcaagtcgtcaaaaatgatgtcgaggctaacaatcgttatgagtctgcaaactcatggtggtcatgcttcataggccggattcgcacacgtgagtccggtttttttatgcctaaaattcaggcgcgtgtactacatgtggggtgggttgatcgttcgtacccccacatatccgtattctataaaggattcttctga

SEQ ID NO: 217826 - DNA, 561 bp, Klebsiella pneumoniae; identical to SEQ ID NO: 192543

SEQ ID NO: 217827 - DNA, 156 bp, Klebsiella pneumoniae; identical to SEQ ID NO: 197724

SEQ ID NO: 217828 - DNA, 459 bp, Klebsiella pneumoniae
atgaacaaaccaaaatcccaacgcatcaccccagccgccatgtctggcgagcagatcgcagacgcgatcctttacggcacgtacaccaaaactgcgctttggtcttttattagccgaagtggtggtgctgacgccgcacacgctaagtatccgcaactggccgttgcacttcatatcctgaaacaggaaaagaagaaggcaaagagcgcccgagcggtcaagacgatcctcaagcctctatcccggcaatacgctgacggtcagtcactgactgagattctggccccggtgctccagggttaccgccgcctctatagagagaaactcaatctcgatatgacgccggaacaggtgattctattcctggttgccacccacggcgtagagaacctggaacaacacggttacaggatcgcgggcaactttcctactgctaccacaccgatcaccactctttaa

SEQ ID NO: 217829 - DNA, 210 bp, Klebsiella pneumoniae
atgaaactttcgctcgatgacgaaacctacgcgattctacgcgaggaatcggatcgcctgggaatgcccgttccccgtatgatccgcatcatgtgccagaacatggcgcagaatattaaaaaaagagacaccgcgaacggcgaacgactgataacgagccaatcactaacgaacccacagggattaaataatgagcaagacagaaactaa

SEQ ID NO: 217830 - DNA, 906 bp, Klebsiella pneumoniae
atgagcaagacagaaactaacggcaccgaagataacgacgtaaccgtcgtcgggacatttgaccaaatccacacggagttacgcaaggttcacaatatccgcacaccatcgggagctgtggtaaaaatggacggtgacgataagatttggtgggcgtacttttatactttttcgcttacaaaacgaaaaaaatggtgtgatttttcactccaaaagatcgccgatgagcacgatgtgagcacgaaaactgttactcgtaacgcaaagcggctggttgaaatgggagtgttagaggttaagccaaaggaacgtggccgagggaatatctacataacaatttctattcctgagttgatcgcaatgaagaccagcgagaaagtcacgcccaaatccgaggagaaacagggaaatggtaatggtcatgaagaggccgcaatatcgcaggcagcaaccactgctacaccatcaactgatgcgcccgcaggcacgcccgctgatcagagtcctgacctggcctctgagtctgccacgcctgctgttggacagcgcgatagcgtggcatttgacggcgatgctgacactgctgacactgatggtaataatgcagtgaagcagccagagatctttgatgatcgcggcgtcatcactgaggcgtttatcaacaacctaaacagcctgacaggatacgacgaaccacgccgcaacgatgacggcacattgcagagtttccgttacgtctatgggatagcacagcaaacacaggataagcgggacggtgttaccgttcgccctcttgatgggtacatggcagaggcccagccttggcacattccgccgcatctgttatcgacaccgataccgataccgataccagagacggaatacgaagaagatccaaatttttaa

SEQ ID NO: 217831 - DNA, 555 bp, Klebsiella pneumoniae
atgacgaatgatgatcgcaacggcgtaagcgccgaaccagaaaagattgacccagaagaacaactcccagaccaacccgacccagaattacctgacctcacccgcctatataaacggcgttgccgcgatggcaacgttatgcagaggtgcaagcacatgttgatcgcgggatattctccaggacgcgtggcattactgctgcgtctgccgctggaaaaggttaaagaactccaccaggcgagttacaacccgcgatgtaggcgctttgcgaacccgaacaacgggaaattaataataacaatgtggcacgagggcgcaacgctcgtggaggtctgccagacgctgggcttgccgttgttcactgttgtgatgtcacttcggcagaatggcgttaccaatgccgcaatggctccacggatgccagagtacaatgatccgctgtatgttgaatatcggcaggttgtggcccgaaaagctgcgagcaaatcgcggcctattcagataaaccctgttcgacgcatatgcaaatccgcaggaaaaactgcgacagcctga

SEQ ID NO: 217832 - DNA, 345 bp, Klebsiella pneumoniae; identical to SEQ ID NO: 197728

SEQ ID NO: 217833 - DNA, 1038 bp, Klebsiella pneumoniae
atggctcttacaaaagatttttcatacgtcgattacagttcgacatttgcgaacgttccggctcgcaaccgtatcttaaccaacctgaacattttccagcgtgacgttactgaccagtttaaaaccagtctggacatcctgaatgctcaggctgacaccattgccccggcagcgaatcgcttttccagtgaatggggaagcacaccgaagccaaaagcagctaaccatctgatcgagcttcctctgttccctacgcaggatgtgatcacggcagcagacgtgcagccattccgtaaaatcggatcgccgctacaggccagcgtgctggatgctgtaactgctaaaagcctggctcactatgaacgcttcgctgcgactcgtgaacgcatgtttgctgaaagcctgttccgtcatcgagtcaccgatatggaatacaccgcagatggcccgatcctggattggtcagaggaatttggttacgaccagagcaccggaaccatctacacgggggttgctgctgatccgttagaatccctgtccgatgaggtcagctccatgaagcgccgcatgggtggcttggcttcgctgctgaaaggcatctacctgttcgcgggttccaacctgttcaagaagctgcgttttaacccatcggttcgccagcttgtacagtatggtgtgcttgatcctgatggtctggtattcaataaagagatcaacccggcattcagctattacgtcctggataacgtgaccgtggtcgagatgtccgataccgatttctacggcatcggggcagatcaaggcttcatggttccggtcttcgagaagccgttaagcgctgatcaggcatcaccatttaccaatttggtagggccaacgagccgcaaccttgagcttgcctttgctgacgtggtggacttccgcatctatagcagcaccgacgcgtataagaacattacgctttccagtgagttcagcctgttgccgatttgctaccgcccggatctggtgaccgccatcaccaacgatgcttcgtaa

SEQ ID NO: 217834 - DNA, 210 bp, Klebsiella pneumoniae; identical to SEQ ID NO: 197729

SEQ ID NO: 217835 - DNA, 123 bp, Klebsiella pneumoniae; identical to SEQ ID NO: 197730

SEQ ID NO: 217836 - DNA, 279 bp, Klebsiella pneumoniae; identical to SEQ ID NO: 197731

SEQ ID NO: 217837 - DNA, 1236 bp, Klebsiella pneumoniae
atggttcacaagagggcaaagccgaaggacaaacgcgatcgttatctgattctcgatccgtgtggtgtgtacatggtacgcatagctgtcccggcatacatggcggcatacttcggcaataaaacatacttcatgaggtcaacagcgactcgcgacattcgtcaggcacgtctattccgggatgccatcgcattggaatggtacaagctgcgcgatcagcttaaacctgtacgttcaggttcacgggttgagcagatccttgatgaacttcgaggtattggcaaacaagcaaaggacacaccgcccacacaattgaacttccccgctcaagtgcaggcttgcccttctcttctggcgatgcgggatcagtacattctgcaattcagcgagaaacgtaaactgaccaccctgtcaaagacgaataaagccgtcgaggtcttattgtcccatcttcgaaagcgcgatattccgttgaaagatatcaaccgaaccatagttactggctggctggataagctgaaaagcgacagagcgccccagacgattcaaaactatatcagcgccctggctcaaatctgggatctggcccgtaaccgatatcacgacgcaccacaggataacccctggcgtggtcatggtctggaagctaaaagcagcaagataagctacgaagttttcacccatgctgagttggcgaaggtcttcgctgcaatggatggtgatgaagagatgcaggcggtgacgctgatcgggatgtacagcggcatgagattgaatgagatctgttctttgtgtgttgggaacattcgcgagattgagggtgtactttgcttcgaagtgacagaggggaaaaccaaatcagcggcccgtatcatcccggttcatagccgcattatcgatctggtggagtcccttctccacaagccccataacggctttcttttctaccgtgcgtcaatcattgaccgtgcagacggaaagcggtctacgtggcatacacagcgtttcacgagggctaaacggcaggcgttgggtgaggaagaaacggagcggaaggtctttcatagcttgcgacatgaatttgcccaacagcttgatcggaaccaggttccagaagacaggattgcattgttgatgggtcatgagcgcgggaaaacggagaccttcaagacttactcaaaacacgcggcgtcaccagtagagctattaagatatgtcgagttgattcgttattaa

SEQ ID NO: 217838 - DNA, 1263 bp, Klebsiella pneumoniae
atggctctaacagatattaaagtcagaacagccaagccaacgaataagcaatacaagctgaccgatggcaacggtatgcatcttctcgtccacccaaatggttcaagatactggcgtctgcagtaccgctttggtggaaagcaaaagatgctggctttgggtgtatatcctgatgtgtctcttgccgatgccagaactcgtcgtgatgaggctcgaaagttgttggcaaacggcatcgatccgggagacaaaaagaaaaatgataaggttgagcaggaagccgctcgtactttcgaacaacttgctattgagtggcacgccacgaataaaaagtggtcggaagaacatagccgacgagtgctgaaaagcttggaggacaatctatttcctgccattggtaagcgaaatattactgaactcaaaactcgagatctgttagcccctatcaaagttgttgaactgtcagggcgtcttgaagtggcttcacggctgcaacagcgaacaactgcaattatgcgttatgccgttcagagcggtttgcttgactataatcctgcgcaggagctggctggagcggttgcttcaagtaacagacagcatcgagcagcccttgaattgaaacgtatccccgagcttcttcaacgcattgatagctacaccggcagacctttaactcgccttgctgttgagctaactcttcttgtcttcatccgttccagtgaattgcgctttgctcgttggtctgaaatcgattttgaatcatctatgtggacgattccagccgagcgagaagctattgacggggtaaagcactcccagcgtggatcaaaaatgcgtacgcctcatttggtaccgctgtctcgccaagcgttagcaatccttagacaggtacacaaacttagtggagatcgcgattttgttttcattggcgatcacgaccatcgaaaaccgatgagtgaaaacacggtgaacaaggcgctgcgcgttatgggatatgacactaaggtagaggtttgtgggcatggtttcaggacgatggcatgtagctcattgatagaatcgggattgtggtcgagggatgcggttgaacggcagatgagccatatggagcgtaactctgtgcgcgcagcttatattcataaggccgagcatctggatgagcgcagactgatgctgcagtggtgggctgattttcttcatgcgaatcgtgagaaggcggtgagtccgtttgattttgcccagtatttctctgataagtcttag

SEQ ID NO: 217839 - DNA, 1497 bp, Klebsiella pneumoniae
ttgaacgaagtaactatcaatctgagtcagcttgaaaaccatctttgggagtcagccaatatcttgagaggccccgttgatgctgctgattttaaaacatatatttttcctctacttttctttaaacgcatctgtgatgtatgggatgaagaattcaaagagattcttgtcgaatcgggtgatgaatccctggcacactttcccgagtcccatcgcttccagatccctgatgactgccactgggatgatgtgcgctcaaaagcagtgaacgtcggtgctgctctccagcgggctatgcgtgagattgaaaaggctaacccagagaccctgtacggcgtttttggtgatgctcaatggtcaaataaagaaagactttcagatgctttgcttaaagatcttatcgagcacttttcaaaattcccatttggtaataagaacatcaactctgatctacttggtgatgcgtatgaatacctgatcaagaagtttgcagacgcaacgaacaaaaaagccggggagttttataccccgcgaagcgtcgtccggttgatgatcgacatgctctctcctgaggaaacggataccatttatgacccagcctgtggtacaggcggtatgctattagcagccgtacagcatgtgagagagaagcatggcgatgtgaaacgtctttggggcaagctctttggacaagaaaaaaatctgacaacatcatctattgcccgcatgaacctgttcctgcacggcatagaagactttcaggtggttcgcgatgatactttacgtaatcccgcttttttcgaaggtgaccaacttgccacattcgattgcgtgattgccaatcccccattctcacttgaaaaatggggtgatgaactttgggtaaatgatccctttgggcgaaactttgctggtcttcctcctacaagcagcggcgactttgcttgggttcagcatatggtcaaatccatggcagaaggctcggggcgaatggctgtagttctgcctcaaggggcattattccgcaaggggacagaaggtagtattcgccaaaagctattacaaatggatcttattgaggccgttatagggctagcccctaatttgttttatggcaccggtttagccgcctgtattctggtattgcgcaagaaaaaacgtgcagatatgagtcgtaaggtcatgattgcggatgcttcccggttgttcaaacgcggtagagctcagaactttttggaacctcaacatgctgctgaaattttacagtggtataaaaatttcagtgatgttaaggacgttgtacgtattttagacttggcagacattgaagctgaagactggacgttgaatatttcacgttatgtcctgcctccttcgcaagacgatattccttcacttccggatgctgtcgaagcgttcaaaacggcgcttactcgttgtcgcaatacagaagagcgacttgcccaggtcatggacgaagggggatggttgaaatga

SEQ ID NO: 217840 - DNA, 1512 bp, Klebsiella pneumoniae
atgagccgtattactcagcaggaactggaaagctacctatggggtgcagctgtactgttacgcggtttgattgatgccggagactacaagcagttcattttcccattattattcttcaaacgtatctctgatgtctgggacgaagaataccagactgctcttgaggcatcagatggcgatctttcttacgctcagttcgccgaaaaccatcgtttccagatccccgagggggcgcactggaatgacgtacggcaaacgccaaagaatgttggcgctacgatccggcaagccatgagggatatcgaatctgccaacccaaacatgcttgaaggcatatttggcgatgccccttggactaatcgtgaacgtttacccgacaaaacgttaaaggaccttatcgaacatttctcgacccaagttctgtcggtcgcgaatgtgccagaagatgaactgggtaatgcctacgagtacctgattaaaaagtttgccgacgactccggtcataccgctgccgagttctataccaatcgcaccgtcgtccatttaatgactcaactcctggctccacaggtaggggaatcgatctacgatcctacctgcggcacaggcggtatgttgatttcggctctggacgaagtgaaacgttccggcggcgaatatcgtacgctcaagctttatggtcaggagcgaaatcttatcacctcttccattgccagaatgaacctctttctgcatggtgtagaggacttcgaaattattcgtggtgatactctggccgaaccaaagcatattgaaaacgatcgcctgcgccagtttgatgtcattctggctaacccgccttactctataaaacagtggaacagagagtcatggagtagcgatccgtggggacgtaacctgttcggtaccccaccgcaggggcgtgctgactatgcctttcagcaacatatcttagccagcctgacggaaaaagggcgcagcgctgcgttgtggcctcacggtgtattgttccgtaacgaagagcaatcaatgcgtgccaaaatggttgaacaggactgggtagaggccgtgattggcctaggtccaaatttattctacaactcgcccatggagtcatgcgtactagtctgcaaccgcaacaaacctgccaaccgacagggcaaagtgcttttcattgatgcagtacgcgaagtaactcgcgaacgtgcgcaaagctttctaaccatggcacaacaacagcgtattttgtctgcataccaggcatttactgacgagcccggatttgccaaagtcgccacgttggcggatatcgacgctaatacaagcaatttatcgatcccgctttatgttaagcggtctactggtatgtctgctaccgatgccaatggtgagaccctgtctttgaaaggtgcttgggaacagtggcaaagtgacaggcatactttttggcaacaaatggacgcgttggttgattcgctggatagcctggcgacgacgggagatacgaaatga

SEQ ID NO: 217841 - DNA, 1926 bp, Klebsiella pneumoniae
atgaagcttgaaaccattcgcctatcgggtttccagtcctttggacaggaaccgaccgagttaaatctggaagagattacttatctcattggccctaacggatcgggtaagactgcagcacttcaggcactgtgtcggctttttgcttttaatcctgctttgcggcgtattctgcgttcggattttcacgttcctttcaacgaagagaatgcgcctggtgagcgcctgttatggatagaagctgacttttcctttccggaattagctgaagatgtagataacagtaccgttgctccccattttgggcatatgcggcttgatgaagttgatggtattccacgtgtgcgcttccggcttacggcgaccatgggaccggatggggacattgaagaaaatctggtatatgtcctggatgttgatgcagacggtaatcctcaaaacacgccacaagttacacgagcagatcgtaaccatattcaggttcactatttgcctgccagacgcgatccggcggaccatataacttatggagcgaacgcattgcttggacgtttgttccgggcagtgcgctgggacaatgaacgcagtgcgattagggcgctaacagatcagattagcgatagcctggctactaatccttccgttaatgcatttagtgagagcctgaaagcgatctgggcttccctgcacaaaggttcatttttcaccgatcctaaaatcacgtttgcagcttccgagattgaagcattgctacggcatatgtcagtctcatttgctcctgaccatgagggttcgctggtggacttctctcggttgagcgatggccaaaagtcgatgctctacctttcccttgtattgtcgtctcaggcgataggtagcgcagtacttgccgggcgagatacttcttttgatcctgataaattgcgtccgccggtctttactttggttgctgttgaggagcctgagaatagcctttctcctcattacttaggacgcattgtcagcaccttgaataacatggcgaaaaatgcggatgcgcaagcgcttattgccacccacgcgccatcaatgctacggcgtgttgcccctgagtttattcgttacctacggcttactgaggagaggaatactcggattacccatatcaagttgccagctaaaactgatgatgctcataagtttgtacgagaggctgttcaggcatttccggaagtctatttctcgcgcctggttgtgctgggtgagggggatagcgaagagatcgtgttgccacgcctgctacaggctaaaggtgcgcccgttgacgagtcggccataacgatagccccattgggtggaaggcatgttaatcacttctggcgtttactttcagcgctgcaaattccttatttaacactgcttgatcttgatatagctcgccatgcagcaggttgggggcgcatcaaatatgttaatgatcaattcgcaatatttgagccagacagagttcttcctgtcaactgtccgattccaagatgggatgatagtggcacacctgtacgaacccatcatttttttaataatggcacccaggatacttttgctgaattggagaataggtcagtatttttttccttcccaatggatttggatttctccatgctcctggcatatcccgaagcctatagtgttattagggaggaaccagacgagtcaacaatcaaagctgtcctcggaaaaagccaccatgattcatctcaatacagccaagacgaattgaggttatttagtacttatcaccgtcgctttaaacttggcagcaaaccagcagcacacattgaagcgttagctcagctaacagatgcgcaattacttggaaatatgcctgcgtcattaagcaggttagccgatactgttattgcaagactcgcggagctgcccgaatga

SEQ ID NO: 217842 - DNA, 1671 bp, Klebsiella pneumoniae
atgattgctgttgaagcctggctacccgctgatggtttgacgcttgaacccaatgcattacgtgcggtaaaggagtgtgagcattgtcttgcgctcactgcagggcctggagcaggtaaaacagaaatgcttgcccaacgagctgactttcttttgcgtactggtacatgccgttatccgaagcgaattctggcgatctccttcaaagttgacgccagtagaaacctgaaagaacgtatccagcggcgatgtggccctgttttggcttcgcgtttcgacagctacactttccatgcttttgccaaacgtattatcgatcgcttcagaccagtactggtaggtcaagatgcgttagatgcggactacaccatcgttgaccgtaaatcaggggcttcccgcacccagatagaatttggcgatctggtcccactagcgattaaaatattgcaatgttccagaatggctcagaacgctattcggcagacctatagcgatgttttcctagatgaattccaggattgtacgaatttacagtacgacctggtcaagcttgcgttccagggaactcgtcttcgtctcaccgcagtgggtgacaccaagcaaaaaattatgggttgggcaggcgcattggatggtatttttggaacctttgttagcgactttaatgctgagccgcttaacatgtatcgcaactttcgttcaaagccaagacttttgcaggtacagaacgatatcattcgtcaactcgatccagcatctgttatgccagatgagctgttagaaggtgacgaaggcgaagtttacacccaccattttactgacagtcgggaagaagcggtttgtttagcgaatgttatacatgattggatcgaaactgaacgattaccgccagctgaaatcgcgattcttgtctccaagcagttggatctctacgctgaccatcttatggctgagctggaaattcgcggtattccataccgtaacgaacagcaaatgcaggatattacggttgaaccggctgcacgcttaattgtcgattatttatcctgtctttacggccagcgggaacctaaagcctggattcggttgatgaaccagctaattccctttgccgatgaagaaatccagtccagcgcgcgaaaagagcttgatcgtttaattaaaaatcagcgcaaagaagcagatattgcggagctgattgactcacgcttctctgattggcgggaatgtgttagcgccttcttagcacatatcagttccgaaacgttgatggcgctatcgcctgactacgaatcacaaacgcgcctacgagaagtgattcgtgatactaaagtacggattgaagagctgctccaaatagaaccagatttgcctaaggctctggagcggtttgtggatgatcaggccgttcgcattctgaccatccataaaagcaaaggactggaatttgactctgtcattatcatggcagttgaaaatgagactttctttggtaaccaggatgaaaatcgctgtgcgttttttgttggcgtttcgcgagcaaagaggcgattggttttgacgcatgctgatcggcgagagcggcctgctaactataccaaacgctgggatgttgttcgttctgttcaatttgagtaccttggctatatcacgccatttgtaaggcaataa

SEQ ID NO: 217843 - DNA, 1185 bp, Klebsiella pneumoniae
atgaaaaataaatctcttaagccaggttggcgttgggttaagtttggtgatgtagttcgcctgcccaaaacaaaaagcaaagatcctttagccgatggttttgagcgctatgttggtttggaacatctggaaccgggggacttgcgtattcgcagttatggcaacgtggctgatggagtgacctttaccagcgtttttcagccaggacaggtattgttcggtaagcgccgtgcctatcagcgtaaggtagccgtagctgatttttcgggggtgtgttccggcgatatttatgtgctggaaactaaagatccacaagtattattgccggaattacttccttttatttgccagaccgaggcattctttgagcatgccgtcggaacatccgcagggtcgttgagtccgcgtactaattgggtaaatttggcggattttgagtttgtgttaccaccaatttcagaacaattatctgctattactgcgcttaaggcagcaatagatgtttgttattcccttgaagctacttatattgctgctggtcgaatggtgcaagcatttaaagattccctttccaaacgatataactcaaatgatattaaatcttatctgttaaaagaacttctattaggttcgccagatagtggttgtagtgctccgcctaaagatgtctctacggggtattttgtgcttagtttatctgcgctatctcgcgatggttacatatctgaagaatataaacccgttgagcctacaagtaagatgcttgctgcaaagctagaatttggtgatatgttaatctctcgttctaatacggttgaacgggttggatatgtaggcatttttagtgatgaacgtgatgatgtgtcctttcctgatacaatgatgcgcctcaggccaaatccttctctgattattccagactttcttgaagccttattacaaacaacatcttcacgtgaatacctaatgcgaattgcggcgggcaccagtgcaagtatgaagaaaatcaatcgtgctaatttgttacagatgcccttgaaagttccatctattcatctccagaatgaggcgcttaaagaactacggaagcttaaaggtactgtgacggccctgaaattgcggtgggacggcgctttgcaacttgcgagacaaattgcagcaaaaacaatagaaggagatgcatga

SEQ ID NO: 217844 - DNA, 2955 bp, Klebsiella pneumoniae
gtgttcactgaatctaatacagtcgaagcctatatgcgtgatattgtctctggctctgctaaaaccgctgcaacacatagcctcaactgtaacggaatcgggtggacctacgttgcaccggctgaagttccacgccaaacccaggaagttctggttgaaccttggctacgagacgcattgattcacctaaatcctgaaatcgccgcacaacccgatctcgctgatgaagtactctacaaactacgtgctattgtgctgtcggtgcgttctgacggtttaatccgtgctaacgaagagatgactgcctggatgcgcggtgagcgctctatgccgttcggccaaaataacgagcatgttccagtgcggcttatcgatcttgatgacctgtcacagaaccagtacaccgttacccaacaatttacctaccgcgcaggcgctactgagcgccgcgccgacttagtgttgctggtaaatggtttgccactggtactgattgaggccaaaacacctgttaaaaagtgcattagctgggttgatggtgcaatacaaatacatgacgattacgaaaaatttgtgccagagctgttcgtgtgcaacgtgttctcagtggctactgaaggtaaagtgtttcgttatggttccatcggcctgccggttaaggactggggtccttggcatttggatgatgtcgataatcagcaccattctctaaaatcgcttaaagtctctgctgaaagtatgttaagaccccaggtactgctggatatcttaagcaacttcaccgtgtttgctaccgacaaaaaaaagcgccgtatcaagattatcagtcgttaccaacagtttgaagccgccaacaaaattgttgagagggtgctggcaggttatccaaagaaaggactaatttggcactttcagggatcgggaaaatcactactgatggtgtttgctgcgcaaaagctgcgtatgcattcccggctgaaaaacccaacagtattgattgtggtggatcgcatcgatcttgatagccagatcactggaacattcactggcgctgacattcccaatctggaaaaagctgatagccgggagaaactacagcagttgctggcgcaggatgtacgcaagattatcatcactaccatcttcaagtttggcgaggccaccgggtgcctgaatgatcgtagtaatattatcgcgctggttgatgaagctcatcgcactcaggaaggtgatcttggtcggaaaatgcgcgaggcgttgcccaatgcttttctgttcggtttgacgggaacccctattaaccgggccgatcgcaataccttttatgccttcggtgcagaagaagatgacaaaggctatatgagtcgctacggctttgaggagtcgatccgcgatggggctacactgaagctgcatttcgaacctagattaattgagctgcatatcgacaaaacggctctggatgctgcttacaaagaccttactggtggactgtccgatctggataaagataatcttgcaaaaacagcggccaaaatggccgtattagtgaaaacgcctgaacgtattcgcaaggtgtgcgaagacattgttcaacactaccaaagtaaaattgagcccaatggattcaaaggccagattgtcacatttgaccgggaatcctgcctgctctataaagccgagttggacaagcttttgccatcagaagcgacagatatcgtgatgtctgttcaggcatcagataagaaagagcatcctgaatatgctccatacgatcgtacccgtgacgaagaagaaagattactggatcgcttccgcgacccagcagatccgcttaagctcatcattgtgaccgctaaacttttgactggttttgatgcgcctattctgcaagttatgtacctcgataaaccactgcgcgaccatacgttgttacaagctatctgccgagtaaaccgcacctattccgagcaaaagactcatggccttattgttgactatctggggatttttgatgatgtagctgcagccttagaattcgatgatcaaagtgttaagcagctagtgagtaatattcaggagctgaaagagaagctacctgaagctatgcagaagtgtttagctttttttgttggctgtgatcgaacgttgaaggggtatgaaggtttgattgctgctcagcaatgcttgcctaacaacgaagtccgagacaattttgcttctgaatacagtgtcctttcccgtatatgggaagcgttatcacccgatgttgttctcggtgtttttgagaaagattacaagtggttgtctcaggtttaccagtcagtccaaccttctagcggccatggaaaattaatctggcactcgttgggggccaaaactattgagttaatccatcagaacgtccatgtcgatgcagttcgtgacgatcttgatactctagtgcttgatgccgatctgctggaggctgttctttcaaatcctgaacctaagaaggccaaagagattgaaatcaaactcaagcggcggctacgaggacatggtaataatcccaaatttaaacatctctctgaacgacttgatgcgctcaaagatcgtttcgagtcaggtcaaatcaacagtattgagtttttaaaacaactgctcgaaatagccaaagaaacactacaaaccgagaaaacaacgcctccagaagaggaattggatcatggcaaagctgctttgaccgaattattcaatgaagtaaagacagctgatacaccaattatagttgagcgagtggttgcagacatagacgaaattgttcgtctggtccgttttcctggttggcaaagtacgctagctggtgagagagaagttaagaaggcgttacgaaaggcactattcaaatataagttacatgcggatgacgaactttttgagaaagcatatagctatattaggcagtattattaa

SEQ ID NO: 217845 - DNA, 246 bp, Klebsiella pneumoniae
atgaatgtttacaagttgaacgtacggacacaaggttactggtttttaaacaaggatgagtatgagcaacgtactgcccgccgctcgccgtggtataaagtgagtgatgaagggaagccgcgctattttgctatttgtcctgcatgtaataatcccatacagatcattgggttctacaagttaccatcaaatgttaattctccatttgccaaacactatgggacatcagtgatcctacccgcgtaa

SEQ ID NO: 217846 - DNA, 906 bp, Klebsiella pneumoniae
atgctcccacacctcaatgttaacggtcaccgttatatcccctcactcgatcagcttcgcaaacaggcccgtttcctcagggatcactgcaatgttcaattgaaccatgcctatgagatggtcgcgtatttttatcggttttctagctggggagatctgctaaatcacatcaccagtgataaagctatcgaagagcagcaaatcgttgctcgcatgcgagaagaactccagacatacagaaaccgtctgccagcatctgaccggcaacgattatcccaattagcagcgctaaagggcaccttaacagaggctgtggtgaatgaccgtataaagacactaaacgacctggacatcgttcagatctataattgcctgtataacgaagaatactggggagagccaactccggtttcctggtatgaagtactcgatgaaacagacagatgtttggtgttgcttgccaaacggacagctctggcgggccatatcaaaacagtcaatcctcatattagctttccatggtttggattcagaatgtatggatatttacatattgatggaaacacactgaactacaactgcagagagctggacagctacctatggccctcagaaaaaaaatacacaatggttttcagcaggccgtggtttgctgcgtatgtcaacggtttcatccgtatgcagcttcattcactatgcagttctggtttctcagggaaaatctcatttgagagaataaataatgtcgatttggtttcgggaccagtaagacaaccatacttttatgatgaaataccaagttcatcaatgaacacggttattgaaaatttactcagattgggaggcgagagggacgccagaaagcaaaatataacattccgttttggcaacggtgagatgtattga

SEQ ID NO: 217847 - DNA, 819 bp, Klebsiella pneumoniae
atgaaattagccagccgctttggccgagttaaccagattcgccgcgaccatccactgacaaatgacgagttgatggcccatgtacccagtgtatttggtaccgacaagcacgaatcccgctcggaccgctacacctacattccaacaatcacactgcttgatagcctgaagcgggaaggtttccagccgttctttgcctgccagacccgagtgcgcgatcagagcaagcgcgagcacactaaacacatgctgcgcctgcgccgtgaggggcaaatgaccggtaagcaggtgccggaaatcattctgcttaacagtcatgacggctccagctcataccagatgttgccggggctatttcgtgcagtctgccagaacgggctgatctgcggtgagagctttggtgaggttcgtgtgccgcataaaggcaacgtggtggagaaagtcattgaaggggcttacgaagtgctcgggatttttgaccgggtggaggagaagctcgatgccatgcagtcgcttttgttgccgccaccagcacagcaggcgatggcgaaagcggcattaacctaccgctttggtgaagagcatcagccggtgacggaatcgcagatcctttccccgcgccgctggcaggatgagagcaacgacctgtggaccacttaccagcgcattcaggagaacttgataaaaggcggactatcgggacgaacgacgaaaggccagcgtgctcaaacccgcgctgtcaaaggtatcgacggagacgtaaagctcaatcgcgctctgtgggtgatggctgaaaatatgcttcaacttgcttcataa

SEQ ID NO: 217848 - DNA, 474 bp, Klebsiella pneumoniae
atgtcagagataaatctacctcctgatcttccggtaactgaagcacgcaccattcgtcgcgctctccgcttactggaaaaatatcagcgccagcctggcgaacaatttaattccactaccttcaccaaaacctggctacaactgcgtcttgccctgcaggagcgcgaagtttttcttgttttatatctcgataatcagaaccgtcttctggaatgcgagacgctctttacgggcacgattaaccataccgaagtccatccacgcgaagtggtgaaactggcactacgccataacgctgccgctgtgattctggcccataaccatccctccggagagacagaaccgagtaaacaggatcgaaacatcactcaacatcttgtgaatgcgctggcaatggtagaggtgcgggtgctggaccatcttattgttggcatcggcgatgtgctttcttttgctgaacgcggctggatatga

SEQ ID NO: 217849 - DNA, 222 bp, Klebsiella pneumoniae
atgaaaatcatcgataaaaaggccgcgatggcgattcagcggcagcatccgcattcccggatctttcgctactgcacgggcaaataccagtggcacggcagcgccagtcattataccggtcaggatgtcgcggagatttccggtgtgctggcggtttacgcagaacgccgtcgtgacaaccacggtccgtatacacgcctgatgtgcattaccaccaactga

SEQ ID NO: 217850 - DNA, 324 bp, Klebsiella pneumoniae
atgcaaaattcatggggactgaagcgcgacatctcgccgtgcttcggtgcaaggcttgtgcaggaaggctgtcgcctgcattttctggcggaccgtgcaggtattcacggtacgtttgccgatgaggaggcgctgcgtctggatcaggcgtttccgctaatgatgaaacaactcgaattgatgctgacaaccggtgaattgaatccgcaccatcaacattgcgtcacgttgtatcataacggactaacttgtgaagcagatactctcggctctcatggctatgtttacatcgttatttatccccaggcatctacaactaggtaa

SEQ ID NO: 217851 - DNA, 321 bp, Klebsiella pneumoniae
atgcacattgcatctgtaccggccacggtgccggtttcgtcacgcctgtcgcccttacaggtctggcagaaactgttaatgtatctgctggagcaccattacggcctcacgctcaacgacacaccattccatgatgatacggccattgcgaagcatatcgacgcgggaatcacgctcgccgatgcggttaattttctggtggaacgttatgaactggtacgcatcgaccgcaaaggatttacatggcaggagcagacgccattcttgaccgctaccgatattctcagaaccaagcgagctaccggattaataaatacttaa

SEQ ID NO: 217852 - DNA, 1269 bp, Klebsiella pneumoniae
gtgaaaaaagaattaccattaatcgcacttggcattattgccgccgcgccggctttcgccagccaacaatctaccagtcagggctttattgaagacagccacctggatctctttttacgtaacgcttatatcaaacgcgattatcgcgatggtttgccggataaagccgaatggggtcagggtatcatcgctaccttcgagtccggctttactcaagggccggtcggcttcggcgttgacggcattgcacagtacgccgtgcgcctcgacggcggccgcggccgcagcggcgcgggcggtatcgactttttcgcccaggatgatgatggccgcgcgaagtccgatttagcaaaatttggcgctaccgctaaaatgcgcttctcgaataccgtactcagctacggcagccagcgcccgatgctgcccatcgtctacgccgatgactcgcggctgctgtacgagagctataccggtaccatgctgacctcaagagaaatcgacggtctggaaattaacgccggttatctcatcgatcagcagcgcaaaagcgacgacagccacaatagcggcctgaagagcctgacctttggcggcgccagctatcaattcaacgaccagctcagcggcgcgctttacgcttcgcacgtcgaagacgtgctgaataagcagtatctcggcctgaactacaagcagccgttcgccgccgaccagcagctgattgttgacttcaacggctataactcgcgcttagatcaagaatatgtcgacgccaatgacaccgggcgcagcaacagcatctggagccttgccgccagctatatctgggatattcacacctttaaggtcgcttaccagcaaagcagcggcagcaccggctaccattatggcggctaccagaaccagggcggcgtcggcgatggcggcaacaccatctggctggctaactcctactggtcagattttaacggcgaggatgaacgttcctggcaggcctcctatggcctggattttgccggactgggcgtaccgggcctgagctggaccaccgcctacgttcgcggggataacattaaaaccgccgagaccagcaacggtaaagaacacgaatggtttaaccaggtgcagtaccaggtgcaaaacggcatggcgaaagatttgaaattgagactccgctattcggtgctgcgcgtttccagcaacgccagcgactataacgtcagcgggaatgaagtgcggttctacgtcgaatatccgtttaacgtgttttga

SEQ ID NO: 217853 - DNA, 1395 bp, Klebsiella pneumoniae
atgcctgacaacaaaaaacaagggcgttcgaacaagactatgacgttcttcgtctgtttcctcgccgcgctggctggcctgctgttcggccttgatatcggtgttattgcgggtgccttaccctttattgccaatgagttccagatttccgcccacacccaagagtgggtggtcagctccatgatgttcggggctgccgtcggcgcggtcggcagcggctggctctctttcaaactgggccggaaaaagagcctgatgatcggcgccatcctcttcgtcgccggttcgctgttctctgccgccgcgccaaacgtcgagatcctgctggtttcccgtgtgctgctcggcctggcggtgggcgtcgcctcatatacggctccgctgtatctgtcggaaatcgccccagaaaaaattcgcggcagtatgatttccatgtaccagctgatgatcaccatcgggatccttggcgcctatctctctgacaccgctttcagctacagcggcgcatggcgctggatgctcggggttatcatcattccggcggtattgctgctgatcggcgttatcttcctgccggacagcccgcgctggttcgccgccaaacgtcgctttgtcgatgcggaacgcgtgctgctgcgcctgcgcgatactagcgccgaagcgaaacgcgagctcgatgaaatccgtgaaagcctaaaggtaaaacagtccggctggtcgctgtttaaagacaacagcaacttccgccgcgcggtgttcctcggcatcctgctgcaggtgatgcaacagttcaccgggatgaacgtcatcatgtactacgcgccgaagatttttgagctggcgggttatgccaacaccactgagcaaatgtgggggacagtgatcgtcggtctgactaacgtgctggccacctttatcgccatcggtctggtcgaccgctggggccgtaaaccgacgctgatccttggctttatcgtgatggccgcgggtatgggcgtcctgggtaccatgatgcacatcggcattcactcctctaccgcccagtacatcgccgtcctgatgctgctgatgttcatcgtcggtttcgccatgagcgccggcccgctgatttgggtactgtgctccgaaatccagccgctgaaaggccgcgacttcggtatcacctgctccacagcgaccaactggattgccaacatgattgtcggcgccaccttcctgaccatgctcaactcgctgggcagcgccaataccttctgggtgtacggcggtctgaacgtgctgtttatcctgctgacgctgtggctgatcccggaaaccaaaaacgtctcgctggaacatattgaacgtaacctgatgcagggtcgtccactgcgcgagatcggtgcccgcgattaa

SEQ ID NO: 217854 - DNA, 756 bp, Klebsiella pneumoniae; identical to SEQ ID NO: 101417

SEQ ID NO: 217855 - DNA, 3285 bp, Klebsiella pneumoniae; identical to SEQ ID NO: 101418

SEQ ID NO: 217856 - DNA, 684 bp, Klebsiella pneumoniae; identical to SEQ ID NO: 193790

SEQ ID NO: 217857 - DNA, 1251 bp, Klebsiella pneumoniae
atggctcgtgattcgctttacccagtgagcgttaaagctggaaaaccgatccttggaatgctacctacaggatggcaaaagttatcattagaaaagtgcttaaatatagaggcaagaaaggcatatatacaagataatcaagagtatgacttagttacagtaaagcgctccagaggtggcgtaataagacgtgagcatcttaaaggaaaagatatctccgtaaaaagtcaattctatattaaagaaggcgactttctcatatcaaaacgacaaattgtgcacggtgcttgcggtcttgtacctaaagaactttctggctcaattgtatcgaatgaatattgtgtgcttacagggaagtccggtttttatcttccttatatggaatttctatcggagtctctatatttccagcaaacctgcttccactctagcattggtgtgcacatagagaaaatgatttttaagttagatagttggtttaagtggccatttaatatccccccactgtctgaacaaaagagaatcgttaaaatcctgtcaacctgggataaggcgatttcggtgacggaaaagctgctcgccaatagtcagcagcagaaaaaagccctgatgcagcaattagttaccgggaagaaacgcttgctggatgagaatggggtgaggtttagtggggagtggtgtacgtgcactttgtctgaagtagcacatattattatgggatcatcacctaaatccgaagcctacaacgataatggcttaggtttgccattaatacagggtaatgccgatataaagtgccgagtttcatgtcccagagtttatacgtctgacattacgaaagaatgtactcctggagatattcttctaagtatcagggcacctgtaggtactgttgcactttctcaacataaagcatgtatagggcgtggtatatcggctataaaatccaagagaaaaatgagtcaatcatttctttatcaatggtttctttggtttgaaccaaaatggtgttacctatcacaaggtagcacatttgaatcaattaatagtgatgatataaagacattaaaattatcagtgcccaattttgaagaacaacaaaaaattgccgccgttctgtccgcagccgacgttgaaatctccacgctggagaaaaaactcgcctgcctgaaagacgagaaaaaagccctgatgcagcagttactgaccggcaaacgtcgtgttaaggtcgatgaggcggttgccgcatga

SEQ ID NO: 217858 - DNA, 1524 bp, Klebsiella pneumoniae; identical to SEQ ID NO: 101421

SEQ ID NO: 217859 - DNA, 309 bp, Klebsiella pneumoniae
atgccgggcaaccgcccgcattatgggcgttggcctcaacacgattttacgtcacttaaaaaactcaggccgcagtcggtaacctcgcgcatacagccgggcagtgatgtgattgtctgcgctgaaatggacgaacagtggggctacgtcggtgctaaatcacgtcagcgctggctgttttacgcgtatgacaggatacgcagggtggtggtagcccacgtcttcggtgaacgcactctggccacactggagcgtcttctgagcctgctgtcggcctttgaggtcgtggtatggatgacggatggctga

SEQ ID NO: 217860 - DNA, 222 bp, Klebsiella pneumoniae; identical to SEQ ID NO: 92408

SEQ ID NO: 217861 - DNA, 594 bp, Klebsiella pneumoniae; identical to SEQ ID NO: 92407

SEQ ID NO: 217862 - DNA, 726 bp, Klebsiella pneumoniae
atgagagcacaacacacatttccaggcgcgacagacagctggcttcagcgcctgctgacctggacaccggggcaaacggatatgattaaaacggtcgcactggtactgatggtgactgaccacaccggcttactgctggccggaaacaatgaagtgatgcgcctgctgggacgtggttgttttccgctgttcggtctggcatggggaatgaatctggcacggcacgcggaaatacgccagtctcaactgaacaacctgtggggctgggcgctggtcgcccaggtggcgtttatgctcatcgggtacccgtggtataccgggaatattctgtttgcctttgccgttacgggccaggtcctgcggtgggtcagccagccgtcctggtattacaccctcctggcggctggactgctggtcacctggatacccctgtcaaccggcagctacggcatggcaggagtgggcatgctcaccgccagctggctgctttgtcgcgcacagcatgcaccggaacggctgggatacggggtgttgtgggccctcatggtgttgctgatgaatatgcataacgtgagtgaatcggcggccgggctggcgattgcgctgctgacgctgatggtgtgctcatctgccggagaacgtgtgaaacgcttctggccgcggcagttcttcgtgatgttctatgccgtgcacctggcggtactgggtattgtcgtctcaatgtga

SEQ ID NO: 217863 - DNA, 5259 bp, Klebsiella pneumoniae
atgctcagtttcagccaggttaaatcggcgggcagtgccggtaactactacacagagaaagacaattactacgtcatcgggagcatggaggagcgctggcagggtaaaggcgcagaattgctgggacttgaaggaaaggtagacaagcaggtcttcacggagcttctgcagggaaaactacctgatggcagcgacctgacccggatacaggatggcgtgaataagcaccggcccggttatgacctgacgttctcggcaccgaaaagtgtatcgatgctggctatgttgggcggcgataagcgtcttatcgatgctcataatcgcgcggtaacagtggctcttaaccaggtggagtcccttgcttccacacgggtaaagaaagatggcgtgtctgaaacggtcctgaccgggaatctgattattgcccgctttaaccatgatacatcgcgcgctcaggatccacagatacacacacacagcgtggttatcaacgcgacacagaacggcgataaatggcagacgctggccagcgataccgtcggtaaaaccgggttctccgaaaccatactggccaaccgcatcgctttcggaaagatataccagaactctctcagggccgatgttgagtctatgggttacaagacagtcgatgcgggtcggaatggcatgtgggagatggagggcgtgccggttgagtcgttttccacgcgcagtcaggaactccgggaggctgcaggacccgatgcctccctgaagtcacgggatgtggccgcgctcgatacccgcaagtcgaaagaagccatcgatccggcagagaagatggtggagtggatgaacacgctgaaggagaccgggtttgacatccgggggtaccgtgaggccgccgatgcgcgagccgcagagctggcccgtgcacctgccgcgccggtgaacactgacggtccggatatcacggatgtggtgacgaaagcgattgccggtctcagcgaccgcaaggtgcagttcacgtatgccgacctgctggcacgcacggtcggccagctggaggcgaaggacggtgtgtttgagctggcgagaaagggcatcgatgccgccattgaacgggagcagcttatccctctcgatcgcgagaaaggcctgttcacctcaaacatccacgttctcgatgaactcgccgtcaaagccctgagtcaggaggtgcagcgccagaatcatgtctccgtcacgcctgatgcgtctgtggtgcgccaggtccctttcagcgatgccgtcagtgtgctggcgcaggatcgcccggtaatgggtatcgtttccggtcagggtggtgcaaccggccagcgggagcgggtggccgagttaaccctgatggcccgggagcaggggcgtgacgtccatatcctggctgccgataaccgctcacgtgattttctcgccggtgatgtgcgtctggccggggaaacggtgaccggtaaatccgccctgcaggacgggacggcgtttattccgggcggaacactcatcgtggatcaggcggagaagctgagcctgaaggaaacgatttccctgctcgatggcgcgatgcgccataacgtgcaggtcctgctctccgacagcgggaagcgcagcgggaccggcagtgcgctgacggtgctgaaggacagcggcgtgaatacgtatcgctggcaggggggccatcagaccacagccgacatcatcagtgaaccggataaaggagcacgctacagccggctggcacaggagtttgccgtcagcgtgcgtgaaggacaggaaagcgtggcccaaatcagcgggacgcgtgaacagagcgtactcaacggcctcatccgagactccctcagacaggagggggtgctgggtgagaaagacacgaccattacagccctgacgccggtgtggctggacagcaaaagccggggcgtgcgggattattaccgggaggggatggtgatggaacgctgggatccggagacccggacgcacgatcgctttgtcattgaccgggtgaccgcgagcagcaatatgctgaccctgaaagaccgggaaggggaccgtctggatctgaaggtttccgcggtcgacagccagtggacgctgttccgggcagatacactgccggtggcagagggggaacgtctggcggtgctcgggaagataccggacacacgccttaagggcggggagagcgtcacagtgatgaaagtggaggacgggcagctgacggtacagcggccggggcagaaaaccacgcagaccctggccgtgggtgcgggcgtgtttgacggtattaaagtcggccacggctgggtggaaagtcccggcaggtcggttagcgagacggcaacggtctttgcgtcggtgacgcagcgtgagctggataacgccaccctcaaccagctggcacagagcggaagtcacctccggctgtactcggcgcaggatgcggcgcgcacgacggagaagctgtcgcggcataccgccttcagcgtggtctcagagcagctgaagacccgatccggcgagacggacctggatgcggccattgcgcagcagaaggccggactgcgtaccccggcagaacaggccattcacctggccatcccgctgcttgaaagtgagaaactgaccttctcccggccccagctgctggcgacggcgctggaaaccgggggcgggaaggttccgatggcggacatcgacacgaccattcaggcacaaatcaggtcggggcagttgctgaatgtaccggtggcgcacggctacggcaatgacctgctgatttcccgtcagacctgggacgccgaaaaaagcatcctgacccacgtgctggaaggtaaagacgcggtggcccccctgatggaccgcgtgccggccagtctgatgacggacctgaccgccggacagcgggcggcgacccggatgattctggaaagcacggaccggttcacggtggttcaggggtatgccggggtggggaaaaccacccagttccgggcagtcatgagtgccatcagtctgctgccggaagagacccgtccgcgcgtcatcggtctggcgccgacgcatcgcgcggtcggggaaatgcagagtgctggcgtggatgcgcgcacgacggcatcgttcctccacgacacgcagctgctgcagcgcaatggccagacacccgatttcagcaacaccctgttcctgctcgacgagagctcaatggtggggctggccgatatggcaaaagcccactccctcatcgtcgccggcggtggacgggcggtgtccagtggggataacgaccagctgcagcccatcgcgccgggccagccgttcaggctgatgcagcagcgcagcgccgccgacgttgccatcatgaaagagattgtacgccagatgcctgagctgcgaccggcggtctacagcctgattgagcgggatgtgcacctcgccctgaccaccattgagcaggtcacgccggagcaggtgccgagaaaagaaggcgcatgggcgccgggcagttctgtggtggaattcacgccaaagcaggaaaaggcgatagaaaaggcgctgagcgaggggaaaaccctgccggaaggtcagcccgcgacgctctacgaggcgctagtgaaggactataccggacggaccccggaggcacagtcgcagacgctggtgatcacccatctgaataaggaccggcgggcgctgaacagtctgatccatgacgcacggcgggagaacggggaaaccggcaaagaggaaatcaccctgccggtgctggtcacgagtaacatccgtgacggtgaactgcgcaaactgtcgacctggacggctcacaaggaggcggtggcgctggttgataacgtataccaccgtatcagcaaggtggataaggataatcagctgatcaccctgacagacagtgaaggaaaggagcgatatatctcaccccgggaggcatcggcagaaggcgtcacgctctatcgtcaggaaaagatcaccgtgtctcagggggaccgaatgcgcttcagcaaaagtgacccggagcgcggctatgtggccaacagtatctgggaggtgcagtctgtttcgggtgacagtgtcacgctgtctgatggcaaactcacccgtacgctgaccccgaaggcggagcaggcacagcagcatatcgacctcgcctacgccatcaccgcccacggcgcccagggggccagcgaaccgtatgccatcgcgctggaaggggtggccggtggtcgggaacagatggccagctttgagtctgcctatgtggctttatcccgcatgaaacagcatgttcaggtctacaccgacagccgtgagggctggataaaggccatcaagcattcacctgagaaagcgacggcgcacgatattcttgaaccccgtaacgaccgggcggtgaaaacagccgatctgctgttcgggcgggcaaggccactggatgaaaccgccgcgggccgggcagccctgcagcagtccggtctggcacagggaagttcaccgggaaaattcatttctccggggaaaaagtaccctcagccgcatgtggcgctgccggcatttgataaaaacgggaaagccgccggtatctggctcagcccgctgaccgatcgggacggacggctggaggctataggcggagagggacggattatgggcaatgaagacgcccggttcgtggcgctgcagaacagccgcaatggtgaaagcctgctggccgggaatatgggagagggggtcagaatggcccgcgacaatcccgataccggggtggtggtgcggctggccggtgatgaccgtccctggaaccccggggccattaccggcggacggatatgggctgaaccggcgccggtggctccggtaccgcagaccggggctgacattatcctcccgccagaggttctggcgcagcgggcggcagaagaacagcagcgccgggaaatggaaaaacaggctgaacagactgcccgggaagtggccggggaggcgcgtaaagccggcgagccggcggaccgggtgaaagaggttatcggggacgtcattcgcggactggagcgtgaccggccgggtacggagaaaacgacgctaccggatgatcctcagttccggcgccaggaggaggcgattcagcaggtggcctcagaacgtctgcagcgtgagcgtctgcaggctgtggagcgtgacatggttcgtgaccttaaccgcgagaaaaccctcgggggcgactga

SEQ ID NO: 217864 - DNA, 147 bp, Klebsiella pneumoniae
atgaagcttaataaagtcatggctgttatggtcgtcagctctgcgctggtgttatctggatgtagtgcaatgggaaccgctattaaaaagagaaatctgggtaaaaacccagatgagcgaaacaatctggctggaaccttcaaataa

SEQ ID NO: 217865 - DNA, 531 bp, Klebsiella pneumoniae
atgatgatgacaaataaaatcctcattgaagaagtagaacagctgaaaaatatgttttcacgaggtgaaatggagatgccatctttttggccatgtctatggcctggggtaattattgctgcctggaatatggtctgcgccataattagtgtggggggcgggtatttgtctgttaaattcatattttgggtgttggtgttccccggcgttataagtcttatgattctgcttggagtggcaagtgcgcgttcactttttttatctgttcccagatcctatagaatgcgctcgcaggtatatcggtttatatctagaaaagtaattgtttatgcacttgtgtatatggctttaattctagcgcttgcactatttaatagggtgtattatgcctctccatttccttttgcgttcatggttcttattgcgacgatttttgtgtggtttgttatgaatattgatttgggacgatatcaactttcggtactctcatctgcgataaactctttccgcgcagaaaagttgggggggtaa

SEQ ID NO: 217866 - DNA, 1341 bp, Klebsiella pneumoniae
atggtctgggacagtggtggtgcaatgtcaaaactgccggtggatattaacgtcggtcgtcagatagccagtgcgcagcaacagatggcccgtgaggctgatgtccaggccgaaagcgcgctgcatggctataacagcagtgtgacaagcgcctggaatagtctgcagcaatttggcaccaataaagggaacagcacatcaacaacgactggggccgatactaccgagtcttcgcaggattcgatggccagaagcaagatgtggaatgcggttgttgctaatgcgaaagccaacaacatcagtaatgaggagtctttccagcagttgatggatgattcatcgaaaagaagtcaatcatttgatgcacatgtatctggtaaatggagttcaggggatcaactgtttggcaagttaggaaagtggggcagtggtttttctgctgaagttggtggtaaaggaagtgcaggctgggggcacagctcaggtaatacagataacgttggaacttccggtcgggaatcgaatgacagccggcatgataccagcagtcaggcggcgaaagactttaaggaagcttcggattactttaccagccgcaaaaccaccacatcgggtaatattaccgataataatgccagctcgcgtgttgaccagtttgccgcgtcactctccagtgccaaaaacagctacgaccagtatacaaccagccggacacgcagccatgagtacagtgagatggcgtcacgcacagagagcatgactggccagatgagcgagaatctcactcagcagtttgctaactttgttcagcgtcgcgctccacaggatgccgaggccattctgaccaataccagttctcctgaaattgcggcgcagcgtgaagccctggcgcgtgaattcgtcaaagagcaggtagaacccagggttgatgctgtgtatcaacagggtcgtgaaagcatcggacagaatatggctggggtgtcaggtggtggtgacaatggttcggtaatggccgactacggacaaaattctggtcgtatcgatgctatgacacaagatgcgggtattaaggataatgtgggtcagaaagtggatgggatgattacagagaataaacaacagcatcaggaaacccgcgaaaacatacaacggcaaggcgcagaggtgaaaaatgagaatgctgaaatggaaaagagccataaaacaaaagcaaatgagtttaaaggtgattataatgaaagaaagagtaaggtaaattctttaccaggggctgactctccggctgagttagaggaaaaagcagcgaaaacgcaaaaggattttcttgatgggaaaagatga

SEQ ID NO: 217867 - DNA, 1560 bp, Klebsiella pneumoniae
atgcttgaggtatatgccattgctggcggcgactggttacggggcaacctgaacgcgattgcggcgtttatggggaccagcacatggtcgactatagaaaagatgtgtatcgccatctcggtactcattgtggcggggaactgggtaaaaaaacacaacgtaatggaccttattggctgggtcttttccctcaccctggtctctatgctggttgtcattcgtacccctgtgcagatcatcgattacagtaacgttgcgcaggtctatgaagtcgataatgtgcctattggtctggcgattccggcgtcgctgacaacacgggtaggaaacgcgcttatccagagttatgagatggtcttcgctctgccggacagtgtcacgtacagtaaaacggggatgttatttggcagtaatctggtcgcgaaaagtacggattttttgtcacaaaatcctcagattacgacgctgttttccgattacgtacaaaactgtgtgatgggcgatattttcctcaatcataagtactcttttgaggacttactgaattcacctgatccgtataccctgatttttgcaaacccgagtccactgcgtggcgtgtttgacaaaaacaaccagttccagacatgcgaggaggcctcacgggatctgaaatcggctctcgcgctggatactcagacaggcggtaaaacctggaactactatgttcgtcagctgtttggcggcaaacctaatcccgatctgcttttcagccagatgattggcgacagctacaattacttctacagctcgggacagagcgccgggcagattatccgccagaacgtcacgatgaacgccctgcgcagtgggatccagagttatgcggcccgcagcggggacaccgccagtctggtcaatatggctaacacatcatcccttgaaaagcagcggctggcacaggccacaatggggcaccaggcgcttcgcgcacttccgctgatgcagaccgtcattatgggtttaatgattgggatgttcccgatcatggtgatggctgccatgtttaacatgatgacgctgcaggtgcttaaagggtatgtgtttgcgcttatctggctgcagacgtggccattactgttcgccatcctgaacagcgcgatggcctactatgcgaagcaaaatggcgtgccggttgttctctctgagttgtcgcaggttcagctcaaaaactcggatattgcgaccaccgcgggctatattgccgtgatgataccgcctttgtcgtgggggatcgtgaagagcatgggagcagccttctccagtgcctacagccatttttcttcttcggggctcagtgcaacatcgcaggcggcctccggcgtggtggacgggaattactcttttcgccaacatgcagatggagaacgtcagcggctacagctggggtaccaacagtacaaccagtttcggacagatgtcgcggcagctggcgaatgggggtatgagcacgcagacgcgggatggatcgatggtctgggacagtggtggtgcaatgtcaaaactgccggtggatattaa

SEQ ID NO: 217868 - DNA, 1392 bp, Klebsiella pneumoniae
atgctgtgcgtaatggaggactggatgcgaattaaacttctgtcactcttctgcggtgccgtgcttggcctgtcatttagcgccgccgccgacgtgaatggcgatatgaacaacttcttcaataagctgggctttgcgtccaataccagccagccgcaggtctggcagggacaggctgcgggttacgcctccggcggttcgctgtatgccagaacgcaggtgaaaacgatccagctggtcagcatgacgctccctgatattaatgccggctgcggagggattgatgcctatctggggtcattcagctatatcaacagcgagcagctgcagaggttcgcaaaacaaatcatgagcaacgccgcggggtacttttttgatctcgctttgcaaaccacggtaccggagattaaaaccgcaaaggacttccttcaaaagatggccactgacatgaacagcatgaacctcagttcctgccaggctgctcagggaattgtgggtggcctgtttcctcgtacccaggtcgctcaacaaaaggtctgccaggacattgccggtgaaagcaatatcttttcggactgggccgcctcgcgccagggttgtacggtgggcggcaagatggacagcgtccaggataaggccagcgataaagacaaagaacgtgtgatgaaaaacatcaacatcatgtggaatgccttatcgaagaaccggctcttcgacggcaataaggagctgaaggaattcatcatgacgctcaccggtacgctgattttcggggagaacagtgaaatcacgccgctgccggcacgcaccactgaccaggatctgattagagccatgatggagggcggcacggctaaaatctaccactgcaatgattcggataagtgtcttaaggtcgttgctgatgcgaccgtgaccatcacttccaataaagcgctaaaaagccagatttccgctttgttaagcagtatccagaataaagcagtggctgatgaaaaactgacggatcaggagaaagggtttatctccagcaccaccattccggtattcaaatacctggtcgatccgcagatgctcggggtgtctaactcacttatttaccagctgacggactatatcggctacgacatcctgctgcagtacattcaggaacttatccagcaggcccgggcgatgatttcaaccggtaattatccccagtcgacaatggatatgatcatggaaaatctcaaccaggcgagtgtgcagattgccgctttccagtcccgtgttcaggtccagcaggacgccttgctcgtggtggacagacaaatgagttacatgcgccagcaggtttctgcccgcatgatgacccgctaccagaataactatcattttggggggaatcagtaa

SEQ ID NO: 217869 - DNA, 444 bp, Klebsiella pneumoniae
atgaacaaatatatacgttcgacgggactgtacgcgtttttatttccagcaagtttaaaggactccgggcagacagcagccgaaaaaatagaacaactgaagccggaatttatccaccgggaaaggcgtctggaaatctatctggaattattcattgtgtttctcactgcaggtgctctgctgttatggataatgagatttttatttaatatctgcgtggatgactggatagccagcggcgacctgcgagtaaaagacctgtggaatattatgatgtacgccatcccttatgcgctgattgctgttggggtggggttctttgttgccggagtgacattagcgatccgcaattttttcagttatcacctgaagaccctttttattctgagaaatgacagagttaaaaagaatgctgtgcgtaatggaggactggatgcgaattaa

SEQ ID NO: 217870 - DNA, 558 bp, Klebsiella pneumoniae
gtgaaaaacagcctgatgaacctcgctaagacgccgctggcggcactggctctttcccttgcactggccgggatggcacatgcgggaacgctcgatgaggtgaagtcgctctgggatccgcggggtatctccggtactgaaacggcctccccgcagagcgacactccccaggcggtgagcggggcatctcagccacgctggttacgactcagcaacggaaagcaggtggacctgcgcgactggaaagtggtgctgttcatgcagggacactgtccctactgtcataaatttgacccggtgctgaagcagctggccggacagtatggcttctccgtgttctcttacaccattgacggacagggtgatgacgcgtttccggaagcgctgccggcgcctcctgacgtgatgcagacctttttccccaatatcccggtggcgaccccgactacgtttctggtgaacgtaaacacgctggcagcgtacccgatcctgcagggcgccacggatgcacagggctttatggccagagtggatacggtatttcagatgatgcattag

SEQ ID NO: 217871 - DNA, 240 bp, Klebsiella pneumoniae
atgcgaaatattcgttttccggatttagatatcaccgggatgtgggtgctggccgtgggcgtgtttttccacctgatagccaggcttgtcagaaaacagcctgagctggccgtccaggccggggaaatcttcgggctgggtatggtggtgttcgggggataccgcattctaaacgccctgattgctgaagccgaaaaagaggagaaagcctgtgaaaaacagcctgatgaacctcgctaa

SEQ ID NO: 217872 - DNA, 753 bp, Klebsiella pneumoniae
atgcgaacaatacatgccgccatgctggcgggatgcctttgctgcaccctgatgccggctttcgccaaagacgcgggctggcagtggtacaacgagaaacttaagccccatgatgaggaaaggaaagccgcaccagcggcaccaccgccgcaaatggatattctggagaaactcgccacactccaggcggccaccaaacggtcgttgtacgaagccattctgtatccatcgtctgaaaacttcgttaagtatttccggctgcagaactactggacgcagcaggcaggtttgttctcgatgagtgcgaagaaagcgatgctggaaaaccccgaactcgattacaacctgcagcacagctactacaacggcacggtaaaaaaccagctcgctgccgactatgccgaacagcgaaaggctatctccaccctcgcacagcactacggcgtgatgttcttctaccggggccgggaagcgatcgatggccagctggtccaggtgattaaaaattttcgcgaaacctatggcctgagcgtgataccggtgtcggttgacggagtgattaaccccatgctgcccgatagccggacggaccagggccaggcagagcagcttggcgtgaagttcttccccgcgatgatgctggttaacccgaaaagtggccaggtgaagcctctcagttacggctttatcagtcaggacgacctggcgaaacagttcctctatgtctccagcgactttaaaccgaatttctaa

SEQ ID NO: 217873 - DNA, 327 bp, Klebsiella pneumoniae
atggaagagaaaaaagcctacgggctggtcatggtttttgtcggggtgtttgtctttttcctggtcagcattatgtcgtacagcctgtggcgggacagacaggttaacgcatttatgaccaccaaccgggcctgggggatccagtgcgacactgtttctcaggccgcgtgggtggtcagggacggggagcgggtggaccttcagataaatcatctgcctctgtactgcagcggttaccgctttgaagcccgtgatgatgcaggaaagatacagcgccagctcgataaatacagtgtctatcagcatctgtcacgccagtcgcaataa

SEQ ID NO: 217874 - DNA, 186 bp, Klebsiella pneumoniae
atgaagacggtgcgcaggtttaataagtttaaagattggttcaggttagcaggggtaatccttattcctgttctgttgataattaacatggcaacgttattaacgagcgatgatgggttcgtaattgttagatctttattgtttatttttgttctcacgattatagcaagacgattacagccataa

SEQ ID NO: 217875 - DNA, 237 bp, Klebsiella pneumoniae
atgaaaattaattttcacaaacagcctgccattgattttgtcctgagattaacgctgacaataatcattatttctccggtgatttatttctcctgggatgccgtcaaagggacgtcggggagtgattatgtcgagagtgtggtttttattgttgcggttggttttttctggttcgtgagctatctcttttttagttcgcttgccgcgttgttacggaaaaagacggaggaagaatga

SEQ ID NO: 217876 - DNA, 1404 bp, Klebsiella pneumoniae; identical to SEQ ID NO: 101449

SEQ ID NO: 217877 - DNA, 867 bp, Klebsiella pneumoniae; identical to SEQ ID NO: 179618

SEQ ID NO: 217878 - DNA, 999 bp, Klebsiella pneumoniae; identical to SEQ ID NO: 101451

SEQ ID NO: 217879 - DNA, 819 bp, Klebsiella pneumoniae
atggttcagattcttaatacaacaggtttaaactatcatgtagagcaaaccatcgctaatgccgaagagcgcattattttgataagcccttatctgaaacttagcgcaagaattaaggagctcattgaagacaaaaaccgtatgaaggttgatattcgtatcatctacggtaaatctgaacttaaccctaaagaccatgaatggcttgtcagtttaccttatgttcgtttgagtttttgccagaaccttcatgctaagttttatgctaatgaaaatcaaagcctgatatgcagcctaaatctatatgattttagtcaaatcaacaatcatgaacttggggtgttaattgtaaaggatgatgaccgtgacgctttcaacgcttctatcacagaggcccagcggttaatcaggatcagtacagaaaatattccatcaccaatatcattacaatcgggtagatctgagttgcaaaaaactcatgagcagaagagtgaacatacaagaacatctcaaaaaaatgatgaaaaacatagtatgttaacagatcctatctcaaccgagtcagatgagagaacaagtaaagagggggatacaaacccagaacccgcaaataaactaacctcaactaatttagctaaacaacataaaatgggtttatctgaaatgtatgcggaattgatgaattcaggatacctcatagagaaagacggaaaatatgagttaacgcctttaggtatttccatcggaggcgagagtaaacccaatcgttataaaaaaggtgagttttattttttatggccttctgatatttctctttaa

SEQ ID NO: 217880 - DNA, 603 bp, Klebsiella pneumoniae
atgactatcatgaaagttcattattcaccaactgacgggatccctttgaactccctttatctgaaggaaacttcaaccactgaacgatcaggttcagtactggggggtggcatttcgggagactctgttattctgggaggcggaggttatgccggttcggaaatgcagaagacgactcgttcttctgtctttgcaccacctgatgaagttactgctgagcctgacaacacaaaaatggtcctccggatttcctgtgttatcggtgtaatgtttttacttataattattaccttattcagtaatgctgttgttgatatttttgacgtaaacgtatctaaaacaatgtcctctttcctggaacatgctcccttctttatcattggactatctgtcatttgtgctttctttgttataggaatgaccgatcatgattacaccccggtacttgaagagcataaaaggaatgaagcgcgtttgtctgtataccacaggctacgctatgtcgaagctgataatattgtttttgatccgcaatcaatgaaaggatgttatgcagaaagaaaattcattgcttcactagttgaaagttgtatcactaagtaa

SEQ ID NO: 217881 - DNA, 1242 bp, Klebsiella pneumoniae
atgctattacaatcaggacagaacattccgcttcacacagctaccctgactctccggcttgattatccccccagtcctggatttcacagtacccctgagacttgcctgtttatgctgaatgctgagggaaaagtgacaggcgatgccgattttatcttttacaacaatctgagtgctgccggtggcagtgtgaaactcaaccccggtcaccagcacgcagtcgttcattttgcgcttgaccagatcccggatacgatccagaagattgcaatcactatggtgatagatggcagtgatacgataagcggcctcgtgcaactgaaactttctgctgaaagtcaggccaccttttttgtcgatctcaatggccgcacagaaaaggcagtaattatgggggaagtttaccgataccagggcaactggaagctcagggcgcttgggcagggatttaatggcgggcttgagcctctggcagtcagctatggtgtggacgtggaacctgcagcagaagttgtaccgcaaccagcccggatcagccttgaaaagaaactcgaaggtaaagcgcctgcgcttatcagcctggctaagaaagccagtatttcactggcaaaacacaaactggataccgttgaagcacgagtcgcttttgttctcgatgcctcaggctctatgaccggccagtttaaaaaaggacatgtacaggccgttcttgaccgtatagctgtcctgtctgtccagttcgacgatgacggcacaatggatgtatggggctttgctgagcgtcacaagaaatatcctgacgtcacactggacaatcttgacggatacattgctgccattcagaacacgggtaaacgatcggcctgggaaatccttcccggccttggcgggacgaacaatgagccgccagtcatgaatgaggttatcgattatttcaaggacagcaccttacccgtttttgtcgtgtgcattacagatggcgggatcagcaaaacacgagaaattaaagaggccatccgccgctcagccaactatcctgtcttctggaagttcgtgggactgggcggatcaaattatgggattctggagaggctggacacctttagcgaccgtcgcgtagacaacagcaacttttttgcgatcgataattttgcccacataaaggacgaagagttgtatgaaaaacttctcgaagagttcaaagactggcttggactggcaaaaaaggaaggcattatctga

SEQ ID NO: 217882 - DNA, 1245 bp, Klebsiella pneumoniae
atgaaaaagattttactcgcattaacgctactattttcttcatgtgctttcgcagggtcagagcttgaattaaataaagtcaagctaccggaggctatttctcttatttacagtgaggtgcttaaagtcccgtatatgctagatccacagcttgttaatgatgaacgaatgattacattcaggttaacacctgatattgatgaacgggaatttgtaacccgttatcttggcaatatgaacattcgaatatggacgaaaaagggtgttgattttatcgcgccctatacgccgaaagagccggttaagccacgttatacatggacttatacgcctcagtaccgttctgttgcctacctgtctgatattcttggcggctacgtttcaggctccttcaataacagtggagccgtgatttctgacgattcgctaaaaggttcatcaggggcaagcaactacatcaatcgaaccggtgatattctggtttattatggtacgaaagaggatatcgccatcctgaaaacactggtcacttcgctggatacgatgagtgatgaagtggttgtttctggttatgtttttgaggttcagacctcgcagtctgacggctccggcattcttttagcggctaaaattctgtctgataaattcaatatttcagttggtgctgccggactggataattttatcaatattcgaaccggctccattgatgccattttcaatctgctgaaaaccgacagtcgttttactgttgtcagtgcgccacgactgcgggtaaaaaataatgcctcagcgtctttttcagtcggctctgatgtgccagtactgggcagtgttacggtgaataacaatacgacaacgcaatccgttgaatatcgttccagcggtgttttgtttaacgtgacgccatcaatcaaaagtcggacaatggatctcaagattcagcagcagctttccaactttgtgaccgctgaaaccggcgtcaataactcgccaacccttatcaagcgtgatgtaacaaccgaagtcagccttgcagatggtgacattattttacttggtggccttgctgaacagaaagacagtaaggccagttccggctggagcttcttcggttcccgtaccagtgaaagcaacaagactgatattatggtgatgcttcaggtcagaaaggttgaccggagcagggcgacgccccgcagcgccgcgaggagcggtgaactgttccgggacaacctgaactga

SEQ ID NO: 217883 - DNA, 1026 bp, Klebsiella pneumoniae
atggctatttctgcatatattggcatacccggctcaggaaaaagttatgaagccgtttgcaatgtcattattccggcatttaccagcggccggagagttgtgacgaacatttatggtttacaaaaagataaaatcaccgaacgttatcctgatgcaacgggagaaattattgttgtggataatgatgatgtgcttaaagcagatttctttccttttaaaggtggggaagggagcttttgccagtttggtgatttaattgttattgatgaagcatggcgaatcttcggtagcgataaggatatgacggctgagaagaaatcatttattgctgaacatcgtcattttacgcaccctgaaacgggtattagctgtgctttggttattgtaaatcagtcactttctaatattgctcgctttctgaaagacaaaatagaaacaacttaccggatgcgcaagctgaaagcgttgggcctgaataatcattactgcattgacgtatattcaggccacaaaatctataaaagcaacctcgtcaccagttatcgcaataaatataaccctgatatttttgaactttacaaaagctatgaaggaaataacggtaatgaaaagcagacagataaacgccagagcatctggaattctggcaaagtcaggttctttcttgtgctttttccattgatgtttatcgggtcaggctggctgatttactcatttttcagcacgtttggccgaagcgatccctcgccagatttgactacaacagatgtacgtgatgcggccatgtttcgttcttccgctgctactccagcatcagatactccctcagaaccagctgaaccgccactttcaaccgagtggcgtatatcagggagaatgaccagtgaaggcagggcgtttgtgattcttgttaacggtgccggtgttttgcgtgccgttcctgcatctagttttaattacaaagggatgttgatgagcggaattattgatggtgagcgtgtgacgctttatacggggaaaaaataa

SEQ ID NO: 217884 - DNA, 1596 bp, Klebsiella pneumoniae
atggaaattgggttcccttttatgggggatcgtctcagcttatgtcgttattcttgggctaagaggctgacggtttattcctttattttttcctttctctgggtttcctttccccgatattcatattcatttgtaccagcaattgcagcagtggctgcgcgggctgttattcctaaagtcgttggccgggtgcttgttcgtcgctttgctgccaatgatgcgatttatacggcatcacagcttacagcaacccgtgtttttgttggccgcgctgcggctaatgctgccgaatacttgcctgctgcctcatcatacaaaatgagcggtgttgcaacgtgggcgggtattgctgctgctgtatcatcttttgttccgtcttctttgagttcatctgacggctcggtaatggtaatgactaacggtaaaaagatttccgataatttatatgaagtaacgtacagtggtcaaagtggtgaaagtaagacgataaccgttaattttgaaccacaggaattaagtccggtaatccttcatgttagtcgtaataatgtggatgcgggttctccagttgtaggtgttgaaacaggatattccacgccagataatgcactttattattatcaggattcgaaagagctaatttattactatggtgataatccaactgaaattgccagaaattatcttaatgactataactcgcgtacttatactgaaacactaacaaattttgaacgcactgtgacgaataaagttgtcaacagtaatggagatgtatcctttactgaacagaattataagtttacttatccttcctcattttatgaaataccagaaattacacacttgtatagcaacccggccgcatcttcatttcccgcaggtattcccatgtatgaaaatgtagcagggcttcccatgtattacagcgttgcttatttaacagcaggcaagcaatatcagtatcacaacacgccttgtaaaacgactaatcagtcaaatggtggatattcgacgatttgcgccgttcctgaaaaagaggattacaccgcaaaagatattgatgaaaagagtgagcttactatctggaccaataccaaatataaagccatgacggaagtactggaggcaggaaatattgagtccatgattgattatctggagtatcttgatagtgttagtgtatcgccagcacttcttgccgacatgattaacgagctgtggtctgaagctgccgttaatgccgattataacggcttaccgtttaaagaggtttcaccggctgaagtaacttctgcgatgtcggaacttaggctatctccaacgttattagatatgctttcacctgtatctgacagtgcaggggctgacgtcaatattgatattaccattaataacaactcaggatctgacaccggaaataatggcaatatagatttgggagaagatcccggtgtaaaagagcctgagcttgaagaaacgccaacggcaagagatattttaacgccaattattaattcgacgtattcctgttatagggtgagttatggctatttctgcatatattggcatacccggctcaggaaaaagttatga

SEQ ID NO: 217885 - DNA, 252 bp, Klebsiella pneumoniae
atggatacatcaggtttcgatattcagtttgataatcatattcctgaaaatggttaccgtattgaaggttatttatgtaatgcgaacaatgcaaaagaatgtcaggcaataatggtacgttctgaaccatttcatcaaattgattattctgcaatggaaaattactggacattaggttttggctctgtcctgctgctctggcttttttctgtaggtgtgggacaggtaataaagatggttcgtactgcttga

SEQ ID NO: 217886 - DNA, 318 bp, Klebsiella pneumoniae; identical to SEQ ID NO: 10871

SEQ ID NO: 217887 - DNA, 1053 bp, Klebsiella pneumoniae
atgatcgactggtttaccggaatcctgccttgcacacaccgaccgttaccggctggtagtgtcgtcagcgtcgatgctgacggtgcagtggagtgggaaacagtaaaacggttgaccgttcgcggttcgcatgagtccacaatgaaagtaaggtctgttggatctgatggtgaaggtcgggcaacacatctctacattgacggtaatccatcaaagtttttgcaaggtcactctgttatcggtcccgacgatttgcaagggttggtggtaacaacttacgccagaatattggcattactgcatattcctcatgatctaccatcctatcggcaggtcatggaagggcaatttaagatctcgcgcatcgatatcaattacatgtattcattgtcaacattagaaaatgtccgcgcatggttatatgccgcagaatttaaagctaaaactcgccacggtcgcgcctgtggtaaaggtggcactgtttacttagggaaaaactcccgtcgttggagcctgaaattttattcaaaatatgatgagcatacatctggcaaaaaagggcaccagatggcagacgaattcgttaaagctggtttactggactggtcaaaagataaattacgcattgaattaacattaagaacaactgaattaattgatttgaatcttacgcttggtaatagctggaatattgagacgcccaataaattattctctgactatgtagggagaatagaaatgaatcaaaatactatattaactgatgaaaaaataattaatctcccaagaaaaatacagtctacatatttattgtggaagcagggcgcgaacatgaaagagatgtttccgaaacctacattctaccgacaccgtaaagaattactttctttcggaatagatattaacttttattgtgagtcaccggattctaataacgttgttccgttggttcgtactcttgaagccaaaccagccaaaattccatcatgggtttatgagaaaggtttaattttcgattataaccgtatttcacatgccagtaactggcattaa

SEQ ID NO: 217888 - DNA, 447 bp, Klebsiella pneumoniae; identical to SEQ ID NO: 10873

SEQ ID NO: 217889 - DNA, 423 bp, Klebsiella pneumoniae; identical to SEQ ID NO: 10874

SEQ ID NO: 217890 - DNA, 795 bp, Klebsiella pneumoniae
atgaagccagaaaaagctatcgcgatattaaaaagacaacgggagcaaatcccagcaatacaaaatgaacgaaggagtacaggaaataacccaagttttaacttgtggcaaagaaacactaagaccgccatatcaaaaatatttggtgaagagtcagatcacaaaaaagaatttggctcaattcgatactctttaatggcatttgttggtgatacaccagattatgttttcgataacgcattttgtagtggtttagatgaagcacattctcttcttacgtctatgatcgctgagattgaagaatatggaattgacggaaatttcatagagacaaaaaatgatgccgtagctcttgttgaactaatttgccatcaatttcataaggttgcaagacagctacagcaacgacacgataatagacaaaccattgaaataaatgacgaatatgacgttcaggatttatttcatgctcttttgaagattcatttcgaggatgtcagaccagaagaatatacgccaagctatgcaggatcttcaacacgagttgacttcttgttaaagaatgaaaaaatcattatcgagttaaagaaaacgagaaaaaatctcaagcaaaaagaagttggtgagcaattaattgttgatatagctcattatcaaacgcatcctgattgcgaaactttagtgtgttttgtatatgaccctgaaggtagaattgccaatccaattggtgtggagaatgaccttgagcgttgtacaaattcaatttcggtaaaagtaataatctcaccaaaataa

SEQ ID NO: 217891 - DNA, 267 bp, Klebsiella pneumoniae; identical to SEQ ID NO: 106446

SEQ ID NO: 217892 - DNA, 225 bp, Klebsiella pneumoniae
atgttatcattattaaaaaaaggcccgtcggcgaataaagttcctgctgagaaaattcaggcaacctatggtcgataccgtatgcaggcgctgctaagcgtatttctgggatacctggcgtactatatcgtgcgcaataacttcaccttatccacgccctatctgaaagaacagttagggaaggtgcgaataagcaggtcatttcttcccaagctgactcgctga

SEQ ID NO: 217893 - DNA, 1101 bp, Klebsiella pneumoniae
atggctttcttcaccatagagaaaagattacgcagcgatggaactgcccgttatcgctgtactgtagccgttaaacaaaatggtaagtacgtccaccgggagaacaaaaccttctccaagaacacccttgcgaagtcctggggggctaaacgtgtagcatacattgaagagcatggtctcccagagccagaaaaagagatgaaagagatctctgttataactgttggtgacctgcttactcagtatgaaaaccatccaaacataacgctcggtgcatcaaaaagaagctctctccgcacgcttggccgttcctttctggcagaaatcaaacttacggacttgaccgcaaaacatattatcgagcactgccagacccgaaaagcgcaaggacttgcgccttccactatctctcaggacgtatcgtatttaagtgttgcgcttgaagcggccaagccactttttggcgccccagctaatttgaacgaattatctgacgctaaagtttggttgagaaatatggggatcacaggtccttcacagcgacgtagtcgccgcgcaagcgctaccgaggttgatcggttgtatgaagttcttaaagttaaggccgaaacggcatacaccggggcgccattacatcaaatatttatgttttccatacttacatgtatgagggttggagaggtttgtcgtcttctctgggaggatgtggacgatattcagcgttctgttatcgttagagacaggaaggacccgaggaaaaaaatcggcaaccacatgttagtgcccttacttggtgatgcctggaggatattgacgatgcagcctcgtgttgacgacagggtattcccgttcaatccgaaaagtataacagccatgtatcggcgcgttcgtgacgagttggggattgaggatctgagatatcacgatctacggcgcgaaggggcaagccgtctgtttgaagcaggattcagtattgaagaggtagcgcaggtcacaggacatcgttcactcaatatattgtggcaggtttacactgagctatttccgaaaacgctgcatgagaaattcgataagttgcagaaaagcaaaaacattgagtag

SEQ ID NO: 217894 - DNA, 549 bp, Klebsiella pneumoniae
gtgctgattggctatgcgacggtatcaaccggggatcaaaacctcgatttacagaaaaacgcgctgatccgcgcagaatgtgagctggtttttgaggatatggccagcgggaagaatgcccggcggccagggttaaagcgcgccttacggcggctccgcccgggtgatgtgctggtggtctggaaactggatcggcttggccgcagcgtgcgcgatctgattacgctcgtatcggagctacaggcgcgcggggtaaatttccgcagcctgaccgacagcatcgataccagtacgccagcaggccgctttttcttccacgtcatgagcgccctggcggaaatggagcgcgagctgatcgttgagcgtacccgtgccggtttaaccgctgcgagggagcaggggagagtcggcggccgccgccggataatgactgaagaagtggtggagcgatgccgcaggatgttgggtacgggcgcaacccggcagcaggtagccgatgtgataggagtgggagtaaagacgatttataaatatttcccagccggttaa

SEQ ID NO: 217895 - DNA, 2829 bp, Klebsiella pneumoniae
atggccgagtttatcccgccgctgggcaccgcagaccctcagatttttatggataatgtcaggcgcctcgatcagcttatgcagtcctcggagttaacctttcccgaccgcgcgggtgaactgctgtatacctggcgtggtatccatcaaactctgatcccgctcagtaagcagtacgcgacgctggcggcagcgcaggcggatatcgctaatattccggtgaacgccacaacctacgtgcgcagtcaggacggcagcgcgctggctgtggaatatctcaacaattctggaacgctccaggctaccggacgtaaaatgccatcccgttccagtgtgctgatcggcgtggttgactcatgggttaacagcactatttatccgtttgataccctgatttcaaagaatgaaaactcactgttggtgcatgttggggcagtgagttcgataacctatcgcgaagcttacagcgacctggctgatccggttgccgctggcgatattattaccgttcgatataaatattccggtactggtggagtaccgtcagtaggactgaagaccgctattaatggcgtgtttgtcagcaaccaggtaaccctgacagctggtgacaactggcaggagattcaactcactgcaactgcggcgacggcaaaattactgacagtaggagttaatacaaggctggataccgatataaagttagatattatcgcgtacagtaataagaaaaatgcaatcaccagcgctattttgagcatcatggacagcattgcctcattaaatgggaaaactaaaataggctcagtcagttcatgggtaaacaataatggttatccattttctgtatttactcagttgaatgataaccgcgtgaattatggaaaccccggaggtctctattctgaaatgtacgcgaacatcgatgttccttccgggacgtcagttacgctgagttactcacttaatatcaactcaggtcgccttttcgcgcggctggcaaatggcagtacatggaccggtgatgaagtccagctggcgggcggtggtacccggcaaacaattacgctgacggctaacggagacagtaagcagcttaaagtctattcaaaggctgaaatatctgcgggtagtatttttgctgaggttaactacggtcagaaaaactcactgaccgagcaaatcgactcgctctatacagctgtcgcatcggcgaatgcgatcctcgcgattttatcccaggactcaactttcgattcagtgacgaagagttctccttatacgtacacagtcaccgacgctggaaatacgtatcgacagttgctgaatacagtcgccacagttaacagcgctacaactgtgaaaatgatgtacaaaatcgtttccagcagtgcggcattgaagatccagagtcgtaatgggaatgcatggggggctaacgaaaagtcgttgatcgcggatgggagatatcatgaagtggatttacctatctcatccggacaggttttctccgggtggggggtgtattctcaggccaaaccaggcgggtattctgctgatgtaaccatgatccccatctctgtaaatggggtatttttcacgcctgcaacggccatcctttatgggctgatggcctcttcggcttccctggacagtcgtgtgacagctctggagaatgggcaggtaacaaaccagaataccgacgtcattttcccctcatacttctacgcagtagacggacgcccgcagcgcttctacggggcgaacatggtcagcggcaatcgcccgtggcgcaatggagcggatattgtcctgtccagtcacggctatgaagggaaacccgtgctgttaaaagacgcagttccggacgccatgatcatgccttctgaaatcaatgggccaaccctgaatatcaatgctcgcgccgatggcgccggcaatgtattccggaaaaaatccacgttcacgaagctcgccgcctcgcaaacaggtagcgtaaaagtcgcgactatcatggactcacttggtgagcgatgtgttccgtggctatacttcgccctcaatgccacgggtgcaacctacgtaggcgccggttcccggaccactcgcggcatgacagatgacggagggtatgttttgccgaacactccttcagcaggcatcccatttgacggtcgtgggggctggaccacgttcgactatctcggaaagacgcagaagacgaatttcagccaaccttttctgcgcgatgcgacgagcacagattttgcggcatatccgcagtattgctacgacaaggcgtggtccggtcagagttacgcagaaaacccaaacttgtccgcgtatcatattttcgacgtgacagcatggatggctgcggcgggagtgagcgcgagcgacaaactggttgtcgtcattcagctcggatacaacgacctctactacagctatacgcctcagcagaccgttgatgcgcaggaattcatgatcgccaaatttaaggagaaaatagcgaattcccgtttcgttatttctcaccaggcatttggctggtcaggagtcagcgcaccgcagaactggcctgactttgccaaatggataacgcagaagatcaggaagttcgacaatcgcctgagcgaaaaaataatagtggcgcctgcatgggcacaactgagctacaaatacggaatgaacgaaactatcacagcaaccagtgatacgggtgttcagaccgtatcgttacctgacgatgtccaccccggtgagctggggggagcgcagtggggcgatgctctggttgctcctgttctggcagcctggaatttatag

SEQ ID NO: 217896 - DNA, 759 bp, Klebsiella pneumoniae
atgcctattacagccattttacttgatatgaacggtcccgtcataccgggaatgaaaacccttgatgactttactatttcaaactggttcgtcgggctcccggatgtcagtgcaacaccgttcgctggttattattttggagagccagcgcctgatatcacttataactcctataacaaaaacgctccggccgtcatcaatggttctctgaataatgctgacggttatatctctgttaacaatactgattatctggatacaagccagaaagcacctttgacgctgacaatctgtggtgtggctaaacggaatgccggaggggcttcactgaacgcccatatgatcgcagatttttcaggaagcggttcagcagcgagtggcttttcaattggcttcacgaacgggaccggaaatctgttctgtgtaggccagaataatggccagtcctcggccgggtacgcctatgcggcattcccggcatcaattgccgtaggtgatctgttcgcgtttgctgcctcgataacccaggggacagcaaccattgatatttacaacccgcagacaggggcactgatatcatcatcagctgctttccctggtacccgagtggccggaacaaataatgtcctgctggggaggaaaactgataacaacaacgaaacaacgaccaagtatatcaagtcggttttgttgatggagggcgtgcttacttcagcagagaaggtttctgttgcgcagttcttattgtcgatggattaa

SEQ ID NO: 217897 - DNA, 1752 bp, Klebsiella pneumoniae
atggcctttaacccggagctggggagcacgtctcccgctgtgctgcttgataacgctgagcgtctggataatctggtcaatgggtctgcgctgactgaaccagaccgcgcaggcgttaatctggatacctggcgcggaatgatggcgaaaaatgatcaggttacggaagacgcccgcaaaagtattactgcgctgggattaccctattcgacattatcggaagcacaggcagccgtgaacaacggtcagataccggtggactcagtttgctatgtccgcagcactgacgacgcagtagcaattgagtatttaaacgaagccggaacactggtacccaccgggaatgtgttgccctcagaagaaaccatcgacaaaaagctcaatcagcgactcgtcccgggtcaatacctgtcgacatggtttcctgtttttttcgatagaaacagaaatgtttacgcgtggtttgatggcggacgttgggacgttgctgattttggcgctaatgcacgaacaatcattgaatcagtacctaacgcctgggcacaaaaatttctcccccagggagactactctccaaattactttccgtttgttcacgacagaaatggaaatgtttatgcatggttccataacggcatgtatgacggttatggatttgggccaaatattgaaaagtatatcttaaatcttgtcggtggggcttctgcaaaatcagacagttcatttattgaaggagaccagtataagttcaactttaaaaaaggtcgtgttttcagtgggcaggcagcgagtgttaataccgcattttttggtgactcatggaacgaaaaaaacacgattccacaatcattaattaatgttcttggtgggatatataaagacccggcctggataagttgctctaaccgcactgatggtgtcatggctggcatatcgcctgtcgttgcaacaaactttacgaaatatgatggagggagtaataacacgaacccgccaccgtatggatgcggacctgatgggaatgggtattacaataacaatactgttgggtctctggcctggaccggtattacagcaaccgatctttcagttttctattatgatggttccggttcgtttaccatcacaattgatggcggcacacctgtaacagtcaatggtgcgaacaccggagcagctaaaaagcacgatctcagtgggctatccgcaacagcccatagcgtaacgattcagagcctggggagtggggttgtatccattttggggatgtatggaaagaatagcgctgtgcgttccggcgtaacggtttcaaggatggggaatggcggggctataggaagtgatttctttaatttttctgagtggatcaaacctgttgcacagtatctcgatattgatttgttgttcgtcatccttggtacaaacgatttcaggttaagcaaggggacaacgcaatatagaaatggactggtggaaataattacaaagtttcgggaagctacgcccggcatctgtatttgcctggtatcaccgggtcactgtaatgcaactggtactccagctctgtcagagtacgatgctgtcatgcgtgaactggctgttgagtataacgtcaacttcattagtggatatcagctattcccgaaaacgtacgataacagcaatggggcctgggaggatggtttgcacctgagctctcttggcgcatatatattgacaaataaaatcaaaaaagaattttttcaggagtaa

SEQ ID NO: 217898 - DNA, 834 bp, Klebsiella pneumoniae
atgcaaacagaacccgacgtgttaacggaacacaatgaactcattctttcgaccagtatcgaacgtgttgtcacgggccgcgataccgcactaaaacggatcgaacaactcattcagcagcttgatgccatttcagagctgacctccgaaattggcggtggcacagcgcaagactgggcgatgaaagccgggcatcgctacgatagctggctaactgaaaaagctgataaagcgctgcctgctatcatccgcaatattgaccgcagcatctggcgcgatttgatgctgaagtccggcatgatggccttgatggatgcgcaggctcgtgaccagtggcataagaacctagaggagggcgatcttcctgctatcagcgaggcgaatatcctcagcacctttgagcagttacatctgaataaaatggatgtcttcgaacgcggcatcattaacgtgttcaaaggcctgtcgtgggattacaaaaccaacagtccctgcagcttcggtaagaagatcatcattaacaatctggtggcgtataaccgatggggctttagccttaactggggttggcggcgggatcaactggcagacctggagagaatgctgtttctgctggatggtaaacccatccctgataaccggagtgatatctccacccggttgatggagcatatccgggataatccggctaaggacgtttacgaagatgagttcttccgcattcgttactatcagaaaggcactgcgcacttggccttcaagcgtctggaattgattgagcgaatgaatgacatcattgcgaaacactttccgggaatgctggcttcgagatga

SEQ ID NO: 217899 - DNA, 615 bp, Klebsiella pneumoniae
atgacattaaagactatcatcgaacaatttccaccgttatcagttgatgagctagtcactgggatcaataatttccctcaatacaacatagctatgaaaaaagaattcttagctaaattgatcaaacaccaccctttgctctatgttgattggggagaaggctcttcatattatagagcaaggtatatgggaaatgatgcgtcccctattgaccacgtcagtaaaattctttgccccccaaaagaaataagatcctacggtagaattgattcagatgaaaatgagattctctacacagccagcagtaaaaacactgcacttaacgagttaaaaaattataataatagctttaattattatactatagctacttttcgtatctataatagcataaaagttcttccgatcggggagctttcacatactcaagttacaggaagaggaatgcttctgggtaatcaatcacaatcaattaacaaattgatcaatgcctgcaatcctgatgaagtaacccgattacttataactgacaaattcctttctgactctctaatgagcgataactacaacataacttcatatgttgccaattgtatctttgaaaaaaaattctga

SEQ ID NO: 217900 - DNA, 123 bp, Klebsiella pneumoniae
atggatagtgtttatccgcacggtcagttgcagacgagatttccacaattgcctgcattccaacagagcaagagcctgtcttttgtgaagctggatcagggcggcggtatcgcggaccggtaa

SEQ ID NO: 217901 - DNA, 267 bp, Klebsiella pneumoniae; identical to SEQ ID NO: 215497

SEQ ID NO: 217902 - DNA, 285 bp, Klebsiella pneumoniae
atgatgcagaacgggaaaaacaaaaggcactggctgatgctgctgacgctgataatgctgctgaccagttgcgcgggcaactcgccaaaatcaggcgtgaacttgcaaccagtgaaacaggcaggatttccgcagatgccgccagaaggcagacagccgccgaaaccgcaagtttgcttgccgacctgtacgaagaatcagaccgtcgcgcgggagaaatcgctaagtatgctgacgcagcagcaagcgccgggagcgtctgcgaacgcacttatgacgcggtaa

SEQ ID NO: 217903 - DNA, 279 bp, Klebsiella pneumoniae
gtgaggaaactctggaagcgatttattgaatcactttcgcctaaaaagctgggggtactactggctttggtggtggggttcacgctgggagcgattaagttttgggactggtttaaatacagggtgggaattattacggcggctcttgcggtgctttctcttaatgaatgggcagtaattatcggcattttatgcactgtggtgacttgcctcgttaactggtattacgagcgaaaaaaatacctaatcgctttaggtggaggtgtgcgtggggaataa

SEQ ID NO: 217904 - DNA, 339 bp, Klebsiella pneumoniae
atggagcctgcttactacgagattggtgttatcgcatctatcccagaccaggaattcacatcatcactaaacggcgtggttttgaatatgcgcctgttcttcgcaacaaccacagagctgtggtggcttgaaatatccaacgcagacaggacagttacactgtcacaaatttgcttgcgtccgggagtctggcacggccttagtggaaaattgccgggctatgctggcgcgggagcgattggtgttgctcgtcttagaccaaatgaaaaatttggagacgttaacgcttttgatgggggctttggccttttcttttacgacgaactggagagtgattaa

SEQ ID NO: 217905 - DNA, 597 bp, Klebsiella pneumoniae
atggctgaaggtatggatgcggcgattagtgcgccacgcgataaacgggctgttatggtgtttgaatcaggggtgacagtgtcacttaggctcaagacacgtgaggaagtttcggcaaaaagaaccattgctcaggggaagattgagacgggttataaaatatcggatggtgaagtagacgatccaaaggttgccagttttgagggaatcatcaccggcactgatttaccttttgcgcctctgcatatgatttcagccatgaatcaggctcaggccattcaggcagcatacgatacgaaggaatttgtatcggtctatacatctttcatggcaatgcctcaatgccgtatcacatcgctttcaattgaagctgcccctaagaaaaacagctataccgtcaagctcactgctcagaaagttgacacggtgacatttcagcgctcacgcacaaaatcagcgcaagcaaaaacttctaagccagcagggaaggggaaaacctccgcaggtaaaaagagcgccaccacggtagacgcgagcaaagagccgcaaaaagtctatgcgctcgaaaaaatgcgccgtgtatttggaggggcataa

SEQ ID NO: 217906 - DNA, 246 bp, Klebsiella pneumoniae
atgggattctttaagtttgaccaattgattacacctaaaattttagctgtagtttatttgttgttagtgattttttgcgttgtgatggcgctgaaaacaggaagtacggatggaatgcaaatgctcggttgggtatttgctgctatcgtggcaagaattccttttgaactggttatggttaccttcaaaaacaacgagtacctacgccggatttgtgaaacagcagaagctaaaaagagcgattaa

SEQ ID NO: 217907 - DNA, 1881 bp, Klebsiella pneumoniae
atgacagaccagtcagccgatctcgtaacgaaaattgacgtaattccagaccttgacgggctcaacagctttgatgccgcgattgataaggccatcgcaaaagttaatcagcttgacgccgctatcaagcgtgtcaacaacctgaagcctgcaagcccctacgcgcccagcagtgcatcaacagcgccgacagcagccactacagcagcaatagccacagtagccgctacaggcacgaatttgattgctcgtacacctctggcggaaactgtgcgccgggagtctcagaaggtcgcacgtgcagccgttcagggcatgggtaacggtattggccttcctcttctgggcggtggcggttctggtggcggaggtctgctattgccgccgccccgcgctggtggttttaacccgttcgacgcgtccaatttttccggcgagccgctaaataccaggaagaaacctgttgctgatgccgtacagagcgggatacgtaacccgtttggtgttgatacgatgctggcaggggccgggctaactgttggcattatggcggcgggtaatgcgctggctgacagccttgattcaattcagcgtcagcaggcgcagattgcgaggttgacgcagacaaccggcgacgcaaaagaggcgttctttgcacttaatcaggctgcgagtgatgtgcgaagcgacagcggggcgtttatttcaacgtataccaatatggcgaccgccacgcagaaacttggaaagtctcaggaggaaacaatccgggcaacgcaggggctggtaggcgcattgcagctaggtggaggcagtgctgaagcggtaaacgcagcgctttaccagatgggccaggcattttcttctgaccggttcggcggggatgagtttagatccttcatggaagccatcggtacaatggccccggaagtggcaaaggctttcggcacggatgtaaaagggctacgggcaatgtcagaggccgggaagctgacggcggaaaccatgattaaagcttttgagaaaatggcggcgagtaatgccgacctgcttaaaaaacagggctggacgtggggccagacaatgaccgtcatgaaaaatgactggcaggcatttttagcgcaggcaacaatcggcggagaatggcgaaaattcactgattgggccgcaaatacacttattcctttagccagaagcgcagaaaaagaggttgccgcgttctggtcaacgctggcagatgaaagcaagtcagcaattctgataggtattcttggcgctgtgggggcggcttttactgcgttagctattccggtcatggctgctatatggccttttctggcaattggtgctgctgtatgggtggtttatgaagcgtttgtagaatggaaagcatggatggcaggagaaaccggaacgatttttgatgggttatttggcagttttgatgaatttgaaaaaagatatcctaatatcatgaaacttttacgtgcattaaccggggcggtgaatgatgctgctgacaatatggataaaagcaaccaaaatgaatcaaaaagtgacccggatagttttggcggaagggttaaaaaattaatgaatccattttatttggcaaataatgctccagcaggaatgatgaactttcttgatggtgttataggtttttttggcggagagagcagcgcaacagatacagcaaacgtatcgccagcaggaaaaggcggtgtaattgttaacaacagcaacagcgggaatcatcaaacacagattatcgttagcagtcctaaggaagccgcagaaacggtaaataatatggttgagccgggtacaatttcgggggatttgtctggtaacatagcagagtctaccggagcacgataa

SEQ ID NO: 217908 - DNA, 486 bp, Klebsiella pneumoniae
atggacgactcaatcaaacacgttgaaatcaacgggcgtaaattctgtgtagtccgaatgagcgcttttgatgccattcactttaatttgcgcgtggcggagattctcgccaaacacggcatcagccaggtagaaagcattctttctatgtcgtcgaagattttcggtatgcttaaccgggaagaccacgacgaactgttatttaccttgctggcaaaatcccgcgctcaactggtcgataatggagagtttctcgatagatgggacgcagtgaataccaatttcaccgctaccaatatcgccgatgtttatctggtggcgctggagtgcctgaagctctccattcttccggttacagcagggttaaaaaaaaatattggtctggacacagcgggaacgatgcagggggccatgcggcaactgttcagcgccttgctgaaaaccttgaccgaaccgtccgcaccgaacttgtcatctggcgagtga

SEQ ID NO: 217909 - DNA, 423 bp, Klebsiella pneumoniae
atgtatttaggcgtaatgtcctctaaagactggctgattaccgtaggcgttgtgccggtaatcggtctggctaaagacagcaatatcacgctggaaatgacggatgaccagattaccgtttcttccggcatcggcggcgactggtcttttattgataatccgactgaagaagggtctttgaccttcgtcacacagcgtaattccccggttaacacggctctttttctgatgcagaaaacgaagtctgtagtacccgtcacgctaaccaatacgcgcaatctgtcggtacaccgcatgggttacgcgatgtttgcccgtcagcctactgatggcgcaaataacggcgctggtgctcaaactctggaatggaaactcgttactggcgaggttgattcggtcattaatggagtgaatattacctga

SEQ ID NO: 217910 - DNA, 1359 bp, Klebsiella pneumoniae
atggcgaatttaagtcggctttttagtgtaaaaattgggcgtcaaactaccgccgctcaatatggcgtgtttggtgtcgggttaatcctcgcgccgggcgcggcatttttcgggaaaaaattcacagattacgaatccgctgttgtcgcggattttgccgatctctaccgggtctataccagcgctgatgatgccatttcagacggcgtatccggcgataatcttctggcggttcaggcgtatttctctcaaagtccgtcaccggatacgctggttgtcggcgatttctcagccgcttacagcaaaactatgattgccctgacgggggttccggtttctggcgcacctacaactacaaaggccaccatcggctatgtgaaaggtacggaatatcgctacgccagttataacggcacgacttgggccgggagcactggcgcagcggctgatatcgttgctgatgcaacgactacaggtcagtttctggttgatggtcgcattgtctatctggaaggggccgaagttgttcacgctgaatctacagcgctggctgctggcgtcagtgcagcgattgctgccatcaaaaaccagtacaacaagttctttatgtgcatgacgccgtcgcggaatctgtcgattcagaaagctattgctgattgggtcgaatcgcagattgataaaatggcggtgtttatcgacgactacacgtcatcttcctgggcgactgacagcattacgaaataccttttcgataagaatatggctggttcgtttgccatttcgacgaagctcgaaaagaacttcctcgacgctgctatcgccgggcgttgtcttgtcatgcaaccgggctcagaaacgtgggcgctcaagacacttaacgctgttcaaagtgatggattcaccgaaaccgattaccagaaaattaaggcgctaaacggcaatacctttgaagattatggttccggtatcacggtaacttaccccggcacatgcggcgacggagaagcgattgaagttgttcgtttctgctactggcaggccgaccgtatgcaaaaagaccttgccacgctgcatatcaaccgcaacaaagtgggtcatgacatgccgggctatgaactggtctgtaaccagatggaaagctcgctgaaggcgggccagaccgctggcggcattatggaaaactttacggatgataacggagattatgtccgtggatttaccgtagtgcgtccaacgatgtcagaaatcagcgccgtgcagcgtattaaaggcgatgtgactatcaaattctctttctacctccgctacgccattaagcacgttgatgctgttggtacagcgatgacttacgggatttaa

SEQ ID NO: 217911 - DNA, 786 bp, Klebsiella pneumoniae
atgactaattatacggtcaaattaatgaccgttgacggggaattatcatattctgattatcgcgcagaaaaggcgacattcaccgctaacggtaacagcaaagacattttattcacgccatataattttcgggatccgtccgtagtcagttctattgtgctggataatggcagcggaaccactatcaatattccggctgatttccggctggatgttggcgatgttgtcaaattcccgactggcacactcaaagagaccgatacgcaggccagaccaacaatcctgagcggtgctccctacgtcgcaatggtacgcgcaagacaggcaatgattgagttagtgggggacagacccatttacgcacaacagaagattccagagtcaaaggatccgtttactgccgttcatcttctcacgtcatcgagagagccacaggcattcgcaaagtcatgggatggcgattaccgcgtttatcattacaactgtgaagcaaaaattatcgtcatccggtcatcagatgacgctcaggcatttctggaaaactttatgaatcaggtcgattcgaccgaaggtgatttctggcaatttgaaaataactgctgtattgaccgctcgggcgatttcgagaatagctcccctctaattgataacctcgtttaccagcagatggcacaggtaacgctgtctttgacatttgtgtaccagcattacaaacgagagagttggattgaaagcgcgacggtcacaccgtgcgataaggtcactctcgctatcaggggctattaa

SEQ ID NO: 217912 - DNA, 300 bp, Klebsiella pneumoniae
atgccacgcgaggaatattcagagcaacaatccgctttcctcagtatgcagccggttgatggtggcggttcatttcgggcgtacctaaccgggcgcaaacctcaagattacatggaagccattggcgaaacggatttagaggttacagaagagggagagcataacggcgctatagtcctgtgtgcgggtaaatattacgaagtggtgcagcggcaggagtggcaaaacggcgttattaaccactacgaatatttgctatttggtatgaaagaacgggacgcgctcgcgctggtgggataa

SEQ ID NO: 217913 - DNA, 474 bp, Klebsiella pneumoniae
atgcgtggaggtgcaaagtttgaaacaaagggctttgaccgcgtaattcgtcagcgcatgaatgcgctggcgggcgtcaaacttaccgtcggtatccacagagggaaaatgaatcagggcgttgatgttgcgctgtatggagcctggaataacttcggcacaaagaacgctatgggatgggagttaataccagagcgtccgtttatgcgatttgcggcggacagaatagctgactggatgcgcacagatgcttacaaagaggttctgcgtgatgttgcacgaggtcgcattactccgcaacaggctattgctcgcataggtgctcaggcggttcaaattacaagaaaaacaatcgctgattccgcgctataccgtcctaactcagatatcaccatcgcccgcaaggggtcaacaaagccgcttattcatagcggtacgcttatccagacagtcaattacagggcttttgcatga

SEQ ID NO: 217914 - DNA, 360 bp, Klebsiella pneumoniae
atgacggtaaatgactggctcgccattctgctaccgggggtgacacttgatgagggcgctattagcgccctttcttctcaatgtgagcggctttacaacctgcgggccgctgcggagtacggttacgacattgagcgcctgaaagcgctgtatgttgctgccaatctcgccccaatagcagtagaaggcataagcgcaagtgttcgcggtgttgcaagtcgccgggaagggaaagtagcggtgacattcacagaagccgcgcaaaagtctggctggcagggtacgcagtgggggcaggagtttttagacgcaatgggggatttgacaggcggttgcatccttatcggtcatgcgtcttaa

SEQ ID NO: 217915 - DNA, 255 bp, Klebsiella pneumoniae
atggctgagaaagaaaaagtttttctgactaacaccactcaggcaccgattcatatcggtgcaaaaaacagtgaaggcaccgttattactatctcaatcgctccgctggaagcggtagaggtggacggcgcaacactgaccatcggcggcgttaagcagtttcttgacgaaggccggttaaaagaagtttcagccgccgaagccaaaaagctcaataaagagcatgacggcgtaattgagtctgacgacgagtaa

SEQ ID NO: 217916 - DNA, 939 bp, Klebsiella pneumoniae
atgaatgagaaatatttagccgcgcttatggcgcagctttttacagaagctcaggtagctggcgcggtgccgggtatcaacgttgacgaacaagggctaatttttgcccgtgacctcatttccatgtcaaacgatgtttacatggaagaaatgcccgcgccggtcgcgttgaccatgttccagcaggagccgggcatcaacgagggcgctaagtgggctggttatcgcatgtattccgctcagggcatggctaaaatcatggcggcattcggtacagatatgccgatgatgagcgccaaaggccgggaatacttcgcgctgatgtacgatatcgggctgggctatggctacacctacagtgacgttatggcggcggcaatgtccggtactccgcttgataacattctggcgctcaatacccgcgaagcgcatgagcgcaccgtttctaatctgctatggcgcggaaacaaggaatatcagattatcggctttatcgaacatccgaatattccgctggtggcgctacagggtgcctgggcgacttctgacggcgataagatttgcgacgattgctcggcgcttatcgctgcggtaaacaccacgaaaatctacgaagtgaatgaattccatatgccatctaaggcgtgggcgcgaattcagggcttgcgcctgagtggtacgctcggcacggtgctttcattcctgcgtagctcttacccggaagttactttccgcaaaaactccgatctggatgatgacggtatctgtatcgcgctggcaaacaatcgtcgccacttcgcccaggctactcctgtgctgttccgtcagttgccggttcagcgtagcgggctagacctgtctattccttgcctgtcgcgctctgctggcgttatcgtccgtgcgccgctggctgctgccaaatcctcaaaggtgatttaa

SEQ ID NO: 217917 - DNA, 792 bp, Klebsiella pneumoniae
atgcagaccacgattaaagacgattttgacgcggggttgccgggtgatttggcggtgcttccgtctttccgttcctccgctcgcgtaacctcccgtcgcgctggtggtgaagttgcgccgggcgatgcggtgaaacttacctccggtaatgattcaacctgcgtcgctctacctgatgatggtgatgttacggatgccatcggtattgctgttaccgcacattccaatatgcccgccacaccgggatttggtagcaacacgcgcattggcgtggtcactatcaattgcccgattggtattgtcgaaaatggcccgatccgcgtggcggtaaaaactggtgagtcgccgaaggtgggtgatttagccgtgccgaaaggccgtaacgccactaccggctatatggaatggggtgttgctgcatccggcgataaaagccgcttccgctttgaatcgccaactcagcgcggtggtacggcaattgtgatggtcattgatggcgaactactcagcgccggatatccccgcgaagtcgccgtaactggcgttgcgctgtcgcctaaaactgcatctaaagccgctggtgcgactcagcagtttacgccgacagtatccccggcaggcgcaaccaataaaggcgttacctacgcatccagcaacgccaacgtagcgacagtggacgcatccggccttgccacggtgaaaagcggggcaacaaccggacagacggcaaccattacggtacgtactgaagacggtggtttcactgacaccgctgtaatcaccgttagctaa

SEQ ID NO: 217918 - DNA, 1014 bp, Klebsiella pneumoniae
ttgctgcaagaaacacaggtcaacgttgacgccatcaagcaatgggagataaccccggaaggttatctccagattgatatccctatcgcccgtccgggcgtactggtttatgaccgcaagcgcggtgatgcattcacggctaaagagtaccgctcagccgatgaattgtttaaccaggactcaatgaataccttaatcggcaagcctgtgacggtgtcacatcctcgtggtggtctggtgacgtcaaaaaactaccgggccgtttctgcgggggttgttactgctgttatgcgtcagggtgatgaacttatcgcccgtgcactggttcaggatgagaagtccatccgactgattcagcaggataaagatttacggggtgcttcggcggggtatcagtgcgacgaaaagccaaaagagacaggactatccccggacgggcaaacgttcgacacgctgcaaaagggtatcaattacaaccatttgagcattgtgcgtaacccacgggtaaaaactgcaacattcaatctggacggtgaaccgatggaattagaagaggcgttagccgaaattgaaagtcttaaagcgaaaaatcaaacgcttacgactgatttaagcaaaacacagggtgacctgctgaaagcaaatacccgccttgtaaatatggactcagccagcaatgaagcctatgagcgcggtgttgctgatggtcgtcaggaaaatgacctgaaagcagcagctaaacgcctgaacatcaacaccgacagcctgggcgatatcaatctggtcaaacaggccatcatccgcaaggcaaaccctgaagtaaacatggatagctggacggatgagcaggtagatgttgcgctgtcaatggcgctggttgcctgcggtaagaagttcgaacaaacaccgcgtaatccccgcgcagcagtaaacaccgatgagcagggcgctcagaagtcagcccatcaggattatctggctcgcacctttggcaaaaaagaggcaggcaaataa

SEQ ID NO: 217919 - DNA, 1362 bp, Klebsiella pneumoniae
atggcgaagagtgaaccacgttacgacgccgggtatccgctggctatcgaactggtttacgctcaaaggctgggcgataacgcccggcttgttggtaaatgggttcgcgatgcctgcataaagacatacagagcaatcggtaaatccggcgcggtactcaataccgatgccgccgatggtaaagatatttccgttgatgacctgctgggggatttcatcgctgccgcaacggtcaaaaaagtgcgcgtatatataaagaagaaagccggaagcaattattcacgcatgacgcgcgagcagcaggaaaggcttgtcaggtctgttgctcaggaacttttgccggatgcatcaatattccttaaagccattccgtcgctgttgaaagatggtgagtttggggccgttcccgcctacgcattcagcgaagtaaggcggcaggcaggaatcagcctggctaaagacttcgcccgagcgaccggctcaaagcccgatacctaccttcgtgttatcaaccgcgccgctgatgacgtacaggccgctattgtaaatggtcaatttggcctgactgacgagtattaccagagctattaccagcgtttccgcgtcgatggtgtgaatcttattgacctgaaaacaggactgtcagccacacccgatacggcgggggcgatatctaagccgctcgccagcttaacggatccgatgagagccgcgagcacggttccatcattaccggctatggaagcggcaaatacccagcttgctaactcggcggttgacgatttccggctggttgttcgcgctgccgccgatatcgatttggcaccgggtatcaaactgccaaccgaaaatatggctgacctgatatccattgatatctatgacggcgataaaaagctgctggagcaaacagcggactggctcgcggagagcatggggcgcatggagaacgtctccgatgaggcgctacagcgtggaattaaggtcgttcagcagggattacgtgaggggcggggcgttgactatatcgccgataaactggcaaccgaaatggaaattccctatcggagagcccgcaatgtcgcccgcaatgagataggtaatcaggcctggaatctggaggcagccaacgcccgtattgccgggatgaaaatataccgctggcgggggatgttagacgagcgcgagcgaaaattgcatgttgagcgcgaaggtaaggcatacgagccgaccagaccgccacaggatgggaatccggggcaaccgcatttatgccgctgcttccctgaatggttgttctctgcgtcggacgttgaagaagcggagaaagaaattgctgcaagaaacacaggtcaacgttga

SEQ ID NO: 217920 - DNA, 1374 bp, Klebsiella pneumoniae
atgacgaacaaaaccagcttgattcccactgagggaattttaacgaaagagggcttgcagccagcaaattacaatgttgacggctatgtcagtatgatgaccagcgcagcggaaagctcaaagggtgctgcggggatgagttcaccgacagccaaccgcatgaaggctcgcgccgcagaagggatgattccgctggtggctgcaatgaccggggagctatccggcataggctggcgcattatcagcgaaccagtcgctgccgcaatgctgaacggattcaccgtagttactgaaaatcctgatgattcaaagcgtattcagcagatttttgacgaaatgggcgcgtggcaggtagtagaaagcgccgccattctaaagcgtcatcatggctggtctgtgctggttatgggggaagagtgggtgcgttgccacggctcacactggattaccccgtcgaacgactggtttgcagactataattcgccattttttggcctgccggaaggctggcgtatccagcttaaaagccccatcggtggcgaagtgtttattgagcaggaggattcgattctctttggcgataaaaactatcaaccgatttacgcgatggtcggtatcgaatttggcgaaccattgttatgtaagccttatgcagcgttacagcgtctgggtctttcgcatgagctaataatcagcattctttccctttccgttcaggatatctataaaaagaaggatttagcggaagacctgaaaacggctaaaggagaggcagcagcggcccgcaggctgggagggatagcggcaacccgccagttaaatgatatggtcgcgattgacgatgaagaggaaatcaaccgcctacagtccaccatgaccggaaccgccgaccttgttgatatggctattaagctggtatgcgccgaaacgggttttcccatagctatgctggcagagcgtaaaggcgggctttccaacagcgataccagcgccgatgcacaatggcaaaaccttgtttctcatatcaacaccaattacatcattccggcactgaaaaagctggcttttcgctatacggggatccgcgctgattttgtcccgaataaatctcagggccaaatagaccgcgaagtagacagggacaagaaacgagcggagacagcacagctttactattccatgcgagccattaccagcgaagaggcccgcgccacggcacaggaaaccggagcggtggttatgcttgcgactactccgcccgcaactggcaccattgatgaccagaatgacgacgattcgaaccagaacaacgagaatctgaaccggaatagcaccaaagaagacaacgacgaggccaataatggcgaagagtga

SEQ ID NO: 217921 - DNA, 1410 bp, Klebsiella pneumoniae
atgacggcgattgagatagcaccagagcatgatttagagcgccgtcgctactggctgtcagagaaaaagaaaatggcagagtggcggcgcgtaatgcgttcgctcacgacaaaaccgcaccgcgttaaatgtctgcgcggtggtcgtggctccagtaaatcatggaggattgccgaagcactgattcagctcactgtgcgatatgacctgcgcattctgtgcttgcgccgggtgcaaaaatctatcgacgcatcatcacataagctactcagcgatacgatacgccgtctcggttatgaatctgagttcacgataacccaaaacagcatcaagtctaaatccggcgctgaattccggtttttgggctttcagtcgaacctcgacagcattaaatccattgaaggggtggacatttgctgggtagaggaagcgcacgcgatatcggctgaagcgtgggaaacgctggccccgacattgcgccgtaatggtgctgaactatggattaccttcaacccggcttttgcgtgggatgaaacctatgtcagatacgttctcaatgcagaggatgactggtttattgaggaggtgaactggtatcacaacccatatttcaattctacgttggataaagagcggctttatacgctgaagtattacccggacaagtacgacaacatctggaacggcgttcccgtcagtgatttacccggcgctgttgttaaccgtggccatcttgaaaagttagttgtttcgcccgattcgaagctggcgaaagcgtgtcgaactggcgttaaaacggcggtgctcgatgtcgctgatgatggcgatgatgattcggtgttgtcgttctttgacgggcgttttttgtaccgtatggagcgattacaggcacgtgacaccgttcagcttgcgcagcaggcgttaaagatggcgacggaagaaggctgtaccgtcctgatttacgactctgtcggcgttggttctggtgttaaaggcgagttaaacaaatacgaagattcagagattgagtttcgtaaattcgtcgctcagggcgaagtgttgcgtaaaaagtccagatatcgcggcgggaggtcgaacgaagataccttccacaatctgcgagcgcaggcatggtgggcgtatcgggatgcggtcaatgactctgtgcgctggatggagacgggaattatgccgcctgatggccttttcgctatatctgaccagataccgcgtcgatatctcgatcgcatcctttctgactccactggcgtcatgtgggaaaccacacctgacgacaaaatccttattgaagcgaagaaaaaagttaaaaaacggctgggcgtgtccactgactacgctgacgccatattcccacatctggtacgtatgaaatcaggaattatcgaatga

SEQ ID NO: 217922 - DNA, 546 bp, Klebsiella pneumoniae
gtgacaataaaaataaacaggcgtgatgatgcatttgcaaagctggtggctgaagcgcgggaagcgccggggttcagctatgcaaagtcgcgcaaccgtgattacaagggctttaacgatgattttcaggctgaaaagttacttaaaaatgacgacatacagcaggccgtcagcgtttacaaaaaacacattattgcagcggatatcgtggggcgtcaggaggcgttaatagacctttcggcgcgtttccgtgcgccggattcaacagcggtaatgctggaattgcaggcgctggagaaaatgaggcttgaaccggaggtgttccgtagccgcatggcggcaattgatacccgcgcagttaaaaacatcaaaagaacaaagcacggctggcaggttgaggggctggataagtctcatcttgccgcgcggatccttacgcttgccggggtggatatcagcaagccgataaccgacgaaggtaagcgcctcgcgcgagaaacgttaaccgaaatttaccgggatatgggattcgatgacggcgattga

SEQ ID NO: 217923 - DNA, 489 bp, Klebsiella pneumoniae
gtgagtcaattaattaaaaattatataaaaaagactaattatttgtatgcttttttggtttttattcatgggaagattttttttaatgttagatctttgatcagatatttaaatgatcgttatttttcgttgacttactataataatttatcacttgttcgagcttgtcatataactgtaggtataaagtatctttttttaaaaaaaacattgatcccgcaccctgttggtattgtaataggaaaaaatgtagttcttggaaatcgatgtacaatatatcagaatgttacaattggcgttcggaataataatgaagataagtatcctgttttaggtgataatgtgatagtgtatgccaatgcatgtattattggcgatgtgagaataggtaacaatgttattattggctcgggtagcttggttaataaagatattccagacaatgctattgttaaaggtagtccagctgttgtgatcagatttcaataa

SEQ ID NO: 217924 - DNA, 1329 bp, Klebsiella pneumoniae
atgaagaaatatgtttataatgcgacttggatttttgcagaaaaaatagctcgggttataattacttttataacctttgcctttatttccagacagcttggccctgctgatacaggaattctaagttttagtcaaagtctagtaataatgttattgtgcgtaacaaacttagggctcgatagcattttaattagtgagttttcaaatgataagccagagcaccagaatggaaagaaaaatgaagattttatttattcgacagtaatgattgctaaattttctatttcttttgtctgtatgattgtgtgcttgttgatattgcttgtagcaaatatttcatttaataataagctgatttttatattgtctcttatatcactagtatttcagtcgaacagcactttttatgcctatttccaagctaaatcaaaagcgcttcttttagctaagttcagtttttttgcaatagttatttcaactgtttttaaagttatacttttgtattttcacgccaatgtttattggttttcattttctttttcgtttgatgttatcgttcttttttatttgttgctaattggaatgagacatcaaaataaatatatttcattttcttgttttagacgagatgttttatttgacttattaaaaaaatcttaccccataatcctttcatctttattagttgttttatatactagactggaccaagtcatgattttaaaaatgatgggttcagaatcactcggaatatttagtgtcgccgttaagatttcggagtcttattccttcatacctgtcgcggtcgttactgccttttttccattgataataaataataacaacaatagtggtgatatcagaacctattttgaccttgtcttcgctagtgcttttttttctgcattgcttgtgatacttttttcatggctttttttagaggatatttttggaccggcttattcagggagtttctcagttctttcaataactgtattttccactgtatttgcagtaatgggagcagcgagtactaattatttagtagtcataaatctcacctatatgcgattaattcgagctattgcagggttaattgtaaatttcattttaaatatcatcttgatccctcgcattggtatcgttggcgcagcctacgcgtctttatttagtcagtttttttctgggtttttagccaacgggcttaataaaagaacatggttatgttttaagctacagtttttgtcagttgttacccttggtattcccgggattgtaagcctacttaataaaacaatgaaggagaaaaaaagtgagtcaattaattaa

SEQ ID NO: 217925 - DNA, 1347 bp, Klebsiella pneumoniae
gtgttatctaaaaagatcaattatgataataaacaaaaaaatgttgctagtataagacaagtgtcctccgtggctgagttacggaatacagagccaaaccatgcatctgaaataattttcgtattaggatattatgaaaacactccttttcaaggaggtggatattttttaaatcatataaacaacaccaatttagatgattgcggcgttaatatccgtacaaggtctggaaactgctggcgacgtactgatgatttttcgtcaggtgtgaatgcgcagatattcggtgtgttagatacaggggaagacataactgaacagttaaataatgctactgagttttctttaataaacaacatagaattagttttacctagaggttatcttagagtagatggtgtctggaaatgtaatggtgaagggtttcgttgtagaggccaaggatcaaataacacttttgttttcggtactaatgtctcagcgaattctccaattttattaataaaaaataaaaactggaatattgaatctgatcctgccctttgtcgattacatggattaaaacttagcgatttctgcttcactggtaaaatagaagggaataaagagcaatcatcttgccgtgatgcactttctttgcatggaattggctttgattttgaactatcatcattgaatttttataatattggttgtcgagcaattgttgcagaagatttatgggacggggatattcataattgcaagtttcatgaatgtggacagtgtttacaatggaagactgatgatgattattatcaagctctagtttttaaaagaaaatatgatagttgtaatgcagtaagaattacaaattgccacttcgaacaccttaaaagaggtgcgatatacattgaagattattgttattctttttttcttacaaataataaatttgaagcggttaatcaagatcagcgctataaagaagaatatcctatatttataggtaataatcatagatgctttactatgtctggtggatttatcacgcttacgcaacaaaataaaaacatgcattacataagaggtggaggtgatataattcgtatcaccaatgtatcttttattgctcctcaaaacaaagacggagctgctgtacttaatctttcaactgggcgatttaaagttggtgctattatttcatcacacttcgacattagaggtgacttacaagtagaaccattgctcatcaaaggggatgccgattttagtggctcaactataaaatgctttcgacccttaagaaatttagaaaaaagcgaacgagttataaataatgcatcatttatatatgatataaattaa

SEQ ID NO: 217926 - DNA, 1050 bp, Klebsiella pneumoniae
atgagtcataatgttatttttccaatgttatctatttcaaatcatggtggtgtaagaattttattgcaaatagcaaatagcattgcaaataaaggtggttgtactaaaattatatgccctaaaggtacatatgatactagatataatatttctgataaggttgaaatagttgaaatagggcctgcgatatctaataaaatctgtcgttggttttgttttactattctctttccattttacgttaaaaataatgacacggtatttgctaatttttttgtaactttttacgcttcgcttctctcgcggatgttatctaaaaaaattaagattgtatattttattcaagatatagaatatgagtttttcggaggtttaattaaaaaaatagcaaaaaaattatgcgagtattcatatgcatataataaagcagatattatcgctgcaaacatatatttatatgaacggttattagttaaaaacgacgctattaaattatttaatgtttggattgatgagaagtttataacaactacttcagttgaaactcacagacaatatgacttgatatattttctaagacaagacccgaggaaaagaatcgatagatttgaaaagatgttaccttacctttatgaaaataatatttcgattttatgtgttactcaatctctcgacttagctgaaagatactcttcgcaacttcctgtttttatacctgaaaatgatcaagaacttatttcattaattgataaatgtaagatttatcttctaactagttcgcaagaggggttttcactacctccactagaatgtatggcgcgtggtgtaatccccgttgtttttgaatgcggtggacctgaaatatatattgaagatggcctgaatggttttatagtcaatacaattgatgaagcgtctgagacaattcttaagctggtaaaaaactatgattcgttaattgaaattaaaaataaagcgatcggcacagctagaaaaatatctttttcagaagaagtaaatgccttagctgataaggtgttgcaaatgtaa

SEQ ID NO: 217927 - DNA, 804 bp, Klebsiella pneumoniae
gtgaataccttaaagttatcaatttgtgtcgttacctacgaatcgctagatatggttaaaaaatttcacactgaacttataaaaagtttagatggatattcagaatgggaggttttatactttgacaattctaaatcagacgaggtgattgactatataacatcagttaaatctgataatgtgttaattgattttgataaaagaaatatgggcttttcatatggaaataacagattaattattaattgtaaatatgataatgtattgcttttaaatcctgacgtttttgatataacaaacagtttttggggcgaattaacgttaaattacaacaaacaagatgtgctatttattaaacttttgaatgaagatggcacattccaggactgtattgggaaatatgcatcattttccagagcatttggggcaaaggttgattatgaagcaattaatcaagccacgccaattgaaatggggataatggcttttatgttaacctcaaaaaaagtgcttgcccatgttggattgctagattgcgattatcctctttatgctgaagatatggattggtgttatagagctaaaagattaggctactcaattatatataatccatctcttgtcttaacccatacagggggggggtcttctagaactcgctggcgtaataacaaaacacaacttaagaaatattatgcagaagaaattttcataaaaaaacattataagggattacatagaacagctatgctggccctcaattttgtaaaaaaaatcaataataaaatgagatcttttaaatga

SEQ ID NO: 217928 - DNA, 675 bp, Klebsiella pneumoniae
atgtgtataagagacagcttttatatttttttattgctgtattgctcttatttactatttcttcatgattatgtccaaatacgagttgcattggctcttggggtttttgttcttgctttgtactgcgccgatagtaaagtaattaaggcattattgtttgtagttgcatgcttgatacatttgtcatgtatattgcttgtgttattttattatgcatttaaagtcttaggccctaaaaaaattataaaattgttgccgtttgctttaattataccgtctattgtgttttcaggtgtaattcccattgaacggataacaacatatataaatatgctaggaaatgaaaagaaatttgatcaaataaacttgctttcaacgttaccaatcctacaaataactggattgttggttatttatttttcaaaatcaattaaagatttatcgaataaattcgagtttagcctgtctgcacttggggttattcttttttattctctacatatgattcctgtttttgcattcagattttttgaaatgactaatttattttttatcattcttctatctgatggctttaaaaaatcgatatatttgaaattggtgtttgttgtttatatattgattggtttgaaaaatagtttttatggcgaatcttcattgtttaatttaatttaa

SEQ ID NO: 217929 - DNA, 651 bp, Klebsiella pneumoniae
atggtagcgggccgggataagctggaaaccgcctttacggtagctgttgagcacctgctgttcagcggcgagagaggcctctgtgctgtctgcggtgtacgtggtgatattaaagaaataggacaccagggaggtctggttggtcgacagtcgctggcggatatcgccccactcctgcatttcctttatcacgttcggaaagtacttcgcgtaggaggttttgcttttcttctccacgtccatgaacttcaggttggcttcgttctgggtcttcacctggtcctccaccatcagcgtcagcgtgatgacaaaggggcaagaaatggagagctccgggttaagcaggttggcgtagttgtccgcagcggtccagaggaaggccatttccggatcactctccagatggtagctcgtcacccgggtcacgcactctttcccgtcgcgccccaggcggccaattttcagatgaccggcggtgacctgcatatcaaagctgtcatcgacacactgatagttcagatcctgataggggtccagcttatacggtacgcggtacatctcgtgcgggtccgggtttataagctcgcgcatcagttcgaccagcccggcagcatcaaggatacgcgtcggaatataggcaccgcccagtga

SEQ ID NO: 217930 - DNA, 393 bp, Klebsiella pneumoniae
atgatgctgtttcttcgaaagtacggatttttgtttatacctccagtctactggctcatctatctgggagccagactgacttacaatggactggcaggagagttttctcctgatttctttcagggtattcgacatgaaggcgtctatattatctgtagtttgtgtgtattttattttttctgcttagaggtggaagttggtgatggggagttctcagcgaacattctgttcctgattgttttctttcatgtggttttattatttatcactctgcttgtttgtctgtggcaaggggaggtgttgttggattcgatctttatgggtcagattattgcctccatgtgtttattgttttttattccagtgctttccattataagaaggagtttctag

SEQ ID NO: 217931 - DNA, 207 bp, Klebsiella pneumoniae; identical to SEQ ID NO: 207365

SEQ ID NO: 217932 - DNA, 405 bp, Klebsiella pneumoniae; identical to SEQ ID NO: 152580

SEQ ID NO: 217933 - DNA, 312 bp, Klebsiella pneumoniae; identical to SEQ ID NO: 152581

SEQ ID NO: 217934 - DNA, 411 bp, Klebsiella pneumoniae; identical to SEQ ID NO: 152583

SEQ ID NO: 217935 - DNA, 696 bp, Klebsiella pneumoniae; identical to SEQ ID NO: 152558

SEQ ID NO: 217936 - DNA, 393 bp, Klebsiella pneumoniae; identical to SEQ ID NO: 152559

SEQ ID NO: 217937 - DNA, 591 bp, Klebsiella pneumoniae; identical to SEQ ID NO: 135451

SEQ ID NO: 217938 - DNA, 180 bp, Klebsiella pneumoniae; identical to SEQ ID NO: 181145

SEQ ID NO: 217939 - DNA, 264 bp, Klebsiella pneumoniae
atggatgagaaggaagtgaatttttcactcagctatgagcagctgacccggatagcggaagagcgtatccgtgaatgcaatctggacagccagggcgcgatttacatcagcgagtcagccaaggccggtgccgtgctgagctattggtatgaactggccataaatggctatgcctcagtgaatgccataaagaggcaagagctcatagacgccgatcacctgcgcctcagaaaactcatctggccggaggcggacaagcaatga

SEQ ID NO: 217940 - DNA, 567 bp, Klebsiella pneumoniae
atgactcaggcgcgccgaccatcgccgctgcagcggcgggtgctgattgtgctggccgccctcgatgcgaaacgtccggggccggtggcgacgcgggatatcgagcgggtgctggagcagggcagggatgccccggtgtacgggccaaacctgcgcgcctcctgccggcgcatggaagccgcgggctggctgcgcaccctgcgcgccccgaacctgcagctggccgtagagctgacggaggccggtcgcggcattgcagaaccgctcttccaggcagaacgcgaggctgaaacggcacgacaacgactgacagacgtccggcgtctgccgttacgccagacggctgccggtgacgcggtggagttgcagctgggtgacggtcattactccctgcgggaagcggcctacgtgatccgtctggacggtaccacctgcctgcagctgacggatgccggcggcatacgccggataaaagagggcgatcccctgcaggtggccagctggtatcagacctgttttgatgcaggcctgccggtcaccgtccaggtgaatgagagccgggactga

SEQ ID NO: 217941 - DNA, 495 bp, Klebsiella pneumoniae
atgaaagtcactgaacccgggctgaataagctgatcgataacctgaacaccctgatttgcgatgacagcctgctcacgcgccaggagcgtgaaacgctggtactggccgtcgccgctatcggcgccatgaaagcgcgcgtcggcttgaaaaaaggcgatgcgccgaccgttgccagacgggaaaaaagggagaaaaaagaccgccagcctgatccgcgttttccgcgagccggtcatccctggcaggaagacgaaaaaaccttactgagtgatgcgctcgattcggtaccggacgaagagattggcaagcatctgttctggctttccgagaaactgggcagaacgcctttcagtgttgctttccagatcgcggcaatcagggagctgcaggacgggtgggaggagcagttcagggagatttcggataacatacgcttgtccggtctgagcatcagtgattatcttacgcagaacggcacgggccataacgcctga

SEQ ID NO: 217942 - DNA, 186 bp, Klebsiella pneumoniae
atgaaatcagatgttcaactcaacctaagagctaaagagtcccagagagcactcatcgatgccgctgcagagatccttcataaatcgcgaaccgactttatcctggagatggcctgcaaggctgcggagaatgtgatccttgatcgccgtgttttcaattttaacgaggctttgttgaataaataa

SEQ ID NO: 217943 - DNA, 321 bp, Klebsiella pneumoniae
atgaagccctctgtagaagagcttcgttaccagtgccgtatcgacagcgatgatgacacagaggatgtgatgttaacgctctacctcaacgcctctctgaagcatgcggaaaaaatcactaattgccgtctttatgataacgctgttcctgacgacgaccctgacggggtggtaatcgaggacgatatcaaactggccctgatgctgttggtttcgcactggtatgaaaaccgggagcctgttagtagcgacagcgttaactctattccgttcggtgttgatgcaattctgaaacagcatcgcaaagtaccaggtacgtag

SEQ ID NO: 217944 - DNA, 204 bp, Klebsiella pneumoniae
atgctgctgaaaaaagacctgaaatggtcacctgatggcattcagatcataaatattcccgccggtgaatatgaggctggctcacttcctgaacgtgctcttgaggttgctgcccagatggggattctcgacgggactaaacagcctgaaattgaaacaccagttaagtctaaaaccagcaataagcggggtgagggaaaatga

SEQ ID NO: 217945 - DNA, 1209 bp, Klebsiella pneumoniae
atggcagtcgaaattaaagacgttgagcaggtcgcgcaggatttgcagcaaaaattcgatgattttaaagcgaaaaatgataagcgcattgacgctatcgaagctgaaaaaggcaagctggccggagaagttgaaacacttaacggcaagctgaccgagctggatcagctgaaaaccgcgctggaggatgagcttaaacagattaagcgtcccgctggcggcactcaaagcaaggccgcaaccgagcacaaaaccgctttcatcgactttatgcgcaagggtaaggatgacggactgcgcgatctggagcgtaaagccctgcaggttggcgtggatgaagacggcggctatgccgtaccggaagagctggatcgcaccattctcaatcttctggaagatgaagtagtgatgcgccaggaggcgacaactatcaccgttggcggtgccaactataaaaaactggttaatcttggcggtaccgcttccggctgggttggtgaaaccgatctccgtccggaaaccgcagcgtctaaactcgctcagattgaaccgttcatgggtgaaatctacggaaaccctcaggcaacccagacgatgctggatgatgccttctttaacgtagaggactggatcaacagcgagctggccgttgagttctctgaacaggaagagatcgctttcaccagcggcaacggtacgaaaaaaccgaaaggcttcctggcctacgcctccactctggaggacgataaaacccgtgcctttggcacgctgcagcacattctttccggtgcggcggcaggtgtgactgcagatgcgattatcaaactggtctacaccctgcgcaaggtgcaccgcaacggtgctaagttcatgatgaataacaacagcctgtttgccgttcgcattctgaaggactccgagggtaactatctctggcgtccgggccttgagctgggccagccttcctctctggcaggttatggcgttgctgagaatgagcaaatgccggatatcgcagctgatgcgaaagccattgcgttcggtaactttaaacgcggctataccatcgttgatcgcattggtacccgcatcctccgcgacccgtataccaacaaaccattcgttggtttctacaccaccaaacgtaccggcggaatgctcgccgattctcaggccatcaaactgctgcagatcggtgcaggcgcataa

SEQ ID NO: 217946 - DNA, 657 bp, Klebsiella pneumoniae
atgatgccgatgactaaacagcggctggatattccgctgaagctaaagtctgtcagcgacagcggggaatttgaaggctatggctctgtgtttggcgttaaggacagttacgacgatgtcgttgttcccggcgctttcagtaaatcgcttcagtcatggcgggagaaaaacgcgctgccagctatgctctggcagcatcagatggatgaacctatcggtgtttataccgaaatgaaagaggatgacgtcggattatatgtcaaaggccggttactcattgatgatgatcctctttcaaagcgagcgcatgcccacatgaaggccggttctttaaccggcctttctattggttacatgctcaaagactgggaatacgaccgcgagaaaggcgtgtttctcctcaaggagatcgacctttgggaggtcagccccgtaacgtttccgtcgaatgacgaggcgcgggtcagcgatgttaaaagcgcgtttgcccgtggcgaaacaccatcccagaaaagtattgaacgggtcctgcgcgatgttgggctctcccgcacccaggccaaagcattcatggccgggggctatggcaacctctctcagcgtgacgctgatggtgtggatgccgcactggatgcattgaaaaacatcaaattttaa

SEQ ID NO: 217947 - DNA, 1230 bp, Klebsiella pneumoniae
atgttctttcccggattgtttcaaaaatctaatactccggtgaccacacctgcagagttagcggaagccgtagggatgacttacgacacctataccggaaagcgcgtcagcagccagaaagcgatgcgtcttacagcggtgtttggttgcatcagggtgctggctgagtcaatgggaatgcttccctgcaacctgtacaaggtcactggcaacagcaagcaaaaagcgacctctgaaaggctgcataaattactgaccatgaagccaaatgactatatgacccctcaggagttctgggagctggtcattgtgtgtctttgcctgcgcggtaatttttatgcctacaaggtcaaagcgctgggtgaggtggtcgagcttttacccattgatccgggctgcgttgaccctaagcttaacagtcagtggcaaccggtgtatcaggtcactttccctgatggttcgacggatgtgttgggtcaggatgatatctggcacgtccgaacactgacctttgacgggctggttggtctgaacccaattgcatacgccagagaggcaatttctctgggtatggcgactgaagagcacggggcaagactgttctcaaatggcgcggtcacttctggcgttctccgtactgagcaatcgttgaccgacgctgcctatgacaggttgaagaaagattttgaggatcgtcacctcgggctcagcaatgcgcatcgtccgatgattctcgaaatgggtctcgactggaagtcgatggcgctcaatgccgaggacagtcagtttcttgagaccagaaaattccagttggaggagatttgccgactgttcagggtgccgatgcacatggtgcagaacaccgaccgcgccaccttcagcaatatcgaaaaccttggcattggcttcattaactattcactcgttccgtatatgacccgtattgagcagcgaatcaacgtggggctggtgaaggaatcgaagcagggcacctattatgccaagtttaatgccggtgctttgctgcgtggggatatgaaatccagatttgaatcgtattcaaccggtattaactggggcatttactcaccaaacgactgccgtgaactggaagatatgaacccacgctctggcggtgacatttatctgacgccgatgaatatgacgaccaagccgtctgacagcaataagagcaaaacaaccgaggaacaacatgatgccgatgactaa

SEQ ID NO: 217948 - DNA, 1758 bp, Klebsiella pneumoniae
atggctaaagttgcagatggcatacgctacgctgagcgcgtcgtggcaggaaatatcattgcctgcgaatttgttcgcctcgcttgccagcgcttccttgatgatctgaaattcggcgaggaacgtggcgtttacttcagtgaaccgcgtgcgcagcatattctaaatttttataagtttgtgcctcacgttaaaggcgctcttgctggtcagccgattgaattaatggactggcatattttcattctgataaacatcttcggttttgttattccgctggtgaatgaagaaaccggagaaatagtactgcgcaatgacggcagtggaaggccggtaatggttcgccgcttccggaccgcctataacgaagttgcgcgtaaaaacgctaagtcaaccctgtcttctggcgttggcctgtatatgaccggcgctgacagcgaggggggtgcagaagtctattccgccgcgacgacgagagaccaggcacggatcgtgtttgaagatgcaaaaaacatggtcaaaaaggccaagccaacgttgggtaagctgtttgagttcaataaactcgctatttaccaggagcaaaccgcctctaaatttgagccgctgtcttccgatgcaaataaccttgacggcctgaatatccattgcgccattattgacgagctgcacgcgcataaaacgcgtgatgtgtgggacgttctggagactgcaacgggggcccgtctgcaatctttgctgtttggcatcaccacagcgggtttcaacaaagagggtatttgttacgaacagcgtgattacgccatcaaagtattacgtggctacaacagcgacgttgaaggagcggtaaaggatgacacctattttgccattatctttaccctcgataaggatgatgatccctttgatgaaacggtatggcagaaggcaaatcccggactcggtatctgcaagcgctgggacgaccttcgccgcctggctaagaaagcgaaagagcaggtttccgccagggttaactttttcaccaaacacatgaatatctgggtaacggctgagtctgcctggatggacatgatgaaatgggagaaatgcgagtatatagctccccggcatgagcttaaaacctaccccatgtgggctggcgttgacctggcgcataaaattgatatttgcgcagccgtaaagctctggcgtgctgataatggacatgcccatgctgactttaaattctggctacctgaaggacggctggaaaaatgttctgcacagatggcgcagatgtatcgcaaatgggccgagctgggaaaacttgagcttaccgatggtgatgttatcgatcacgcccagataaaagcggatttccttgaatggattaacggcgagaacctgaaagaaaccggattcgacccgtggagtgcgacgcagttcagcctggcgctggcagaagaaggcgtaccgctggtggaggtccctcaaaccgtcagaaacttttctgaatccatgaaagaggttgaatcgctggtctacggagggcgtttccaccacagcaatcacccggtaatgaactggatgatgtcaaacgttaccgttaagccggataaaaatgacaacattttccctaacaaatccacgccggaagccaaaatagacggccccgctgcgctatttaccgcaatgagtcgaatgctggttaatggcggggaacctgaggcgagcctttctgatcacctggaaagttacggcgtccgttcactttaa

SEQ ID NO: 217949 - DNA, 498 bp, Klebsiella pneumoniae
atgtctggaccgccgaaaaccccgacacatctacgtttggtgaggggtaacccatctaagcgagcgatcaacaaaaacgaaccagagccacccaaaggggtacccccaacaccgaagcatttcgacaagcaggggaagtactggtttaagcggattgctgaggaactggacgctatcggcgttatgtcccagcttgacgcgcgggcgcttgaattgctcgttgaagcctatacagaataccgccatcactgtgaaacccttgatcgtgagggatatacctacgcggtttacagcgaggatgatcctgatgaagggaaagaacgtgaaatcagaatgattaagcctcacccggcggcaatgatgaaagcggatgcatggaaacgtatgcgtgcaatgctgggcgagttcggcatgactccttcaagccggtcgaaagtcaaccgagaaacgacacctgacgatgacctgatcagcaaattccttaattcgagagactaa

SEQ ID NO: 217950 - DNA, 351 bp, Klebsiella pneumoniae
atgcccgcactaattccccgagcatgccgtaagcgtggatgcgcaggcacaacaaccgaccgctcaggctactgcgagaagcatcgtaatgaaggctggcagcagcatcagcagggcaagagcaggcatgagcgcggctatggtagccagtgggatattaagcgtgcccgcatccttaagcgtgataatcacctgtgtcagaactgtctgcgcaacggtcgtgcggtagcagctaagaccgtggaccatatcaaggctaaggctcatgggggtaccgatgatgattcgaatcttgaaagcctgtgctggccctgtcacagaacgaaaaccgggcgtgaacgtttcaaatga

SEQ ID NO: 217951 - DNA, 246 bp, Klebsiella pneumoniae
atggtcgaaatcacagacgcccagcagattcgcctgaacctgctttccaccctgaactacgacacagcagcagctaaagtcgctgtagaatttgttcaggatgatccgcttaagtatcagcttttcatccagcaatacagccgcgtcacgacagaaaccgaagtggtagcaaagacgatgaaagcagtgcaggaagcaactgaagcgctgccgctcttcgataccggcgctgagcagtccagctaa

SEQ ID NO: 217952 - DNA, 150 bp, Klebsiella pneumoniae
atgaccaaggcaaagaatattgaatttcggctgagcaaacttgagaaagggccagacaaaaacgttctggccatcatggagataaggtcgagggctattgcaggtacggtgttgaaccaggtacgaaatcaggtgttgaaaggtcaataa

SEQ ID NO: 217953 - DNA, 201 bp, Klebsiella pneumoniae
atgacgctgttgatcgtgagctgcgcgaaagatttacccgccccggtggtggttgatactgcctgcagctgggtgcgtatcatctacctgaccgaccacgatatcgacgcgctggacatgcagacgaagcgcgacattctggcgcacaacaaatccgtgcaggccaactgtccgcaaccaacaaacagggttacgcgatga

SEQ ID NO: 217954 - DNA, 276 bp, Klebsiella pneumoniae
atgagctttgaaattattgctgggctggtggtcgtcatcttgggcgctatcgctggcgcgttcggcatcggccatgctcgcggggccagtaaggcagaagccaaagccgatcagcagcgtaccgaagagaacgccgccgccaccgtcgccgcggcagaacgtaaggcggaagttgtgaaagaggcaagcgatgtacaggaagacgttaagcgtatgggtgatgacgctgttgatcgtgagctgcgcgaaagatttacccgccccggtggtggttga

SEQ ID NO: 217955 - DNA, 348 bp, Klebsiella pneumoniae
gtgaagatgatcattttcgctttgctcgtgctggtggctgtgctcgttctgttacttctgcgcaaatatacccggctggagttcgtagggcatgccagcctgctgctgaaaacgtggtctgtaaagctgggagctatcggcgcggtggttggcatgtgggcgcagacgttcccggatgctgcgctgcacgcctgggcgatgctgccgccagatatcaaaaacatcctgccgccaaacattgttgcactgattagcccggcgctggtggtgctggccgtgctatcgcaatacgtacgccagccagcattgaaagaaaaggccgacgaactgaaggagccgcagcaatga

SEQ ID NO: 217956 - DNA, 540 bp, Klebsiella pneumoniae
atgacagcagaccagattatcgaggggatcctcggaaaagagggtggttatgtcgatcacccctctgataaaggcgggccaacccgctggggcatcacgcagaccatagctcgcgcacatggctacaccggagatatgcgagagctgcccagggaaacagcaaagcaaatcctgctgagcgattactggaccggaccccggtttgaccaggtggcagctctatctacgttactggcggatgagctttgcgacactggcgtgaacatggggcccagcgtcgccagtaagttctttcagcgctggctgacggcaatgaatatgcgtgggaagctttatcccgaccttatcccggatggcgtgattggaccccgaactatcactgctctgaaggggtatctttctgcccgcgggaaagaaggcgagcaggtgctgctgagagcactgaactgcagccagggcgccagatatctcgaactggcggagggccgcgaagccaacgaggattttctctacggctgggttaaggagcgtgtcctgtga

SEQ ID NO: 217957 - DNA, 294 bp, Klebsiella pneumoniae
gtgctgagacgacgcttacggatgtcctggctggctctgctgatcattgctggctggggcggccttgtccgattcctgatggatgtgaagcagggcaaagcgaaatggagctggataaatgcttttgcgcagattgtggtttcggcttttaccggggtcattggtgggctcatcagcattgaaggtggcctgagtatttacatgatactggccactgccggtatcagtggtgccatgggttccgtagcgctcacgtatttctgggaacgaatcaccggagtgaaagcacaatga

SEQ ID NO: 217958 - DNA, 825 bp, Klebsiella pneumoniae
atgtcatccccttccacaacagtaccggaagcagttattgccactgtaaatacattcattgctctgtgtgtcaccattgtaaatgaaggttcatcaagtcctgataaatatgtttcgcagttttatcgcttgcgtcaggaattacttgagctcgataatattatcaccattccttcatggatcagattctccatgtcacccgctgacattaagaataatgttggcttaaacgtcactggtggcgatggagcttggggtcgaagacgacagtatttgcagagcgaatcgatgaaaatactttcaagctataaaaccgctccaattattgagcattctattagtgagaataaaataaaaaatactgagcaagtcagcgggttgacaacggtggcaagcgatgcagggttaaacatgaagaagaaagtattcattgtccatgggcacgatgataaactaaaaaacgaggtttacatttttctggtaaatgaaggtttccagcctgtcatacttcatcatgaagccaatgaaggacagaccataatcgagaagcttgagaagcatatcgacacggtatcctatgcagtggtgctttatactgcctgtgatgaagggaaagccaagaatgaaactgaactaaaaaaaagagcccggcagaatgttgttttagaacacggctggctcatgtccaagctatcgcgtaaattcgtcgctgcgatagttgaagatggcgttgaatttcctggagacctgtccggagtggtcagaatatctgcatcagactggaaatatgatctgtctaaagaattaaaagtgctcaataattaa

SEQ ID NO: 217959 - DNA, 1131 bp, Klebsiella pneumoniae
atgggatacaccagaaatcagcacatgctctcacagtggtttctcaggaacttccgcagtgatgatacggcacagagtccgaaggagaagcaacgggtctgggcccacgttgtggttcctacggcagaaggcaaaaatgacataaaggacatcccgctaccgatatccagcgtggccgtctgtaaggactgctttcgtcttaccgacggtgacacaggcgaggtttttgatatcgagcatgagctcagtgattatgaacaggatatggctttgcttgtccgggatctggttcagaaccataatttcccgcgtctggctaactgtgacactgatgattttccagtagagaagcttgcaagttttgctatatttcagatgttacttaacctcaataacccacaaagcagatttccgggtaaaaatgagttatttcagtcattcattaacccagtaaaaaacaaccttcagcatatcatttccgaaacaatttctttgtctgacgttatgccggagctggcggctttaagtatctatcagaaactgattcgtatagctcgttcttcttctggggatgacgaaaaagctaaggccatgtttgtattattttcccttctcgcacttcagggaaaaataacaatgattgacactatggcctggctacgcggagaggttttttccggaatacatcgtgtggatatatttcataccgggcaccactttgacagtacagaaccacgtccggtgtttacagtatcacctaatgtattttgcaaaatgacagaagaacgcgtcctgtaccttccccttgctcataatttggctcttaagttttatcagtacccggaacacgggtttttcacaccactggaaattaatgtattcagcccggcccctcagaaactacttacaaaagacatgtcacgaatcaaagtttataaatgctcctatgattatattgatcaggttatgtcaacaattgatatgtataacgtcggattttcaaatattatttattctagctggcagctcagtgatgttgaaaattatctgaggctacagaacgaacatcatgatacttattatcttccggaacatcccgttttctggactgtatccagggagaaagggtga

SEQ ID NO: 217960 - DNA, 291 bp, Klebsiella pneumoniae
atggccctgaccccggaacagataagttgccgacagcagcttgtggcaatgggtgacttcaatgcccataccctgctgcccggagaggagtggaccaggccagaaaacgctgatgtccggcacgttctgtcgctgatccccctgacggacatccagctggcgaaccggctggatgtggacgaacgcaccatccgcaagtggaaatccggcgagaccagtatggtgttcaccacctggtgctgcctgtgctggctggccgggctgggaatgctgctggaagaaccggcttag

SEQ ID NO: 217961 - DNA, 198 bp, Klebsiella pneumoniae
atgactgtatttctcatggccgttttctttggcctcttaaaaactggctctctcattgccctacttgttggtgcctataaaggctggaccttgttttggaagaactatgatcgactcacccatatctaccgctcacaatggcgatatcagcgacgcttcatactcaaaagaatctggaaacgcatcagaaccggctaa

SEQ ID NO: 217962 - DNA, 915 bp, Klebsiella pneumoniae
atgccggatagtgtggcttaccagccagatctaatggacaggatcttcacccagaaaagaatggacagctaccaaagagtgttcgggagactgactgaccgggaaatggtggggatttatatctggaatcagacgctgggtggtgaactctatccgctgctgagcgccgctgaaattaccctacgaaatgctattgatagtgcattcatcgcctttgcaggccctcggtggtggagaggggttaagtataaaagttatgcccccgtcgcaggccatgtaccgcctttcgagattaaggcgatgaaagacaattttgttagagcagctgactatgcaaggaaagaaaaatacctccgttatcacaagccaaatcacgctcccactcatgaagaagttgttgccagcaccgatttttccacatggcaatttgcaatgagtgacgagttgctggggccgggtctattctggaataccatgataactcaagtctttaagggacaatggccctcgcaaagcggtgcgaaaacactatccacggcccgggatcaggtcaaaacgatacgcgaataccgtaaccgcgtagcgcataacgaaccgttgtggaaggcttatcaggtcaatacgccgcaggatgcgattgcctacattaatacgaagattgataccgttgagcagctgattcagctgttgtctccggaaaagcatgatctgctgactaagcaccgtctgttcagtaatgcccgcagaattaattcactaccagaaatcatgcgattccgtaccacaggtaacgcgcagtggcttggatcgtttggcgatgtgacgtccgccttccagaatgcaagagcaaacaacagtcctgtcctctgcaagctcggtcccggagccgaaccttttcttattatcccccattaa

SEQ ID NO: 217963 - DNA, 954 bp, Klebsiella pneumoniae
atgatggccgctatcaatataaagatagatgacaaccttaaagatacgggagacgcgattctgcgggagctaggcctgaatgcaacacagtatattactctctgctggcagtaccttgcccagcatcgcaaattgcctttcatgacagagacgaagatcttaactgcctctgatctgacaatgaccattgccacccagtttagggatgtgcttaatcagctgcataaaattcgggacatgttaaactctgaaggcacggatttttctgaactgtctgctgcaaaacaggctctctcccgtcttgctgcagacatacaacagaacggctggcgactggagtccatgcctgaagatcttgatgcatccaccccggcccgtcggatgctgccccgaattaactattacctgacaggatgcgactttgccttgtcggatttaccggcagaactgcctgtccccacccggatagagaatgagtttggcatctcgctgaaggcgttcgaaactgagtttgccaggctgcagtctgtacttaccgataccggtctgctggcacgtcctgcgccggcgcgcgaattcgtttaccggggagaaaacgtcacagtatccgtcgtacaaccggaagattaccagcacggggcatggctagtgcggatgcaggcaaaatcagtggttcgggaaaatgcactggaagatgccgcactgacctttccagcactggagggcacagtattcctgcccggtactgtctacggtaaagcggtacgtaattcactgactggaaaatatgagatgggattctgttttctctctggcatcacagaatttcatatgtactccagcggacacgaagaggaagggaatccaacctcgcctgatcaggtggcttcccgcctgtcagcttgtgtggaccagtatgtactgaagagcctgcagtcaatttcaggcaattaa

SEQ ID NO: 217964 - DNA, 252 bp, Klebsiella pneumoniae; identical to SEQ ID NO: 127325

SEQ ID NO: 217965 - DNA, 309 bp, Klebsiella pneumoniae; identical to SEQ ID NO: 127326

SEQ ID NO: 217966 - DNA, 330 bp, Klebsiella pneumoniae
atgtgtaatttatgcagggcggacgggaattatttccatacgccggaatgtgtgtatgaccagctggtcagtgagtaccccgtgatgtggctgcgggattcgacccggattggcgcctgctacaccctccgtgaactgctgtcgccggaagggatggtgctggccatacagaacgcgcctcccgtgacgggatggcggctgcgcatgcagtataacgaggccattgatgaagagattaacccgcagcgcggggactgtaccgagctactctccaggacggacgccctgcttgtcttccggtcgctgcaggatgataccgcgtcagcttag

SEQ ID NO: 217967 - DNA, 357 bp, Klebsiella pneumoniae; identical to SEQ ID NO: 127327

SEQ ID NO: 217968 - DNA, 333 bp, Klebsiella pneumoniae; identical to SEQ ID NO: 127328

SEQ ID NO: 217969 - DNA, 783 bp, Klebsiella pneumoniae
atgataccggcaataccaggccagggcgtttcattttcggccgcgcagctgccggtggccatcgattacccggccgcgctggccctgcgacagatggcgctcgttcaggacgagctgcctaaatacctgctggcgccggaagtgagcgccctgctccactacgtgcccgatctgcaccgcaagatgctgctggccaccctgtggaacaccggcgcccgaattaacgaagcgctggcgctgacccggagtgatttttcgctgacggcgccctacccgttcgtgcagctggccacgctcaagcagcggaccgaaaaagccaccagaacggccggccgagctccggccggtagccagcctcatcgtatcgttccgctttccgatgcgaactatgtcagccagctggagatgatggtggccacgcttaaaattccgctggagcgccgtaataaacgcacaggcagaaccgagaaggcacgcatctgggaaattaccgacagaacggtccggacctggataagtgaagccgttgatgcggctgccgccgacggggtgacgttttcggtaccggttaccccgcacacgttccgtcacagctacgggatgcacatgctgtatgccggcatcccgctgaaggtgctgcagagcctgatgggacacaagtcgatcagctcgacggaggtctacacgaaagtgtttgcgctcgatgtcgcggcacggcaccgggtgcagttccagatgccaggcgatgaggcggtggcgctgctgaagggaaatggcaggtaa

SEQ ID NO: 217970 - DNA, 615 bp, Klebsiella pneumoniae
atgaaagtggtttttttttgtaaggacagattttatgcagaaggattatgcatacttcttgaaaatatatacgaggagcaatgctactcaattttctttaattttaatgaggcatctcttctaatagataaacttaacaagactacttgcgatcattttatattcgatcttacttcatatacggaaaatgaattgatttatatcaatagagtaataactagccagtttccaaaaagaatatgcattatcgatgacggtataaataacaagaatcaattatcgcaacaatggtgggcaggccaagagataataagtaagtcatggccagttgtgcgtgtggaaaaacaactagttaattacaggaataaaatatcaaaaggggttgaaatgcatcacgaaagtggctggaaaataaacgaaatgaattgtaatgagataatgcttattatgctcttatctcgtggagtttcggttaaaaacatcgccagtagattaaatgttagtcataaaaaattatataatcaaatttcaattgtaaaaaagaaaattggcttggaaagaaaaaatcaatttttagcatttttagcatcactttatcctcaggatgtgggctga

SEQ ID NO: 217971 - DNA, 951 bp, Klebsiella pneumoniae
atgaaaaatgatactgatttgccccaaagtgtcacaattttagagcatgtacaaaaacctacgaaacagcgtttttttgtgttagggatattattcgttagcttatcgattatatatcttgaccgtgtcaatatttctattattgcagcaaatacacactttttaaacgaaatgcatcttaatgacaaaccaatcttagttggcttgttgatgtctttattcttagcgagttacgggattgctaatgtttttttaagccctttaggagattatattggccctcgaagggccatgcttatcgcttatgtggtgataagcctatcacttttgattggggggttgtcaagtttctttgctatattattaggaaccaggattttgctaggtattggtgaggggctttactaccctatgcaaaatacaatcataaaaaattggttccctgctggagaacgaggtcgagcgaatacggcatggatcttaggacagtcactcgctcctgcactagccatgcctctttatacctggatcatcgctgagcattcctggcgtcatactttttatttttcattctcgttaaccttgttgcccattgttctaatctattttttcacatcaaacttcccacaggaaaataaatacgttaacgttcttgaactccaaaaaatcaataaaagcaccacagaggaagttttacataaaaatagcagtgaaaaaatttcagttgttgaacgtgccaaagtatatctgtgcaattctaatttttggattttattagctgttttttcttctaactccatgctgtcatggggtgtcgtaacttggcttccaacatatttaaataccgagcgcggtttttcatgggcaaatgtcggttggatgtccgcgcttcctttttacatttggacttttgttcaaggtgcttgctgggtttattgtcgacaaaactga

SEQ ID NO: 217972 - DNA, 876 bp, Klebsiella pneumoniae; identical to SEQ ID NO: 216438

SEQ ID NO: 217973 - DNA, 528 bp, Klebsiella pneumoniae
atgcgcgattttgctctggtatttcgtcatgcgtgggaactggcaagaaagggtgccgataccttcggtggttcggcgcgtcagtatttccgcgagtctctcctgttggcctatagcaacctgaagcgcaatgtaaccgccaaagaccttgtcaaaataatgcaaggtcgcaagctgtctatgagccaaattcgggaggaagtaaacgccaaatttaaaaaacaaacagcaaagaacatcgcccgcagaatttggaatatgtttcgttcgccatacgtagaaattgagaagatcaaatgtcaggcaacggggaaatatttgtatcacctgaagaacgcacagaagaatttttttgttagcggggctattactcgcgctctcaaatcggcaagacctgagaagaagaaggctgtaaaacctcgaccagcaatgactaaagaggaaataaacgcctgtcggttggctaatgcttttcatagtgcattaagcacaggggtgtatgtagcgcctcaacttattgagaattaa

SEQ ID NO: 217974 - DNA, 723 bp, Klebsiella pneumoniae
atgaaaaaaaaccagaaagtcattcagtttcgtggtgacgaagatatgtatcatcgggcacaggaaagaataaccagtcaggagattcttttccctgatgttatgagggccgcgcttagggccattgctgagggtgatgttgcgccgtttgccgatatcatcaatgaggccggtcatactggcgatgaaacaaatcaggcatggctttatcacaaatgtcatgagcttttcgagtaccgtgatggtcagttattacgcaagtcacgcaaaggaatgggtgaaaagggaactcctgcatatatccgcatccgggaaggtgaagaacatgtattaattcagggcaatcattatttgctaaaagatattgtctggttaatggctaacggaagcattgccggagaggttatctataaaaacccgcatcgtgtaaccaataaacacgcaattgaaaacctcattttaaaccctgtcgaaattagacaggtgacgataacaaaatatttaagtggatctgaaaagatcgacatttgtagaggtaagcagcgagctatagctattaataccgaaagcgatataagcgcagccggagcaattgagagactcattaacagagggcaaacaatcccgttacttttgcgcggtgatgatggttgggttgcatcacgaaccgccattcacgctttcaaattgggtgataaccagtacgtagtaagcattacataa

SEQ ID NO: 217975 - DNA, 270 bp, Klebsiella pneumoniae
atgtcgaatgaaacagtaaaaaaggtcatggcagaaaagcgccgtatgaccatcggacagttaacagaccagcttgttagcggtgctttgcgccgtgagttaggcatggataaaaccgaatttgccacgctggtttcagttatgcgatccactatccggcgcattgaagggctggaggcaacgccacgtatagggcttattttcaacacagccgccgtgttgcgcattggtattgactttccaatcacagaggaaagcgaaaaaagatga

SEQ ID NO: 217976 - DNA, 195 bp, Klebsiella pneumoniae
atgagcaataaatcaggatgggccagacccatcaacgccaacaagcatcatttctttttagaggatgaagtcacaagtatttgcgcccgctggatgtatttcggtactgaccgtgagccggacacctttgaaagtcctgatgactgcgccgcctgccgccgtaaggtaaataagaatacgggagtgaaagcatga

SEQ ID NO: 217977 - DNA, 345 bp, Klebsiella pneumoniae
atgagcaaatcactaaacgcacgctgtatccgccggtggcaggtcgaattcaaagaccgctgcgattctaaatttagcactgtgtggcgtaagcgtgatctgcgcggatatatccgtgagtctgggctggttactgctttctgcatggttgagcagatggctgaaaacaatgccaaggtggactatgacggctctactgctggctggtcgcctgaattcgcagcatggtacgacgaacgccgggatcagtacctaaaagaggcacgtgactttctgaacgaagaagccaccaccgaagaaatcgacgaagagattcagaacgagctggaggcctggaatgactga

SEQ ID NO: 217978 - DNA, 309 bp, Klebsiella pneumoniae
atgactgagttaagcaaaccagccagtaagggaagaaacgatggtgaatgcaaatatctgacctcagatgacgctcgcttcctagtgattcgtggtgactatagcgaatccgatatcatccgggcggcagttaaccagaacgttattgatacagaaggcgcacaggattttgcttctaccgcacgctattaccaatgctggtataaagtcagcccaatcggcggtcagaatggctattcaggctggcatcatccacgcaacacaccgtgtcgcggcgcgtactttgcgtcagttttgcaatgggattag

SEQ ID NO: 217979 - DNA, 1524 bp, Klebsiella pneumoniae; identical to SEQ ID NO: 77500

SEQ ID NO: 217980 - DNA, 240 bp, Klebsiella pneumoniae
atggggtgctggcttgctggcagactcatgaaagagctggggctggtcagttgccagcagccgactcaccggtataagcgtggcggtcatgagcacgttgctatcccgaatcatcttgagcgacagttcgccgtaacggaaccaaatcaggtgtggtgcggtgatgtgacctatagtgtgcccggagttcagggcgggcatggatgcttaaatgaaccgcgagtctgtctggaatattga

SEQ ID NO: 217981 - DNA, 303 bp, Klebsiella pneumoniae; identical to SEQ ID NO: 96991

SEQ ID NO: 217982 - DNA, 666 bp, Klebsiella pneumoniae
atgaataatatcaatttaattagaagtgaaacaaccaaaggtattcatgtaattaaaggtaaggcactcattgatgatattttgagttattctattttgcatttgtcgcgacacattcaactttgtcacgaattctttttgaagaaacatagccttgtcttcataaatacccctaacctctggactgaattgccatcgttagaagaaaagattaaaagaagagaatatgaagttgttattattttagtggatagtgattatattgatttttatcgctcattaataaatcacccatacgtcattgcaattccgatgagtgaatctctggaaaacataaagagtatgatttccagagaaataaataaatacaccccacaaagagcaaataaaaaagaaaagctaacaccaagggaaaaaaatattttgtatttaacctctcttggttggagcaacaaagaaatagctctcatcttagacgtttccaataaaacgatattctctcataagagaaaaataatggataaagttaatttaaaaagacccaatcaaatgaataaggtcttatcggaattaatgcctgctcagcatagaaaaaacataaccactaacatctgcgatattgagggagtggatgggggcaaactagctccccacccactagtttga

SEQ ID NO: 217983 - DNA, 1026 bp, Klebsiella pneumoniae; identical to SEQ ID NO: 129696

SEQ ID NO: 217984 - DNA, 135 bp, Klebsiella pneumoniae; identical to SEQ ID NO: 141082

SEQ ID NO: 217985 - DNA, 978 bp, Klebsiella pneumoniae; identical to SEQ ID NO: 99298

SEQ ID NO: 217986 - DNA, 891 bp, Klebsiella pneumoniae; identical to SEQ ID NO: 99299

SEQ ID NO: 217987 - DNA, 474 bp, Klebsiella pneumoniae; identical to SEQ ID NO: 99300

SEQ ID NO: 217988 - DNA, 690 bp, Klebsiella pneumoniae; identical to SEQ ID NO: 99301

SEQ ID NO: 217989 - DNA, 738 bp, Klebsiella pneumoniae; identical to SEQ ID NO: 99302

SEQ ID NO: 217990 - DNA, 267 bp, Klebsiella pneumoniae; identical to SEQ ID NO: 141683

SEQ ID NO: 217991 - DNA, 240 bp, Klebsiella pneumoniae; identical to SEQ ID NO: 99304

SEQ ID NO: 217992 - DNA, 288 bp, Klebsiella pneumoniae; identical to SEQ ID NO: 84381

SEQ ID NO: 217993 - DNA, 441 bp, Klebsiella pneumoniae; identical to SEQ ID NO: 102179

SEQ ID NO: 217994 - DNA, 2406 bp, Klebsiella pneumoniae; identical to SEQ ID NO: 102178

SEQ ID NO: 217995 - DNA, 1077 bp, Klebsiella pneumoniae
atgagctggaaactctttctctatgactggggtggcctgaacatcgcgttgtttcaagccatcaacacaggcacgcccgccacgctgaaaccactggcatggttctttggcctcgtgggaagttactggacagcgccgctgatgctgttgggtctgtggtggtggtcgaaatcggctacaaacccggcgcgtggtacggccgttcggcatcgccttattggttttagcgcggccttcttgctggcgttattggtcgccaccgccttgaagctatggttcgactttccacgcccgcctgccgtccttggcgacctggcgcgcgtcatcggggacaaagagcttcactacagcctgcccagcgggcatgccacctatgccgcgatggtggtcggcgcgctctggcctttgatgggccgccgtggtcgtctcagtttaatgctgtacgccacattggtcggctggtcgcgcatcgcggccggaatgcactttccggccgatgtgttggcggggttgacgctgggatggagctgcacggcactcgccgggtggttgctgccgttggccgcccctgtgtggcaatcggcccgccgcacatcggcttgggtctggttcaccgtggccgccagtgctgtcatgaccgatcagctcacgaagttcgccatcatccgcacgtttgcctacggtgagcaagtcgaaatcaccccgtttttcaacctcgttcatgtcctgaatccgggtgcggcattcagctttttggcgaacgctggtggctggcaacgttactttttcatcacgctgggtctggctgtttctgcttggctggggcgcatgctgtgccagcaacggccacgtctcgaagcgatgggctacagcctgatcctcggcggtgcgctgggcaatgtcgcggatcgtgtgctgcgtggacaggttgttgatttccttgacttccattggcgacttgcgcactggcccgccttcaacctcgctgatgtggcgataactatcggagcgctctgcctgttcttgacggttgtaccgaaaagcagtaaaggcacagaggccgaggtgtccggttaa

SEQ ID NO: 217996 - DNA, 558 bp, Klebsiella pneumoniae
ttgcaaggtcaacgtatcggctacgttcgcgtcagcagcttcgaccagaatcctgatcgacaactggaacaaatagaagtcggcaaggtattcaccgataaggcttcaggcaaggacacacaacgtcccgaacttgaaaggctgctggccttcgtccgcgagggcgacaccgtggtggtgcacagcatggacaggttggcacgcaaccttgatgacctgcgccgcatcgtccaagggctgacacaacggggcgtgcgcatggagttcgtcaaagaagggctaacgttcaccggcgaggactcaccgatggccaatctgatgctgtcggtcatgggagcctttgctgagttcgagcgcgctctgatccgcgaacgtcagcgcgagggaatcgtgctggctaagcagcgcggggcctaccggggacgaaagaaatcgctgaacagcgaacaaattgccgagttgaaacggcgagttgcggcaggcgagcagaaaaccttggtggcccgtgacttcggcatcagccgcgaaaccttgtaccagtacctgcgggaagactga

SEQ ID NO: 217997 - DNA, 1572 bp, Klebsiella pneumoniae
atggacacctcacttgctcatgagaacgcccgcctgcgggcactgttgcagacgcaacaggacaccatacgccagatggctgaatacaaccgcctgctctcacagcgggtggcggcttatgcttccgaaatcaaccggctgaaggcgctggttgcgaaactgcaacgtatgcagttcggtaaaagctcagaaaaacttcgcgctaaaaccgaacgacagatacaggaagcacaggagcgaatcagcgcacttcaggaagaaatggcggaaacgctgggtgagcaatatgacccggtactgccatccgccctgcgccagtcttcagcccgtaaaccgttaccggcctcacttccccgtgaaacccgggtcatccggccggaagaggaatgctgcccggcctgtggtggtgacctcagtcctctggggtgtgatgtgtcagagcaactggagcttatcagcagcgcctttaaggttatcgaaacacaacgtccgaaactggcctgttgccggtgcgaccatatcgtgcaggcaccagtactttcaaaacccattgcacgcagttatgccggagcggggcttctggctcatatcgtcaccgggaagtatgcagaccatctgccgttataccgccagtcagaaatataccttcgtcagggcgtggaactgagccgcgccacgctggggcgctggaccggtgccgttgctgaactgctggagccgctgtatgacgtgctgcgccagtatgtgctgatgcccggtaaagcccatgcggatgatatccccgttccggtccaggagccgggcagtggtaaaacaagaactgcccggctgtgggtctatgtccgtgatgaccgtaacgccggttcacagatgcccccggcggtctggttcgcgtacagcccggaccggaaaggtatccatccacagaatcacctggccggttacagcggtgtgcttcaggcagatgcttacggtggttaccgggcgttatacgaatccggcagaataacggaagccgcgtgtatggcccatgcccggagaaaaatccacgatgtgcatgcaagagcgcccaccgacatcaccacggaagccctgcagcgtatcggtgaactgtatgctatcgaggcagaggtccggggctgttcagcagaacagcgtctggcggcaagaaaagccagagccgcgccactgatgcagtcactgtatgactggatacagcaacagatgaaaacactgtcgcgtcactcagatacggcaagagcgttcgcatacctgctgaaacagtgggaggccctgaacgtgtactgcagtaatggctgggtggaaatcgacaacaacatcgcagagaacgccttacggggagtggccgtaggccggaaaaactggctcttcgcgggttccgacagcggtggcgaacatgcggcggtgttgtactcgctgatcggcacatgccgtctgaacaatgtagagccagaaaaatggctgcgttacgttattgagcatatccaggactggccggcaaaccgggtacgcgatctgttgccctggaaagttgatctgaccgctcagtaa

SEQ ID NO: 217998 - DNA, 348 bp, Klebsiella pneumoniae
atgatatctctccctgccggttcgcgtatctggctggttgccggtatcaccgacatgcgaaatggttttaacggcctggcatcaaaagttcagaacgtcctgaaggatgacccgttctccgggcatctgttcatcttccgcggacgccggggtgaccagataaaagtgttgtgggctgacagtgacggactgtgcctcttcaccaaacgcctggagcggggccgcttcgtctggccggttacccgtgacggcaaggtgcaccttactccggctcagttatccatgcttcttgaaggtatcaactggaagcacccgaaacgaacggaacgcgctggaatccgcatataa

SEQ ID NO: 217999 - DNA, 648 bp, Klebsiella pneumoniae
atgaatgcacgaaaggcggtactggcagataatccggaattgatcctgcgtgtgctacagctgagatttgacgagtcactgtcgtacccgcgcatttctgcgcagactggtgtcagcaaaaccgccattttttctctggtgaggcgatttcaccaggtattcactgactggcctctttccggtgaatattcctgcgggcaactggcccgggctcttttcccggggcgatatccttcaaccccgaccgtgactcagcctgtgaaagcagagaaaacccgccggaaccgattttcaccggagtttaaatggagacttgttcagcagactcttttacccggtgcctgtgtcgcacaaatagctcgtgagaacggaatcaacgataacctgctctttaactggcggcatctctggcgtaacggcggcctgcagccgcccggcgaacatgaaacatcgctacttcccgtgacgttaacgccggagccggataataaaatcccggaccccgtgcaggttgagcagataaatacaccgaccgacagtctgtgctgcgagctggttctgccggccggaactctcaggctgaaaggtgaactgacaccggcgttattacagtcacttatccgcgaaatgaaagggagcagccactga

SEQ ID NO: 218000 - DNA, 315 bp, Klebsiella pneumoniae; identical to SEQ ID NO: 151383

SEQ ID NO: 218001 - DNA, 1005 bp, Klebsiella pneumoniae; identical to SEQ ID NO: 53712

SEQ ID NO: 218002 - DNA, 558 bp, Klebsiella pneumoniae; identical to SEQ ID NO: 144157

SEQ ID NO: 218003 - DNA, 390 bp, Klebsiella pneumoniae; identical to SEQ ID NO: 140042

SEQ ID NO: 218004 - DNA, 291 bp, Klebsiella pneumoniae; identical to SEQ ID NO: 140041

SEQ ID NO: 218005 - DNA, 543 bp, Klebsiella pneumoniae
atggcagcacgtggcgttaacaaagtcattctggttggacatctgggacaggacccggaagtgcgttacatgcccaacgggggcgcagtggtcaatctgacgctggccacgtctgaaacatggcgtgacaagcagacgggagagatgcgcgaaaacaccgagtggcatcgtgttgtcatgttcggcaagctcgcggaagtggcgggtgaatacctgcgtaaaggcgcacaggtctacatcgagggccagctgcgcacccgcaactggcaggacgatgccggagtcacgcgctacgtcaccgaggtgctggtcgggcagaacggcaccctgcagatgctcggcggccgccgtgaatccggagtgcctgagagcgccgcgcagccgcagaatcctgccaccccggcacaatctgctcaggccgcagctaaatccccgaaagcgaagggcggtaagaaaggccgtcaggatgccgccccgtctcagcaaccgcctcagccactcccggatgatttcccaccaatggatgatgacgcgcccttttaa

SEQ ID NO: 218006 - DNA, 510 bp, Klebsiella pneumoniae
atgtcaagacgtaagtacacctttgaacagcgcctcgaagtggttatgcactatttagctactgatgaaggctatcgcttaacatcagctcgctttaacgttcccagaacccaggtaagattatgggttgcagcctatgatgtttatggagaagaaggtctgaagcccagagataagggcgtttcaatcgatcccgaaatcagagtagaagccgtgaaggctgtgctgacggggcagatttcccagacgcaggcagctgcgaaatttaacgttgctggtgcggcatctgttgggaagtggatgaaggtgttcagcgaacatggagagcaagggcttcgttctcttcgtgtgggcaaaaaaagggcacttcatatgattgatgatcctgttgcgcttgaagtggcattggaacgttcgaaagataaacatattcaggagctggaaagaaaagttcggtcccttgaattacgggtactttatctaaaaaagctgaaagccttagttcggtaa

SEQ ID NO: 218007 - DNA, 972 bp, Klebsiella pneumoniae
atgttcactaacattgaaaatatttcaaaatcgaaacgcatctctggcgaagctttttttgtcactgatattcaaggtacgatagatatatttaaggttaaccttgaacctaatgctgaaaaagatctgaccacttcattttctaaaagcttaatcaataatattattgaacctaacagaggtaaagtggccgttccacttgtatccactttattagaaagagataaacaagttttcgaatatgatcacttagcaattaatcatctcccaattgaatttactaaaatgaacaacgtgctaaatttcggtgtcaatgggaatgcaacacagtttgattttgcaacacaaagcctgacatctgtaaaagccgtaatttaccacctttgtgatggtaatggaaatagcgtagtcatttaccaacataaatatcctgtttctctacataagaaaacaaaaaagtctttcttgagtctaaatggcagaaccttagataagatcactcatgacagtattgatataaatgacacgattgacttcttcttttttcagaataagtactatgcgctaaacattaaacttcttgaaagaatgtatggattagaaagtgtaatagataatcttgcaaataactcaacgccattaataataaaccttggaattgttaatacacaaggtatgccagtgccactagatattttcaaggacatgtataaagacagagcatttatgcgtagacttgctatggtttcaaaagggaacttagtaaaaacgggagtttcagtccctcaaatacaacaagttatgcaaaaattccctgtatttcaacggaatattgatctaaaaggaggattaataaaccttaatactaaagatcaaaagagatactttattcggcttctaaataatgaagcatcttttgcagcacttgataactcgcccttcctggctgttgaaaaagactccgctgcttaa

SEQ ID NO: 218008 - DNA, 594 bp, Klebsiella pneumoniae
atggatagcaggccatatcttaaaacagtactatatatactatcactatggcttctatttttatcattattaattatgtcctacgataaggttttgataaaaaatgtgtgggactatatttttactgaaaactttactttctcaatctcgtcattgaaagtgagaaatatcgttttcatagttagtttgattttcatctttattggtgcaattattttaatagtccttgcaaatagctttggttcgggttggtctgttgcatgcactgtctcggatatcagcaatgaaaaccatgaacatttagaatttttaaccacttatataatgcccttagttttcactgatgtcgatagtaagagaactgtattaaatttaggattgatgatatttgtaatcggcgcaatatacgtaaagacaaaccggttttattctaacccatcacttgcaatactcggattcagaatatacaaagctaatgttcatgaccgtggagtgaaaaaatgcacagtaatctgccgcagtgttctaaagagcacagataatataaagtatataaaaatcgacaatgaaacttatttggctaaaatagtgtag

SEQ ID NO: 218009 - DNA, 3081 bp, Klebsiella pneumoniae
ttgcaacgactaaatccacacctcagtgagcagaaatgcgaggaaactctaaaacaggtgatgcagatcagcacacctgatctaatggcaaacaatctggcctttcatcgcctgttgacagaaggaatcaatattgaagtcagcaaggatggtaatacacaaggagagttggcctgcctgatggactttaacgatcccactaataatgaatttctggtcattaatcagctcaccatcaaagaaggcaatcatacccgccgacctgatcttattttattcatcaacggcctgccattagtcgttatcgaacttaaaaatgccgctgacgaaaatgctacggtaacaggtgcctataatcagattaaaacctatcagaaccaaatccccggtctgtttaactacaatgcttttaatgtgatatctgacgggctggaagccaaagcggggacggtttctgccgatttcagtcgttatatgacgtggaaaactgctaacggtaaaacgcaagccaccagtacccaaccacagcttgaagttttattacaggggttgcttaatcctgtaacgctgctggatatgatccgccactttatcgtgtttgaagccagtaaacatgaagacagcaaagggattatcagtatccgcaatgttaaaaaaatggcagcttatcaccagtactacgcggtcaacgcagcagtactttccactattcgtgcctcggcggtgaatgcttactccccctctgccgaagtggcattacgccagcagggacgtaacagtaaagatcttgttaattcgcaaaaaaccggagatcgtaaagcgggggtcgtgtggcatacccaaggttccggtaaatcgctttcgatggtgttttataccgggaagatagtacttgcgctgaataatccaacagtggtagtgatcactgaccgtaacgatttggatgatcagctattcggtacgttttcttctgccactcagctacttcgtcagacaccaaaacaagccaacaatcgggaagaactcaaagaatatttgcgtgtcgcctctggcggtgtggtgtttactactattcaaaaattccaacctgatgacggcggcaatatctatgagctactatcagacagaaccaatattatcgttattgcagatgaagcacaccgttcccagtacggtttcagcgccaaagaagttgacgtgaaagacagcgaaggcaacgtaacaggtaaacgcaccgtttacggctttgccaaatatatgcgtgatgccttgcccaatgcgacctatcttggctttaccggtacccccatagaaaaaacggacgtaaacacacctgctgtttttggtaactacgttgatatctacgatatctcacaggccgtagaagacggtgcaaccgtgcgtatcttctatgaaagccgtcttgccaaaattgccatcagtgacgaaggtcgccagctaattgaagacttcgacgatgagtttaacgaagacgaactgacgcttacccagaaagaacggtctaaatgggccagaatcgaaggtttgattggcagttcaaaacgtattaaagctattgcggcggatatggttcagcactttgaacagcgcttaaaatctaatgccgatcatggcaagggtatgattgtcaccatgtcccgtcgtattgctgctgaactttataaagaaatcatagagttaaaacctgaatggcacagcgatgatctaaatgatggcgtgattaaagtcgtcatgacctcttctgctgctgacggaccagaaatcgctaaacaccacaccacaaaaaaagaacgtcaggttctggctaaccgtatgaaggatgacgacgacaagctgaaactggtgatagtgcgtgatatgtggttaaccggcttcgacgctcccagcatgcatacgctgtatatcgacaaaccaatgaaaggccacaaccttatgcaggcaattgcccgtgtgaaccgtgtgtataaagataagataggcggtctggttgttgactatctgggcattgcctctgatttaaaagaagccctctccttttactctgatgcaggtggacgtggagatcctgctgaggttcaggaagaagccgtaacgctcatgcaggaaaagctggaaatcctggaaggcatgatgcatggatacgattacaaagcttactttgccgcaactacctcacaacgcctgacaattattcttgaatcagaaaaccatattttagggctggataacggtaaaggtaaaatgcgtttcctggctgcggttgcagccttatcgcaggcatttgcattggcgacaccgcacgataaagcaatggaagcggcacccgaagtagcattcttccaggcagtaaaagccagactgaataaatttactgaaaactcagacggatcagaagaagaacacaatgacagtctcgaagttcgggtaaaacagactatcgatcaggctctggttaccgataaagttgttgatatttttgacgctgctgggatacaaaagcctgatatttccgttctttctgaagaattccttcaggaaatgaaggattaccaacacagaaatattgctttggaaacgcttaaaaaactgctttctgacgagatcaaggttcgctcgaatcaaagtatcacccaaggcaaaaaactgattgatatgctgacctctgcaatcaatggctaccagaacaaggtactgaccgcagcggaggtaattgatgagctaatcaagcttgccaagactatccaggaatctgacagccttgccagccagttaaacctcagcgcttatgaatatgccttctattctgctgttgcagataacgacagtgctcgcgagttaatggaaaaggaaaaactacgagaactggcagtcgtacttacagaggctatccgcaacaatgtcagtcttgactggacagtgaaagaagcagcaagagcaaaaattcgcgtggtggtaaaacgtctgctcaaaaaatatggttatccacccgatatgtccttgctcgccacagagaccattttgaagcaggctgaacttttagctggagaattaggaaaatga

SEQ ID NO: 218010 - DNA, 321 bp, Klebsiella pneumoniae; identical to SEQ ID NO: 95262

SEQ ID NO: 218011 - DNA, 504 bp, Klebsiella pneumoniae; identical to SEQ ID NO: 101191

SEQ ID NO: 218012 - DNA, 279 bp, Klebsiella pneumoniae; identical to SEQ ID NO: 98260

SEQ ID NO: 218013 - DNA, 561 bp, Klebsiella pneumoniae; identical to SEQ ID NO: 104073

SEQ ID NO: 218014 - DNA, 1284 bp, Klebsiella pneumoniae
atgagtaaacttgaatatactgacaacttaatgctgtcgcgccagttaccgcttaaatccgtggccctgatcctcgccggcggacgtggcacacgattaaaagacctgaccactattcgcgcaaaacctgcggtgcatttcggcggtaaattcagaattattgattttgctttatcgaattgtattaactccggaataagacgtatcggggtcattacacaatatcagtcccattcactggtgcagcatattcaacgcggctgggcattctttaacgaagaaatgaatgagttcgtggatttattaccggcgcagcagcgggtgcatggtgagaactggtatcgggggacggcggatgccgtgacccagaatctggatattatccgccgctatgatgcggaatatgtcgttattctggccggggaccatatctataaacaagattattcgcggatgctgctcgatcacgttgaaaaaggggcgcgctgtaccgtggcctgcctgccggtcccggttgaagaggcaagcgcttttggcgtcatggccgtggatgagaatgacaaaatcattgaatttgttgaaaaaccggctaatccgcccaccattcctggcgatgaaacccgctcgcttgccagtatgggcatttatgtgtttgatgcggaatatctctaccagctgctggaagacgacgatcgggatgaacactccacccatgattttggcaaagatattattcccaggataacggcggcaggtgaagcgtatgcgcatccgttcccgcgctcctgcgttcagtcggataataatgccgagccatactggcgcgatgtcggaaccctggaggcgtactggaaagcgaatctggatttagcctcagtagtgccagagctggacgtttatgaccgtaactggcctatccgtacctatgtcgaatcgctgcccagcgccaaatttgttcaggaccgttccggcagtcatggcatgaccatgaattctctggtctccggcggctgtattatttctggctcggtggtggtgcagtcggttctattttccagagttcggattaactcgttctgtaatattgattcgtcggttttattaccgggcgtctgggtcggtcgctcctgcaggataagacgctgcgtgatcgaccggggatgcgttattccggaggggacggtgattggcgaaaatgccgttgaggatgcgcgacgcttttatcgttcggaagaaggcatcgttctggttaccaaagaaatgctgaaccgacttgaactatga

SEQ ID NO: 218015 - DNA, 2193 bp, Klebsiella pneumoniae; identical to SEQ ID NO: 180773

SEQ ID NO: 218016 - DNA, 423 bp, Klebsiella pneumoniae; identical to SEQ ID NO: 195003

SEQ ID NO: 218017 - DNA, 192 bp, Klebsiella pneumoniae; identical to SEQ ID NO: 180782

SEQ ID NO: 218018 - DNA, 429 bp, Klebsiella pneumoniae; identical to SEQ ID NO: 180787

SEQ ID NO: 218019 - DNA, 171 bp, Klebsiella pneumoniae; identical to SEQ ID NO: 180786

SEQ ID NO: 218020 - DNA, 429 bp, Klebsiella pneumoniae
atgacttactctattgaggaaaaatggaaggctggcggtttgtctcttggctggactgcaatacctactgtcttgttttttatacagaacgagaaaaagctaacctccgtagcctttaacactctgcttaacctgatcgttcattggtggaatttgcaagaatggccgcatccatcaatggaaagcctagccatacgtatgggggtttctgtaaggacagttcagagagctatcaatgatctggaaaaagctaatctcttggacaagaaaccaacgtcgaagagtgatagccgatatggaggtcgtaatatttatgatctaacaaagctcgttgattacctggatacaatgggcccatcagtagctgaacaggttaagaaaccccgtcataaaagaccggtatataccgtaagaaaaacaacaacttaa

SEQ ID NO: 218021 - DNA, 201 bp, Klebsiella pneumoniae; identical to SEQ ID NO: 180784

SEQ ID NO: 218022 - DNA, 453 bp, Klebsiella pneumoniae; identical to SEQ ID NO: 102162

SEQ ID NO: 218023 - DNA, 276 bp, Klebsiella pneumoniae
atgcattcatacgaggatcgtatttgggcagtcgaactttattaccggtacggtaaaaagacctctgcggttgtcagagagctgggatatccttccacaaaacagttgagccgttgggtgcggatttatgaacagaaggacgatttacccagagatttaaagccaagggaacttctggacagatacatacgctggtataacgagaagcgtatcaagctatcattaggagcaatgagtccggtgaagtaccggcagcatcttgggatcacaacataa

SEQ ID NO: 218024 - DNA, 396 bp, Klebsiella pneumoniae
atggacgacaacaaaccagtgctcctgacacttcacgaagcgctacgcctggatttgattgaagcctatatggcgcgggaaattacgctggcagaagtggcagagtccatggagctcacccgtcgtcagtgctcccgcctgattaaacgctaccgcgagctggggtcagccggtctggtcagccggcgccgtggaaagccaggcaatcatcagttaaacaccaccatcagagatcaggcactgcagcttattcgctcacgcggccgggatatgaatccgtcagccatctggcgaattctgaccacagaatacggtgtccggatttcaaaagagaccgtacgtaaactgatgatagccgagaaaacctggcaaccacgttcttcctccaaagcctga

SEQ ID NO: 218025 - DNA, 1359 bp, Klebsiella pneumoniae
atgttggtgactatgacagacaaagaactttaccggcttggcatcattcagcgagtatttgaccgggctttgcttcagcgcgacgcagcagacatacttaagctcagtgttcgtcaggtgcagcgtcttgtgcgtctgtaccggacagatggagcaaccgcatttgcatcttcccgccgtggacgtcctgcaaacaaccggatcgatgaagaaacacgctgtaaagccctggatttgatccggtgccactattcagattttggcccaacgctcgcaaccgaaaaactggctgaacgccatcatatttatctctccgttgaaaccatccgtaactggatgacagccgacggtctctggcgtcctcattcccgccggcgaacccgggtttaccagccgcgctatcgtcgcgactgtctcggcgaactggttcagatcgatggctctcaccatgactggttcgaaggcagagccccaaaatgctgtcttctggtcttcatggatgacgccaccggtcgcctgatgcacctgcgattctgtgattcagaaaacgcgtttgactacatgatggctacccggcaatacattgataaacatggtaaacctgtcgcattttacagcgacaagcatgcggtgttcagggtcagcggacccgaaagccgacgtaccggcacaacccagttcggacgggctctccgggaactggcgatcgaattgatttgtgccaacagcagccaggcaaaaggtcgcgtggaacgggtaaataaaacgctccaggatcgcctgattaaagagatgcgcctgcagaacatcagctcggttgctgaagccaatcagtggattgaacatttcatgtctgattttaaccgtcgcttctcccggccggcaaaataccctaaagatctgcaccgtgcggtcacacagagtccactggagctgaatgatatcttcgcctggcaggagctgcggaccttatcgaaagcactgacttttcagtatgataaagtgatgtatatcattgaacccaccgaacaaaatacgcgcatagcaggtgaaaaaattaccgtttatgattaccctgacggaagcattactttccggcatcagcaccggccactgggttataagattttcgataaactgacctgcgttgatcagggggcggttgttgataacaaacgactgggtgccgttctgaggctggcacagcagaaacaggacgagctgcaggctgaaggaaagcgaatgcgcagtacaaaaatgccccgcaggcgcgctcaggagcgtgcactggaagagctcagggcgatcaacccggtgctggccagtccgcaggattttatccccagcctgaagcgatga

SEQ ID NO: 218026 - DNA, 324 bp, Klebsiella pneumoniae
atgtccaccgcgaggctctccatctgcccctgcaccgacggcagggccagcgccagcgcctccttaatggcgtggacgtccggcgcgcagtggagcttcgcggcaatcaccgccagctgcgccgggtcgtggtgggccagcaggctctccagggcggtgagcgccagcccggcctccggaatattggagagcaggccgccgaagccaatcggcagcagcagtaacggctcgaacttcttcgcgatggccagccagagcagcagcaggctgaccagcagcatcaccgcctggccggcgccgaggtgcatcagccccatgccctga

SEQ ID NO: 218027 - DNA, 543 bp, Klebsiella pneumoniae
atggcgtgcatcagcaggaagttctgcccgtccgcttccagacccaccttgttcgacacccgcgccgccatcggcaccgccgacacccccgccgagccgatcagcgggttgattttgtgccggctgaacacgttcatcagcttcgccatcagcaccccggccgcggtccccacgcagaaggcgatcacccccagcaccaggatccccagcgtctgcggctgcaggaacttgtccgccaccagcttggcccccaccgacagcccgaggaagatggtgacgatgttgatcagcgcgttctgcaccgtatcgctcagccgctccaccaccccgctctcgcgcatcaggttgccgaagcagaacatccccagcagcggcgcggcgtccggcagcaggagcgccaccagcagcaacagcaccgccgggaacaggatcttctcccgcttacttaccgtgcgcagctgcaccatgcgaattttccgctccttatccgtggtcagcgccttcatgatcggcggctggatcagcggcaccagcgccatatag

SEQ ID NO: 218028 - DNA, 234 bp, Klebsiella pneumoniae; identical to SEQ ID NO: 135203

SEQ ID NO: 218029 - DNA, 972 bp, Klebsiella pneumoniae
atgggaagattatataataaaaaagataatgtcaagtttgaaaatttatcagatagatcggaaaaagataaagtatgggatactcacaggaaagactgtgatttagtttctgcattatattttcagtcagcggagtttgaaagatactttgaacgaatggaagattgttccggccgtttagagtttaatcaacttttagatcgtgaaaccggtgaaataaaaataaaactaacaaacgcacatttttgccgagtaagacattgccccgtttgccagtggagaaaatcacttatgtggaaagcaaaattttataaagcacttcccggaatcgaggcagaatataaatctgcccgatggatgtttcttacactgacggttgaaaactgtgaaataacagatctaaaaaatactctttcccatatgaacaaatcatttaaaaaaatgattagtaggaaacatttcataaaatataatttgggttttgttaaaacaactgaaataacaagatcgaaggatggaaaagcacatccacattttcacatattgcttatgatgaatagtagttattttaaatatggttatttgaaaaccagtgattgggctgaactctggagggattgcttaggtgtatcgtatacacctatcactgatgtaagaacggttaaggtcaagaacggcggcgatgccagtcgttcggctcttgctgatgctgtagctgaaactttgaagtatgccgtcaaaccaagcgatatgactaaggatcgtgaatggtttcacgagctgacaaggcaagtttttaaattaaggttcgtatcaactggtggagtattgaaagatttattcaaggaagaaacttccgaagaagatttattattactaacagaagaagaagaaacagacaaagaacttggatcgttatattttaactggtataaaacaaaagcaaaatacagaagaaaaataacagaatga

SEQ ID NO: 218030 - DNA, 942 bp, Klebsiella pneumoniae
atggaataccatagtaaaacaaagataatagataaaaacgggaaagagaaaaaattaagatctgatgctaatgttttactcgctggggttatttctttaaatcgtgaaaatatggaaatatgggaagattataaaaatgactcgatagcttatttgaaaaataagtatggtaaaaagcttatatcagttattgaacacactgacgaggaacatcctcacatacatttttattgtattcaggatataggtaaaaagtttgatttgatgcatgatggtaaaaaagcattatttgaaaacagagacaagaaaaaacacgatcaaaatatagcttacttggactcaatgagagcctttcaggaggattttttcaaagttgtaagctctaactatggcttgtcgaaagacggccccagaagggctagaatgagccgttctgactacttcaagctgggtagagaagtaaagctgattaatcaagtaaagttaaaagcaaaaaaagatggttataaatttgcaatagacgattttgaaaataaaaactggtttaataaactaacggcaagcattacatttaataaagaatcgttaaatgaagccgtttcccgtgggaataaatataaaaaatcgcttagtagtaaaactaaaaaactaaaagaactcgaaggtgtagaaactaaatataatgatttgcgaaaagattttaaacttagagttaataaccaaactgaaaacctaagaaataaaaataatgctcttgagtctgagaatgaaaatataaaaaacaaaaataaagaactggaagaagaaaataaacaactaaaaaccactcttgaagaaacttccccactctacgagctattaaaaaataagtttggggatcagtttgaagaatggaaaaataacttatttaaatcttttagatccaaaataaaacctaagtag

SEQ ID NO: 218031 - DNA, 1356 bp, Klebsiella pneumoniae
atgacaccgactaccgcacagatcatgacggaaaataccgtcagccagacttaccgggcaacctattcacccgatgataataaattgcgactttacgcatcattacggctcgatgaagaaacgtattccctgatcaacaaagcaggctttcgctgggcgcccaaacaggaactctttgtggcgccagcctggacgccggggcgggaggatgtcctgctttccctcgccggtgatatcgaggacgaggacagcaccctgtttgatcgccaggagcagcgcgccgggcggttcagtgactacagtgaccggcgggcggttgaatcggagcaggcgcttgcgcatgttgattcgctggcatcggctgtcccgctgggacagccgatcctggtaggccaccacagcgagcgccgcgcgcgccggcatgcgcagaaaattgagaacggcatgaaacgtgcggtgatgctgttcgagcgcgccgaatactgggaacagcgcgcgcaggcctctctgcggcacgcgaaatacaaggagcgtccggatgtgcgttaccgccgtatcaaaaaaatcgaggcggaattacgcaagtcccaaaagcacattgcccggtctgaaaagtatatgacgatgtggcgtgcgcagacgctcgatctgaaaatggcgttactggtcagtaattatgatcatattcatgcctgcttcacgctcgacaaatacccccgcccggcagagaaaagccagtatgagggctcgatgtctctccattctgccctgtctgaggagatcattacttttgaacaggcgcgggatattgcgatccgctgtcatgagcgcacgattagccaccaacagcgctgggttaatcattaccagaaccgcctggcctacgaacgcgcgatgcttaatgaaaacggtggcgttgtcacccgaacagaggaatttgaaccaggcgggcaggtactgagccggggagaatggttaaccattctccgggttaaccggagtcagggggaggtgagttcagtcgaaacgccctgttatcgctttctgggctacagcggcacgatgaaactcacgcccgaccgtatcacggactacaaagccccgacagcggaggaagccagcaacgcgaagaaagcggcgaagcgcccaccgatcgtcaactatccgggggaagggttccgggaaatgacaaaggccgagtgggcgaaattacccgctgattataaaggcgtgcggggtgctgcagaaaccgaaacacacggcgcctatcgcttgcgccggtgcatgacgcacggttgtacgctcgtgaatgtgtatatcacagacatgaaaaccgttgaaattccgaaaaaataa

SEQ ID NO: 218032 - DNA, 564 bp, Klebsiella pneumoniae
atgcatcatgaccttaaacaccgtattcaggcgatgcgggacaaactggaggggcgcgcccctgtcgctgaaattcaggggagctcgcagctttttgtcaccccctccccggaatgtcgccggctggttgagctggctgatgtccgggaaaccgatcgcattctggaacccagcgcaggaacgggcgccatactgcaggcgatcagggatacagtcccccgggcgaagtgtgacgccgtggagctgcacgccgggttagtcagccacctgcaggcacgtttcccggaggtccggacctggtgcggggattttctcgaatatcatccggatcgccggtatacccgaatcatcatgaatccgccgtttcatcgcggtgatgatatccggcatatccggcgggcattaactctgcttgagcctggcgggattctgactggaatatgtctggacggcccgcgtcagcaaaaggcgctggagtccctggcggacgtctgggagccgttgccgcggggaacattcacgtatacccaggtagcgaccgccatcctcagaataaccgtctga

SEQ ID NO: 218033 - DNA, 549 bp, Klebsiella pneumoniae; identical to SEQ ID NO: 102282

SEQ ID NO: 218034 - DNA, 405 bp, Klebsiella pneumoniae; identical to SEQ ID NO: 121274

SEQ ID NO: 218035 - DNA, 348 bp, Klebsiella pneumoniae; identical to SEQ ID NO: 16878

SEQ ID NO: 218036 - DNA, 1539 bp, Klebsiella pneumoniae
atgaacagcttacttcctgacgatatcgatgaactgaaacgtctccttgccgaacaggaggcgctgaaccgtgcccttctggaaaagctgaacgagcgtgaacgcgaaatagatcacctgcaggcgcaactggataagctgcgccggatgaacttcggcagccgctccgaaaaagtctcccgccgtatcgcgaagatggaagccgaccttaagcagttgcagaaagaaagcgatacccttaccggccgggtggatgacccggccgtgcagcgcccgctgcggcagacccgtacccgcaaaccgttccctgaatcacttccccgtgacgaaaaacggctgctgccggcagcgtcatgctgcccggaatgtggtggtgcgctgagttacctgggtgaagatgccgccgaacagctggagctgatgcgcagcgccttccgggttatccggacagtacgtgaaaagcatgcctgtactcagtgcgatgccatcgtgcaggcccccgcgccttcacggcccatcgagcggggtatcgcaggaccggggctgctggcccgcgtgctgagttcaaagtatgcagagcacaccccgctgtaccgccagtctgaaatatacggccgccagggtgtggagctgagccgctcactgctgtcgggctgggtggatgcgtgttgccggctactgtcaccgctggaaggggcgcttcaggactatgtgctgactgacggtaagctccatgctgatgacacgcctgtcccggtgctgttgccaggtaataagaaaacgaagaccgggcggttgtggacgtacgttcgtgacgaccgtaacgccgggtcagagctggcgccggcagtgtggttcgcttacagcccggacagaaaaggtatccacccgcagacccatcttgcggggttcagcggagtgctgcaggcggatgcgtacgccgggttcaacgaactgtaccgcaatggacagataacggaagctgcctgctgggctcatgcccgccgcaagatccacgatgtgcacgttcgcaccccgtcagcgctgacggaggaagccctgaaacggatcggtgagttatatgccatcgaggcggaaataagggggatgccggcgaagcgacgccttgcagaacgtcagcaaaaagctaaaccgcggctgaaatccctggaaagctggctgcgtgaaaaggtgaaaacgctgtcgcgacactcagaactggcgaaagcgttcacgtacgtactgaaccagtggccggcgctggcttactatactgacgacggctgggccgaggcagataacaacatagctgagaatgcgctacggatggtcagcctgggccgcaaaaactacctgttcttcggttcggatcatggaggagagcggggagcgctgctgtacagcctgatcgggacatgcaaactgaacggcgtggagccagaaagctacctccgttatgtccttgacgtcattgctgactggccgataaaccgggtcagcgaactactcccctggcgcgtagcactgccaactgaataa

SEQ ID NO: 218037 - DNA, 477 bp, Klebsiella pneumoniae
atgacaattcttgagcgactatatgccagcagcggatcggaggttattcacgacacgttgcagatatcggcaggcgatgataactactggctaaccagtggctgggatgacgtttccgtgatgctggaaaatggtcagccggcgacgtttgaagccagcgcgatagatatcgccttaccagccaggaacgccgacgggacacaggatttaaagtttgctatcagcaatattgacggaagggtttccgaggcgatcgataaaatcctggatgaaatgaaatcagccacgctgacattccggcggtacatttcatccgatctgtctgctccggcatcatcaccgtatacgctcgatatcaaatccggctcctggacgccgacagcagttcaggtcacggcaggctatatgaatgtcctcaaaacagcctggccccgtaaacgttacaacctcgccgagcatccgggcttacgttactaa

SEQ ID NO: 218038 - DNA, 474 bp, Klebsiella pneumoniae
atggcagatattttctacccggatgaatacctgcccatgccgcttatggacgggtacgggtttaagcccatatcacctttactgcgaacggagatgacgtccggtcgggctcaacaacgaaggcgatatacctcaacacccacccaggcatcggttaaatggatttttaaaactgatgctctggcgcaggtgtttgaggcgtttttcagggatgcgcttaaagatggccagtcctggttctatctgaaactccaaaccccaataggggtaaagccctataaagccaggttcgtggatatttacgaagggccgacgctggtcgcgccaaaatactggcagtacagcgcaacgctggaattatgggagcgcccgttaccgccttcaggctggggaaattacccggaatggctggcgggccagtcgttactggatattgcgctaaacagagagtggccgaagcatgacaattcttga

SEQ ID NO: 218039 - DNA, 1485 bp, Klebsiella pneumoniae
atgtacggagaggagaagtcggactcgctcatagtagcggcgaagcaggcgaacaacccgaaaggagcggagtcagtggagcgaaggagcggggccaaggggaacgcggaacagccacacatgcgccggacacagagccgggaaagcatgtcacagaggctgtcacgcgtgcgggaagctgcgaagcagcggaagaaagaacggtttacagcattgttccacctgctgacagtcgaagcactggaagccgcattcctctccctgagcaggaaagcggccgccggagtggatggcatcaggtggatggactacgccggaaacatgaagaacaacataacagatctgcaccggaggctacatcagggcagctacagggcgcagcccggcaggcgtcactacatcccaaaagcggatggaaaacaacgcccgctcggcatcgcctcgctggaggacaagatcgtccagtatgcgctggtgaaaatcctgaacgcagtctatgaaaacgactttatggggttctcatacgggttcagacccgggcgaagccagcacgatgcactggacgcactggccacagggctggtacgcactaacgtaaactgggtactggatgccgacatcagtcagttcttcgacagggtgagccacgaatggctgatcaggttcacagagcatcggatcggcgaccggagggtaatcaggctcatacgtaagtggctcacagccgggacgtcggaggagggtcaatggcgagcaacggaggaaggcaccccacagggtgcggtcatctcaccgctgctggcaaacatatacctccactacgtcttcgatctgtgggcgcatcagtggcgacgtcgctatgccacaggcaatgtggtaatggtcagatacgccgatgacatcgtcatcgggttcgacaaacgatacgatgcccggcgcttccgtatagccatgcagcgcagactgagggagttcggactcacggttcacccggagaaaacccgtctgatggagttcggccgcttcgctgccgaaaaccgtgccatcaggggaaaaggcaaaccagaaacgttcaacttcctcgggttcacgcacatcagcgggaaagatcgcaacggcaggttcatgctgatacgaaagacccgccgggatcggatgacggcaactctgaaagccatcaaagacggtctgcgaaggcgctggcattactcaatccccgaacagggaaaatggctcaggagagtggttcagggatacctgaactatcactcggtaccgggcaacttccccaccatgcagaagttcaggacacacgtaacaaacctctggcgccgggcgctcaggcgcaggagccagaaggatgatacgacctggacgaaagcaaacaaactggcagccgcatggctaccaggggttcgggttcttcatccatggcctgtggagcggttcaccgccagacacccgaggcaggagcccggtgcgtaa

SEQ ID NO: 218040 - DNA, 201 bp, Klebsiella pneumoniae; identical to SEQ ID NO: 101187

SEQ ID NO: 218041 - DNA, 582 bp, Klebsiella pneumoniae; identical to SEQ ID NO: 101188

SEQ ID NO: 218042 - DNA, 201 bp, Klebsiella pneumoniae
atggactacatcactgccatggaagaggcgctgggaatggaagcgcagaagaatatgatgccgatccagccgggagatgtgctggacaccagcgcagacacccaaccgctgtatgacctggtgggctttaagccgcaaacgtcagtgaaggacggcgtgaagaacttcgtggaatggtacaaggattactatcagatctaa

SEQ ID NO: 218043 - DNA, 390 bp, Klebsiella pneumoniae; identical to SEQ ID NO: 152530

SEQ ID NO: 218044 - DNA, 990 bp, Klebsiella pneumoniae
atgagaaaaatatcatttttgtttatcctcctgtttttttcgttagtccctcaggtacatgcagatccgtcgtgtgaaggtcgattcgtcaacccgatcaccgatgtgtgctggcgctgcatatttcctttatcactcggcagcgtgcaggttggtaaaggcgatctgcctgataccagcaatccgggtagtcccctgcagctgtgtccggcgccgccaccgatttttgttcgccccggcctggccatcgggtactgggagccgatggccatgacggacgtcagccgttcgcctggctgtatggtcaatctggggggcttcagtatcaatctcggcaagaccggtatggggaccgcgagaaaggacgacaagcaggtgaacggcgctttttatcacgttcactggtacaagtacccgctgacctactggctgaacatcatcacctccgcaggctgtctggaaggcggagacatggatatagcctatctgtccgagattgacccgacctgggtggacagcagcctcaccactattctgaatccggaagccatcctgtttgccaaccccatcgcacagggggcgtgcgcggctgacgctatggccagcgcgtttcatatgccactcgatattctgttctggtgtgccggctctcagggttcgatgtacccgtttagcggctgggtaagcaacgagtccagtccgctgcagtcctcgttacttgtcagcgagcgcatggcgtacaagcttcaccggcagggacaaattatggagagcatcgggaaggacaaggcggtctgctatgagtatccgtccccgatcatccccaaagagcgctggcgctatcagatggtgaacatgtacccggacagcggccaatgccatcccgtggggcgcagcgtgatgcgctgggaggccggtaaaaatccacccaacacccgtaagaactatggctatctgatgtggcgtaaacgcaattgtgtctttctctga

SEQ ID NO: 218045 - DNA, 720 bp, Klebsiella pneumoniae; identical to SEQ ID NO: 139639

SEQ ID NO: 218046 - DNA, 522 bp, Klebsiella pneumoniae; identical to SEQ ID NO: 92461

SEQ ID NO: 218047 - DNA, 366 bp, Klebsiella pneumoniae
atgaacatggtcgagaatatgctcgatcaggcattcaaaaagcttaagcctcacgagcatcctattctgcactctgaccagggatggcagtatcgtatgagaaggtatcaaaacatccttaaagaacaaggcattacacagagcatgtccagaaaaggcaattgtctggataatgcagtcgtggaatgtttctttggaaccttaaagtcggagtgtttttatcttgacgagttcagtaatataagcgaactgaaggatgctgttacggaatatattgactactacaacagcagaagaattagcctgaaattaaaaggtctgagtccaattgaatatcgaacccagacctatgtgcctcgtgtttaa

SEQ ID NO: 218048 - DNA, 1113 bp, Klebsiella pneumoniae; identical to SEQ ID NO: 11536

SEQ ID NO: 218049 - DNA, 141 bp, Klebsiella pneumoniae; identical to SEQ ID NO: 11535

SEQ ID NO: 218050 - DNA, 276 bp, Klebsiella pneumoniae; identical to SEQ ID NO: 139585

SEQ ID NO: 218051 - DNA, 870 bp, Klebsiella pneumoniae
atgttactcaacaaagaccgctttggcaaactcacgtcaaaatccctcgattcgattgctgctaccggactccgcgaggcggacgccgagcttccttgtctatttagaaacaactcaatcgagatttcttcaaaaacacctccactacccttatcacctctggcttttgagctttctacaaacctcaaaaaatctgcctcggctctggcatggaatgtacagtattttgtcgatacctacggcctttcaaacgttggatttttaacccttacctttcgtgaccatgtgaccgacccaaaagaggcgcagcgccgttttaactccctcaaaacaaatatccttgccaaaagataccgcgcttacatccgtgtcatggagcctatgaagtcagggcgcatccactatcacttactcgttgcactgcactccgacattcgtaccggattcgatttccccgctgtatatcgccaggactactcctccgcaaacaaggctatccgctccgagtggtcattctggcgcaagactgcgccgaaatatggcttcggtcgcactgaattgatgcccgttcggtcaaattctgaggggatagggcgctatgtaggcaaatacatttctaagggcatagaatcgcgtacagagcaatttaagggcgttaggctggtagagtattcccgcaaggctaaaatcgcttctacgcgcttccagttcgtttctgacgggtcttatgagtggcgtcgaaaactttctatcttcgttcactacatcgcggataacatgggttgtgaaccatcattcgacggcttacgccgtgtccttggctctcgctggtcttatcactggcgtgatttcatcatgaacattgaatag

SEQ ID NO: 218052 - DNA, 1221 bp, Klebsiella pneumoniae
atggacgaaaagtccctctatgcacatatcctcaacttgtcagctccgtggcaggtaaagtctctttctctcgatgaaaatgccgcttctgttaccgttactgtcggaatcgctgaaaatactcagttaacctgtccagcctgcgggaaatcctgccccgttcacgatcaccggcatcgtaaatggcgccacctcgatacctgccagttcgccacgatagttgaagccagtgtgccccgtgttatgtgtccgaagcatggatgccagactttgcctgttccgtgggcggggcccggcagccggtatacgctgctgttcgaatcattcgtgctttcatggctgaaaatcagcactgttgatgcggtcaggaaacaactcaaactgagctggaatgccgttgacggcattatgacccgcgcggttaaacgaggtcttgcacgcataaaaaagccgttagcagcccggcatatgaatgtggacgaggtcgcttttaaaaaaggacatcgttatataacggtgatctccgatcgtgacgggcgggcgctggctttaacggatgatcgaggtaaggaaagtcttgccggttacctcagaaccctgactgacggacagctgcaggccattaaaacgctctcaatggacatgaatgcgggctatataagagccgcgcgcatccacttaccgtgtgcagttgataaaatcgcctttgaccgcttccacgtagcgaaacagctgggtgaggtggtggataaaacccgccagaatgaacatccccgtcttccggttgaaagccgccgtcaggccaaaggtacccgcttcctgtggcagtacagcgacaaatggatgactgagtcccggcagaaaaagctgatgtggctgcgggaacagatgcagcagacaagccagtgctggacactgaaagagctggccaaaaatatctgggatcgcccctggagcacagaacgcaggaatgactggttgcagtggatatcgctggcgtctcaatgtgatgtgccgatgatgaaaaacgcagcgaaaaccatcaaaaaacggttatatggaatactgaatgcgatgcatcatcgtgtctcgaatggtaatgcagaggcgctgaacagcaagatcagactgctgagaataaaagccagaggatacaggaaccgggagcgctttaagctgggagtgatgttccactatggaaaactgaatatggcgttctga

SEQ ID NO: 218053 - DNA, 216 bp, Klebsiella pneumoniae
atgggcaaacttggcgaaaacgtaccactaatcatcgacaaagccgtcgattttatggcgtccagtcaggcatttatggagtatctgaagaaatcacctcgcctgagtcacgtaccggaagagatcccggaagagaaagcggcgatgtttctggagcgattagaacactaccgcaaactttatcagccggtcgagaaccaggcgaaagaagtttga

SEQ ID NO: 218054 - DNA, 453 bp, Klebsiella pneumoniae
ttgattgccgccgtcgagttactgaccgaggcggtcaatattctggtgcttcaggtgttccgcaaagacgattatgcggtgaaatacgccgtcgaaccgctgctggacggtagcggcccgctgggcgatctttcggtccggctcaagcttatctatgggctgggcgtgattagccgtcatgagtatgaagatgcggagctgctgatggcgctgcgtgaagagctgaaccatgacggcagcgaatatgccttcacggatgatgaaattcttgggccgctgggtgagctgcactgcgtctctgccctgccgcccgcgccgctctttgacgatagcgatgccgacctgctggcaatgcaaaaacagcgctatcaacaggtcgttcgctcaacgatggtactttctctgaccgagctgatttcccgaatcagcttgaaaaaagcctttcagaaataa

SEQ ID NO: 218055 - DNA, 804 bp, Klebsiella pneumoniae
atggggtattttctgctatctgacgggttgctttctgtcgggagagagggcgtcaaaagctggaccggaatcattactccccaggataccgtcgaggaaatgcagacttcattcagggtcccgtcggaagatgattttgatggcgtggatgtgaaatatatcaaccctgtgacctgggcggaggaaaccgtacagtgccggacgccggaaaatccttttccgcgcaaaacggaggcatacaccattgatgttgccatgactgcagatcgcgcctggcgtatcgggatgcgtcggttaatgaaatatctccaccaacgccgaacgtatacggctacgacttcaatgctgggatggtgtcatgacttcggtgatcacatcattttgtccgacgacattcgaaccgggaaaacccaaagttgcctgattgacgcgatgatttacgacttccaggaaatttcgctgcacgtcacggagccactggactggagctacgcgaatcctcgctgctggatacagtttcaggacggtcgaccatcatcgcgaatgctcacgccgcaacgggtagatgatttcacgctgacggtgccgtacaacgacgacctgcatcccggcgactggattatggacgacccagaaattgatctgccgaagttattgttctgcgacagtgaaaagggggcgcggcatgggatagtccaggaggttgccccatcaggtgacagcaactgtcagattactgcacctgaatataaagaaattttctaccagtacgacgacgccacataccccggcgacgctgcttaa

SEQ ID NO: 218056 - DNA, 282 bp, Klebsiella pneumoniae
atgaaaaaggttcttctttctgcagcaatggcaaccgcgttttttggcatgactgctgcccatgcagctgataccaatgttggcggcggccaggttaatttcttcggtaaagttaccgatgtatcctgtactgtttccgttaacggccagggcagcgatgcgaacgtttacctgtctccggtaaccctgactgaagttaaagcggcagcagcggatacttacctgaaaccgaaatctttcaccattgacgtggctttgttgaataaatcgaacttttgctga

SEQ ID NO: 218057 - DNA, 282 bp, Klebsiella pneumoniae
atgaaaaaggttcttctttctgcagcaatggcaaccgcgttttttggcatgactgctgcccatgcagctgataccaatgttggcggcggccaggttaatttcttcggtaaagttaccgatgtatcctgtactgtttccgttaacggccagggcagcgatgcgaacgtttacctgtctccggtaaccctgactgaagttaaagcggcagcagcggatacttacctgaaaccgaaatctttcaccattgacgtggctttgttgaataatttgaacttttgctga

SEQ ID NO: 218058 - DNA, 336 bp, Klebsiella pneumoniae; identical to SEQ ID NO: 139380

SEQ ID NO: 218059 - DNA, 366 bp, Klebsiella pneumoniae
atggcgggctttcgtaaaaaagaagtctccgttccggagtgggataacgccaaagtcatcattcgtgagccatcagcagaagcctggattcgctggcagggcattgccagccccgaaccacccaaaccaccggaagggcaggatccccaggaggcaccagaactgaccccttcagaacgagccttccgcacgatgcgggccgacgtcacgcttttcatcgatattttgctggataccgacctgcagcccgtctttactgtcgatgacaccgaacaggttgaagcgatctatggccctgtgcattcccggctgttgaagcaggcacttgatctcattcgtgacgcggatgatgctaaagcaaagtaa

SEQ ID NO: 218060 - DNA, 447 bp, Klebsiella pneumoniae
atgggcaacaatgagcatgaagttatggcggacaaacagagagcagaacgtatcaaaaaggtaattctggaacactcgacttatgaagaactggccgagaagactggcattagcgtgagtacgctggtcaggatagcgtccggcaaaactgaacctaaattcagtgacatcattcagatagctaaaattacgggtgcagacttaaacaccttagcttatggctatactcttgatgttaaagaagaagctaccgagcggaagctaatcacttctgcggatggatatactgatgaagaaaccactaacgcacataatttcatcgtgtggaacatcaggacactggaaaaacaagatattctggcactcgcaaggcaggtttctgcattaagttcatacacttacagtactaaaatgtttatgaaaaaagcggtgtctggagaagagtaa

SEQ ID NO: 218061 - DNA, 483 bp, Klebsiella pneumoniae
gtgggacgtataaccgcgcccgagccgttatccagcgctcatcagctggctgagttcgtcagtggagagacagtcctcgatgaatggctaaaacagagaggtttaaaaaatcaagctcttggcgctgcccgaacgttcgttgtttgcaagacgggtacgaagcaagtagctggtttttactctttggccaccggtagcgttaaccatacggaagcgacaggtagtcttcggcgtaacatgccagatcctataccggtgattatactcgctcgcctggcggtagatgtctcattgcacggaaaaggggttggtgccgatttactccacgatgcagttctacggtgttatcgcgtagctgagaacattggcgttcgtgcgataatggttcatgcgcttactgaagaagccaaaggtttctatgctcaccatggatttaaggcatcacaaactcatgagaggactctgtttctaaagcttccatga

SEQ ID NO: 218062 - DNA, 282 bp, Klebsiella pneumoniae; identical to SEQ ID NO: 218056

SEQ ID NO: 218063 - DNA, 282 bp, Klebsiella pneumoniae; identical to SEQ ID NO: 218056

SEQ ID NO: 218064 - DNA, 141 bp, Klebsiella pneumoniae
atgtacagaatgaagcagttgttgggagattcactgacgctgcgtgactacgatggtcaggtagcggaagctatggccatggtgcgtgcgttgaacaggatgacaaaggccgggatgccagaaagcgtgcgtattgcctga

SEQ ID NO: 218065 - DNA, 318 bp, Klebsiella pneumoniae
gtgattgatcgtgctccggaacagaccggtaagctgaagaaaaacgttgttgtcgtcacccagaaaagccgccgccgtggggaaatcgcatccggggtgcatattcgtggcgttaacccgcgaacggggaacagcgacaacaccatgaaggccagcaacaagcggaatgcgttttactggcgctttgtggagctgggaacatctacggcgccagcacatccgtttgttcgtcctgcctttgatacccgcatggaagaggctgcgcaggtggcgatgcagcggatgaatcaggctattgatgaggtgctggctaaatga

SEQ ID NO: 218066 - DNA, 447 bp, Klebsiella pneumoniae; identical to SEQ ID NO: 218060

SEQ ID NO: 218067 - DNA, 141 bp, Klebsiella pneumoniae; identical to SEQ ID NO: 36145

SEQ ID NO: 218068 - DNA, 159 bp, Klebsiella pneumoniae; identical to SEQ ID NO: 95254

SEQ ID NO: 218069 - DNA, 201 bp, Klebsiella pneumoniae
gtgaaaaccctgacgcttttcctgagtgccctgatgttgtgggggtacagcctcagtgcggctgctgacccctcctgtgagggccggtttgttaacccgatcaccgatgtgtgctggcgctgcatcttccctctgtcgctcggcagcggtaagcgtcgtctcagcaccgtctggcagatcctgatattcctgagaggatag

SEQ ID NO: 218070 - DNA, 498 bp, Klebsiella pneumoniae
atggcacgaaaaaccaaacaacaggcacgtgaaacccggcaactgattctggatgttgctctgcgtctgttttcgcagcaaggcgtatcatctacctcgttggcaacaattgcaaaagctgcgggtgtaacgaggggggctatctactggcatttcaagaataaatcagatttattcaacgaaatttgggagctgtcagacgccagtattagcgatctcgaaattgagtatcgggcaaaattccccaacgatccactctcagttatcagggagattctagtctatgttcttgaagcgacagtgacagaagaacgtcgacgattaatgatggagattatctatcataagtgtgagttcgtcggtgaaatgaccgtggtgcagcaggcccagcggcagctctccctggcgagttatgagcgtatcgagcagaccttgaaagagtgcatcgcggcgaagctgctgccgccaatttactcacccggcgggcggccgtgttaa

SEQ ID NO: 218071 - DNA, 402 bp, Klebsiella pneumoniae
atgaaattagttatcgcctccgtaatttctctgctcagcttcagcgcgctggcggcgccagaggggacgctcagcgtacacattcttaatcagcaaaccgggctcccttcaccgggggtgcagattgagctggataaacagcagggggagagctggcagcatatcgccaccggtaaaacggatgccgatgggcggattaagtcgctctatccgcaggcggagaatatggagccgggggtgtataaagtgacgtttaaaaccggtgactattttaaaagccaaaatatgaatacgttcttcccggtgattccggttattttcaatgtcacaaagcaaaatcaaaaactgcatatcccgctgctgctcagtcagtacggatactctacctaccgcggcagctga

SEQ ID NO: 218072 - DNA, 348 bp, Klebsiella pneumoniae
gtgctcggcgcagagttcatcaccagttttgccgggctcagcgctgcccttgcccgcggtccgcgcttgacatcgccccccgccgacaagctctatatcgccatacctgacagctataacctgacccgtaaggaaacttttttaatcagcctgctgatggggggaatgccgttgtgtcacgtggccagcaccatgcagctcacgatcaaacgggtctactactaccgttcacgcgtccttagcaagctggcggtgaaaaataacgtggaactgatgaacaaagttcaggggatggtgttgcgccactaccgacaggagacaggccatgaaatcgtatctctacgctaa

SEQ ID NO: 218073 - DNA, 300 bp, Klebsiella pneumoniae
atgttgatctgcattgcggattcagaatattttaatattgccctgaaagcgtatattaatgaaccaaacagcaagcctctggatattaaagaaatactctgttacccgtttagtggacagagtgagatgttctatactttttttgcgaccgatgccggagcccggctaagcaccatccttattgattacagcagcgtcagcatcgaagtactgcaggtcgcgctcagtttaaaatcgtttaatcccctgatccggatctttatttttgccaaatcaggctacccgttgagcgagctctaa

SEQ ID NO: 218074 - DNA, 2436 bp, Klebsiella pneumoniae
atgaaactcagggagatcaaggttgggttgatgctgctccttccctggcaggaggcatgggcggcagaggcgtttagttttaaccgcgcccatttgcacggcgccgcgcaggttgatctccagaaatatcaatacggtaatccactacacgccggacagtaccgcagcacgctctcggtgaatggccgggacctgggggaagaaacgtttgttatccaggaacacgatggccagcttgagccctgcatctcaccctcgctgttcgacgctctgcagctgaaggatgcccagtggccaaccgcggccacctgcctgcgtttttcgcagatcgataaggcgatcggctgggagtatgacagcggggaaaacgtcctgcgggtaaatatgccccaggcgctgctgcaaccccattatcggggggcggtgaacctgaaaaaggtggatagcggcgtgcccgccgcggtgctgcgctaccaggccaatagctatcagagcatcgtcgacggggacaccagcagccatcattatctcgggctggatgccagcctgcgcgcctttggctggcggttacatcaccagtccagctaccaggcgcaggaagggaatacgcactgggatagcattgccacctgggctgagagaagtgtagtgaactgggcgtccacgttacggctgggtcagggatggaccgacggaaccttctttgacagcgtcagttttatcggcggcaggctggctaccgatgtgcgcatgctgccgggctctcgccgcggttttgcgccgtcggtcagcggcgtggcgcgcaccaacgcccgcgtaacggtcacccagaacggcgctctgttgtacgaggcaacggttccgccgggcaaattcaccttcgacgatctctatcccaccaacgccggcggcgatttacaggtgacgatccacgaggcggatggcagtcaggacacctttaccgtgccgtacgccacgctgcctggcctggtgcgggcaggcgcggtctattatgatctgtcgctgggctatctggatgaggacgggatcgccgggcggccgggatttggcgaagccacgctgcagtacggcttcaatgactatatcagcggctataccggcgctaacgcgacgacagattattactcgacgctggtcggcagcgccttcaatacctactggggcgcgctggcggtcgatctttcccgttctgcggcgaagggcagggagcacggctggcaggagggctaccgctggcgggtgtccgcatcaaaatcgtttacatccgatacgcgaatgctgctctcgatgagccacagcaacgacggcaattatcgctccattcgcgatgccgcctgggagcacgaccggcaccccaacgactggcgggagatgacccgctacagcgcgacgttgtctcagcaggccggcagcggcagtctgtcatttaacggaatctggagtgaggatgtccgccaccaccgctggcgctcatatcagctgggctatgccaaccgctatggtcagctcaattattatctgtatgcccagcagagccaggatatccatcaccgcaataatcaggtggtgggcgtctccttttcgctgccgttcgggcaggcgggcagcctgaccacccgctttaaccacgataaaaactacggcagccagctgcagtccagctataccggcagcgcaggcgagaaaaacgccttcagctacggtttgaccaccagctacgacatgccgcgggagaacccaaatgaagccagcgttgcggccaacggtagcctgcggacggattatgcgtacctgaacgccagcgccagcgccggtcgccatcagcagcagtactcgctgggggcatcgggcgccctggtagcgcatcagggcggcatgaccgccacccccgaactgggggaaaccttcgccattgtggaagcgcccggcgcggtgggggcccgggtggctaaccgccttggacagccgattaaccgccagggttttacgatcatcccttacctcgatccctttaccgctaactggctggatctcgatccgcagggtctgaacgaccatgtggagattgtctccagcagcacgacggtggtgcccgattcgggcgcggcggtgaaggtcaaatttgtcacgcgtaccggctatccctggtttgcccatgtcacgctgccggatggcgcggcgcccccgctgggcgcggaggtgttcgacgacaacggtcgggcggttggcgccgtcggtcagggcgggctgctgtatgcccgagtgccgcaagaccacggcagcgtctcggtagtatggggcgaacgcagcgggcaacgctgccggttggcctatgccatccgcgacgacgcggtgcagcaggttagcagcggcacgccgcatcaggtctgccggccgggaataaaggagaagtaa

SEQ ID NO: 218075 - DNA, 1026 bp, Klebsiella pneumoniae
atgaaaaaaatcatcgcatcaggggtacctcttctgctggccggcgggtactgcgcttcgctgtcggcagcgtgccagatggtcagtggcaaaactatcgagtattcagtgaacgtcagccaggccagcatcaaccttgacgtcagcgatctccccatcggctccctgctatacagctacggagggatgattatcactaataacgaacgctgggagatcgcctgcagcggcagcgagcccggcgggtttcagagcattggcggttcccgggtcggcccggcgggagacggcaagccgggggatatctacagcatcgaccgcctgccgggcatcggctacagctttcagatgggggaacaggatggcattaatttcgattccctgttcacggcctggccttccgcgccggtattttccggccagcgcgcatttcaggcggaaaataaaaaaccgaccatctatttctggcggattgccgataacggcggtctaccgccgccgggcgaatattgccttaatgattaccttggcgatatttatcttggcggagtacaggcgatgcgcttcagcgtcagcgggctctgtattcaggtcaaatcacccacctgcaagattactgacgacagtaaaaacattaacgtcttcctcggacggcataacaaaaccgcatttaccgggctcaacagcaccaccgccccggttccttttaacatcaacctgacgaactgtgaaaatgtcggcagcgtgtttatgcagtttaacgcgacggtggacagcgctgtcgccgccaacgaagtgattaaaatcgatgaccaacctgaaggggcatccggacttggcgtgcagatcctcagtgccggcggctcgctggtgccgctaaaccaggtgagccaggtctggtccgggaaaaaaggcagtcagacgaactatcgtttatcctatcaggcccgctatatccagacgcagcccgcagtgactgcgggcgaagcgaacgccagcgcgaccttcgtggtgacttataactga

SEQ ID NO: 218076 - DNA, 585 bp, Klebsiella pneumoniae
atgtctaatgaacaaattaatgtgcaactaaataccatcgggttttataatcttattcattatcaggatgggcggaatagttttgttgatcccatatctcgagtaaaatatgtatatccggattttttctttctaagaaatatagggataaaacacaggttgtataaaagattgttttttttgttaaagtttttatttgtaagtaaaagttttaagagaaatggtgataaaatagatggatatttcaagggcactaactggtttggtttgaatagagaaacgacaatcgccatgatgctctttataaataataatgaatggtatagagaattatactataagtcatgttgtgcagatgaagttatatttcatactgcaattaaacacctagggcgcgaggatatattccatgatgaaaattacataaacgatgcgttacgctatattgattgggtttcaggtcccgaatatcctaagatactcaatgaagaagatgtagataaaataaaaaaatcaaactgtatttttgcaaggaaatttccacatgatatagcctctgaattgttttataaaataatcgagtaa

SEQ ID NO: 218077 - DNA, 636 bp, Klebsiella pneumoniae
atgttaagactttttaaaataaatggtggtgccgtgaggttagatagacaatatatgataaaagataaaaaagatcttgttaggtatttggagtgtgataggatagccttaaaaaaggattataaaaggcctagatttatgaaggactatgagtggcgatttcagatacttcttagaaaaacagagtattggaaaaataaaaatggtttcttgaaaaagataatttacccatattatttgtttaaatataaaaaaatttccagattaaactgccttgaaataccattaaactgtataagagaaggattgaccatatggcacttacaaaatataataattaacgataagtgtaaaattggttataatttttctatttctgcaggtgtgataataggacaagccaaagagagagcacctgaaataggtaataatgtcatgttaatggttaatacttcagtacttggtgccagcatatgtgataatgtagctatcggtgccggtggtttagtcataaaagatattgacgatgagtttactgtttgggcaggatcaccagcaaaaaagatatctaataattatcccgaaccccatatggaaaaaggtaaaggtatatttaaaaaaatagaagaaggatga

SEQ ID NO: 218078 - DNA, 1797 bp, Klebsiella pneumoniae
atgcttcaatgggtagaaaactatatctctgcagagcaatatgatacgccagcgatagcacatgagctatattcctgggaaattgagcaagagaagaagcacatctatctggatccaggtattgaggactttcttgcgcaatatccctctgataagacaatctttctgtccgatttttatacttcatccactgatttaacagagttactcgttagcgctggattggatcagtctgtcatatcagatggcgtttcttcaattgacgagcgactgaacaagagaagtggacgtctcttcgattttattcaacaaaaatatcagttagccggcgttgactggatacatattggcgataatgaatggtccgatgtgcaaatgccgacatcaaaaggtataaaaagtattcggtatctcccagcccaacagcatcagctgcgtgagcaaaaagagtttctctggaataaaaatgaagatctcacggaaacgatcaccaataatattcttaataaatatgcagcatctaaagatttatcagttgattttcagcttggcttgaaaacaactccgttaatcgctggtttttgccttaaaattttggaacatgccgtcatatcaaaaagtgaaaaaatcctctttttcactcgtgaaggcgagtttttcattaaagcaatgaatattttgattagtcatctcaagactaatattaaagaaataaagttaccagaaatcgatattatagaagtcagccgtctggctaccttcgcgccgtctctacaagaaattagcataaaagagatgatgcgtgtttggaatttatatagcacacagtccattagctctttattcaagacccttaacgttgcccctgaaacattccagagtttcatcgacaaatatgggattcctgcagatgaacagatccaatatccatggcaggacagccgtattcagcaactttttgacgactctggtttcaaagagacgctctggcagcatgtgatgcagcaaagagctcttttgaagaactattttgcgacaaaaggtctaactgatgatatcaatgcgcgtatttgcgtagtcgatgtcggctggcgtggcaccattcacgataatattgctcttctttatcctgatattcattttaccggcatatatctgggcctgcagaaatttctcaacgagcaaccatcaaacacatcaaaagttgcttttggcccagatttgaatcaccaactggagtatcctcattttcttgattccgttgctcctattgaaatgattaccaactccccttcaggtagcgtaacaggctatgggctggagaatggtaagatagtcgctattcgcagtgttaacgacgacgaaaacagcgcgtggcataatttcacaaaaacatttcaagaagggatcctggccggtatggaatccttctccgctgcagtgttgagttatggcattactcacgacgttgtacgtggctacgccctaaatatttgggatgtgctaattagtggtagtaataaatctctaactgacgcttttaataatttaaatcataacgaaacattcggcttaggtggatacgttaagaaaaaccatgtaccctcgaccttcgagatattaagctctttatggaataaaaacaaccgtgcagcattgattgaatttattaaagcaaatcaatggagcgatggcatacgtaaaagagacaatctgccctcgctaaataaatacattttagcactgacgattgaccttgcggttttttataaaagaaaattctatcgcaagtattaa

SEQ ID NO: 218079 - DNA, 1410 bp, Klebsiella pneumoniae
atgtcatctgataacattgcaattagcgtaagtaacattagcaaatgctataacatttaccaaaaccccagagataggttaaaacagtttttcttacctaaagtccagagtatggttgggaaacctgtacaacgctactataacgaattttgggcgttaaataacatcaactttaccatcaataaaggtgagtcagcgggaattattggacgcaatggttctggcaaaagtacattactacagctaatcaccggcacgctaactccaacaacgggcacgatacaaaccaagggaagaatagctgccctcctggaattaggctccggtttcaacccagagtttaccggtagggaaaacatctatcttaacggcgccgttctgggattatcgcgggcagaaatagatgcaaaatttgatgctattgccggttttgctgatataggaacccatctcgaccagccggtaaaaacatactccagcggaatgatggtgcgtcttgcatttgccgttcaggtacaattagagccagatattctcatcgtagatgaagcacttgctgtaggcgacgcactttttcaaaagcgctgtttccaacaaattgagaaattaaccagcaatggcgtaactttactgtttgtttcacacgatcaagagtccgtgcgtaccttaacaaacagagctattcttctcgatcgtgggacacaattaagtactggcttatcatcagaagttttacttgaatatcgtcgtttactacaccgggaagaaagtaagtatttttctcagttagcagaggaagttgctgcccacgcggacgccactcgcgatattaatcaaacccccaccgcgccggctaagatagaaattagtgctaatgctgaaacccctgctgtagaggaaacctcgccctctcgtacagataaactatcgttcggtgaaggtgaagcagaggttgaaaatgttgaattgtttacggcttctggtgaacgcagcaatgcctttaaccctggtgataaaatcagagttcgtgttaattgcaaagtaaataaagatataaaccacattaacgttggcattcgtattcgcaataaagaaggcgtcaaaatttattcatggggaacgttaaaccaggacatgtatgttcgtttccatcaacttaaagatccccaattttgggaacgtgagtttaaagcaggcgagcgtttttatgttgatatggaatttgaatgtactttaggaacaaacctatatgaaatacaggcggcgatatcctatgaggggacacctaattatttctcgcagcgcattttacactggcgtgatgaagccgcgttttttcacgttaatgtcctgcgtgatgaatatttctttggtggcattctggatctcaagatgactgcagagtggtaa

SEQ ID NO: 218080 - DNA, 882 bp, Klebsiella pneumoniae
atgattaacggttacattcctgccgcgcgctttcttccttttctgagctggacggacgtggccgccctgccggataaaagcaatacggttatcgtcctccccaccggggcgatcgaacagcacggcccgcatctgccctgctcggtggacagcgtgatatcttccggcgtggcgggccatgccctcgccaggctgccggcgacgatcccggcctacgccattccgccgatcgtctacggtaagtccgaggagcatctgcattttcccggcaccctgacccttagcggcgatacgctgctgcataccctgctggagatcgccgaatctctctatcgggccggttttcgcaagctgctgatgatcaacggccacggcggccagccgcagatcctgcagatcgcctgccgggaaatgcgcctgcgccacggggatttcatcgccatcccccacgacgtgttcaacgtgcccaactgcgaaaaacagtttctcagcccgcatgaacagcggatggcgatgcacgccgggcatagcgaaacggcgctgatgctggcgctggtgccggagtgcgtccatatggaacgggccgtcgctaatttccccccggaattcccctgcccgaccctgtcgaaaggccgcccggcggcggcgtgggcgtcgtatgactttggccccagcggggtgattggcgacccgaccccggcgacgcgggagcaaggcgaagggcttctcgactccctcgccgccagctgggcgcaggcgatcatcgagatccaccgcatggcctgggtcgaacgtcgcgaaccgacctggggcaaacagcactggcacggctttgtgcagtccctaccaccttctttcgctgctgaatccagggagccctga

SEQ ID NO: 218081 - DNA, 984 bp, Klebsiella pneumoniae
atgaataccagattgacgcccgtttttaccctgctgaccgtggccgccctcgcgacctcagcctcctgcttcgcggcggagaagtttacctttctcaccaactggtatgcccaggccgagcacggcgggttttaccaggcccaggccaccgggctgtatcaacacgccggtctcgatgtcgaaattaaaatgggcggcccgcagatcaacgtcatgcagctgatggcggccggtcaggcggattgcacccttggcgacaacggccaggcgctggagacctggcaggccggggtgcacgcggtgaccgtcgccaccgtgttccagcactcgccgacggtgtttatcacccatgacaaggtggagaacccggcggaacttaaagacaaaaccttcctgctcgccaccgaggcctatacctccttctggccgtgggcgaaaagcgagctgggtctggctggcagcaaagtgcgcccctatacctttaacgttcagccgttcctcgccgataaaaacctggtgcagcagggctacgtgacctccgagccgttctccgtcgccaaaggcgggcagccgttctatgtctatccgctcagcgactggggctacccgccctacggcaactcgattatctgtatggccgacaccatccgcaaacgtccggcggcggtggcggccttcgtcaaagcctccatggaaggctggaaaagctacctgcaggatcccgcccccggcaacagcctgatcggtaaagcaaatccgcaaatgggcgccgagcagatcgcctttggcattgcccagatgaagcagtaccagctggtgaccggcggcgatgctaagtccggcggtatcggcatcatcaccgagccgcggctgaagaaaacctgggacatgctggtgaaaaacaaactgatcgacgccagcaaggtgccgtttgagcagacttacaccctggagatggtcaaagacgccggagtgatgccatga

SEQ ID NO: 218082 - DNA, 300 bp, Klebsiella pneumoniae; identical to SEQ ID NO: 110084

SEQ ID NO: 218083 - DNA, 2106 bp, Klebsiella pneumoniae
atgcctgactccacatccctggcatggagctggaatgccagaaagcagccagtaaacccttatgctgttgatgtgcctgcacggaaaccatctgcgctggccgtctggattgctctttatgagcaggataaaagcggtcaacgtgagcaggctgaagcaatgagtcgtgcagcagaagagtacctcttttctgttgcacattgcgatccctggcactatgacgaattgaatgatgcgctgattgagaaagctaaacgacattcagaactccatcgtgttgatcctcttaccctgattcgtgatgacgtcgccagcttgcctggtttcctgcgcaagccgctggaaaccaggattaagtatttggaaaaatcagaagatccgcgccatttgcctacctatctgaatgaggtcattactccctcattagtgaggattgacaaggtccgtgctaaccaggcgtcgctgtcattccaggccatggctggcagggatagccttgatcaactccttcgacttgctgaactgaatcagcgggaggttaagcggctttcaacgctggtcgcagcgcacattgatatgatttttatccagctttgcggtgagatgctgaccgatgaattagcttctcccatcgtaatactggagctctatcgtcgtgtggcggccgaagtgtcacgcctcgatgttatcccgccgggttatgaagcgctccgcagcaaacataatcgccgcaacccgattaactacgagctgataccgggcgcgcttgcccgtatgcgttgtgctgactggtggcaacgtaagctgtggcaactccgcaacaaatggcgggaagagttgcttcgggcagcgtgccttgttcatcggcacgcatcaccttatgtcagccatgacattctgttgcagaagcgggaacaacgccgtaaggcgatggattttttccgcaatcatgatctgattaacgaagatggcgatacgctcagcatggaggatgtggtgcttgcaagtgccagcaatccagcgcaccgccgtaatgagatgatggcctgtgttaaaggcctggaattgatagctgaaatgcgtggcgactgcgccatgttctataccatcacctgtccgtctaagtaccacgccacactgatgaacgggaagcctaaccctacatgggatcactcgacagttaggaaaagcagcgactatctggtcgatacgtttgcggcatgccgtaaggcaatgcacaaaaaagagctgcgctggtacggcgtccgcgtagccgaaccacatcacgatggcactgtgcactggcatttattgtgtttcatgcgcaaaaaacatcgacgtgcaatcacagagctgctgcgtcgtttcgctatccgagaagatcgcgccgaacttggcaataacactagcgctcgtttcaagtcaaagctgatagacccgcgaaaggggactccggccagttatattgcaaagtacgtcagtaaaaacatcgatgggcgtgggctgggtgacaccgtcagcaaggagacgggtaaatcactacgtgatagtgctgagtacgtcactgcgtgggcatcgttgcaccgtgttcaacaatttcgtttttttgggattccaggccgccaggcgtaccgcgagttacgattgttcgcatcgcaggcaactcgtgcaatgaaaaccagcaaaccgggtgctccggtacttatggatccaaaactggacgctgtgcttgctgctgctgatgttggctgttttgccacttacatcatgaagcagggtggtgtacttgttccccgcaaaaattacctcattcataccgcctacgagccgacagttgaaccaggaacctatggcgatcacgggattcgtgtttatggcatttggtcgccaatcaccggtaaggaaaacaaaatatgcacgcatgtccatacctggaagatggtgaagaagactcccgctaacccaggcgctgaaagcgccgcccagggcgaccccgtcgccccttggactcgtggcaataactgtccccagctatctgaaggagtaagaaaggaaacggtggatgactcatggacagagaaacagctaaatagatgcgcggaatag

SEQ ID NO: 218084 - DNA, 2031 bp, Klebsiella pneumoniae
atgagactaaaaaaaattttcatctctggattcaaaagtatttctaaccaacatcctcaaactattgaacttgagaaagacttaacaacttttattggccataacggtactgggaaaagtaccgttatggaagctttaaataaattgttttcagtcgatcactcattaagatttttatcgataaatgattttaacagctcctatgattgtaaagatgaaaagaacaagaatttaattattgaggcttggtttagttttgataagccaaaagatagtgagctcgttattccgcctttgattgagcatttaactattgataaggaagatggtggtatattatttcgggtgcgattagagggaagtcttacatatgattctaatccaatgggggacattgatgaagacatttgggtagttaacacaagcgatatgatagttgaggatgacaacaaacagaagctacctgctgctataagaaattctattcaggtaaattacgtacctgctaatcgtgatccattattacaacttaaatattcttccaaggctgttttaggtcgattgcttaaggctatcgagtgggttgaagacagccaaaaggctatagaagaacaggcagcacatctgaatgttttgactaagagtaatccagcgttaaatgaaatagcctcagcaattaatgcaagttgggctagtatatatagaggacgatacttatctcaagcctccttgaatttcccacatgctaatattgatgagatacttaaactaatacaacttcaattcaatcctgatgaactcgggaatacaataagtgttgagcgtttgagtgatggccaaaaatcactagtttatttttctctggtcaaagctatgttcgatattgatcagaaaacaagagagttattatcctcagggaataagtcaaattttaacccagacaaaatgagattgcctatttttagtatgatttccctggaggagcctgagaatcacctttctccacactatttaggacgtattataaagttagtaaaagactatgcaaaaaatgaactctgccaggtaattatttcctcacattcatcatctatattaagtcgagtagaaccagagcatatacgccatttcagacttgatagtgattcaaaaagtaccatagtaaatgcgctatctttacctgataaaactgatgatctctctaagtttgtcaaagaagcagttaaggcttatcctgaaatttatttttctaaattagttatttttggtgagggggatagtgaggaaatagtcattcctaaagttcttgaactttattcgactgaggtagatagccattctatttctatagtccctctcggtggaaggcatgtaaatcatttttggcgccttttgaggacattacaaatcccttttattactttattagatttcgatattgatcgaagcggtggtggatttggaagaatcaagtatgcaattgagcaattagtttcatttggtgatagtggtagcaaatatattagcgacaaaattatatctaaaataccaagatggaatagcgagacggatcctacaacattctctattagatatactgatggtgctgaaaaaaatatcgttcgggaacttgaaaaatgcaatgtatatttttcatcccccttggatattgattatgcaatgatcgaggctttcccggatgttttttgtgaaaaagatgtggtctatggagaaagaggaccgtcggcaataaaatttgatgttgcagaagatttggatgagttaattaaagcggttttgaaaaaaggaaattcaggtgttcgttacgccttttcagaaaactatatgaagtattttttgtggtatcgttatcgatttctatcaaataaaagtaagccagcatcacatgttcgcatgtttacaaaaattgaagagttatattctcctgatgaaattcgtgacaagttaccacccgaattaattaaagtggctaagaaaactattaagctattgaaggaggtcatagaatga

SEQ ID NO: 218085 - DNA, 1674 bp, Klebsiella pneumoniae
atgatgacggaatggcaaccttcagctggtattgaagcgacagatgaattgatggagattattctttgtgatgggcacatctctgttttggcgggtgctggtgcgggtaaaacggaactgttagcacagaaagcagattatttattgcaaactgggaaatgcatgtggcccaaaaaaatactctgtctttcatataaaaaagaggctcaagaaaatattaaagagcgcgtaatgagtcgatgtggctcaaaaggggaacgttttgactcatatacatttgacgccttttgtaaaagtattgtagaccgattcaaagatgttttacccgacagtaaaaggccttcaaatagttatgatttggtttttgacaataaagaaagtaatggcagggataaagtctcttttgatttgattagatatttggctttggttatttttaaagaaagagaagatatttctgatttgttttcaatgacatattcacatgtttttattgatgagtttcaagatacacgtactgatcagtatgagctaattaaattattatttaaaaataaaggaaattctttactaagtgttggtgatattaatcagagtattatgttatgggctggtgctaaaagaactgtttttgatgattatattaaagattttaatgccacaaaaaaattactggtgaaaaattttagagcaagcgatgagattcaagaggttcttagatgttttattcactatgttcaaaatgatacgaatttttcgccaatagcaaaagatataaataattgtacaatccatttttacaatgatgagatttcagaggctgaagatctatctgatataattaaaggattaattgggtctggaatttctgagaatgaaatttgtgtgttaactaaacagcaatcagagaagtatacagagcagcttaggcatagtcttacgaaaaaaaatattagaaatcttgagatgtcagaattacaagatcttttgaaagaacccttgggtgaactattctcggcatgttttaaattatacacatctcgatctttatctggttatacagatctttgtcagttgtatttgggtatgtacagaatttcttccggagacgcaaaagaggaattgttaatcaaaagtttgtcaaatgaaattgctaggcatcgtgcagaattaggtaatcagcctaatgctgattcactgttaacatgtataaaagaaacggttgagtttttttgcattgatcgaataaagggtcgatgggggcagtataagtcggctggttattgggtaaaggtctggaacggcttggagcaacatttgcgatacacaatatcttcaacagggtcactaaatgatgcggtgcaactcttcggggctgacaattctgttcaagttatgaatattcataaatgcaaggggctggaatataaagttgttattttgctcggattggaagaccaggccttttggacttatcattcccagaagtttgagaatgattgtgcattatatgtggctttgtccagagcaaaagaaaaagttataatatcaactgctaatttcagatctcataggattaattctaggtatgataataggacttcattatacaatatgcttaatccagtttatgagtttttaagaacacattgcaaatttaaggtggttacttga

SEQ ID NO: 218086 - DNA, 1053 bp, Klebsiella pneumoniae
gtgaaaaagaaatacggtaaaaagccgatagccagcacagccggttctgacattgcggagtcactgaaggccgatcccgcgttgacagcattcagctttgatggcccttatcccgtgcgtgatatggccgatttgctggacaatctctattgcctggacaacgggcgatactatgagacgccagtggatttttacgggctggctaaagctccacgtcagagcgcctggcatgagtcggcgttgtatttcaaacgaaatgtgctcaccggctgctttatcccgcacaagctgctcaatcgccagaccttttccgcgtttgcgctggactggttcacgtttggcaatgcctatctcgaattgccgcgtaatcgcctgggcggcccgctacccttcaaacactctctggcgaagtacacccggcgtgggagcacagatctcgatcaatactggtttatccggcgctggaaagaagagcacacgttcaaatcaggaacggtttgtcacgttctgaaccctgatattaatcaggaggtctacggtatgccggaatatatggcagcactgctggccgccagcctggcccactccgctgacatgttccgtaagttgtactacgacaacggatcgcatgctggatgtattgtctatattggcgctggacaggttgatgataaaagcatgaaggcagtcaaagagacgttgaccggtgcgcgtgggaaaggcgcatttaaaaacctgctgctgcatgcgccaggcggcggcaaagacggcgtgcaaatcctccccttccagcagatcacggcgaaagatgagtttatcaacattaagaacgccacccgggacgacatactcgcagcgcaccgtatcccgccgcagctgatgggcgccatgccagagggaaacggatcatttggggatatcgagaaagccgcccgggtctacgctatcaacgagctgacgcccgtaatggaggcgctgaaggtggtgaacgagtggatcggagaagaagtgatccgctttaacccttacgcgttgcttacccctgagaaataa

SEQ ID NO: 218087 - DNA, 468 bp, Klebsiella pneumoniae; identical to SEQ ID NO: 203374

SEQ ID NO: 218088 - DNA, 585 bp, Klebsiella pneumoniae
atgaatgctgagctgttgcgcctgctggaaaacattctgcgcctgggcgtcgtggaacaaatcagcgccgacaagaaagcggtgcgcgttcgctccggcagattgctgaccacctggatccgctggaacgtcacccgcgcaggggcattcagcatctggctgccgccctcgataggggagcaggtctggatcggttgtccgggcggcaaccctgaaaacgcgtttgtgattggctctgcatacagcgcagataatcagccaacgggcagcaacctgctggaaatcagcatcaccgcaccggatggcgcgcgcctgcattacgacgccgccgatgccggagcactgtccgtgaccggtattaaaaccgcgcatatccaggcagagacccgcgtcacgctggacacaccggaggtggaatgcacaaaccacctcaaaacacgcactttcgaactgacccacggcggcacgatggccggtgatgtgactcacagcaacggtgcgttaacgtccaacggtgtccaagttgacagccacggtcatggcagggttcagaccggcggaagctggacggagggcacgcgatga

SEQ ID NO: 218089 - DNA, 924 bp, Klebsiella pneumoniae
gtgcaaacgtccgtcgatttatctcagatcccgcagcctgatatcgtcgaggtgcccgattttgaaacggtgctggctgatatccgggcgcttatcgtggcggccatgccagcggaacttcaggcttctgtgtctgctgcgctgttgctggaatctgaaccgatggcggcactggctcaggccttcacctatcgcgagatccatctgctgcaacgcatcaatgaagccgtgcgcgcagtgctgctttccagcgccttgggggcggatctcgatcaggtctcgggtaattttgacactgaacgtctgctgattactgaagccaccgacgaggcggacgccgtatacgaaagcgacgaagagctgcgcgcccgcacgctgctctcatgggcgcgcctgagcacggcgggcgcccgtaatgcctatcactattttgcgcgaggcgcagatgcggatgtgctcgacgtgcgcgcctatggtcctgaaactcataatcaggaaggccgcgttttcctctacgtgctgtcacgcaccggggatggatccgccccgcaggcgctgctcgataaagtcctggcggcggtaaccccggaagacgtgcgcccgattacggattatgtggctgattacgtccgttccgctgtgatagtgaattatcaggtggttgctgacatttacgtcccttacggcgtggacaccgccacggtgctggaaaaagccaccgcagcactgaacgaatacaccgcctcagtgcatcttatcaacgccaccgctgcacggtcgggcatagacggggctttgcatcaggacggcgttgtcaccgtcgatttgcattcaccggccgccgacgtcgttgcgacgatgggcgaagcgcctcattgcacctctgtgaaaatcaatcttgtggtgatggactatgaccgctaa

SEQ ID NO: 218090 - DNA, 3027 bp, Klebsiella pneumoniae
atgaccgctaattatcccgccagcattctgccacccaacgcaaccgccgtggagcgggccatcgacagggccagcgccgccgcactggagaggttgccggtatatctgatccgttgggtgaaggatcctgacagctgcccgctggcgcttctgccgtggttggcgtgggaataccaggttgatacctggaatattaactggtcagaacaaaagaaacgcgatgcgattaagcgcgcccactatatccaccgccatcgcgggacggtcgccgccgtccgtcatgccctagtggacagtccttttgggacggatattgttgaatggttcaatcagaatccgaaaggggatccgtatacctttcgcctgaacgtttatcagaacgatttgccggtgacggaatacgaccagcaggatctgaaactggcggtgctgcgcgccaggaacctgcgcagctggttttccgttcatgtatttggccgacttcagggaacctcatatgcggccggttacatgtacgccacggagaaaatcacgccgcgctttgtcccgttgcaggtgattttatcccgctacgagctgaatctggcccctggtgacgcggaaacggtcacggtgaccatcctccctgaatacgcggaagataaaacctttacggtaaccacgtcggataaaacaatcgcgactgcccgaattgtcaacggcgctattctggttacgggcatgaagcgaggtacctgttcggtcaccgttacgacgactaatggcgtcagtgcggtgatcagcataaaagtggtcgcggtaatgaagttcattacccgcatcgacagtgcaaccaggccaatattctttgctcatatggacgagggtttcacggttgactatggcgacggcattgacagccgggactaccgtttcgatcccgccagtgaagcttcaggttgggttattcctacacgtgaattagtacagggaaaggaatacaccatcacagttaagaacacggaaaccgcctgtctgcgcagccgcttatctaactattcttcgaaactgaaccctgttgtggaattgattagtgttacaggggaaagaggtcatctttcagggttcgctttggataccagcggattaatggctattcgtcccggagtatttgacgatttgccaaacgtgaataactgcaaaaatatttttaccaactgctcgtcgcttacaggtatcccggcatcgttgtttgctcgcatgaagatagaggatttttcagacgcattcagagggtgtacatcgcttactgaggttccatcggggctatttgcaaaccagcctgatgcgatcgacttctcatcggtatttgcaggctgcaccggcctgatcagtatcggcaataatctgttccacagctgtgtatctgcggtgaatttcagttacgcgtttgatggttgctcaatgcttgcaaatatcggcacgggaatatttacaggatgcggttcagcagggacattctcttatagcttcagggcgtgtaaaaatcttcttgtcttgcctgctgatatgtttgcggatgttccgggcggcgcattcaccggcgtattccagaattgcacggcactgacggcaattcccgccaacctgtttaaaacatgttctgaagcgaatcattttggcggtgcattcactggctgttcgcagcttctttctgttcctgccggtctgtttgcaggtctgtcgaaagtcacctatttcgggacagtcttttctggttgcagttcgctgaaaacggtcggcgcgggtttatttgccgggtgcagccaggcgcagacattcgcctctgcattttacagctgccgctctcttgaaactgtagcgaaagatattttcagcggctgcgtagaggtgacgacctttgccagtacgttttatgggtgcagcagcctgacggcgctcccgtcttttactgactgcgcgaaagtcaccactttctcatacgcttttgctaactgtggatcgctcacgaaaattgatgatgatgcttttgctgagaaagcgctggtaacgacattcacatacgcttttgtaaactgtacttcgctggtttctgcgggggacggcgcatttcggggatgtagcgcgttaaccagcctgggctatacgttttcaggttgccgctctctggtttctctcgcgggagatatgtttgccggttgcgccaaagtgacagccgtcgatttcttgttcgacaagtgctccgcgttgactggactgccaaaagaactgtttagtgacatggtatctctgaaaggtatgggatcgacattccgtgattgcagcgcactgatcgcgctaccgtccggcctgcttgatcgttgcatcaatctcacttcgttaacgctgacattctcgggttgtacctcactggcggtattgcccggcgatttgctgaaaaacaacattctgctgtccggtgccggatcgacgttctacggttgcacctcactggtaaatattccgccgacgctgttcgcgtcctgctcgcttattacctcgtttggcgccacgttccagaataccggcgtggaggaaataccggaaaacctgttcagcggcaacccgctggtgacctcttacggccagactttcaggggctgtgaaaacctgcgcttagtgccagccggtctttttgccgccagcataagtgccacggtattcacgaatgtcttttcggaatgcagtgcgctggaagtcgtcggggcgggattacttaacaccacggcggtaacgacggtgggttatctgtttgacggctgcgcgtcattacgtagcgacgttaacacgatatttaatcttgcgagttacccggagattgtcaccacaacggcaatattcaggagctgcgcattactggccggtaaaagcctggtatttatggacaaggtgccgaacgtcaccgcgcactattacgcgttttatgcctgcgtgggcctggacgattacgacgatttacctggcaattggataacgaataaatcatga

SEQ ID NO: 218091 - DNA, 1296 bp, Klebsiella pneumoniae
atgaaaattgcagtggaaaaatacaaatcgatctacaaaaaaaaagaaataacaatcgatggcctaacaatcctttctggttcgaatagctcgggaaaatcgagtttcatgcaaccttttctaattttgaaacaaacattagaaaaacaatatgactctgggtttctaataataaatggtgaaaatattaaactaactgatgctaagcaaatattatccaaagttaacaataatacagacagaaaattttcattagcattcactgaggacgaatcttcatgtagcataatttatgaatataaaaaaggctcggggtttatacctaaagagtcgtcaatgctcagcagtaaaatgaaaaatgaagtaatcctcaaccttagaatgaaacatgatgagattaaagagatgttggggagagaaaaagaatttggttttatggatgaatacgcaaaaaataaaaagataaaaccaatttggaaaactataaaaaagaaatgcttcattattgctgaatataggtctccggatagaaaagcatctttttttgctgctggcgtagatcctacatatcagttagaaaaatttattcgtagtataatacacgttcctggattacgtggaaatcccgaaagaaagtatcagattgctgagtcggaaaatgtatttcctggatcctttgaaaaatatgtagcaagcattatatctatgtggggtaaatccaagaaaaaggataagcatgatctactagtcaaacaattgaattatttagggcttgccagttcgataaagacaaaaagaacagacgatacgtcaattgaaataaatatatcaagaaagataaaaaatggagacgatgattgtgtaagtgttgcagatgtagggtttggagtatcccaaacgcttcctgtccttgtcgcgttactggttgcgaaaaaaggacagcatgtttatatcgaacaacctgaattacatttacatcctaaagctcagtttaaactagcagaaataattaaatcagctttggatcgaggagttaaaataatcatagaaacccatagctccttattaattagaggcatccaaacgaaaatagccagaaaggaaattgaaaatggcaaagtttctttaaactggttcacccaagatgaaatttcaggcgaaacaataatagatactaaaactcctgatgagtttggagcttttggagattggcctgctgactttgatgatatatcgctatatgcggagcaacaatatttggatgctgtcgaggaatctatttatggctcactatga

SEQ ID NO: 218092 - DNA, 555 bp, Klebsiella pneumoniae
atgcggagcaacaatatttggatgctgtcgaggaatctatttatggctcactatgataatagacatattgtagacgcagatatcgcaagatctgctggggcatcagaacatcctgtgtcgaagagcagtcgtgatttattgtcggatattaaatctgggaataatgaagtatatttttgccaaaaactccttcaagagtggcgtaaacataattcgctaatcgcaagaacttggttgtcatcgatgatctcaagcaaaaaggcgatcttaacgaaggataatctttcctcattatctgaggagattgaagaggtaataaatgaggtcaaaataaaggagatagcaaaaaaagatgctcatttagtggagtcagccaaaatttatgggtgcattattttctctaatgataataatgcaagggcagccttctcaaaaataaaagaaaaaatcacctccattcgaggggttatatggttatgtccgttggaaaagattgaggaaatcagaagtgatgtccttacaaaaaaaatgatacgcaaagacaattacttataa

SEQ ID NO: 218093 - DNA, 1485 bp, Klebsiella pneumoniae; identical to SEQ ID NO: 95322

SEQ ID NO: 218094 - DNA, 438 bp, Klebsiella pneumoniae
atgattaagccccgccttaacgaaacgctggaagatattcgccatgcgctgagctacgtggattatctgtttcccaactttgaagaggcgagacttctcaccgggaaagagacgctggatgaaattgccgacagcttcctcgactgcggcgtgaaaacggtagtgatcaagaccggcaagagaggctgctttatcaagcgtgccgatatgaaaatggaggtccctgcggtgtcgggaattaccgccatcgacaccatcggcgcgggggataattttgcctcgggatttatctccgcgctgcttgaaggcaagccgctgcgcgagtgcgcgttgtttgctaacgcaacggccgcaatatcggtactgagcgtgggtgccacaacgggcgtgaaaaacagaaagctggttgaacaacttctcgacgaatacgaagggtaa

SEQ ID NO: 218095 - DNA, 1359 bp, Klebsiella pneumoniae; identical to SEQ ID NO: 214298

SEQ ID NO: 218096 - DNA, 909 bp, Klebsiella pneumoniae
atgcgtgttatcgactatggccgcctgctgctgctcgccgccctctggggcgccagctttttgtttatgcgcatcaccaccccggccttcggggcgttgaacagcgcttttcttcgcgtactgttcgccgctatcgcgctcgggctgttactcggcgtgcagggtaaatggagcgggtatcagggaaaattcacatccactctgcagctgggggtcattaattcaggccttccttttctcatgtactgccttgccgcgcaatggctgccggcagggtactccgccacgcttaacgccacggcgccgatgatgggggtgctgatcggcgcgttatgctttgcagaaccgttaaccctgcgcaaaggcggcggcgcgatactgggcgccattggcgtggcggtgatcgcgcgcccgacatctggccttagcgccgccctgctgctgccggggattggcgcctgcctgaccgcgaccgcctgttacggtctggccggctttctgacccgccgctggatccagcagcgaggcggcctcgaggctgaacgcgtcgcgctgggtagccaggtcggcgccacgctgtttctgtttcctttctttctctggtcctgctggcatgggccagccgtagactggcggcagagtctgccgtggatagcgatagtcatgctgggcgtggtctgcacggcggcagggtatattctctacttccgcttgattgcagatatagggccgctgcgttcgctgtcggtgacctttttgatcccaccttttgcggcgctgtggggctatctctgcctcggagagacagtggaggaaggattgattctcggcgcgctgctggtttgtgtagcgctatggatgattatcgtgccgtcggggcgaaaacgcggggtaccggacggcgcatga

SEQ ID NO: 218097 - DNA, 753 bp, Klebsiella pneumoniae
atgcagagcagaaccgtttaccactggcagagccggcgggatgatcgggcggtaaccctgcatatccgggaaatagcggaaacccggatccgctacggttgcccgcgtattcatattcagctgcggcgggaaggctggcctgttaaccacaagaaaacacaccggatttactgtctggaaggcctcaacctgcgcagaaagcgcccccgcaggcatgtcagtgcagcacatcgtcagcaacgtccagtcctgaccggagtcgatcagtgctggagtatggatttcgtgtcggataacctgtttaacggacgacgtttccgggcgctgactgtagtggataattttagtcgggagtgtgtggcgatccatgccgggaagtcgctgaaaggtgaggatgtggtcggtgtgatggaaaggttgcgggtgctgggcaagcgcctgccggtacgtattcagacagataacggcagcgagtttatctcgaaaagtctggataaatgggcgtatgagcacgttgttacaatggacttctcccgccccggaaaaccaacggataacccgtttattgaatcatttaacggcagtctgcgggatgaatgcctgaacattcactggtttctctcgctggaagatgcgcaggacaaactcgacaactggcgcagggaatataatcatgagagaacgcattcatcattaaatgacatgactccggctgaattcatccgaagtctccggaaagacgaagatctctga

SEQ ID NO: 218098 - DNA, 390 bp, Klebsiella pneumoniae
atgaaaaagacccgctataccgaagaacagatagcatttgcgctgaaacaggccgaaaccggcactcgggtggaggaagtctgcagaaagatgggcatttctgaagccacattttacaactggaagaaaaagtttggcggcatgggcgtgacagagctgcgccgcctgcgccagcttgaggaagagaatcagcgtctgaaacgtctggtggccgatttaagtctggacaaggagatgctgcaggaagttatcaaaaaaagttctgaggccggctcagaagcgtcaggcggtgcattttctgcgggaggcttaccgtatcagtgtccggcggggatgcggactgctgatgcagagcagaaccgtttaccactggcagagccggcgggatga

SEQ ID NO: 218099 - DNA, 2382 bp, Klebsiella pneumoniae
atgtccaaaactagagataatcattatgtacctcaatggcatcaaaaagggtttatggaggaacgggaacaacaactctgtcacttaacgcgacgtgaaatcaacattcccggaggcgagacaaagttggtcgagtcaaaaaaatggcagactccaacccagcggttttatgaggttgatttatactcaactttttttggctctgaaataaatgatgacatagaacgacaattattcggccctatagataacaatggttcaacagctattcgagcttttctcggagatgatcaagctcagtggcataatagttttcgtgatttgtttacgtacattgactctcagaaattacgaacgcctaaaggtttggattggattaaaagcaaatactctgagctaaatcaaagtcaactcatgatggaaatgcaatcacttagaacaatgcattgtacattatgggccgagggagtacgggagttagtttcagcatcagaatctgaaaccaaattcattctttcagaccatccagtaactgtttacaactatgcttgccctcccgattctgaactttgtgtttatcctaatgatccagacattacgcttaaaggctcacagacaatatttcctttagacaaaaatcgctgtttgattctgacaaatcttgagtatgcacaagatccaaaaaatataaacccaattcagcaacgaactaatgccactcgacaaagacatagtatggttaacaccattaatttcattaacagccgaaaacttactgatgatgaagtaaaaaaaataaactacatcataaaaagcagatctaacaaatccattgccgcaggtcgagaagattggctttatcctgaaaaagacattaagaatgattgggctgaattacgccatgtgcttttaccatcattgaatggggtattgggttttggaggagaaatgtatgttaagtttgaggatggctcagtacattatcaagatgcgtttggtagaacatctagtgcacacgaatttctccagaaaaagacaagtaaagagcgaataggtcgtaactctatttgtgggtgtggcagtggtagaaaatacaaatattgctgccttaatcttgctgaaaatttgcgtacatcatgggatgtattaagcataagagaaagaaacctcgcattttgcaattgtattaaagatgtattgggtttaaataaaggtaaaacgtggctagatgtcagaaaagaactcacagaggaacatataacaaagatttatgaattctatgcaatcctatggcctattgatacagacatatataatctattaccaaaatctgatggaaaattacgagctttgtattcagggcctgtagatatccgtaccatagttgaaaatgcaataccaatggcttcattatttgatgagtttttgattgaatcccctatatgtaaccctaatgttaccaatcctgattttagccccataaatcacccatcacaatataaatatcagtcactcaaggattttttattcttccttcacatggagccatttattggacttggcttgataaatatcattcctgaaccagccgaatttgatattgaacttatgcgagcaatgttagacatggctagggatagaagccaaagaaaagagcatatacacgagcaagatctgcagcgacatttcatattagccactgaggatttactaaactcaacggtactaatgcctaggtctataagagttgatttccttatgagccagttcgatttggctgaagagttagcaactgatattatttctatgtcagagtcgaaagcagattcatcacctctaatgctattacaaaagccaccaacaggtagtagtgggcaattaatgatgtcacgtaacggacctaattatgaaatggctttatttatagcccaggcaactggatcagtgattgtaactgatagcatttcgagatggaatcagctatattctgcacagcaccgcaatcaaggtatatctgcttacccatggagtaaaacacttgatactttcaattctgtgcctctagacattcagtttgaccgcacatttttaaaatcccaaggtctattctccaagaccagaaacctgcttaaatgcattgaccaaacaatattgagaaataatcgttcaccatcacatctacagaacctcgctgctcacataaatgaccttatgaaacagctaaatgtagagagtgagtccttggttcttaaaaatatgatgatttccgcaccggagggtggttttcatgatagaaatgttcagcgattattggcacgttcaagttgtttaaaatacgatgacaatgtcaggtcaattttgggccttgatattacaacttag

SEQ ID NO: 218100 - DNA, 570 bp, Klebsiella pneumoniae
atgagccgtacatttgcatactgccgagtttccaccagcgaacagacaaccgaaaaccaaatcatggctattcgtcaggctggctatgatgtgattgataatcgtgttgtatcagaagttgtttctggtggtgttcaggctatgcagcgtaaagcctttgccgatatggtaaatcataaactggagtctggtgatcggctggttgtgctcaaactggaccgcttagaccgtgacaatatcgacgtgcaacacactatcgcaatgttgctagacaaaggaattgacgttgtatcgttggatctgcctgcgagcaaccttgccagtgccaaaggaaagttaatgcttcagatgttctcggcgtttgctgaatttgaaaaatcccgcatcacagagcgcactaaagaggggctagagcgtgctaagaaagaaggtaagaagctaggtcgcccaattgctacagacacccgccaacgagttcaggaagccaaaactggtgggctgagccaggccaaggttgctgctgctttaggtttagggattgccacgataaaacgtcattggaacatctga

SEQ ID NO: 218101 - DNA, 741 bp, Klebsiella pneumoniae
atgtcacaggcttatgaagcattctattcaggtgatttgacacgataccagcagatcattaattcgatgggatcagctttacaaaatacaatcccggcagttaccccagcaccaatggagcaaaatacagcgacaactgccgagactgaaccagcacactgcccaagattgttggaagcgtggaatgactatataaaggataagggtcaaaagtggcgcaagcaaacagcaaatgagaatcagcgtttctttgatgtcctctatcatgttgtgggtgatgtccctgttgatagcgttaagaaacaggatttaagggattctctcaaggtggcagagaatctgcctactcgaactaaactaccctactccagaatgagtcttgccgagtgcattgattacgatgtccctgaggataatctgatcgccagtgagcatgtccacaaacatttaaagctatggcgttcattgttcaaaacgtatcaagtcgatcagaaagatgttcttaccaaatcccctactgatgggattagttacgaggttaaatccaaccggggtgggaactatacaaccaatgaactgagtcgaatcaaagagcatctctttgcactaccaaacagtgattatcggaaatggcacttactgcccctgatttatacaggtgctcgacgtggtgaaatagcggatatccgtaagcaccacatacagaaagatgaggagaccgggcgcgggtatatttattga

SEQ ID NO: 218102 - DNA, 363 bp, Klebsiella pneumoniae
atgctttatgaaacaatgagccagcctgaatttaaacttaactcactgatctgtaactatttcatggtacacagcatggcaaacaacgtgtcacacaagctgtcacacacaatgattcgtgggcgcacatactacacgaattttagactaaatgattcaacaagttttgtgcgcttgagtctcggtactgatagccgaaagcaagcggaagtgatcatgaatcagatccgccctttcataccccttgtacagaatggaacgatgagcctcgaagagttcaaacacaaaattcagggttaccgcgccgccactaagcaggactttgatgaatatcttttgaattggcttaaaggtggcctttaa

SEQ ID NO: 218103 - DNA, 1083 bp, Klebsiella pneumoniae
gtgcagcaacgtcagtgctttacacaaggtgaaaacgtggaattacttgctcagtacggcttatttttagccaagatcgcgacggttgtcgtcgccatcgcggtgattgccgctattatcgtcaacctcgctcagcgcaagaagcagcgcggcgagctgcgggtgaccaatcttagcgagcattataaagagatgaaggaatcgctggcggtggcgctgctggacggcccgcagcagaagcagtggcataaggcgcagaagaaaaagcaaaaacaagaggcgaaggcggccaaagcgcgggcgaagctgggtaatgccgagccggaaggcaagccgcgcgcctgggtgctggatttcaaaggcagtatggatgcccatgaggtcaatagcctgcgggaagagatcaccgcggtactggcggcggcgaaagcgcgcgatcaggtggtgattcgcctggaaagccccggcggggtggtgcacggctacggtctggccgcctctcagctgcagcgcttgcgcgacaagcagatcccgctgacggtggcggtcgacaaagtggcggccagcggcggctatatgatggcctgcgtggcgaacaaaattgtctcggcgccgtttgcgatcctcggctctattggtgtggtggcgcagatcccgaacctgcaccgcttcctgaagaataaagatatcgatatcgaactgcacaccgccgggcagtacaaacgaacgctcaccatgctgggcgaaaataccgaggaagggcggcgcaagttccgcgaggatctcaatgagacacatcatttgttcaaggatttcgtccaccggatgcgtccgggacttgatattgagcaggtggccaccggcgaacactggtacggggtgcaggcgctggaaaaaggtctggtggatgcggttgaaaccagcgatgagctgctgctggggctgatggagagccacgaggtgatcggggtgcgttatcaacagcgtaagaagatgctcgaccgctttaccggtagcgcggcggagagcgccgatcggcttctgctgcgctggtggcagcgcggtcaaaaaccgctgatgtaa

SEQ ID NO: 218104 - DNA, 612 bp, Klebsiella pneumoniae
atgactgatatcgccaccttcactaatgagcaattaatcgccgtgtgccgtgctgacgtggcggaaatgtcgaagtttttaaaagagggtgaattcagcaatccgtcccgcgcagccatgtatttgcgtattactgaaatcgcattggctgcgctgatgggggagttctcatttgctcgcaaccaggtacgccgcgagcacgccgagtggtcacagtccaccttcgggaatgtcggcccgatcggcccactgaagcacctacgaagagaagtgctggaaaccatcgctaagccgcatgatctgatcgagtgggctgatatgcaattcctgttgtgggatgcgcaacgccgtgccggtatcactgacgagcagattacccaggcgatgatcgataagctcgcggtaaataaggcgcgccagtggcccgagccaaaggacggggaacctcggatgcatttacgaagcgaagacgaatcactcaacgccaggcgccgccgtaatcgtgaatctaatgcgcgcgctcgcgaacgtgaaacgcccgcacaacgcaaagccagactggagaaaaacagattgagaatggctcttcgtcgtaagggaggtgccaaatga

SEQ ID NO: 218105 - DNA, 315 bp, Klebsiella pneumoniae
atgcatacgtcgctgggaagtggaattcaaacctttctgcgatcaaaagttaacccctactggcgtaaacgcgatctgcgcgggtatatccgcgaagctgcactcaccaccgcttactgcatggttgaacgaatggctgaagataacgcccgagctgattttggtatcaagggttggtcgtcggatttctcagcctggtacgacgaacgtcgggagcactatcgcaaagacgcaaagctcattcttgatacgtttgcctgcaacgaagctattgatgaagaaattcagaacgagctggaggcctggaatgactga

SEQ ID NO: 218106 - DNA, 3039 bp, Klebsiella pneumoniae
atggaatatttttatctgataaaagcgactcaaaaatcgggtaaagctgatgccgtaatctggcgcactaataaatcagaagctcgcgccctactgcagctcgacgtcgatctggaagacgctgggatcgaaacaggccgcggcaaagactatcaaaaaccaattcgtaccgatttcccggtattcaatgacctgccggcggaaggtgttctcgattactcatggtgcgaacgctaccagctcggcgacgatggccgcacctgggctctgaagccaggtcaggcgcctgcggatcatcacatcgataatgccggagtatctgctgagcccgttagtggcgagctggttgatgccaatactactggtgacgcggcacaaggtgagaccgtgataactttcggtagcgatgaataccaggacgattcgagcgcgctttttaacgtggcagaactcccctttcgcgctcagctgctggcgcagtatatggccgaagaacgccacgtttatcatatcagcatgcctcaccggcaggagctgtcagttcttgaaatggacactgataacgcagccgtccaggatctgattctggccgccgagaatatccctgaaatcaaaaaatacgatatgccggcgctctggaaattcaccagtgccaataaaaaagtcttcccggaagggaagcggcatgagctcggcaagcgtatccagtttgcaaagctgtggttcgccacgaacgcaatcgaccgcggcattctcaccaaggaatgggctgccggtaactgcatttcttcggttatgaaaactgatgcaggtacgaatgctggcggcggtaataaaaccgatcgcaatcctgactacacccatacccttgatacgctcgatgtagaaatagccctggccacaatgccaatggatttcgatatctacaatttcccggcatcaattcaccgccgggccaaagagatcgtccagaagaaagaaagtccgttcaaggaatggtctgcagcgctgcgcaaggtcgcaggcatcctggattattcccgcgcagccatttttgcccttatccgtggcgccaccagcgatattcaccatttcccggtaagtctgcagacctatatcaatgcgaacctgaccgagcataagcatgacgccccttctgctgagacgcttgaaaaagctggtcatgtttcatctgccgccgtcactctggacgctgtgaaaaaggctatcgatggagatgaaggtgtgcctgacctggaaactctcccaacagactttcaggtaattggcaccgaactggtgaaagaagctcaaaagaaatgtcctgacgctaatcaggttctggccgccgaacgtggtgaatatgtcgaaggcatcagtgaccccacggatccgaagtggataaccgaagacctgaccaagcccagagccccggaaattgccaatcttggcggcggaatgttttcaattgaaggccttatgacttcaccggctactaatgctaccgaagaaggaaccaccagcgatgtgcagatggaaacggctcagccggtcgaagacgaaaatgataatgcggtatcagcaggcgaaggcgctgatgagcctcctgcgcaaacaactgccgtgaacatgagcaaaatactggctgaacgctgcccggatcttaccgccgaagtgctgaaaagccaggtttccgagagtgctcatagcgatgaagaggaagaggctgaacaagcagcgccagcatggccggagtatttcgagcctggtcgatatgaaggcgtgccaaatgaggtctaccacgccgctaacggcatcagctccacgatggttaaagatgcgcgggtttcgctgatgtatttcgaggcgcgccacgtatccaaaactatccagaaggtacggtcccctgttctggatatgggcaatctggtgcatgcactggcactgcagcctgatcaactggaaaaagaattcagtatcgagccggaaatcccggaaggcgccttcaccacgacggcgacgatccgcgcatttatcgacgaatacaacaacgggcttccggttttactcagcgcagatgacatcaaaagattcctggaggaatacaacgcgaacctgcccgcccaggttcccttgggtacatcagttgaagaaaccggccagggttatatgtctttacctgctgagttccagcgcattgaagacggtcagaagcaaaccgccacagcaatgaaggcctgcatcaaagaatacaacgccaccctgcccgcccaggtgaaaaccagcggtggccgcgatgtcttactggaacagctggcgcttattaatcctgacatggttgctcaggaagcacagaaggcgcagcccctgaaagtctctggcacaaaggccgatctgattcaagccgtgaaatcggtaaaaccggatgccgtgtttgccgacgagctgctggatgcatggcgcgagaacccggaaggaaaagtgctggttacccgccagcagctggctacggcactggccattcagaaagcactgttgaatcacccgaccgctggcaagttgttgacgcacccgagccgtgccgtcgaggtgagctatttcggcattgatgaggaaaccgggctggaagttcgcgtgcgccctgaccttgagatagacatgggcggcctgcgcattggtgcggacctgaaaaccatcagtatgtggaacattaagcaggaaggcctgcgcgcgaagctgcaccgggaaatcatcgagcgcgattaccacctgagcgcggctatgtactgcgaaaccgcagcccttgaccagttcttctggatattcgtcaacaaagacgagaactaccactggatcgccatcatcgaggcatccgaagaactgctggaactcggcatgctggaatatcgcaaagcaatgcgtgccatcgcgaacggtttcgacactggcgaatggccggcgccgattaccgaagactacaccgaagaacttaacgattttgatatgcgccgtctcgaagcgctgcgcgtacaggcataa

SEQ ID NO: 218107 - DNA, 2655 bp, Klebsiella pneumoniae
atggaaaatccagccagcctgttacgccgtcttaatccctgctgtgcccgcgcaatggagggggcggcctccctgtgccagacccgggcgcatgccgagatcctgcccgagcactggctgcttaagctgctggaacagggggaaggcgatctgacggtgctggcgcggcgctatgaatgggatatggatgcgctgtggcaggatctgctgaactggctggataaacagccgcgctcggttcgtcatcgtccccagctctctgaccataccctgaggctgatgcaggaggcctggctgattgcctcgctcagcggcgaagcgcagatccgcagtgttcacctgctgatggcgctggttgaaaaacagaatctgatccagtgcgatggcctgtggccgctgttaacgctgggccagcgtcagctggaacgcctgcgccccttgcttgatgcccagtccgacgaacgtccgccagcgcagcaggaagcggcgctggcgcagccccatggcggggacgtggaatttgtggggcgtcctgcgggcagcgaactgaatgcggatgggctcaatccggcgctgcagaacgcgctggacaaattcactctcgacgtcaccgccaaagccagagacggcctgattgacccggtgttcggacgtgacacggaaatccgcctgatggtggatattctctcccgtcggcgaaaaaacaacccaatcctcgtcggtgagccgggcgtgggcaagaccgctctggtggaaggcctggcgctgcgcattgccgaaggcaacgtccccgacgcgctgaagccggtgtcggtgcgcaccctcgacctcggtctgctgcaggccggcgccggggtcaaaggcgagttcgagcagcggctgaaaaatatcattgaggcggtacagcagtcgccttcgccggtgctgctgtttatcgacgaggcgcacacgatcatcggcgcgggtaatcaggcgggcggcgcggatgccgccaacctgctgaagccggcgctggcccggggcgaactgcggactatcgccgccaccacctggagtgaatacaagcagtacttcgagcgcgacgccgcgctggagcgccgctttcagatggtcaaggtggatgagccggacgacgacaccgcctgcctgatgctgcgcggcctgaagtcccgctatgccgaccaccacggcgtgcatatcacggatgatgcggtgcgcgccgccgtgacgctgtcacgacgctatctcaccggtcgccagctgccggacaaggcagtggatttactcgacaccgcctccgcccgcctgcgtatgagtttggataccgtgcctcagccgctgacccgcatgaaggcgcagctcaccgcgctggcaatggagaagcaggcgctgctggaagatattgcgctgggcaacagcgcccgcggcgatcggctggcggccattgagcaggaggagatccgccttattctggcgctggatacccttgaaactcagtatggtcaggagctgcagctgacggaagcgctgctcgcctgtcgccgcgatatctcccgccaggcggaaattagcgatctacaaaccgcgcttatcgccgtccagcagggcaatccgctgctcgggctggacgtcgatgtccgcaccgtggcgacggtgattgccgactggaccggcgtgccgctctcctcgctaatgaaagatgagcagacggagctgctgagtctggaagagagtctcggcaaacgggtggttggccaggaggcggccctgagcgctattgcccggcgcctgcgcgccgcgaaaaccggcctgacgccggagaacggtccgcaaggggtgttcctgctggtcgggccgagcggcaccggcaaaacggaaacggcgctcgccctggccgatgcgctgttcggcggcgagaaagcgctgatcaccatcaatctctccgagtaccaggagccgcacaccgtcagccagctgaagggttctccgcccggctacgtcggctacggccagggcgggatcctgaccgaggcggtgcgcaaacgcccctacagcgtggtgctgctcgatgaggtggaaaaggcccatcgcgatgtgatgaacctgttctaccaggtcttcgaccggggggtaatgcgcgacggcgaggggcgtgaaatcgactttcgcaacaccgtgatcctgatgaccgccaacctcggaagcgacctcctgatgcagttgctggatgaacagccggaggccagcgaatcagacctgcacgagctgctgcgcccggtgctgcgcggccacttccagccggcgctgctggcccgcttccagacggtgatttaccgtccgctgccggcgggagcgctgcgcgccattgtcggcatgaagctcgggcaggtaagtcagcgtctggcttgccattacggaatcaccaccaccctcagcgagagcctgttcgacgcgctgaccgaggcctgcctgctgccggataccggcgcccgtaacgtcgacagtctgctcaatcagcagatcctgccggcactgagtcagcagctattgagccatatggcggcggggcagaaaccgcgccaggtgacgctggggtatcacgaagaggaaggcgtcgtgatggcgtttgacgaggggacaatatccgatgagtag

SEQ ID NO: 218108 - DNA, 819 bp, Klebsiella pneumoniae
atgagcaatccacaagacaacactgcatccattctgcagaaaaacaagaaggtactgatcgcgagcctgacaggcagcgccatcgaatggttcgattattttctctatggcaccgccgccgcgctggtgttcaacaaaatcttctttccgatggtcgacccggttatcggcctgatcctctcctggctctccttctcgctgacgttttttatccgccccatcggcggcgtgattttcgcccatatcggcgatcgcatcggccgcaagaagacgctggtgctgaccctgtcgctgatgggcagcgccacggtggcgatcggcctgctgcccacctacgagatggtgggcctctgggcgccggccctgctgattatcctgcgcattattcagggcatgggtatcggcggcgaatggggcggcgcgctgctgctggcctatgaatacgcgccggaaaagcggaaaggctttttcggcagcattccccaggccggggtgaccatcggcatgttgatggcgacatttatcgtctcgctgatgacgctgtttgatgaggcgcagtttctcgcctggggctggcgcataccgttcctgctcagctccgtcctcgtttttctcggcctgtggatccgcaaagatatcgacgaaacgcccgcctttaagcaggtgaaaaaatccggccaggtggcgaaggccccgctgcgcgatacgctcaagcaccactggcgggaagtgctgatcgccgccggcctgaaagtggtggagaccgccccttctatatcttctccacctttgtggtcagctacgccaccaccaccctga

SEQ ID NO: 218109 - DNA, 882 bp, Klebsiella pneumoniae
atgtacggttcggttaaggtctggcaggaaatcatttcattaccaacgtggacgacgggagcggaagatccgaaccctatgtttctggaaaaacgtgtttatcaaggatcttccggcagcgtctatccctacggcgtgattgataccctgaccggcgaacgcgaaatgcgcgattatcaggcagtgtggatggagaatgatttccttcgggtcatgctgctaccggagcttggcggccgtattcaccgggcatatgataaagtcaaacaacgtgatttcgtctattacaatgaggtggttaagccagccctggtagggctgctcgggccctggatctccggcggaatcgaatttaactggccgcaacatcaccggccgacgacctttaagccggtcgatttttctattcagcagggagaaaacggcgcgcagaccgtatggatgggggaagcggagcccatgcgcggtttgcaggttatggccgggtttacgctctatcctgaccgcgcgctgattgaaatcactggcaagatcttcaatggtaacgccacgccgcgccatttcctgtggtgggccaaccctgcagtaaaaggcggcgatgcccaccagagtgtattcccacccgatgtcaccgctgtattcgaccatggtaagcgtgatgtttccgctttcccgattgccaccggtacctactacaaagtggactattctgcgggggttgatatctcccgttataaaaacgtcccggtacccacttcgtatatggcggagaagtcggattacgattttgtcggcgcttatcatcatgacgagcgaggcgggttactgcatgttgccgatcaccatgtctctcctggcaagaaacagtggagctgggggtaa

SEQ ID NO: 218110 - DNA, 681 bp, Klebsiella pneumoniae
atgagcgctaaattttcaccgtcactgatgtgcatggatttaacgcagttcaaagagcagatcacggcaatgaataaaaaagcggatttttaccatgttgatataatggatggcaattacgtccgcaatatcacactgtctcccttttttattgagaatctgaaaaaaattactactgtgcccattgatgttcatctgatggtgaatcatccggaagatatcattcccatgtgtctcgaggccggcgccgatatcatcagctttcatcccgagacggcgaataacaaaatattccgcctgctgaatcagatcaaggatgcgggcaaaaagtgcggggtggtgctgaacccggcgacaccggcagaaagcattgccgaatatgcgcatctgctggataaagtgacggtcatgtcggttgaccctggctatgccggacaaaagtttattcctgagtcgctgaacaagattagaaagctcatcaacatgcgcaagaataatggttatcgctatctgacggaaattgatggctcttgcaatgagaaaaccttcggtcagattgctgaatccggggtagatgtctttatcgtcggcacatcgggtctgttttcgctccatgaggatgtcagccaggcgtgggacagaatgatcgagatcttccaacgggaaactgtcgctgcataa

SEQ ID NO: 218111 - DNA, 456 bp, Klebsiella pneumoniae
gtgcttaatgttaaaaacatcaagttaaatatgaccgccagaaccaaagaagaggtgatagaagaactcaccgatttacttatccaggatggcgccgtcaccaataaggaagactttattcgtgatgtctggttacgcgaggagctaggctctaccggttttgaaaaccatatcgctattccacatggtaaatcttccggtgtttcccgtaccgcattagccatcggacgcacgcaacatgccattccctgggagaccatggatggcagcgacgtccgctgtgttattttatttgcggtttgcctggtggatcaaaatgccacccatattcgcctgttggcacaagtgtctgggtcactggcggatgaagacattattgctaaattacttgttgaatctgatccacataaaatcattgcgcttttcaattcagaaactgaaaacgccgatgcttaa

SEQ ID NO: 218112 - DNA, 312 bp, Klebsiella pneumoniae
atgaatattgtcggcgttaccgcctgcacggtggggattgcacatacctatattgcacaaaagaaaattgaaactgcggctaaaaaagccggacataacgttaaaatcgagacgcaaggaaccatcggcattgagaacccgttaaccgctgatgagattgccgcagcagatattgtcctgcttgctgccgatgtcaaagtaacgggcgaggagagatttgccggcaaaaaagtcgttaaagtcgcgacggaaacggcagtcaaatcccccaataagttgattgaaaaactcagtgaaatagtcaattcataa

SEQ ID NO: 218113 - DNA, 1107 bp, Klebsiella pneumoniae
atgtctctaaaacaaatatggcaagcagcaaaccctaaaggacatctgctgaccgctatctcgtttctgatccccattgtctgtggttctgggtttattatcgccatcggtatggggcttggcggaacggtgcaggacacgttaactccgggacaatttgatgtatggcaggcgatggccaccctgggcgccaaggcgcttgggctgttgccggtggtgattgccgtgggaatatctggctcgattgccggcaaaccaggcatcgcgccaggatttgtcgtcgggctggcggcgaatactataagcgcaggctttatcggtgggatgattggtggctatattgcggggtatattgcgctggcgatcattaaaaacgtcaaggtgcctgactgggcccgcgggttgatgccgacgctgatcgttcccttttttgcctccattatcagctgcctgattatggtctatatcatcggtacgcctatcggtatctttacggaagcgcttacgtctttcctgagaagcatgggcacgtcttcgaatttggtgttaggcgcagtcataggcgcattgtgtatcattgactttggcggcccgctgaataagacatgctttgctttcgtgctgaccctgcaggcgcaggggataaatgaacccattaccgcacttcagttagttaacaccgctacgcctatcggatttggcctggctttcttcattgctaagcttctgcgtaagaacatctataaccgtgaagaagtggaaaccttaaaatcggcggttccgatggggattgtgaatatcgttgagggttctatcccgatcgtcatgaatgatattgtgcgcggtatcgcggcggcggctatcggcggcgcgtgcggcggggcggtcaccatggtctatggtgcggatgcgacggttccttttggtggagtattgatgatccccacgatgtcacatccgatggcaggcatcatggccctgctggtgaatatcgttgttaccgccacggtctatgccgtcatcaaaaaagatatccctcgcgacgtgattgttgataatgattacgaagaagaggatatcgacctggatgatattaaagtgagctaa

SEQ ID NO: 218114 - DNA, 381 bp, Klebsiella pneumoniae
atgcccctgacccgaatttcgcttggcaccgcctggcgtcccgcggagtttgctcaattgtcggcgctctttcatgagtgtctggtggcggagttcgacgttccgtcagcagatagatttcagtttatcgaacgggccgccgatgagcagcgcatttacgacccgcactacctcagcgaaggacgcagcgcccgcttcgtgctgtttcatattttcgccggaaaaccgcgcagccgggcgcagaaacagggactctatcgccggctctgcgcgcggttagacgacgagatggcggtcagcccgcaggacgtgatggtggttatccagtttaaccaactggaggactggagttttagcgcagggaagatggcggatgaatga

SEQ ID NO: 218115 - DNA, 447 bp, Klebsiella pneumoniae
atggccatcgatatccgggaagtacggccccacgacaaagccgaatggcttcagctttggcaaggctacactcgtttttacggtagcccgcagccggaagaggtgaccgaatgcacctggcagcggatgctggatgtaaactcgtctgtattgggtagagtcgcggtggtggatgatgcggtggtcggcttcgctatctgtgttcttcatgagggaacctgggttaccacgccgatctgctatctggaggatctgtttgtcgatcccgccttccgtggacagggtattgccagaaccatgattaagtcgctgcaaagcgaaggggcggacaaaggctggtcgcggctgtactggcatacgcgccgtgataatcccgcccgtcatctgtatgatgagtttaccccggctgacgattacgtacgctacaggatcacgcttgagtcctga

SEQ ID NO: 218116 - DNA, 534 bp, Klebsiella pneumoniae
atgaattggaaactagctatcgcttttacgtttgtattatcccaatcagcttttgcaagttctgaagccttccaaaaggtatggaatgatagttccggtaaacatgttttaattatagataaaaaacttgatagcaaagacggtggaatgaccttacttgtcaaacaagtcacagggtatagtaacgattggaccctcaaggattttgtccgaaactgcggcgaagatataaaattagatattgctcctgattctgtcgaggtgaataaaatattttctgacggtgtaggaaccgttttatttgcctacaaaatagggtgtgttggtgggattgaccctgtaattgtaaaatattttgcttttaaaaatggtgtaaaatattcattaaggggagaagagcatattattgtcggtagtgagggcttcggtggggagaaggctccagtacctgatttcaatgtcaggaatgacaaatctcttctgaagtacatgatgggaaaatgggattctatttccacaacaaaaataaattaa

SEQ ID NO: 218117 - DNA, 2010 bp, Klebsiella pneumoniae
atgtatatggtattcaggcgactactggtctgcctgctttggctatggctgcccgtcagccaggccgccgacagcggctcgctgcgcgccgccgacaatcaacacgccagcgtccgcctgcgggcgcaaaccgagagcaatggcgacactcgcctgcttttagacgtagcgctggaaaagggctggaaaacctactggcgctcgccaggggaaggcggcatcgcgccggctatcgcctggcacacgccgctggaggtgagctggcgctggccgacgccgcagcgcttcgacgtcgcgggcatttccactcagggctatcacggcgacgtcagctttccgatgacgctgcgcgggaagataccgccgacgcttagcggcgtcctgacgctctctacctgcagcaatgtctgtattctcactgactatcccttttcgctggatatgacgactccggcgggggagagatttaattatgattttacccgcgcgatgggcacactgccgctgcgcgatggcctgacttcgcaactgaccgccagctacgtcagcggcaaactgacggtgaccgcccgccgcgatgccggctggcagcagccagcgctgtttatcgacagcatggaggatgtcgatttcggcaaaccgagctttaccacccgcggcgctacgttgaccgccaccgtaccagtcaccgacagctggggcgaagcggcgcctgacctgagcggcaaaacgctgtcgctggtgctggccgatagcggtcaggcgcaggaaagccaaatcgccgtcgccgccggcagcgccgcgccggggctggcgttaggctgggtgctgctgatggcgctggccggcgggcttattctcaacgtcatgccctgcgtgctgccggtgctggccatgaagctcggctcgctggtgcaaaccgaaggtcgcgaacgcggcgcggtgcggcggcagttcctcgcctcggtgtgcgggatcgtcgtctcgttcctggcgctggcgctgatgatgaccgcgctacgcctggggaatcaggcgctcggctggggcatccagttccagaacccgtggtttatcggcgcgatggcgctggtgatggtgctgttcagcgccagtttattggggctgttcgaaatccgcctctcctccagcgccagcactttcctcgccaccaggggcggcaacggcttaatgggccatttctggcagggcgccttcgccaccctgctggcgacgccctgtaccgcgccattcctcggtaccgccgtgtcggtggcgctggtggcgcccctgccgctgctgtggggcattttcttcgccatggggatcggcatgagcctgccgtggctgctgatcgttgcctggccgggtctggcgcaacgactgccacgtcccggccgctggatgaatcatctgcgcgtggtgctggggctaatgatgcttggttcagcgctatggctggtcagcctgctgacgatccacatcggccgtacgccggtgcttaccctgctggtgattctggccatcgccctgctagtggccaccgcctggcgctaccgctggcggacggcgctgcgcgcgggcgctctggccatcgtggtggcgggcgccgtcgcctttgttgcccaacaggacggccagggcccgcgccgcgaccgggttaactggcagccgctcagcgagcaggctatcgccagcgccctggcggagcataagcgggtatttattgatgtcaccgccgactggtgcgtgacctgtaaagccaataaatacaacgtgctgctgcgcgacgacgtccagcaggcgctgttagcgccagacgtagtcgccctgcgcggcgactggagccgcccctccgctgtcattagccagtttttaaccgctcgcggcagcgccgcggtgccgtttaaccagatttacggaccggaattgccgcagggacagattctgcctgcgctgttagaccgcgaacaccttctcgccaccctgtccgccgctaaaggaaaataa

SEQ ID NO: 218118 - DNA, 582 bp, Klebsiella pneumoniae
atgaaaaaacaacctcgctttataaccatcctcataggagcgctgctttctggcgtagccttgcaggctaccgcggccaacactatcaatcctgactcgggcaccagttcggaaggcgccggcgggcaggtcatcttcaatgggtcaatcaccgacagctcttgcaacgtcgatagtagttctaatggccagaaggttgatctgggcaaatgggccagcaactattttaccggcactggttttgaaaccaccaaaacccccttccatatcaaagtgaaagattgcccggccagcgtgactacggtcgccgtgctgtttgacggcgcgcgcgatcagtctgataactccctgctggccatcaacggcggcgccagcggcgtagcgattaagctgtatgagcacgatcggtcgacggctgtcagcctcggtaaaacgtcagccaaacagacggtcactccgggtaccagcggcggcaccggctctgccgacctcgagttttacgccgactatatctccaccgcggcgaccgtgacggcaggtaaagccgacggtacagctaatttcaatatgatttataactga

SEQ ID NO: 218119 - DNA, 663 bp, Klebsiella pneumoniae
atgatgaagaaaataattgccgttgcggcttttctgctgtgtaccacggcagcgcaggccggtattgtcatgggtggaacccgtgtgatttatcaggaagggaagcgtgaagccgctatttcagtcaccaatgccgatacccatacgccctatctggtgcagtcgtgggtggaaaattacgcggaaaacgataaggccagggtgcccttcattgtaacgccgcccttgttccgtctcgatccggagcaaaataacgttctgcggattaactttattggcgcctcgctgccccgcgaccgtgaatcggtcttctggctgaacgtcaaaagtatcgccccgacgcctcagggcgaggtgaataagctgcaggtgaatattaaatcgaaattcaaaatcttctatcgccccaacgacctggcgggcgacccggcaaaggcctggcagcagctgaagtttagccagtccggcggtcggctgacggtgataaatcccactccctacttcgtctctttttacgccgtcgaagtgggcgggcaaagcatcgacgatcccggcatggtggctcccttcggcgagaaaacgtggccggtgagcgggcacggcaccgtcaaatggcgggcgattaacgactacggcggcgtcagcgatttcgcccagcagtaa

SEQ ID NO: 218120 - DNA, 1095 bp, Klebsiella pneumoniae
atgaaatctgtttttcgtctacttcctttcttctttctgctggggctgagcgcctatcttcccggcgtgcgggctgaaacctgccgcgcaaatatcggccagaccacggtcaatattcctaatatcaagtatttacccacgctgccggtcaatacccagatgaccagcgcgatggcggataacggcagcgggatccctttttcctgcgacctgcagctgccgacggcgagcgccaaacgcatcgtctataagcagctgaaaaccggcggctcgccgatggtgattaacggacagcatgtctaccccagcgctatcgacggcattggttacgccctcagcttccagtgcgccggcggcccgatgcgtgccatcgatggcagccactccgccggcggcgagtcggtggtggtatgcgacagtgcgacgctcccggcgctgatgacgcagcagcaaaccacggtgaggattgcggtaaccttctataaaaccggaacggtgcaactggcggacgggacgcataccaactcgccgccgctgccgcaggtgggggagatgaccattgaacagcagaccagcgcaagcgccagctttgtcgccagcgcgccggtcagcatcgatatcgccgccctgaatgtggacattggcagcagcggcagctgccaggtagcgacatcgacgatccaggtcagtctgggtacggttaaccggggggagtttcatggcaaagggactaccggcggccaggcgaagcgcttttcgattccggtcttctgtccgacgccgactgacgtgcgcatcggctttttcggcgtcagcgtggagagcgataccctggccctgagccaggccagcaacagcgccagcggcgtcggcgtgaagctgacctacggcaataaccccggtgcggcagtgcccgacggcaccagcgttaagatcaatgaggccagcaacttgccgatcctgaaaagggtgaccggcgccagcgccggtaccgccgaggcgatcaatttcaacgcccagtatgtgcagactgacgccacggtgggagccggtacggccaacagcatggtgactttcgccctggagtataactag

SEQ ID NO: 218121 - DNA, 885 bp, Klebsiella pneumoniae
gtggatcgtattcaggctatgcagatgtttatgcgcgtcgcggaggcaggaagcttcgtgcgtgccgcggaaaccctttccctgccggcctccactgtcaccagtaccattaaaaaccttgagaaatacctgaaggtgcggctgctgaaccggaccacaaggcgggtgagccttaccccggaagggatgcagtatctggcgcagtgccgggaaattctcgccctcatcgaacatagtgaatccaccctgagcgagtctgtcgcgcggcctcaggggcgcctgcgggttgatatgcccgcgggcatcgcgcatttcatcgtcatgccgcatctaccggacttttaccggcgctatcccgatatctacctgatgatcggcgtcagcgatcgccaggtcgatctcattcaggaaggcgtcgactgcgtgatacgaacgggagagctgaacaactccagcctggtggcccgccctctgggccgctttcgctgggtcacctgcgcgtcaccggactatctcagggaatatggtgtgccgccgtcaccggaggcgctctctcagcaccgggctgtgcattatttctctggtcaggcgaggcgggccgatgagttccgcttcgttcgccatggcgagaccttttctgtacccgtcagcggcaacgccgcggtgaatgaaacggggctctatataaaaatgtgcctggcaggatttgggctggcgcagctggcggagaatatcgttgctgaccacctgcaggaggggagactggtggaagtgctgacggactggcagccgcccccggtacctgtcacattgctctatccgcaccagcgctttctctctcccgccgtgcgggcgtttgctgagtggatgagcgaggtggtttga

SEQ ID NO: 218122 - DNA, 195 bp, Klebsiella pneumoniae
atggtaaaatttgctagtttttatgagtctcctccaaatcattttactatcaatcttgatctgatcaaatctttaagtgagctggatacagaattagatggtatttattttgaaaaagatgaaccttcaaattgtgaattcttcataagcaaacctgataaaactttaaatttgttagagtataaagttgtgtga

SEQ ID NO: 218123 - DNA, 1821 bp, Klebsiella pneumoniae
atgaaaaataaaaacatatatgttaaaattccttttcattatggagttcataaattcaaaatatttaaaggccatagatggggagctttggatcattttttacttcaagagattagccttcaaccctatcctatagaagagctatcattaaaatctaatcttccacaacggctcataattgaaataatattgccatttatgaaattgggttgggttgaattagttgaattgaattctaaatacaacttcaggattaccagcaaaggaaggagtgttgctaatcgtgaggaactcccttatgaaagagagccactggaatctactcggaagtttttaatagatccaatcacagcaaaatgttatcgagtaaatgcaagaaatcaaaactatcagatatatcctacatcaagagcaaatgaattacttaagaataaacactcgatatcaacagaactcaaaattaaaaatcccaaacattcaccgttcacatcagacattctaaattgtgttgaagatactgacgaagaggttatagggtatgaggaaagagctaatgatagaccttattatcaaaatagaacttttgctatagcacaagttgatgaagcagataacataacgggtgttccatctgatatctcaaaagaattagccgcagatattatcgctgcagctaatatgaaacgaagtgaaataaatactaatatagactctcttagccagaactcaaaaataagcacttataataccgagtcttttgaaaatagatttgaagaacattatattaatgaaactgaattccgaataatatcaggttcagaaagccatcgagatcatcttatcgcgatgatcgataaatctgttagtagaataattatccattcaacttttatacacttaaaaaactttgaatcaatctttcagaaattaactgatgctgctaaacgcggagttcaagttgatatcttatggggccaagaagaacccgatgatgagagaagtatcggaagttataaccaatttcttgagggccttaagtcttatagagaagaaattataaagcttggtttaacttcactttttacaatacattcagatccgacaggttctcatgcaaaggttatagtatgcgataccatggagttcgggtattgttcaactattggttcatgtaactggttagcaagtggatttaatagatatgaatgctctgttttcgtaacaaatgataccttaacgactgaagtattagatattttgagcatcatttctaaaggaaaatccagagtatcaaacaacttaagcaaatctatttcagccatttcatacgaattgaaaaaagcttgtgagcatttttcatcagaagcttcctcgaacaaaaatgtaagaattaaaatcatcacaaaaaatgagcatcatgattttgttttagatgcaagagacaaagcaacaaaatcaatatttattgcgagccatagaattagtaataatgcagaaagacctattttaactcccttgataacatcaatgacagccaatagcagtcttaatattaacatgtattactcatctcttagtggaggtatcaatacacagcaacttgatgacatgagtaactctttaagaaaaaatggaattactttagagaagaagaaagatcctatttctcacgcaaaaatattatcatgggacaatgacaacattttgatcacgagtctcaattggctatcagcctcagcttacggaaacccatatgatgagcttgggatctttattgagcaaaaggatatttttaatatcataaatagtaactttaattaa

SEQ ID NO: 218124 - DNA, 3648 bp, Klebsiella pneumoniae
atgagtgaaaataaactgtttgataattatgagattatagaaagaaatctactaaaaacagaatcaaataaaaatattcctgaagtaattcttacccttaaagatggagagagttacattatcaaacattggccaagaaatacctcaagtgatgaacaagttcttgaaagtatttggcaacatgaattacgacaactacaaaggttaaagggatatcctggagtaggagattatatagtaaatcctgttgaatcaaaaaaaacaaatgaagggtactatcttgttttaaattctgatggaagagtacctacttcttacttattgaataaaagaacattatctctcccaagaaaaagccactggctcacccgtttaaaagatccagcagttagaatcagattctggaaaaatatctgtagaattacaaatgctattggtttgcttcatgcgcaagggttgttacatcgacatttagatgaaaattcaattctaacatatgattatgaatcagatgattataacgattttcaattgaccggcttcgagtggtcaatccgaatgcctacacttaccagagctaaaattgagcctgttggtgaacacggtaaaatatcaacttttgctacagattggatcgatttaggaattttaatagcaaactttttaaaaatagatataaatgaaattaaatctctgcagttcccagcagaatacttcatttctaagtacgatctgacaattagtgaagtagctataattcgtagtctattaggaatccaacctattcagcaaaatgctataaaagaacttcttggtgaaaaagatattctacagtttttagatggtataattgatgagcttactgaattctataaaaaaacgaaaactattcatgggttagcaataaacactaagtatgaacaatctgataataccaaagataaaaaagagctatttcactgcatacaaaaaataatctttgagaaaagtgaattcacaatatccagagatgactctgatataataaagagtttcgtaagcgaagatttatcagattcaccagtattatttgttaatacctcagaacacaatcgatatgatgtagtattgaaagggaaagaacttttttatgtactaacaccatttcaacctgaccatcgaacgagtgacaaaacatgggatttaggttattcacaatatgcatatttagagttgccaaatagattctttggtaaagataattacattgaactaaatagtaataatatatcatgttatactcattacgaagccaggaaatttttgaatagtaatgataactcattaagcctactgtcttgggaaatgattttcaaagatataggtaaaactaaaaacaaaagaaatgaagaacatcttcgattattggagggcctaactgccgttcatattacaaatatcgcatatgcaaaagcagaaattttccctgtagaaaacatcagtgaagaaagcgaaccagataatattagctcatggatctttaaattcattcccaaatttgacgaaacaacggaggaactgtctaagtcgctaagtattgactcaccatctgtcaggcttgaaaaaattataaatagtagtgaaaacaacgataaggtatcttggagtttagtagacaataatgatttcagtagagttgacgaagagattcttttagagttttatggctatgaaacagatcaagacaatcaagaaatatatagcttcatctctaaaaaacctcttccagaatggaggaatttttatattgttcccgactcgattgaaggaactctgcgccaaataacaagacatgcaaatacattggatatgcttgaaaatcatatcgaattgatgaatgtaattacttcccctaattcaaatctcacagtaagcaatgaagatataaatgcaaaagatataatggactcattggatgaatctaaacaaagagtttttacaaaagtattatcaacattgccaatgaaccttgtacaaggtccaccgggagtaggtaaaactcacttagtcaaagcaatttctaaatttatctttaaagaagaacctaatagcaggatactctttactgcacaaagtcatgcaaccgttcaacatctatatcacgaagttgtcaaagatttacttactgaaaacaaacatacaaatgatcccataattattagatgcaacaaaatatctggcgaagataatataatattaaacagtgccgatgaaactggattagaatatttgcggaagttcgtagaaagccctttatacaaaaactcttccaatcaaagtttaaaaagtaatatttccagtttgcttaaagctcctccagtaaagagatacccactaattaatcaactaattaaatcagcaagcttaatatttgctacaactaattcagattatgtagagagaatgataaaagaaagagcacaatttgattggtcgatcatggaagaaagtggaaaggttacaggtatagaattaataagcccacttttattatcctaccgacgattaatgatcggtgatcacaatcaattgccaccgtatcgttcaattgagttaagaaacattttaaccaataatacaaaacttaaaaacacctttgaagaagttgacagcataagtaattttaaattaaaaaatgaactaatgcgtaatagtcacttttcatcaataaccgatgatcaagcaagagaaataggattacgggcagccaaatatgtaaatctatttgaatctcttattattgatgatgaaagacaagacgtaatgtatgaaaaaataaagggaaaagattataaaagaaacaataaattatcctcaatgctgtcagtccagcaccgtatgcatcctcatattgcagaagtgatttcaaatgttttttataacaacaaattagttaccgataaagataaagaaaggaagtatcttacagaagattttcaatcagtacttaacttaaaagaggaatctcacctcacaaatacaccagcactggtatggattagtcaaccagatgtacaaaaaactaaaggtaacagagcaggagagcatacaccaatctggtcaaacgaaagtgaatgtaaggcaatcatagatattctcaaagatttggacaagaactccaacccaacaaaaaaaataaagttggcaattctttctccatactcaaatcaagttaaattaatttcaaagcatattgaaattgaaaagaagaaaaatcaattcaaaacacttttaaataattacattccaccagatgataatgatggttattgccttactgttgattcgttccaaggtggcgaagctgatattgtcttaatttcattagtacgaaacaatggtaaaagcacaattaagagtgcattaggatttttatcagatcaacgccgtataaatgttttacttagtagagcaaagtacaaattgatcatagtcggttcatatgaactccttaaggcttggtctaatcgtatatccagagagaactcaaaagaatatgattttattccaagactaactgataaactggatttgtctttaaatgagagaaagctttcattaattacatcaaactttataacaaacaaaggaaataaaaatgaaaaataa

SEQ ID NO: 218125 - DNA, 909 bp, Klebsiella pneumoniae
atggcgagaacacttgtaaacgtcagcgctacaatttttgctctcatgttgattgtcagagcactatttacttatatctaccctggaaaactcccctttaacctggccatcattgattggctggtcgtcattgctggatctggcgctgctatttcttctatcttctgcttcatcaaaaagcgctacccagacactgcagaatttcttccaatgttcagtactgtttgttatgtgatagtcctgatcgggtatgcaatcctgagatacactccggcttatcaaacatctctttcgattatggttacaggtatgctcgttgggatggggtggtggatccagtgcataacgtcagcagcgaatacgcgcaggtcacatacccttaacatgatcattaacacacgcaccagtcccgaataccaaaaacagttacggaacagcacaaaattttatcggggtatgcgttatgtgccgcaagaactctctgagtggcgctgcaacccggataaagaagaatacaagaacatgaaggtacccgacgagtatagagatgccattaacggccttctgtacattcttaattatttcgagtttcttgcgcagggaatcaagttcaaggatttggatgacgagttgctgaaggagtgtttttccagcttcttacgcggaatagaacgccgcggattccacatgattttagaatctcagaaacaggatccagcggcctttgaaggaattatttatctttcaaaaaaatggaacggaacctcgtttgttgaaacccaccgttcaaacccaaacacagtagaactcggggttccatatccttcaaacgaaactgtcgaaaaaatggttcaaggtcagccgttaattgatagcgacacgggtccagagcttcaagtggccacttaa

SEQ ID NO: 218126 - DNA, 1047 bp, Klebsiella pneumoniae
atggaagccaatgcgcgcggcattaaatatgccgagcgcctgttgggggagatacagaaccagatcaatagcggcgtgttcaattattcaaaatatttccccaactccaaaaagctggagctgttcggggtggtgaagaaaaccaaaaacataaagtcttacctggacgagtacctgaaaatctgccagaaccgcaacctgtctccgtcgactatcaacggttatgaaaaatgcctgtcggcgctgtcagctctgcataaactccacgtgtcagaattgacgccagcggttctaaaaaactggatagccagccggaaaacaaagctgaaaacgacccggaataacctttcgtttctgcgcagcgccatagatgaagcggtgacagacggcctgctgaccattaacccggtaagcctcgtcagcgccagccggtaccacgtgatcgacaacagcccgagcgccgacgattacgaggttgacccgttcacgccagcggaaaccctcgctatttatcagagctgcaggtactcggaatgggaaaacctgttccgctttgccttcaataccggtttgcggagctccgaactatgcgcgctgcgctggcccgatctcgacaccataacgaacacagcccacgtacaagcggccagtgttgttggagtacttaaaggcaccaagacaaaagccggtacccgtaaggtggaactgaacagtgaggcgctggcagccctgcaggcgcagaaacaatacacatttatgaaaagtgagttcatcttcagcgatccgaaaacgggagaaccctgggcaaacgccgacgcgatccgtaaaaaagcatgggtgccgaccctgaaaaaagctggcgtgcgctaccgtaacccgtaccagacccgacacacgttcgccaccaagcatattagccagggcgttaacctcttctggcttgctgggcagatgggccacaaagggccggaaatgttgttccgcaattatggtacataccttgcagtatatgatggaaagacgtctataaaggtagtgtcaacctga

SEQ ID NO: 218127 - DNA, 213 bp, Klebsiella pneumoniae
atgatttatctggatgtcgtaccgattacaaagtactgcgaagagatgggtgagacgctggatgccgttaacaaacggttacaacgtggagtgtggcaggaaggtgttcatgttttaaaagtcgatgggtcaaaagaacgttggatcgacttaaaggagattgcaaattgggcaagacaaaacaaggatcactatctctcccgagaggggtaa

SEQ ID NO: 218128 - DNA, 579 bp, Klebsiella pneumoniae
atgcttcacaacatgcttaacccagaaccaacctcaacagggatccggtctggaaaccgggtgattggttactccgctgccattcgcctgctggataacggtcgttatgacaaacaccttgccgaaggaatggaaattctggcctgcatcatggaagcggtagaaagcaactggattacgctcaatatcgaaaaagagatgatcctctggcgctggctgctggctgccgtgttcatcaccgaggagctggagaaaaacggcactgtcgacattccgaatgatgctggaggtgttgatactgctgttatctattccagcgaacatggtgccattagcgtctacccgggacctgaacgctttgcactcgccaaccatattgagctgggggctatcgagaaatatgggccagagattggccagcagctggcgctgcggatgtatcaggacatggttgttgcagatgaagaatttgggttcaggttatcagcgcttggccgggaggggcttaacctcctcaatgacggctttatcgaacacatcaagaccgaaggtgtgccagaagcaccgattatgcattga

SEQ ID NO: 218129 - DNA, 366 bp, Klebsiella pneumoniae
atgagtaacttaattactacctatcgccgtcgaattttaaaagcagccttgttacgccaccagcgaaagactgggagtagcctacttgtcattaagcttaacaagggtgggattagtactatcgaattaactgagattcttcttgatggattgttgcggaaattcgagcgactggcgctcggtgagtacggaaatgtggaaggtgtgaaagctctcaagggaatttacagcaactctgttgatgttaatggcagcggcgaattcctcacagaaagcgggaaagagttaatcgacgagcttatttctgaactggtggagttcgtcaaaaagcataaaccagttactgcggagtccggcaatgaataa

SEQ ID NO: 218130 - DNA, 195 bp, Klebsiella pneumoniae
atggcgcatgaaatttcgttagagcaggcggcagagaaagctcatcaggcagagataatctgccgcatgatggaggtataccctaataaaatggattgcaccgaaattgaggcattatcttcgctgctcagggttcttactggtgatgcatgcgcctggcttatcgaagaacaagcagtaaaaaataacaagtaa

SEQ ID NO: 218131 - DNA, 309 bp, Klebsiella pneumoniae
atggcaactaaaaacttcattcaattagtagatattccagactaccgttttgataagcgtgcgactgatatcgattatgatggtatcgcgtgcgactgcgactctaaaacaatttcaatattaaatgccataagccatatcagccttaatgttttctcccttgtggaagagagcctggttgataaagaaaaaatagctgacctttcctgtattattgctgaccttgcagaactggcaattgctacaaataaaatctctcaatctgcatcatacctttctggcttaaaaggtgacaataatggcgcatga

SEQ ID NO: 218132 - DNA, 708 bp, Klebsiella pneumoniae
atgtcgaaaacaacgtttgctgaaagattggttgaatcaatgaaggcagcaggctttacccaagcctcccttgctgccgctgtaggaatgtcgcaatccagtatctggaaactaacttctggcgcggcttctggctcgcggaaaactgtagagttagctaaagcactacatgtcaggcctgaatggctcgcctcaggtgagctgcccatgaatgataatgaatccaatgatctcccaaccgtctacaggcaacaaagacctgttgatcctgggatttacagagtcgatttgcttgatgttcaagtgagtgctggccccggagtatacctatcttctgagttcatcgagacagtgcaagcaattgaattcacagaagaatatgcaagaagcatgtttggaagtcgtccagcatcatctatcaaggtgatcaccgtgcgtggtgatagcatggaaggtacgattgatccaggtgattacatcttcgtggatacatcagttaatcactttgaaggtgacggtatttatgttttcgtgtttggcaaaacgattcatatcaaacgcctccaaatgcagaagaatagccttgtcgttctgtcagataacaagctctacagcccttgggaaatagacgcatgtgatgaagatcagtttcacgttttagctaaagtactggtcaaacagtcggcagcctttaaacgattcgcataa

SEQ ID NO: 218133 - DNA, 816 bp, Klebsiella pneumoniae
atgaaactggaatcagtactcaagcactttagccctcagggcatgcatatcagcgacgacgtgaaaagcacatcgccgaatcgccttaacggtacagacattatgaccgggatcggggtgaccagcagcagggcacgcttcggcctggccgctttcttcggcaagaccggaatcagtaagaccgatgagcagctggcggtgcaggcgctggcgcgacatgcccttgatacagcaccaaagaacgtgcgaaaggctgcgggtaaagcgctggggcgctgctgcctgattctggcgcaatttgcctttgcagagtattcccgttcagctgaaacaacgggggcctgcggggtatgcaatggcaccggcaagatcgaaagcactaccactgaacgcaaagtttctaacccgtggggcaaagcaccatattgggctagcaggtcccgttctgttcgtccgtccgactgggataagtggactgaagtaaaaatcaacgtcagtgctaaatgtgaaatctgtgacggcaaggggacgatcagcgctcgctgtcgctgcggcggttcaggtcaggttctggatcgaaaagagaccaaagagcatggggcaccagtttacaaggcgtgcgagcgttgttcggggaatggattctcaacggtgccatccacagcagcttacaaagcgattctgaccctcattcctgatctgcatgtcagaacgtggacccgtaactggaaacctttctgcgatgcgctggtggacatctgccgggagggggaggcacaggctgataaggagtttcagcgcgcgacagcgtattaa

SEQ ID NO: 218134 - DNA, 246 bp, Klebsiella pneumoniae
atggaaaataaaccatcagatccgaatcaaaaggcaaagatagtagcagaagcaatggttaaacatatggctccggtggctccccctgtggcccaggtaaaggagattattgccagggttcgacgtggcggtgaagaaagcatgctggaattggatgtaatgaaaatgctgacatcatatcttttggaagcgacaaaacttcgggattccatgccagaagaggtaaaaaaagcacttggtaagtaa

SEQ ID NO: 218135 - DNA, 204 bp, Klebsiella pneumoniae
atggcccggcgcagcgcgaactttatcggccgcttatcggcgcaggggccgctgctgtttaccggcggcgtcagccactgcgccgcctttgcccggatgctggaaagccatgtcggcatggcggtgacaacccatcccgacgcccagtttgccggggcgatcggcgcggcgctgatcggccagcgccagcggaggcgcggatga

SEQ ID NO: 218136 - DNA, 1068 bp, Klebsiella pneumoniae
atgatgacgcctgaacaaaaatttgcccgctgggtacgggtgagtattgccgcttttctgggaatattcgcctggtttatcgttgccgatatctggatcccgctgacgccggactccaccgtcatgcgcgtggtgaccccggtttcgtcgcgggtctccggctatgtctcgcacgtctacgtgcacaacaacagccaggtgaaaaagggcgacctgctgtatgagctcgacccaacgccattcattaataaagttgaagcggcgcagatcgccctcgagcaggcgaaactgagcaaccagcagctggacgcgcaaatcgccgccgcccgcgccaacctgcgcaccgcgcagtacaccgcgcgtaacgataaggtcaccctcgatcgctaccagcgcttgagtacgatgcagaacgtctcgcagtccgacctcgataaggtgcgaaccacctggcagaccagcgagcagtcggtctcggcgctgaacgcgcagatccagaacctgctgatccagcgcggcgagcgcgacgataagcgcaacgtcaccctgcaaaaataccgcaatgcgctggaggaggcgcagctgaacctggcctggaccaaagtgcgtgcggaaactgacggcatggtcagcaacctgcagctgaacccggggatctacgccaccgcggcgacggctgtgctggcattggttaacaacaacactgacatcgtcgccgacttccgcgaaaaaagcctgcgccacaccgcggtgaataccgatgcggcggtggtctttgacgccctgccgggtcaagtcttcccggcgcacgtgaccagcagcgacgccgggattctggcgggacaggaggcggtgaacggtcagctgtcgcagccggagcagtccacccgctgggtgcgcgacgcccagcggatgcgcattcacgtcgcgctggatcagccgctggacaaaccgctgccgaccggcgcccgcgctacggtgcagctgtacaatagcgagggacctttcgcccgcaccttcgccggcctgcagatccacctggtgagctggttgcactatgtctattaa

SEQ ID NO: 218137 - DNA, 762 bp, Klebsiella pneumoniae
atggctgagccaacggcgggattttcgttgaacgtgctgacaattaacacccataaaggctttacggcgtttaatcggcgttttattttgcccgaactgcgcgacgccgtgcgcagcgttagcgcggatattgtttgcctgcaggaggtgatgggcgctcatgaggtacatccgctgcacatcgaaaactggccggatacgacccattatgaatttctcgccgacaccatgtggagcgactacgcctacgggcgcaatgcggtttatccggaaggccaccacggcaacgccgtgctgtcgcgctttcccattgaatactacgaaaatcgcgatatctcggtcggcaacggggagaagcgcggcctgctgtactgccgcatcgtgccgccgcggagcgggataactattcacgtgatttgcgtccatctcggtctacgcgccgaccaacggcaggcgcagttgaccatgctggcggagtgggtcaataccctgcccgcgggcgagccggtggtggtggctggcgattttaacgactggcgtcagcaggctaaccagccgttaaaagcccaggccggtctggaagagatctttacccgcgcccgcggacggccggcgcgcacctttccggtcagttttccgctgctgcgcctcgaccgcatttacgtcaagaacgcccacgccagtcgcccgaaggcgctggcccttaaacaatggcggcatctgtccgatcatgcaccccttagcgtggagatacatttgtga

SEQ ID NO: 218138 - DNA, 759 bp, Klebsiella pneumoniae
atgcaaaccatctatgagatgaccagcgaactggcaaagcgtctgggcgtcgaagagcagtttaccgaaggccgtacccaggaaggctggatgcgctatctgtatgagcagtcgcgcaaagcgattcccgacctgccggatttcgacaccttccgtcagcagggcatctataagcagcgcgatccgcaaggtcatcatgtggcctacaaagccttccgtgaggatccgcaggctaatccgctgaccacgccttcgggcaagatcgaaatttactcgcaggatctggcgaaaatcgcggccacctgggagctgccggaaggggatgttatcgatccgctgccgatctacaccccgggtttcgaaaactacaacgatccgctgacagcgaaatacccgctacagctcaccggcttccactataaatctcgcgtccactcgacctacggcaacgtcgatgtgctgaaggccgcctgtcggcaggagatgtggattaacccgatcgatgcccgcaagcgcggcattgccaacggcgatcgtattcgcatcttcaacgatcggggtgaagtgcatatcgaagcgaaggtgacgccgcgcatgatgccgggcgtcgtcgcgctgggggaaggggcctggtacaacccggacgcctcgcgtgtggatcaggcgggcagcatcaacgtgctgaccacccagcgtccgtcgccgctggcgaagggaaacccgtcgcataccaacctcgttcaggttgagaagctgtaa

SEQ ID NO: 218139 - DNA, 1422 bp, Klebsiella pneumoniae
atggaaaccaatatcgtagaagttgagaattttgttcagcaaacggaagagagacgggttagcgcgttcgcgaaagaagtgaagcgctacctcgaaacctaccctgatacccagtatgtcgatgtcctcctcactgacctgaacggctgcttccgcggcaagcgcatcccggttgccggcctgagcaaactggagaaaggctgttatttcccggcctcggtgtttgcgatggatattctcggcaatgtggtggaagaggccggtctgggccaggagatgggcgagccggatcgcagctgcatcccggtacccggcaccttaaccccttcggcggctgacccacaatcgatagcccaggtacagctaaccatggttgatgaagatggcgctccctttgacgttgagccgcggaacgtactcaaccgcctctggcagcagttgcgccagcgcgggctgttccccgtggtagcggtagagctggagttctatttactggaccgcaaacgcgatgccgaaggctacctgcagccgccgtgtgcgccgggcaccgacgatcgcaacacccaaagccaggtctattcggtcgataaccttaaccacttcgccgacgtgctcaacgacatcgacgagctggccaaactgcagctgatccccgccgatggcgcggtggcggaagcctcgccgggccagtttgaaatcaaccttcaccataccgataacgtgctggacgcctgcgatgatgcgctggcgttaaaacgtctcgtgcgtttgatggcggagaagcataagatgcacgccacttttatggcgaagccttatgaagagcatgccggcagtgggatgcatatccacatcagcatgctgaacaataaaggggaaaacgtgctggtggacggcgatggggaagactctgcgctgctcaaacgcgcgctggccgggatgatcgatctgatgccggcctcgatggcgctgctggcgccgaacgtgaactcgtatcgccgcttccagccggggatgtacgtcccgacgcaggcttcgtgggggcataacaaccgcaccgtcgcgctgcgtattccgtgcggcgagcggcagaaccaccgcgtggagtatcgcgtcgcgggggcggacgccaacccgtatctggtgatggcggcgattttcgccggcattctgcacgggctggataacccccagctgcctttacaggaagaggtggaaggtaacggtctggaacaagagggcctgccgttcccgatccgccagagcgatgcgctgtgggagtttatgcagaacgatcacttgcgtgagcgcctcggcgagcgtttctgccatgttttccatgcctgtaagcatgatgaattactgcagtttgagcgtcttatcacagaaaccgaaattgagtggatgttgaaaaacgcctga

SEQ ID NO: 218140 - DNA, 789 bp, Klebsiella pneumoniae
atgacccaaccatcgcacacagcttttatcaccggcgcgtcctcaggtatcggcgcgatctatgccgaacgactcgccgcccgcggctacaacctgatcctcgccgcccgtcgtgaagaccgtctgcaggcgctcgccgaccagctgcaggcgcgctacgccatccaggcaagcatcctcaaagccgatcttagcgaagagcacgggattgccgccgtagagcagcgtctgcagcaggatcccgccatcgacctgttcattaacaacgccggcaccgcgaaattggcgggttttctcgccagtacgccacgcgagcaccaggcgattcatacgctcaacaccaccgcgctgctgcgtctgagctatgccgcgctggccgctttcaccccacgacgccgggggacgctgatcaatattgcctctatcctcgcgctgcatacgctgccgggcagcgcagtctacagcgccagcaaagcctgggtgttgagcttcacccgcggcctgcaggaggagtttgccgacagcggcgtgcgtattcaggcggtattgccggcggcgaccgctaccgatctgtggccgacctccggcgtggcgctggacgctctgcccagcggcacggtaatgaccaccgaggatctggttgacgccgctctcagggggctggagatgggggaacaggtcaccttaccaccggttcatgacctgggactgtgggagacttttgagcagtccagagtggcgctgtttaccagcgcgcgaaccggacagcctgcgccgcggtatcgataa

SEQ ID NO: 218141 - DNA, 1008 bp, Klebsiella pneumoniae
atgaccgttaagctgctcgatggtggacgctataaagtggatattagaccgcgtggagcgacaggacgtcgtatacagcggatttttaaaaagaaagctgatgctgttgcttttgaaaaatatgtcatcagcaatatgcatgacaaagactggctggataaaccaaccgatcacaggcggctaagtgagctgcttgatagatggtgggagctgcacggccgaagccataagtacggtgagaagcgccagcgcgaacttaagcgggtaattagtgatatgggcaaccctcgcctttcaaaaatcaataaggggtttattgctgagtacagaagccagcgcctttatgaaggggttaaggcttccactgttaaccgcgacttgagtacgttacgaggcctattccgtgtattgactgaagcggaagatctccacgcagagaacccactaaaagggatcacagatctcaagcaggaaaggcccgaaatgtcctatctgagtactgaagagattgaaaggctgctttcagctttaagtggtgacgcccggcgcctcactgttctgtgtttaagcaccggcggccgctggggggaatcgctgcttatgctggctcagaacatgatgcatggaaaagtgacgtttaccaaaaccaaaaacgggaaggcgcgcaccgtccccatttctgatgaggtcatgaaatacgtcaaaaccaaaaccaccggcagactcttcgacgttgactatgtcgaatatcgcaaggtactaaaggaggtaaagccagatctacccaagggccaggctacgcatgttttgcgtcatacctttgcagcgcacttcatgatcaatggggggaatatcttgacgttaaataaaatattgggacattcgaaaattgagcagactatgacatatgcgcatttttcacccgaccaccttagcgacgcaattcacctgaatccgcttagtaatggcatccacattccatccactaaaatggtgaatagcggttaa

SEQ ID NO: 218142 - DNA, 303 bp, Klebsiella pneumoniae
atgaatttgccaattagtgaacgcctcaagctcatgagggaaagcgagcgcattaccagccgcaacgaagctgctgaaattattggaattcctcacaatgcgctttggcgttatgagactggggaatcaataccaaaaggcgacgtaatgatgaaaattttaaataccccgagatttgaaaagtatgccctgtggttcatgaccggaaagatcgcccctgaatccggtcagatcgcgccggctctcgcacactttgggcaagacgaaacaacgtctcagtcctcagaccagaaaattggctga

SEQ ID NO: 218143 - DNA, 333 bp, Klebsiella pneumoniae
atgaaagatgcagttttgagcgcgctgtttaagattccagatccgatcaccgctgatgagttttctcgtcgaaccggcaaaacggagtcagccgttcgtcacatgatggatcgccgccttttacctatggtcactgagcgcgaagtacttggccctgatggcagtactcgccgcctcctgattctgtggaacgaatggcttgagatggttcatgaagctacgtcaaaactccctcctgagcgacaggactggcgagcaggttggatcaagaaagccaataagctggcgaatgatatgggcgtaaacatgtttggtggcggggcggcagcatga

SEQ ID NO: 218144 - DNA, 264 bp, Klebsiella pneumoniae
atgaataaacgctactcacagcatggcaagcactcggggagcatttgcagcacgccacttgataacttgccgaaagttacatggattaataagcatgctggaatctgttgcggcttcaccatccgcgtattaccgcgcagggtagggaagaagcgctatcaaattatgaaagatggtgattctttcggaattgattttgcgttatctgaagcacgcaaaacgataggtcgcattattaataacaaccgcttcactattcattaa

SEQ ID NO: 218145 - DNA, 387 bp, Klebsiella pneumoniae
atgaaaagagaatacgcagacaaaattaattcgctgctgcaatgcttccatttcaacaaggagtttctggaatggaaccatgattattcccatcaacttttacgccacggcgtatcccacctttatcacttcgcgatgctccagggcgagaacgatgaggccacgctggaagaactgcgtaacatcatcattttgatcactaatggcgatatcccgaagccatacgacctgtcatctatggatgctgagcaaccggaagcagcaagcaagacagtgatgttttttaagccgctggcggtaacagtggaagttacaccagagatgcttcagcagctgaaacagtcggccacggtgtcagcgcagatgaagcgcccacgcctctattaa

SEQ ID NO: 218146 - DNA, 273 bp, Klebsiella pneumoniae
atgtttaccgaagagaaaacatcgtgggaacgtgaaatgctgatacgcgaagcggtggaaagcgcagagcagggcttcaccgttcacctgaagaacggcgctcgcgtcaatgtcaccgctgacagcccgtcgatagacttaattatttacggtctggagaaaacaattcgcggtaatcatgagcgtgcgcgaatgacgtttatcgactttttgtattactggcacgaaaggttatttaaacaggttaaaagaaaaccgcgccctaaccactaa

SEQ ID NO: 218147 - DNA, 225 bp, Klebsiella pneumoniae
atgtcgattacgtcaataaaactggatggcggaataagcgatccagagtttgtagaaataagcgccaacgctcgaaagcacgaacgcgctcacctttttggcctgctgcgtatttttgtcgtccagctgaaaaaggaaagcgccaccccggaagagatttattcatcaatcgaacagtgggccgatgcccgcgagttaaccatcactgaggaaagcaaacaatga

SEQ ID NO: 218148 - DNA, 579 bp, Klebsiella pneumoniae
atgaaccacttaatgatcgacattgaaacgctcagcacccagccgaatgcggtaatttgcgcgattggcgcgaccttcttcgaaccgtcaaccggaaaaatcggcccttcgttctatcaaaccattgatccgcgaacctcgcagaatcgcggcgcgcatatctccgccgacacggtgatgtggtggctcaggcaggataaagaaccaatcagcgagctggtaggcgcgaagtcgcatgaaattgaggtgatgctggatttcgccaaattcattgaaggcgcattccctgaaaccaagaaaaagaatctgaaggtgtggtgcaagggcggttcgtttgatttcccgatcctcaaatctgcatttgaacgctcatcgctcgaaggcgtttccatgctgccgtggctttattggaatgaatgctgcttccgctcgctgcttacagtggccggagctatcggttacgccccccatccgcgccgctcagttgcacacaacgccttaaccgacgccatctatcaggccgagcaggtttgcgagatctggcagcgcctgacctccccgcacctcgaatcattgtga

SEQ ID NO: 218149 - DNA, 969 bp, Klebsiella pneumoniae
atgactaaatcacctatcaaatgggctggcggcaaaacccgcgtcatgccgcagctgctgatgcaactgccgaaagccgattgtttaatcgagccgttcgttggcagcggtaccgtgtttatgaacacggaataccgccgttacatcctctgcgatagcaatcgcgctctgatcaatttctttcgtgtgctgacttccaacaccgagcgactgattgataccgcttgcggaatgttcctggatggcaataacgaagagcaatattacaagcgccgtgcgctatttaactccatgcagtggagcgatacgggcaaggctgatactgctttactttatgccgctttgtttctgtatctgaaccgacattgctttaacgggatatatcgcgtcaatcagatgggtgatcataacgtcccgttcgggaaatatggcgcaccttacttaccggctgacgagatgcgccgctttgccgaaaaggccaacgacacaaaagccgttttcattgatggcgattttcgtcacaccatcccttacgttatgcagctggcatatgacgcggttatttactgcgaccccccctacattccagccagcaagacagccaacttcactgcctacggcaagccatttaccctggacgatcaccgcgacctggttgcaaccctgctcgatgctcatcgccagcacggcacccgcgcggtgatatccaacagcgacaccccggaaacccgcgagatctactccgctttcaatctccacgccttcagcgttcgccgctctgtcagcgccaaaagccgcgatatggccggtgaagtgatcggcgttcttcgcggcgatgtgggtcgcaactctggcgcatgtggagcttggacgagcaccattgaaaatctgcggccggcggcgatatggatcgggtttgacctggccgccggattcgataacggggagccatctgatgaacacgcttga

SEQ ID NO: 218150 - DNA, 174 bp, Klebsiella pneumoniae
atgaacacgcttgatgccgttgtgacacgagttttggacgttcgtccatatcgccatttctggatcgtcgaggtggaggtgttgagctggggcagatacagcaacacaaccatcatccgcgatagcgaaaaagaagcccgccaggttcaacccggcgacacggtaacgatctga

SEQ ID NO: 218151 - DNA, 153 bp, Klebsiella pneumoniae
atgaacgaagaaaccaattaccgccggttctggcgaaaccttgtgatctgctgtgcgctttgctcgctgttgttctggatcccgatgggctatctcgcctttcgtgttggctctgtggtctgggatgcgctgtggtctcttataaaaatgtag

SEQ ID NO: 218152 - DNA, 162 bp, Klebsiella pneumoniae; identical to SEQ ID NO: 205296

SEQ ID NO: 218153 - DNA, 330 bp, Klebsiella pneumoniae
atgaagatcagtcagcccaagcttagcaatgccttgaacgagagccaggtatgcgccaagaccatcaacagtaatgacgcggtaaatatcaccagcttcattttgaatcgctgtcagcatcggcatgccaccaagttcagcatccttcgctttgcggactacttcggagattttctcatcaatggaggacttcacttttccttctacatatttatctttcatttttatcccttttttgctgtatgcgttggcaatactaaccatctgctgcgtttgagggcaagaaagtttgccgcacatggcgagccagaaaaggcagatcatgtctga

SEQ ID NO: 218154 - DNA, 2628 bp, Klebsiella pneumoniae
ttgccgcacatggcgagccagaaaaggcagatcatgtctgactattcctccttagtttgggaatggaacgccaaacggcaggctatcaaccccaaccacgtctcagatcctcaaattgagtatctcaccccgaaaggcgagcggaagacgctcgcctatgcggatttggtcgataccgtttatcgcacccccatgcgcccgcgcgaaggtgccgcgcgtgaagcattcgaccgcaagggacgcgcccactacctgcgccgccgggttcagactctaccggcgtttatccgcaagcggttctctctgcgcctggaatcgctggagcgtcacgacccaaaagaggccgtgcgctggctcttcagtacgtttgaacgccatgtcttacgccgtgtcgatgcggtaaacgcacaatacctaccgcaggacgcgctcccggcgatccttgcgcccctccgtgatgattttcacctgctgccttgggcggacaaaaaacgcctgaaacgactggcttataagctcgccaacctgatgaaaagcgagtttatgcgcgagtttgattttcagtatgagaaaaccgctgatgttgagttttccacgctttacgcatacggatttatcgccagtaaagcgacagcgctcaatatcgcgatccctggctggagccggtattgcgaagagaagctggaggccgaagaggcgctgcgtgccgttgcgcgccttcagtcagaaaagtggtggttaggtaaaatccgccggatccatgactgctggcgcgagcacctcatgatcgccgctggctatgtcagtaaggtagcctcgccgtattgttctgatccgtgcttcaaagagtggatagcccagaaaaaagcgaactttgaataccttcaggcgatggaactggaagaccaggacaccggcgagcgtacctcgctgcttgataaggtcatggggagtacgtccaaccctaaaaacgcccgcgccgagctgatggtgcgcatgcgcggttttgaggatatggcaaaagaaatgggcctggttggcatgttctacacgctaacagcaccgtctcgctatcactcttcacacgtaaaatcgggcaagcgcaatgacaaatatcgtgatgccagcccgcgactaacgcagaaatacttatgcaaagtctgggcgcgcgtccgtgcaaaatggggccgcgaggggatccgcgcattcggttttcgcgttgctgaaccgcaccatgacggaacgccacactggcatctgttgctgtttctccgcccggaagaggtggagtttgcaacggctgttttccgcaagcatgcactgaaagaggacggctacgagccgggcgcgcaggagcaccgctttaccgttacaccgattgatgaaaaatttggctcggcaacgggctatatcgcgaagtacatctctaaaaatattgacggttacggcatggatggcgagttagacgacgaatccggccagcccgtcaaagagatggcaaagcgcgttcgggcgtgggcttctcgttggagcattcgccagtttcagcagattggaggcgctcccgttactacctggcgcgagctgcgccggttgggtagccgtgagctggtattgcatccggaacttgaagcggcccgcgcggcagctgatgcgccggactggccgggatacaccaacgcccagggtggcccatttgttccgcgagattgcctgcgcgttcgcctcaactacgaatacaccgaggatggcaacgattatggtgacacggtcgccaaaatcactggtatctactgcccgtattcgggcggtgattctgtcattttcacccgcaccaccgattacaagattgtgccgaagcgtaagccgtcgccggtcgagaatttgaccttagaaggccgcgcagcggcccctcggagttctgtcaataactgtacggggcgcgccagatcggacgaaaaaccaccgtcagaaacggcggtgtcagctgataaaaccgcgccagacgacagttcagtgacagaacttccgctgaatatcgatgttttgaggcgatattcacgccagcaaaggcaggaaatcaccagtcgcctcagaaaatcagcccgggaaagctcagatcaagccttcacgcgtaccgcgcgcgttctgcgcacgtcgattgatgacgaaactgcgctgatgtggggcccgaaagttaccgcttcgaaagatatgactctgacgacagaagaggcagagcgtcgctggcgcgaacagctgcggattgaggcagaacagcgcgcggatcactacgcggccgcagttgcggagtaccagaagaaaaaggcagaagccgcattacgccaggcgcagcaaaaagaagcgtcgcaaaaacacggcgtctccgaagagatgatcgcgagcatcggcgcgcagctccgtgattgtcggattttcgtcagtgatgaagttgtgctatcagtcgcgggtggtgctagaattcactacaaaggaggtaagcttgtcgtgcgcaacggaattttgcgaaatgtacaaaagtgcaataaagagtcaaccaatgagtacatcttggtaatggctctgattaggcgctggaaatgtgcgataaggaagaaaaaaatataa

SEQ ID NO: 218155 - DNA, 801 bp, Klebsiella pneumoniae
atgaaactctccaatcgcctcgacaagcatacagtcatgattaaatgcaataatggatctgttggcacaggttttttctatggggtagagcatcatagcggagttggtcataacttctttattgttactaataaacatgttgttaaagatgcagtatcagctatgcttatgaccagaatggctaatgctggaacgggtgatattgaaaacaataaaagcgttctaatcgaagatcttcaaactatactgattccccatccaggtgatgtagatttatgcgcaataccaataaataaggcaataattgaattccaaaaaaataatatgacactgcattttttcccatttttccagtctgaatgttatgaacactatgagcataaatcctcactaacatctgttgaggatgtttttatgacaggatatccaacggcattatgggatcatgtaaataataagcccatcacaagaaaaggcattaccgcatcagattgtaaagaaaactggcaagggaaaaaggagtttttaattgacatggcttgctttcctgggtcaagcggttcacccgtgtatatatacaataacggaaccattatgattgacggggatatttttggcggggaaagacttattctattagggattcttcgcgcaggaccattattcgaagccggtggtagggtggaaataactaatgttccatcatctgttaaggcaatctcagaaactagaattccaatgaaccttggcgtggttataaaagcagaggagcttggtttcctcagagataagagagtttaa

SEQ ID NO: 218156 - DNA, 1047 bp, Klebsiella pneumoniae
atgagcagacgaaaatccccgcgcggcaggcagtatgccagagagcaagccgatcttgccgacgcattgaaatcagcgcccggcctcagtgcgttcacgttcgatggcccctggccggtgaccggtgctcatgatctgctggatagcatgtactgtgccgacaatggccggtactacgagacgccgattagctggtacgggctcgcccgtcagttcgggtatgcgagctggcaccagtcggcgctgttcttcaagcgtaacgtactggccgggtgctttatcccgcataaattgctatcgcgccaggcgttcagcgcctttgcgctcgactggtttgtgttcggcaatgcgtaccttgagatgcgccgcaaccgcctgcatgggccaatgggctttcgtaattcactggcgaagtacacccggcgcggttccgacctcgatacttactggtttattcagtccgggcttaccgatcaccagttcgagactggttcagtgtgtcatgtgctcaacccggacatccaccaggagatctacgggatgccggagtatttcgccggcctgctgtcggccaacctggcacactccgccgacaagttccgcaagctctactacgacaacgggtcgcacgcaggctgcattgtttacgttaacagcgcgatggccgatcaggagagcattgacagcctgaagaaaacactgactgacacccgtcgcggcggggcattcaagaacgtcctgctgcatgctccaggtggcggtaaggactcggtgcagatcctgcccttcagtcagatatcggcgaaggatgagtttgtcggcgtgaagtcctctacgcgcgatgacatgctggctgctcaccgcgtgccgccccaactgatgggcgccatccctgaaggtaacggatcattcggcgacgtcgagaaggcagcaaaagtctttgctgttaatgagctgacaccggtcatggaagcgatgaagcatgttaacgactggctgggcgaagaggtgatccgcttcaacccttacgccctgctcgcgcagtga

SEQ ID NO: 218157 - DNA, 1722 bp, Klebsiella pneumoniae
atggcgattgaagaagcattcatcatgcagcgtgcgcggcagctctactggcaggggtaccccccggcggagatcgcgcgcctgatgggtatcaatcagaatacgatttactcatggaaaaaacgtgacgaatgggacaccacgccaccaatccagcgcgttacgacgtctattgatgcccgactgatccagctcaccagtaaggacacaaaaaccggtggcgacttcaaggaaattgacctgctgacgcgacagctcaaaaagctggataacggcacgccagtgacgcagccgaagaagaagatccgcaagaaacagaactttttttcagaggcgcagatcgccacgctgcgggccaacatcatcgactcgctgcactggcatcagaagagctggtacgagaatcaccaccaccgcaaccgggccatcctgaaaagtcgtcagattggtgcgacgtggtatttcgcccgcgaagcgctgctgcgtgcgctaacgggtgacgtgaaatacaagcaccagctcaaccagatcttcctgtcggcgagtcgtcgccaggcgtaccagtttcgcagcttcattcgtgccgctgctgctgaagtggatgttgagctaaagggtggtgacatgatccagctgttcaacggcgcggagctgcactttctcggcacgtctgccgcaaccgcgcagtcatacaccggcaacctgtactttgacgaatttttctgggtcggacagtttgccaacctgaagaaagtagccggtgcgatggcgaccctgaaggggttgacgcgcacctatttctccacaccatcggctgaaagtcacgaggcgtaccccttctggtcaggtgaagccttcaacaaaggccgcagccacggcaagcgcgtggagttcgacacgtcctggaagacgcttaacagcgggttgatgtgcccggacaaaatctggcgccagattgtcacgttgcaggatgctgtcgataacggctgggatctgactgacattgacgaaatccgcgacgaaaacagccctgaagagtacgacaacctctacgcctgcaccttcatcaaaaatggtgaaaccgcctttgactacaacatgctgttgagttgcggcgcggacggttacgacgagtggccggactggaagccttacgccatgcggccaatggccgatcgcccggtgtggattggctacgaccccaacggggccagcggcaagggtgatagcggggccatctctgttaacgcggcgccactgatccccggcggcaagttccgcacgattgaaaccattcgcgtacgtggcatggagtttgaggcgcaggccgccatgattattaacatgctcacacgctacaacgtgcagcacatcggtatcgacgggagcggcatcggcgaggcggtgtatcagctcgtgaagaagcgattccctgcggcggtatgctaccagttctcgccagccagtaagcgcatgctggtactgaaaatgctgcaactggttcgcgccggtcgctgggagtatgaccgcggcgaatatgacctgatcaccgctttcagtgccgtgcgtaaggtggtcacacccggcggcgtcatcacctacgacaccgaccgcgcccgtggcgtgagtcatggcgacctcgcctgggcgacgatgctcgccaccgttaacgagccgctgggtcaggaaggcggaaacactatgactgttatggagtactga

SEQ ID NO: 218158 - DNA, 834 bp, Klebsiella pneumoniae
atggcaggcacagctaaaccccgtaagaagtttcgcgttgccgtctccggcaataccgtcgatggccgcgaaatccagccgcagcacctccgcgacgcagcggcgaactacaaccttgaggtgtacgccgcacgcgtcaacattgagcatattctctccccgtatcccggcagcgattttggcgcgatgggggatgttgtggcgctgagcgccgaggatattaccgaagggccgctggccggtcgcactggactttatgcggagatcgaaccctccgagcgcatgaagcagatgaccgataaaggtcaaaaggtctattccagtattgagctgcatccgcagtttgcccttaacggcaaggcttacatgatgggcctggcgatgaccgacaccccggcaagcctgggtactgagcgcctgaagtttgcggcacagcaacgcgcctcggtgatggccttcaacaaccagcaggtggaagcgccgatgatcaccgaggcgatcgaggccgaagtgattgaactggccgcccagcgcagtgatgagggcaagcagtggtttaaccgcgtaatgggcattctcggtaagggccagaaaaccgacgatcagcgcttcggtcaggtacatcaggctgttgaagccgtggcgcagtctcaggtcgatcttggcgagcagttcagcgctgccgaacaggaacgccagcaggataaggccaccatccagaagttgaccactgaccttgccgcactgcgccagcaacttgaagggacggacggcaacttcagccagcgcccgccagctggcggcggcgacagcgcgcagctcgctgactactga

SEQ ID NO: 218159 - DNA, 1050 bp, Klebsiella pneumoniae
atgagaaaccctacccgtaagctgtttgacagctacgttgcccgccaggcgcagcttaacggcgtcagcgccgccgccgttgcggcacagttcagcgttgacccgactgtacagcagcgccttgaagctgccgcacagcaggatgatgcctttttgaagctgattaacgtctttggcgtggaagagcagatcggtcagaaaatcctgatcggcagcaaaggcccgctggcaggcgtcaacaacagcaccaccaaccgtcgtaatcccggcgctaacgacaagatggacccgtacaactatttgtgccgcaaaactaactacgactatgccgtgagttatgcgcagatggatgcatgggcgcatcagccgaacttccagccgctgattagctcggcgatggcccgtcagatgtcgctcgaccgcattatgatcggctttaacggagtcagttacgccgacccgtcagaccgcgcagcgaatccgctgttgcaggattgtggtattggctggttgcaaaaaatccgcaacgaagcggcgcaccgtcgtattaccggtgtcacgatcacgtcgcgtgatgaagacaacaaaatcactgcgaaaggcacatacggcaacatcggcgctgcggtttatgacgcgaaaaacagcctcatggatgaatggcacaagcgtaaccccgacaacgtggtgattttgtccggcgatttgctgacaaccagcaatttcccgaccatcaacgccatgagccagaccaacccgaacaccgagatgctggccggtcagctgattgtggcgcaggaacgcgttggcaacatgccgacctttatcgcgccttacatgccgggtaacgccatcctcatcacgccgtttaaaaacctctcgatctactaccagcgcggcggcctgcgccggacgatcaaagaggagccggaatataaccgcgtggcaacgtaccagtcctctaacgatgacttcattgttgaagactacggcgcagtggcttttatcgacggcatcacttttgctgaagcgccggcaggcgggcagtaa

SEQ ID NO: 218160 - DNA, 915 bp, Klebsiella pneumoniae
atgctgacacctgcacaacgacattttcaacgcgtcatggctgaacgtcatggcaaaaccgacgagcagtcggataccgcgcggacagcgcacgagcaaatcatgcaccggctgcgcatggatcagagtgcattaaagcgagtgcagtctgaccaggcgaaagcggcgatgaaacgccagttgctaccccattacgagggctggatcgaggggacgctcgacggcgacagtggccgacaggatgaggtgattgtcaccctgatggtatgggcgattgatgccggtgattacgtcctcgcagcacgtattggccgctatgtcgtggcacatggtctgctgatgcctgatcgcttcaaccgtacagccgcaaccatcctggtcgatgaaatctgcgatccgattctggtgcaggtcaaggccgacgataccaccgacgttacgccatatctggcggtgctcgatgacgtcgcggactttaccgccgacagcgatatgcccgacgtggttcgcgccaagctgtgcaaagcgcgtgcctttgcgctgcgtaacggcacaaccgaagagcaggccatcgcgctggcgttgctgcgtcaggcgctgaccctggacgcgggcgccggggtgaaaaaagagattgaacgccttgcccgcgcggtgaaaaaagcctccgcagaggcgggcgcaggcgggggcggtaatgctgatggtaccgatggcggcgatggtgctgaaggcgctggcgatgctggcggagataccgcagcggacggcgcaggcacaggcgaagctgcagcatcgtcagatccggcagtagcggccagcaccacagcgacaaagccagcccgcacccgcgcaccacgtaaaccggcagtgcgtagaacagcagcgaaaaagacgcctgccgcaaaaaaataa

SEQ ID NO: 218161 - DNA, 498 bp, Klebsiella pneumoniae
atgagccttgtagccggtcgcactgttaccccctccacggaggatgtgccggacactgacgacggtggcgagaaagtcactgcgggggcgttctggccggaaatcgccttgcgcgatgtgcgcatggagatgcgcatcaatggcgccgtgaccacctcgcgcctgaagcaagccgtgatcgaaggggtatctcacaccctcgatcagctcgctgactggcaggccgaccagctcgctgcgggttacacccaactggccgacgtcccggcggtaaaagttaacggcgaaagcgtgaaggtgcatcgctaccgccgcgcggtgttcagcatcgcccgcgcgcacatcctcggcacaaaccgggatgtggacaccactggcgacgcaggggagaagcgcgccgccgcgctggcctcacaggccgatgatatgtggcgcgatgcccgctgggcgatatccgacattcgcggcaccgtgcgcaattctgcggaggcattctga

SEQ ID NO: 218162 - DNA, 201 bp, Klebsiella pneumoniae
atgaaagtgcaggcattgcagggcgataccgtggatttgttgtgtcagcgccactacggaaccacgcagggcgtgaccgagaaagtcctcgccgcgaacaaagcgctggccggtcagatctttctcgacgccggccaggtcgtggagctgccggaaatcagcactccagcgacacaggagaccgtgcagctatggacttaa

SEQ ID NO: 218163 - DNA, 282 bp, Klebsiella pneumoniae
atggacttaatcaaccgaatctggaatggcgtgacgtactcctggtcaacgctgctgaccagcatcggcgtcatgacgcaaaaagactggctggctgctattggcgtgctgatcggtattgcggcggccctgcttggtgagctgcatcgtcgccgcatggcacgtattcaggaaaccaataactcattgctgaacgaactgatcgacgcgattcgtgacgacaccgagaaccgccaggacgtcaaagaactgatccgcaccatccgggaggcaccacgatga

SEQ ID NO: 218164 - DNA, 552 bp, Klebsiella pneumoniae
atgaaaaagggagttattgcctgttccatcgccgcgatcatctcgctggccgccacgctgtggccgcaggcgttgcgaaccagcccggaagcgcagctgaagatggcaaagtacgaggactgccgcaagaccccgtactactgcccggcgggtgtactgacagtggggattggctccacttcgaaggtggaaaatcgccagtatgtcgagggtgagatcgccgagcgctgggttaacgacctcctgcgtgctgagaaatgcaccaaccgtgagtttaacggcgccgctgcaccgcagaaggttttcgagagcatgaccgatggcaactttaacgtcggctgcaccgggctgggctggtacaccaacagcaagggccagaaagtgcgaaccaccctctggcgtgatgcacaggccggtaactggcggggtgtttgtgagcggctgacggactttgtgaactccggcggcaagcgcctgcaagggctggtcaaccgccgggaggagtttaaggcctggtgcctgtctgatccggcgctgaagggggcgaaatga

SEQ ID NO: 218165 - DNA, 396 bp, Klebsiella pneumoniae
atgaaagcgaccgccattctcgccatcgtgatgtttgccctgctgattgccgccgtcagcggccttgcgtggcaaagccataagcgcgaacaggccgaaaaatcactgaccagcacccgggaagaactgaaacaaaccggcgacgtgctgaccgaggtcagggcgctacgccaggacgtcagcctggtggaagccggactgaagagactgaaccagcagcgcaatacaacaggagagcaccgacgtgaaaacatcaaaaccgcactggccggtgacccctgcgctactggtcctgtgcgcgctgctgtcgctgacggcctgtaccagcgagccgaagaagtcaccgccgcagattattcaggaacccttacccgaaagcctgacggcaaaaactga

SEQ ID NO: 218166 - DNA, 459 bp, Klebsiella pneumoniae
gtgaaaaaagccgagctgatgcgtgacgccctgacaagaaacaatacgtggtgtaaggcgaacccggagctgttcattgtgtgggtggaaaaggggcacatccagatcgaagcgaccggcgaagcctcgtttatgtaccactacaccattcaggtactggcggtggattttcccggccagattgatgatctcatgctaccgctgctggcgtgggcatgggagcaacagcccgatctcctgctgaacccggacaataaccgcaaggtggagtttgacgccgatatcgtcaatgacgacgtcgccgacattctgtttaaggtgcctgcctgggagcgcgtcatggtaacaaacagcaatggcgggctgaaggcggagcatctggccgaacagcgcccacgcttcaacggtggcgagtgggaaatggtctttgatccggaatccgggggagtactggcatga

SEQ ID NO: 218167 - DNA, 642 bp, Klebsiella pneumoniae
atgagtgacaatgacgccattttccatcaacttgacgcggttttttcggccatcctgtcgggtacgtcaccggcagggcgtcagcgtaccgcccgcagcgtcggcacgatgttgcgccggagccaaagtcagcgcatcggcaggcaggaagcgccggacgggtcgaagtacccgaagcgcagtcgccgtgtacagcacttgcaggcaggaattagctttacctggcagggggatacgcgtcgcctgcgtaactggaaaaacactcgcggtcggcatggtcgcatgctgaccggatttgatgaagatcgcggcgccgtgcgatcgttctatctcaatgatattgagcgctatctcaacatcagctttaacgaaaggcgccagaacatcaccaaaccagatcccatgttccgccgcctgcgtacagcgcgatttttgaagacccgcgccactgctgacggtgtcgaagtggggtactcaggcgtggccgcacgtatcgcccgcgtccatcaattcggcctgcgtgacaaagtcaacagcagcggcgcaatggcgacctatcctcgccgcgagctgctgggcctgagtaagactgaccgcatggcgatagctcgccaggtgatcgactcgctgggtgtgcgctga

SEQ ID NO: 218168 - DNA, 585 bp, Klebsiella pneumoniae
atggaaattgccgagctgatccgcctgctggagaacattgtccgcaccggtacggtgacggagatcgacgaggaaaaatggcgcgttcgcgtgcagagcggaggactggaaaccacctggcttcgctggaacgcacagagggccggggcgtttaaggtctgggtgccgccatcaatcggcgagcaggtctggttcctgtgcctgggcggcaataccgacgtcgcttttatcggcgggagcctgtacagcgacgacaacccggcaccaggcgcgacgcgcaaagagatggtggtgacggcgccggacggcgcaaagttccgctatgacgcggaggcgggcgcattgcaggtgcaaggcatcaagtcggcagtgattgaggcgtcggtaattgtcaccctggatacaccagaggtgaactgcaccaacctgttgcgcgccaaaaatctgaacataaccgaaggtggaaagatgcacggcaacttcagccataccggcggtaagttcacgtcaaacggtgtacaggtggacgaccacaaccacggcgctgttgagcgcggcggaagctggacggagggtacgcaatga

SEQ ID NO: 218169 - DNA, 366 bp, Klebsiella pneumoniae
atgacagagcgctatcgcggtatgaatgccgcaggcaccggcacgctgaccgacgaggatcatgtgtggcagtcggttaacgacattttgctgacgccagtcggaagccgcctgatgcgccgaaattacggctcactgtgccctgacctgatcgacagcccgaaaaacgacgtcacacggctgcaactgatgagcgcagcagtcatcgcgttggccgcatgggagccgcgtattgtgctggataccatcaacgtgacttattcagccagcggtgctgtgactgccgcactgtccggcatgctgacggaaaccatggaaaaaagcacccgcgcggtgacattaaggggcgccaatgccaacgattga

SEQ ID NO: 218170 - DNA, 900 bp, Klebsiella pneumoniae
atgccaacgattgatctctcacagttgccgaagccgaccattatcgaagaactcgacttcgagacgatcctggttgacgtcaaagcgctgatggtagcggcatttcctgccgatcagcaatcagccgttgccgccgcgctgggtctggagtcagagccactaaacatcatcgcccaggcgatggcataccgtgagctactgttgcgccagcgcatcaatgagggagtagcggcctgcatgctcagtcattcgactggcgacgatctggacaatattgcggccaacctggacacagagcggctcatcatcacgccagagaccgacaccaccgacgcagtaacggaaagcgacgaagcgttacgcctgcgtgcacaggcggcctttgaggggatgagtgtcgccgggccatcggcggcctatgagtatttcgcgcgcagcgccagcggaaaagtggcggatgttaaggcatccagcccggcaccggcggaggtggtcattgctgtactgtctacagagggtgacggcaccgcctcgccggagctgctggccgacgtcgcagaagcggtaaacgatgaggaagtgcgccccctgggggatcgggtcacggtgcgtagcgccgaggttgtcgattacgaaattaacgccacgctctatctgtacccagggccggagtcagagccgatcatcaacgccgctgacgcatcgctgcaaaagtttctgaaacagaacaacaaaaaaatcagtcgcgacgtcgcgcgctccgctatttcggcggcgctgcatgtccagggggtgcagcgagtggtaataaattcgcctgcgaacgatatcaaaatcagcgacgtccaggccgcacgcaatatcggttatcaccttgaaaacggcggaacggatgaatag

SEQ ID NO: 218171 - DNA, 603 bp, Klebsiella pneumoniae
atgaatagcacgttactgccgccgtcctccactgcatggatgcgcagcacagaggccgccacggcgaggctttccgggataaccgtcgcgatacgcacgctgtggacgccgaccgcctgcccgattgatttactgccgtatctggcctgggcgctgtctgttgatcgctgggataaggactggccagcagaacgaaaaatagctgttatacagcgttcgtactggttacaccgccgcaaaggcactcgcgcagcggtacggcgcgtgatcgaggacatggggttttctgccacgttcgccgagtggttcgacgtcggcgaccagccgggcaccttccggcttgaagtggatgttaacgaggtcggactgacgccgaaaaccctggacgaattaaaccgcctgattggcgatgcaaaaccagtcagtaggcacctatcgctaatgaccatatcggccagttcacggggaaatgtctgggcgggtctggccttatttgacggggatatcatcagtgtttatccgccaggatatgagccaaacgacagcattcactacgacgcacagcagtatttcttcggcgatatatatttttcaggaaaataa

SEQ ID NO: 218172 - DNA, 1242 bp, Klebsiella pneumoniae
atgtcagcattaccttcccccgaatacagccgcaatatgcggctgattggccatagcgatcagggcggtcgtccggacggcgtgcagctgatggtgcaccgcggattcgcctatatcggccatatggtgtcgcagggtttttccgtggtcgatgttcgcgatccgacccggcccaccaccgtcaactatattgccgcgccgccgggcacctggaacgtgcatctgcaggcgcatgacgatctgctgctggtgatcaacgcccgggatctgtttgctgacgcccgttttgctgatgagaaggtgtactacacccgctcggtgggtgacacggtcagcgatgtgcaggacaagggctggagcgccgggctgcgcatctttgatatttccactcccgcgcagccgcgggaaatcagtttcctgtcgcttaacggcatcggtattcaccgcatctggtacgtcggcgggcgctgggcgtatgtgtctgcgctgatcgacggttttaccgactacatcttcctgaccatcgatctggccgatccgcgtaagcccaaagtggccgggcgctggtggctgccggggatgcaccaggcgggcggtgaaacaccggactggccgcagggcaaacgctatgcgctgcatcacgccattattgccggggataccgcctacggcagctggcgcgacggcggcctgacgctgctggatgtcaaagaccgtacccagccgaggctgattagtcatcgcaactggagcccgccgttcggcggcggaacgcataccgcgctgccgctgccggatcgtgacctgctggtggtgctggatgaagcggtgctcgacaaccaggaggacggcgagaagctgatctggctgtttgatatccgcgagccaaccaacccggtgagcatcgccaccttcccgccgccggacgaagcggattatgtggcgaaaggggcgcatttcggcccgcacaacctgcatgagaaccggccggggagctttgtcagctcaacgctgatttttgccacgtatcagaatgccggcgtgcgggcttacgacatttccaacccgtatcgtccgctggagaccggggcgctggtgccggctgcgcctgagagaatgatggatacccgtcccggccgcccgcgggtgatccagtcctgtgacgtgtttgtcgatgcgcaaggcattatctacagcaccgattacaacggcgggctatcggtgattgagtatctggggtga

SEQ ID NO: 218173 - DNA, 999 bp, Klebsiella pneumoniae
gtgagcaaggccctggcagtaaacgcgacggtatcgggccgtcagcgattttttgattttctctataagtggggcatgttgctgaccgtggtgctgctggtggcggtctttggcctcgcctcggacaacttccttgacccgttcaacatcatcaacattctgcgctcgatcgccatcgtgacggtgattgccattggggtgtcgatttccctcaccatcggcggcttcgatctgtccgtcggatcgacggcatcgctggctaacgcgctggtgatttccctgtttgtctggcatggcctggggaccaccgaagcgattctgataaccctcgcgctctgcaccctggtggggctgtttaacgcctttctgatcgtggtgctgcgcattcctgacatgctcgccaccctggccagcctgtttgtgattcagggcgtggcaatgacctacagctacggtgggtcgattaccgaaaacatggttctgccgagcggcgagatggcggagggtactatcccggcggcctttggcgcgctggggcaggtgccgaccatcgtcattatcatgctggtggtgacgctggtcgcccagctggcgctgtcgttcactacccacggacggcggatgtacgccatcggcggcaacccggaggcggcgcggctctccggcctgcggatcacgcgttacaaagtcgcagcatacgtgattgcctcgctgctggccgggctcggcggcattctgctggcctcgcgcatcggctcttcgcaggtcaacgccggcggcggctatctgatggacgcggtggccgcggcatggatcggcttttcgctggcgggctccggcaaaccaaacgccctggggacgctggtgggggcggtgatcctcggcgtgctctccaacgggctggtgatgctctcggtgccgtattacgcgatggacattattaaagggttggtgctggctggcgcgctggcactgacctattttcagcgccgtacttaa

SEQ ID NO: 218174 - DNA, 1503 bp, Klebsiella pneumoniae
atgagcgcgaatcgccttgagatgcataacattagcctggccttctccggctttcaggcgctgaacaaggtggactttaccctccatggcgggtcggtgcatgccctgaccggggccaacggcgcgggtaagtcgacgctgatggccgtgctgtgcggcacccacgcccactatgagggcgaagtgacgatcaacaacctgccggttaccattcgttcgccgcgggatgctaaacagctggggatccacctggtgcagcaggaggtggacgtggcgctggtgccgggcctgagcattgcggaaaacattatgctggacaggctggcggagccgggcatgaccttccgctggtcgcgggttcggcagctggcgcgcgaggcgctggcgcagctggacgtggcgctggacgtccggcgctccattgacagctgcacgctcgccgaaaaacagcaaatcctgttggcccgcgccctgtcgcaccattgccgctttttgatcctcgatgaacccaccgcgccgttggatcagcatgaaagtgagcgtctgtttgcggtagtacgccgtctgcagcatcaggggatcggggtggtgtttatttcgcatcgtatccatgagctgaaggcgatctgcgacaccctgacggtgctgcgcgacgggcggctgattgagagcggcccgatggggccgctgagcggcgaacagatcgtcgaaaagatgctgggccacgagctgagcgatatcttcccgccgccgcgcccgccgcacggcgaagaggtgctgttgcaggttgacggtctgcatgatgaggcgttgctgcaggatatttcgctgcgcctgcggaagggggaaattctgggtatcgccgggctggccggcgcgggcaaaaccgagctgtgcaaagcgctgttcggcgccagcaaaagccgggtgcagcgtggcgagctgaacggccagccgtggcgaccgcgcgatccggccgactcggtggggcgcggcctggcgctggtcccggaggagcgacgcaaagagggcattttcattgaagagccgatcgcgatgaacctggcggtcagcgccgataacagcttttcgcgctggagcctgtttggccatcggcaggcctggcgctgggcggaggaggtgattgcccgcctcggcgtgcgcgctaccggtcccggtcagacgctgcgccgtctttctggcggcaaccagcagaaggtggccattggcaaatggctgcgcggtgatgccaacgttttgatttttgacgaaccgaccaaaggggtcgatgtgaaagcgaaaaccgatctgttcatgctgatcgatggcctggcgcgggaaggcaaaggggtgatttatgcctcgggtgaattcgccgagctggtcggtttatgcgaccgcatctgcgtactgtgggacggacggatcgtagcggagatccccggcgcggaagcccgggaagagacactgctttattattcaaccggaggagcggcagcgtga

SEQ ID NO: 218175 - DNA, 3093 bp, Klebsiella pneumoniae
atgctgaccttttttatccgtcgtccgcgatttgccatggtgatcgcgctgctgctgacctttgtcggcgcggtgtcgctgaagctgatcccggtggagcagtacccggcgatcacccccccggtggtgaacgtcagcgccagctggccgggcgccagcgcgtcagacgtggcggaagccatcgccgccccgctggagacccagctcaacggcgtcgatcatatgctgtatatggagtccaccagctcggatgaggggacgtaccgcctgagcataaccttcgcggcgggcaccgatgccgacctggcggcgatcgacgtgcaaaaccgggtggcgcaggcgctggcgcagctcccggcggaggtgcagcagaatggcgtccaggtgcgcaagcgcgccagcaatctgcttatgggggtaagcctctactcgccgctgggcacgctgtcgccgctgtttgtcagcaactacgccagcacccaggtgcgcgaggcgctggcccgcctgcccggcgtcggcgaggtgcagatgtttggcgcccgggattacagtatgcgcatctggctgcgcccggaccgcatgaacgcgctcaacatcaccacggatgatgtcgcccaggcgctgcgcgagcagaatgtgcagggcgcggcggggcaggtgggcaccccgccggtatttaacggccagcagcagacgctgaccatcaacgggctggggcgtctgaacgaggcggccagctttggcgagattatcctccgccgcggcgcgcaggggcagctggtgcgcctcgccgacgtggcgaccattgagctgggcgcccgcagctacagctccggcgcccagctgaacggtaaagcgtcggcctatctggggatctatccgacgcccaccgccaacgccctgcaggtcgccagcgcagtgcgtgcggagcttaaccgcctgcacactcgctttccggcggatctcacctgggaggtgaagttcgataccacccgctttgtggcggcgacgatcaaagagatcggcgtctcgctggcgctgaccctgctggcggtggtcgtggtggtgtcgctatttttgcagagctggcgggcgacgctgatcgtagtgctggcgatcccggtgtcactgatcggcacctttgcggtgctctatctgctgggctacagcgccaacaccctcagcctgttcgcgatcattctcgccctgacgatggtggtggatgacgccattgtggtggtggagaatgtggaaaccaaaatggcggaagggctggatcgcctgcaggccaccgcccaggcgctgcggcagatcgccgggccggtgatcgccacgaccctggtgctgctggcggtgtttgtgccggtggcgctgctcccggggatcgtcggcgagctgtaccggcagtttgccgtgacgctctccaccgcggtggccctgtcgagcctggtggcgttaaccctgactccggccctctgcgcgctgctgctgcgcccgcgtcccgcccggccggcggcggtgtggcgggcgtttaaccgtcttctcgacggcacccgcgacggctatggccggctggtaggctggatgaaccgccgtccctggctggcgctggcggcgacggtggcggcaggcgcgctggtggcgttcagcttcacctcgatgccgaaaggcttcctgccgcaggaagatcagggttacctgtttgccagcgtgcagctgccggaggcggcgtcgctggagcgtaccgaagcggtgatggcccaggcgcgcaagctgctgatggctaacccggcggtggaggatgtgattcaggtgtccgggttcaacattctcaacggcaccagcgcctctaacggcgggtttatctcggtaatgctcaaggactggcatcagcggccgccgctggatgcggtgatggcggatattcagcgccagctgctgtcgctacccgaggcgacgatcatgaccttcgcaccgccgaccctgccgggcctgggcaatgcctcggggtttgatctgcgcatcctggcgcaggccggtcagtcgtcggcggagctggagcaggtgacgcgggagattctccagctggcgaaccagcattcgcagctgagccgggtgtttaccacctggagcagcaacgtgccgcagctgaccctgacggtcgaccgcgatcgggcggcgcagctggatgtgccggtggcgcagatcttcagcagcctgcagacggcgttcggcggcacgcgcgccggcgatttcagccgtaacaatcgtgtctatcatgtggtgatgcaaaatgagatgcagtggcgcgagcgggcagagcagattagcgagctgtacgtccgcagccgcgacggcgagcgggtgcggctgagcaatctggtcaccattacgccgacggtgggggcgccgtttattcagcagtacaatcagttcccgtccgtttcagtgagcggttcagcggccgagggggtcagcagccgcacggcgatggcggccatggagcagattttgcaggcccatctgccgccgggatatgactatgcctggagcgggatctcctggcaggagcagcagaccggcaatcaggcggtgtggatcgtgctggcggcggtggcgatggcgtggctgttcctggtggcgcagtatgagagctggacgctgccggcgagcgtcatgctctcggtgctgttcgccatcggcggagcgctgctctggctgtggaccgcgggctatgccaacgatgtgtatgttcagataggactggtgctgctgatcgccctggcggcgaagaatgcgattctgatcgttgagttcgcccgcagccggcgcgaggaggggctgtcgatagtcgacgctgcgcgagagggggctacccgccgcttccgcgcggtaatgatgaccgcggtgtcgtttattatcggtatcatgccgatgatgctcgccaccggcgccggggcgcagagccggcggatcatcggcaccacggtattcagcgggatgctggtggcgacgatggttggcatcctgtttatcccgtcgctgtatgtactgtttcaacgtatgcgcgagtgggcgcatcggcgggggtaa

SEQ ID NO: 218176 - DNA, 1101 bp, Klebsiella pneumoniae
atgaaccgtgtcactttcagcgtggtcgccatcatgttactcgcagcagcaacgacattgccgtttgttcttaatgccggttttggtaaagcgccgcagggggcacagcttagccaggtggaagcgtctccccactaccgggacggccagttccataaccaattgcccacgccagggttcaccgggcagaaaaatatgctggcggcgtggtgggatttcctgatgaccaaacgggaaaacgcccgtcccgcgcaaccgctgccgctggtgaagaccgatctggcgacgctgcccctcgggcaggacgtgatggtctggctcggccactcctcctggtacctgcagctggcgggaaaacgcatcctgatcgacccggtgttcagcgattacgcggcgccgttctcctttatcaataaagccttccccggcgactatccgtggcgggcggaagggatgccggagatcgatctgctgatcatctcccacgatcactacgaccatctggattacgccaccattcgcgccttactgccgaaaattaagcgggtcattacgccgctgggggtcggatcgcatctgcgctactggggaatggacggggcgctgattaccgaagcggactggcagcaggcggtaccggccagcgacgagctcaccgtccacgtgctgccggcgcggcacttttccggccgtgggctgaagcgtaaccagacgctgtgggccagttttctgttcgttacccggcagcaaaagatttattacagcggcgacagcgggtatgggccgcactttaaagcaataggcgatgagttcggtccggtcgatctggcgatcatggagaacgggcagtatgaccaggactggaaatatatccacatgatgccggatgaaactgctcaggctgccgacgacctgcgcgctcgcgcggtgctgcctgggcatgcaggacgattcgttttggcgaaacacagctgggatgaaccgtatcaacggctggcggctgccagcgaaggaagggcctggcgtctactgacgcctgtgcagggcgagccggtgtgggtcgccgataagacgcaatcatttaacgcctggtggcgctaa

SEQ ID NO: 218177 - DNA, 900 bp, Klebsiella pneumoniae
atgtcgagattactcgctgcgataacacttccgctgagtatcgccttaaccatcttagtcaccattatctgctctgtaccgatcatcgtcgccgggctgattaaactgctggtccccattccagcggtatggcgctctatatccgttttttgcaattttatgatgtactgctggtgcgaagggctggcgctgctgttgcatctcaatccctggctaaaatgggacgtccagggtctggaaggcctgaacaaaaagaactggtatctgctgatcagcaaccaccacagctgggcagacatcgtggtgctgtgcgtgctgttccgcaagcatattccgatgaataagtacttccttaaacaacagctggcgtgggtacccttcattggcctcgcctgctgggcgctggatatgccttttatgcgccgctactcgcgcagctatcttattcgtcacccggagcgccgcggtaaagatgtcgaaaccacccgccgttcgtgtgaaaaatttcgcgcgcatccgacgactatcgtcaattttgtggaaggctcgcgttttaccgaagaaaaaaagcgcgaaacgcgctctccttaccacaacctgttaccgccgaaagccgctggtatcgccatggcgctcaacgtactcggttcgcagttcgataaactgctgaacgtcacgctgtgctacccggataatcatacaagaccattttacgatatgttaagcggccgcctgacgcgcattgtggtccgtatcaatctggtccctattggcgaagagctgcacggcgattacgttaacgataagaactttaagcgcagcttccagcgctggctgaatggcctatgggaagagaaagaccgtcagttgactgacatcatgagggacaaagagcggtag

SEQ ID NO: 218178 - DNA, 348 bp, Klebsiella pneumoniae; identical to SEQ ID NO: 182324

SEQ ID NO: 218179 - DNA, 1539 bp, Klebsiella pneumoniae
atgaatgacatctcttctgacgacatccttctgctgaaacagcgccttgccgaacaggaagcgctgaaccgtgccctgctggaaaagctggcagaccgggagcgcgaaatagaccatctgcaggcgcagctggataaacttcgccggatgaacttcggcagccgttccgaaaaagtctcccgccgtatcgcacaaatggaagccgatctgaaccggcttcagaaagagagcgatacgctgaccggtcgggtggatgacccggcagtacagcgcactctgcgtcagacccgcacccgcaaaccgttccccgaatcactcccccgcgatgaaaaacgcctgcggccagcaggttcctgctgcccggagtgtggtggtgcgctgagttacctgggtgaggatgccgctgaacagctggagctgatgcgcagcgccttccgggtgatccggaccgtacgggaaaaacatgcctgcacaaaatgtgatgccatcgtgcaggcccccgcgccttcgcgccccattgagcggggtatcgccggaccggggctgatggcccgcgtgctgacctcaaagtatgcagagcacacaccgctgtatcgtcagtctgaaatatacggtcgccagggcgtggaactgagccgttcactgctgtcgggctgggtggatgcatgctgccggctgctgtccccgctggaggaggcgcttcaggactatgtcctgactgacggtaaactccatgccgatgataccccggtccaggtgctgttgccgggcaataagaagacgaagaccgggcggttgtggacgtatgttcgtgatgaccgcaacgccgggtcagcgctggcaccggcggtgtggttcgcctacagccccgacagaaaaggcatccatccgcagacccatcttgcggggttcagcggtgtgctacaggcggatgcgtacgccgggttcaacgagctgtaccgcgatggccggataacggaagccgcctgctgggctcacgcccgccgtaaaatccacgatgtgcacgttcgcacgccgtcagccctgacggaggaagccctgaagcgtatcggcgaactgtatgccgtggaggcggaaataagaggaatgctggcggaacaacggcttgctgaacgtcagcggaaaacgaaaccgctgcttagtaccctggaaagctggttgcgtgaaaaaatgaaaacgctgtcgcgacactcggagctggcaaaggcgttcacgtacaccctgaaccagtggccggccctgacgtactatgcagaaaacggctgggccgaagccgataataacatcgctgaaaatgcgctgcggatggtcagtctgggtcgtaaaaactggttgttcttcggctcagaccacggtggtgagcggggagcgttgctgtacagtctgatcgggacgtgcaaactgaacggcgtggatccagaaagctaccttcgccatgtccttgacgtcatagctgactggccggtcaaccgggtcagcgagctgctaccctggcgcatcacactgccaactgaataa

SEQ ID NO: 218180 - DNA, 633 bp, Klebsiella pneumoniae
ttgaccaactggaattatcaactgacgcactttgtcactagcgcgccagatatccgccatcttcctgccgataccggtattgaagtggcgttcgccggccgctccaacgcgggaaaatccagcgcgctgaatacgctgactaatcagaagaacctggcgcgtacctccaaaaccccggggcgtacgcagctgattaacctgttcgaagtcgctgagggcaagcgccttgtcgacctgcccggctatggttatgcgcaagtacccgaagagatgaagatcaagtggcagcgcgcgctgggggaatacctggaaaaacgtctgtgcctgaagggtctcgtggtgctgatggacatacgtcatccgcttaaagatctcgatcagcagatgatcgaatgggcggtagagagcgatattcaggtgctggtactgctcaccaaagccgataaactcgccagcggcgcgcgtaaagcgcaagtgaatatggtgcgtgaagcggtactggccttcaatggcgatgtccaggttgaacccttctcttcgctgaaaaaatctggcgtcgataagctgcgacagaagctggatagctggtttaacgaaatcccgccgcaagaagccgtcgaagacgccgagtaa

SEQ ID NO: 218181 - DNA, 507 bp, Klebsiella pneumoniae
atgaaaaaaccgacatccgccacccgtggcaaatccggccgcaagtcgcgtgaagagttaaatcaggaagctcgcgatcgcaaacggcagaagaaacatcgtggccacgcggcaggcagtcgcgcgaacggcggcgatgcggcttcagcgggtaaaaaacagcgtcaggcgcaagatccgcgcgtgggtagcaaaaaaccgatcccgctgggcgtgagcgaaagcagcgttccagctcccaagcagcataaaccaaagagcgagaaacctatgctttcaccgcaggctgagctggagttgctggagaatgatgagcgcctggacgcgctgctggaacgtctggaagagggcggcaccctgaatgctgaagagcagagctgggtggacgccaaactggatcgcattgatgagctgatgcagcagctcggcctctcttacgatgatgaagatgaagaagaggaagagcgtcaggaagatatgatgcgtctgctgaagggtggaaactaa

SEQ ID NO: 218182 - DNA, 1374 bp, Klebsiella pneumoniae
atgtctgagcagataatcgactgggatctggccctgatccagaaatataactattccgggccgcgctatacctcgtatcccaccgcgctggagttttcaccgcaatttggcgcggcggaattcgatgccgctgtggcccgttacccacagcgtcccctgtcgctgtacgtgcatatcccgttttgccataagctgtgttatttctgcggctgcaataagatagtcacccgccagcagcataaggccgatcaatatctcgatgtccttgaacaggagatcatccaccgcgcgccgctgtttgccactcgccaggtgaagcaactgcactgggggggcggcacgccaacttatctcaataaggcgcaaatcagtcgcctgatggatctgttgcgcagctatttccatttcagcgcggaagccgagatctccattgaggtcgatccgcgtgaaatcgagctggatgtcctcgatcatttacgcgctgagggtttcaaccgcctgagtatgggcgtacaggacttcaataaagaggttcagcgtctggttaaccgtgagcaggacgaagcgttcatctttgatttgctcaaccatgcgcgggagattggttttacctcgaccaatatcgacctcatttatggcctgccgaagcaaacgccggagagcttcgcctttaccctgcaaaaggtcgccgagctcaatcctgaccgcctgagcgtgtttaactatgcgcatctgcccacgctctttgccgctcagcggaagattaaagatgccgatctgccctccgctgagcagaagctggagatcctgcaggaaaccatcggctcgctgacgacggcaggctatcagtttatcggcatggaccatttcgcccgtcccgatgatgaattagcggtcgcgcaacgtcacggcgtactgcatcgtaatttccagggctacaccactcagggcgataccgatctgctggggatgggcgtttcggcgatcagcatgattggcgacagctacgcccagaaccaaaaagagctcaagcagtactaccagcaggtagcagagcaagggaacgccctgtggcgcgggatcgcgttaactcgcgatgactgtctgcgtcgcgacgtgattaaagcgttgatctgtaacttccagctggatatcgcggcggtcgaggcgcagtgggacgtggattttgcgtcttatttcgccgaggatctgaagctgctggcgccgctggcgcatgacgggctggtggctgtggatgataaggtcattcaggtgacggcgaaaggccgcctgctgatccgcaacatctgtatgtgctttgatgcctacctacggcaaaaggcccgaatgcagcagttctcacgggttatttaa

SEQ ID NO: 218183 - DNA, 1410 bp, Klebsiella pneumoniae
atgcaacgagggatagcctggatcgttgatgacgatagctccatccgctgggtgcttgaacgcgcgctcaccggagccggcttgagctgcacaacgttcgcaagcggcaatgaggtgctagatgcccttaccaccaaaaccccggatgtactgctgtcagatatccgtatgcccggaatggatggtttggcgctgctcaaacagattaagcagcgccatccaatgcttccggtcatcataatgaccgcgcattccgatctggacgccgcggtcagcgcttatcagcagggcgcttttgattatttgcccaaaccttttgatatcgatgaagccgtcgccctcgtcgaccgggcgataagccactatcaagagcagcagcagccgcgaaatgcgccgataagtagcccaactgccgacatcatcggcgaagcgccagctatgcaggatgtctttcgcattattggccgcctgtcgcgctcatccatcagcgtgctgatcaatggcgaatccggtaccggtaaagagcttgtcgcacatgccctgcatcgccatagtccacgctcaaaagcgccgtttatcgcgctgaatatggcggcgatccccaaggacctgattgagtccgagctgttcggccatgaaaaaggagcctttaccggcgcaaataccgtccgtcagggtcgctttgaacaggctgacggcggtacgctgttcctggatgaaattggcgatatgccgcttgatgtccagactcgtctgctgcgcgtgctggcggatggtcagttttatcgcgtgggcggttacgcgccggtcaaggtcgatgtgcggatcatcgccgctacccaccagaacctggaacagcgcgtgcaggaggggaaatttcgtgaagatttgttccaccgcctgaacgtcatccgggtgcatttaccgccgctgcgcgagcgccgggaagatattccacgcctggcccgccattttctgcagatagccgcccgcgagctcggcgttgaagccaaacagctgcatccggaaacggagacagcgctgacccgcctggcgtggccaggcaacgtccgtcagctggaaaacacctgtcgctggctcaccgtcatggccgccggccaggaggtgctgactcaggatctgccgagcgaactgtttgagaccacgattcctgatagcccaacgcagatgcagcctgacagctgggctacgctgctgggtcagtgggccgatcgggcgttgcgatccggtcatcaaaacctgctctcagaagcgcaacccgaaatggagcgcacgctgctaacgaccgccctgcgccatactcaggggcacaaacaggaggctgcgcgcctgctgggatggggacgtaataccctgacgcgtaagctaaaagagttgggtatggagtag

SEQ ID NO: 218184 - DNA, 735 bp, Klebsiella pneumoniae
atgggacgctactccctcgatcgcgaaggcctagtctacgcccatgaaggcaacaaaggatttgccgaacttgtcgctgaaggcgcatacaaaaccttccctgcggacaatgacggcatcctgccgctgatggatgacgaatggtttgacgatgacgtcacctctcgcatcaaagagtttgtccgcaccgtctggggcgaagaacatttgcaggaaaatctcgaatttatcgccgaaagtctctgtttatacgcgatcagtcctaaaaaaggcgaatctgcgctggataccatccgtcgctatctttccacccggttctggaaagatcatctgaagatgtataaaaagcgcccgatctactggctgttcagctccggtaaagagaaagcgttcgagtgcctggtctatctgcatcgctacaacgacgtgacgctggcgagaatgcgtaccgaatatgtggtgccgctgctggcacgctaccaggccaatatcgatcgcctgaacgaacaggtcgatggtgcctccggcggcgaagccacccgtttgaagcgcgatcgcgacaatctgagcaagaaattcaacgaactgcgcagcttcgacgatcgcctgcgtcactatgctgatatgagaatcagtattgatctcgacgacggcgttaaggttaactacggtaaatttggcgatctgctggcagatgtaaaagccattaccggcaatgcgcctgaggtgatgtaa

SEQ ID NO: 218185 - DNA, 2598 bp, Klebsiella pneumoniae
ttgcaaaatcaggaatttattgccggccttaaagcaaaattcgccgaacatcgcatcgttttctggcacgatcccgataagcgtttcctcgaagagctgggtaatctcgaactggagaacgtcacgctgctcgacatgtccgaccagtcgcagctggcggttaaaaagcgcattgaaattgatgagcctgaacagcagtttttgctatggttcccccacgatgtgcctcccaaagagttcgactggcttctggatattcgtctttatagtacggagttccatgccgatttcgccgccatcacgctgaatatgttaggcattccgcagcttggcctacgcgagcatattcaacgccggaaggcatttttcagcactaaacgtcttgctgccttaaaaggcctggtcactgagcaggaaaacgaagcttctcttgataagaagatggttgcggtcatcgttggcgtaaaaaccgcaaaaacggaagagattctgttcagcctgattacccaatacgttcatcagcaaaaagatgacgacagcgacctggaaaacacgctggcaatgctgaaacgccacgatcttgaaggtgtactgtgggccattcttaatcaggaaatgggctaccaggccgaacatccttcgctggaaaacctgatcctcaaactgttctgtaccgatctttccgcacaggctgatccgcagaaacgcgaatggctggaaaaaaacgtgctgaccacgccgtcaggcagagcctccgcactggcctttatggtcacctggcgtgccgaccgtcgctacaaagacgcttatgattattgtgcacaacagatgcaggatgcgttgcgaccagaagaccagtaccgtctcagttcgccgtatgatctgctcgagtgcgaaaccacgctgagcattgaacagaccgttattcatgcgctggtgacgcaacttctggaagagagcaccacgcttgaccgtgaagccttcaaaaagcttctgtccgaacgacagagcaaatactggtgccagacgcgtcaggaatactacgctatttatgatgcgcttcgtcaggctgagcggctgctgaatctgcgtaatcgtcatattgacggtttccactatcaggacagcgcaacgttctggaaagcttactgcgaagagctgttccgctttgaccaggcctaccgcctgtttaacgaatacgcgctgttggttcacagcaaaggcgcaatgatcctgaaaagcctggatgactatatcgaagcgctgtattccaactggtacctggcagaattaagccggagctggaataaggttctggaagccgaaaaccgtatgcaggagtggcgtattgcgggcgttccacggcagcagaacttctacaatgaggtggtgaagccacagtttaacaatccacaaatcaagcgtgtgttcgtgattatctccgatgcgctgcgttatgaagtggcagaagagctgggcaaccagatcaataccgagaaacgctttactgccgaactacgttcccagttgggcgtgttacccagctatacccagctgggaatggcggcattgctgccacatgacgagatctgctaccaggcgggtagtggtgacatcgtttatgcggacgggttatccacctcaggtacgcctaaccgcgataccattctgaagaaatataaagggatggcagtaaaatcggacgaccttctgaaatggaaaaatcagcaaggacgagatcttattcgcgattacgaagtcgtttatatctggcataacaccattgatgccatgggtgacagcgcatctacggaggagaagaccttcgaagcgtgccgtaacgcggtggttgaactgaaggatttagtgacacgggtgataaaccgtctccacggtacacgcattatcgtcacggcggaccacggtttcctgttccagcagcagcccctttccgggcaagataaaaccacgctgcagatcaagccagacaatacgattaaaaaccacaaacgctttattatcggccaccagcttcctgccgatgatttttgttggaaaggaaaagtggcggataccgcaggcgtcagcgataacagcgagtttctgattccgaaagggatccagcgtttccatttctcgggcggcgcgcgatttgtgcatggtggtgccatgctgcaggaagtctgcgttcccgtattgcaggtgaaagcgctgcagaaaaccgctgccgagaagcaacctcagcgtcgtccggtagatatcgtgaattaccatccgctgatcaaactcgtcaataacattgataaagtcagcctgctgcaaacccatccggtaggtgagttatacgaaccacgaaccctgaacatctttatcgtcgacaacgccaataatgtggtatccggtaaagagcgaatctgctttgacagcgataacaacacaatggaaaaacgtgtgcgtaacgttacgctgaagctgattggcgcgaatttcaatcgccgtaatgagtactggctgatactggaagatgcgcaaacggaaacgggttaccagaagtaccctgtgattatcgatctggcatttcaggatgatttcttttaa

SEQ ID NO: 218186 - DNA, 2085 bp, Klebsiella pneumoniae
atgcaaacccatcatgacttacccgttccagccgtctccgaaggggaactcatcgcagaaggttacgatctggacgccttactgaatcagcattttcgcggtcgggtagtgcgtaaagatctgaccaagcagctcaaggaaggggctaacgtcccggtctatgtgctggagtatctgctcggtatgtactgcgcttccgacgatgaccagatcgtcgagcaaggattgcagaacgttaagcgcattctggcggataactacgtccgccctgatgaagcagagaaggtgaaatcgctcattcgtgagcgaggatcctacaagatcatcgataaagtgtcggtaaagctcaatcagaagaaagacgtttacgaagcccagctctccaacctcggcattaaagatgcactggttccgccgcagatggtcaaggacaacgaaaagctgttgaccggcggcatctggtgcatgatcaccgtgaactacctctttgaggaaggacagaaaacgtcccccttctctctgatgacgcttaaacctatccagatgcccaatatggacatggaagaggtatttaccgcacgtacacacttcaaccgcgaccagtggattgatgtcctgctacgttccgtgggtatggaaccggccaacattgagcagcgaactaaatggcacctgatcacccgcatgatccctttcgtggaaaacaactataacgtctgcgaactgggcccacgcggcaccggtaaaagtcacgtctataaagagtgttcgccaaactcgctattagtttccggcgggcaaaccacggtagcaaacctgttttacaacatggccagccgccagattggcttggtcggcatgtgggatgtggtcgcgtttgatgaagtggcagggatcactttcaaagacaaagacggcgtgcaaatcatgaaggattacatggcgtctggttcgttttcacgcggcagagattcgattgaaggcaaagcatcgatggtgttcgtcggcaacatcaatcaaagcgttgagacgttagtcaaaaccagccatctgttagcccccttccctgccgcgatgatcgacacggcgtttttcgaccgtttccatgcctatatacccggctgggaaatcccgaaaatgcgcccggaattctttaccaatcgctacgggcttatcacggattacctcgccgaatacatgcgggaaatgcgtaagcacagcttctccgatgcgattgataaattttacaaactgggtaataacctcaaccagcgcgacgttattgcagtaaggcgcacggtttctggtctattgaaacttcttcatcccaatggctcttacagcaaagaagatgtccgggtttgtctgacctacgcaatggaagcccgtcggcgtgtcaaagaacagcttaaaaagctgggcggactggaatttttcgatgtgaatttcagttacatcgataatgagacgctggaagaattcttcgtcagcgtgccagaacaaggcggtagcgaattaattcctgctggcatgcccaaacctggtgtagtgcatttggttacgcaagcggaaagtggcatgacgggtctataccgcttcgaaactcagatgaccgcaggcaacggtaagcatagcgtttctggtctgggatcaagcacctcggcaaaggaagctatccgggttggatttgactatttcaaaggcaacctcagccgcgttagcgcaacagcaaaattttctgaacatgagtaccacctgcacgtagtcgaattgcacaatactggaccaagtaccgcgaccagtctggcagcacttattgcgttgtgttccgttttactggcgaaacccgttcaggaacaaatggtcgtcttaggtagcatgacgctcggtggagtgatcaaccctgttcaggatctggcggctagcttacaacttgctttcgacagcggcgcgaaaaaggtccttttgccgatgtcttccgcagtagatattccgacggtgccagccgagttgtttaccaaattccaagtcagtttttactctgaacctgtggatgcggtttataaggcgttgggggtaaactga

SEQ ID NO: 218187 - DNA, 1350 bp, Klebsiella pneumoniae
atgaaactaattgcaaatggattgaataagcagttttttagttcttttctacctccatcggattgtgaaattgacggtgtcgtagcagcaatagcctatgctgatgataaaactacgcttcttgaccattgtctaaaaaatcaccatcgccttgatatctggatgcgatatgatcatactgttccggttgcaccctcttttttatcaaaattgcttattaatacgaagaacaacatcttttgtaagctggtacccgactgccttcatagtaaagtcatctggtggaagggctatggggcatacattggttcagcaaaccttaccgatcgcgcatggaatatgaacattgaagcaggtgtcttctatactgaaagtgatttgtacaactcggacttaatctcgcaattagaagattttttcgataatttagcatttcttgattgttgtattgacctcagtcaggaaatcatcgacgaacaaaagaagctacaaaaattaaaaatagagaaagataaaaaagaactagagcttataaaaaaacgtcgtgtacctgtttggggcggtgtgagtaattatgacaagccaaaagcaaatgataaaagaaaagatagtttccataaagaatgggacagtacactttccgtaatacgaaatatatccagccaaataaatgacttcaggcctaattgggtcgctaaggacacacctgcattttggcaaactgatcagtttttacatgcgtattattacaatcaagtccatcaaaatgataaaacttatccttttgaggattatcaccaagctaatagtaaagacccccaagctgcacttatgaatatgttgtcatggtggaagagcctctctgggcctccatctaatgaagatatcaacctaggaatttacgctccttatattcgtgaacacttatcaaaaagcaaaattagttcattgactgaggataatcttcataacatattcttctatacgcatgcaacgatggaccatgtgataaaaatgagtactgaaacgtttggcctgtctgcccaaaattccataaacagggaagaacgtgccattttattcaccaaatggatcatgagccagaccaatcaaaaaggtatgactattgctgaattactcaactatgtcctctacggtggaaaacctgcattaatgtgggaaaggatctatctggcaggaaaagacgaggagtacaaattccaacattacggtattaactctattgctgaagtggtcggttgggcaaggccagaagatacgcctcccagaaatggcagaaccaataaagccttgcgagcattaggctatccagttcgcgtaaatatttag

SEQ ID NO: 218188 - DNA, 1008 bp, Klebsiella pneumoniae
gtggcgactaaaatgtggatgatccgcggtgatggcggaaaattgtacgatgacttcagagacaagcaggttgttgctatcggctggtcgcagctcgctccctatgtgaaaccgggatgctcaagagagcagttgtttacccggtatcaggagcttgagccacagactaagccaggcacagttcgttccggtgcttcccaggtctggcgctttgtgaatgagatgcagaaaggtgactgggctatcacttattcaccttctaatcggacttatttgatagggaaaatcgcgtcagattttgagtttcatgccgagtggcttgaagatggcatgggcattgcgcgtaaagtgaagtggaatgcggaagagatcaagcgcgatagtctgagtgatgcaaccagaaacacccttggctcaacactgacggtttttcaggtgcctgattttgccgtgaatgaattagtgcagggcaaaaagcctgtctcagatgtggtgccggaagtacctgtttcaggtgaggaggatgaggttgtttctaatcctctgcgcgacatggagatgatcgcttttgaaggtatcaaggatcgtatcaaccgtctcgactgggatgagatgcaaaatctggtcgcaggcgtgttacgtagtatgggatataaaactcaggtatcgcccgctggtgctgaccgtgggaaagatattattgcttcccctgacggcttcgggttcgaaaatccgcgcattattgtggaagtgaagcaccggcgggaacagatgagcagccagcaaattcgtagcttcatcggtggtcgtcataaagacgatcgcgggctgtatgtcagtaccggcggattcagcaaggatgcgcgctatgaagccgatcgttcaacaatcccgttgacgctatggacgttggacgatttggtccgtgcgttagtggaaaactatgagcaagtggatattgaaactaagctgttggttccgcttaagaaaacgtatttgcctgcatga

SEQ ID NO: 218189 - DNA, 3516 bp, Klebsiella pneumoniae
atggatgaaaatgctttagggtttgcctcatactggcgcaactcgctggcagatgctgaatcaggaaagggcagttttgaacgcaaagacgccaaaaatttcactcactggcatgggatagcggcgggacgtcttgacgaagcgatcgtcgataaattttttgaaggagaaaaagacgacgtcgaaacagtcgatgtcatcttgcggccaaaggtttatttccggttactgcagcatggaaaggaccgttccgctggtgcgcctgatattgttaccccgatagtgacgccagccctgttgagccgtgaaggttttttatatccgacgccagcgacctccattcccagagacctgcttgaacctttgccaaaaggggcattttcgattggtgagattgagcagtatgacaaatacaaaacgacacatacgtcattctctatcaactttgatgacagcgttgataacactgccgaaacggatgaagaacgagaagcacgatatgccgtctggcagcaggattggcgtcaatatctggatgattcagagaggctactgaagaacgttgtcggcgactggattaaaaatcccgagcaatatgaactcgctgagcacggttatattgttaaaacggcgcaatctggcggcgccagtttccatatcctttcgctttatgaccacctgcttgtttgcaaaaaggatgtgccgcttttcaatcgtttcgcctcgcgggaggttcatgcagcagagtctttgctcgctccggaagcaaaattcagcgacaggcttggacactccggagataagttcccactggcaaaggctcagcgcgatgccttaagccattttctggatgccaggcatggcgatatccttgccgttaacggccctccgggaaccgggaaaaccacgctggtgctttctattatcgccactcaatgggccagagcggctctcgaaaaagcggaacctccggttattatcgcgacttcaacgaataaccaggctgtaacgaacattatcgaggcgttcgggaaagacttttcccagggtactggtgcaatggccggacgatggttgccagagctgaaaagcttcggtgcttatttcccctcaagcactcgtaaagccgaggcagccaaaaaataccaaactgaagatttcttcaaccaggttgagtcaaaagagtatgtagaggatgcactgctgttttatctggagaaagctaaggcagcctttcctaaaaaagattgttcatcccctgaaaaggtcattgaactcctgcatggccagttggcagaaaaattcgaacaactggtaagactgaacgcaacatggcaaacgttaagccagattcgggaggcgcgagagcttattgctaatgacattgagcaatatctcactaatctaaataaattactctccgggcaagaacaaaaagtcactctgctgaagagtgctaaaacggaatggaaaaaatatcgggccagtgaatccctgatctattcattattttcctggcttccggcggttcgcagtaagcggcagtaccaaatacaactgtttctcgaagataaattaggtgcgctgattgcgggaaatcagtggtctgatcctgaaaccatcgaacgtaatatagatggactgctcaactccgctgagcgcgagcaaacaacataccggcagcagattgactccgctcatgaaattgttcttaaagaacagcaggcggctcagaagtggcagaatctggcacttgatttagggcatgagggcgacgaggagctgagcttctcacaggcagatgaactggctgatacgcagattcgcttccctgcattcttacttacgacccactactgggaaggtcgttggctaatggatatggcgaagatcgatgatctgcaaaaagagaagggcaagaaaggagctaaaggggtaaccgcccgctggcaacgccgaatgaaactcacaccatgcgtggtcatgacttgctatatgctgcccggcaatatgcagataagtgaacacaaagggcagcgtaaattcgagaaaagctatttatatgacttcgctgatttactcatagtcgatgaagccgggcaggtgcttcctgaagtggctgcagcctcttttgccttggctaaaaaggcattagtgattggtgatacggaacagatcccgccaatatggagtattgctcccgctattgatataggtaacatgctggcggaaaaaattctgtcaggtagtacgcaagaagagattactgagaaatatacggcaatcgcagagcttggtaaaagcgccgcatctggtagcgtcatgaaaatagcgcagtgtgcttcacgctaccaatatgatcccgaactggctcgtggtatgtacttatatgagcaccgccggtgcttcgataatattattggatactgcaatacgctctgctatcacggtaagttgttgcctaaaagagggtgtgaagagagcaatttaatgcccgccatgggttatctccatattgatggtaaaggagagctggcaagtagcggaagtcgatataatttgcttgaggctgaaacgatagctgcctggctgacagataaccagcaagatattgaagcgcattacggcaaatcgcttcatgaggttgtcggaatcgtgacgccttttagcgcgcaggtatcgaccatcaaacaggcgctgggtaaacaaggcatcagcacaggcgcgaatgaaacgtccctcacggtgggcaccgtgcattctcttcagggggcggaaagagcgattgttatattctcgccagtctattcaaagcatgaggacggtgggtttattgatagtgataacagcatgctgaacgttgctgtctcccgtgcgaaggacagtttcctggttttcggcgatatggacctgtttgagatccagccagcctcatctacgcggggattactggcaaaatatctctttgagtcagagaagaatgcgctcacttttgattataaagagcgtaaggatttaaaaacttccgagaccaaaatctacacactccatggtgtggagcagcatgataatttcctgaatcagacgtttgaaaataccggtaaacacatcacgatagtttctccatggctgacctggcaaaaactggagcaaaccggttttcttgattccatgattgcggcgtgttcacgtggtattaatgtcacgatagtcactgacagaagctacaacactgaacatagtgattttgagaagcgaaaagagaagcagcagaacctcaaagcggcgctggagaaactgaacgcccttggtattgcgacaaaactggtcaatcgtgttcatagcaaaattgttattggggatgatggtttgctgtgcgtgggatcgttcaactggtttagcgcgacacgtgaagcgcgatatgaacgatacgatacatcgatggtttactgtggtgacaacctgaagggcgagattgaggcaatttacaatagccttgagaggcgtcaggtttag

SEQ ID NO: 218190 - DNA, 780 bp, Klebsiella pneumoniae
ttgaatagctcggaagacgatttgcttgaagtggcgtggtatttgtcgaagtacggtaaatctcaaccacccgtgggactgggtgtccagaaatggaaagaggcttatgcctcgttctatcctcgttttggagcgggcaaaagcgccagtaagtttcacaatagtctgaaaaatagccgtgatcgttttgattcatggcttaccgatgagcgcatcggctggcgggacgggcaaggtgctcctgatgcgctgtctcattcagcgcagcgtgtgcatcagcgattgagtatgctttcagacagtgcgattgagcagcgcgttctttcgttaatatcttctcatggagatgaacaggcgcaacgtgactgtcttattattcagcaggataaaagtattgaagataccgtacgcgagcagctgattgcggcacgactggggcaggggacctttcggaaaaattgtctcatgttgtatccggcatgccctgttacgggaatgacttttgcgccgttactccgcgccagccatataaaaccgtgggccgcctgcgagaatgggagtgaacgccttgatccgtttaatggaataatattggctgcgcacattgatattttattcgatcagggatggatttcgtttgagaacgatgggcgtttgttaattagtcaggagctggatattagtgttaaagagcagtgttttttgccggaaaaaataaaggcgttttctgttgaatcgtattgttatctggagtggcatcgggagaatttactaagatag

SEQ ID NO: 218191 - DNA, 1308 bp, Klebsiella pneumoniae
atgcaagcactgaaaattgccgttatcggcggcggcagcagctacacgccggagcttattgaagggattatcgttcgttacgagcagcttccggttacagagctggcgctggtagatgtcgaatccggccgggaaaaggtggagatcatcgccgcgctgacccggcggatgctgaaacataaagggctggagcaggtggcggtcagcgtccactttacgctcgatgaggccatccgcggcgccagctttgtgctgacccagctgcgtgtcggacagctggcggcgcgcgccgccgatgagcggctgggtctcaagtaccacctgctgggccaggagaccaccggcgtcggcggttttgccaaggcgctgcggacgatcccggtgatccttgaggtggcgcgcaaagtggaacagctggcgccggaagcgttcattctcaactttactaatccggcggggatcgtcaccgaggcggtcagccgctacagcaaggcgaagatcatcggcctgtgcaacgtgccgatcaacatgcagcacatgatcgtcgggatgctgggcgcccaggagtccgaagtaaaactgcgctttgccgggctcaaccatatggtttgggtgcataaggtgctacaggggcgcgaggatgtcaccggcaaggtgatcgacatgctgtgcgacggtaaggcgctgtcgatgaacaacattaaagagctgccgtggccggcggaattcctgcgtgcgctgaaggcgattccgtgcccctatcatcgctatttttggctgacgccggcgatgctggcggaagagatcgccgcggcgaaaaccaagggcacccgcgccgaacaggtgatgaaagtcgagcaggagctgtttgcgctgtacgccgacccgcagctggaagaaaaaccggagcaactgagctttcgcggcggcgcctactactcggaggtggccgtcgagcttatcaacgcgatctacaacaacctgggcgcggagatggtggtgaatacccgcaacaacggcgcgattcatggcctggatgatgatgcggtggtggaaaccaacagcattattgatgcgcaaggggcgcggccgctggcgttcggcccgctgccgccggcgatgaacggcctgacccagcaggtgaaagccttcgagcggttgacgattgaagccgcggtacacggctgtcgcgaaagcgcactgctggcgctggtgaccaacccgctggtcggtaacgtcaccgatgcccaggcgctgctggatgaagtattaaccatcaaccgtcaatggctgacgcaatttaactga

SEQ ID NO: 218192 - DNA, 465 bp, Klebsiella pneumoniae
atgaattatcaccagtactaccccgtcgacatcgtcaacggccccggcacccgctgcaccctgtttgtctccggctgcgtccacgagtgccccggctgctacaacaaaagcacctggcgggtaaactccggcatgccgtttaccactgagatggccgatcgcatcatcgccgacctcaacgatacccgcatcaaacgccagggaatttcgctctccggcggcgatccgctgcatccgcaaaacgtcgcggagatcctcaatctagttcagcgcgtgcgcgccgaatgccctggcaaagatatctgggtgtggaccggctataagcttgatgagctgaatgacgcgcagatggaagtcgtgaacctgattaacgtgctggtcgacggtaagtttgtgcaggatttaaaagacccggcgctgatctggcgcggcagcagcaaccaggtggtacatcatttgcgttaa

SEQ ID NO: 218193 - DNA, 741 bp, Klebsiella pneumoniae
atgaaactgaccccaaacttttaccgtgaccgcgtgtgcctgaacgtcctggcgggcagcaaagacaacgcccgtgaaatttacgacgcggcggaaggtcacgtcctggtcggcgtgctctccaaaaactatccggacgtcgccagcgcggtggccgatatgcgcgactacgcgaagcttattgataacgcgctctccgtcgggctgggggcaggcgatccaaaccagtcggcgatggtgagcgagatttgtcgccaggtgcagccgcagcacgtcaaccaggtcttcaccggcgtggccaccagccgcgcgctgctcgggcagaacgagacggtggtcaacggcctggtctctcccaccggtacgccgggaatggtgaagatctccaccggcccgctgagcagcggcgcggcggatggcattgtgccgctggaaaccgccatcgcgctgctgaaagacatgggcggcagctcaatcaaatacttcccgatgggcggcctgaagcaccgcgccgagtttgaagccgtcgctaaagcctgcgccgcgcacgatttctggctcgagccgaccggcggtatcgatctggaaaactacagcgagatcctgaaaatcgccctcgatgccggggtgagcaaaatcatcccgcatatttacagctcgattatcgataaagccagcggcaacacccgcccggccgatgtgcgccagctgctggagatgaccaaacagttagtgaagtag

SEQ ID NO: 218194 - DNA, 1119 bp, Klebsiella pneumoniae
atgccttcgatttttgagaaataccatttaaaacaggtgattaatacttctggccgcatgacggcgctgggcgtttccacgccgcgcccggaagtggtggaagccgcgatggcaggtatgaaccagtactttgaaatgaaagacctggtgaataaaaccggcgagtacatcgccaaactgttggatgtggaaggggcgaccgttgtctcctgcgcgtcggcggggattgcccagtcggtagcggcggtgctggtgaaagacagcgactggctgctggagaacctgcacgttacgccgattgagaataacgaaatcgtgttgccgaagggccacaacgtcaacttcggcgcgccggttggcaccatggtggcgttgggcggcggtaagctggtggaagcgggctacgccaacgaatgttctgctcaacagctggcggcggcgatcactccgcgcaccgcggcaattctgtatatcaaatcccaccactgcgtgcagaaaagcatgctcaacgtggcgcaggccgcggaagtggcgcgccagcataacttgccgctgatcgtcgatgcggcggcggaagaagatctgcagtgctactaccgcatgggcgccgacctggttatctacagcggcgcgaaagcgattgaagggccgaccagcgggctggtgatcggcaaaacgcagtacgtcgagtgggttaagcgccagtcgatggggattggccgggcgatgaaagtgggtaaagagggcattctcggcctgacctgcgccattgaacactacctgacggcgagcaaagagagcggtcagcagatggtggcgaagatgacgccgtttatcgaacagctcaacacgcttaacggcgtgaccgcccgggtggtgtgggatagcgcgggtcgcgatatcgcccgcgccgaaatcaaatttgatgaagcgaccaccggtgtgaagaccggcgatctggttaacgcactgaagcagggcgaatatgccatctacttccgcggctataaagccaacgagggcattatcgaagccgatgtccgcagcgtaaacgcgcagcagctggcggtggtcgctcgccgcatcgcagaagttctgaataaggagaaacaagcatga

SEQ ID NO: 218195 - DNA, 1134 bp, Klebsiella pneumoniae
atgtttgatttactcctgcgccgcgcgcgcctcgtcgacgataccctgactgatatcgccattcaggacgggaaaatcgcggcgctgggcgagattagcgcgccctcccgtaaaaccattgagctgaacggcaaggtttacgtcagcgctggctggattgactctcacgttcactgctacccgaactcaccgatttatcacgatgagccggatagcgtcggcatcgccaccggcgtcaccaccgtgatcgatgccggcagcaccggcgccgacgacgtcgatgacttctatcaactgacccgtaaagcggcgacggaagtttatgcgctgctcaacatctcccgcgtcgggctgattgcgcagaatgagctggccaatatggccaatatcgacgccgccgcggtgaagcaggcggtgcagcgtcatcgcgactttatcgtcggcctgaaggcgcggatgagcagcagcgtggtgggcgaaaacggcattacgccgctggcgcgcgccaaggccattcagcaggaaaacgacgatctgccgctgatggtgcacatcggcaataacccgccgaacctcgatgaaatcgccgatctgctgagcagcggcgacatcattacccactgctataacggcaagccgaaccgcattctgaatcctgccggcgagctgcgcagctctattactcgcgctctgcagcgcggcgtgcgtctcgatgtcggccatggcaccgccagcttcagctttgaggtggcgcggcgggcgattgcgctgggcattctgccgcacaccattagctccgatatttactgccgcaaccggatcgacggcccggtgcgctcgctggcgctggtgatgtcgaaattcctcgccatcggcatgacgctgccgcaggtgattgactgcgtgaccgtcagcgccgcagaagggctgcgcctgtcgcgtaaagggcggctggaagtgggcttcgacgccgatttaacgctatttcgcctggagcaccggcccacgctgctggtggatgctgaaaaagagagcctgcaggctgacaacattctggtgccgctggccgcgatccgcgcgggcaaaggctatctgaccgaacaagggagcgcggaacatgccttcgatttttga

SEQ ID NO: 218196 - DNA, 702 bp, Klebsiella pneumoniae
ttgaacgtcaaaactttcaatgttttctgtgatgagtcctgccatttattgaatgatcatcaagaagtcatggttataggcgctacatggtgccctgattcaatcacaaaaaaaattggtcgggatataagggctataaaagttaaacatggtctaagtcaagatttcgaaattaagtggactaaagtttctaactctaaaattgatttctatcttgatatagttgattattttttttccaatcaggcattgcgctttagagctgtagttgttcctcataagagtcggttagatcatgacagatttaatcaagatcataatacattttattataaaatatgtttttatttgcttaaaaatattattgaaaaccaaaatttttatcgtatttatctagatataaaagatactcttggcatagaaaagatcgaaaaacttagaagtgttcttcataatgctggatacgattttaaccgtgaatcagttcagcgaatccaacacattcgctcacatgaagttcagcaactacagttagctgatctattcattggggccttaggatatcttcacagaggtttgaactctaatgaaggaaaggttcaactaattgaaagaattcgcagttatacaaatagagatcttctaagaagtactctcccaactgagcgcaaatttaatgtttttgtttgggagtcacgttaa

SEQ ID NO: 218197 - DNA, 288 bp, Klebsiella pneumoniae
atggctgatttgcattctaccccagatatcaccgttagcggaaccgagcgtcggctgctggttggctatcgacccaatggccgggatatcagtacaccaagtcttcccctttctggcaagtggctacgcgaagcgggattcggtaccgggaagccggtcacggttaaggtgatggatggctgcattgtgttgttaccgctcagcgataaagaagagaagctaacagccgaattacggcatattcaacaatctttgaaaagcgtcaacagcacactgcaacatgcctga

SEQ ID NO: 218198 - DNA, 276 bp, Klebsiella pneumoniae
atggcaaaggaaactataacgtcgtccccagcaggtgaattcattatgtttgccagtagtgatggggaagtgcgcgttgaatgccgctttgagcaagaaacactatggctccctcaggcaactatcgccagccttaatcaagtcaccccccaagccgttacacggcatattaaagcgatctatgaggaaggcgagcttgagcaaaacgcaacctgtgagtcttacttacaagttcaacaagaagatagccgtcagggatcagttccggcaatttaa

SEQ ID NO: 218199 - DNA, 1098 bp, Klebsiella pneumoniae
atgaagcaagacgttatcctggtcctcgactgcggcgccacgaacgtgcgggcgatggccgtggatcgacaagggaacattatcgcccgcgccgcaacggcgaacgccagcgacatcgcggcggaaaaaagcgactggcaccagtggtcgctggaggccattatgcagcgctttgccgactgctgtcggcagatccatgaccagctggcctcctgcacggtgcgcggcattaccgtcacgacctttggcgtcgatggcgcgctggtagatgagaagggcgccctgctgtatccgatcatcagctggaaatgcccacgcaccgcggcggtgatggagaatatcagccagtatatgcccgcgcgccagctgcagcagatagccggcgtcggcgcgtttgcgttcaacaccctgtataagctggtgtggctgaaagagaaccacccgcagctgctggcgcaggcccatgcctggctgtttatttcatcgctaatcaaccatcggctgaccggggagttcaccaccgacctcaccatggcgggcaccagccagatgctcgatctccggcagcgcgatttcagcgcgccgatcctgcaggcgaccggcctgccgcgccgcctgttcccgcggctggttgaagcaggccagccgatcggcgccctgctgccggaggccgctgcgctgctgggccttcccgtcgggatcccggttatctcggccgggcatgacacccagttcgctctgtttggcgccggcgccgggcaggatgagccggtgctctcctccgggacctgggagatcctgatggtacgcagcgcgcaggtcgacacctcgctgctctgtgactacagcggctccacctgcgagctggacagccagccgggccgctataacccggggatgcagtggctggcctccggcgtgctcgagtgggtgcgcaaactgctgtatagcgctgacaccccatggcagacgctgattgacgaagcgcaggcgatcccgcccggcgcccagggcgtcaggatgcagtgcgacctgctcgccagccagcacgccggctggcagggcgtcacgctcaacaccacccgcggccatttttag

SEQ ID NO: 218200 - DNA, 609 bp, Klebsiella pneumoniae
atgtctgaaacaataatagctgaacatactgccgtccggattaacagaacgatgctggccggctaccttcatcagtcgttgcagcaggtctgtaaactggcctccggtctgaaaatcctcaggctgccagccagcgacacgacccgaagggcgacgatactcacagagccggtctacgctgccgccaggctacgccttgcccaacagcagcctctggcgcagaacccgctctgcgacgacgtgctgcgacgctttcgtcatgcacccggcctgacggcggatctgcccgatctcattgataccatgcgtagcgtgacgctgccggtctggtcacgcctgcgtcgcgacgggcatagcgacgatgttgccctccgtcaaactctgctacatatcctggcctggaagagtgagtcatcctggttgcaggatcaggcgcaaagggttctctggcagggcggcgtgctgggtgaaaaagggggccgcgtactcgtctcccttgatgatgaagccgccctccggggcgccgggttctgcgggctgagtgaactgctcatcaccacaggctttttagtccactttccggtcggccctcagttttctgaagagtaa

SEQ ID NO: 218201 - DNA, 849 bp, Klebsiella pneumoniae
atgaaattactcagtttttgcgtaagcaacatacccagctatggtttgctgcgggaggatggcgttgtcgatttaacccggcattttctgcaatatccatcgctgaaatcttttctggcggcaatggacaatatcccggcagaaatgctggcacatatgccagtcgattataccctcgatgagatcgcgtttttgccgctgatccccgacccgcagaagatcctctgcgtcgggatgaactatcaggcaaaacggctggagtttaatgaacaggatcccgatccgacgctgtttatccgtttccccgattcccagtgcgggcatctgggcgagatcattaaaccagccgccagccacgagtttgattatgaaggcgagctggcgctggtaattggcaaacgcgggcgcaatattcccgtcggacgggcactggaacatgtctctggctacagctgctatatggacggctccgcccgcgactggcagcacgcctggtttaccgccgggaaaaactggccgtcgaccggcggcttcggcccctggctggtgacgcgggatgaaatcgccgatccgaatgcgctggatatcaaaacccggcttaacgggatggaagtgcagaacgacaatacctccagcatgatccaccacgtccccgagctgattgcctacatcagtaccttctgtctgttgaccccgggggacgttattctgaccggctcgccgagcggtgtggggaaaaagcgtaccccgccgctgtttttgcgggacggcgatatcattgaagtggaaattgagaagatcggctgcctgcgtaaccatatcgttgatgagaggccggaatctgagtga

SEQ ID NO: 218202 - DNA, 381 bp, Klebsiella pneumoniae
atgaagcatgagggtatatatttagcatttgttaatgatcttgaaaaaaaaatgaaagaagtaacattaacgttagaggatgaaagcaagagtgactggttgtttcctaatccgatgccttttggtctggagcctgtgatgacgcagccgtgggtacgggcgcgttttgggttgccgatgatttatgttgatgcgaaagtggttatgacgctctatagaggagtaaaggagttttatccgctattagctcctgatcaaaatatagttgcgtcatttagctataataaagatttttttgttgaaagtgtgactttttatccgctggagcgagccaaagaaattcaggttgcgctggagaaaaagcgacttggtcgcaaatga

SEQ ID NO: 218203 - DNA, 894 bp, Klebsiella pneumoniae
atgaggaaattaatcgtagttgcttctgttgccgccagtttactgctcgggtgtgaccagaaaagtactggcaagcgtgaaaccttgtctgaagcgcttgttgctaagtcgctctctaacatggttcccgttcagggcggcgagtttttaatgggggattttggcccattagtcggtgaaaaactgcctttcagcataaaccaggatgataaggtattacataaggttgtattaagcgatttttcgatatcaaagtttaaagttaccaacgatgattataataaatatctgcagataacaggaataaaaaaacctcccattaatattctggtaaaagagtacccatccttgcaaaaagatgattactctgttggtgtgacctggcaacaggcaaaagattattgtcagtggctaggtaaggagtccgataaaaatattgatttaccgacagaagcacaatgggaatatgcggcaaggtcaagagggcagtatcttcctttttcgactaataatggaaatttcgagcttggttctaatatacctgaacaaaagaaattagatgaatacacagatggttatggttttcctatttatccaattgggaaatatcctccgaatccgctaggtttatacgatatggggctaagtggagccgaatggagtaatgattggtattcaactgattattattcccactcccctgtttatgatcctcaaggtccagttaagggtaatgaaaaagttttaagggggtatgttggcggagatcgtcagtatgccttgactatattcaggcaatcgtcacaacctgtgccaaaatttgctgggcgtgatgattatcaaaagtttggagttagtcctctttttgtatttcgttgcgttattaataaataa

SEQ ID NO: 218204 - DNA, 354 bp, Klebsiella pneumoniae
atgataaaattaatcgtagttgcttctgttgccgccagtttactgctcgggtgcgatcagggaaataccaccgggagtgaaaaagcagctaaagcacttgtggataaatcggtctctaatatggtccctgttcagggtggtgagtttttaatgggtgattttggtccattagttggtgaaaaattacttttcagcatacaacaggatgataaaactttacataaggttattttaagtgatttttcgatatcaaaatataaagtcaccaacgatgattttaatgtttatttgaaagtaacagataaaaaaatccacctgtggatatactggcaaaacgtcatccttctctgctaa

SEQ ID NO: 218205 - DNA, 972 bp, Klebsiella pneumoniae
atgattagtggtgtgttatacgccctgctggcggggctgatgtggggtttaattttcgtcgggcctttgctggtgccagagtatccggcgatgctgcagtcgatgggacgctatctggcgctgggcctgatcgctctgccgctggcgtggctcgggcgcgcgcgactgcgccagttgagccggcacgactggtggaccgcgctgggcctgacaatgatggggaaccttatctattacgtctgcctggccagcgccattcagcgcaccggggcgccggtttccaccatgattatcggcacgctgccggtggtactgccggtgttcgccaatctgctctacagccagcgcgacgggaagctgccgtggcggcgcctgtttccggcgctgatctgcatcgctgtgggcctgatctgcgttaacgtcgcggagctgcgtcaggggctgccgaattttagcccgtggcgctacggctccggcattgcgctggcgctgggatcggtggtctgctgggcctggtatgccctgcgcaacgcccgctggctgcgggagaacccgcatcaaccgccaatgatgtgggctaccgctcaggcgctggtgacgcttccggtttcgctggccggctatctcgccgcctgcgtctggctgcacggtcagcaggccgggtttcccctgcccttcggcccacgtccggcggtgtttattacgctgatgctggccatcgcggtgctctgctcatgggtcggcgcgctatgctggaatattgccagccagcggctgccgacggtgatcctcggcccgcttatcgtcttcgaaaccctggccggactgctgtataccttcctgctgcggcaaagcttaccgccgctgctgaccctgagcggcatcctgctgctggtgctcggcgtggtctctgccgtacgcgccagaccggaaaaaccgatgctgcagccgctggcggacgaaaaaaagtag

SEQ ID NO: 218206 - DNA, 180 bp, Klebsiella pneumoniae
atgatcgctcttaccggtgccaccggccagcttggccactacgttcttcaagacctgcttaacaccgtccctgccagccagattgtggcgattgtccgcaacccggccaaagcccaggcgctcagccagcagggcgtggttgtccgccaggccgactacagcgacgaagcggcgctgtag

SEQ ID NO: 218207 - DNA, 1944 bp, Klebsiella pneumoniae
atgattaagtttagcgcaacgctcctggccacgctgatcgccgccagcgtcaacgccgcgacggtcgacctgcggatcatggaaaccaccgatctgcacagcaatatgatggacttcgactattacaaagatgccgccacggagaaattcggcctggtgcgtaccgccagcctgatcgaacaggcgcgggcagaagttaaaaacagcgtgctggtggataacggggatgtgatccaggggagcccgttaggcgactatatggcggcaaaagggctcaaagagggcgatgtacatccggtgtataaggcgatgaacaccctgaattacgccgtcggcaacctgggcaaccatgagttcaattacggtctcgacttcctgcacaaggcgctggccggggcgaagttcccctacgtgaacgccaatatcatcgatgccaaaaccggaaaaccgatgtttacgccgtacctgatccaggatacccgggtcgtggacagcgacggtcaaatccacaccctgcgcatcggctatatcggctttgtgccgccgcagatcatgacctgggataaagccaatcttaacggcaaggtgacggtcaatgacattaccgaaaccgcgcgcaaatatatcccggagatgcgggcgaaaggggctgatgtggtggtagtggtcgctcactccggcctctccgccgacccgtatcaggcgatggccgagaattcggtttactacttaagccaggtgcccggcgtggacgccattatgttcggccatgcccacgcggtgttcccgggtaaagacttcgccaacatcaaaggcgcggatatcgccaaagggacgctaaacggcgtaccggcggtgatgccgggaatgtggggcgatcatctcggggtggtcgatctggtgctaaataacgacagcggtaaatggcaggtaactcagagtaaagcggaagcgcggccaatctatgacgcggtggcgaagaaatcactggcggccgaagatgccaagctggtggcggtgctgaaagccgatcatgacgccactcgcgaattcgtcagcaagccgatcggcaagtccgccgacaacatgtacagctatctggcgctggtgcaggacgacccgacggtgcaggtggtcaacatggcgcagaaagcctacgtagaacactatattcagggcgacccggatctggcgaagctgccggtgctctccgccgccgcgccgtttaaagtcggcgggcgtaaaaacgatccggcgagctttgtcgaagtggagaaaggccagctcaccttccgcaatgccgccgacctctatctctaccccaacaccctggtggtgatgaaggtcagcgggaaagaggttaaggagtggctggaatgctctgccggacagtttaaccagatcgatcccgccagcagcaagccgcagtcgctgatcaactgggacggcttccgcacctacaacttcgacgtcattgacggggtgaactaccagatcgacgtcactcagccggcccgctacgacggcgaatgtcagatgatccatccgcaggcagagcgtattaagcacctgaccttcaatggaaaaccggttgatccgcaggctactttcctggtcgcgaccaataactatcgcgcttacggcggcaaattcgccggcaccggtgagagccatatcgccttcgcctcaccggatgaaaaccgttcggtgctggcggcatggattggcgcgcaatcgaagaaggaaggcgcgatccatccggcggcggataacaactggcgtctggcgccgatccacagcaacacgccgttggatattcgttttgagacctcgcctggcgacaaagccgcggcgtttatcaaagagaaagcgcagtatccaatgcgccaggtggccaccgatgatatcggcttcgccatttatcagctggatttgagcaagtaa

SEQ ID NO: 218208 - DNA, 744 bp, Klebsiella pneumoniae
atgttagaacaagtatgtcagcttgcacggaatgcgggcgatgccatcatggaagtctacgatggaaaccagccgatcaacgtcgccagcaagaaagatgattctccggtcacggcggcggatatcgcagcgcataaagtcattgtcagcggcctgcaggcgctggatccggataccccgatcctctccgaggaggacccgccggcgtgggaagtgcgccagcactggcagcgctactggctggtcgacccgctggacggcaccaaagagtttattaagcgtaacggcgaattcaccgtcaatatcgcgctgattgaaaacggcaagccgacgctgggcgttgtctatgcgccggtgatgaaggtgatgtacagcgcgcaaaatggcaaagcctggaaagaagagtgcggcgtacgcaagcagatccaggtccgcgatgcccgtccgccgctggtggtgattagccgctcccatagcaacgatccggagctgcaggagtaccttgagcaacttggcgaacaccagaccacctcaatcggttcgtcgctgaaattctgcctggtggcggaaggtcaggcccagctctatccgcgcttcgggccgaccagcacctgggacaccgccgccggccatgcggtcgcggtggccgccggggcgcatgttcacgactggcaggggaaaaccctcgactacacgccgcgtgaatccttcctcaaccccggcttccgggtctctatttattaa

SEQ ID NO: 218209 - DNA, 1974 bp, Klebsiella pneumoniae
atgttcaggttaaacccttttatccgggcgggattgtctgcgtccgtcgtatcgttggcgtttccggctctggccgatgtgaatgaagaaacgctggtggtgaccgcctcggccactgaacagaatgtcaaagacgcgccggcgagcatcagcgtcatcacccaacaggatttacaacgcaagcctgttcagaacctgaaagacgtgctgcgcgatgtgcctggggtccagctcaccaacgaaggggataaccgcaagggcgttagcatccgcggtctgagcagcagctataccctgatcctggtcgacggcaagcgcgttaactcgcggaacgccgtcttccgccacaatgacttcgaccttaactggatcccggtggatgctattgagcgtatcgaagtggtgcgcggcccgatgtcctccctttacggctccgatgcgctcggtggggtggtcaacattattaccaaaaaaattggccagaaatggaccgggacgctgagtgctgataccactattcaggagcaccgcgatcgcggggatacctataacggccagttcttcaccagcggcccgctgatcgacggcgtacttggaatgaaggcctacggcagcctggcaaaacgcgccaaggacgatccgcagtcatccagtaatgccaccggcgagacgccgcgcatcgagggcttcaccagccgcgatggcaatgttgaattcgcctggacgccgaacgaaaaccacgattttaccgcaggctacggttttgaccgtcaggatcgcgattccgattcccttgaccgcaaccgccttgagcgggagaactactctctgagccataacggccgctgggatatcggcaatagcgagctcaagttctacggcgaaaaggtggataacaaaaatccagggcagagcgggactattacctcggaaagcaatgccatcgacggcaagtatgtcctgccgctgggcatgattaaccagctggtgaccttcggcggcgaatggcgccacgacaaactgaaagatccggtcaacctgagcagcggcggccaatcaacgtcggctagccagtacgccctgtttatcgaagacgaatggcgcatcatcgagccgctggcgctgaccaccggcattcgtatggacgaccatcagacctatggcgatcactggagcccgcgcgcctatctggtgtataacgccaccgataccgtcaccgtcaaaggcggctgggcgacggcgtttaaagccccgtcgctgctgcagcttaaccccgactggaccaccaactcctgtcgcggctcgtgcagcatcgtcggtaacccggatctgaaaccggaaaccagcgaaagcttcgagctcggtctctactaccgcggggaagagggctggcttgaaaatgtcgaaggcagcatcaccaccttccagaataatgtcgacgacatgatcgatgttctgcgcacctccagcgccagcgaagcgccgggctacccgaactttgtcggctggaaaaccgtcaacggcaagcgcgtgccgatcttccgctatttcaacgtcaacaaagcccgcatcaaaggggtggagacggaggtgaagatcccgtttggcgatgagtggaagctgacggtgaactacacctacaacgatggtcgcgatctgagcaatggcggcgacaaaccgctgcagacgctgccgttccataccgccaacggcacgctcgactggaaaccgctggacgactggtccttctacgtgacggccaactatactggccagcagcgcgcggtgagcgccaccggcaaaacgccgggcggctacaccctgtttgacgttggcgcggcatggcaggtgaccaaaaacgtgaaactgcgctccggggtgcagaacgtgggtgataaagatctgagccgggacgactacagttataccgaagaaggccgtcgctactttatggcggtggattatcgcttctga

SEQ ID NO: 218210 - DNA, 249 bp, Klebsiella pneumoniae
atgattaaggttctgttttttgcccaggtgcgcgagctggtcggtaccgattcgctgacccttgatgccagcgaactggcgactgtcgaagcggttcgtcagcagcttgccgcccgcggcgatcgctgggcgctggccctggaggagggcaagctgctggcggcggttaaccagacgctaacctctttcgaacatccagtggccaacggcgacgaagtggcgttcttcccaccggtaacggggggctga

SEQ ID NO: 218211 - DNA, 267 bp, Klebsiella pneumoniae; identical to SEQ ID NO: 16860

SEQ ID NO: 218212 - DNA, 276 bp, Klebsiella pneumoniae; identical to SEQ ID NO: 16862

SEQ ID NO: 218213 - DNA, 1110 bp, Klebsiella pneumoniae; identical to SEQ ID NO: 113667

SEQ ID NO: 218214 - DNA, 399 bp, Klebsiella pneumoniae; identical to SEQ ID NO: 16863

SEQ ID NO: 218215 - DNA, 1077 bp, Klebsiella pneumoniae; identical to SEQ ID NO: 97051

SEQ ID NO: 218216 - DNA, 426 bp, Klebsiella pneumoniae
atgacgatgtgtcgggtactgaatgtcgcccgggccgggttctatgcgtggctgcataaccctgtctcggcgcgtgataaagataaccagcgcctgctgatgcttatccgcgactcatattccctgagcggaggcgtatacggttaccggcgggttcatggcgatctgaacgaaatcggggaaacctgtggtagaaaccgggtgggtcggatcatgcaactggaccggattaaagctgtgcgcggctataaagcgccacgtcgtatcgctggcaggccttcagtcgttgctcctaatcgcgtgcagcggcagttcaccgttgtccgggccacccaggtctgggtcaccgatattacttatagtgtgcccggagttcagggcgggcatggatgcttaaatgaaccgcgagtctgtctggaatattga

SEQ ID NO: 218217 - DNA, 2652 bp, Klebsiella pneumoniae; identical to SEQ ID NO: 16870

SEQ ID NO: 218218 - DNA, 309 bp, Klebsiella pneumoniae; identical to SEQ ID NO: 113671

SEQ ID NO: 218219 - DNA, 609 bp, Klebsiella pneumoniae
atgcaaatacccaccgggcgccgctgccgcgtgggaatcggcccaccttgccaggcgccgctgccgtgtggaaatccgcccatcttgccgggcgccgctgccgtgtggaaatccgcccatcttgccgggcgccgctgccgcgtggaaatccgcccatcttgccaggcgccgctgccacgtgggaatcggcccatcttgccgggcgctgctgccgcgtgggaatcggcccaccttgccgggcgccgctgccgtgtggaaatccgcccaccttgccgggcgccgctgccgcgtgggaatcggcccaccttgccaggcgccgctgccacgtgggaatcggcccaccttgccgggcgccgctgccgtgtggaaatccgcccatcttgccgggcgccgctgccgcgtgggaatcggcccaccttgccaggcgccgctgccacgtgggaatcggcccaccttgccgggcgccgctgccatgtggaaatccgcccatcttgccgggcgccgctgccgcgtgggaatcggcccaccttgccaggcgccgctgccacgtgggaatcggcccaccttgccgggcgccgctgccgtgtgggaatgcacccaccttcctga

SEQ ID NO: 218220 - DNA, 387 bp, Klebsiella pneumoniae
atgaataaaccagcagatctgaaaccccgcaacttatcggctgctgtcagattgcgcctaaatgaaatcgagaactggctggacagagggctaacgcggcatgaaattgctgaaatcctcgacagcgaatacagcttttcggtaacagccaaagggcttgagatggcactgtatagaacgcggcaaaaccgaaaaaatgtattgcacaatacacatgataagagtagtgcgaagggtgcagcggaaagtgtattgcacaatacacaaccgtctgagcctgaagcgcaggaaagtgaaaaagcagagagtcccggcattattgataaagagttcttcaataaaatcggtgaggatttcaaccctaagaagttcaacaaaaaattctga

SEQ ID NO: 218221 - DNA, 135 bp, Klebsiella pneumoniae
atgttgcatgaatcactcgctattgaaacgctaatcctcctgcgctcgatagcagaaccgggcaaaaccaaagcggcaaaagcagaggttgaacgtaacggctacaaagtctgggaaccaaaaaaggagcgctga

SEQ ID NO: 218222 - DNA, 1530 bp, Klebsiella pneumoniae; identical to SEQ ID NO: 16835

SEQ ID NO: 218223 - DNA, 399 bp, Klebsiella pneumoniae
atggagcagaccgacaagcgcaagcaggataaactgaagttcgaccgggtaattaatctggcgcgcagactgccgcaaccggcgatccatgacttactacgcgcgctgatactgccaattcaggccgattacttgctggccgttggcacggagggccaggacgcgcgcccggacatgaacgagcgcgagttcttcttcacaaaaatcatctgggcgatggattacacgcacatgaaatcactcaggcttgcagctgaagattttcccctggcgcttgcgacggccaagatcctgccgtggccgtggggtgaatcaagctaccggagtgctttagccgatataggcagcgctaagggcaatccgtgggtacaggatattaaccaccgcgttactttgtga

SEQ ID NO: 218224 - DNA, 402 bp, Klebsiella pneumoniae; identical to SEQ ID NO: 16839

SEQ ID NO: 218225 - DNA, 357 bp, Klebsiella pneumoniae; identical to SEQ ID NO: 16840

SEQ ID NO: 218226 - DNA, 534 bp, Klebsiella pneumoniae; identical to SEQ ID NO: 16842

SEQ ID NO: 218227 - DNA, 306 bp, Klebsiella pneumoniae; identical to SEQ ID NO: 16855

SEQ ID NO: 218228 - DNA, 345 bp, Klebsiella pneumoniae; identical to SEQ ID NO: 86717

SEQ ID NO: 218229 - DNA, 1539 bp, Klebsiella pneumoniae
atgaaagatgaatacgtcatgggcatcgacaatggtggaaccgtcaccaaggcagccatctatgaccgtaaaggacaggtgctcgccatcgcctcaaaatccacgcagatgctgacaccccgggaattccacacagagcgcagtatcgatgagctgtgggccgcgaatgtcgaagtgattaaaaaagcgattgagcaatcaggtatcgacgccagccagataaaaggagtggccgtcaccggtcatggtaacggtctgtatctggtcgacgaagaaggtcacccggtgcgtaacggcattatatccaccgatagccgggcaaaagagtacgttgagagatggcaacgctcaccagaattccttaccgacattttgccaaaaacgatgcagtccatctgggccggacaacctgtcgccctgctggcatggctgaagaatttcgagcccgagacgctgcaaaaagcgcgttatatttttatggtcaaggacctgatccgtttttacctgaccggagaggcttttcttgagctgaccgatatctcagggaccaacctgatcaacgtacgtgactgcaagtatgacgatgaactactggcatggtggggacttgatgaactgcgggataaattgccccccatcaaacgctcaacagaatgctgcggaaaaatcactgacgacgtggcccgtctgaccggtttatgcgcaggtacgccggtttctggcggggtgtttgatatctcggcctcttccattgcctcggggattaacagtctcgataagatggcgatcgtcaccggcacctggagcataaacgaatacgttaccgaccacccggttattgataaagatctgtttatgacctccatttatcccattgagggtaaatggctcatcaccgaggccagccccacctccgcgagcaacctggagtggtttattaacaactttatggagagcgatcggaaaacctccgccgaacaaggatcgtcggtctatgacctgtgtaataagctggtttcgtcaacgacgccggatgaaagccacctgttgttctttccgttcgtgtttggctctaacaccattcccgacgcctcggccggctttatcggtgtcaacagcttccataaaaaagcccattttctgcgggcgatttatgagggcgtggccttcagccatctctaccacaccgagcgcttacgcaatattaacccgaagctaagccgcactattcgtattgctggcggcgtcacgaactccccggtctggctgcagatattcgccgatatcttccaggccacgctggaaatcgttgacgtcaaagagcacgggaccctgggtaccgcgatgaccgccgccgttatggtgggctggtttgcggaggtatttgctgcctcaaacgacatggtccatgtctcacgcaccgtctcccctaatccggaaaaccaccgggtctaccagaccaaataccagctttataaaaacctgttatcagaaatgcagtcgccgtggaaaagctgcagcaactacatcgcgcactaa

SEQ ID NO: 218230 - DNA, 348 bp, Klebsiella pneumoniae
atggggtcagtccaggttgccagtctgggcctgacggaatcgacggccctggccaggggacggcccgtcaggatcggtaagttctcttatcagagcaatggtaaggcgctggccagcggcgagacagagggttttgtgaagacgattttcgatgctgaaaccggcgagttgctgggcgcgcatatggttggcgcacaggtcacggaacagatccagggctttggcatcgcccgtcacctggaggccacagacgaaagtctcctgtcgatgatctttgcgcatccgacactttccgaagcgatgcatgaatcaatcctcgcggcctgcgaccaaccgttgcatcaataa

SEQ ID NO: 218231 - DNA, 1161 bp, Klebsiella pneumoniae
atgatgacagaacctttaagttgggagcgctggcgcaaggtttacttgaacaagaaaaacaaaaaaagagcctcgcttgaacggtcgggactacgaaacctacattctgtagaagctcttgatcacattgtttctgaagttaaaacaacatacttaaacaacaatccatacattaaagtcagcgcaaactcagtttgggttgatggcacacctcaggcaaagtttaccgtaagcaagtacgaaaatgtgaaaaactcctctacgagttacggcaacacgaatcaggtaagtcttaaagccaggaaagatgaagtccttaactgcgaactagcagaccttttgtttatcttcaatgaatttaacagccaaaatggttttaaaaaagtccgtgccgttttattacagggcaagtgctcagaaaaaaacaatttattgcccgatggaccttcaacagaaaaagaaaggaagttacttgaatcggttaaccgggaagaattgctgaccttatatcctggtactaaagcatctggtaataaaatagggacgtacaaacttggtggatatcaaccgggactcgctgattgcgccaagtatctgatgatgccgaaacatgaagcgtggaactataaatatcctgaagatacaggaccttacgtgataggttggccagaaaattcgtcaagtaaaagtctcggtgtaacaaaaaattacttagatgcagtcatcgatgaaatgctcaaatttcaaaccatgggaagagaggttaaattcaaaaatggcgatatagacaggacatgcgaatggtcaaaaatgatagatgacttgctgacaagttatcatggcgtaactatgaagggctatgatcgtcaaaggcgtttctataagtcatctggatatattcctagccatattcaaaaccttggttttatgatcgatgatgtcagtcttttgagcctcttacaaatagattatgatgattttgtctggtattatcgcactcgttatgattattttctaaaaaaatatggcattcaggttgcaaagttaatacaacataagtttgagcaatatttaaatttacttatttcagagcagggacctgtaattccgacgataattataaatattgattataatgaaggtgaattttttcgaggttaa

SEQ ID NO: 218232 - DNA, 1479 bp, Klebsiella pneumoniae
gtgaaattttggcgcccgggtattaccggcaagctgttcctcgctatattcgccacctgcatcgtgctgttgatcagcatgcactgggcggtgcgtatcagttttgaacgcgggttcatcgactatatcaagcgcggcaatgagcagcgcttaaccatgctcagcgacgcgctgagcgagcagtatgcccagcatggcagctgggcgtttctgcgcaataatgaccgctttatcttccagctgctgcgcaccttcgaacgggataacgacgaccgctcgccgccggggcacgccatgaagccggacgccgccccggacgggccgccgccggatggcccccctgacggcccgcgcccgaggccggaaatgccgccccacggctggcgcaccatgttctgggtggtggatcagtcggggcgcgtgctggtggggccgcgtgagcgcgtcccggaggacggcacccagcgcagcatcgtggtcaacggcgcggaggtgggcaaagtgatcgcctcgccggtagagcggctgacgcgcaataccgacattaacttcgaccggcagcaaaagcgcaccagctggctgatcgtcgcccttgccaccctgcttgccgcgctggccactttcccgttggcccgcggtctgctggcgccggtgaagcggctggtggaaggcacccataagctggcggcaggcgacttttccacccgcgtgacggtgaccggcggcgatgagctcggccgcctggcgcaggattttaaccagctcgccagcaccctggagcgcaaccagcagatgcgtcgcgatctgatggccgatatctcccatgagctgcgtaccccgctggcggtgctgcgcggcgagctggaggcgattcaggacggggtccggcgctttacccccgagtcgattccttctctgcaggccgaggtggctactctcaccaagctggtggacgacctccatcagctgtcgatgtccgacgagggggcgctggcctaccagaaaacctcactggatatcatcaccctgctggaagtggcggcgggcgcttttcgcgagcgcttcgccagccggcagctaagcattcaggtgtcgctcccggagcaggcgatgatcttcggcgaccgcgaccgcctgatgcagctcttcaacaatctgctggagaacagcctgcgctataccgacagcggcggcagcctgcacatcaccgcccgccgcagcggccggatgctggtgattgacttcgccgacagcgcccccggcgtcagcgatgagcagctggcccgcctgtgcgaacgcttttaccgggcggaaggatcgcgcaaccgcgccagcggcggctccggcctcgggctggcgatttgcctcaatatcgtagcggcccacggcggcaccctgcgtgccgaccattcgccttttggcggggttagcattaaagttgagttacctctggaacatgatttaccgagagacgtatga

SEQ ID NO: 218233 - DNA, 1134 bp, Klebsiella pneumoniae
atgaagaaaaaacttgttagattttcggcattagcgttagcgattgggtttttatcgggttgtacaatcatccctggtcagggattaaacagtctgcgcaagaacgtggttgagcttccagacagcgactacgatctggataagttagtgaacgtgtatccaatgaccccaggactgatcgatcagcttcgtccggagactgtactcgctcgtccaaacccgcagcttgataatttactgcgcaattatgaataccgcattggggttggtgacgtactgatggttaccgtatgggaccaccctgaactaactactcctgcaggccaataccgcagcgccagcgacaccggtaactgggttaactccgatggtaccattttttatccttatattggtaaggtgcaggtagcgggaaaaactctcgctcaggtacgacaggatatagcgagccgtttaaccacctatattgaaagcccacaggttgatgttagtgttgctgcttttcgttcgcaaaaagcctatgtgacaggtgaggttactaaatcagggcagcagccaattaccaatattccattaacggtgatggatgccattaacgcggccggcgggcttgcaccagatgcggactggcggaatgttgtattaacacataacgggaaagacacaaaagtctcattgtatgcattaatgcagaaaggcgatttgacacaaaatcatctgttatatccaggtgatattctctttgtgccgcgtaatgacgatctaaaagtatttgtcatgggcgaagtaggtaagcaaagcacaatgaagatggatagaagtggcatgacattggcggaagctctgggtaacgctgaggggatgtcacaaactttcagtgatgctactggggtgtttgtcattcgtcagattaaaaatgatagtcagggtaaaattgcgaatatctatcagcttaatgctcaggatgcttcggccatggtgttaggtacagagttccagttacagccgtatgatattgtttatgtcactacagctccattggttcgttggaatagagttatatctcaacttgtgccaactattacgggagttcatgatatgacagaaacaggtaaattcattcggacttggtga

SEQ ID NO: 218234 - DNA, 2163 bp, Klebsiella pneumoniae
atgtcatcagttacaaacaaagctacatctaaagatgcggatgaaattgatttaggtcgccttattggtgagtttatagatcatcgcaagcttattatttctgttacttctctattcacattagtcgcattaatttatgctatttttgccacgcctatatatcaagctgatgctctaattcaggttgaacagaaacaagcgaatgccatacttagcaatcttagccagatgcttccggatagccaacctcaatcggccccagaaattgcgttgattcgttcccggatgattttaggaaaaacagttgatgatcttaacctgcaggcgagggtaaaacaaaaatacttcccactattagggcgtggttttgcacgcttatcgggagataaacctggtagtctatctatttctcggttgtatataccggaaaatgataatgatactcctgagatcatactaactgttaaagagagaaatagtttttctatctccgtaggtgactttattatcaatggtaaagttggagagctacttgatgagcggggaatttcgctcaaagttgatgaaatcagcgcaaaaccagggactgagttttcaattgtctatgttagtcgattgaaggctataacagatcttcaggacgatatagccgtagctgatcagggaaaagatactgggatgctaacactctccttgaccggcgataatccagtattaattgaacgtattcttaatagcatcagtgaaaactatttagctcagaatattgcgcggcaagccgcacaagatgcgaaaagtctggagtttttgagtaagcaactgcccgaggttcgcagtgatttggatcaggccgaagataaattaaaccaatatcggagaaagagtgattccgttgatttatctcttgaggcaaaagccgttcttgatcaaatagttaatgtcgataatcagcttaacgaattaactttccgtgagtcagagatatcccagctctataccaaggaacatccgacgtataaagcattgatggaaaaaagaaagacactacaagatgaaaaatctaagcttaataagcgtgtgtctgctatgcctgaaacgcagcaggaaatattgcgtttaagccgtgatgtagagtccggtcgagctgtgtatatgcagttattaaatcggcagcaagagttaaatatagcaaaatccagcgctattggtaatgtacgcattattgataatgccgtaactcaacccaagccaattaagcccaagaaaatacttattgttctgattgggattatattaggtgttatgacctccgctggtgttgtattgcttagagttattttacgtcgaggaattgaaacgcctgagcagcttgaagagcttggaattaatgtttatgcgagtattccgatcgcagaaacattttccaaaagtgtggtgcagaaaaaaggatggagtaaaaagtctgctgaagaaattcagggcttcctggcggttgataaccctgcggatctgtcaattgaagctattcgcggtttgcgtaccagccttcatttcgccatgatggaagcaagaaataatgtactgatgatatctggtgcgagccctaatgcagggaaaacttttgtaagttcaaatctggcggctgtaatttctcaaacagggaaaaaggtattgtttattgataccgatatgcgtaaaggctacacgcataaattgttcaatgaaaataataccaatggtctctctgatatcctgtcaggaaaagttgaaattaatagggcattaaaaaaagtcgtatcaggtgattttgattttatttcacggggaatggctccaccaaacccagctgaattactaatgcacagacgttttggtgaactgctaaattgggctagtgaaaactacgatatcgttgttcttgatacaccaccgattctggctgttactgatgcagcaataattggtaattatgtaggcacaactctactggtagctcgatttgaattaaatacagcaaaagaaattgaagtaagtgttaaacgattcgaacaagccggtgtaacagtgaaaggctgcatattgaatggtgttgtaaaaaaagcaagtagctattatggctatggctatagccattatggatattcatatactgataagcagtaa

SEQ ID NO: 218235 - DNA, 675 bp, Klebsiella pneumoniae
atggcatcgtcatcagcgttacggtttgcgattaatttaggtaacgctttgctcgctaagcagttaaccgacggatcgttacagggactaacggttgagctagcgcgaaaaattgcggagttctgccagcagccggagcggctgttaccttaccccgcagcaaaaggtattgttgacgatgcttcgaataatcaatgggatattgcttttttagcggtcgatcccgcacgtgagaacgaactgcgctttacctcgccctatctcacgattgactgcaccctactggtacgtagctgcagcgggatacattccgtcctggagatggaccgggaaggcgtgacgattaacgtcggtaaaggctccgcctattcattgccgctcattcggacattaaaacacgcccgtctttgcgaatatcccaccactcagcaggcgctcaacgcttttctggccggtaagggggatatggtggcgaatattcgccagctgctggaagccgccgccctggggcaagatagcgtttgtgtgctgcctgacaactatagccagattcagcaagccatctgcgtgccgcgcgcggttccgcactattatgagcgaatggaggcattggtgagacagtggcagcaggacgggacgctggcggcgctggttgcccgccatatttatgcctga

SEQ ID NO: 218236 - DNA, 936 bp, Klebsiella pneumoniae
atgaagagcgagctattagggacaaaagcctttgtcactattgctgatttcggttgttttactcgggcagcggacgaactcaatttatcgcaaccggcattgacgcgtagagttaaaaaattagaagagcaccttaaggtttccttgtttgagcgcacaacacgcaaagtgaccctgacctatgccgggaaagcgctgctgccgcacgcgcgggcactactggactacatggataatgccattcttagtgttcaggaactggccgctcatcagaaaggggtcattaagttatcctgtattcccacggcgactttttattttctcccccttgtgctcgaaaaatttaactcactttatcctaatattcgcgttcatattcatgaacaggcgacgatggatagtttagattcgctgatgagtggtgagacggattttggtatcaatatgaaccgcgtgacacatccccaaatttccttcactcctcttgttgatgaaccctatattctggtttgtcgccgcgatcatccgttggcaacaaagaagctggttgagtggaacgagctggcctcccatcggctgataggtatcaggcgtaccagtgggaaccggatactgattgaacaagagatcgcgcagaccgccggaacgctggagtggttttatgaagttcgccactattcaacggcgataggcctggtggaagccgggctggggattgcggcactgccttgtatggcgatgtcgcatcatcaacacgaatcgctggtcagcatcccgcttgtcgaaccggtgatccgtcgtagcattggccttattcgacgcaacgatgtgccgctgtcgccaatagcggagagattggttaatttgtttctggaaatgtggtttgaacgcaaacctgaaaaatggacggcgccttttgatttattttcgcgataa

SEQ ID NO: 218237 - DNA, 1059 bp, Klebsiella pneumoniae
atgtctgtatcttacgttggaagcagaactacggcgttacgtaatgcgagagggaaagggctaagcgtctggagtattgatgatgataccggcaactggacgaaaatccagacgttaaaagaacaggaaaacccatcttacctgaccttcgacaatacgaaaaatttcttatattctgttcacggtgattatactgaagttaccagttacgccattaaccctgaggatggaaaacttacttacattaacaaaataacacttgatgacggtaaaaacccggtatttattaccgcggataaaaccaaccgttatctgttagttgccaccctacaaggcggtgcagtttacgtcgtccgccgggaagaaaatggcgccctgggcgaagtcgtatccgtctggcgttttcctggaaaaaccaatgaatccatctctcatgcgcatcagtgtatctgggatcaggaaaaaaactaccttttcgtgccgcagcagggccgtgttatcggctacgctggcgtcagcgtacttaaattcaacccggaagatggctcattaatcgaaaccgattacttccgtgccagagagtattctgaaccgcgccatatggcgatccatccgaataatcaatattgctatttggttaatgaaaaagacaataccgtaacctggttctttttcgaccaaaatagcggaaaaattgaaccgcagcagattatcccggtactgccggaaacctataccggcgaagggcagtccagcgccgtgctggttgataaaagcggaaaatgggttattgaatccacccggattcacgaatcgctttccatcttccgtattaatcctctgactggctatctaacccgggtagaaaccatgaaagtacccggactgacgccgcgttttattacgtttaacgatgctggcgatcggttatttgtcgctaacgaagatagcgataccattatccaatatgctttcgataatattactggcagcctgacgcaattacaacccgttgttgcgacggaaagcccagtttgcatcctttttaaatcgctgtaa

SEQ ID NO: 218238 - DNA, 1272 bp, Klebsiella pneumoniae
atgcctaatctcgcgattatttcgctgttagcgatatttatcgccattattattggtttttataagaagaccaacgtgggaattattatggtagccttcgcttttatcttaagcctggcctaccacattccaacagcaaagttattcaaaggttttagcgtttctttatttctgacgatgctgggagtaacctatttatttagcatactgcataacaataaaaccctggagatattatcgaaaaagattgttggtgctgttcataaacgcaatctactgccaatcgctatttatatcgttggctttgtgctgtgcgccgtaggccctggcgccattccggtgctggcgatagttccggttattgcgatacctatcgcgtttcaggcccggctcaacccgatcatgatggcgattatcggtcagtgcggcgtatttggcggacgcataacacaaatcacgccggaaggcgtgctggtcatggaattaatggacaaacagcagcttacaccatcactgttcccggtctggctgtgcctgttcatcacctccgttctgatggccatactttgctacgtctggtatcggggctggcgccttgatgatctggatatcaatgccgcagatagcacaatcaacgccacgccgaagtttaccaccgttcactggtgctcgttggcaggattactcgcattgataatttgcgccgtcgtcttctccctgaatgttggtttaacggctttcgtcattggcgccattctttctgcgctgggtgctggtgacgaaaatgcggcgatcaagggtatcccatggtcagtcttaattctggtatgcggcgtcggcctgttaatgaacgtggtgatggagtccggcggtatttcactgctggcgaaaaccttaaccacggtaatgaatcaaaccaccgcttcatcggtaatggtcactaccgccgcgattatgtcctttttcagttctggattaggcgtggttttcccaacattaatcccgacctgtcagggtatcgtcgaacatttaggcgcgaatatttccgctattgaactggtcgccatggtcgtcgttggcggtaccgtctccggcgtcagcccggtatccaccaccggcgcactcattatgtccggcgtcgccaccaataaagaagcagagcagaaatacacccccagcaaaatgtttattgagctattcgcctgggccttcgccgcaatgattttgtgctttgtgatggcgattaccggtatttacgctctattttgttaa

SEQ ID NO: 218239 - DNA, 1938 bp, Klebsiella pneumoniae
atgaaacagaatattacccagaaaattattgctcaacatttgctgagcggcaatatggttgcaggtgaagaaattagtattcgcatcgatcatactttaacccatgatgtcaccggcaccccagcctatctggcatttgaaactttaggtattccacaggtaaaaacagagcgttcggtcagctatatcgaccacaatatgctgtataccgataataaaaacccggacgaccatatttatttacagaccgttgccaaaaaacacggcatttatttatccaaagccggaaacggtatttgccatacggtgcacttcgaacgctttagccgtccggggattacgctgttgggttccgatagccacacgccaaccggcggcgcggttggcgccatggcgcttggcgcaggcgggctggacgtcgcgctggcgatggcgggcgagccgacctggctgaaaatgccgcgagtgattaacgtacgcctgcacggtcgtatgcagccgggggtttcggcaaaagacattattctggagatgctgcgccgtgaaacggtcaaaggcggactgggcaaagtctacgaatataccggcgaaggcgtggagcatatcagcatccgcgaccgctcaaccatcaccaatatgggcgcggaaatgggcgccaccacctctattttccccagtgatgaagtgacccgtgagttctttattaaagagaatcgcgagcaggactggatttcattacagccggatgaaggctgcgagtacgacgactatattgatatcgaccttaacacgctggagccgctggtggcgatgccggatatgccggataacgtgaccgaagcgcgcaactgccgcgacgtgaaaatcaaccaggtgttcctcggcagctgcaccaacgcctcctataccgatttcgccaaagcggcggcgattatggaaggccgctttactcatccggaagtgagctttgtcgtcgcgccgggcagccgccagctttatcagatgctgttacgcgacggcatcatcggcaaactcattgctgcaggcgcgcgcgttatcgactgcggctgcggcgcgtgctgcggcattggccaggcgccttccaccgatggcgtttctctgcgcacctctaaccgtaacttcaaaggccgcggcggtcatttgaacgcgaagctatacctgtccagcccggaaattgccgccgcatcggccattactggctacatttccgacccgcgcgatgtggttgatgtcgcggtgctcaacgatattgtcgaaccacatgactatatcatcgacgatcggctgatcctggccccggcagaaaacggtgaagaagtcgaagtgattcgcggaccgaacatcaaaccgatgccaatcaacgaaccgctgccggatacgctgaccattcaggtttctgcggttcgcggcgataacatcaccaccgacgatattacccctgccaacgcgcagttctccgccctgcgatccaacatcccagagatcagcaaatattgctatggccgcatcgatccagagttccacgatcgctgcaaagaactgggcaaaagcatcatcatcggcggcgaaaactacggtcagggctccagccgcgaacatgcggccatcgcgccgatgtacctgggcgtcaaagcggtcattgccaaatcgatggcgcgtatccacaaaaacaacctcgtcaaccacggcgtggtgccgctgattttcgctaacccggaagattacgcctgtttcgagacctttgacgaactgcgtatcgaaaacttccatgaagggctgcgccagcgctgtgtgctgctgaaaaacgtgaccaaaaaccgcgaagtttcgctcaacgtcgaccttacgccgcgagaaatcgaaatcgtgatcgacggcggccagttgcgccacgtcgccagtaagaacgcgaagtaa

SEQ ID NO: 218240 - DNA, 1134 bp, Klebsiella pneumoniae
atgagaaaattcagaacggtctttatgcgcggcggcaccagtaaaggctgcatgtttttaaaagacgatctgcctgccgatcgcggccaatgggatcatatctttctgcaggcgatgagcgaccccgacccgaaacaaatcgacggtatgggcggtacggtttcctctaataacaaaatcgtcatcgtctggaaaagcgaactgcctgacgtggatgtggagtaccttgtcggccaggttatcgttggcaaaagccaggtcgactacaaatccaactgcggcaatatgaccgcagcggtcggcccctacgcgattgaagaaggtctgatcccggccgttgagcccatcgccacggtcagaatgctcaaccacaataccggaaaacgcattgatatcaccgtgccgtgcgaaaacaacaccttcgcgctggacggcgattgccagattgccggcgttgacggcacctgcgcagaactgaaagtcaatttcctcaatccagctggttcgaaaaccggcacgctgctgccaaccggcaatactctcgatgttttatctatccccggccacggggacattgaagccacgatcctcgacatcagcaacccgatggtgctggtgcgcgcggaagatatcggcctgacaggcagcgagttgcccgacgacatcaaccagaatcaggccgtcagcgacctgctggaaaaaattcgcggtactgcggcctgcctgatgggcttcgccaaagatctcgacgacgcgcgcgacaacagcccggcggtgcctaaagtcggtatggtcaccacgccgaaaagctatgcggatatttccggccagccaacccagcagcaggaaatggatttatgcgcccgcgtgatttccgttttcaaatgccataaagcctgccctctcacctccgccagcgccattagcgtggcggcgtttcttcccggcagcctggtgcagcgcatcgtcaccgttggcgactggaaccagggtgtacgcatcgggcaccccagcggagtcatgaaaatgtatccgtcgctggtgcaaaacggcgatagcacggacgtgcccggcgtcgccgtacaaagaacggcccgcagaattatggacggcatggtgtatatccgcgactaa

SEQ ID NO: 218241 - DNA, 2265 bp, Klebsiella pneumoniae
atgatcaagctttccgatggcggggtttacctgctgaacggcaccgaagtggttgaagagaaaaacgccccggcgtctctgaacaaagccgaagcgcaaaaaggcaccatctcatggtcaatcctcaacgcgcacaacacctccggcgatatgtcgcggctcaagctgaagtttgatgccctcacctctcacgacatcacttttgtcggcattgtgcagacggcaaaagcgtccggcatgacctacttcccaatcccttatgtgctgaccaactgccataactcgctgtgcgccgtcggcggcaccattaacagcgatgaccatatgttcggcctgtcagcggcgaaaaaatatggcggcacctacgttcccccgcatctggcggttatccaccagtatatgcgcgaaatgatggccggcggcggcaagatgatcctcggttccgacagtcatacccgctacggcgcgttggggacgatggcgatcggcgaaggcggcggcgagctggttaagcaattgcttaacgacacctatgacgtggcttatccgggcgtcatcgcgattcatctgaccggcaagccgcagccgggcatcgggccgcacgacgtggcgctggcgatcatcggcgcggtcttcgagaaaggctacgtgaaaaacaaagtgatggagttcgtcggaccgggcgtctccaccatggataccgattatcgtaacggcatcgacgtgatgaccacggaaaccacctgcctcagctccatctggcgtaccgatgccgacacccactgcttcctggcgaagcatggccgcccggaagcctatcagcgcctggatccggccgatgttgcatactatgacggctgcgtacacgtcgatttaagcgccatcaaaccgatgatcgccctgccgttccacccaagcaacgtctacaccattgacgcgctgaacgacaacctgaccgacatcctgcacagcgtcgatcaagaagccaaacaaatcgccggggaacagatcccgttctcgctgttaaaacatgtggaaaacggcaagctgcgggttcaacagggcataatcgctggctgcgcgggcggcaactactccaacgtctatgccgcggcgcagatgctgcgcggtaagagctgcggcaacgatgccttctcgctggcggtctacccttcttcccagccggtatttatggatctggtgaagaaaggcgcgattgccgatctgatggcggcaggcgcgattatccgtaccgccttctgcggcccttgcttcggcgcaggcgataccccttgccacgacgggctgagtatccgccacaccacgcgtaacttcccgaaccgcgaaggctccaagccaggcgtaggccagatgtccgccgtcgcgctgatggacgcccgctcaatcgccgccacggcggcgaacggcggcctgctcacgccatccaccgatttaccgccggttgaagtcccggaatacgacttcgatccgaccccgtatcacagccgcgtctacatcggtacccaccagaagctcaacgacgccgaactggtttacggcccgaacatcaaagactggccggaaatggaacagcttcacgacaacattctgttaaaagttgtctcgcgcatcatggacccggtaaccaccaccgatgaactgatcccatccggcgaaacctcatcctaccgctccaacccgctggggctggccgagttcaccctgtcccgccgcgatccgcaatacgtcagccgcagcaaggcggtacatgcgctggagaaagcccgcgcgcagggagaaatcgccgaagagctacagccggtgttcgcccaaatccagtctattccaggcttcgcggagattaaaccgctggacgtggagatcggcagcatgatttacgccgtgaagcccggcgacggctccgcccgcgaacaagcggcaagctgccagcgcgtgctgggcggcctggcgaacatcgccgaggaatacgccaccaaacgctaccgctcaaacgtcatcaactggggaatgctgccgttccagatggtaggcgaaccgacctttgacgtgggtgactctattttcgttcccggcattcgcgccgcgctggatgccgactcgcgcaccttccaggccttcgtcattcgccaggacggccgggtacaggaaattgagctgacgatggcgccggtcaccaaagatgaacgggaaattattaaggcaggctgcctgattaactacaacaaagctcgcaacaataagtaa

SEQ ID NO: 218242 - DNA, 1164 bp, Klebsiella pneumoniae
atgacgtttatcgaagaagctcaggcaaaattcgccgagttaattacctcagaactggcgcgcattgaagcgatgaagcaggctggggaagcgaaagacttttcacagctggaacgtatcgtcgtcgggatcctgcccggcgacggcatcggtccgatcattatgaagcaggcgttgcgggtactggaatttctggcaaaagatgaaatcgccgccgggaagctggagctgcgtccggtcagcggcatgaccatagaagaccgcgcgcgcttgggccagagcctgcctgataacgtgctggagcaggttaaacagtgcgacgtgctgctgaaaggcccaatggtgaccccgcgtccgggcgaagagtggccgaacatggtcagcgccaacagcctgctgcgccgctcgctggatctgtttgccgcagtacgcccggtctcgatcccggaaaagaacatcgactggacgttctttcgcgaaaacattgaaggcgagtatatctggggcaacaaaggcatccaggtgactaacgatctggccgtggacttcaaagtccagaccgcgccgggcaccgagcgtatcgcccgtcaggcgttcgagtttgccaggaagaacggcaaaaccaacgtcacggtgatcaccaagtccaatatcgttaagctggcggacggcaacttcctgcagggcgtacgcaaagtcggcgcagaacattaccctgatatcgaagtgcaggatcgtctggtcgatgccatgtgcgcacgcatgggcgatgagaccttctgcaaagggcttcaggttttcgtcctgccgaacctgtacggcgacatcgtcaccgacatcgccgccgagcttcagggcgggctgggcacagcctcttcggctaacattggtagccgctatgcgatgttcgaagcaatccacggcaccgcgccgggtctggtcagcgaagggcgcggcgagtatgccgatccgtgcagcctgatccgcgccgtcggcatgctgctggcgcacatcggctacggtgagaagagccgccagctcagcaaagcgttgatccagtgcaccgtcaccgaacgcaaaaaagtcgtcactacctacaccaaagacgccagcgcggcggaattcaccgactacctgctggaaaccttagccagacaggcttaa

SEQ ID NO: 218243 - DNA, 2589 bp, Klebsiella pneumoniae
gtgctggaagcataccgccaacatcaggctgcccgcgccgcaaaagggcttgtcgccaaaccgctggatgccgggcaggtacaaaaactcaccgaactgctgcaacaccctcccgccggcgaagaggcgtttttatacgacctttttgttaatcgcgtcccgcccggcgtcgatgatgccgcgaaagtaaaagccgcttttctgacggcgcttgccgagggcaaagccgtttcaccgcttatcggcaaagagcaggcgattaccctgctgggcaccatgctcggcggctacaatattccgccgctgatcgccgcgttagatagccctgaattagcctctgccgccgtcgccgccctctcccacaccttgctgatatttgataacttccaactcgtggagaccaaagccgccgcgggcaaccgccatgctcagcaggtcatgcgcgcctgggccgatgcagaatggttcttaaaacgccctgccgttgccgaaaaaatcacggttagcgtctttaaagtgccgggcgaaaccaataccgatgacctctcaccggcacaggacgtgtggtcgcgcccggatattccgctgcacgcgctcaccatgctgaaaaacccgcacgaaggcattgagccggaccagccaggcgttatcggcccgctgcaaaaaatcgcccagctaaaagaaaaaggctttccgctggtttacgtcggcgatacggtcggcacaggttcttcacgtaaatccgccgccaactcggtactgtggtttatgggcgaagatattcccttcgtgcccaataaacgcggcggcggtatggttatcggcggcaaaattgcgccgattttcttcaacaccatggaagactccggcgcgctgccgattgaagcagacgtcagccagttgaatatgggcgacgtcatcgacgtgtatccctggcagggcgagatacgtcgtcacgacgacaatgtgttgttagcgaacttcacgctgaaaacggacgtgctgcttgatgaagcccgcgccggagggcgtattccgctgattatcggccgcgcgttaacggccaaagcacgccaggcgcttaacctgccgcaaagcgatgttttccgccaggcccatgcggcgcaggagagttcacgcggcttctcgctggcgcaaaagatcgttggccgtgcctgcggcgtggcgggaattcgccctggaacctactgcgaaccgaaaatcacctccatcggttctcctgataccagcggaccgatgacccgcgatgagctgaaagaccttgcctgtctgcgcttttccgccgatctggtgatgcagtctttctgtcacaccgccgcctatccaaagcaggtggatgtccagacgcaccagaccctggcggactttatgcgcgaacgcggcggcgtgtcgctacgtcccggcgatggtgtgatccattcatggctcaaccgtatggtattaccggataccgtcggtactggcggcgactcccatacccgcttcccgataggcttatccctgccggcaggttccggtctggtggcttttgccgccgccaccggcgtcatgccgctggatatgccggaatcggtgcgcgtgcgcttccatggcaacatgcgccccggcatcaccctgcgcgatctggtccacgccattccgtactacgccagcaagcaaggtctgctgaccatcgagaagaaggacaagaaaaacatcttctctgggcgcatcctggagatcgaaggtctggaagacctcgccgttgagcaggcgttcgaactcaccgccgccaccgccgagcgctcggcggcaggatgcaccataaagctcaacagcatgccgattatcgacagtaccaaaggcaatattgtgctgctgaagtggctaatcgccgaaggctatggcgatcgcgagacgctggagcgccgtattctggcgatggaaaactggcttgacgacccgcagttgctggcagccgatgccgacgcggaatacgccgccaccattgatatcgatcttaacgatatccatgagccgctgctgtgcgcgccgaacgacccggatgatgtcagaccgctatccgccgtcgcgggccattctatagatgaggtgtttatcggttcctgcatgaccaatattggccactttcgcgcagtcggcgaagtgttcagcgcccacaaaggccagcttccggtacgtctgtggatcacgccgcccacgaagatggacgccaacaagctaaaagatgagggctggttcagcgtcttcggccagcgcggggcgcgtatcgaaatccccggctgttcgctgtgtatggggaatcaggcgcgagtggcggatggcgcgacggtggtttccacctccacgcgcaacttccccaaccgtctcggagccggagccaacgtctatctggcctcggcggagctggcggcggtcaccgcacggctcggtaaacttccacagccggaagagtattttgccctcacagaaaagatagataagcacatttatcattatctgcaattcgatcgtcttgatagctatgttcagaaagtcgctgaagtgatttttcaaacccacagttaa

SEQ ID NO: 218244 - DNA, 1059 bp, Klebsiella pneumoniae
atggatgccaccacgatgataagcagagtgaccagcaaaaatacggcaaaaataatcgaaatagctcgtttccttcaggctaacaatctggatatcgaccctcacattactgattttgttgttcttcatcaacacggtgaaatggttgcctgcggtgggatcagtggcgacattattaaatgcgttgctatttccccgcagcttcgcggtcagggggtattgctcaaactggtcaccgaactgattaatctcgcgatggaaagcggcaacagtacattattcgtttacacccgcagccataacgaaaatctatttcaccattgcggattcaccacactggtttctattcctggctgtatggtgttaatggaaaatagcggttcgcgtctgactcgttatttgcaacagctggcgcaatggcgtaaaccaggcaagcatattgccgccatcgtaatgaacgctaatccatttaccaacggccacttgcaccttattcgctatgcctcgagccactttgactggctacacctgtttctggtcaacgaagatgccgcccagtttccgtttgcggatcgcctcgcgctggttcgtgaagcgacacaaggtattgtgaaactgacggtacatcccggctcgcaatatatgatttcgcgcgccacttttccggcctactttctgaaagagcaggcgctcgtcgaacgctgctacacacaaatcgatattacacttttccgtcaatatatcgccccggtgctgggtatcacacaccgcgttgtcgggaatgaacccttctgcccgattaccgcacgctataacctggatatgcgccactggctgagtacaccggagctccctttcgcgccggtggagcttgtggaaatttcacgtttgcagtggcacggcacacccgtttccgcttcaagggtacgccgcctgctgcagcaaaatcgctttacagaggtagcccctctggtacctgacaccactctccgttatctgaagcgccaccagaaaactgtcctggcgaacatgacccaaacccctacaggagcattatga

SEQ ID NO: 218245 - DNA, 294 bp, Klebsiella pneumoniae
atgaaacagattgtccccgccgtggccgggactctggagtccagcgatgccttaatccgcatcgaaccgctggctcccgagctaccgccggaaattgaaatcaccagttcggtacaaaaacagtttggcgacgccatccgcgccacgctgattgcggtactgcaacaacacgcgattcgcggcgtctccatcatcgttgatgacaaaggtgcgctggactgcgtgctgcgcgcacgactggaaaccgctctgatgcgcgcgggcgcgctaacgctgtgctggggagaaaaataa

SEQ ID NO: 218246 - DNA, 897 bp, Klebsiella pneumoniae
atgacgccaaaacgtaaaaaccgcctgcgccgcagcatgcttttcgtccccggcgcgaatgccgccatgctgagcaacgcctttatttttcctgccgatgcgctgatgttcgaccttgaagacgccgtggccgtgcgcgaaaaagatgctgctcgccacctggtctaccacgccttacagcacccgctttatcgcgatgtcgaaaccatcgttcgcgttaatgccctggactcgcagtggggtattgatgacctggaagccgtcgtgcgcgccggggtcgatatcgtccgtctaccaaaaaccgataccgcagatgatgtcattgcgatggaaaaagagatcgcccgcattgaacgcgactgcgggcgtaagcctggcagcaccggtatgctggccgccattgaatcggcaaaaggtattctgcaggctccggctatcgctctggcgtctccacgcttaatcggcattgcgctgggcgcggaagattacgtgcgtgatatccgtaccgaacgctcggccgacggtatcgagttgctttttgcccgctgcaccatcctgcaagcggcacgcgcggcgggtattcaggcatttgataccgtctacagcgacgccaacaatgaagaaggcttcctgcgcgaagccgcgcatattaaacagctcggctttgacggtaaatcactggttaacccacgccagattacgctgctgcataacctctacgctccgacacaaaaagatgtcgatcacgctaagcgcgtggttgaagcggctgaagcggctgaacaagaaggtctgggcgtcgtttctctcaacggcaagatgatcgacagcccgattatcgctcgcgcccacctggtgctgtcccgcgctgaactttccggcgtccgtgaggagtaa

SEQ ID NO: 218247 - DNA, 1497 bp, Klebsiella pneumoniae
atgaatcatactcaagatttatcccgcatcatcggtgaactgacgccatttgccgataccgataaacagacccaacgccagcagcgacgtgcgaaaacctgcgcatcactgacagaggccatacgccgcagcggcctgcgcgacggcatgaccatctcctttcatcacgcttttcgcggcggagacttgacgctgaatctggtgatggatcagctggcgacaatgggttttaaaaatctcactttagcctccagttcgctcagcgcctgccatgcgccgctggtcgatcatatccgcaacggcgtggtcaaccggatatatacctcagggctgcgcggcccgctggcggaggaaatttcccgcgggctgatggcgcacccggtgcagattcattcccacggtggtcgcgcccacctggtgaagagcggcgagctgaatatcgatgtcgctttcctcggcgtcccgtcctgcgacgacatgggaaacgccaatggctataccggcagtgccacctgcggctccctgggctatgcgatggttgatgcacagtacgcgaatcaggtgattctgctgacagaagatatcctcccctacccgcaccacccagccagcatcaggcaggatcaggtagacctggtagtcctggtggaatgtgtaggagacgcagaaaaaattggcgccgatgcaacccgcatgaccaccaatccgcgtgagctgcaaattgcacagaacgcagcgctggtgattgaggcatcaggatattttcgtgaaggtttttccttacaaacaggtaccggcggcgcggcactggcagtgactcgttttctcggcgagaagatgcgccgcaagaatatccgcgccgattttgcgctcggcggcattactgccaccatcgttggtctgcacgaagaaggctacatccggcgactgctcgatgttcagggatttgatagcgtcgccgcccgttcgctggcgcgtaatccaaaccatatcgaaatcagtgctaacgagtacgctaacttcagctccaaaggagcgtctgttaataaactggacgtcgttgtactgagcgcgctggagatcgacatcgactttaacgtcaacgtactgaccggttccgatggtgtactacgtggcgcatcgggcggacactgcgacactgcgttcggctccgcgctgtcgattatcgtcgccccgctggtgcgcggacgcattccgactgttgtcggtaaggtcctgacccgcatcacccccggctccagcgtggatatcctggtgaccgaccacggcgtcgcggtcaacccggcgcggccagaactggcgcagcgccttgaggccgcagggctgaaaaccgtcaccattgaatggctgtgcgaccgcgcgcgccagctgacggacgagccgcagccgatcgcctttaccgacaagcctgttgccatcgtgcgctatcgggacggttcggttatcgatgtcgtttatcaggttcgtgatgaatga

SEQ ID NO: 218248 - DNA, 927 bp, Klebsiella pneumoniae
atgatgcgcccggtgcctaccgaatcctggggtgcgccagtcgcgcgtcaggaaaagctgccacaggcatatcgcagccgctattacgccaggctggcctgcagggcaatgcaaacggaagctcggttgacgccgaaacctggtctggttgacggcagaaataccggcgctcacaaggatatggcgttacctgattttctgcgtagcgccagcgaaattgccctcattttcccgctgttttttgaagagggagccgccagcgcggtgtgcgatcctgactgcgttctggctcgcctgaaacccatcgggctgcgctgcgaaacggaaatgttgcaggcaacgggaggcgtcaacacgcataaaggcgccatctttacgctcgggctgttttgcgccgcgctggggcgccacgaggctttggggcaaccgctcacccccaacgcgctggccgccaccgtgtctacattttgccacggtatcgtcgaacgcgagctggtggaacttcgcggccggatgccgcttactgccggacagcggctgtttattagcgccggcctgaccggggcgcgtggcgaagcgcaggcgggatacccgctggttatcgaccacgccctgccacgctatcgccagctgcgacgcgaaggtctgagcgaggaactggcgttgctcaataccctgctgctcattatgtcgcgcaacgacgatacctgtgtcgcctcgcgcggcggtatcaacgggctgcgctggctacaacgtcaggcgcagcagttgcttaacgacggcggcatccactcacccgaaaatctcacgcgattacagcaattcgatgatcactgtattacccgcaacctcagccccggcggcagcgccgatttgcttatgctgacctggtttctttcacactttcaccaagaggaaagacaatga

SEQ ID NO: 218249 - DNA, 438 bp, Klebsiella pneumoniae
atgatcagagactggttaaccccggataaaattaaagtcattaactcaatagatagctgggaaaatgccgttcgacttgcagcagaacccttgctgatgcaagggtatatagccgggtcgtatattgaggcgattttgcaaagccataaagaacttgggccttattacgtattagctcccggcttggcgatgcctcatgcccgtcctgaacagggggtgttaagaaatggattatcgcttcttcatattaaagaaggggtgtcgttcggctcgacagagaacgatccggtatacgtggtaatcatactatgcgctcgttccggaaatgaacatatcacgatgattggtgaactggctgaaatctttagcgatcagcaaaagttacaccgattgttaaatgccgatgatagcaaggcgattcaggccgttattgactga

SEQ ID NO: 218250 - DNA, 774 bp, Klebsiella pneumoniae
atgcatcagaatctttcaagttacgataagtatctgaaagaaggcctcattacaaaagatcagtacaactatcagcactcactttattttcaacagcaaagtgcgtatcaatctctggtaagccaaaagatgcaactggaatctcagataacccagttcacaagtgataaagtcaccaaagcggcagattttgataatcaaatatcaaaccaacaaaatcaaattaatgattctaaaaatcaactagttgagtccgatgcaaaaggcaatgtcatcatcaaggcgacaacggatggaagaatcgaatcgctagccgtaaccaaagggcaaatggttgataatgggagtagtttggcacaaataaagcccaccggtaatgttgagtactatcttattttatggttacccaataatagtattccttacgtaaaaccgggggatacaatcaacatccgatacgatgcctttccggcagataaatttggtcaatttccaggagaggtaatatcgatatcatctatgcctgcttcacgacaggaaatgtcagaatatactaacgttaataatggcacgaatcagcaagagcttgcactatataaaacgattgtaaaaatcaagcaaaaatcctttagttacaatggaaaaacattgtacttatctaatggcttaaaagccgaagctgttgtttttcttgaagagcgtccgttatatatgtggatgtttactccgttttataaaatttctcaaagtgtgagcggcccaattaatgaataa

SEQ ID NO: 218251 - DNA, 2121 bp, Klebsiella pneumoniae
atgaataacaaactctttgaaacgattattgcaaagttaaatttttcgctaattaagaaaacaccggtaattttacaatcagaatcagcggaatgtggtatcgccagcctggcaatgatctgcggacactatggattagatatagacttattcaatttccgccaacgcttcggcagcccatcgcaaggcgcttcactgctgcatttgagcaaaaccgccgagcgtgctggccttaaaaatcgcgcgctttcattagatttagatgaaataaaacagcttaagctcccttgtattcttcactggggaatgaatcattatgtcgttctaacgaaagtacgaaaatctagctatgttgtgcatgatcctgctttgggtaaacgtataattggtttgcaggagatgtctaataatttcaccggcgtggctctggaactttggcccgatcagaactttcagcaagaaaaggcaaaagcacgcttacgtttattagacctgatgcgaaacattgtcggattaaagtctgcattaattaaaatcttcgcattctctgtcgtaatcgaagccattggccttttactccccattggtacccaactggtcacagaccatgtcatcatggcccatgaccagagtctgttatccgtcatttgtataggactggtctttttcactctcttccgtacctttgtcagtatgctaagggcatggacctcactgactctcaatactctgactaatattcaatggaaaacgacattgtttgatcacttgacaagcttgccgttatccttttttgaaaaacggcatcttggtgatatccagtcacgttttacttcattagatactatccgctcaacgttcactaacagtattgtcagtggcatcattgactcgatcatgacaattggtctgttaattatgttaaccctttacggcggctggctagtatgggtggtcgtaggatttacgctttgctacgccattatgcgcctggcgacataccgtttttaccgtcgggtagcagaagagcaagtcattaaaggagcccgctcgagctctcatttcatggagtcactttatggaatatcaacgattaaagctcttaatttaaaagagcgccgttcgcagcattggcttaatattaacattgatgcatgtaatgcaggaattaaacaaactcgctttgatatgatgttcagtggcataaacaccttcatatcatctatagatcaggttgctatcctatggttaggcgccattatggtgattgataacaacatgacgttaggtatgtttatggcgtttaactcttatcgtggccagttttctcaaagagcatctaatttgatcgatctctttatgcaactgcggatgttatcattacataacgagagactatctgagattgttttcagcgaacccgagaaagagctcccggcacgtcgagttttcgatgagaatagtggagtgaagctggagattaaaaatctcagttatcaatatgacccgttctcgcaacctattttttctaactttaacctgcaggttgagccaggagaatctattgcgcttgttggaccttcaggggtcggtaaaacgactttactgaaagtgatgtgtggtttgttatctccaacgtcaggtgaggtaattgccgataatcttgacatttataaaatagggcttaataactaccgcctggggacagcatgtgtcctgcaagaagatcgtcttttttcggggtcaattagcgataatatcagcgggtttgaagataatgcggatgaagaattaattgttgagtgtgctcgacgcagtaatattcatgatgaaattatgaaaatgccaatgggttatgaaacaatgataggtgagttagggctgggtatttcaggtgggcaaaaacaaagactcttaattgccagagcgctttaccgcaagccgagcattttgtttatggatgaagcaacaagtcatcttgatttgaagaatgagtctgccataaaccaatctattgccagtttaagcataacccgaatcattgtcgcgcatcgtccttcaacgatagcgtctgcagaccggatcattgatctttctcaatatggaaagcaagcatcataa

SEQ ID NO: 218252 - DNA, 861 bp, Klebsiella pneumoniae
atgctaagtaccgtgctaggttttaacaccgcaatcataaagcaaaatgataattttcttgctctggcgctgaaaataaaaagaagtgataacacatgtcaaacatattatttacaatatacaacattaactgatttgttaattattttaagaaatcaattacacagagtagctcatcgattgttagaacatggtgaaacctatcggggtcagttgcatgagcaggcagagctgtgtataaaaaacattccaggtatagatgctaacgaagtacagatgcctgagcctgagagaagaatcgcttcattaacgctcaaaccaggaaaatcggactcaacgctgatcgccatgcttcaatcagagcaaattgaaattatcacaattgatgacacgcaagcagaggtacttctacttgcaatacgccaggcatttttacacgctgatgccgaagattttctcaaccttatagattccactacagattttgtgatgctgtatgcagtgcaagttatggaagatactcgttttaactatgaatattttgaacacgaattatggaagcagaatctattttctcaccatctcgcggtactttattgttatgaaaccgaaaatggtaaaaaaattctctccggagccgtaattaaaacgaatgcggttcatccttctgaagcagaaaatagtatcactatacgcatcaatgaacagtgtccaaaattaagggtagtaaatgaaaagtattccttgtgcgagatattcagtaaagttattccgactgttggcaacatggatagtttggaagcctgtctgcatccattaaagacattttttattgagcaacaggcaaaacttgagttctaa

SEQ ID NO: 218253 - DNA, 681 bp, Klebsiella pneumoniae
atgcgaatcttaaattcattgctatccattatactccttttttctacctctctcgcctgctacgcaggagtacaggtcggaacgactcgcataatttatgcagaaggtaaaaaggaggcgagcgtatcccttgataacctggacagtactccttatctaattaaatcatggattgaaaacaataataatgctgggacacactttttagttactccccccctctttcgtctggaagggaaacaaaaaaatgttgtcaggatctttaagcttgatggcgttttgcctgccgatcgtgagtcacttttcttttttaatacgacctcaatcccggccagtacgacagatgccgatcgtaatacgttgcaaattgcagttcgtaccagacttaagctcattttccgcccgaaaggactaagcgatgacttgccagtaaatcatgctaaagaattatcatggtcaaaaaatggcaatcagattatcgtcaaaaacccgtcagctttttacattaatttcatgtttatcaaggtgaatggtcaatcaatagtaatgaaagataaaaacttcgttgcaccattctcctcagcaagttactcattgcctgcaggcggtggtgggaaagtagaatggaaaattatcaatgatatgggtggccaaagcgacctttatcaaagcagtttatag

SEQ ID NO: 218254 - DNA, 2574 bp, Klebsiella pneumoniae
atgattaaaaaattcaaattatctccatgctgtttagctcttataagtatcggtgtgttagccatatcttctgagctatatgcaagagaattttttaaccccgcatttcttaccgatctaaacggttcagacgtgagtccggacctttcggcttttgaagtggcaaattctcaggcccctgggaaatatcgggttgacattatcatcaatggtaccgtcgtcgataccaaagatgttgatttcttttctacggcagaacaaaaagcaagctatcttaacgaggcgggagaagagcttaaactatacccatgcttatcaacagaggaattaagtggttatggtattaaggtaaaagcaatctcttcattaaaaacaaacgctaatggttgcgtcattatcagttccattccagaagcctctgttgattttaactttaacttacagaaacttgagttaagtgttcctcaggctgcagtatcctcaacggttcgtgggtatgtttcacctgatgaatttgacaatggtattaacgcgttctatttaaattatagatataatggaaccagtagctacgcacgagataacggatcatcagatcaagagaaccatagtgtcaacttactaccaggcttaaatatcggaccatggcgtattaaaaactacaccacgtggaataaagatagttatgataatgatagcaatggtaaatgggatactatttatacctatgctgaacgaaatattatttcacttaaaagcctgttaacattgggtgaaagcacttcagatgctgatatttttgatagtgtgccatatcgtggtgcgcaattaaactcagacgattacatggatgcagaaagtatccagggatatgcacctgtagttcgcgggattgcgaaaagtaacgcaaaagttattattaaacaaagtggatatgttatttatcaatctttcgttcctcctggagcctttgagatcactgatctgtattcgacaggtggcaatggggacctcaatgtcactatcgaagaagctgacggcactcaacaaaattttgttgtagcttatgcttcacttcccgtattacgtcgtgaaggtagtttaaaatatagcattacatccggccaataccgctcctccgacggtagcgttgactatactccgttttcacaagcaacggccagctacggtttaccacacaacaccaccctatacgggggattccaggctgcttctaaatatcaatcagtggccattggcgtcggtaacaacctgggcgtacttggtgctgtttctttagacgtaacacaggcctggtcgacgaagcaagatcaagataagatatcgggccaatctgtgcgtatacgctacagcaaaaacctgaacgatataggcacaaatatagcgattgcaggctatcgttactcaacgagcggctttaataccctttctgatgttcttgaaacctatcgtgatgactataaatactactataacgatcgcgttaaaaatagaactgaaattaccgtaagccaaagcctcggtgataaattaggctattttaacatcggcggcgtaatggaagattactggaatcagcgccgcaggaataactcacttaatgtaggttacagcaatagctggagcggtattacgtataatttaaactattcccattctcgctcctcaactgactatgagggttacggtagaaactattctactgataatatattttcattcaacgtcaacattcctcttgatatttggatgccgaatacttgggtaacctatggcttgaatactagcgatccgggctcaaccagtaatagtgtgggtttatctgggcttgcgttggcagataataatctgagctggaacttgcaacaacaatacgataatcgagacttcagtagtggtaacgctggcgtcgactataagggtagctatggtgaaatttacggaagctacaactatgatcatgattggcagcgtctaaattatggtattaacggtggtgtaattgtgcaccgcaatggtattacagctggacaatcttttagtgatacaagtgctcttgtcaaagcgcccggtgtgaccggaacacgtgttataggaaataccggtgtgaaaacagactaccgtggctatgcgatagttccaaatattacgatgtatcggagaaatgatgttgttcttgatacagaaacaatgcctgaagacgttgatttagatacaaccaccgctacagtggtgccaactcgtggggcgattgtattagctcaatatacaggtaaaaaagggatcagagctatgtttcgtctagttgataccaataataaaccagtcccatttggtgctatggtaaacagcgttgcagagacgtcacaagaagttcgtaatggtatcgtcagtgataatggtcaggtttatatggctggtttgcctttggaaggggcactatcggttcagtggggtaaaaaggcttctcagcagtgtcgtgcaaattatcaattttcggatgctgaaaaaacaagcggtattcaacaaagtcaacttgtgtgccactactaa

SEQ ID NO: 218255 - DNA, 960 bp, Klebsiella pneumoniae
atgtataaaattatggtggctattatcaccacctttatcggtatctatagttcgcagtgcttagctgatgcgtctggctgtattgtattggacggcaagacgtatactttaaatttgtcttcaatagctatcgatccagatgccgaggttggtgcaactctctatacagctcgcctcgatacagaaggaccaaagataacctgtcctttaaactcaggaagaggtaaatatacctctaaaatgctgggttctttccagacattagtgggctcgaatgtttatggtaatatctatgcctcaggtattgatggtatcggtattcaaatacgagatcttgtacaatcttcaaaagccgtcccttattcagcgtctatgacttctggcgatttattatattggtctaccgataaaaaaactgtcattagcttcattaagacaggcactgttggtaaagggacgacgaattatggcctcgcggcccagtttaatgttgataactgggttgtagcaaaaatatctattaaagcaaaaatttcctggattactaaaagctgtgtgacagacccaagtttacgaattcaaaatattcaacttggtaatcatcttgcttcttcctttacgtctgttggaagcacatctacggataccaagttctccgttaagcttaattgtcagaaagatgctaatgctatctacgtttcttttgacccaacaaccggtagtactggaaaaggtatacttaatgttgacaccagtaattcagatgccgccacaggcatagcagttgaaatacttaatgctaaagatcgttctcctttagttttttctagtgaaaccaaatatcataccaatatggagagctcaatagagatcccacttgttgctcactataaacgtatcgggacggttaagtcagggactgctaatgctgcaatgaccttcacgataaatcaatattaa

SEQ ID NO: 218256 - DNA, 363 bp, Klebsiella pneumoniae; identical to SEQ ID NO: 137714

SEQ ID NO: 218257 - DNA, 363 bp, Klebsiella pneumoniae
atgaaagaattatctgtaattgaaatggaatcaatctctggtgcttatagctgggacttctcatccctgggatcggcgatttcatcgattgcaacaaacggcgttgaagcagtcgcttctgctttgctgttaggtgcaatcaccgcaggtggtggtagcatcgttggtggctcccacggcagcgacaacggcgggatctttggggttggtactatcggtatgatgatcggtggactctatggccttatcgttggcgcaattaacggtgccgcagcaggtttcttcctgggctgggatcagtcaaaacagatcgcgattgatagtttagaaggtatctttaacggtactccgggtatttattaa

SEQ ID NO: 218258 - DNA, 561 bp, Klebsiella pneumoniae
atgccttatccggcctgcgggtcctccacaggttcaaacagcgtaggcccgcgcaagcgcagcgccgccgggcgatacacatcagacgccgtacccgcggttgtgccggatggcggcataaatgctttatccggcctgcgggtcctctgctggttcaaacagcgtaggcccgcgcaagcgcagcgccgccgggcgatacacatcagacaccgtacccgcggttgtgccggatggcggcataaatgccttatccggcctacgagtcctttcgcaggctcaaacagcgtaggcccgcgcaagcgcagcgccgccgggcagcgggtgatagaacggagttcgatgaagagtccggatgcagaaaagcaaaaatccgccttttgggcgggttctttaaatagtggtgcccggactcggactaacgccgcaggcgttgaacagcgcgcttgccgcgctggccccgaaggggtgagccgctgtgcggcgaataatcgaacggagttcgatgaagagtccggatgcagaaaagcaaaaacccgccttttaggcgggttctttaaatag

SEQ ID NO: 218259 - DNA, 537 bp, Klebsiella pneumoniae
atgtggataccgcagacgcaagaagcactgaccgatattgataccgggcaggtgataacgccgcagtatgcaacttatgacaggcacgctgaagggattaatattttctggataggacgaaataacagtgctggtattgcgcaggttatttccgatttgaaagcgatggtggaaaaagttaaggcatcatctaaatatccgcgaatcgtggtgctggctgatttcatggatgccggacagactaatggtacggcaggccgcgcgcagattttttcgctgaatgcagcgtataaacgcgcgtaccccgaatattattgcgaaattgacggcgtcgatattttgcagaattttatcaatcacgcaaatccgaactatgcagacgatgttacggacgttgccgccggaacgacaccgcgcagcctgcgttatgacgacctgcatccgtcccaggttctgcaggaaaatgcattacatatcggcgcggatgttaacgccgaatttatcgttcaatttttgacaaaaaaaggttggttataa

SEQ ID NO: 218260 - DNA, 870 bp, Klebsiella pneumoniae
atgactacagtaacgggtccattcgaagtacgtaaaaatctcactctcggctctggcgtaaaattgtatcgcgaccagaccattgtcccggaaactaaaggcgttttcgatttcgcatctgactgggcgggcggtaaccaggcgcagtataaaaatctgaacacgttaaaaaacatgaactatatcgatgatgcgataacgattaacgccaacgattcaaattcaaacgcgcaaaactacggcagtggcgggggaatttactctgcaacaggccagaatctgggtgtaaaactcccgtcgtcaatgtatcccacgccggagatgtcaaaattcctgtatacagtgtgggcaaaatggccggctgacaaactgataaaccccgcaaatactaactgggcattgctctacgccgggtcgggtgagggtaatttgtctgatgatgtcagcactgcatttaaaatcggcggcgtgcgacaagttaacgacggtacagatgtgcctatcaactcactgtacgtatacggcgtgcgcgttacctacccgtctgaggcccagactaagattaaagccgtcgttggccagagcaagccattccagtatggcgtcgaagtagtgcgagataaaaacctcaacaatttctattgcaatttttatctaaacggtgagttgatcggtacatctccgacgcataccccgctcgctatcccgatggtcacaaacgcctttgtgctgggaaatctgtcccgtggctactgcatggcgaacactgttttctatcgtgtacgcctggatgacctgagcggctctactcagttgacggcagatctcatcgcagacgattacgcaaagaataagaggtactttatctag

SEQ ID NO: 218261 - DNA, 1020 bp, Klebsiella pneumoniae
atggctatcggtgacggaggcggcgcactcccaagcccctccagtgagcaatccggactggacaatgagaggtaccgcgccccacttaaccgactagttatcgccgaccagggtgcaaacgtgatacgcgcagaaatgattatacccccgcaggttgggggcttctggctacgcgaggcggcgctctatgatgataatggcgtgtgcctggctgtggcgaatctgccggagtcgtataagcctctactggctgaggggtctggccgcctgcaatcggtgaatatgtggattgccgtcagcaataccgctgatgtggaactgaaagcggatccgtcagttattctggcatcggtggaggaagtcaaccgcgcaaaaaatgaggcaaaggattacacggacgagctgatcggagcgctgggggaaagcatcgatcaggctgtaaatgagctggataaaaacacccaaaaggctatcgccgatgctgtgaaaaaagcggtaagtgacgcatgggagcagaataaccccgtcggcaccacccggttttttaatcagaacctcaaccccaacgagcgctggccgtggtcgcaatgggtttacaccggcgaaaataaaacaattcgcgtcggaaaagctgacggctcaaatgtcggacagaccggcggcagcgataacgtcacgctacagcgggccaacctgccagccattcagattaacgtcaacggcgaaaccagcgagttacctgcacatgagttaacaaccaggggggctggcaggcacaaacatcagggggggatggcggcgccgggtgaagcatgggacggggattatattgtcggctccgataatgacagccatcgcacacgcaataacaccagtgaagctgacgatcatagccatatcgttgacgtccaggcccacaaacacacgaccaccggcaaaaccgacaacctcggcgagggtaaattgttcagcgtggtggaggctcatacgctgctgatgtgctggtcgcgggtggcgtga

SEQ ID NO: 218262 - DNA, 489 bp, Klebsiella pneumoniae
atgatgatgatttacgggatgtttgtttttacgcttcgcactgtgccgtatcagcagctgcggcactcccaggcgtggcggcacgttaaaaatgaccgggttaaccagtcggcggcctggcagtacatcggcccaggtgacgacacaatcacgctcgatggcgtactctacccggaaatcaccggcggccggtggtcgctgtcggcgctggagacgatcggctttgccggtcgtccctggccgctgattgagggtgacgggcagatttatggtatgtaccttatgacgcagctggagcgaggaaaaacggagtttgaccgctacggcaacccgaaaaagattgagtttacgatcagtctttcgcgcgccgatggtgattttcgcgagaagctacagacgtcgtctgtcagtgatgtgctggatgatctgaagtccagcgcgacaaaagcggttaactctgtttcaacttccatcaagagcctgttttaa

SEQ ID NO: 218263 - DNA, 2922 bp, Klebsiella pneumoniae
atggatcttagtattcgcgttgcgttcagtgctattgataagctcacccgcccggtcagcgccgccagtaaagctattggcggcctttctgactccctcaaaaaaacacagtcttccatcaaagacctggaaaaaagcgcgtcatctttcgacaagctgcgctcacaggccaacgataccgcgcaaaaactcagaagcactcaacgtgcctttgatggtctcaatcagaagcaacgcgaaggcgggcaactgaccgaggcgcagacggcgcggcttgaaacgctgcggaataagctctcgcgcctgacagacacctataacaaacagaccacccaactacgtgcagccggacaagcggtgcgccagcatggcgttaacctcaatgccggtagcggcgcggtgcaggcggccatccggcgaacagagcaatacggtcaggcgcttgagcgtgaacgacagcggctggctgtggtcacgcgcgcgcaggcaagttatgagagggctaaggaaaccggcgcgaaacttcgcggcggtggcacgatggcggctacgggcgcagttgcggcgggatacgctggcggcagcttcctggctcctgccgttggctttgatgaggaaatgtcgcgcgttcaggcactgacacgacttgataaaggtgactctcaacttgcagcattgcgtgcgcaggcgaaaaagctcggcgcggaaacggcatttaccacccgcgacgcggcaagtggtcaggcgttccttgcaatggctggcttcactccacaatcaatccaggtggcattacctggcgtactgaatatggcgctggccggtgggatggagctgggcgaaagtgccgatattggatcaaacatcctttctcaatttaccctccctgccggtgaaatggatcgtgtcagtgacgtgctgacggctgcatttacccgcaccaacactgacctgcgaagtcttggcgacacgatgaagtacgccggtcccgtggcgtcaaagttgggtatcagccttgaagaggctgccgggatggcgggtattctggctaacaacgggcttcgcggtagcgatgctggcacagctatgcgagcttcactagcccgacttgcatcccctacagccggagcggcaaaagcattaaaacagcttggcgtatcagtatcggatgccaggggtaaaatgcgaccagttgaaactattcttctcgacctctacaaggcaactaaaaaatacggacaagttgatcaggttggattctttaaagacattgccggggaagaggcttttgttgggctgcaaacactggttgcaggtgcgggaagtggagaactgcaaaagctcgtaagggaactaaaaggcgcaggaggtgaggcgtctgctgtcgctaaaaaaatggctgacaacctgagtggcgatctgaaaaacctcgacagcgcctgggaaggatttcgcattcagattgaagagaccgttgatggccctcttcgcaaattaacacaaggtttaagtgatgcgctcacagctgcgagtgaatgggtaaaagccaatccgcgccttgcacaaacattgttactggtggctagcggggctctggcgctgacagttgctgttggcgccctctcgcttgctgtcggtattctgattgggccgctggcaaaactacagctcggcttcgcggtgctaaccggtggtcgcggcattctcggcactattgccgcattccgcaccctgggcactgccgctggcccggtgatggcaagcatgcgcggctggcctgtcgttgtatcggatatctcatccggtttcggcaggatctcagcagtgcttcccgccatccgcgcggggttgttaggtgcatttctggcgcccggtgctgcgttggcctccctgggtaaaaaccttgccatgctgatgctcagacttaccggcctccctgcgttatggggggtgattactggtgcggtatctgtgctgggtggcgcgctgtctttcctgttaagtccaatcgggttaattggtgcggcgtttgttgcggctgggctgcttatctggcgctattgggagcctatcaaagcctttttctctggtttctttactggtgtgtggcaggtgttaacacctgtcagagctgctttttctgcactggtgcctgttttctccgcgctgggtaatggcatcaaggctatctgggagtggttcaaaaacctgctgaccccgatgcagaccagtaaagacacgctggataagtgtgcgtcggcgggtgaaacctttgggcgtgtaatggggaccgcgcttagtgttctgttatggccgctccagcagttaatgaacggcgtcagctggttgcttgaaaaactggatcttattcccgacggtatcgaaagggccaggcagcaagcagataaggcacagagtgcgctggaggcatcagcagccacgctggccggtcatcagttgccacttggtcaggccaccgtgtccggtgctggcggtggcaagccgccggttattaccggcgataatggcactcttcgacgcctgaataatatcgcggataacacaaaagcgacggcgaataacacgaagaaaatcggccccggtgatattgtctttaaaaacctgccgcgtgcgctggcgctgcgtgggccctatcaggaagcgcgggttattccgcagcctgtaccgcgtgtgtccgccgctgcggccggcggcattctgtcggtgccgacggcgacgcagggggcaacgtctgcgccggtcgccgcatcgtcaggtgctgcgccgttcttccagttggtctttaacgacgtcggtaaacgctcggatcaggagctggaaaaaatggtgcgtaacgccgtgcgcgatgcaatggccggcacccgcaaaactaaccgcggctcattccgcgatcgggagtaa

SEQ ID NO: 218264 - DNA, 300 bp, Klebsiella pneumoniae
atgtccgttattctcagtaagccggtcaagcgcggcgatcaggaaattatcaccatcactatcactgacaccatcaaacaggctggatctctgcgcggactgcgtcttgttgatgtgctgaacttcgattttgatgcggtttccaccctgctgacgcgcaccaccagtccgcagctgaccagcgccgaaattgcctcactggcaaccggtgacttcactgcgctatgtgaagagatcacgccttttttgacgaaaccggtgccgtccgcacagaacgtggcggagacggagagcgagtaa

SEQ ID NO: 218265 - DNA, 516 bp, Klebsiella pneumoniae
gtggctattcctaaaaaactccggctgtttaccctctttgttgacggggaaaacttcatcgggaaagtgccaagcgtcacgctcccgaaactcacccggaaaacagaagactaccagggcggcggcatggtcggcgcggtggcggtagatctgggtcttgattccggggcgctcgatgcgtcgatggtagtcggcggtgtggtcgagacgctgatcctgaaatacggtggcgatattgacgaagtgcgcctgcgttttgctggtgagatttacagcggcgggaccagttccttgctggaagttgagatgcgcggccgcatcactgaaatcgatccgggtgatgcgaaacagggtgatgataccaatcacacctacgccatcaaaaacacctactacaaagagtcggtagacggtaaaccactgctggaaatcgacctgctgaactttatctacaagcggaacgggcagaacctctacccggatcgcattatgtcagcgctgggtctcggcagctga

SEQ ID NO: 218266 - DNA, 1182 bp, Klebsiella pneumoniae
atgaccgacaacttttttcacggggcgcgcgtcaaggaaaataccgacctccagaccgcgatcaatgacattgattcaacggtcattggtctggttgcggtagccgaagacgccgaccctgtcacctttccacttaacactccggtgcttgtgacgcgggttatcagcgtgctcggcaaagcaggtaaaaccggttcgctttacaaatcgctgaaagctatttccgaccaggtcagcacccgcgtgatcgttgtgcgtgtggcaaaagctgaagcgggtgaaaacaagcccactcagtcgcaactgattatcggcggcacgcaggcagacggcagctataccggcatgtttgcttttctgacggcggagcaaaaaaccggataccggccacgcattctcggcgtgcctgattacgacactgccgaagtgaccgcgcaactgcgggttatcgcaaagcagttgcgggcgttctcatacagctactgccacggctgcgacactattgctgaagccaaaacctaccgagaaacgtttgcagagcgtgaaggtatgctgatttggcctaacttcatcgcctataacccggcgactggtgccaatgaagagtttcccgctgtggcgtatgcgctgggtctccgcgctctgatcgataacgagcagggctggcataaatcactgtctaacgtgccagtgaaaaacgtgctggggatttctaaggatgtgttctgggcgttgcaggcggaggactccgacgcgaacgagcttaacgccaatgagatcaccacgctgattaaacgcgacggcttccgcttctggggtaaccgcacgactgataccgaaaaatttattttcgaggtgtacacgcgaaccgcgcagatcctggcggacagtatcgcagaagcgcagttcaccacagtggacaccccgctgaccccggcgaacgtgaaagacgtggtgagcggcatcaacgccaaactacaggcgctggttaccgccggcaagctgattggtgcggcgtgctggtttgatatcgttgataacccgaccgttggcctgcggcagggtaaagccatcgtgcgctacaactacagcccggtaccgccgctggaagacctgacgatgatccagacgttcaccgatcaatactacgaaccggcgttcgcgtcgcttgggggtgaatag

SEQ ID NO: 218267 - DNA, 1155 bp, Klebsiella pneumoniae
atggcacttacgacggacactatcgacaaagcaaaagcgctactgagcgaaggggtgcagcgattccaggattaccagtcagaactatcgcgcgtgccggcattcagcatcatgatgggtggcaaggctctgacgcagctcgatccccgcattatttcgctagagctgaccgacaaccgcggatttgaggccgacgagctgaccattgttatcgacgacagcgacggactgatcgaactgccgccgcggggtgctgagctgtcggtgtcgctgggctggcagggcgagccgctggtttacaaaggggtttacaccgttgacgaggtcgcccattcggggccgccggacaggctggagatcaccgcccgcagtgcagattttcgggacgaatttaacgtcaagcgcgaagtgtcatggcatgacgtgacggttgagcgcatcgtgtcagccatcgccaggcgttacaaactgacgccggtgatttctgagcagttgatgaacgccgagattgatcacgctgaccagacccaggaaagcgatatgtcatttctgacgaggatggccgaccttctgggtgcgattgctactatcaaaaacggctgtctgctgttcattctccccgggggcggtgtcagtgcgaacggcaaagcgttaccagagtttgcgatcacccgctccagcggtgacaggcattccttccgcatcgccgaccgcgacgcttacaccggcgtgcaggcgtactggctggatctggagtttggcaaaaagaaaaaagtcaccgttaaagcccgcaagaaaaaaaacgagaagaagccgcgcagcagcagccgggaaggggattatatcgcgggcgaagacggtaacgtttttgtattacggacaacgtacgccagcgaaactgctgctcaacgcgctgccgctgcaaaatggcaacaactcaaacgcggtgctgctgaatttaatatgacgctcgcccgtggccgcgcggatctgtacccggaaatgcatggcactgtgtcgggctttaaagcagatattaataatcaggactggataattgcgaaggccacgcattcgatcgacgacggcggatttaaaacgcaactggagcttgaagcgaaaatacctgaatggattgcagaaacggagtcatag

SEQ ID NO: 218268 - DNA, 249 bp, Klebsiella pneumoniae
atgttcaagtgtcctatctgtggtgccgttgctaagacgcgtaccagtcgtccgttaagtaataccaccgttcggcattatcatcagtgccagaattttgaatgtagtatcactttcaccacactcaacagcgttgaaaaactggtaacaaagcgcgcgccgcgtgagaatctaccgctgggcttcatcccctctgacgcgtttcctgcgtcacactacggtagcgatcaactaaccctccctgtttaa

SEQ ID NO: 218269 - DNA, 177 bp, Klebsiella pneumoniae
atgaaaatgttaaacagaatgaagatccattttattagtaccccaaaaattgagcggcgcggcttccttaattgttttccgcaggatggacacctcaatgctgaatcgctcacttctttccggcattccgggcagctgaccaaagccatagcaatcatccccatagttacttattaa

SEQ ID NO: 218270 - DNA, 897 bp, Klebsiella pneumoniae
atgaagaaaggttttgttttcattgcgacatttttagccgcttccgtttctttggctactgatgctaaagaggagtcaagggactttaaaggggttcttcagtgccggacgattgaggatagctcactgcgtctttcttgttacgataattcaatccctccttcgcgaacaaagcacgctgaaaaatttgaaagtagagagcaatgtccttatgaaaaaacggatgagaggcgtctggcctgctatgacagatttttctcgccaactttcaaaccgatgaattcagcaaagaatgcaccttcaggtgctgaagttgctaaaaacgaggcaatcagtaaagaaaaggctctggagtgccgctcagaattaaatggtaccaaacgattagcgtgttatgacaagctttttccgcaggatgcaacagaaggggatgagcctgccgtagtagaagcgactccgaaccccggaaaatggcttacccatataacaacatctccggttgatgactcaaaaaacgtggttttaatgttacctagcaatgattcaatcagaaccccatttggcgagaccgtcacaccaacgatttttgtggcctgtcgtgaaaagaaaactgaagtttttattaattgggatgtgtacttaggacttgaggaaacaagtatgctttaccggcttgataagcagaaagcggtggagagaagctggtcgatttctaccgacaccaaagcggtcttttatagtggtagagatatagattttgttaaggccctagctaaatctgaaaagatgtttgcaaggataaccccctacaacgaaagccctgtatcggtaacatttgaattaactggattgaacaatgcattaaagcctctacagcaggcgtgcggctggaaatag

SEQ ID NO: 218271 - DNA, 228 bp, Klebsiella pneumoniae; identical to SEQ ID NO: 136941

SEQ ID NO: 218272 - DNA, 495 bp, Klebsiella pneumoniae
atggagttaacggacaaagcgagtttccgtgacgccatggcccacgtcggcgccgcggttaacattattaccaccgatggcccggcgggccgggcgggattcaccgccagcgcggtctgcagcgttaccgacacgccgccgaccctgctggtctgcctgaaccgctcggcttcggtgtggccggtgttcagcgaacaccacacgctatgcgtcaataccctggcggccggacaggagaccctgtcgacgctgtttggcggtaaaacggcaatggacgagcgttttgccgccgccgactggcagaccggcgccaccggctgtccgcggctggaggcggctctggtcagctttgactgccgcatcgaccagcgcgtcagcgtcgggacgcacgacattctgttttgtcacgtcgtggccattacccgtcacccggagccccggggactgatgtggtttgaccgcggctatcacacgcttatgcgacccgcttgttaa

SEQ ID NO: 218273 - DNA, 249 bp, Klebsiella pneumoniae
atgcgtgtagaaatcagcattgccaaagagaaagccgtgaaaatgccaaagggttcactggaggctttgaaagacgagatgacccgccgtgtcagtaagcaatatgacgatgttgaagtgatcgtgaaaacagccagtaatgatggactgagcgttttgtgggcgacagataaagaaattgcgaaggaatttgtcgaagaaaccctcaaagacgcctgggaaacagcagacgactggtttgtgtgttga

SEQ ID NO: 218274 - DNA, 1539 bp, Klebsiella pneumoniae
atgagcagctcacttcctgacgatatcaatgcactgaaacgtctccttgccgaacaggaggcgctgaaccgtgccctgctggaaaagctgaacgagcgtgaacgcgaaatagaccatctgcaggcacagctggataagctgcgccggatgaacttcggcagccgctccgaaaaagtctcccgtcgtatcgcacagatggaagctgacctgaaggcacttcagaaagaaagtgatacccttaccggtcgggttgacgacccggccgtgcagcgcccgctgcgtcaaacccgcacccgcaaaccgttccccgaatcactcccccgcgatgaaaaacgactactgccggcagcgtcatgctgcccggaatgtggaggctcgctgagctatctgggtgaggatgccgccgaacagctggagctgatgcgcaacgccttccgggttatccggactgtacgtgaaaagcatgcctgtactcagtgcgatgccatcgtgcaggcccccgcgccttcacggcccatcgagcggggtatcgcaggaccggggctgctggcccgcgtgctgatctcaaagtatgcagagcacaccccgctgtaccgccagtctgaaatatacggccgccagggcgtggagctgagtcgttcactgctgtcgggctgggtggatgcatgctgccggctactgtcaccgctggaagaagcgcttcaggactatgtgctgactgacggtaagctccatgctgatgacacgcctgtcccggtgctgttgccaggcaataagaaaacgaagaccgggcggttatggacctacgttcgtgacgaccgtaacgccgggtcaacgctggcgccggcggtgtggttcgcttacagcccggacagaaaaggcatccatccgcagacccatcttgcggggttcagtggtgtactgcaggcggatgcatacgctgggttcaacgagctgtaccgggatggtcggataacggaagccgcctgttgggctcacgcccgccgtaaaatccacgatgtgcacgttcgcaccccgtcagccctgacggaggaagcgctgaaacggatcggcgaactgtacgccatcgaggcagagataaggggaatgacggcggagcagcgccttgccgaacgtcagttgaaaacgaaaccgctgctgaaatccctggaaagctggctgcgtgaaaagatgaaaaccctgtcgcgacactcagaactggcgaaagcgttcgcatacgccctgaaccagtggccggcgctgacgtactatgcagatgatggctgggctgaggcggacaataacatcgctgaaaatgcgctgcggatggtcagtctgggccgcaaaaactacctgttcttcggttcggatcatggaggagagcggggagcgctgctgtacagcctgatcgggacgtgcaaactgaacggagtggagccagaaagctacctccgctatgtccttgacgtcatagccgactggccgataaaccgggtcggcgaactgctcccctggcgcgtagcactgccgactgaataa

SEQ ID NO: 218275 - DNA, 348 bp, Klebsiella pneumoniae
ttgatcccattaccatcagggacaaagatctggctggtcgctggcatcaccgatatgagaaacggcttcaacggcctggcggcaaaggtgcagacgacgctgaaagacgatccgatgtcaggtcacgtttttatcttccgtgggcgtaatggcagtcagataaagctcctctggtctaccggcgatggactgtgtctgctgaccaaacggctggagcgcggccgcttcgcctggccgtcagcccgggatggcaaagtgttcctcacaccggcacaactggcgatgctccttgaaggtatcgactggcggcagcctaaaagactgcttacgtccctgactatgttgtaa

SEQ ID NO: 218276 - DNA, 156 bp, Klebsiella pneumoniae
atgattaggttattttactatcgcccgccttttttgctcttcggcccactcagccctccaggcatcatcgagagccagtatcgctgcgtcaaactcaatgcggtcgatcaggatggtgcgcgatgccaggtaaagctcgatatcattcagggatag

SEQ ID NO: 218277 - DNA, 684 bp, Klebsiella pneumoniae
atgaagaaattattgatagtggctctgggggcagtgcttttaacagggtgtacaacgccggctcgtaactatgtgcctcaaacaaagcaaatcagtattccgccgctaaatacagtaacaacaacctacgttggcgaggatatggttaggcagggaattgatgctagcattgatgcaattcatttcaatcaggctgtggttataggctcaatcggtgtctatacgatcccggcaggagactacgtaaaaattggagaggattcaaaatcagagttttactctaatgtagaaagaacatcaggtgcagttgttcctaaccgcttcatggttaatgatcccacacaaagcatacagctcatgaagaacggcgaaatttgtattgtcacgatttatggtggaaccaagtgtgatacaggcaagccatttacgaaagtaaaattccagaccgagcaacaatcttccttccagcaaactcttatctacaatgggaaggtcggcaacaaaattaatattggttatagagaatttcaaggaggtatggctcgggccgctttttctaatgaggtagagtacgacctttctgagtccaaaacgatacgttataaaggggctgtgctggatatcatggatgcaaataatcagtcaataacctttaagttgactaggaattttaatacaaattaa

SEQ ID NO: 218278 - DNA, 315 bp, Klebsiella pneumoniae; identical to SEQ ID NO: 216788

SEQ ID NO: 218279 - DNA, 681 bp, Klebsiella pneumoniae
atggtatttccttatatgacacatttactcgcggcaatgttgttgggggcgctgatcggcgcggaaagacagtggcgacaacgtatggccggtttacgcaccaatgccctggtggccaccggcgcggcggtgtttattctcagcgcgatgtcggcctcgccggacagcccggggcgtattgcagcgcagatcgtctccggtatcggctttcttggggcaggggtgattatgcgcgatggtatgaacgtccgcggcctcaataccgccgccacgctgtggtgttcggccgggatcggcgtactctgcggcctgggacagttctggaacgcgacggcggctacgctgattattctgtgcgccaatatcctgctgcgcgaggcggcgcagcgcattcatgccttgccgggggccggtgacgaagagaaacgctatgtcttacgcgtcacctgtctgcgcgaacatgaaaatgccgtacgtcagctgttgctgaatattgcgcagcagcagcggtttaccctgcagggattgcagtcggcggcggcggacaccgcggaccatctggagatttgcgcgcagctgattagccataagcagcaccaaaaaacgctggcgcaaattatggcgcagatgggcgttcagcagaacgtcacatcggtgcactggcgtgtcggagaggcgtag

SEQ ID NO: 218280 - DNA, 933 bp, Klebsiella pneumoniae
atggccgatgccaacagcgtcgattttcgcgcccttcagcttttcatcgcggtttacgataaccagagtttttccgtagtggcccgccgcgaaggggtctctccctcgctgatctcgcgaaccatccagcagctggaagatgccctcgggcagcagctgttctaccgcaacacccgtgccgtggtaccgaccgaagcaggacgccttttcgcagcgtccgcccgggaactgctgggacagtacgccgacgcgcaacgggcgttacaggatcgggcacaggtccccggcggactggtgcggatcaatgcgccggtctattttggtcagcgtcatatagccccctggcttccggaactggcggcccggcatcccaaactgcagtttgacctgacgctgaccgacgattttatcgatccccatcgcgatgcgacggatatcctttttcgcatcagcagcctgccggacgcgggctatcacgccagagtgtttggcagccagcgctattacctgaccgcctccccggtgtatgtttcacggtacggcagcccgacttcgccggaggcattgcatcaacatcgcacgctggtgtatggcggttcgcagggagccaaccgctggctgtttcgccagcgcgaagaggcatgggtgcactatccgttgaccccgctcatgacctcgaacaatgccgatgccctgctcacttcagccatcggcgggatggggatcgtgttatttcccgactggatggtcagcgaggcgctgcacaacgggacattagtcacgctgatggatcgctattcggcggccatcagccacacgccatcgtatatcgcggcgatttatccttatacccgccatccctctctcaacgtgcggacagtgattgactattttgccgacgtgtttggatcgccgccctactggcagcgctaa

SEQ ID NO: 218281 - DNA, 2451 bp, Klebsiella pneumoniae
atgaataccaataacatcaaaaaatacgctccacaggcccgtaaccagttccgcgatgcggtgatccagaagctgaccacgttggggatttccgtcgataaaaaaggcactttgcagattgctgatgccgagatcgtcggcgaaaccgtgcgctatggtcagttcgactaccccaagtccaccctcacccgccgcgatcgcctggtaaaacgcgcccgcgagcagggctttgacgtgctggttgagcactgtgcctatacctggttcaaccgcctgtgcgccattcgctatatggagatccagggttatcttgaccacggtttccgcatgctctcgcacccggataatccaaccggctttgaagtgctggaccatgtgccggaagtggcggaagcgctactgccggagaaaaaggcacagctggtcgaaatgaagctgtccggtaaccaggacgaagccatctaccgtgacctgctgctggcccagtgccacgccctgcaccgcgcgatgccgttcctgtttgaagcggtcgacgatgaagctgaacttctactgccggataacctgacccgtactgactcgattctgcgcggtctggtggacggtattccggaagaagactggcaagaagttgaggttatcggctggctgtatcagttctatatttctgagaaaaaagatgccgttatcggtaaggtggtaaagagcgaagatattcctgccgccacccagctgtttaccccaaactggattgtacagtatctggtgcaaaactccgtcggccgccagtggttgcacacctacccagactcgccgctgaaaagcaaaatggactactacattgagccagccgaacagacgccagaagtgcaggcacaactggcagccattacgcctgccagcattgaaccggaaagcattaaggtgctcgacccggcctgcggctcagggcatattctgattgaagcctataacgtgctgaaaaatatctacgaagagcgcggctatcgcgcccgtgatattccacagctgattctggaaaataatatttttggtctcgacattgacgaccgtgctgcccagctttccggctttgcattattaatgatggcccgtcaggatgaccgccggatattcacccgcgacgtgcgcctgaatattgtttccctgcaggaaagcctgcatctggatattgctaagctgtggcagcagctgaacttccaccatcaggaccagaccggcagcatgggagatatgtttgccgaaagtaccgcattagcccataccgacagcgcggaatatcagctgctgatgcgcacgctgaaacgctttgtgaacgccaaaacgctgggctcgctgattcaggttccgcaggaggaagaagcggagttgaaggcgtttctcgatgcgctgtatcgcctggagcaggaaggagatttccagcagaaaacggcagcgaaagcatttattccgtatattcaacaagcatggatcctggcgcagcggtatgatgcggtagtggcgaatccgccgtatatgggtggcaagggaatgaatggtgaattgaaagggtttgccaaaaataatttcccggacagtaagtctgatttgtttgcaatgtttatgcagcatgcattttctttgcttaaagaaaatggatttaatgcacaagtgaatatgcagtcatggatgtttttatccagctacgaaacactacgcggctggctcttagacaataaaacctttattacaatggcacatctgggggcaagagcatttggagagatttctggagaggtagtacagaccactgcatgggttatcaataataaacataccaaacaatatcaccccgtattttaccgtttaatcaatggaaatgaagaacaaaaaaaatccgctttaatagataaaaaaaatcgtttcaatggcataacacaagatgaactaaaaagagttcctggctcacctattgcttactgggttagtacaaaaataagaagccttttttcacatcagaatattggcaacaattcaatatctaatgggcagaacaaaactgctgataatgagttatacacaagacttcactgggaagtaaagtctgaatcagtaggtatagagaaaaaatggtttcagtacgcaaaaggcggagagtttagaaagtggtacgggaatattgatacagttgttgattggtccgacgaagcaagaacacattataggaaagatgcaagatgtagaataattcctgaagaattatggtatgagaccggaattacatggagtcgagtatcatcaatgaatacacctcctgcattccgtatcttaccaagtgatgccacttttgatatggtaggttcatctgtttttattaaagatgagaatatattattattttgtctatctgcactaaactctaaggaaggtgcgaataagtccgagatgtga

SEQ ID NO: 218282 - DNA, 3642 bp, Klebsiella pneumoniae
atgaatattgaacagatctttgagaaacgtctggaccgaaatattaatggcgttgtgaaagccgaacagacggacgatgccagtgcctggattgagcttgatgaatacgtcatcacccgggaactggaaggacatcttcgccatttcttcgaatcttatgttccggcaaccggtccggagcgcatacgcatggaaaacaaaattggcgtatgggtttcagggttctttggctcaggtaaatcacactttatcaagattctgtcgtatctgttgtctaaccgcaaagtcagtcataacggtacagaacgtaatgcatactccttctttgaagacaaaatcaaagatgctctgttcctcgctgatatcaacaaagcggtccatcatccgacggaagtgattctgttcaatattgattctcgtgctaacgtcgatgacaaagaagacgccatccttaaagtcttcctgaaggtgtttaacgaacgggttggctactgcgctgattttccgcacatcgctcatctggagcgtgagctggctaaacgcggccaatacgacgcgtttaagaccgcattttccactatcactggttcaagctgggaaaaagagcgcgattcctactatttcatcagcgatgaaatggcagaagctctaagccaggccacaggtcaaagcgttgacgcctcgcgtcaatgggtggaacagctggataagaacttcccattagatatcaataatttttgccagtgggtcaaagagtggctggatgaaaacggcaaaaatatcctcttcatggtggatgaggtcggccagttcatcggtaaaaatacgcagatgatgttgaaactacagactatcactgaaaacctgggtgtgatctgcggtggacgcgcatgggttattgttacctcccaggcggatatcaatgcggccattggtgggatgagcagccttgacggacaggacttctctaaaattcagggccgtttctctacccgtttgcagctttcaagctccaatacatccgaagttatccaaaaacgtttgctggtgaaaactgatgctgcaaaacccgcgctggcgaaagtctggcaggaaaaaggcgacatcctgcgtaaccagcttgcctttgatcctacaaccaccgcttctttgcgcccctacaccagtgaagaagaatttattgataactacccgtttgtcccgtggcactaccagattctgcagaaggtttttgagtctatccggaccaaaggtgccgccggtaaacagttagccatgggtgaacgctcgcagttagaagcattccagactgcggcacagcagatcgccccgcaaggtctggattctctggtgccgttctggcgtttctatgccgcgattgaaagcttcctggaaccggccgtcagccgcaccatcactcaggcctgtcagaatggcattcttgatgagttcgatggcaacttattgaaaacgctgttcctgatccgctatgtcgatgtgctgaaaagtacactcgataatctggtcaccctttccattgataaaatcgatgctgataaagtcgatctgcgccgtcgcgttgaaacaagcctgaacaagctggaacgggaaatgttgattgcacgggtcgaagacaaatacgtgttcctgaccaacgaagaaaaagagatcgagaacgagatccgcaacgtcgaagtcgacttctctgcgatcaacaaaaaactggcgtcgatcatctttgatgacattctgaaaaaccgcaaatatcgctatccggcaaataagcaggactttgatatcagccgcttcctgaacggacacccgttagacggcgcaatgcttaacgatctggtggtaaaaattcttacccccaaagatccgacctatacgttctataacagcgatgccgcctgccgtccttatacttcggaaggtgatggctgtattttgattcgcctcccagaggaggggcgcacctggaccgacattgatttagtcgttcagaccgaaaaattcctcaaggacaacgccggacaacgcccggaacaggccagcctgctttcagaaaaagcccgcgagaacagcgttcgcgaaaaaatgctgcgcgtccagctagagtcgcttattgccgaagcagacgtctgggcgattggcgagcgtttaccgaagaaatcttcgacgccgtccagcatcgtggatgaagcctgccgctatgtgattgaaaacacgtttgccaagctaaaaatgctgaagccgttcaacggcgatatcgcacgtgaaatccatgcgctgcttacagtagagaatgatacagagctggatcttggcgagctggaggaatctaatcccgaggcgatgcgggaagtggaaacctgggtcagtatgaacatcgagtacaataaaccggtctatttacgcgatgtcctgaaccactttgctcgtcgaccttatggatggccagaagaagaagtgaagctgttggttgctcgcctggcacgtaaaggcaaattcagctttagccagcagaataacaatatcgagcgtaagcaagtttgggagctgttcaataacagccgtcgccacagcgagctacgtctgcacaaaattcgtcgtcacgacgaatcacaaattcgcaaagccgcacaaaccatggcggagattgcccaacagccgtttagcgaacgtgaagaacccgcactggtcgaacatatccgtcaggtcttcgacgactggaagcaagagctgaatgtcttcagagcgaaagcggaaggtggaaacaatccaggaaaagaagagattgagtcaggcctgcgcctgctgaattccattctcagcgaaaaagaagattttgccctgattgagaaagtcaccagtcaggccaataagcttctggatttcagtgaagatcgtgaagatttggtcgatttctaccgcaagcagttcgccacctggcaaaagctgggggctgcgctgaatggcagctttaaatccaaccgcagcgcgctggaaaaagacgccgtggcggtaaaagcgctgggtgagctggaaagcatctggcagatgccggagccttataagcacctcaatcgcatcacgccgctgattgaacaggtccaaaacgtcaaccatcagttagtcgaacaacaccgccagcacgccctggagcgtattgacgcccgcattgaggagagccgtcaacgcttgcaggaagcgcactccacgtcagagctgcaaaacagcgttctgctgccgatgcaaaaagccagaaaacgtgccgaggtcagccagtcgatcccggaaattctggcggagcagcaagagacaatggcgctgcaaacggatgccgagaagaagattaaccagtggatcgacgagctgcgtaaaaaacaggaagcccaacttcgggcaacgagtgaagctaaacatgcggcagagtcacaacagacctatgttgtggtagaaaagcccgtaatccaaccggtaccgaaaaaaacgcatctggtgaatgtcgccagcgagatgcgcaaagccaccggtagtgaagtgctggaaaccgccgagcaggtggaaaaagcgcttgataagcttcgctctgcgctactgacagccattgaggcaggtgaccggattcgtcttcagtaa

SEQ ID NO: 218283 - DNA, 603 bp, Klebsiella pneumoniae
gtgatcgatcccgtgcttgaataccgcctgtcacaggttcagagccgcattagagaaaagcgctttctcaaaaataacggctccggtaatgagattggtttttggatttttgattatcctgctcagaatgagctgcaggtgcgtgaacacctgaagtatctgttgcgtaatctggaaaaggaccacaagttcgcacacctcaacatctttcagatcattatcgagatgctcaccgaacgtgggctatttgagcgcgtctgtcagcaggaagtgaaagtcggcaccgaagcgctgaaaaaacaactagttggcttattgaatcagaaaaagatcgcggattacatagcaaaaaaagtcgatcttcaaaatcaggagtttgtcatcctgacaggcatgggtaatgcctggccgctggttcgtggccatgagctgatgagcgccttgcaggacgtgatgggttttacccctctgttgatgttttatccaggaacctatagcggacacgatctttcccccctggcgggtattgattcccgaaattattatcgcgccttcaggctggtacccgaaagcgggcctgcggcgacattgaatcctcgttaa

SEQ ID NO: 218284 - DNA, 609 bp, Klebsiella pneumoniae
atgacggtgaaaaacgacaaggcatggattggggacctgctaggcgggccactgatgagcagggaaagtcgaatcatcgctgagcttatgcttaccaatcccgatgaacaaaactggcaagagcagatcgtgggttataacattctccaggcctcctcagccaatacggcgaagcgttatgccacgacgataagattacgcctgaatacgcttgataaagccgcgtggtcacttattgcacaagggagcgagcgtgaacgtcagcaattactatttgtcgctctggtcctccattcaccggttgttaaagacttcctggctgaagtggtgaacgacctgcgtagacagtttaaagaaaagcttcctctggatagctgggatgagtttgtggccagccatcttcgtcagcagcccatactcactagttactcagattcatccatcaaaaaaatgggtaacaacctggttaaagcgctggctgaagcaggttatctggatacgccacgccgacgtaatctccagtcagtctttcttttaccagaaactcaggcgaccttgcagcgcctcgggcaacaggaattggtttctattctggaggggcaacggtga

SEQ ID NO: 218285 - DNA, 510 bp, Klebsiella pneumoniae
atgatgaaagatacaaatcagctgatcggcatctttaatactctgatggttgccaataattatccggtagccaatccagtagcctcggatgtaatggcggacctcatgcgcgaagcagcgccagctgaatgggacgctcaaaagagaagggtttacgaggatatccagcgcctgatgatcaaccgtctggactactctgatatgttcaaaatcatggatgggcttgagtacaacggtttgatgctgtatagcatggtacaagcagaaaacggcgaaccagtatggtcgaatatctacatccgcaactttgagacgcgtgataacgagatctatgtcgatccgaacctttctgacaaggtactgattggcgaagatggtatgtccgtgtttgcctacagcttcacagataactgtttcgagatccgcgataaagcatctacgggttatgttattgagtcacataccaacttcagcgcattgttgtccgcgctgattgatatggtgagctga

SEQ ID NO: 218286 - DNA, 1134 bp, Klebsiella pneumoniae
atgtttcaactttaccggtcacatgatttaacacggcaattagcccctgaagattttcaatacattttgacgccagcaggctcgctgagagaggcgtgtatacattacgatctgtcttatgaagcgaacggccatagtctctcttttggtcttcccaataaaaagtacagtttatctccacatgaaagaccttatgaacgaagacatcgcagttacgtagatcccatctatgataaggtagagcacgatctacaaattggctggcttgttggtgtggatacctccaggcgctggagcagcgaccggaacccgttttacatcgacgataccggcgatctgatttttacccctacagcctcatcctggcatgcatggtataaggatgaaatcacgagcgcctaccggcacgctattgccgaccgacaggggcgtaaacctgctcccactcaaaggatgcattacgattattacggcccggcagcaataccagaggggaaaacgctgaacagtaaagccgttggcagactgctagcggctggtggtgtgtataacggcaacattgaaggatttcggcaaaccgcggaacggctgggcggcgatgctgtgaaggggtatgacagtgttttaaacgaaactacgtccggcatgatggttgctgcggcctcactattggtcatcagaaatccgatggcggcgcaggaattgacaagctatctggggaaatacaaacaagcccatgttctgctggatgatatgaatgttatccagcttaattacctccgccgcaatcgtgccgagtacaatgcgctgcgtgggcaattcaacagcactgtgcggcctaattttctcaaatctctttccgatcaccctgacgcattatcaacatttgattccaataaccttctacgcttggcaaatggaaatgtaccatcggggtggcaggtccatcacaaaattccccttgatgacggtggtacaaatgcctttgataacctgatactaatccaatactcaccatatcactctgccttatcaaagatgcaggcgattatcaccaaagaacttccatacaatgccagcacagctgttttgtggccttctccaaatggcgtgatttacccggtcgggaaataa

SEQ ID NO: 218287 - DNA, 537 bp, Klebsiella pneumoniae
atgaaaagagacttttgccttgttctgtcctcgtttggagcgggcaaaaccgccagtaagtttcacaatagtctgaaaaatagccgtgaccgctttgattcgtggcttactaatgtgcgtgttggctggcgtgacggactgggcactcctgctacgctttctcactcagcgcaacgtgacggtcttattattctgcaggataaaagtattgaagataccgtacgcgaacagctaattgcggcccggctggggctgggtacctttcggaaaaattgtttcatgctgtatccggcataccctgtaacgggaacgattgatgagcgtcttgatccttataatggaattatattagctgcgtatattgatattctatacgatcaaggatggatttcgtatgagaacgatggacgtttattaataaattatgaattggatattacttttaaagaacagattttgttaccggagaaaataaaggcatataacgtttcattgtattgttatctggaatggcatcggggcaatttacaaagataa

SEQ ID NO: 218288 - DNA, 609 bp, Klebsiella pneumoniae
atgaataaatctgtcataaagctgttgaataaaaaattcattatttcagtaataacctcatctacatttattactggatgcacaatggctgttatatggttctatctgtcaaatattgatagattagatattttctttgatgctgtaagcctcagttcagccttgggtatcattttcgtctttataatagtatcggtttcgggatttagcttagtaattttcatctcctcttttattctaatgctcatttacacagggcatgaagataatttcaaagattattcaagcatgcctcatcgaatttccattgtttgttatctaaatagcttgtttatatgctgtggtatgattgttggctactacatttattatctttatggatggaatggttatttaataagtggcacctgcttggtgttgatgcttgcttatagttatgctgtatcttttttaaagttatttagaatacagagattccgtttgcatgaatctgataactatgagaaacttccaaggaaaaaaggattgttatttttttttacccttgcagcttatggctcccgggatcgttcagatattacctttattatttctgcttacccaacttga

SEQ ID NO: 218289 - DNA, 690 bp, Klebsiella pneumoniae
atggctcccgggatcgttcagatattacctttattatttctgcttacccaacttgattttagtgaggggacaagtgattgggttgaaatactaatgctccttgccttaacagtggctattgttactattggcattttgcctggtgccatacatcttaatgagcgcagaaatggcaataaaatcaatagcttcatagttgttttaatatgcataccagttgtaattactttattcagtgtgtggtatcgccccatcccaaatatgatcattaatatggcaatgagtctctcgggtattagcgattggagaacgcatcagtattatgttgaaagcaaaactctttctcatagtatgtttaatggattaatctggaatactcgatactataaagaaattcccgggaggtttttcatcaccggagtcagtacatttaccttaggggatataaagttgatatgcccaactgaaataactgaaacaaggaaagagagtttgaagtttaccgttaatgatatcaatgagtatgagcaaaaagggaaacagttaaaggcagtagccatgcaatgcatcccttttaataagaacgatattcatgcctgggattcgccattatctgaaccgatctattacgagaaagttaaacagaccatagataactctatgctaaaaattcttcataccctgaaatga

SEQ ID NO: 218290 - DNA, 258 bp, Klebsiella pneumoniae
atgagctgcgatagcgccgtatacgaggcttttcactgggcaaaacagcgttgcggcgcaccgcgcctgaacgatgaactgcatgcccagggttaccggtttaacgtgaaaaccgtggcagccagcctgcttcgtcaggcgctgaatgggaaagcgtcacagaagctcagtcaggtcagttaccgcgaacatggcctgccggtgtcggaaaaactgctgaaacaggatttttacggcggcggcccgaaccagaagtag

SEQ ID NO: 218291 - DNA, 276 bp, Klebsiella pneumoniae
atggggccatcggttgcaagtaagtttttccagcgctggctcactgcccttaacatgcgtgggaagttgtatccagatctgatcccggatggcgccattggcccccgaaccatcaccgcgcttaagggatatctttcagcccgcgggaaagaaggcgagcaggtgctactgagagcactgaactgcagccagggcgcgagatatctcgaactagctgagggccgcgaagccaacgaggattttctctacggctgggttaaggagcgtgtcctgtga

SEQ ID NO: 218292 - DNA, 348 bp, Klebsiella pneumoniae
gtgaagatgatcattttcgctttgctcgtgctggtggctgtgctcgttctgttacttctgcgcaaatatacccggctggagttcgtaggccatgccagcctgctgctgaaaacttggtctgtaaagcttggagctatcggcgcgctggttggtgtatgggcgcagtcgttcccggatgctgcgctgcacgcctgggcgatgctgccaccggatatcaaaagtatcctgccgccaaacatcgttgcgttgattagtcctgcgctggtggtgctggccgtgctatcgcagtacgtacgccagccagcattgaaagaaaaggccgacgaactgaaggagccgcagcaatga

SEQ ID NO: 218293 - DNA, 276 bp, Klebsiella pneumoniae
atgagctttgaaattatcgcggggctggtggttgtcatcctgggtgctattgctggcgcgtttggcattggtcacgctcgcggtaccagtaaggcagaagccaaagccgatcagcagcataccgaagagaatgccgccgctgccgtcgccgcagcagaacgtaaggcagaagtcacgaaaggggcaagcgatgtacagcagactgttagccatatgcctgatgacgatgttgatcgggagctgcgcgaaagatttacccgccccggtagtcgttga

SEQ ID NO: 218294 - DNA, 177 bp, Klebsiella pneumoniae
atgacgatgttgatcgggagctgcgcgaaagatttacccgccccggtagtcgttgatacggcctgtagttgggtgcgggtcatctacctgaccgaccaagatatcgacgtgctggataagcagaccaagcgcgacattctggcgcacaacaaatcagtgctggtgaactgcccgtaa

SEQ ID NO: 218295 - DNA, 489 bp, Klebsiella pneumoniae; identical to SEQ ID NO: 184583

SEQ ID NO: 218296 - DNA, 390 bp, Klebsiella pneumoniae
atgtttaccgttaagcagattattaacaacgccacctcattgtatgaggcaaaagaaatcaccgttgctcgccctggctctgagcaatggcgtcaggcttttgctcttgctgatgaactggatgttatggcgcctgacatcattgagcatatcccgatgtcctatgaggaccaagatatgacgaaaccagttggcgatgagcatcaattaacggtcgagcgtactggagcaaaccgggctgattgcattgccattatttgttcagggattccttcgccagctttcccggacatacatgagcttggtggtgttggataccagtttctttacaaaggcgatcagatttacatcaccaacagccacggcgcgaccatcgaaacagttaagtaa

SEQ ID NO: 218297 - DNA, 246 bp, Klebsiella pneumoniae
atgtcagagatcacaccagcagaacagatccgactgaatctgttttccaccctgaactacgacacagcagccgcaaaagaggctattgcgttcgtccaggatagccagctcaaatatcagctgttcatccagcagtacagtcgcgtgacaactgaatccgaagtggtggcgcggaccatcaaagcagttcaggagtcgaccgaagcgctagcgctgtttgataccagcgcagggctggcgagttaa

SEQ ID NO: 218298 - DNA, 219 bp, Klebsiella pneumoniae; identical to SEQ ID NO: 197833

SEQ ID NO: 218299 - DNA, 600 bp, Klebsiella pneumoniae
atgaatgaccgtgaaacgcgctgttacagcggggaggtcagagccgagcaacgcaccgatgaacctacccgcattctgggctatggctcggtgttcaacagccgttctgaacccctgtggggattccgtgaaatcatcaagcccggagcatttgacgatgtgctgaatgatgatgtccgtgggctgtttaaccatgaccccaactttattctcggacggagcgctgccgggacgctatccctgtctgtcgatgagcgcggcctgcgttacgacattacagcgccggatacgcaaactatccgcgatctggtgctggcgccgatgatgcgcggtgacattaaccagtcatcttttgccttccgggtatcccatgacggtgaaaattggtaccaggacgatgaagggatcgttattcgtgaaatatcgaagttttcccggctgtttgatgtcagtccggtgacttatcccgcatatcaggaggccgactccggcgtccgatcgatgaaagcctggcaggaggcgcgcgacagcggtgcgctaaagaacgccattaatcaacgaatggcgcgtgagcgcctgctgacccttcttaacgcgtaa

SEQ ID NO: 218300 - DNA, 318 bp, Klebsiella pneumoniae
atgagcacaacgattgagatgttgcgggcgcagtgtcggatcgatatcgacgacaccacggaagatgaggtgcttacgctctattatgatgccgcgcgccgaaaggcggagaacttcatcaaccgccatctttatgaagaagaagtgccggaaactgatcctgacgggctggtgattgctgacgacatcctcctggctctgatgctgcttgtcgggcactggtatgaaaacagagaagagtcgtcagacgcagcaaaaaccagcatcccatttggctttacatcgctgatagagccgtaccgctatattccgctctag

SEQ ID NO: 218301 - DNA, 339 bp, Klebsiella pneumoniae
atgcaggcaggacgattacggcatcgcgtcactattcagaacttcacaatatcaaaaacaccttccggccagccggtagaaagctgggctgatggaaaaactatctgggctgaggttaaagggatcagcggtagggagctgttagccgctggcgttgagcgtgctgatgccaccattcgcgtctgggtgcgttttcgtacagacatctcagcttcttcccgtttgaaagtactgaatggcccatacaaagatgctgtcctgagtgtcactgggcctccggttccggatataaaaggtacccggctggaaattctctgcaaacaggggaccgaaaaatga

SEQ ID NO: 218302 - DNA, 705 bp, Klebsiella pneumoniae
atgtcagcactatttgaacgtgcccaaaaaacggtagtaatgatttcctctgtgccggtcaccgcggcagagctggataccgcaacctggttaaacctgagttgcactatcaaacaggcaagctttaccgctggtcagaaaaacgatattgacgtgacaacgctctgttcggatgaaacggaaaatatcaacggccttcctgctccgtctgaaatgtcactttccggtaacttctaccgcaacccggcgcaggatgcacttcgtgaagcatatgataacgacggggtttatgggtttaaggttattttcccgtctggtaatggattcctgatgcgcgctgaggtacgtcagcacacctgggattctcaaaccaatggcgtggttgctgcaacgttctcgctgcgtcttaaaggtaaacccaccaatattaacgccccaggagttctgtcgtttgctactgaccttccggcgtcccaaacggtcgcggcaggaagcgccctgaccatgggcgtagtcgtccagggcggtacggcaccttatacctacgcctggaaaaagggcacctcgacggtcagcggccagaccagcgcaacgtttacgaaagccagcgctgtatccggtgatgccggggtttattcctgcgtggttactgatgccgatggtactgtgatcacttcttctgattgcaccgtcaccatcaattaa

SEQ ID NO: 218303 - DNA, 366 bp, Klebsiella pneumoniae
atggcgggctttcgtaaaaaagaagtctccgttccggagtgggataacgccaaagtcatcattcgtgagccatcagcagaagcctggattcgctggcagggcattgccagcccagaaccaccaaaactaccggaagggcaggatccccaggaggcaccagaactgaccccttcagaacgagccttccgcacgatgcgggccgacgtcacgcttttcatcgatattttgctggataccgacctgcagcccgtctttactgtcgatgacaccgaacaggttgaagcgatctatggccctgtgcattcccggctgttgaagcaggctcttgatctcattcgtgacgcggatgatgctaaagcaaagtaa

SEQ ID NO: 218304 - DNA, 3078 bp, Klebsiella pneumoniae
atgacgataaagttttacccgtcccggcttccgggtgaaccccttgaaacgcacgagcatggtgtgctgacgctgcatgagtggatgagcagaaatgtcccgagctattcacaggataaaactcatcctgtcgtgatcgagctgaacggccaggcagtccccccggcggaatggccgttatgtttgttgcggccagacagcgacgtgcggatatatcccattccgtatggcacgggtcttgaaattgccgcgtgggtttcggtggccgtatccatagcgtctacggcctatgcattattctttgcccctaaaccagagctgggcggcttttcatccagtaacgcttcatcgctggatctgaatccggctaaagccaacacagcgaagcttggcgatcccgttagggaagcttttgggcgaaaccggatatacccggattacctggtgcagccggtaacgcgattcgaccccgctgatccaaccagaatgacggtagaaatgtttgtctgccttggatatgggcgtttctcctataccggaggggattttcgggtaggagaaactccggcgctgaccttaggcgagggcttttcatataccagctatgggcctggcgataatgtggccggggatcgtcgcagtgagatatggttcaactcaacggaagttgggggaacgtcgagcggcagcggcctcgatatggctcagactgcccctgaagccagtgatatcgttgctgatgccatgaccgtcagcggtgcctctgtctcgttttctggcctcgatgtcgatgatgataatgatgaagacgaggatgagaacaaacttcctcctggctggatcgccggtgcaattgtcaccctgaaagcgccagtgaattatcaggtatccatcgaggacggttttaacgtgctgacaggcgacgtcgtgtcagagattgcgccattcagcggaatgcctgtcaccctaacgtttaacggtactgactatgacctgcagatcgccacgtatacccctcaccaggacgccgttccgggaacagggggagcgactgcggtattacgcgccagtgcctcgccgtcaacgtatgactttacgacaaccagccagacctttgctctgacctggcagggtatcacctataccatatctctggtcgccaactacggcacaatgtctggcttgctcgcagcgattaacggcgggttgactggttcggggctcattgctcaggatgatggcggcgtgatacgtatcgtggagatctccagcccctggcgtggcggttccattacgtcatcattcctgcctgcgtcagtatttggcgacagcccggtatttacagctggtacagcatccagcggcggaagccctgcggtaacagccagcgtcacgctggcatacgattctggcactgccttttccggattgccggaaggcacccagcggatttccctggcgcaccgtggcaacgaataccagatagcgtctactgatggtccctctgcgaccgtacagcgtgtggttaacggtgtcgttgacagcacctggtcaggctttatgacccgtaccgtcgtggattttgccgcgtctggtattaacgataatgaaacctggctcggcccctttctggcctgcccgcaaaatgaagttgtggatgccttcgaggtcaactttgctttcccaaacggaatttgcgggttccagaacaacgggaataagcgggtccgccatgtcgagtatgaaatccagtatcgcgtttatggttccggatcagggtggacgagtaagccaggggtttacgcgcttaaaaacattaatggcctcggttttacagagcgttttgatctgtcctctcctgggctggtggaggttcgatgccgccgccgtaacgagcaggggagcaacaacgcgagagacagcatgttctggcaggcgctcagaggtcgtttgctttcccgtccgacctcctacgcagggatatcaacaatagggatcacggttgaaaccggcggccagctggcggcccagtcagacaagcgtgtgagtgttgtcgccacacgaaattatgatggcggtggtgacaggacaatcagcggtgcgttcctgcatcttgcccgcagtcttggatatcgcgacgaccagatcgacattgcggcgctcagtacgctggaggctacctactggacgccaaggggagaatattttgatcaccaggcaagcagtgacagcacgtcagcaaaggatattttcgacaaaatagccgaggctggcatggggtattttctgctgtctgacgggttgctttctgtcgggagagagggcgtcaaaagctggacagggatcattactcctcaggataccgtggaggaaatgcagacgtcattcagggtcccgtcggaggatgattttgatggcgtggatgtgaaatatatcaaccctgtgacctgggcggaggaaaccgtacagtgccggacgccggaaaatccttttccgcgcaaaacggaggcatacaccattgatgttgccatgactgcagatcgcgcctggcgtatcgggatgcgtcggttaatgaaatatctccaccaacgccgaacgtatacggctacgacttcgatgctgggatggtgtcatgacttcggtgatcacatcattttgtccgacgacattccaaccgggaaaacccaaagttgcctgattgacgcgatgatttacgacttccaggaaattacgctgcacgtcacggagccactggactggagctacgcgaatcctcgctgctggatacagtttcaggacggtcgaccatcatcgcgaatgctcacgccgcaacgggtggatgatttcacgctgacggtgccgtacaacgacgacctgcatccggaagactggattatggacgacccagatattgatccaccgaagttattgttctgcgacagtgaaaagggtgcgcggcatgggatagtccaggaggttgccccatcaggtgacagcaactgtcagattactgcacctgaatataaagaaattttctaccagtacgacgacgccacataccctggcgacgtcgcctaa

SEQ ID NO: 218305 - DNA, 366 bp, Klebsiella pneumoniae
atggaagcgtttaaaaacaacatttccccttatgttggaacaaggaaagtgggagagattaaaccgctggagctgctgaacgtactgtgtaaaattgagaaacgtgatgcgttggagaaaatgcggaaagtgcgtcagcgttgttctaaagtgtttcgctacgcaattgtaacgggtagagcggagtacaatcctgcggcagatctttccagcgctctcgaagtacaccaatccaatcatttccccttcctaaaagctgatgagatacccgaatttctgcgtgccttagacagttacaaaggcagtcggcttgtccatattgctaagaaattactgatgatcacgggtgtgagaaccatcgaatga

SEQ ID NO: 218306 - DNA, 156 bp, Klebsiella pneumoniae
atggttataagtacctctgattggatttttgtcaacatgggtcaactgaagctcaatccaagcagtatcaagatcatgatcgtgaaggatagtagaaaaagtatgccgaaagccatgatcagtcactctcccaacatagccaattcgcttgattaa

SEQ ID NO: 218307 - DNA, 2133 bp, Klebsiella pneumoniae
atgtttatcaagaccctctcggtaagaaattttagaaattttaaggcagcgtctctttccttcaaaaaagaatgcgtcaatacaattgtaggtgaaaattcatcggggaaaacaaatatctttgaggcgatgagacttatacttgacgataccttgccatattataagcgatatcttgtagaaaatgactttcatcgagggctagggacagcgtttggtcattgggttataattagtttggagtttgatgaaataggtggggatgaagagtcagagttactatgtcaattaaatactaccgttaatggtggtggaacagggcgaataacttatatttacagaccgcaactttacatcagagaacaacttttcaatttaaatgatattgaagatgttgatgcgcgtagaagcgcatataacatactgaaagaacaatattctattgataagaccacgtatgaatccttagtgttatgccaaggcacagcagattttagcgatgatggattatactctcatgtggttggtgattttaatgattatttattccctgatccaaagttagagcggattgatttaattggtaatagacaacgtgggtataatattcaggataatatcagttgtacttatgctcgtgctttgagagatgtggtaagtgaacttaagaataatcgattcaacccattccaaaagcttttagaatatgtttctaaaggaattgataatgatgacgcattgagcgaaaacatcaaaaacgtgaataacagaatatcatcgattgaagaggttaagaggctttctgagggcatattattatcaataaccaatgctgttggtaccacttactcgccagttttgaatgttacatctgaattgccctgtgagctaaaagagttggtaaaggttcttcaactcaaggctggcgactctctttgtgaaggatatgtatcagagctatcagagatgagtctcgggggtgctaatttaatatatttagctttaaaattgtatgagtacgaagaaggtatcagtaaaaacctcttagctaattttttaataattgaagaacctgaggctcatattcatacgcacatacaaaaatctttatttagcaatctgaaaaataataaaacgcaagtttttatatctactcattcaactcatatatcatcagtatcaaatatatccactacaaatgtgcttgtaaaaaatggtcttgaaacaatttcttgctctccatctaacggattggaaaaagagagaattaatcgcattgagagattccttgatgccataagaacagatattctctttgccaagaatgttatcctaattgaaggtgatgctgaagaaatattaatacctcatctcgttaaaaatagtttcggtattacacttgatgaacttggcatatccttgatatctgtgcggggtactgggtttgaattactatcatctttatttcactcagaccgaattaaaaagaaatgtgcaattttgaccgatgatgacataaatttgtatggagataataagcctgattatttatctcaagatgattataataaagctgtaaactcagcagagtctggtgtcgctcgtaaagtaattctggatgaaatagttagaaataacgcttttattcgtgcctatttttctaagtatactttcgaaattgatttagtgctatcaggcgccgtaagatactttgatgcgatagccgctgaatcatttgagaaaagagcatattacacaccataccaagaagcattccaatcctctgatagacaaaaaataggctgctacgctttaaagttagctaataagcataaaaaaggttggtttgcaatgatgcttgttgacaagcttgatgcagattttcctatctctaaggcactctgtcagtcgttagggttcactggtgattttaataaattcactctagcaaagatggttcgatatcgtagtgaggttattaagaatagagatgggtctgatttattaaataatatattgggacaggatgatttatcatttattatagataacatagatgctgctttggacatatttaaaacacattaccctaacgatcctttaacttctttgcttgaggttcatcatggataa

SEQ ID NO: 218308 - DNA, 1677 bp, Klebsiella pneumoniae
atggataatcaaaagagacaattaattaatattaaagacaatctattggtcagcgcctgccctggggctggtaaaacaaaactattgattggtatgttagaggacaatttatatcgaaacgaaggttttcgttggcatattgtgttaactcacactaacgcagcagctgatgagatctctagcaggatagataatctaagtatagaggtagatagagtttggtgcgggactattcattctttccttttagagtgggttgttaaaaagtatgctggagctatatcaagattaaaagatggattttctttactttcagaatataaacaaaggaaaataatccagagcatagaaagtgataaaaaactaggagtaagaatacgttataattgtgatgagcaaggtaacgcatttgtggaaccttattgccattcgttagatgataagcacaaagagttacttgtaattcaggagtataataccttcaagcaaaataatagactgattgattttgatgatattattaagcttggcgtagaatttcttgaaaacaatcaaaacatatgtgagcatctttccaagttaattggtaatatttatttagatgaatcacaagatacaagtctgattcagcttaaagcattgtcatatataaccagatataatcgcacctcagtatttattgttggtgacaatgaccaagccatttatcaagatcttggcgtttctataaaggataaatatataattaaatctgtactgcaattatctgaactaaagcatgaaactttgtctggatgctatcgatcttctgaattactggtgaaatattacaagaaatattcttcttcgcgaaatgatgttacttctctgcgtgaatttgaggggaagcctccaataatcaaagatatttctcaagatgaattgccacaaagagtgtttaatttaataaatcaataccaaacaaaatataatagcgtttccggtattgctattatagggcctgataagtactatcttatggcgctaataaatgctttatatgacctttcagaaaacttcgtttatgattttcaatcaacaacccccctatattgtgctaggaatactgtattttacgagttgataagtttggttcttttggatgtaaatgttattaactaccaaagaagaagttctcttgcaaggaaaattgttgattctgttcctgaattgagtcatttgacgccattacaacttaagcgtgatttaaaggagtttcagtcagtaaaaaataattttatattgtggttgagggagttatatgattttttagaaatgaagtatcaaaaatccattaaacttgagacagattacaaaatatgtaatgcagcggcttctgtggcaaaaatcagggctggcatgggcgcaattagtaagatgattaataaagacaaaaatgttgtctctgtatctactatacatggttcgaagggtgaggaatatgattatgtaatctctattgggtatcatgagcaggtggtgcctcatcaatcatcttttgaaaaaggaaatgaatatgctcgcgatattgctaatagattaatgtacgtggctttttctagagctaaggattatatgaatatatttatagatgatcgaagaaaagttagtcctttctttattagagaacctgactaa

SEQ ID NO: 218309 - DNA, 1020 bp, Klebsiella pneumoniae
atgacaataaaaacctatcgtgaagcggtcaaggaagccctggctcaggaaatggaacgcgatgaacgcgtggtgctcatcggtgaagacttgcgtggcggtcatggcggaaatgcgcccgaagaggcgaaaatagaagcctttggcggtgtgctgggtgtcactaaagggctgtggacgcagttcggctccgatcgggtgatcgacacgcccattaccgagtcggccatcatcggtatggcggccggcgccgcagcgacgggtttgcggccggtcgcggaattgatgttcatggatttttttggcgtgagtcacgatgcgctgtacaaccaggcggctaagttccgctacatgtttggtggcaaagccagggccccgctggtgatgcgaggtatgatcggcgcggggttttccgccgcggcccagcattcacagtcaccctataatatctttgccaccaccccagggctgaaggtggtggtgccctcgacgccttatgacgtcaagggtctgttaatccagtccattcgcgacgacgacccggtggtattctgcgagcataaaatgctgtacgacctcaagggcgaggtaccggacgagagctataccatcccgctaggtgtagccaactatacccgcgaaggagaggacgtcaccatcattgcgctgtcggcaatggtgcataaagccaaccaggtggcggacaagctggccaaagaggggatctcggtcgaggtagtcgacccgcgaaccatttcgccgctggatgaggaagggattctggaatcggtggcttccacagggcgggtcgtgattgtcgacgaatccgcggcacgcttcggttttgctcatgatgtcgcggcgctgattgcgtcccaggcattccatttcctcaaagcgcccgttctgctggtgacgccgccacacacgccggtcccgttctcccctgctctcgaaaaactctggatccctggcgttgaacgtatcgaagccgccgtccgtcaagtgctggaggattaa

SEQ ID NO: 218310 - DNA, 1536 bp, Klebsiella pneumoniae
atgagcgaaatcaagacgcttgaaatgccaaagtgggggctttccatggaggaaggcttgctcgctcgatgggcaatccaggagggtgacgatttcatcagagggcaggaaatctgtgagattgaaaccagtaaaatcgtcaatgtgctggaggcaccttttgccggtacattacgccggataatcgcccgagagggtgagacgcttcaggttggcgctgtgctggctctggcggctgacgcgtcggtcagcgatgctgaactggacgaatttgttgccagcctggcgacggcgaaacccgcagccccaggcccggaggctgccgcgccggacgtagcggcacaggcaggcgctaagccagcttccgttgtttcgccgccatccaacagccccgagccccctgttgggcagaccgtcatccccgtcagtctgcaaggtgtgaccgatgtgactcaggttaatgccacgccccatgcgttacgactgtctgcccgctggggtgtcgacctgaaaaaagtccgcggcagcgggcgcggggatcgtatctctgtttctgatctggaaagcgcgatcgttgccgccggcggtcgcctggcctctccgacgccccccgttcgtcgcagcaaagcgccccgctcgcatgccgatgacagccaggtatcggccaccccgctggcgcgccgcctggccggcaaactgggtatcaacttgcatgactgccgaagcagcggttcacgcggtcgggtaagtcgcgatgatgtgctggccgcggcgttgttactcgacgagcacccgcagaccagtcctgtgcaggagagtgccccggccccctttgagagcattccgatgtccggtatgcggcgggctatcgcttctcgcctgcaaacgtccaagcaacagtctccccatttccgtttgagcgtcgatctcgatctggagcgactgttagcgttacgtcaggacattaaccgcgaagtacccggcgtcaagatttcggtgaatgacctgctggtgaaggcctgcgccctggcgctggtggccgtgcctgacgtcaatatccagtttgatgaagcggcacaaagtatccgccgctttacggatgccgacatttcggtggccgttgcgctgcctgccgggctaattacccctattgttcgctcggcgaaccggaaatcgatcagcgacatatcgaacgaaattcactcgctggtgaccagagccaaagcgggcacgctgaagccggaagagttccagggcgggacctttagcctgtcaaatctggggatgctcggcgtccggcagtttgacgccatcatcaatccaccgcaaagcgcaatcctcgccattggcgccggcgaggtccgggcggtagtacgcgacgggcaaatcgtcgcgcgccagcaaatgacggtatcgctatcctgcgatcaccgggtcatcgatggcgcggcaggtgcggcttttctccgggaactcaagcgactgattgaaaccccgaccttgatgtttatccaggagacgagctatgcacgataa

SEQ ID NO: 218311 - DNA, 1107 bp, Klebsiella pneumoniae
atgcacgataaatacgatgtgctgatcatcggcgggggtcctgggggatacgttgccgccatccgtgccggccagctagggcttcgtaccgtattagtggaaaaacaacatctgggcggcatctgcctgaactggggatgcattccaaccaaggcgctgctgcatggcgctgaggttgcgcacactatcacccatgccagtcagctgggcatcggcgtgggtgaggtgaacgtcgatctgcagaaactggtgcagtttagccgtgccgtatcgcaacagctcaccgctggggttgcgtacctgttgaagaaaaatggcgtgagggtgattgatggcaccgcgcggctgcgcggcaaggggcaaatcacggtcgaggatgcccgaggggaggcgcgcgattaccgggccgatcacgtgatcctggcaaccggcgcccgaccacgcgcattgccaggcatagcgccagatggcgaacatatctggacctatttcgaggcgctgcggcctaagcttttacccaagtcgctcttaatcatcggttcaggggcgattggcgtcgagttcgccagcctttataacgatctgggctgtaaagtgacgctggtcgagctagcgtcgcagattttgccagtggaagatgccgaggtgtctgcagcagtgcgtaagtcattcgaaaaacgcggtattcagatccatacccagaccctggtgacgcaagtacagctcaccgataccggggtgcgctgcacactaaacaacaccggcggcgaatattctcaggatgtcgaacgtgtgctgctggcggttggcgtacagccgaatattgaagatctggggctggaagcactgggcgtcgagttagaccgcggttttatcaagacggacgcggcttgtcgcactaacgtattcgggctttatgccatcggcgatgtagccggcccgccgtgcctggcgcacaaggccagccacgaaggcgtgatctgcgttgagacactggccggtgtcgaaggcgcccaccctctcgatcgcgactatgtgcctggttgcacttatgcccggccccaggttgtggactgcaccccaaaagttggacacccaactgagtaa

SEQ ID NO: 218312 - DNA, 432 bp, Klebsiella pneumoniae
atggcacgaaagctctatcgcaaggaagcgattgaatataagaaattacactggaaaggaaaagcattattactggcaggtatgccagcatggcttatcgttattctgtcaagttgttttctcatcgcactcatctcgactcttatcctatgtacattcacccaacgtatagatgtacggggggaagtcatcacattaccgcattccgttaacgtctttgcaccgcagcaaggctttgtgttaaatcaatatgttaaggtcggagatatagtcaaaaaaggtcaaaaattatatgaaatagatatttctcgtaataccactaacggtaatgtgagtcttgctcaaactgccgtcataaatgaaaagatcattaatgctgagagcattattacaaaactaattcgcaacaaagatgaaacattgaatgggtaa

SEQ ID NO: 218313 - DNA, 267 bp, Klebsiella pneumoniae; identical to SEQ ID NO: 121407

SEQ ID NO: 218314 - DNA, 1254 bp, Klebsiella pneumoniae
ttgaataaaagtgttttttcaaactccttgtggatgatgtccgagaaaataatctctatttttggtttgatatttgtcacgtcttatgttgctaagtatgttgggccaaatatttatgggcaaatagcgtttgccacatctctatttcaaatagttcaaattgtatcgcaaatgggtagtgatgttattatttttaaaagacttagcaaaaataattcttcagggataaaattaatcaatgaaacatcttttatacgtggggttgtttatatatttatatcaatccctatagttttttggtctatagaaagtgagaataactacagtctttattttattgtagcatgttgcttatcctgtttttttacatcattagatgtatattcagtttattatgatgccagacttgaatcaaaaaaaaatgtttttgtcaatgtgttagggctaatagtgagtttatttttacgatggggaattgcagtatttaaacttgatcctgtttttttatctattccaatcatttttacaggtatgttcccttatttttttcgcatgtatctttttagaaaaaatcttggtataagagcatcgaataaaaaaaataaatttaaatacataaggtttttaatagcatcgggttctagttttgttatatcatctatttcagtggcaatatacactagggtttcactgctattgcttggcttcttttgtggaagttctttattgggtatatattcagtcgccgttagtctggctacctcatggatatttgtttgtaattcttttatcacatcaaatttaccctctattttttcatctaacaatgaactggaaacgataaaaatcactgcaaaacttaacatattagtaattctcatagggtgtgtcgtcatctcgttcgctataataggtgggcattatggtatatcgctcttatatggtaaagattatgttttagcatatactccatttgtaatattatgtgccgccacacttttttcttctctcggtacaatagcttcgagatttattgcaaaatattctgggtattcatatctttcaaaaaaagctttttgtgtgttgattttaagtataatgcttaacgtgatctttattaatttatgggggatcattggtgctgctattgcaactcttgctacagagtttatttcgttgacgttactgaactatttatttaaaggtgggattgttttaaaactacatgcatacaaaatattttacagaggttaa

SEQ ID NO: 218315 - DNA, 1095 bp, Klebsiella pneumoniae
atgaaaatgttattgttgcttatttcgttgagtgctctgtatcaaccgatgatttatgctcgaaccgattatatatatccagggaaagtttggccggatgtcaaaagtaatccaataaatgcacatggtggtggtatatattatgatggtgagtactattatttttatggagagtatagagtaggtaagagtatattctctaatgagtggcaaggaagtaaccagaaagtaaatatgtaccgttcaaaggatttggttcactggatgcctgttggtatcgttttagatttgtctcacctaccagaaaattatcaattagaaagacctaagattatatataataaaaaaaataaagagtatgtaatgtggtttcatttagagaaaaataaaaaattcactgatggtagtggtgaggctggtgtagcaacatccaataatatcacgggaccttatacttttatttctgcttcttactctaatgcaggagtaaaaccattttctccagctgcaaatacagattcttctaattggtttgttaggcaagcgaataaaagatttgaaaagtatttttctcgtgggcagccagtcagagatatggcccttttcgtggatgatgatgagaaagcttatcttatttatgaatcagaagataactattctcttcaggtagcaagattatctgatgactataaatctttttcaggagtttactcccggattttagttgggcaattaaatgaagccccttctattatgaaatataagaataaatattatttgattacttctggtctcagtggttataggccaaatgcagcgagaatatcagtagccgataatattttggggccttgggttacacttgggaatcctatgtcctcatttaattctaatgacattttaacatcgtttcactcgcaaccaacttacatactgaaagtgaaaagtgataaatatatatacttaggtgatcgctgggattttaaaaataattcttacagtgatctgtggaaaagtacatatgtatggttgcctataaatttttctaacgagataccatctatctcttgggttgaaaaattatccccagattga

SEQ ID NO: 218316 - DNA, 552 bp, Klebsiella pneumoniae
atggctgcaatccataaagcactgggcgaatgcagcgcagaacacccggttttttatgaggatgaagtggatatccatctcaaccccaaaatcggcgcagactggcagttacgcgggcagcaaaaacgggttgtgacgccgtggcagaacgaaaaatactatctggccggagcattgcacagcggaacgggcaaagtcagctatgtgggcggcaacagcaaaagttcggtgctgttcatcagcctgctgaagcaccttaaagccacataccgacgggcaaaaaccatcacgctcatcgtggataactatattatccataaaagccgtgaaacacagcgctggttgaaagcaaatcccaaattcagggtaatttaccaaccggtttactcgccgtgggtgaaccacgttgagcggttatggcaggcgcttcatgacacgataacccgtaatcaccagtgccgctcaatgtggcagttactggaaaaggttcgccattttatggaaacagccagcccattccccggagggaaacatggtctggcaaaagtgtag

SEQ ID NO: 218317 - DNA, 1236 bp, Klebsiella pneumoniae
atgaaaattaataaatatttacccatagctatatgcgccacggctttaattcctattgctgggctacttttttcattactgtcaatatgcaaaaatggtaaaaacagaatctcttttttactgatttcttttttctattttttcttccttattagacttccgccatatggtgactcttacaggaggtatggggattttctaagttatgcacctcattcagaggtaaccagtttcttatccggtcatccagatattttctattacttaggtattgtggtctttcggaacttagatattgcgtattatataatgcctgcgacatacggtgctttgatgatatatctattgcttgcatcgttaagaaatatgttatttatatttgattgtgaactttcggggtttaaaaaaatatcagcatatgtgttgcttttatctgcttttgatattgttggttattcattaggactaagatttggtttatctataactttagccgtttacgcaatatctacctattctcgaggtgataagttaaaagcgattttggctatgatattaactctgttagttcatttttctatggctttgattgtcattggatttatagctagtcgttttgtaaatttaaacaagaaaaaacttgtcctgttttcaattatttcctatgttttaagctctactattttaccattcattttgactaaaattagcttaggtgggattggcgcttatgctataagtggatatgtcgatggagtttgggcgaatgcatctgacaatctaaatacgaaaggagtttttttcattaggaatatgctgcaactttccctcttagtgctttttttgcgcgacaaaaattcggtagatataattgatcgggctatttgtctaataatacctctctcatttctcactgctgtctcttttactgcatttcagcgttacttagttgtttgtagtctattgctaatggttagaattattcctccatatatcggattgttatttagaaaaatatatttaatgatagggttttgcttttatgtttttgtcagtgctattgttctaaatatctatgttcaaagaatgccttttatttggggggatttatggagagggtactatcaatctccattgacattaataaattatgatgataaaaaattcaccaaatatttaaatgaggttacacttgatggtgattgggttaagaatagacaaggtgaaaaaggataa

SEQ ID NO: 218318 - DNA, 897 bp, Klebsiella pneumoniae
atgaaaaatattgaaatacaagaaaaaccattaattacagtatatattcctactcataatagatcaattttacttaaaagagctgttgattcagtattaagacaaacatatgagaatttcgaaataataatatgcgatgatggatcgtcagataatactgctgattatctcgttgatttagctagtagagaccatcgagttaaatttattcgtaataacgaaccaaaaggagcttgtttttcaaggaataggtgcatcgaattggcaaaaggagaattcattacaggtctcgatgatgatgatgaatttgtcgaaaataggcttcaattatttatggaaagttttcaaagtcatggatggaatattatttctagtaatagagtttttagggggaataatggggattatattggtgaagtctatgagggtatagttacgaaagaaatgcttggtagtagaaatattataggtaatcaagtttttactaaaactaaatattttattgaagtcggtggatttgatacatcttttcctgcttggcaagattatgacatgtggttccgtgtagttcaaaaatttggtcctagccatagaatttcaaacgcatcatatattttttatgttgacgaagaccgtcctagaataactacagggagcagagcgtatcacggctaccagttatttatagagaaacataaaaatgaattaagttctaaacaacttaacagtcttttttttcaagatcttttaaataggaatcaaaagataaagcttaaatatgtcatagactattttactctaactaacctgctaacttatattaagcttagccttaaggaaattgattttatacataaagcttattattatctttataaaaagaaaaacataaaatga

SEQ ID NO: 218319 - DNA, 1350 bp, Klebsiella pneumoniae
atgaaaatttatcgtccactatggaacgagggggctttactatctcctcaacagttccagcagcagactgaatgggagtctttccgcagtgccggtgcatcagcgctggcatccccattcccctggggcgtggaaaaaattgagtttaatgacagtcttctttcgtccggcctgatccagattacgcagttacgcctttggctggaagatggttcattaattgatgcgcaaaggagcgatttgcctccggcgccgcgtgagttagatgccagccagctgacaggtcgtgatgcggtaactgtagtcattgcattgccgcatatgcagcctggcataagcaacgttgaacaggagggcgtcagttcagaacggccgcttcgctatagagaagagtgggtaacattgcaggatgcctttggctctgaagaagaatctatagcagttgcccggtttaatttcaccatccggtttgcctatgaaagcaatgattcctggaaagtgtgtccggtcgcaagactgattcgggatggacaaaatgcgtggcgacaggatctatcttttattcctccagtagcgtcatttggagcaagcccggttcttcacgaacgtctgatgttgcttaaccgccagttacgctcccgacgccagcgtttgatgacgatgcgccgagaaagcaacgaaaggcttgccgattttgccgtcgccgatgtttcccttttctggttgctgaatgcactgaattctcacgccacagtgctagcagaatacgaacgttttccttcacgtccacctgaacaagtatgggctgagctcgctcgtctggcaggcagtatgctgaccttttccctggaccatgatctggacgccataccgggttatgaccacgaggagccagctaaggcgtttcctccgctgtttgacctgataacgggtttgcttgaggcaagtctgccatcccgagtcattgctctggaaatgacccgtccggacggacagacctggaaggccaacctccacgatatccgtctgcgtgaagaggccgatctctatctctctgtacgctcggatatcccggcctggcaggttgccgagaaatttcctgcactctgtcaggcaggttcacctgatgatgtccgcgaaatctatggtgctgcgctcaaggggatcccgttgataccggtgagcagagtcccggcagcgttgcctgtacgcatggaaaaccagtacttcgcacttgatatagaaagccctgctgcgcatgaaatgctggagcagggggtatgtatgttctatgtgcctgagttacttggtgctttggaacttgaactgtttgcggtattgcgctcatga

SEQ ID NO: 218320 - DNA, 690 bp, Klebsiella pneumoniae
atgagacaggatatcgatatcgaccagctaatgacggagacctggctcaccgtcaccatgcttaagaaaggcgccatcacgcttaatggctctgcgctttacaacgcatgcgttaaacaagttgaaagtgtgcgggaagcgctggagcgtgccggttatgacgatgccagtgtggaacatatttcctacgcacaatgtgccttgctggacgaaacggtgatgagccgtaagcccgaaaaaagcgaaggaggagaggagccgaaagtagatgaaggccagatggtctggcgtaaagcaccgcttcaggcccgtttttttggctcacttcgggcaggtgaagcactatgggatcggattgcagaggttctgcgtcagccctcaccgaacccggccgttttaacctgctatcaccgggtgatagcgttgggctttcagggattatacagcctgaaagcggtcagccagtcacagcgggatgaggtagtgaaagccctttctgagcgagtttctccacctgatgctggcctgtcgctggttgtttaccggatagggaaacatcgctggaatctgatgcgctcggtctggttctggatagtgctggccgtcattctgaccgggattatctggtgggggggccatctgtggcttcaggcgctgttgtcagcacaaataccggagctgcatggctaa

SEQ ID NO: 218321 - DNA, 1677 bp, Klebsiella pneumoniae
atgcgcagaaaagtcatcatttcggtaggcctacacactttagcagctgtagccgcgctactgtggttgctgtggtatttcattccgacaggcaacgtatttaaaggcctgtccactttgctgatcctccttctggcaggctggtatgtgttcaaaaactgtcggcatgaggagcccgtacccgacgcatacctcccggcggctgaactgccattactcgacgctgagggccccgttgtactggtgtgtggcgacatgctggatgcgttgtttcagggaagccctctgcgtaaaacagcccagggatggtggctacgggtcggcgacgtcagccggttagctgacgttgtccgcagcatacagacgcagtttccgcgccaggtcggtcagctctcggtaatgtaccgttgcctgccagaccatcatcaggatgaagccgtacttcgttccgcactgaaaacgctccgccagcagtgtaaacagattaaatccctgacgggtatcacactgccggttgtgttgaacgctgaattatccgggcctgaaacgccatggataatcgtccggggtgacaagccgatggtatgtccccttaatgattcaccgcaggcattcattgactggcagcagacggacgccaatatcctggcgctgccggcagtcagccaggcattttcctttatccgtaatacgttggctgatgagctggataaacctgaccgcttaacgccgccggtgcgtgcattttccgtgatcatgcggctcggagtagtcagcccagagactcggtctgtctgggccggttggctctattcccgtacctgcttgcagttttcccgagctcccgggcagtcatcgacaagtctgttcccggatgcggttttgccacttctggcaccgtttgcctcgccagtacagggaggcaaacgtacccgtcttctggttctgctgatatggctgtgcgttctgacggcgttgggcatatccgccctcaataatcgtgatcttatccgtcatgtcagtacccatttacagcgctggaatgctattccaatgaatcactacccccctaaagcagaatcactggttgcactgaaacaggatgcgctcctgcttgaacgctggcagcgtcagggagagcctttacgttatagcctgggttattacccgggacaacgtatgtggctggccttgcagcaggctatcgatacctggacaccgccacccgaccctgaaccgaaaccggtaccgaaaattgtacgactcgacagcatgtcactgtttgactccggcaaatcggtactcaaagacggctcaaccaaaatactcgttaatgcactggtagggattaaagccagaccaggctggctaatcgtggtcagcggtcatacagacaataccggcagcgttcagctaaatcagaccttgtctttgcaaagagctgaggccgtccgtaactggatgagtgataccggggacgtaccggaaagttgctttgccgtgcagggttacggcgacagtcgaccgattgcatcaaacgacacgcctgatggccgtgcgcataaccggcgtgtcgagatcagtctggtaccgcaggctgacgcctgtcgtctgccaggcgcaaaacatgcgtcacaggatgtaggtgacgtttcaactcgagaaatggagaagtaa

SEQ ID NO: 218322 - DNA, 492 bp, Klebsiella pneumoniae
atggcaatcccagtttatctgtggctgaaagacgacggtggcgcggacattaaaggttccgtggacgtgaaggaccgtgagggcagcattgaggtggtggcgcaggagcataatctgtacatcccgaccgataacaacaccggcaagctgactggaacccgtattcacacgccgttcctgtttaccaaagaaatcgactcttccagcccgtacctgtacaaggcggtgaccaccggccagaccctgaaatctgctgagttcaagtggtacaaaatcaacgacgcgggtcaggaagtggagtacttcaacacgaagctggaaaacgtgaaagtggtaaaagtgaatccagtgatgcacgacgtcaaagatccttctttcgagaagcacaaccatcttgagaggatcgaactgcgctacgaaaaaatcacctggacctacaaagacggcaacatcattcattccgattcctggaacgaacgcactacggcgtaa

SEQ ID NO: 218323 - DNA, 165 bp, Klebsiella pneumoniae
atgcatgccatgtgcaccattgttggcatgaatctggcacagatgagcacgcgtctacaacgccactacggcatttctactcacattggcgaacgtcgcatcgatatgctgacgatggcgtctttgctgccggataccggtgcccgcaacataattgacgattag

SEQ ID NO: 218324 - DNA, 2358 bp, Klebsiella pneumoniae
atgattgatagcttaagcagcctggcgcagaaggcgatggatgaagccctgagcctgtcccgctaccgggttgctgtgcatgaatgcagcgatttcctggatgttctgcgttacagcgcggtggaatccctcagtcagccctggcggtatgacgtggcggtcacctgctcctctgcggatattgcctgtgacacgttactgctgaaacccgcatcatttactttcatgaccccggtgtttgacggcaccccggcgctgccggtcgggacggtatttggcgtggtggagtcgtttcgccgtgtgtccacctcaaatgatgatacccattacgcgctgacgatcgttccccgtatcgcccttctggagtatgcgaaagggagcgaaatctatctcaatcagtcagtcactgaagtggttgaacaggtgctgcgtaaacacggtctggaggggcctgattttgagttccggctctcccgcgaatacccctcccgggagctcatcacccagtggcgggaaactgaccttgagtttatccagcgcctgctggcagaggtcggcatttactggcgctatgaaatggacagccgacttgaacaggacgtggtgatttttcaggacagccagcagcagtatgaatttggcgtcacgctgccactgcgcaaccaggccgggatgagtgacagcggacaggagagtatctgggatattcagactgcatataacgtggtgagcggaagggtggccacccgggactacaactaccgtgaagcgctacaacctcaggacagtgccgaaagcattttcagcaaggaggggatcaccaccggggaaacctaccattacgcggaacccttcctgacagcaggtgacgctgaaagcgcagagtccggggcatacttcgcccgtctgcgtcacgaacgcattctgaacgcccagtatcacgtcaccgggcattcctccagccctcatctggctcccggtcaggtactggaaacggacggcacgttacccgatgccgtcagggaaggtatcgtcatcaccacggtgcgttccagcggttcacgtaaaagtagtttttctctgacgtttgagggaatcccctacagcgaaactgtctgctggcgcccggcactgctcagtcgcccggtgatatccggctcgcttccggcacgggtggaaagcacacagaaaggcgacacctattcctggctcgatccggacgggcgctaccgggtaaaactggactttgaccgcaacagtgccgaacagggttatgcgtatctgtggctgcggctggcgaaaccctatgccggtgatacgtacggattccactcaccgcttatcgacggaacggaagtggccgtcgtatttgacggtggagacccggatcgtccctacatcgcttatgccctgcatgattcagagcatccggaccatgttaccagcgagaatcatacgcggaacgtgtggcgcacgccggcgaacaataagttgcgaatggaagacaagcgcggcgaggagcatatcaagctcgcaacggaatatggcaaaacgcagctgaacatggggcacctggtcaatggccagcgtgaaaaacgcggggccggttttgaactgcgaacggatgagtatggcgcagtccgtgcggcaaaagggctgttcctgacggcggatgaacaggccaaagcccaggggccggtactggaaatggcccctgccattaatcagattaacctggcgaacagccagatgcaggccctgaacagcgccgccgaagccgccggagccctgatctgcgacatcaatacccagataaattttgtgaccgacaaaatcaaagacctccagtctgcggtcctgctggggagtgcgccgcagggggtggcactgacctcaggcgaacaccttcagctcagcagcacccgtaacaccatgatcaatgcaggccagcatcttgatatcggtgcgatgaaaaatctgtcggtaacggtggaaaaagcccttggtctgtttgtgcataaagagggggctaagctcgttgccaaccagggagacatcgagattcaggctcaacacaacacgatgtccctgttttctgaaaaacagctgacggtgaccagcagtgaagatgaaattattatcagcaccccggaaacgctgacgctgaacggcggcggatcttacctgaggctgagtaagaacggcattgaacatggctcatcaggtgagttcattatgaagacgtctgactatctggtaccaggatcgggcgcaaatctccccaacgaaacacccaatttcagcctgacggatatcactcaggaaagcaaaatcagcagcaaatctttcaatgactaa

SEQ ID NO: 218325 - DNA, 192 bp, Klebsiella pneumoniae; identical to SEQ ID NO: 38528

SEQ ID NO: 218326 - DNA, 1422 bp, Klebsiella pneumoniae
atgaaatatttttccacgggcttctttttgaaaggaaatgttgaggtaaaagatataatcaatgagtgtttgtcatgggtgtcaacatcaccatttacttcatttgttcccgctagcttagatatgaaaagagggttggatgagtttgatattgaggtgggtgatgaaagaattgaactgataaatttttcagatgattcgattatgatgtcttgttttcgttactctaaaatatcaggggcacataaatgggtcaccgatgttgctgttaattattatttttcagaagggaaaacctgggttcaagttgaatctagtgttgttactcagcaagctgttcataaggcacctgtaactaaaacaccactcattgtattgcgtctgctagataaattctctggtgggcgtgatgatgtttttaaagtaggaattgaacctgttttactggatggttcagaacattctcttggctttgcttgtgatataattaatggaaggcacaaaaacaggcttcctgtggtttatgtgagctctaaatattttttcaaagaacatccgcataatgtgatacctggcaggttggctaggaagctatcagggttggcccatgtggttgtagaacctgaaggccacttgttttctaataaactcaagcatgaagttaataataaaaattcttatggtggaagcgttggtatttactggccgggagggcaaagtattagtattcataaaagaggtagtcttagtgctgctgaatttgagaaagagatatttaaagagattataactgctatgacttcactggcccccttaaggaaaaatgggtggtctgagatagtcagtagtaaaaacagaaaagccattcaagttttaaaagataatggaagtcaaagtagtgaactcgcttctctatatgaagaagagaatgaatccctgcaagatgaagtaaaggagctaaatcaaaagatagcttcttatgaagcaaggataagagtattgatggaaagaacatctatgcagggtggggtttttttgaagattggcaatgagtatgagttgtttgaaggtgaggtattagaaataataatgtcttcaattaggaaggttcttccgacaaattatgagggaggtagatatcatgatgttctatcttcaatatcttccgctaacccatgcagtacaaacctcttggaaagagataaaaagttgaagcaagcgctagtaggctatacaaaaatgacgccaaaagtgagaggtgttttgaatgatgtcggtttttcaataagcgaagagggtaagcactataaaataacttaccatggggatccccggtacacatatattttacctaaaacggggagtgactatcgaggggcgttaaatgcttactccgacatatcaaaaaaggtgttttcataa

SEQ ID NO: 218327 - DNA, 267 bp, Klebsiella pneumoniae
ttggtctggacgattaactattccgaccgagcgctcaagtcgttacgtaagatggacaagcagaacgcacgacggattgtggattttatggatttacgtattgccgttgccgcagatccacgccactcaggtaagccgcttaaaggtgagcttggagaattctggcgctatcgagttggcgattatcgcatcctatgcgagatcagggacgacgagctgattattctggctgctaccattggccaccgacgtgaagtctacgactga

SEQ ID NO: 218328 - DNA, 225 bp, Klebsiella pneumoniae
atgttggctatcagattgtctgacgagattgagtcccgtctaaacttgcttgcgaagcaaacaggtaggactaaaacgttctatgcgcgtgaagcgatcctgacgcatctggatgatcttgaagattattatctttcagcagaaactgtggcacgtgttcgccgtggggatgaagttgtacattcgtctgaagacgtgaggaagtcgcttggtctggacgattaa

SEQ ID NO: 218329 - DNA, 1047 bp, Klebsiella pneumoniae
atgttgatgcagcatatcggtgtcggctattttgggtattaccgagcaactgcttatgcgatgaaacactctcttatgcccgagattgcgaagttaagaatgaaggctctgaacttctgggataagcacgggatccgtgccgcagctgatgcttttgacgtatcaacgcgaacactctactggtggcgccggttactgcgcaccggtggtccagaagcactaattccaagaagcaaagcccctctggttcgccgttcaaggcactggcatcctgatgtactcaaggagatcaggcgtctgagaactgagttacccaatctcggcaaagagcagatttttgtcaggctgaaaccatggtgtgaagcgcggcattttacctgtcccagcacgtcaaccattggaagaatcattgctggtgctcacgataaaatgcggatgatccccgtacgcctcagcgccaggggcaaagcccggttgataaaaaaacgctcagtgaagcccagaagaccaaaacaataccgcccggtaaaaacaggcgaactcatagggatggacgcgattgaactcaggatgggggacctacgccgctatatcattaccatgatcgacgagcacagcgactatgcgctggccctggcggtcccttcactcaacagcgatattaccagccatttcttcagcaaggccacaaagctctttcctgtcgctatcagacaagttgtcactgacaacggtaaggagttcctcggtaactttgataaaacgctacaggaagcctcgattaaacacatctggacctatccgtacacaccgaaaatgaatgcgacctgtgagcgatttaaccggacacttagagaacaatttattgaattcaatgaattgttgctttttgaggacctgaatttgtttaatcaaagaatggctgaatatctggtgctgtataacagcaaaaggccacataaatcactcgaactgatgacgccagtggactatattttacgtgagagtaaaaattgcaatatgtggtggacccatacagagtattga

SEQ ID NO: 218330 - DNA, 303 bp, Klebsiella pneumoniae
gtgagtatggcgaacctacgcaaagaggcgcgtggccgcgaatgtaccgtgcggatccccgggcactgcaacggcaacccggaaaccagcgtgctggcgcattaccgcctggcgggtacgtgcggcacaggatgcaagcctgacgatactcaggcggcgatcgcctgcaacgggtgccatgacgtaatcgacggcagaactaaaaccaccgatttcacctacgacgtattgcgcctgatgcacgcggagggggtaatgcgcaccctggaaatctggcggaaagagggactcattaaatcatga

SEQ ID NO: 218331 - DNA, 222 bp, Klebsiella pneumoniae
atgaccaaatatgaattactcgactcaaaaataatgagcaaaattgatgcgcatcctatgccattttccagcctgtacgtcatggatgtagcagaagaatgcagccgcatcgcaaaggatgagaataagccagaacctttccgcattctcgatcgccggcttcaggcgttacgtaaatcgggaaaaatccgcagtacatccaaaggctgggtgagggggtaa

SEQ ID NO: 218332 - DNA, 369 bp, Klebsiella pneumoniae
atggctagagcattttctgctgttgagcgccgggagtatgtccgcgcagtgattcggatcaccaggcatcaggggcgcctcacgaccgccgaggcaatgaacaaactgggcctgagccgcgctactgtccaacgatatttttccgaagcagaagcgactggcgaggttgtacgacatggtcgtttgggattgttccgcgatcagcgcgccgtcatcgattttgacatgaaacggttagggatggtgccaaaggcagcgtcagggatgaattacagcctgcttggttgtcctgtattccagcgtttcctcgatattcaggaaatgatttttacctgtacgccggcatcgtcatcacgggaggccttatga

SEQ ID NO: 218333 - DNA, 750 bp, Klebsiella pneumoniae
atgaaaaatatgattggtactggtagtgcgctggagcggctgaaaaaactcatccctccgggtgtagagcctaagtttggcagtgtagatgagtggagaacctggcaggccgaggaagggcgcaaacgctgcgaagaactggaaaaacaaaaccagcgtatccgtgctgaaaaaatattcggacgagcgggaattcaagatctgcatcggagctgcacgttcgcaaattaccaggtggcaggagatggtcagcgccgggcgctcacgatggcgagaagttacgcacagaacttcggttcagggttcgccagtttcgtattcagcggagcgccgggaaccgggaaaaaccatctggcggccgcaatcggaaatcacctgctggctggtggtcgctctgtgctggtggtgactattcctgacctgatgctccgtgttcgcgagtgctacgacgacgggcagtcagaggcttcgcttctggacgacctttgccgggtagatctgctcatcctggacgaagtaggcattcagcgcggcagcagcggcgaaaaggtcattctgaaccaggttatcgatcgccgcctgtcgacgatgcgtccggtcggcatcctgacgaacctgaactacgaatctctgacggacaccctcggcgcgcgcattctcgaccgtctccagatggacggcggcatgtgggtgaacttcgactgggatagttatcgcaaaaacgtccgccatctgcgcgtcgttaagtga

SEQ ID NO: 218334 - DNA, 189 bp, Klebsiella pneumoniae
atgtcaggaacaaagactgaggtaaacgcccaagcgacccataaatgctacttttgcggagcgagcaatattgaggttgcaggcgttctcattgccggccccggcgtatccatctgtcaaaaatgtgtctttcagtgggttgatattgtctttcaacacgcagaaaagaccgataaaccaacgtcataa

SEQ ID NO: 218335 - DNA, 537 bp, Klebsiella pneumoniae
atgcaaacactttcctttcaacaaaataccggattcaaccccggcgcactgataaagcgaaatcaggcgaaagtggcagatcacgacggcattcgttctgccgttcgcgcctgggccgctgctgaaggtcaggatgttgtttcggcatacatcattgatgagtggcgccagcagggcggggaagaaattgaatttcccgcggacatcagccgcgcccgccagaagcttttccgttacctggataacgaggtcgattctgaaaagtatcgcgcgaatgtgcgtcttctgacgccagccatcatggccgtcctcccgttggaatttcgccaccgcctgttgcctgaagacaatttcatgtcccgactggcacggttggagaaagagaccagcgaagcgaaggttgccgttgccatgggagctccacgtcatcaaaagctgaaagaactgagcgagggaattgtcgagatgttccgggttgacccagaactaacggcgccactgatggccatcgtcacttcaatgctgggggttttgtaa

SEQ ID NO: 218336 - DNA, 396 bp, Klebsiella pneumoniae
atgagaaaaaatacgcaccagtccgacaacccacaggtccaaaggctcaatgaaataattgagatgaagcgcatatccaaagcggatatagcgagaatttgtggtgtaagttcgcaatcggttaacaactggtttgtgcggggagcaatcggaaagagctctgccataaagctcgctgatgctcttggcgtaagccttgagtgggttttaggtcaggacgtcgatgcaaatgatggtttacgcccggacgagaagcggttgctggaactctataaccaactccccaacgaagaagagcaacagaacatgctgcggatcgtatctctgcggctcaaagagctcgatgagttgtatgccaagtacatggggcggcggattaagggtgatggcgagtga

SEQ ID NO: 218337 - DNA, 540 bp, Klebsiella pneumoniae
atggatggtggcactttacaggatataaagatatctcttagatatgacggaaaggatgctttaaatcatgagatagatctgaattgccttggagaatctcttaaggggttctctaaagtcctatctacagcggcgtcattctctgccacacaaaagtatagcaaatatattaattatcaagaagttaaggtgtatgctcgtgaggcaaaagctaactgttttacccttgatgctgccctaaacttcgtcactcagaatcagttgttctctgggatcgccgcaactatactgggtgcaattctacaatatatttttgcgagaaattccaacaagaaagatgaaatgaaagctttacagcagtctcttgaaaaagccatagaggcgctagggaacaaggacgcaggaaccatcgacaagttgatcgctgtgattgaccgaatggctgtagagttacgcccatctgtaaggcaggctgtatcaccaataggcaatacttgtgacgagatctccattgcaactgacctgctccccgttgattaa

SEQ ID NO: 218338 - DNA, 444 bp, Klebsiella pneumoniae
atgaaaaaaatcattttccttctactaattccagcattttgtaatgcaaacactcctactgttttcaaatcttcttgcggtggtattcaatacagtatcgaatcattttgtagtgtaaataaccttaagggtgaccaggataaacttgacataccaatttgcagcaagcaaatttttgtccttggtaaggaaaaccatgatctatcaaagtttacaggtcttgtagaacgcattaacagcaaagacgaaaaaataaaaatgatgaatttcgtcttctacggagcctcatgtaaaaatgacagaattattttatccggcgcaggtggttgcaattcatgtggtgaaacgttcaagacatttaatctatcaggggaagaaataaatgagaaatctaccacgctagatttggagcctatgcaggatattatccccgagctttattaa

SEQ ID NO: 218339 - DNA, 858 bp, Klebsiella pneumoniae
gtggcagtgcaggtgcagggtgacgtcatagcgcttcttgatttcgctgaccagctcaaaggcggcatgcggcgtcagaatgccggacatgtccttgatggcgacggagtcaacgccggtctccagcagctgttcggtgaggtcgagccaggtctgcagggtgtgcgccgggctggtggtgtacgaaagcgtaccctgggcgtgggcgccgtgccggcggaccgcctgcagggcggcctgcatgttgcgcgggtcgttcatggcatcgaagacgcggaagacgtccatgccgtttttgacggcgcgctccacgaagcgctccaccacgtcgtcggcgtagtggcggtagccgagcaggttctggccgcggagcagcatctgcagcggggtcttgggcatcgcctttttcagctcgcgcaggcggacccacgggtcctcgccgagaaagcggatgcaggcgtcaaaggtggcgccgccccagcactcgagcgagcggtagccgacgtcgtccagctgagcggcaacgggcagcatatcgtcgagacgcagacgggtggcgaacagggactggtgggcgtcgcgcaggacgacatcggtaatggcaacggtcatgaattcctccgtgaattaagggtgaagacggcgatggtggtgaatggcggcgacaatcgccggcttcaggcgggcgaaatcgtcggcgggcgcgacggcggccggcgccgctgcgggggcggcgggcggctcgggaaacaggcggttgacggcgagggacattccccggatggcgaaaatgagcagcagcaggaacaccagcacaaagcccatgccgagaaacatcagggtgaagccttcgcctaa

SEQ ID NO: 218340 - DNA, 492 bp, Klebsiella pneumoniae
gtgctcaccgtggcgctgttcccgcaacccggcctgaagttcctcgaaaaccgccacaacccggcggcctttgagccggtgccgcaggtggaagccgcgcagccagtggcaaaagcagaaaaacctgccgcctccggcgtctacaccgtggaggtggaaggcaaagcctttgtggtcaaggtcagcgacggcggtgacgtcagccagctgacggcggctgctcctgctcctgctcctgctcctgcctctgcacccgccgctgccgccccggccggcgacggcaccccggtgaccgccccgctggcgggcaccatctggaaggtgctggccgcggaaggccagacggtggccgcaggcgaggtgctgctgattctggaagccatgaagatggaaaccgaaatccgcgccgcgcaggccgggaccgtgcgcggtatcgcggtgaaagccggcgacgcggtggcggtcggcgacaccctgatgactctggcgtaa

SEQ ID NO: 218341 - DNA, 1098 bp, Klebsiella pneumoniae
gtgcatcagcaggaagttctgcccgtccgcgtccagacccaccttgttcgacaccctggccgccatcggcaccgccgacacccccgccgagccgatcagcgggttgattttgtgcctgctgaacacattcatcagcttcgccatcagcaccccggcggcggtccccacgcagaaggcgatcacccccagcaccaggatccccagcgtctgcggctgcaggaacttgtccgccaccagcttggcccccaccgacagtccgaggaagatggtcacgatattgatcagcgcgttctgcaccgtgtcgctcagacgttccaccaccccgctctcgcgcatcaggttgccgaagcagaacatccccagcagcggcgcggcgtctggcagcaggagcgccaccagcagcaacagcaccgccgggaacaggatcttctcccgccggctcaccgtgcgcagctgcaccatgcggatcttccgctccttatccgtggtcagcgccttcatgatcggcggctggatcagcggcaccagcgccatgtaggagtaggccgccaccgcgatggcccccagcagctccggcgccagcttgcccgacaggtaaatcgccgtcgggccgtcggcgccgccgatgatgccgatggccgccgcctgcggcagggtgaagctgatgatgccgaagtagttcagcgtcagcgccccgagcacggtggcgaagatcccgaactgcgccgccgcccccagcagcagggtgcgcgggttagccagcagcgggccgaaatcggtcatcgccccgacgcccatgaaaatcaccagcggcgcgatacccgagccaatcgccaccttatagaagatggccagcaccccggcggagtagcccatgtccaccgcgaggctctccatctgcccctgcaccgacggcagggccagggccagcgccgccttaatggcgtggacgtccggcgcgcagtggagcttcgcggcaatcaccgccagctgcgccgggtcgtggtgagccagcaggctctccagggcggtgagcgccagcccggcctccggaatattggagtgcaggccgccgaagccaatcggcagcagcagtaa

SEQ ID NO: 218342 - DNA, 777 bp, Klebsiella pneumoniae
atgggaatacttctaatactacctattttagtggctggatatatatattgcacatccagcctctacatgaaatacaaaatgcacagatatgacggacaacttctctatcttctggtaggtaagtttggtgtctatttttttgccttgtcctctatattaactctcgccttattctctttttgcagagggctttctgttgacttttgcagcatacacattcccttggattacgtcgattatctaaagggcgtgcttgttcagaatcacattagagatgagggttcagcggaaacggcaatatttttccttcacgccagtttcatatcattttttttggcatacatttttccatccatttatatatggttggtgaaaaaacgacacaaattaaaaacttcagatcaggcaaaatatgctgtattacaaagcgttgccaaaagtggcattgagagcgctttgattaattcaataatccatcctggcactgtttatatgtgctctatgagtgatagaaaagtttatgttggcaccgttacttctgtttcagaacctgatgaggttaatggccttgccgaagaattttctataatcccattttatagtggatatagagataaagactccctctctgtggagtttaataccttttataaggatgtggcgcctactaatcatgttgatttcactattcacttaaagaaagaaaacataatatcgatgactgttttcgattatgatgttttctcaaggtttaagcctgaaaaagaaaaacactga

SEQ ID NO: 218343 - DNA, 501 bp, Klebsiella pneumoniae
atgaaaatcgcagctgcgttaggtgtatgtcattttttagtatataaaacgaccactcccgagtgctggcgccgcaggttaaggatgattctggctaaaaagcgtccttttccgggaaagggtcatgctcgtatgaccctatgggttcagcgactacacataaactacaaaattgcatctgcttttaccccagaacgcgggtgtacaacagaattacatcaaaagtacatcaaaattacatcacttttacgtcagatcgcgggtgtacaacagaattacatcaaaagtacatcacttttacgtcacttttacatcatttttacgtcagatctgacctctgaactattcgtacatccgccccctcttcctgggcctcctgcacgtgctgaaaatggtttttccggctgtgccggcaacgcctcacggccacgcaataaattgcgtccccgttcaccgttttcgggtaagaagaacatcggaaacaggacttaccccggctga

SEQ ID NO: 218344 - DNA, 408 bp, Klebsiella pneumoniae
atgggatttataggtaatctattcagtatgtttactggtaaaccgacagcttatgacaagcttactttgattgaatttggtgactggttagagacatatagttcatctaacttactatcccaatcatcaatggcaaccgctcttatggttcaaggtgttaatttgcttgttcaaaatatggggaatgagtactcggtactgtattcttttattaggaataagaaagtttcttccaagaaagtatttgatgatttatttatcccgttcattgtccattgtaagcaaaacgacaatgccggagagtttgattatcgtactttgatggggatgcctgccagagccacgatggcttatatgatagctactatttacgactcagacccccagcttttatttgatattgagtga

SEQ ID NO: 218345 - DNA, 915 bp, Klebsiella pneumoniae
ttgcataacgccgcactcgaactttttaacgagcgcttaccgcataagccgtacttctcggatgatctgcactttggtgtgcgcattgcgggaaaagaacgtgcaatcctggcgaaatatatccagttcaaccagcctcacgccatgttctggctgggatttgacgttgatcgcgccggcgcagccattgactggagcgacaggaacgcgccagctcctacgctgaccatcaccaaccccgacaacggacacgcgcatctgctgtacgccctcaaaacctcgattcgcaccgcaccggacggaaaaatgaagccgctgcgctacgccgctgccgtggagaacgcgctacgtaaaaaattagaggctgacgcggggtattcgggcctaatctgcaaaaatccgaaccacggccactggaaaattgccgtctggcagccggaactctacacgctggactggctggccgacttcctcgacctgaacgcggcgaacgataaagaaatcgtcgccgactacggcttaggccgtaactgcaccctgttcgacaaaacccgcaagtgggcataccgcgccattcgtcagggatggcctgcgtacgaccagtggctgcaagcctgctatgatcgtgccagcgcctataatcagcaatttgcagctcctctggatgacaatgaggtaatagggatagctaaaagcattgctaaatggacgttcaatatcttttcgaaggaaaaattcgaagcatatgtaagagactctcactcatcgaaaatccagtctatcagggggcgaaaaggcggcttaatctcgaagagaggtgtttcacctcgatcccaaagaacaagtcagccatggctggacttaaaaatatctcgcgcaacattttacagaagaaaaaaagcctcggaggcatga

SEQ ID NO: 218346 - DNA, 237 bp, Klebsiella pneumoniae; identical to SEQ ID NO: 148995

SEQ ID NO: 218347 - DNA, 405 bp, Klebsiella pneumoniae
atgacagagaaaaccgccatcctgagcctgcgtatcacccctgaactgaaacggaaactcgaagcctgtgctgatgatgagcataagacactgaccgaatttgtacgcaagacactggcacacagccaggaggaaagtgttatgcattcggcaaaagaaaagctcgctgaactgcaaacggacgtaagcaaagccgaagaacagatcagtaattttcagtcacaacataccaaactgatggaccagctggttaacgcgcagaataggctggtctctgagatggaaaaccggctaaaggttttacgacgcaacaggctgctcgatatcgtactgatgacgatgttctgcatagcagggtcggtgctgggcggcttaatcacggagctgatgagggtcaagggatag

SEQ ID NO: 218348 - DNA, 126 bp, Klebsiella pneumoniae
atggaggccgttctccaaaaagagactagagctacctacagccttaacagccgtattaacccttttgaaatcaaagtttctaactgtattcccactaccaccaatgatcaaagcaccaaccggtaa

SEQ ID NO: 218349 - DNA, 228 bp, Klebsiella pneumoniae
atgccaatgtttgatctcgatggttgcaatgatgcaaatattaaaggcaataagacctcgtcagaagagcttctgaaagctaagcaatcagataaccttactgctattgataatgaggctgggcttcctaagaagaaagatgaaattctgggcttgaaaccaggagtttatggcttctctattgatttaaaagcgctttaccgtcgaatttttaaaaaaagaaaatag

SEQ ID NO: 218350 - DNA, 141 bp, Klebsiella pneumoniae
atgtcgaagtggagcattgcagccaaaccgaaagacgagcagaacaaggttaagttgaccttgcgttctccggcgttgcatgcaaaatgcgcattagtgagctttggacgcaaggaaaacaaaagctggtatcgtttctaa

SEQ ID NO: 218351 - DNA, 429 bp, Klebsiella pneumoniae
atgaccagcaaattaaccagagagcgcctgcaggaaatcgctgaagatggattcctgaagcatggcgaaagcaaagaactggcccgtatggcgctggccgaaaaggccagcgagccggtgatattgtaccgggagcgcaatccctacaacggcttaaccacaagctggcaagagcttaccgaaaacgagttctcattcctcaaagagaatgccggggaaaatgcagagttcctcacgctctatcgccacgcgcagtcagcgccggtaataccggatttcaaaaaactggctcgcgaactggttgttaatctcgtcgattgcggcggactggatgaaggggtgaaagagaagtatctggagtgggtggagaaaacctgccgcgccgccatgctcgcaaccgccccgcaggaggcatcagatttgacgtaa

SEQ ID NO: 218352 - DNA, 1398 bp, Klebsiella pneumoniae
atgggaggcctgcagctcgtcgccggggtcggtcatttcggtcaccaggctccgcacccaggtgttcagctccagctccagcagacgccggtccttggtggtgccgatattctcgcgctggatcatcttcaggtagtgcgcgatgcgcgacagcaggaagatgtaaggcagacgcgcgttgatacggctgttggcggtggcgtcggcggtatcgtacagcgccggtttctgcgcggagttggccgagaagaagcaggcgtaatcgcgatttttgtagtacgacagcgggataaagcccaggctggcgaactcaaactcccgcgtttccgggatcatcacctcggaagggatcttcacctggttgccggtgcccagatcgtacagatggataggcaaatctttcaccgcgccgcccgcctgcggaccgcgaatttgcacgcaccagccgttgttaacaaagctcttcaccatattagatgcgaaggagaacgccgcgctggtccagagatatttttcgtgatccgggcccttcacctgctcgacatagttgaagctgcgcaccggcacggtgtccggaccgtacggcagacgacccagcacgcgcggcatcaccaggccgatgtagcgggcatcgtcggtttcacgaaacgccttccagcgaatatattccgcgcgatcgaagtagttgccgatatccttaatggcagccacctcttccatggtctctttcaggaagaaggccgggccgacggcgccgataaacggcatatgggcggccgcagagacgcgggagatattgcgcaggagcgccacatcctgcgggctggcgtcgaactcataggccgagatcaccgagccgatcggctcgccgccgggagtgtcatactccgcggtataggtgtgccagtacaggccgctctggataagctccggcgcgtcctcaaagtcctggcgcagatcgtctttggcgacgtcgaggatctccgttttgacgttctgccgatagtcggtgttgtccaccagctgtttgaggccgcgccacagggattcgacctgctgaaactcctgatggtgcatcaccgcgtccagctgacggcttatctggaaatccagctcggcgatatggtggtcgatcagcgttttgtcgagcttttccacccgctggccggactgacggatgcgttccataaacacctgcatcgccgcggtgagacgttccgccgccggcgcctcggagagcgcggcatcgtccagaaagtcgttgatatccccgaggcaagacgccggggtgagattaattttttcaaacagcgaggcgtaaacgccctcgcccgcgctgttttcctgcagcgtggtttgcccctgaacaggggcgttttctgtggtaacagacattag

SEQ ID NO: 218353 - DNA, 261 bp, Klebsiella pneumoniae
gtgccgaatacgctggccggcaatggcgaagaggagaacgtcagactgcgttttaccgacatcaaagattttgaaccggagcaggttgcccggcaaattccgcaactccgcgccatgctggcgatgcgtaatttattacgcgatctcaaatccaatctgctcgataacgccactttcagaaaagagcttgaggcaatcctgaaagatccggcgctgtcccaggaattacgcgacgaaatgagtgcgcttgccccgaaataa

SEQ ID NO: 218354 - DNA, 306 bp, Klebsiella pneumoniae
gtgagaaatgccttccatcatacagccgtcgcccatgaaggcgtaggtgtagtggtcgacgatatcgtgtcccggacggttgaactgcgccgccagggttttctcggcgatagccatcccgaccgcgttagcgataccctggcccagcggaccggtggtggtttccacgcctgcggtgtagccgacttccgggtgacccggggttttggagtgcagctggcggaagtttttcagctcttcaatcggcagatcgtagccagtgaggtgcagcaggctgtaaatcagcatcgaaccatggccatttga

SEQ ID NO: 218355 - DNA, 771 bp, Klebsiella pneumoniae
gtgcagcgcgataccgttggcgatagcggtcataccgaactcgcgcacgccgtagtggatgtagttcccggcagcgtcttcgttgatcggcttagaaccggaccacagggtcaggttggacggcgcgagatctgcggagccgccgaggaattccggcagcagcgggccgaaggcttcgatggcgttctgcgaggctttacggctggcgattttcgccgggttggcctgcagcttcgcgatgaactcgttagctttcgcgtcgaagtcagacggcatctcgcctttcatacggcgggtgaattcggctgcttcctgcgggaaggctttggcgtaggcagcgaacttctcattccacgcggcttctttcgcctggccggcttctttggcatcccactgggcatagatgtcagacgggatgtcaaacggcgcgtgtttccagcccagcgcttcgcgggtcagggcgatttcggcgtcgcccagcggcgcgccgtgggagtcgtgggtaccggctttgttcggcgaaccgaaaccgatgatggttttgcacatcagcagggacggtttgtcggtgaccgcccgtgcttcttctaccgcgcgtttgatggcgtcagcgtcgtgaccgtccacgccgcgcaccacgtgccagccgtaggcttcaaagcgtttggcggtgtcgtcggtgaaccagccttcaacgtggccgtcgatggagatgccgttgtcatcatagaacgccaccagtttacccagtttcagggtaccggccagtga

SEQ ID NO: 218356 - DNA, 1200 bp, Klebsiella pneumoniae
gtgatcaccaacccgcagaccaccgccgcctcgccggatatggccattccgtttggcctcaagttcagcggctacgcccgctatggcgcccacttccagaccggcgaccagaaatatgtcggcgtcgacggctcctataacggcgcctcggcgatcggccgtctgggcaacgaaagcaacggcggcgaattccagatcagcaaggccttcaaaagcgcgcagggggctatctgggatctcaacgtgatgttcgaccactggagcgacgaagttaacctgaagaaggcctacgtcggcgttaccaacgtgctggaatccaaccccaacgcctatctgtgggccggccgcgacttccaccaacgtccgcaacaggggatcaacgactacttctggatgaaccacgacggccagggcgccggggtaaagaactttgatatcggcggcgtgcagttcgacgtggcggctgtgtcgcaggtgaaatcctgcagcccggaagtgatggccgacgagaccaacccgtcgcgcatcacctgtaccggcagctccgacaccggcgacaacggccactacgcgctgaccaccaaaacccacaacatcaaggccgggccgatcgacgtcgaggtgtacgccaactacggctttgactcgaaggcggtggacagcgacgcgcgtctcgaagcctggcagggcggcctggtgctgagccacaccaacgacagcggggtgaacaaggtgatcctgcgctattccgacaactcggataacagcgtctacaacaaaaccgacgacctgaccacggtctacgccagcttcgagggcagccataagttcacccagcaggcgcaggtggaatatctgctagccttccacgactacgacaacggcaaggacaacgccgacaaccgtaaaaactacggcgccatcgtgcggccgatgtacttctggaacgacgtgcactccacctggctggaagcgggctaccagcgcgtggattacgaccagggcggggataaccacggctggaagctgacgctgtcgcagaacatcgccatcggcatggggccggagttccgtccgatgctgcgcttctacgtgaccggcggccaggtggacaacgagcataccgcgaaggtcaacaacaccaaagaccagcagctggattcgctgaacgtcggcgggatgtttgaggcgtggttctga

SEQ ID NO: 218357 - DNA, 441 bp, Klebsiella pneumoniae
ttgtcagatgacgcaagcacggcgtttaaaatcggcggcgtgcggcaggtgaacgatggttcggacgttccaattcaggtcctgtacgtatatggcgtgcgcgttacgtatcccgcagaagcgcaaacaaagattaaagcagtcgttggccagagcaagcctttccagtacggcgtagaagtggttcgagataaaaatctgaacaatttctactgcaatttctacctcaatggtgagctgatcgggacgtcaccagcatttactcccctggctgtcccgacggtgacaaacgcgtttgtgctgggaaatctggctaacggctactgcatggcgaacactgttttctatcgtgtacgcctggatgacctgagtggctctactcggctgaccgcagatctcatcgctgacgattacgcaaaaaataaggggtactttagttaa

SEQ ID NO: 218358 - DNA, 240 bp, Klebsiella pneumoniae
atgcatcgacagtcagacatcaatcaggcattccgcgagtcggtattgcgcaactccaaaggttttcagtacctgcacacaaaggattttgtgtcagcgctgcgccggcgtggcatccactttaccgaggtggaggcgaactcctggatcgcacgcgagcagtcttatttcattgataaaacggcagagcatagcgaaaacaggctatggatgatggccaacatggggagggtcatctga

SEQ ID NO: 218359 - DNA, 318 bp, Klebsiella pneumoniae
atggggtttccttcacccgcagcggactacgtcgagcagcgactgtccgttaactcgatatgcaatgttggtcctaacacccgcgttttcgaaagggatggcggttatgttgtgctggatatctccctgaagccaaagcagggtagtcaggttctgatccagcacggcggcgggacggagcttgccacgctgagagggcggtcgctgataaccgaagatggcgaagcgattgaaggtgaggccctggacgatgtcactgtcgccggcgtcgtgacgtttactatctgcgatgtgcgtcaggacaatgcggttgtttag

SEQ ID NO: 218360 - DNA, 981 bp, Klebsiella pneumoniae
atgagccatcaactcaccttcgccgatagtgaattcagcactaagcgccgtcagacccgaaaagagattttcctctcccgcatggagcatattctgccatggcagaatatgaccgctgtcatcgagccgttttatcccaaggcgggcaatggccgacggccctatccgctggagaccatgctgcgtattcactgcatgcagcattggtacaacctgagcgacggtgccatggaagatgccctgtacgaaatcgcctccatgcgcctgtttgcccgattatccctggatagcgccctgccggatcgcaccaccatcatgaatttccgccacctgctcgagcagcatcaactggcccgtcaattgttcaagaccatcaatcgctggctggccgaagcaggcgtcatgatgacccaaggcactttggtggatgccaccatcattgaggcacccagctctaccaagaacaaagagcagcaacgcgatccggagatgcatcagaccaagaaaggcaatcagtggcactttggcatgaaggcccacattggtgtcgatgccaagagtggcctgacccacagcctggtcaccaccgcggccaacgagcatgacctcaatcagctgggtaatctgcttcatggagaggagcaatttgtctcagccgatgccggctaccaaggagcgccacagcgcgaggagctggccgaggtggatgtggactggctgatcgccgagcgtcccggcagggtaaaaaccttgaagcagcatccgcgcaagaacaaaacggccatcaacatcgaatacatgaaagccagcatccgtgccagggtggagcacccgtttcgcatcatcaagcggcagttcggcttcgtgaaagccagatacaaggggctgctgaaaaacgataaccaactggcgatgttattcaccctggccaacctgtttcgggtggaccaaatgatacgtcagtgggagagatctcagtaa

SEQ ID NO: 218361 - DNA, 270 bp, Klebsiella pneumoniae
atgttttcgctgaacgctgcgtataagcgcgcgtaccccgaatattattgtgaaattaatggtgttgatattctccagaactttatcaatcacgccaacccgaactatgcagatgatgtggccgacgttgcagccggaacaaccccccggagtctgcgatatgacgacctgcatccgtctcaggttctgcaggaaaatgcattacatattggcgcagacgtaaacgctgaatttatcgttcaatttctgacaaaaaaaggctggttataa

SEQ ID NO: 218362 - DNA, 318 bp, Klebsiella pneumoniae
atgggctttccatcacccgcgacggactacacggaacagcgattaacggttaactcgatctgcaatgttgggcctaatacgttgctcttcgagcggtctggcggttacgttgtgctggatatctccctgaaaccaaagcaaggtagtcaggttctgattcagcacggcggcgggacggagattgccacgctgagaggaaaggcgctgattaccgaagatggcgaagcaattgaaggtgaggccttggatgatgtcactgtcgcaggcgtcgtgtcgtttactatctgcgatgtgcgccaggacaatgcggttgtttag

SEQ ID NO: 218363 - DNA, 240 bp, Klebsiella pneumoniae
atgcttcgacagtcagacatcgccgcggctttccgcgaggcggtattgcgcaacgccaaaggataccagcaccttcacacccgcgacttcgttaccgcgctgcgccggcgcggcatccacttttccgaggtggaggctaacgcctggatcgcacgcgagcagtcttatttcgtcgataagacgccggaccatagcgaaaaccgcctgtggatgatggccaacatggggagggttctgtaa

SEQ ID NO: 218364 - DNA, 264 bp, Klebsiella pneumoniae
atgaagaagcgtttttccgacgaacagatcatatgtattctccgcgaggccgaagccggcgtttctgcccgtgagctctgccgtaagcacgccatttccgacgccaccttttacacatggcgtaagaagtatggcggtatggaggtgcctgaggttaagcgcctgaagtcgcttgaggaagagaacgccagactcaagaagctgcttgctgaagccatgctggataaggaggcgcttcaggtggctcttgggcgaaagtactga

SEQ ID NO: 218365 - DNA, 207 bp, Klebsiella pneumoniae
gtgaaatctttgtcttcaagtcgccgggaggtacttgtagattgttttcacgtctacacctattacatcagctacctgctgccgggttgcgcccgtactcaacatcctgcggcaccgctccaccacttcttcagtcattacccggcggcggccgccgactctccctggcacgtgcgcagcaccgaggagatcctcgccgcgttctga

SEQ ID NO: 218366 - DNA, 480 bp, Klebsiella pneumoniae
atggattttatgcatgatcagttgtcagatggtcgctccgttcgtctgctgaatattattgatgatttcaatcgcgaggccctggcaatagaagtcgatttttcccttccggccagtcgggtagtcagaactctcgaacaactgattgaatggaaagggaaaccggcatcgattcgatgtgacaacggaccagaatatgcaggtaacactctgatagtatgggctgaacgacaaaatatcatcctcaattttattcagccggggaagccacaacagaatgcgtatattgagcgttataaccggacagtgcgttatgactggctggggcactatctgttttattcgctgagtgagttacaggaatacgccacacaatggcaatggttctataatcacgaacgaccgaatatggcactgaatggcttcacaccaatgcagcatattcagcgcttatctgattctacttatctgcccggttaa

SEQ ID NO: 218367 - DNA, 276 bp, Klebsiella pneumoniae
atggggccatctgtagccagtaagtttttccagcgctggctgaccgcaatgaatatgcgcggaaagctgtatcccgatctgattccggatggcgccattggtccccgaaccatcaccgcgcttaagggatacctttccgcccgcgggaaagagggtgaacaggttctggtgcgtgcgctgaactgcagccagggtgccagatacctcgaactggcggagggccgcgaagccaacgaggattttctctacggctgggttaaggagcgtgtcctgtga

SEQ ID NO: 218368 - DNA, 132 bp, Klebsiella pneumoniae
gtgaagatgatcattttcgctttgcttgtgctggtggctgtgctcgttctgttacttctgcgcaaatatacccggctggagttcgtagggcatgcggtaatccccccgaaaaaccagtgcatgaataagtag

SEQ ID NO: 218369 - DNA, 276 bp, Klebsiella pneumoniae; identical to SEQ ID NO: 218367

SEQ ID NO: 218370 - DNA, 141 bp, Klebsiella pneumoniae; identical to SEQ ID NO: 36145

SEQ ID NO: 218371 - DNA, 252 bp, Klebsiella pneumoniae
atgagcttcgaaattatcgcggggctggtggttgtcatcctgggtgctatcgctggtgcgttcggcattggtcatgctcgcgggaccagtaaggcgaaagccaaagctgatcagcaacgtaccgaagagaacgccgctgctactgtcgccgcggcagaacgccgtgctgaagtcacgaaaggggccagctatgtacaggaagacgtggtaatccccccatttttaaccgggcagataagtagaatcagataa

SEQ ID NO: 218372 - DNA, 234 bp, Klebsiella pneumoniae
atgaaaaagacacaatttaccatcgcagccctggcgctgtgcgtgctttcctttggcgcgtcagccgctacgcccgttccgccgtctggcaaccaggatcatacgcagattggcattgccaaagctaccgatgttgaagccggttcgaatattgcccccggttcccatactaccggacaatccatgagcgacgcctttaatgtgcatacgctggtggctggcgagtggtcataa

SEQ ID NO: 218373 - DNA, 1110 bp, Klebsiella pneumoniae
atgctcaggctcaacgccgtccattttgccgtctgcttcctgccgctggccctcgcgggctgcggcgaacctgccgatcatgacgacccccgcatccggccgccgctggttcgggtagcgaccgtcgagcgcgccgaggccagctcgcgggcctttaccggtgtggtggtggcccgaactcaaagcgaccttggttttcgggtgtcgggaaaagtccttgaacggctggtggagaccgggcagagcgtcaggcgcggtcaactgctgctgcgcctggatccggctgacttaaccctgcaggcgcagtcgcaacagcgggccgtggatgctgcgcgggcgcgggccaggaaagcggccaacgatctggcccgctatcgcggcctggtggcgagcggcgccgtttcggccgcggagtttgaccagattaacgccgcggcagaggcggcgagagccgacctgagcgcggctcaggcgcaggccaatgtagcgcaaaacgccaccggctatgccggactgctggcagacgctgacggcgtggtagtggaaacgctcgccgagccggggcaggtggtcagcgccgggcaggtggtgatccgcctggcgcgggcggggcagcgtgaggcgcgagttcagctgccggagacgctgcgcccggcggtcggcagcgaggcgctggcgacacgctatggcagcgaatctcagccggtcaccgcgaccctgcgactgctttcggacgcggctgacgccaccacccgcacctttgaagcgcgctacgtgctgaacggcgccctggccaacgccccgctgggatctaccgtgaccctgcgcatcggcaacggccaggcgccaggcgaggtgctggaggtgcccctggcgtcgctctacgatccgggcaacggccctggcgtctggcgcattgcctcccgtccggctaccgtctcctggcaaccggtgaccgtgctcggcctgaatgatgaaacggcgcgggtgagcggtccgctgaagcccggcgaaccgatcgtcgccctgggcgcccatctcctgcaccagggcgaggcggtgcggctggcggaacgacgcgagcatgatgccgccgggagccagccatga

SEQ ID NO: 218374 - DNA, 1854 bp, Klebsiella pneumoniae
atgctgcgctctatcgccaccgtttcgatttccggcactctgcctgagaagctgcacgctattgcggcggcgggctaccagggagtggaaattttcgaaaacgatctgctctattatacggggacgccggcgcaaatccgccagctggccgctgatttagggttaaaaatcacgctttttcaaccctttcgcgacttcgaaggcgccagccgggcgcagtttgcggccaatatggcccgcgcccgacgcaaatttgccctgatgcatgagctgggctgcgacacgctgctgctgtgcagtaacgtgcagccggactgctcggcggacagcgaattgcaggttgcggacctgcgggcgctggcgaccctggcggaggaagaggggatcgctatcggctacgaggcgctggcctggggaacccatgtgaaccgctggcagcaggcctgggatcgggtgcagcaggtcaacagtccggcgctgggcctggtgctcgacagttttcacattctggcccgcggcgacacgctggacgcgttgccgacggtgccggtggaaaaaatcaccttcgtacaacttgctgatgcgccatacatgaaaatggatctgctggagtggagccgccactttcgctgcttccccggacagggcgagctgccgctggaggcgtttgccgagcaggtaacccgctgtggctaccgcggcccctggtcgctggagatcttcaacgacggatttcgcgcctcgccgaacggcgcgacggccaaagacggctaccgttcgctgctgtggctggaagagcagacccgccgccggcttccggcgtgcgatgccgacctgttttcaccgccgccgctgccggtctatcaccggctggagtttatcgagtttgccgccagcgccgccgaggcgcagcgcctcgggcagcacctgcaggggctgggttttcagcacgagggaagccaccgttccaagcaggtgacgctgtggcgcaacggtggcgcgcgggtcgttatcaaccatcagccccacagctgggccgatcacttttatcaacgccacggggtatcgctctgcgcgatggcgctacgcgtcgagcacagcgcgccgattgtcgcccgcgcccgcgcgctggggtacgccacctggcagggcgacgccgggccgaacgaaacgccgatcccggcgatttgcgcccccgacggcagccttatctatctcattgacgccggggaggcgatctacgagcgcgactttcacctgcgtgacgggttgacgatgcgcgaggattatctcggcattgaccatctggcgctggggatggaagccgacagccgcgacaactgggtgatgttcttccgcactgtatttggttttacccttgaacatgaacaaacgctgccggacccgtatggactagtacgcagcctggcggtgcgcagtccgcagggcgatatccgcctggcgctgaatatttcccagagccggacgacgcagatcgcccgctcggtcgcctgctatcagggcgcggggctgcagcatgcggcctttgcctgtcgcgacctgcagaacacctgcgatcagcttaccgagattgcccgctatgcgctgccgatcccggctaattactatgatgatctcctggcgcgctttggcggcgagctggacgtcgcgcagcttcagcgccagcagcttctctatgaccgcgatccgcagggcggggatttcctgcatctttacacccggccctttaccgccgggcgctttttctttgagttaaccgaacggcgggctggctacgcgctctatggcgcggcgaacgcagccgttcgtctggcggcgatgcagtattgttag

SEQ ID NO: 218375 - DNA, 744 bp, Klebsiella pneumoniae
atgacaaacacctctctcacgctgctggcggcgggaagcctgagaagcgctttcctgccgctggtggcgcactttcagcagcatactggcctggcggtcgatgcgcagtttggccctgccggcctgctgcgcgagcgaatcgaagccggggcgccatgcgcggtttttgcgtccgctaacgcgacgcacccgcaggcgctgctgcaggcgggtctggcgcaggaatgccagggatttgccggcaaccagctgatgctgaccgcccggcgctcaccggacaacgatggcctggactggctgacgctgctcagcacgccccgcctgcggctggccacctctacgccgggctgcgatccgtcgggagattatacctggcagctgttcgcccaaattgaggcacgccaccctgggttgggcaatgcgatagccgggcgggcgcagccgctggtcggcggcagagacgcactgagcgtgccgccgggagagatagccggcgcgtggcttattcgtcagaatctggcggatctgtttatcggctatgcgcactatggccccgcgctggccgcctgcgacgatctgcgtaccctgactatccccgcaccgtggaatattcgctgtgattaccagctggcgcgcctcagcgctgaccccgccgcgctggccctgtatcgctttatcctcggcgacgttggccaggcctgtctccggcaggcgggttttatgccgttcagcgacgcagcgtaa

SEQ ID NO: 218376 - DNA, 1008 bp, Klebsiella pneumoniae
atgcgcgctaaccgccatccctggcggttgcagggtagcctggcgctggcgacgctggcgatcgctgtcgtctctctttgtttcggccagtacccgttaagcctgcgcgccgttgggcacaccctggtccatctgccgccaggtgaaggggtgatcgggcagatcgtctggtcggttcgcctgccgcgcgtggtcatggccctgctggccgggggggcgctggggctgtgcggcgccaccttgcagggcgtgttccagaacccgctggtggacccgcacatcatcggggtgaccgccggctccgccttcggcggtacgctggcgatcctgttgggcgtcggcagtctgctgatgatggcctcgacctttttcttcggcctcgtcgcgctggggctgatttacgccctcgccgccctgcaggggtgggacagcacgctggggctgattctgtccgggatcattctcagcggcttcttcgccgcgctggtcagcctgatgcagtacctcgccgatagcgaagagacgttaccgaacattgttttctggctgctcggcagcttcgcgaccgccagctggcataaggttctgcttatgtccctgcccatggcgctagccgccggggtgctgtggaagctgcgctggcgtatcaacctgctggcgctggaggaacgcgatgcccgcagtcttggcgttccggtggccgcgctgcgtcgcggcgtgctggtgtgctgtgcagtgctggtggcagcccaggtggcggtcagcggcagcatcgcctggatggggctggtggtcccgcacctcgcccgtctgctggtgggcgctgaccatcgtcgcctgctgcccaccgccttctggcttggcgccgcgctgatgctggtggtggacgatctggcgcgcacgctgacccaggcggaaatcccgatcgggatcatcactgccctgctcggggcgccgctgtttacctttttactggtgcaatcccggcgccggagtacggcccgatga

SEQ ID NO: 218377 - DNA, 582 bp, Klebsiella pneumoniae
atgtcaaaacaccccttactgctgggcctgacgctgctcagcgccagcctgttcaccggccagaccttcgccgaccgcaccgtcaccgaccagctgggtcgccaggtcaccctccccgaccacgtcacccgcgttgtggttctgcagcatcagacgctcaacctgctggtacaactgcatgccgccgaggatatcgtcggcgttttaagcagctggcagaaacagttcgggccgcagttcgcccgctttatgcccgagatcgggcaactggcgaccccgggcgatctcacccaggtcaatattgaaagcctgttggcgctgcgtccgcaggtggttttcgtcgccaactatgcaccgccggcgatgatcgcgcagatccaacaggccgggatcccggtagtggccatctcgctgcgccacgatgccgccggggaaaaaaataaaatgaaccccaccatggctgacgaagagcaggcctataacgccgggctgatggaggggatccgccttatcggcgaggtggtcgaacgccagcccgaggccgaggcgctgattcactataccttcgaggcgcgcaaataa

SEQ ID NO: 218378 - DNA, 813 bp, Klebsiella pneumoniae
atgcgtgacgatgcggccactgagtacaaaacggtgcgcggattaagccggggtttattgttattaaaattgttaaataaattcgacggcggcgcgacgccgggcctgctggcggagtttagcggcctgcatcgcaccaccgtgcgccggctgctggagacgctgcaggaggagggttttgtccgtcgcagccgctccgatgacagcttccgtttgaccattaacgtccgccagctgagcgatggatttcgtgacgaacattggatttctgccctcgccacgccgctgctcggcgagctgttacgcgaagtacagtggccaacggacatcaccactctcgacgttgacgctatggtggtgcgcgagaccacccaccgcttcagccggttgtcgtttcaccgcgcgatggtcgggcggcggctgccgctgctgctcaccgcctccggcctgacgtggctggcctttgcccccgacgcggagcgcgacgccatcgtcagcatgctggccgcccgcccggaagctgaatatcagctggcccgcgaaccggaacggctggcggcgatcctcgcccgcacccgccagaacggctacggcgaaaacttccgcggctggcggcaggaggagaaaatcgcctccatcgccgtgccggtctgtagccagcagcgggtgatcggctgcctgaacctggtctatatcgccagcgcgatgaccattgagcaggcggcgcagaagcatctttccgccctgcagagggtggcgagccagatagaagcccgtatggaggatgaagaagtgtggtacgaaatgccgtga

SEQ ID NO: 218379 - DNA, 1665 bp, Klebsiella pneumoniae
atgacaacatctacacccgatattcaacccgccgtccagcataccgcccaggtcgccatcgccggcgccggtccggttggcctgatgatggccaactaccttggccagatgggcatcagcgtactgctggtggaaaagctcgacacactgatcgattacccgcgggccatcggcatagacgatgaatccctgcgggcgatgcaggcggtggggctggtgaatgacgtgctgccgcataccacgccgtggcacgccatgcgttttctcaccccaaaaggccgctgctttgccgatatccagccgatgaccgatgagtttggctggtcgcggcgcaacgccttcattcagccgcaggtcgatgcggtgatgtatcacggtctgcagcgttacccgcaggtccgctgcctcttctcccgcgaagtggaagcttttagccagaacggtgacggtgtcacgttaaatatcaaaggaccggacggcgagcgggagacggtgcgcgcggactggctggtggcctgtgacggcggcgccagctttattcgccgcacgctgaacgtcccctttgaaggcaagaccgcgcccaatcagtggatcgtcatcgatatcgctaacgacccgctggccactccgcacgtttacctgtgctgcgacccggtgcgaccctacgtttccgccgcgctgccccacggcgtgcgccgctttgaatttatggtgatgcccggcgaaaccgaagctcagctcagcgaaccgcacaatatgcgccgcctgctgagcaaagtgctgccggacccggatcgcgtcgagctgatccgccagcgggtctacacccataacgcccgccttgccgagcgctttcgcatcgaccgcgtgctgctggccggcgatgcggcgcacatcatgccggtctggcaggggcagggatataacagcggcatgcgcgacgccttcaacctggcgtggaagctggcgctggtggtcaatggcaaagcgggagagacgctgctcgacagctaccagcaggagcgccgcgaccacgcgaaagcgatgattgatctgtcggtcaccgccggccacgtgctggcgccgccgaagcgctggcagggggccgtgcgcgacggtctctcctggctgctgaactacctgccgccggtgaagcgctacttcctcgaaatgcgctttaagccgatgccgcagtaccgcgagggggcgctgctgaccgacggcgccggcaaaacctcgccggtgggcaaaatgtttattcaaccgcaggtgacgctggagagcggcgagagcgtgctactcgacgacgtcatcggcgcgaatttcgccattatcggctggggctgcaacccgcagtgggggctcgacgccgggcagatcgcccgctggcgcgcggccggggtgcgctttatccaggtggtgccggcggtgcagatccatcgcgagcaggataacgcccccggcacgttgcgggtgggcgatacgcaaaaccgtctgaagagctggtttgctcagcataacaccgccattgccgtggtcagaccggaccgctttgtcgccgctctcgccatcccgcagaccctcggcgcgcagctgaccgcgctggcggaaaaaatgactctcgcggtcggagataccgcccacgctgaagagaaggtggcctga

SEQ ID NO: 218380 - DNA, 945 bp, Klebsiella pneumoniae
atgcatgcctatttgcactgtctctcccacactccgctggtgggattcgtcgacccggagcaggcggtccttgatgaagtgaacggggtgattgctgacgcccggcggcggatcgccgccttcgatcccgagctggtggtgctcttcgcccccgatcactacaacggttttttctatgacgtgatgccgccgttctgcctcggcgtcggcgccaccgccatcggcgacttcgccagcgccgccggcgacctgccggtaccgaccgagctggccgaagcctgcgcccacgccgtgatcaacagcggtatctatctggcggtgtcgtacaacatgcaggtggaccatggcttcgctcagccgctggagtttctgctgggtggcctggatcgcctgccggtgctgccggtgtttattaacggcgtcgccgcgccgctgccgggttttcaacgtacccggctgctgggcgaggcgatgggccgcttcctcaacaccctcaataaacgggtgctgatcctcggctctggcggactctcgcaccagccgccggtgccggagctggcgaaggccgacgcccatctccgcgatcgcctgctcggcggcggcaaacagctgccgccggacgaacgcgaactgcgccagcagcgggtgatcaacgccgccaggcggtttactgaagacccgcactcgctccatccccttaacccggtgtgggacaaccgctttatgagcctgctggagcaggggcggctggcggaactggatgcgatcggcaacgacgagctgtcggcgatggccggtaaatcgacgcacgaaattaagacctgggtggccgcttttgccgcgctatccgcttttggcccctggcgcagtgagggccgctattaccggccgatccccgagtggatcgcagggttcggctcgctgagcgccaccaccgagatttga

SEQ ID NO: 218381 - DNA, 951 bp, Klebsiella pneumoniae
atgcgtaaacgtaaagtcgccattatcggctccgggaatatcggtaccgatttaatgattaaaatcctgcgccacggccagcatctggagatggcggtgatggtcggcatcgacccgcagtcggatggcctggcccgcgcccggcgcatgggcgtcgcgaccacccacgaaggggtgggcggcctgatgcagatggcagaatttgccgacatcgattttgtttttgacgccaccagcgccggggcgcacatcaaaaacgatgccgcactgcgcgaagcgaagccggggatccgcgtcatcgacctgacgccggcggcgattggcccgtactgcgtgccggtggtcaacctcgcggctaatctccaccagggcaacgtcaatatggtgacctgcggcgggcaggcgaccattccgatggtcgccgcggtctcgcgagtggcgaaggtgcattacgcggagatcgtggcctcgatcgccagccaatccgccgggccgggcacgcgggccaatatcgacgaatttaccgaaaccacctcgcaggcgattgaaaaagtcggcggcgcgggcaagggcaaagcgattatcgtgctgaacccggcggagccgccgctgatgatgcgcgataccgtgtatgtgctgagcgagctggcgtcgcaggaggcgattgccgcctcgatcgccgagatggcggcggcggtgcaggcttacgtcccgggctaccggctgaagcagcaggtgcagtttgagattatccccgaggacaagccggtcaacctgcccggcgtcggctgtttttccgggctgaaaaccgcggtgtaccttgaagtggaaggggcggcgcactatctgccggcgtacgcgggcaacctcgatattatgacctcggcggctctggcgacggcggagcaaatggccggggcaatgcacagcgcggcgggagcgacagcatga

SEQ ID NO: 218382 - DNA, 768 bp, Klebsiella pneumoniae
atggtcaagaatttgctcaaggcgtgtttcatgatggccgcgctgacggcagccggccaggcggctgcggaaacctataccgtcggttccggcggcacctaccggccgtttgaatttgaaaacagccagaaacagctggaaggtttcgacatcgacatcatcaaagccatcgctaaagccgaaggctttgacgtcaagctggtcaataccccatgggaaggcatcttcgccacgctgaacaccggcgaccgcgacatcatcatctccgggatcaccatcaccgataaacgcaaacagatggtcgatttctccgcgccgtacttcccggccgagcagtctatcgtcgtcgcccaggactcgcaggtggattcgctggcggccctgaaaaacgagaaggtcggggtggtgaactccagcaccggcgatatcgtggtgtctgaggtgctgggcaaaaacagcaccgcgatcaagcgcttcgacaacaccccgctgatgctccaggagctgttcgaggacggcgtcagcgccgcggttggcgacgtcggggtggtgaagtactacatcaaacagcacccggagaagcagttcaagctggtgccggatgccaaatttgagcgtcagtatttcggtattgcggtggcgaaaggcaacagcgaactgctgggcaaaatcaacgccgggctgcaaaagattgttgctgacgggacttacgccaacatctataaaacctggttcgacgacaacgtgccgacgctgccagcgcaataa

SEQ ID NO: 218383 - DNA, 2151 bp, Klebsiella pneumoniae
atgaaaaaaatcacgagcgtgtgcccctactgcggggcgggttgcaaacttaaactggttgtcgacaacaataaaatcattcgcgcggaggccgccgacggcgtcaccaaccagaaccagctgtgcctgaaaggctactacggctgggattttcttaacgatacgcagctcctgacgccccgtcttaaacaaccgatgatccgctaccagaaaggcggcgccttcacgccggtcagctggcaggaggcgattcgctataccgccagcaagctcagggagatcaaagagaagcatggcccgcgcgccatcatgaccaccggctcctcgcgcggcaccggcaacgaaaccaactatgtgatgcaaaagttcgcccgcgcggtgctgaacaccaataacgtcgactgctgcgcccgcgtctgccacggcccctccgtcgccgggctacagcaggcgctgggcaacggggcgatgagcaactcgattagcgacatcgaaaactcgaagtgcctgctggtttttggctacaactgcgccgactcccatcccatcgtcgcccgccgggtaatcaaggcccgggacaacggcgccaaaatcatcgtctgcgatccgcggcgcatcgaaaccgcgcgcattgccgatcgtcatctgcagctcaacaacggcagcaacatggcgctggtaaatgccttcggctatgtgctgctggaggaggagctgtacaacaaaacctatgtcgaacgctataccgaagggctggatgcttaccgcgaggcggtgaaggattacgccccggaagcggtggaagggattgtcggggtcagcgcgcgggaaatccgggaggcgatgcgcatgttcgccgccgccccatccgccaccattatgtggggcatgggggtcacccagtttggccaggcggtggacgtggtgcgcggcctggcaagcctggcgctgctcaccggcaacctgggacggcccaacgtcggcgtggggccggtccgcgggcaaaacaacgtacagggcgcctgcgatatgggcgtgctgccgaacctgttccccggctatcaggaggtcaccgaccccgccgtgcgggcgaaattcgccgccgcctggggcatcgacccggcgctgatggacgaccaggtcggcactcgcatcaccgaggtgccgcataaagcgctgaccggcgagatcaaagcctactacatcatgggtgaagatccgctgcagaccgaagccgacctcggcctggtgcgcaaaggcatcgaggcgctggactttgtggtggtgcaggacatcttcatgaccaaaacggcggaaattgccgatgtcctgctgccggccacctcctggggcgagcacggcggcgtattcacctgcgccgaccgcgggttccagcggtttgaacaggcgatccctccggcggggaatgtgaagcgcgactgggagatcattagcctgctggccagcgaaatgggttatccgatgcactatgagaacaaccagcagatctgggacgagatgcgcgaactctgcccgctgttctacggcgtgacctgggagaaaatgggcgatatgggccatgtccagtggccgtgcccgaccctcgaccaccccggcacgccgtggctgtataaagacaaccgcttcgataccccatcgggtaaagggcaactgttcgccaccgcctggcgcgcgccggcggagcgcccggatgacgagtggccgctggtgctctgcaccgtgcgggaagtcgggcattactcctgccgctcaatgaccggcaactgtgccgcgctgcagtcgctggccgacgagccgggacgggtgcagatgaatccggtggatgcgcaacgactggggatcgctgacaaacagctggtgtgggtcagctcccggcgcgggaaggtgatcacccgcgccgaccttagcgatcgcatcaatccgggggcggtctatatgacctatcagtggtgggtaggcgcctgcaatgagctgacccaggataacctcgatccgatctccaaaacaccggaaaccaaatactgtgcggtgaaagtggaagcgatagccgaccagcaatgggcggagcgctacgcctggacggcctacagcgatatgaaggcgcgactgaaagccgccgccgacgtctga

SEQ ID NO: 218384 - DNA, 1080 bp, Klebsiella pneumoniae
gtgcctacaggacaccgctttctggcgacggatctgcatcagtttgtcgtctcactgtttacccatctcggcagtaccccgggggaagccaccctcgtcgcggaccatctgatcgccgccaatcttgccgggcatgactcccacggcgtcgggatgatccccagctacgtgaaatcccacgccggtggttttctgcagctcaaccgccacgccacggtaaccaaagacgccggcgccgtggtcaccctcgacggcaacgccggcttcggccaggtggttgcccacgaggcgatgcagttaggcattgaaaaggcgaagcagcacggtatggcggcgatcgccctgcgcaatgcgcatcacgtcgggcgcatcggctactgggccgagcagtgcgccgctgccgggctgatctccattcacttcgtcagcgtgatcggcgacccgatggtcgccccgttccgcgggaaggacagccgcttcggcactaacccgctgtgcgtggtgtttccccgcgcgggccatccgccgctgctgctggactacgccaccagcgccatcgcctttggtaaaacccgcgtcgcctggcataaaggcgaagccgtggcccccggctgcctgattgacgccgagggtcgacccaccaccgacccggcggtgatgcagacctcgccgctgggcgccctgctcaccttcgcccagcacaaaggctatgccctggcgacgctgtgcgaagtgctcggcggcgcgctctccggcgggcaaaccacccatcaggagagcctgcagaccagcgtcgacgccatctttaactgcatgaccacggtgatcctgcgcccggacgcgttcgatgccccggacagccaggcacagacggaggcctttatcgcatggtgtaagcagtcgccgcacgatgccgatgccccggtgctggcgcccggcgaatgggaggccgccaaccgcgaagcgcggctggcgcaggggatcccactggatgccggcagctggcaggctatctgcgccgccgcgcgcgacgtcggcctgagcgaatcgcacttcgaccgctgccgccctctcgcctag

SEQ ID NO: 218385 - DNA, 1071 bp, Klebsiella pneumoniae
atgattgaattatcggtagaaaatctgcatctcacctatggcgacaacccggtgctgaagggggtgtccatgacgctcggccggggggaggtggtatcgctgctggggccgtcgggaagcggcaaaaccacgctgctgcgggcggtggccgggctggaaaaaccgacgagcggacggatcgccattggcaaccgcacggtgtacgacggcacgccgcgcagcgaaatcccggccgaagagcgtaacctgggcctggtctttcagtcctatgccctgtggccgcacaaaacggtgttcgacaacgtggcctatccgctgaagctgcgtaaagtcgccgccggggagataaaagagcgggtgcaacgcgtgctggatcaactggggctggggcatcttggcaaccgccatccgcaccagctctccggcggccagcagcagcgggtggccatcggtcgggcgctggtctacaacccgccggttatcctgctggatgagccgctctccaaccttgacgccaagctgcgcgaagaggcgcgggtgtttctgcgcgagctgatcatcaagctggggctgtcggcgctgatggtcacccacgatcagaatgaagcaatggccatctccgatcgtattctgctgctgaataatggcgtcattgagcagcaggggacgccgcaggagatgtacggcagtccggcgacgctgttcgccgccgagtttatgggcagcaataaccgcctgcacggtaaggtgacggcgctggagaacggtcgtgcgagggttgaaggcgccagctggacgctgtggggacgagcgggcgagggggtcagcgtcggccaaccggcgacggcggtgatccgcgtcgagcgcctgcgtctggacggcgcagcgcaggataacagtctccagctcccgctgctgaccagcatgtatcttggcgaccgctgggagtacctgttccgtaccgaaggcgacgactttccgctgcgtgcctacggaacggcgctgcgcgatgccgaacactgccatctgacgctcccggcggaggatgtgtggatttttccgcagcggtaa

SEQ ID NO: 218386 - DNA, 2616 bp, Klebsiella pneumoniae
atgaggcgcttaaccagggtttcgctacaaaatcaacatgccatcgcggcgataagttttgaaaactgcccggcgaaaacccggatgttgagtgatggtcgcgtggtgcagggacgctcggtattgagtcattgtcagattgtcggggagattgcccgggcgcttatagcgctgtatcccgagccgatgcgaagtcgactctttcccgcaggaagtgaaatggcagcggctggccacgatatcggaaaggtcagtccgacgttttccgccaaactttttgcggcctgtgacgttaatgacctccgtcttgctgggttatcggcggtgaatcccggactcgaaacgctctggggaggacatgcaggcgtcagtcaggcgacagcggaaagtttatatgctccgcgctatgttcctgagatccttggtcagcaccatggttttaatccagggctcaacggcaggcgtggtgatgctgaagtattcggcgggccgctctggtttgatgagcgtaaaaaactcgtggataagctgaaagcggaactctccgctgattggccgacatttgattcagcggctcaggctcgcgtggtcgccgggttgacctcggtagccgactggattggctctggcgaattttttgaaaatcctgagcaagcgtggcagcctgccataacggcagcccttaataacgccggttttattaaacccgttatacgtaagggactatcctttgcagaggtcttttttcctgacgatccgtcgaaggaaccacgcgaagcgcaatcgcgctttattgaccaggttgcggggccgggtctttatattctcgaagcgcaaatggggatggggaaaaccgaagctgcgttatacgctgcttatcaaatgctgactgaggaaaaagcaaccggtatttattttgcgctacccacccagcttacctcgaacaaaatatacgatcgctttaatgcgtttctgcaacaaattgtcagtactgaaactccacagcatgccttacttttacattctggcgcctggttgatgaataccgagatgggagaagaagcaagccctggtggcgcgtggtttaaccaccgtaaacgcggcttattagcgccgtttgccgtcggtaccatcgatcaggcgctgatggcggtgatgaatattaagcatggttttgtcagagcgttagggctcgcaggcaaggtcgtgatccttgacgaagttcatacatacgatttgtacaccggcacgatccttaatgcgttagtcgaatttctgcgtcaaatcgactgtacggtgattattctcagcgccacgctgagtcgggcccgccgtgacgccttgctgcaacagactacaagcagtgaggcctacccgctgatcaccgccgcgcccatcagcgcaagagagcaagcgctggtagagattggcgttcctgtcactgagcacgccacccttacgctgtattcctgtaacaatgatgaatccgcgctggaagaggcgctgcggcgcgcagaacgtgggcaacaggtgttgtggattgaaaataccgtagctgaagcgcagcaacggtatctggatatggctagccgggcggttgaggtgggatgtgaaatcggactcttacattctcgttttacgcctcagcaccgcaaccggcatgagcaacgctggatcgcgctctacggccggaccggctggtcgcaacgtcagcagtgcgggcgtattttagtcggcacccaggttctggaacaatcccttgatattgatgccgatttcctcgtgagccgatttgcgccatccgatatgttgctgcaacgtcttggccggctgtggcgacataccgatacaccccgcaatgtgagtgcgaaggcggaatgctggctattgtcaccttcgctggagagcgctttagccaacccgggctcggcattcggcatgagcgccctggtctactcaccctatgtgttatgccgcagtctggaggtctggcaagagatcccgtctctctcgttgccaggagatattcgtcccctgatcgaccggacctatgttgcacgtgcggaagagggaccatgggccacgctactgcatgaactcaagaatggcagccgctttcgttctggtgaagaggcgctgcagtcgctggcgaagctcacgttatctggcggcgggaaaacgctgcctgagcataaagcggagactcgctatagcgatcgtgacactcatgatctgctgctgctgcgtggtctgcgtacgcaagacggcgtcacgtatatgcgccttcttgatgatggtgaattagcccttcctcatgggcgcaaccgtttaagtcggttgcaatggcgacagctggcggtggcgctgaatcagcagctggtacgagttaatccggcttattgtccgcccacgatagcaaaaagtgatctggaaaaattacacctgcaggaggtgttctatctcggccgccccgaagatgatgaggcgttattgcgcgttgccattgtcagccccgcgggtgaactgaagacgctggatggccgccccgcgggagagaaatacacccttgaatacagtgaatatcttggcttccgggccatttccaaaaaggaataa

SEQ ID NO: 218387 - DNA, 1524 bp, Klebsiella pneumoniae
atggagaaccgcttcaatttgattgatgaaccctggattgcggtcgtggatgtggggttggtcagtttaaccgatattttcagtcagccgacattacgcgctttagggggaaatccggtagaaaaaatcgcgcttaccaaattgctacttgctatcgcccagtcagccgcgacgccggctgatgatagcgactggcagcagatgggctggcagggaatggcccattgctgcctgaagtaccttgctaaatggcacgaccgtttttatctgtatggcgaaaagccgttcttacagatgcccgctattcaggccgctgaatgtaagtcattgggcgtattatcacctgaggtgagtaccggcaataccaccgttttaaccgaaagtcagcaacagcagcaattaactgatgcggacaaagcgctagctattattgtgcaaatgggctttgggctcggaggcaagaaaaccgataactctgtggtattaacgccgggctatcggggtaaacaaaacgacaaggggaagccgggcagtggaaaggccgggatttctgtcgggcatatgggattgttacattcgttctggcaggggaattcaatcgtacagagcatttggctcaatttatttaccgctgaggatattgcacaactggtgatgtatcccacgctggggactgcgccgtgggagcgaatgccgacaggggaagatgatgacgttgcgcgttcgttaaaagcatcgctgcttggccgcctgatcccaatgggtaaattttgtctgttagccggggacggtattcactatagcgacggtataagccatgccggctatctggaaggcaaaaccgatcccacggtttccgtcgatttttcaggaaagaaaccgaaggcattatgggttaacccaggcaaacgcccctggcgcgaactgacgtcgttattacagtttattgagcaggatagctcccgaggatatgaaacccgtcagcttaaccttcctttgaagcgaatagcccataatacggttcagtttgcgctatggtcgggcggcttacgggtaagtagtaatgcgggtgaacagtatgcttcaggaatggatgattatgttcagtcagaaatatggttgtcatccgaattaattaataattgctttattgaatatttaaaatatgaaatgacgcagcttgatgctgtgcaaaaacagctttggggtgcagttgtacgttatttccgacagctttccgatattgataaatcagcaaccggtaaggcccaaccctttgtggcaaaacaggccgaaaaagcaacggcgctattctggcaactctgcgagcgtcaggcccaggcgctcattaatgtttgcctgagttccggggaagaccattccgcgcgtcatcagttacgaaaaacgtttatcagctatgccggccaggtttttaatcggctctgtcctcgtgacagtgcccgtcaattagatgcctgggcgcagtcccggcctaatttttccaaatatctcaccgtcgattaa

SEQ ID NO: 218388 - DNA, 567 bp, Klebsiella pneumoniae
atggatcagtttcctgcagacgttaccgctgaaagcgcgagtaacgaattgcccgccaaacgatttgtcggttacgtgattgagcgtatcgcaaaagacaatggctttgccgcccgccttaaacgagcggacaacccggcgactgagtatcagagctgggaaattctggcagggtttggcattgatctggaaaaagagtggcagcgccttccgtactgcgtcattggcgccgcgctggccagggtgaaaccggccagcaatggcacgacctcgctgggaggcgccattgcagcttgttatcccgaagggaatcagtctgaacaggcgaaagcccgcctgcggcgattgttggcctgtacctcgacgagtgaagcatgccgtattctgcgcccgttgctggcattaatggccagccgcaatgtgacactggatttcgccaggctactcaatgaactgcagtggttttccggcagcagtcgcgaacggatccgcgcccgctgggcgcaagaattctatcgtcgagccgacgaggcagccgggaatgaggcggggaatccacatgactga

SEQ ID NO: 218389 - DNA, 666 bp, Klebsiella pneumoniae
atgaggcggggaatccacatgactgaactctttgcgagtgctttacatctcgatcgcgctgcggtgaaagccctgaaaatcagcgatgcctattccctgcaccgggtggtgtacagcctgtttgctgatgcgcgcacagaccaggagaagtgcagccatatgtcgagcgggattgcttatgccgaccagggcggagatttccatggccgcaaagtattgatcgtctctgacagacctcccgctgcaaaggtcgatgggctgtacggtgaggtcaacagcagattaattccggccgcctttctctctcattcacattatcgctttcaggtgcaggtgaatccggtacggaaggataaacagacaggtaaacgcgtcgcggtgaaaggccggactgatattgcgcagtggttcattcagcgcgctgccagccgctggggctttgaagtggatgcgtcgagcctgcaggttgacgcggtggaagtgctgcaatttaaagataaagcaggtcgccaggtgacccttggcaaggcgacggtgcagggcttgcttaccgtcaccgaccgacagcagttccagcatagctttcatcatggcattggcaaagggcgagcctttggctgtggcctgctgcagattgtgcccgttgttgatgcgcttttttcctga

SEQ ID NO: 218390 - DNA, 1035 bp, Klebsiella pneumoniae
atgactaccccatttaaaaacacccgtatcgagtttcatattttgcagtctttcccggtgacctgccttaaccgcgatgacgtgggggctcccaagtccgctattgtcggcggtgtgtcgcgcgccagagtgtcatcgcagtgctggaaacgtcaggttcgtctggcgctgccagattttggaattcgtctcggggtgcgtagtaaaaaaattgcttcattgctggccaatgcctgtcgcacagcaggggcgagcgaagaacaggccactcactgcggtgagacgatggccgcttttttctccgacgataccctgttgtttctcagcgcggctgaggccgccgcatttgccgcttatgcgcaggaaaaagattttgacgccgcgagcctgaaagacaaagaactggtcaaggtcgccaaaaaggtggttaacaataccctggatgccctggatattgcgcttttaggccgtatggtggccaaagcggcggatatgaacgttgaggcggcggcatcgttcgcgcatgccatttccacccataaagtgagtaatgaggtcgagttttttaccgccgtggatgactgtaaaacggaggatgaaagcggttcggcacatatgggcagcctggagtttaattcggcgacctactatcgctatgtcagcctggatctcgggcaactggcgcagacgttgggtgagggcgccgatatgaaaaccgccgtcgccgcttttgttaaggcactctatgtcgccgtcccctcagcccgacagacaacgcagtccggggcctgcccgtgggaatatgctcgcgtgttactgcgtaaaggtcagggtctgcaggcttcattcgagcagcccgttaagagtcagggtgaaggcttcttatcccccagtaaagcggcgctcaaagactggttgcatacaaaagaaaaactctctggctccctgttcggcaaacaaggcgattacgagtggggtgaggatcttgactacagcattgaccgactgatcgctgacttgcagtcacatctgtaa

SEQ ID NO: 218391 - DNA, 717 bp, Klebsiella pneumoniae
atgagccaaactacgcactatatgctgctgtggcttgaagggccgctgcagtcatggggattcgattcaaagttcggtgtacgcgatacgctgaatttcccgacccgctcgggcattctggggctgatttgctgtgcacgaggcgccgcggggccagaggtcgagtggctggcggagatgaataacctgccgatggaggttcgcgcctacgcccgaaccgacaaggagggccagccgctcctgcgcgagccgacattgtgcgatttccagatggttggcagcggatatgacgacagcgatccgtggcaaagtctgctgatccctaaaacatccgatggaaagaaagccgtagggggtggaacgaaaatgacctaccgccactatctccaggatgccgtattcgccgtggtaatggggcttggcagccagcaagccgagtcgttaccagaggcgctacaaaatccggtatgggatttatatctcggtcgtaaaagctgcgtgcccagcgagctgatctatcagggcatctatgacagcgcagaagcggcatggcagcaggcccggacattagctgagagtaagcggcgcacgctgagctacagggtcattgaaggggaaggggatggcgatgtcatcacgcttaatgatgtcccggtgcagttcggccggcataagcgttaccgggatcgtcaggtgaccgtgctggagtgcggctaa

SEQ ID NO: 218392 - DNA, 876 bp, Klebsiella pneumoniae
atggccctgggggagaggctgtttgtcaaagttacccgcgaactcctgcctcaggtaaaagataaatatccttttctctatcttgagcgcgggcggctggaaattgatgacagcagtgtgaaatgggtggatgcggatggcaacgtggtgcctctcccggtggcgaccatcaacacgctgctgctcggccccgggacaactgtgacgcatgaggcgatcaaaaccgcgaccgccgctaactgcgcggtgtgttgggtgggcgaggatagcctgctgttttatgccgccggttttttgcccactgctgatacccgcaatcttaaagcgcagatggcgctggcctgcgatggggcgtctgcccttaaggttgccaggatgatgtttgctaaacgctttccggatgccgatctggagggtaaaagtttaaacagcatgatgggcatggaggggagtcgggttcgcgcgttgtatcagcagaaagcgcaggagtatggcgtcggctggaaagggcgtcagtttacaccaggcaagtttgaactgagtgacctgacaaaccaggtactgacctccaccaacgccgccctgtatggcattttatgctcggttgtgcatgcgatgggctactcgccgtatatcggctttatccattcaggtagccctttaccgtttgtctatgatttggccgacctatataaagaacgactctgtatcgatctggctttttcgctgtcgagggagatggcgggtcgatatgataaacataaagtttctgaggcattcagaaaacgagtgatagccctggatttgctcaaccttattgccgccgatatcaatgagctaatgggaggaaaaggtgctcgtcgtactggcaaatga

SEQ ID NO: 218393 - DNA, 288 bp, Klebsiella pneumoniae
gtgctcgtcgtactggcaaatgatctgccgccagcggtccgtggacgaatgaagctgtggtttgtcgaaccccggccaaatgtgttcgtctcaggcgtcaaagattcggttgcacaaaccgttgttgattatctgatgcagtacacgcctgtggaatcgggcctgatgctgtttcgcagtattcctcaaccgcctggttatgaaattcgctacaagggtgaggtcagaaagccgattattgaactcagtgggttacagctgattattgaaaccctaaaactgtcgtaa

SEQ ID NO: 218394 - DNA, 1116 bp, Klebsiella pneumoniae
atgtttcggctttaccagtcacatgatttaatacgccagttaaaacctgaagactttcaatatattttgacaccagcaggttcgctaagagaagtgtgtatacattacgacctctcctgtgaggcgaatggtcacagcctcgcttttggcctaccgaaggaaatatacaattcatctccacataaaaggccatatgaacgaaggcaacgtagctatgcagatcctatctacgatgaggtagagcacaggctacaaattggctggcttgttggtctggatatctccaggtgttggagcagtgacagaaatccattttacatcgacgacaatggcgatttaatttttacccctaccgcttcgttataccatgcgtggtttaagaacgaaattatgaacgcctacaggcacacgattgccgatcgccaaggaaggaagccagctcccactcagcatatacaacacaattataatggctcaagaatcgcaccagcgtcaaagacactaaacagtaagaccattggccgactgctagccgctggcggtgtatataatggcaacattgaaggattccatgaaacagcgttgcaactgggtggggatgcgcctgcaggttacgaccagattatggacaataaaggattactcattgcaggagcctctttcgcggcaggattaacaatgggtagggtgaatcctttaagtgagttagatgagttatcgagtctcagtaaaataccagcctttgaaagtccgtatgtaaagggcttcatctctgagaacggtacgttagtgaatgctgaacatgccgttatcgatccgaaaaaactcgcgacgtacgctttagattcaacacatcctacaggcggtcataaggctcgggtgtttgagtctgccatggggtacaacccaacgaatgcggatgttttagccgcacgaattcagaagggcgtattatcggccccagcaaagatattgcagacaaacaactacggtcaaacaatggctgtagatatgccaattttaggcatcaatggtgaaacggcggtcatccgtacaggctggatgtatgaaacagatgcgctcgttcctcgcctgacaactatttacgttaaatag

SEQ ID NO: 218395 - DNA, 684 bp, Klebsiella pneumoniae
atgaaaagagccgaattagacgttgtggttttaggtgaggatttaccgaatgaagggctggtaaaaggaacgcctggtacgattgttatggtttttaatacgccaacaactggctatctggtcgagttttgcgacgagaaaggaaaaacaatcgcaatgccagttttattccccgcccagctaaagcgctatttcaccattggtaacctgaagtcgctgatggttgaaggtaattatcccgtagccgaccctgtagacccagacgtcatggcagatttaatgcacaaagtcgcgcctgttgaatgggaggacaagaaaagaaggggctatgaggatattcaacgactattgattagtcggccggactacgcggatatgttcaatattatggatgggggtgagtacaatggcatgacattgtacagcctggtgcaggcagagaacggtgaacctgcatggtcgaatatctttgttcgaaactttgagacgcgtattaacgaaatctatgtcgatccaaacctcaatgacaaagtagtgattggtgaagagggcatgtccgtgattgtctacagcttcacagatgaccgtttcgaaatccgcgataaagtctcctcggattatgtcattgagtcacatacccacttcaccggactgttgtccgccctcattgagccggtcagctga

SEQ ID NO: 218396 - DNA, 624 bp, Klebsiella pneumoniae
atgctgcatgcagagcgactgacctgcatcgttgacgatcgaccgctgtttgcggcgctgacgctgtccctcgctgccggcgagctgctgcaggtcgccggtgataacggcgcggggaaaacctcgctgctgcggatcctttgcggcctggcgcgcccggaaagcggggtggtgagctggcaggggcatccgctggcgaaggtccgggagtcatttcatcgtcagttgctgtggctgggccataaacccggcgtcaacgcggcgctgaccgccgatgaaaacctgcgtttcttctttccatccagccgccttcagcagcgggaaagcgccctcgccgccgtcggcctggcgggctatgaagacctccccttgagccagctctccgccgggcaacagcggcgggtggcgctgacccgcctgtggttaaccgacgcgccgctgtggatcctcgatgagccgttcaccgccctcgacgccacggcgatggaaaccctgacccgccgcctggagcagcacgcccggcaggggggaagcgcgatcctcaccactcatcagccgctgcggccgctgcgctgcccgttgcgcaccctgcgcctcggcggcgacgcgggaggcgggcaatga

SEQ ID NO: 218397 - DNA, 204 bp, Klebsiella pneumoniae
atgggccgattttatgccgggtggcggctgcgcctgacccggcctacaaaacttacccggcctacaaaaactgcccgtaccgtcctcgcggcagaccccaagttcagcgccgccgggctgttactgcgcctgctgctgcgcctgcgccagctggcggacgatcgccgcgcgccgcgcatctccttccggcagccgggccagtaa

SEQ ID NO: 218398 - DNA, 1368 bp, Klebsiella pneumoniae
atgagcaaaacggtcgttcttccgcagactgacactccttccgtcgtcgcttccgtctccttctggcaggcttttcgcttctggctgaagcttgggtttatcagcttcggcgggcctgccgggcagatcgccatgatgcaccaggagctggtggataaccgacgctggatatcggaagggcgattcctgcatgcgctcaatttttgtatggtcctgcccggcccggaggcccagcagctggccacctatatcggctggctgatgcataaaacctggggaggcgtcatcgccggggtgctgtttattttgccctcgctggtgttactcatcgccctggcgtggatctacctcgtctggggggatgtcgcggtggtggcggggattttttatggcatcaagcctgccgtggcggcaatcgtgctgcaggcggcgcaccgcattggctcgcgggcgctgaaaaatggcgcctactgggctatcgccgctgctgcctttgtcgctatttttgcgctgaacgttccctttccgctgattgtcctcgccgccgcgatcgtcggctttatcggcggacggctggcgccggcaacattcggcaaagcggacgcccatcgtgctccgagtcaccctggcggggccgccattattgatgacacgacgccgatcccggcccacgccctgttcagctggcggcgtacctcccgggtgctgatcgccgggttgctgctgtggctggtgccgatggccgccctgacgctgatgctgggctgggcgcatccgctgacccagatgagctggttctttaccaaagccgcgctgatgacctttggcggggcatatgccgtcctgccctatgtttatcagggggcggtgacccacttcggctggctgacggcagggcagatgatggacggcctcgcccttggggaatcgacccccggaccgttgatcatggtggtgacttttgtcgggtttgtcggcggctacaccaaagcggtgttgggcgttgatgatgtgctgctggggggcatcgcggcggcgtgcctggtgacttggtttacttttttaccctcgtttatctttattctcgccggcgggccgtttattgaaacgacccataataaggtgggattcaccgcgccgttgaccgccatcaccgccgcggtggtgggcgttatcctgaatctggcgctgttttttatctggcatagcgtctggggaccatccggtttcgacccgtggtccgcagccatagccctgggcgccgccgggctgctgtttcgctataagtggaagttgacctgggtgctggccgccgccgccgcggtagggcttatcgtccatatggcgggactgtccggcgcaggataa

SEQ ID NO: 218399 - DNA, 300 bp, Klebsiella pneumoniae
atgactcaacacactgatattgagaaaataaaagcggcactcaacgccatcgaagaactcgaacagattgcccgttcaacgcagccagccgatattaaaaatttttgcgtggaatataacaaagcatggaaaaagaaagtggatgccgcactggcgctgcttgacggatctacgggcgcactgcttgttcagttagttccgcacttacccatgctacttatgattattaagatgtttaaagaaggcgttgaacaatattgtcaactgcatctcgcggtggagcctcccgtctataaataa

SEQ ID NO: 218400 - DNA, 432 bp, Klebsiella pneumoniae
atggtatggcgggtcgcaaagagtctgctgatactcagagatcagattgatcaattcgcgccacatcgcaacacggacagcgatggcaccattggcgatgaacatcatgctcacaccaactcggatcataatccgcaggtgatggatggcaatattggtgtggtaacggctatcgatattacacacgttccttatcacgggtgtaatgctcaggcgattgtcgatgcgctggtcgagagcaaagacaaacgaattaaatatattatctggaacaaacggatcattagcgcttctgtccagccatggatatggcgggattatcatggcgccagcccgcacgataaacatttccacttatccgtggtgccggtgaaagcgctgtacgattacaccttaccgtggcttttgtttaagccacaaaccgggaagtaa

SEQ ID NO: 218401 - DNA, 477 bp, Klebsiella pneumoniae
atgagcgatgccatttcttcgcaacttgaaaacatcattacgatgctgatcgccatcagtatcgcctcggaaagactggtagagattatcaaagggtattttccctggctcaatctggaaaaacaggatccggtcatcgaaggacggcgcaaatctgccctgcagctgttagcggtagctgctggtattgtgacggcgtttttgacccaaccttttgtcgccggcagtttctcggccattaaacatccggacctgatgacattatgcattggcctgatggcgagcggtggatcggcgctctggaacgtcattcttaattatctgttgcaagtgaaaaacctgaaaaaggaacaagtcagcagcgcgaaagcggctcctgtcgccgatcctgttcccccctctccggtttatcaggacgtggttcctggcgcagagccggtcagctcaaatccctgttttaatccggagggtaaataa

SEQ ID NO: 218402 - DNA, 975 bp, Klebsiella pneumoniae
atggtaatgcacagccacgatcttatttcggtctcggtcggggaaatacgccccaatggtgagggaaacctatccataatattgcaggcggcggccggggaaatattaccggcctgctccgccggggcgcatatcgatattattattcccggcgttggcccccggcagtattccctgtgtggcgcgcctgaccgcagtaatacttatgaagtttgcgtcaggctgactgacacctccaccggcggctcacgctatttgcaccagcagctcaaacccggcgatcggctcgccatttcgccgccgcgtaatcattttctcctgccgcaggccgggcgctacctgctgtttgccggcggtatcggcatcacgcctttgctggcgatggccgaagcgattgccgccagaatgggggcgctggagctgcattattatgtcgccagcgcgcgccagacggccttctccccgcgcctgacccagctggctgtgggcggcaccgtggcgatccactgtagcgaggaaggcgcgtcgtttcgccagcggatccccgcctgcttaaccacgcccgatcctgataccgcagtggtcgcctgcggcccggaggggtttattcagcgactgcagtcggtcatggaggaatattgctggtcgccgtcgcaattcgtcttcgagcgttttactcccgcggcggaaaataataccgcggcgaaaaatgcgttttatattgagctggcctccagcggccagcgtctgcaggtcgccgcggatcaaacgattgctcaggtattacagcacgccggggtggaggtgatgctctcctgcgaacagggaatgtgcggatcctgtattaccggggtcctcgacgggatccccgaacaccgggacagcgtgctgacggcggaagagaaagccggcaacgaccagatcacgctctgctgttcgcgggcgaaatccccgggtctggttttggatctgtga

SEQ ID NO: 218403 - DNA, 1419 bp, Klebsiella pneumoniae
atgtcattaatcattaaaaatgcccatgccatcctcagcggtctgccgggggaggcggcgcggctggccgggccggatattcgcatccgcgacggcaagattgcggccatcggcagtctgacgccgcagccggaagagcgacagatcgatgcccgcgactgcgtgatctatccggcatgggtgaacacacaccaccatctttttcagtcgttactgaagggcgagccgcaggggctgaaccagagcctgacggcctggctgagcgccacgccgtaccgctttcgcgcggccttcgatgagcacacttttcgtctggcggtgcgcattggtctggtggagcttctgcgctcgggctgcgccagcgtggcggatcacaactacctgtactggccggatatgcctttcgatacgtcggagattgtcttcagcgaaggggaagcgctggggatgcgtatcgtcctgtgtcggggtggggcgacccagggccgggcggtggaacaggatctgcccgtagcgctgcgtccggaaaccttcgacggctatatggcggatatcgaacggctggtcagccgctatcacgacccccggcccggttctctgcgtcgggtggtgatggcgcccactaccgtcctgcactccgcgccgggcgcccagctgcgggagatggcgaagctggcccgtcagctggggatccggctgcacagccatttatcggaaaccgtcgattatctcgacgccgcgcggcagaaattcgccatgacgccggtgcagttctgcgcggagcatgactggctgggaaatgacgtgtggtttgcccatctggtgaagctgctgccggaggagattgccctgctgggccgtaccggaaccggcatcgcccactgcccgcaaagcaatggccgactgggcagcggcatcgccgatctgctggcgctggagcaggccggggtcccggtctcgctgggagtggacggcgctgcctcgaatgaagcggcggatatgcaaagcgaagcccatgccgcatggctgctgcagcgcgcgcgcaagggaatgctggcgcagccgcgctacgccgggggcaccttcgagggcggggccgatgcggccacggtggaggatgtggtgcgctggggcagcgccggcggggcgcagatccttggcttagcgcagagcggcactctgcaggtcggcatgcaggcggacctcgccatttaccggctggacgatccgcgctacttcggcctgcatgatatggccattgggccggtggcctgcggcgggcgcgccgcgctgaaggcgctgctgctcaatggccgccccatcgtggaagatgacgccattcccggtctcgatcttgacgcgatgcgccacgacgcgctggcggccgtccgtaccctccagcagcgcgccgctgtttaa

SEQ ID NO: 218404 - DNA, 990 bp, Klebsiella pneumoniae
atgacctcaaccacccagaatcaacgctacgccttacaggaactggaaaaagaggcgctgatgggcgcccagggtgaagagaccttcgcccgcgaagtgcgctgtatcgacctgtcgaactttgccgaaagaaaaagtgaaattgccgaacaactgtgggaggcggcggtggagattggcttcttccaggtcagccaccacggtattccgctggcggagatccgccaggccttcagcatgaccgaggcgtttttcgacctgcccgacgaggtgaagcgccagtatccgctggcaggcaacgccggctgggagagcaaggcgcaggtccggccatcgacccgcacgccggatcaaaaagagtcctatcagataacccggccgctgatggccgggcgctggcccagcgatcgggagttgccagcatttcagcagacgatgctcgggtttgaatcgcagtgctggcagctggggatgaagatcctctcctgctttgctttgaagctcggttttccggaatcgtttttcaccaccgcgcacgatccgcagcgtgacacctaccagagcaccttacgcatgctgcattactatgcgaccgggcagtcgcagcagggaatgtggcgggccggcgcgcacaccgattttgactgcctgacgctgctgttccagcgccccggccagggcggcctgcaggtttgtccgggcaaggatcgtgagagccagcagtggaccagcattgagccgcgcgaggaggtgatcacctgcaatatcggcgatatgctgatgcgctggagcgacgatcagctgccgtctaacttccaccgggtgagaaacccgctgccccacgaatatcaggggccgcgctacagcctggcgtttttctgccaggccaataaagatgtcgagatcctcgggccgcagaggaagtacccgccaatcagcgctgaggattatctgcagcagcggatccaggccaattttgccaaagggtaa

SEQ ID NO: 218405 - DNA, 810 bp, Klebsiella pneumoniae
atgataaaagatagcggaagagaaaagctttcagacaaaagatttgactctgttgtagccaaggataagttcgttaataaattatttgaacgattagttgcattagatattgaattcaaaaatgtgaactttcgctattgtattttcgatgctgcttacatcagaaactgtagttttcaggattgtgactttaccggttgcagatttttaaattgcaacttaatgggttcaagctttagtggctgcaaatttgactacgccacttttgataaatctcatattgataatgacattctcgataatgggtgccctggactggacaaccttaaactcaaatttgtgcgttcgttacgcttgaattatcagcaaataggtgattcaaaatcagcaaacaaagccatagcaatcgaactacaggctacaggagcgcatcttcataaagcatggaaatccaaggaatcatattaccgaaataaatataagggaatcgaccgccttaaaatgtttggcgagtggtttgagttcaaggctctagatcttatctggggaaatggcgagtctgctcttaaattatgtagggccatcgctattattttgtgcatcatagctttacatcacgtccttaattatggagatccaaaactagttagctcatattttgactcgttagcaatttctccgcaaatatttctagggactttgttacctcatcaatattcaacatgttttctgacaatggtcgttttggtaaggttaattatgtttggtttctttatgtccataataatcaaacgattcaataggcgataa

SEQ ID NO: 218406 - DNA, 633 bp, Klebsiella pneumoniae
atgcatatctacgcttttggttcgatatgtcgtggagaggttgattcattttcagacgttgacatgttggctattgtcaatggtcgggatgaaaggtttaatccgaaagattactcaatttactcgtatgaacggataaatgaactctggaaagaaggtaatccattcgcttggcacctgtttttggagtccatgcttatttattctcccgataagattgattatttacggaacttaggtaaacctagtaattataattcaggcttggctgattgtgaaaagtttctggagatatttatcagcgctaaaaattcaattgaaacctctgttcttactgagatttttgatctctcttcagtgtttctgtcgatacgaaattttgcaacatgtttttctttagattataatatgaaacccgatttttcacgaaattccgcgcgtaatctgggcattcacagcataccagtttgtgatttgacctatcaattacttgaaagggccagagtgctttgtaccagaggcactggtgaaattctgaatgctgatgacattaaaaaagtcaaatctcaattaggcttaattgagtcttggatgcgagaaaaaataaaaatgattggtgacaagaatgagtga

SEQ ID NO: 218407 - DNA, 318 bp, Klebsiella pneumoniae
atgagtgagtttaataatagaattaaagcgcaaagagatgctttaaaaatagttaatggctcagggctattccatgagccattgttaagtctgacagagaaagccatagaccgatggtctaataacaatgatattagcaatacagatcacgctattctcttgctgaaagcgatgtcaggcaccttatttttccttgcaaacaagagccaagagcaggttactgaagactataagattctttctaaaaaagtgaatgaccagttatcgaaattagaaattgaattgaagaatagagttatttcaaagacaattcgttga

SEQ ID NO: 218408 - DNA, 3252 bp, Klebsiella pneumoniae
atgaatgtacaggaaaccaaattttcatctaaagaatttctaaggcgccgtcgccctgagaaattttctgattcaacaatcagagagactggtactttagatagagttgtactggaacacttcctctctacgctaaatacaagaaatcaagaactacaattcgaagattttgccaaaaaaatatgtgaaaaaataatttgccctaatctccttgagcaaactggtcctgtagcagggggggatggtaaaactgacacacaaacattccctgtttcggaacagaataagcttctttggttcgaaggtgttaatgaggcatcaaataaagaacgttgggcctttgcggtgagtacacgtaaagactggaagaaaaaatgctatgaagatgtacttaagataaaagaaacagatcgtgggtatactaaagtattttgcgtaacgaatcaatctgcaaagtccagtattcgttcagaggttgaggatacactaaaaacaaaaactggagtagatgttcgtatattagatattaattggctattagatcaaatttacaaaaataattttgagcaattggccattgattcattgtcagttccaacacaatataaaagagaagttatttttggagaaaatgattttaaaaagcataaaaaatatgaagaattaaccgagtatattagagagaaaataaaccctgctgaaatttcatatgaagaggtggatatatttttagaaatcgcagagttaagcgctgaacttgagaaaccactaattgaaacacaaggtctatttgagagagctataaaaatctcaaaaaaattcggaactaatcaacaattgctagatgcgtattatcaatatgcctggaagtctaatttttggatggaagattttaatctcttcgaagaaaatcttcaatttgcatatgaaagtattgcatcatcaactaattcctcaaagtgggagaaggttttaaatttagtaaccgttcataaaagttatattagacttaacaacgcaacatctacaatcgacattgagaatattgaacgtaacatgctcgctaaactagatgagatagctgacgatgaatcacgtcccagtaatgcactcacagcgagaactcacaaagctatttatcaattgacaacgttttcagatatagaagatgcttcggttgtatttgaagcgttacatgaaatttttaaaaatagtgggaatttaataggctatccctttgagaaaaacttccaacttttgaacgaattagatgacatttttttcgaggtagatgcatatgaaaatttattagactatatgactgagctatctgctgttagagatggtgaagttaaaggggcattattaaatctccgaagaggcataaagaggattcaaaatggtcacccttatcaagcaatcaagtatttaggaaaatcttttattcccctctataaagaggaatcacgagataaatttatattagcattaaaagctattgcttatgcttacgaatccattgggttgctatggagttcacgttcatgcttgcttctatccgcttctttgattacagataactactggaagtatgatgagatatcattaaaacaggctgagatttattatagtttatgcctaacagaaataaaactagggaaattagcacatgcgcttttatggtatgaactgtttttaataattaaccaaaatatcagtgatagctcgttcggcgataaagaaaatcagcaagttgatttttacataagtcaactcattttgaacactgacttaaagggaataaatcgacagagtaatattcccgatgaactcgatagattaggtctttttgtatcatcgggatgtcttaaatatgctttaggttatattgaagattttgaacgtgagtacgaagttactgccgataaagatcataatgatttcttgcaaaaaatacgtgactttgatgttggattcaatattaaaggtataaaagataactatgataaacgaggagtatatacatctttcatttttggatgcaccatagaagttaactttccgaatcggtcaccatttatagagttttcaactagtatcttagcacttttagagagcgcttttgcaacttgtacgattgataacatccatctcaaagaagcatttttaattattgaagtaatagcagatgatggagatgacttatccttatcacatgaaataaatagcaatagtggaaaactaaaccttactataaattgcaatggttttgaaaaaagtgcttttagaatcgatgctcaacaaaaaattactaatgaattcaagagaatagtattcgatcttctccctgagttattttttataaaaaatacagaatacattgaaaaaatgatattcgaagatgctgcatttgacagagcaattagtttcggtgcctgtatcaaagctattgaaaatgttcttggaaatgatattgatcaacaaattaagaaaatttattccaccagtgctgaaaagaaaacttaccctcttttaagagatgaatcctgggatagtgaatttccgaaagtgttggacatcgaggatataaatgctccaacacccggtaaaggaagaatacctgaagaggaacttaattccgaaaatataacacataaagattattcaatacaaagtctaatcaaacctcgtctatgggatagaacacgctggcaaggagtaggcttcgctcaattaaaatcgtgttatcctgggttgtatctattatttaaacaccccgatagaggtgagggtatttttaaagatcttatgtcatcagtaggcttggtagacagtaaagccagattacgggtttgtattgtcaagggtatttcagttaaaaacccaactcattatagagtactgatatctgaaaatatgatgacaacgccattaactaaaagaatgacaatgatcagtagaattaatacgatgactcctgatagtaatgtcaatttagaaagatttcttgctgcgtatcaggcctgtggaaaattctatcttggatgtgatgcgatgttaaaaaatattattcctgagcatccaaaaagagatagtttagggatagaaatgagtacgttagatgttaggtgggcttgggaaattgggttaaatgatgttgattgtattggagttaatttaaaagaagatgacccctatattcctagtgatgtagctgagatcccattattgcaattgataaacagtaaataa

SEQ ID NO: 218409 - DNA, 930 bp, Klebsiella pneumoniae
atggatcctctcgatgatgtatttgctgctatgcgtctcaagagcgcactttattcacgccttttaccgcatgccccgtgggggataagctttgtaagaagtgcttcaattcgctttggattcatggtttctggacatggaatgcttatagtggaaggcgttgaaaaccccattgaactgcagcaaggagatgggttcctggtgaagcctgagacccttttttctctggtagataacccttctactccaacacaatggtgcgaagatatctttgctgaatgttcaggtaatagtctcagttttggaggtgatggcgaagtggccaatattctctgtggctatttctccttcgatactacgggagcagaaccgttgctttcactgctgccctcagtcgtggtcatcccctctgacgctgcccgttcaccacttttggaagcgacgttaaaactactggctatcgaaagtaccgaaccgcacatggggtcgcgtatagtcgtgagccggcttgcagacgtattttttgtacaggctatcagagcacattatttacgcgagcaaactcataaaagctggatagccgcccttgccgatccccgtcttagccgtgtggtgaaacaaatacacagagatatcgggagaccatggagcctcaaactgctcgctgcggaagcagggatgtcgcgctccgcgtttgcagttcattttaaggacataacaggaatcactcccggggattatctcactcactggagaatgtaccgtgctcgttgtttactgagacatccacaattgaccctggctaagattgcagagatggtgggctacgattcaggaattactctgggccgcgcattcaagcgtttcacaggagtgacagcgggggaatatcgtaaacggtccgggcagggacctgacagtcagctttga

SEQ ID NO: 218410 - DNA, 1014 bp, Klebsiella pneumoniae
atgcatagctatcgacttgagagtttcggaagtttacaaggactgaagttaattgaggaacagcggccagtccccgggcgtaatcaggttctgataaaagtccgcgcctgtagtcttaattatcgtgatctggccattctgtacggaacaggcacattaacccctaaagccgggctgatccctttatcggacggggctggtgaggtcgtggctacaggcgattctgtgagcctgtttaaaaagggggatcgggttgtgggaaccttctttcctcactggtttggtggagcacgggatgccgctgcagggagaggaacttatggcactcaggccgatggatggttaacctcatacaaggtggttgatgaagagtctctggtttcagtacctgattacctgagctgggaacaggctgccactctcccttgcgcagcagttacagcatggaacagccttcaacagtcgcggtctgtattaccgggagagactgtgcttacccagggcaccggtggagtctcactgtttgcggtgcagttcgccaaaatcatgggggcacgcgttattgcgttaacgtcaaatgatgtaaaagcacagctattgtcggcgcttggtgccgatcatgtcatcaattaccaacattatcctgaatggtcagtaaaagtccgggaactgacacaaggcaggggggttgaccgtattgtggaaattggcgggccgggaaccttaaatcagtctttactctccgcagcgccgggaggggaaattgctctgctgggctttgttgcacagggaagtgcatcagtcgattttatgactttgttcaaaagtggcgcaactgtaagacctttcagtgttggcagccgcgaggattttatcgctatgaatcgggcgctggtaaaaagtcagcttcagccgattatagacagggtattcgagtttgaacatgctgttgaagcatggcgatattttgaaagccagcaacatactggcaaagtggtcatcacgatgaattga

SEQ ID NO: 218411 - DNA, 1044 bp, Klebsiella pneumoniae
gtgacgcatatcccctccccaccgatccatattgagtttgccggtatcagcaaagcctatcctaacggcgtgcaggcgctgcaggacattgacctgaccatccgtcagggcgaaattttcggcatcatcggccgcagcggcgccggaaaatccaccctgctgcgcctgtttaatcgtctggagaatgccgacagcggcgagatgttcatccacggtgagtcaaccgtgcgctactccacgcgccagctgcgcgatctgcgtcggcgggtggcgatgatttttcagcactttaacctgatggccaccaaaaccgtggcgcagaacatcgccttgccgctgaagatggctggcgtcccggccggcgaacgccagcggcgggtcacggaaatgcttgagctggtgggcctcagcgcgctgcgcgacagttatccggcccgcctttccggcggccagaaacagcggaccggcatcgcccgggcgctggtcacgcagccggaagttctgctgtgcgatgaggcaacctcggcgctggatccggaaaacaccctgtcggtgttagccctgctgaaggagattaaccagcgcctggggctgactattgtgctaattacccacgaaatggaggtcattcgcaccctctgcgatcgggtcagcgtgcttgagggcgggcgcattgtcgaacagggggacgtctggcgcgtgtttggcaacccgcagcacccggtgacgcgcgccatgctcggccagcaacatcccgaccgcccggaggccgggccgacgctgcgcgatggcgagcagatcgtgaccttgcgttttgacggcagcagcggacgcgaacccaatctgcagcatatcgcccgcctgctgggggccgatgcccgactgctgtacagcaactgcgagcgcattcagggtcgggtgatcggccagctgcaggtgcggctgagcgggccgctggccgccagcgcgctggcgcaggatggctgggtggcggacagcattctgacccaccgacctcatccagcggaaaccactgcgtcttag

SEQ ID NO: 218412 - DNA, 777 bp, Klebsiella pneumoniae
atgaaaaaatccattattgccgccggacttctggccctcttctccaccgcagcgctggctaacgagacgctgatcgtcggcgccaccccggtaccgcatgcggaaatccttgaatttgtgaagccggtgctggcaaaggaaggcgtcgacttacaggtcaaagtgtttaacgattttattcagcctaaccagcagctggcggagaaacacctcgacgccaactactaccagtaccgtccgtttctcgataactacaaccagacccgccacaccaaccttgtgccggtggtcggggtgcatatcgagcccttcggcgcctactccagcaaatacacgaccctcgccgcggtgcctgacggcgccacgatcgccatccctaacgatccggtgaacaccggccgcgcgctggtgatgttaagcaacgccgggctgattaccctcaaagatccgcacaatccgcaatcggcaaccagggacatcaccagcaacccgcatcactttaagatccgcgaactggagggcgccatgctggcgcgggcggtgaagcaggtcgacctggcctttatcttcgccaactatgcgctggaggccggcattgataccgataaagcgttgctggtggaaaaaggcagcgatctgtacgtcgaatatctggtggcgcgcccggacaatattcaggatccgggcattcagaagctggcgcaagcgctgcattcggacgcggttcgtcagttcatcctgacgcgttatcagggcaaaattttacctggattctaa

SEQ ID NO: 218413 - DNA, 675 bp, Klebsiella pneumoniae
atgacgagtctgctggcgtttttcgcgcaaatcgactggagcgatgtggcccaggccgccctcgacaccctcactatgctggcctggtcgctgggctggaccgtgctgattgggcttccgctggggattgtgctctatctcaccggcgaaccgcgtttgctgtatgccccacgcctttaccggctgctgtcattgtgcgtcaacgtgctgcgatccctgccgtttatcattttactcatcgtaatgatcccggtgaccacgttgctgaccggcacctcgctgggggtggcagggaccatcccgccgctggtcgccggctgcgccccgttcttcgcccggctggtggaaaccgccctgcgcgaggtggagcacggcctggtggaagccagctggtcgatgggcggcagcacctggcagcttatctggcacaccctgctgccggagtcgcgggccgggctgatcgccgccgtgaccgtgacggccattttgctggtcgactacacctcgatggccggggtgatcggcggcggcgggctgggcgatctggccattcgttttggttatcagcgctttcagactgatgtgatggtggtcaccgtcctgatgctgattgcgctggtacagcttctgcaaatgagcggcgaccgcctggtgcgctacgtcagccgcaaataa

SEQ ID NO: 218414 - DNA, 381 bp, Klebsiella pneumoniae
gtggagcgggcgagcgacgatccgctgactatctaccatatcggccagctggacagccgtcttgccgccgccgacgcgctgctggaacgggcgggacgggtgctcgaccgctataaaaatgacctcagcgaggagcacgtcgccgaggcctcgctggccgtcgcccgcgccaaaatctggaccaccgaagtggcgctggaggccgccagccgcctgtttgagctgggggggacgcgcgctaccggtgagtcgctcaacctcgaccgtcactggcgcaacgcccgggtgcataccctgcacgacccggttcgctggaagtatcagctgctgggcaactgggtgctgaacggtattcgcccgcaacgacatgactggaactga

SEQ ID NO: 218415 - DNA, 834 bp, Klebsiella pneumoniae
atgatgtcagccagttcacccgctctgccttacacccagtccacgccgcaggcgcatattattgccagcgatgcggaagcccttgccatcgcccatgagatcgccgccgtgcttaaacccggcgccgccgagcgcgaccgcacgggtatcgttccggcggagatcgtcaacacctattccaacagcggactgtggggcatcacggtgccgcgccgctttggcggcgccgaggtttcggccgcgactctggcgcaggttatcgccattgtctccgcggccgatccgtcgttaggccagatcccccagaaccactactgcctgctggaggacattcgtctgcagggcagcgacgagcagcaggcgttttttttcgcccaggtattgcagggctatcgcttcgccaatgccctgtcggaaaccggagggaaaacggtgctcgatattcgaacccgtatcgaggaaggcgccgggggcctgcggatcaatggccgcaaaggctactgcaccggctcgctgtacgcccactggattggcattctggcgctggacgccgacgatcgcgcccagctcgctttcgtgccgcacgacagccctggactgacggtggtcaatgactgggcgtgcctcggtcagcgcaccaccgccagcggcaccgtgctggccgacaatctaccggttaatcctttccacctttttccaacctggaagtcttacgccagcccgacccttgccggccccttcgcccagctaaccaccgcggcgatagacgccgggatcgcccgtgcagcgctggacgataccgtggcgttcgtgcgcgaccgcgcccggccgtag

SEQ ID NO: 218416 - DNA, 837 bp, Klebsiella pneumoniae
atgataccagcccctttttataccctgacgcaaggcgacctgacggtaagcgccgtgagtgatggtcagatggcggcgccgctgacgttactctcggggcttccccctgaagaagcggtgcgcctgcagctgcaggcggggatcgcttcaccggagaccattgagattggcgcctatctgatccgcggtcgcgggcacacggtgctggtggatacgggcaccggtggggtcaacggcgtcggcggcgcactgatcgccagcctggcgcagctgggcgtgcgccctgaagaaatcgacaccatcctcctgacccacgcccacccggaccatattgggggcctgctcacggccgctggtgcaccagcgtttccccgtgccacggtttacctgccctggcgggaacaggcttactggctggcggcgtcgaccctcgccaatgccagcgatcgcggccagcgtaacgtgctgttcgtccgccgcgtgctggcgatctgcgcagaacaaattcgtgaacttaatgaagaaacaagggtggcaggtatccagccatgtgcgctgcccggccatacccccgggcataccggctatcgactggaactgggcgatacctcgctgctgatctggggggatatcgtccattttccgccgattcagaccgcgcggcccgaggtatcggtggctttcgacgtcgatcctgaccaggcccggcaaacccgcgagaacgtgctgcgtcaggccgccagcgaacaatggctgatcgccgggatgcatcttggcctgcctggttttgccagggtggtggagaccccctccggctatctgttgcgggcggtgtaa

SEQ ID NO: 218417 - DNA, 123 bp, Klebsiella pneumoniae
atgtatttcatggtgcgtttttcgccgcttattctggatatgtgcgactcgtccgccatattattacacgatcaatggctaaggtcttttatatttaatttctcaatgtcgttcgggcgttaa

SEQ ID NO: 218418 - DNA, 1362 bp, Klebsiella pneumoniae
atgcgcatacctgcgaatcatcttacaaaacgtatcatcatttatatttttatttgtatcttagcgggggtaggcatcgccggattgacggttttttttcatagcagcctcagcagcacttcttcaatattatttcctctgcttaccagctttttgatggtatttcacattactatcgcctgctttatggggatgaagtactggagcagtaaacgccgtttgtatctgacccctattgcattcgctttcgcctgttccgcacttctgatgctgggcaccctcagcagttatccggactggtggacctgcatgacgactccagtggtcaaacacaatgacgccgttatatattatttcttccgtaatataatgatggctttatcattcatgtcatcaataatattatactatttccgccagcgtttgatgcattcgtggaaagcgcacgcaattacattcatggcgtgtattatcttttctttaactattattattttgtcctggctcttctcaagccactcaccgtggttgaacatcgacttcatcgatgataccagccatacttttacaccgctgtggcaaagtattactggctgggtgctgatatgcatctggtttattacattgattttattaatctgcctgagcaaattgcgcaatatattttggtatagcggcgcttttttttgcagcgcttatctctttaccctgtatcagctcctctccgtcacgggggacctcgatcaaacctggtaccaggctcgtttctttgaaacgctctgcacactgttcctcatcctggtgctgctggttgatgttttcattctctaccgggaatcgaaccataagtacgtcaattcgtatcagaactcgatccgtgatcctttaactcgtctctacaaccgcagcttcttctacgacaccctcaatcagcagctttcgaaggtcaatgcccagcatccgctgtcggtgctggtcagcgacctcgaccacttcaaacgcatcaacgataactacggtcacgtagtaggggataaagtgatccagttcgccgcctcggtactggagaaccattcgcgtgttgacgacgccgccgcacggattggcggggaagagtttgctttattgttggtcaataccggtgaagaagatgcccaggcgattgccgaacgaatccgccaggcggtcagcgttgagcagagccatttgccggaacgaatgaccatcagtatgggcgtgtatacgacgcgtaacgccagcgtgagcgcagaggagtgcgtccagcgggcggatgcggccatgtacgaagcaaaaaacagcgggcgtaatcgggtggtggtctggcgcggtcagagtaactga

SEQ ID NO: 218419 - DNA, 2154 bp, Klebsiella pneumoniae
atgtttaagttattttccgctttccgaaaagataaagtctgggattttaacggcggtattcatcccccggaaatgaaaacccagtctaacggcaccccgctgcgccaggtatcgctgccgcagcgtcttgttattccattgaagcagcacattggcgccgagggcgaactgtgcgtcaaggtgggcgatcgggtgctgcgcggccagccattgactcgcggctggggcagaatgctccccgttcatgccccgacctccggcaccattgccgccatcgccccgcacaccaccgcccatccgtcagcgctggcggagatgagcgtcattattgacgccgacggcgaagatcgctggatcgaacgcgacggctggagcgactatcagacccggacgcgtgaagcacttatcgaacgtattcatcagtttggcgtcgcgggcctcggcggcgccggcttccctaccggcagcaaactgcgcggcggcggcgataaaattaaaacgctgattattaacgccgctgagtgtgagccttatatcacggcggacgaccgcctgatgcaggactgcgcggcgcagattgtcgaggggatccgtatcctcgctcatattctgcagccggacgaagtgctgatcggtattgaagacaacaagccgcaggccatctcaatgctgcgggcggtgctctgcgacgcccatggtatctcgctgcgggtgatccctaccaaatacccctccggtggcgccaagcagctgactcaaattctcaccggcaagcaagtgccgcacggcggccgttcgtcggatattggcgtgctgatgcagaacgtcggtacggcctacgcggtaaaacgcgctgtcatagacggcgaaccgttaacagagcgcgtggtcaccctcaccggtgaggcggtgacccgtccgggcaacgtctgggcgcgccttggcacgccggtgcgccatctgctggatgacgccggcttttgcgccagcgccgaaccgatggtgatcatgggcggcccgctgatgggctttaccctgccgtggctggatgttccggtggtgaagataaccaactgcctgctggcgccttccgccagcgagatgggcgagccgcaggaagagaaaggctgcattcgctgtagcgcctgcgccgacgcctgcccggccgatctgctaccgcagcagctgtactggttcagcaaaggccagcagcacgataaagccaccgcccacaacctggcggactgtatcgaatgtggcgcctgcgcctgggtttgcccaagcaatattccgctggtgcagtacttccgtcaggaaaaagccgagatcagcgcgattcgtcaggaagagcagcgcgccgcggaggccaaagcacgattcgaagcccgacaagcgcgcctggagcgcgagaaagcggcccgcgccgaacggcataaaaaagctgccgttcagcctgccgccaaagatcaggaggcgattaacgccgccctggcccgggtacgtgacaagcagcgtgacgccgcgcaaccgatcgttatccaggctggcgccaaaccggacaacagcgaggcgattgccgctcgtgaagcgcgtaaggctgaagctcgggcgcgcaaagcgcagcagcaggccgcgccggtggacgctccagtgacagacaccgtcgatccgcgtaaagccgcggtggaagctgctattgcccgcgccaaagcgcgtaaagtcgagcagcaggccgcaccggtggacgctccggtgaccgacaccgtcgatccgcgtaaaaccgcggtggaagcggctattgcccgcgctaaagcgcgtaaggccgagcagcaggccgcaccggtggacgctccggcgaccgaaccggtcgatccacgtaaagccgcggtggaagcggctattgcccgcgccaaagcgcgtaaagccgagcagcaggccgcaccggtggacgctccggcgaccgaaccggtcgatccgcgtaaagccgcggtggaagcggccattgcccgtgccaaagcgcgtaagcaacaggcagcccaggcggagatcgcgtcagccgcagccaatgacgacccacgcaaagcggctgtcgccgccgcgatcgcccgcgttcaggcgcgtaaagcaacacagcaggccgttaacgaggaataa

SEQ ID NO: 218420 - DNA, 579 bp, Klebsiella pneumoniae
atgagcgcagtctggatagccgtgatcgccatcagcctgttggggctgattttcggcttaatactggggtatgcctcccgccgtttcgcggtgcaggatgatccggtagtagaaaaaattgatgagctgttgccgcagagccagtgtgggcagtgtggctatcctggctgccgcccctatgcggaagcggtcggtgcccagggggaaaaaattaaccgctgcgccccgggtggggaagcggtgatgttaaaaatagccgccttactgaacgtcgatccgcagccagtcgacggcgacgagcacgaggcggagccggttcgcatgctcgcggtgatagacgagccgaactgtattggctgtaccaaatgtatccaggcgtgtccggtggatgccatagttggcgcgacccgcgccatgcataccgtgatgagcgacctgtgcaccggctgcaatctgtgtgtggccccctgcccgacccagtgcatatcactcgttccggtggcgacgaccccggaaacctggaaatgggatctgcatgcgatcccggtgcgaaatattcctgtggaacaacatgtttaa

SEQ ID NO: 218421 - DNA, 1371 bp, Klebsiella pneumoniae
atggccgcttttccgcaacattttttatggggtgccgcaaccgcagcgtatcaggttgagggtgggcacaatgctgacggtaagggaccgtcaatctgggatatctactcccacctgccgggaactacctttgagggaaccaccggcgatgtcgccgtcgatcactatcaccgctttcgtgaagatgtagcgttaatggccgaaatgggcctgcaaagctaccggttttccatttcatggccccggctgttgcccgctggccgtggcgaagttaatgaagcaggagtgcagttttacagcgatctgattgatgaactgctggcgcataatattgaaccaatgatcactctctatcactgggacctgccgcaggcgctgcaggatgagggcggctgggaggcacgcagtaccgccgaagccttcgcggaatacgcccgcttgtgctacgcgcgctttggttcccgagtaaagctttgggccacctttaacgagacgattgtgttcatcggtcacggctatataaacggcctgcatccaccggcagtccgcgatccggcacgcgctattcaggcctgccatcatgtgtttatcgcccatgcgctggcggtgaaggcctttcgcgagatggccgtggcgggcgaaattggtttcgttaatgtgctgcagccgcataccccgctcaccgacagcgaggcggacataaaggccactgaactggctgacgccatccatacccactggctgtacgatccggtactaaaaggcacctatcctgccgagctgctggcgcagacccaggccctgtggggcgtaccgcgctttgccccgggggacgatgcgctgctccgcgacaatcgctgcgactttattggtctgaactactatcgtcgggaaacggtatccgcgcagccacccgaaatcgctaccggcggcgagcctggcgtagagggtttgttttattttgtgcgtaatccacagagcacctataccgaatggggctgggaaatctggccgcaggggctgaccgacggcattatgatgatcaaggcgcgctatggtgatatccctatctatatcaccgagaatggtctgggggcgaaagacccgatcattgctggtgaagtggtcgatgacccgcgaattgattacctgagcagccatatcggcgccctggaacaagcgctggcgctgggagcagacgtgcggggttattatccgtggtcgtttatcgatctgctgagctggctcaacggttatcaaaagcaatacggctttgtctatgtcgatcaccagcaaaatctggcgcggaaacgaaagaagagtttttattggtacaaatctgttattgccagtcacggcgaacagcgttaa

SEQ ID NO: 218422 - DNA, 141 bp, Klebsiella pneumoniae
atgatgacaactgtttttacccgtattgtagaacttattggctgggttgtttttggtatttccgctctgcttttggttatcgcgcaccatattgataactaccagacgccaccgcctgcggatgtggtgcagactaagtag

SEQ ID NO: 218423 - DNA, 219 bp, Klebsiella pneumoniae
atgagcgcgctgctgttgctgtgtgcgcttttttcaggacatctgctggctcgccgccagggacacgattactttccggtgcaaagcctcgaacagcagctgctgcacgaggcggatagcgatgagctgcgcagccggtgtgaagaggttgctgccgaactgcgcgagcatcaccgctggcaggacgcccacaggccgcgggcgcccctaagccagtag

SEQ ID NO: 218424 - DNA, 306 bp, Klebsiella pneumoniae
atgaagaagttagctttactctccgccgtaatgacgctgggattatcgtcatgggcttttgcggcagataacccgccgccgccgccggaaaaaggggctcagcatgacggccagggcgcccatcaccagggtcagccaccggcgaagaacggtcagcacgacggtaaacagccgccgcacgacggcaaacagccgcagcataacggcaaacaaccgccgcacgacggcaagcagccgcagcatgatggcaagcagccgcccaaaggcggcgagcacaacgggaaaccgttgccgccgaaagcgtaa

SEQ ID NO: 218425 - DNA, 1146 bp, Klebsiella pneumoniae
atgagcaaaaaatttgcccgttgcagcctttatgtgctgagtatggcctgtttgaccgttcaggctgccgagccgctcacgtcgctggataaaccagaagggcgtctcgatattattgcctggccggggtatatcgaacgcggccagaccgacaagcagtacgactgggtcacccagtttgaaaaagagaccggctgtcaggtcaatgtcaaaaccgctgccacctctgacgaaatggtcagcctgatggccaagggcggttacgatctggtgaccgcgtcaggggatgcctcgctgcgcctgatcatgggcaaacgcgtacagccgatcaatacggcgctgatcgcgggctggggcactcttgacccgcgcattgcgaagggagcgtggtttaacgtcggcggtaaagcgtacggcacaccctatcagtgggggccaaacctgctgatgtataacacccgcgtattcccgacgccgccggacagctggcgcgtggtgttccttaagcaggacctgccggacggtaaaaccaaccaggggcgggtgcaggcctatgatggcccaatttatattgccgacgccgcgctgtttgtcaaagccacccagccgcagctggggattaacgacccctatcaactgaccgaaacccagtacaacgcagtgctgaaagtcttacgcgatcaacagccgctgatccatcgctactggcacgatgccaccgtgcagatgaacgactttaaaaacgaaggcgtggcggcttccagctcatggccctatcaggccaacggtctgaaggcggaaggccagccggtcgccaccgtgtttccgaaggagggggtgaccggctgggcggacaccaccatgctgcacagcgaagcaaagcacccggtctgcgcctataaatggatgaactggtcgctcacgccgaaggtgcagggcgacgtggcagcctggttcggctcgctcccggtagtgcctgagggctgtaaagccagcgcgctgctcggggaaaaaggctgtgaaaccaacggctatgaccagtttacccgcatccatttctggaaaacaccggtcgccgaaggcgggaaatacgttccctatagccgctggactcaggactatattgcgataatgggcggccgctaa

SEQ ID NO: 218426 - DNA, 807 bp, Klebsiella pneumoniae
atgcactctgatcgcgcaccctggtatctgcaactggcgacctgggggggcgtggtgttcctccactttccgctgctgatcatcgccatctatgcttttaataccgaggatgcggccttcagctttccgccgcaggggctgacgctacgctggtttagcgaggccgcagggcgcagcgatatcctcgagtccgtgacgttgtcacttaaaattgccgccctgtcgactgctattgccttagtccttggcacgctggctgcaggtgccctgtggcgcagcactttttttggcaagaatgcggtatcgctactgctgttattacccattgccctgccggggatcattaccggcctggcgcttctgacggcgtttaaagccgtcggtctcgagcctgggctactgaccattgtagtggggcacgcgaccttctgcgtggtggtggtgtttaacaacgtcatcgcccgcttccgccggacgtcgtggagcctggtagaagcctcgatggacctgggggcgaccggctggcagacctttcgctacgtggtgttgcccaacctggggtcggcgctgctggcggggggaatgctggcattcgccctgtcatttgatgaaattatcgtcaccacgtttaccgcggggcatgaacgcaccttgccgctgtggctactgaatcagctggggcggccgcgcgatgtgcccgtcaccaacgttgtcgcgctgttggtgatgctggtaacaaccataccaatcttaggggcctggtggctcacccgcgacggcgataacgacgccggaaacgggaaataa

SEQ ID NO: 218427 - DNA, 258 bp, Klebsiella pneumoniae
gtggctgtgaaaacttttgcttttattttattggctatcggcatcctgacgctgagctatggtaatgccccggcgaaacgtatccagagctgtgagaacaccggcgtggagcaggccgtttgcgccgccgccgaatgggatagtgaaaacgttaatgttctgccgcgctataaccccatccttaataaggaaatagcggccgggtcgttagcccctaccgctcggcagcaaaatatcgattctgttgttcgcgcgtaa

SEQ ID NO: 218428 - DNA, 1434 bp, Klebsiella pneumoniae
atgacaatcacctgcaatctgtaccttaacggccagtggcacgatgccgaaggccgccgcacctttacccgccgccaccctgcccacgacgatgtggcctcggtggccgctgccgccagcctcgccgacgctaaacgctgcgtcgaagccgcggccagcgccttcccacgctggcgtgatacgcccccggcggaacggcgtcgcttactgctcgacgcggcggaacatatgctgttgcgcgaggctaaatttatcgccgctatggcggcagagaccggcgcgaccgcccattgggcggggtttaacgtccatctggcagcggatattctgcgggaggcggcagccctcaccacccagattgaaggacagatcatcccctctaacgtgccgggaaacctggcgatgggcgtccgccagggggccggcgtggtgctgggcatggcgccgtggaacgcaccgctgatcctcgccacccgggcgctggcgacgccgttggcctgcggcaacacggtgatccttaagggcgccgagctgtcgccagccacacagggactgattattgacgctcttgacgcagcgggcttcccgccgggcgtggtcaactaccttacctgcgcgcctgaggatgccccggcgctggtggagtcgctcattgcccatccggcggtacggcgggttaactttaccggctccacgccggtggggcggattatcgcccgcacctgcgggcaacatctcaagccagcggtactggaactcggcggtaaggcgccgctgctggtgctggacgatgccgatatcgagcaagccgcggctggggccatttttggcgccttcgccaacgccgggcagatctgtatgtccaccgaacgcattattgttgacaacgccgtggcggaaacctttattccgttgctggccaaacgcgccgccgccctgcccatcagcctcacgggcccggtagtcgatatgaacaccattacccgctgcaatgcattaatcgacgacgcgttagccaaaggcgctcgtctgttaaccggcgggaaagccagcgatacttacatggctccaaccttactggacggtgtcacacaggagatgcgattgtggcgcgaagagtccttcgggccggtaaaagcgattattcgcgtcaataacgaggaagaggcgctgaccgtagccaacgacagcgaatatgggttgtccgcggcggtctacagccgtgacagcgccagagcgtggaacgtggcgcaacgcctgcagaccggcatttgccatatcaatggcccaacggttcacgatgaggcgcaaatgccgtttggcggctgcaaagcctccggctatggccgcttcggtggccgggccggtatcgcggagttcaccgagctacgctggataaccctccagacccagccccgcgaacttcctttctga

SEQ ID NO: 218429 - DNA, 474 bp, Klebsiella pneumoniae
atggataatgtcgtttatgcggactgcgtattaattaacggcaaggtcgccacggtggacgctcattttagttttaagcgcgccatcgccgtaaagcagggatggattattaacgttggtgaagaccaggagattcagcagcatattggtccccagacgcaggtcattgaccttgagggcaaactcattctacccgccgcgcatgactctcatatccatatcggctggctcgctgacagctggcattgcctgaactgccaggacgtgcgttccctggccgaactgcgggaaagactgcgcgaccaggcagcgcgcactccggccggagagtggatccgcgtctgtggactggatccgaatgcgattgaggagtgcgcggccgagcagcgctccctgacgcgctgggatattgacgatgtcacgaccgatcatcccaccctgctcgccctgtgggacggtcactcctgtatctaa

SEQ ID NO: 218430 - DNA, 867 bp, Klebsiella pneumoniae
atgacacccttacactttcataaatatcacgggctgggtaatgattacctggtatgccatcgcgacgttgccgatcagttgagcaacgagcatattcaaattctgtgccatcgccactatggcgtgggatcggatggcctgctgatcgacagcggcgatcagatcaatcccacactgcgtattatcaatccggacggctccgaggcggagaaaagcggtaacgggctacggatctatgcgcgttatctttttgatatcggtcgtgtcggccatgagccctttctggtacacacggcgggcggtgacgttcattgcactgtgcatggcgatgttcatcagattagcgtcgacatggggcgggcgaatttcaatccggcggcgctgcccgccttagtgaatttgcctgaggcggtgaattatcctttgccgctggcggatgaaaccctgtccgtcgtgctggtctccatgggcaatccccactgcgttgtcctcgtcgataagctcgacctggcgcaggttcatcgtttaggaccgcaaatcgaacaccattccttgttccccaaacgcaccaatgtccagttcgtggaagttatcgatcgccatacgctgaagattggtatctgggagcggggcgcggggttcacgatggcctccgggagcagcagttgcgcggctgccagcgcgatgcgccggttagggaaggtggacgatcgggtggatgtcaacatgcctggtggtcagctgcacatcgccttcgatgcggattttcaggtccgtatgcgtggtccggtgcataaaatcgccagcctgacgctggataaagactgctttgttggcggcagcgccatcttcactggcgctgcataa

SEQ ID NO: 218431 - DNA, 696 bp, Klebsiella pneumoniae
atgaacccctatgaagcacgctacagacaactgttagccaacggagccagcgcctgggcaggtgatggttttgcccgggcaaagatacaacaggaaaaaacatttcattggctggatgcccatggctatttacccgctcccggcgcgccggtacttgaactgggatgtggcaatggtgccatggcagcccagtatctggcggaaagaggctatgccgtatcgggtgttgatgtgtccgaaacggcgatccgctgggcagaagaccgttttcagcaagcgggtctggacgccacatttttcgtcggcaacgtctgtcatctttctcaatgtgaggatgcccagtatgccttaatcattgatggcagctgtctacattgtctgctggaagatgagcgtcgccgttttttcgccgaggcgagaagattgctgaaatccgcaggccggctggtgatcggctcgatgtgcgggcttcctcgttatgctgaagacctcgccacttacgatcctgccaggcatcatctcctgaaagaggggcagccctggcgtacgcttaaacccctcccggctttactgaatgagatacagcaggcgcaatttaccgtccttgccaccagcgttaagcacaatgcctggtgggaccatgccaccatcgtttgttcggcaaacgggccgtcggcagatccacaggagagttaa

SEQ ID NO: 218432 - DNA, 1314 bp, Klebsiella pneumoniae
atgtctggaaatcgacaattgcgtctgggaacgatattacatggcgcatcgggaaatatgtccgcctggcgtcatccggcggcgcaggcggacgccagtattaattttgacttcgtcacacagacggcgttaaaagcggaagcggggaagctggattttatttttgtcgccgacggtttatatattaacgaaaaatcgattccccattttctaaatcgcttcgaacctttaacggtactttccgcgctggcggcggtcacccggcgtctggggctggtggggaccttatccacttcctacagtgagccgtttaccaccgctcgccagttcgccagcctcgaccatttaagccagggacgggcgggatggaatgtcgtcacttccccgctggaggggtcggcgaaaaacttctcccgcgcccaacatccggatcatgcgctgcgctatcgcattgccgatgagtatctgcaggtggtgaaaggcttatgggattcgtgggaagaagacgcctttgtgcgcaataaagagactggccagttctttgataaaaataaactgcatacgctcgatcaccacggcgatttctttaaagttgccgggccgctgaatattgcccgcacgccgcagggccgaccgattattttccaggccggcgcgtcggacgacggcaaaaaattagccgcacgccacgccgatgccatttttacccatcaggactcgctggccgaggcgcaggcattttatcgggatgtcaaaagccaactcgccgcatatcagcgcaccccggatcaactgcatatcttccagggcgtcagcgtcatcgtcggggatgacgccgaggatgcggaacgtcagtaccagactaccgcggcgctggtttccatcgaggatgcgctgaattatctcgggcgctatttcgaacaccacgatttctcgcagtacccgctcgacgaacctttcccggatattggcgacctgggacagaacagcttccgcagcaccaccgacgagattaaacgccacgcccgcgagcggggattaaccctgcgccaggtggctctggaggcagcgagcccacgtccgcgctttaccggcaccgccagcgatgtcgccgatggcctgcaattgtggttcgaacagcatgcggcggacggtttcattattcagggcggcacgccggaaaccttcccgcgttttgtggatgaggtggttccgctgcttcaggcgcgtggactgttccgtcgcgactatccgggcaccaccctgcgggaaagtctgggtctggcgctacccgctaatcaattccaaaaataa

SEQ ID NO: 218433 - DNA, 1311 bp, Klebsiella pneumoniae
atgcaacagcaactaaaacgcagcaacgtgcgttacggcatattactttttttatttctcgcgaccgtatttaattatgctgaccgggccactctgtccgttgtcgcgcccattatgagtaaagagttaggttttgaccctgaagccatgggcctggccttttcggtgtttggtatttcctacgtcattatgcaaatccccggcggctggttgctggataaatatggttcgcggttggtctatggctgcgcgctgattggctggtcggtcgtcactatgttccagggcactgtttatctgtttgccagcccgctggtggtgttggtgatcctgcgtctgatgatgggcgccattgaagcgcccgcctttccggccaacagtcgcctgagcgtccagtggtttcccaataaagagcgtggatttgtcacctcggtctatcaggcggcgcagtatatttcgctgggcattattacgccgctgatgaccatcattctgcataatttaagctggcactatgtcttttattatattggcgctatcggggtggtgctggggatattctggctggtaaaagtgaaggatccttcacatcatcctaaaattaaccaacaggagctcgattatattcgtgaaggcggcggcgtaccggaattaggtagtcagaaaacgcagcaaaaattaaccctcgcgcagattaaaagcgtctgtgtcaatcgcatgatgatcggggtttatatcggccagttttgcgtcacctcgattacctggttcttcctcacctggtttccgacctacctctaccaggccaaaggcatgtcaatcctcaaagtcgggtttgtcgccagtatcccggcgatagccggctttatcggcggcctgctgggcggcgtgttttcggactggctgctgaaacgcggttacagtctgaccaccgcccgtaagcttccggtgatctgcggcatgctgctctcctgcatcattgtcgtcgccaactacacctcttcggaagtggtggtgatcgccgccatgagcctggcgttctttgccaaaggtttcggaaacctcggctggtgcgtgctgagcgacacctcgccaaaagagatgctcggtattgccggcggcgtgttcaatatgtgcggcaacctggcgagcatcattaccccgctggtcatcggggtgatcctcgccaatacccactcatttgattacgccatcctctacgtcggttccatgggcgtgctgggcctgttctcctatctgttcatcgttgggccgctggatcgcttgacgctcactccgcgcaccgtttga

SEQ ID NO: 218434 - DNA, 1197 bp, Klebsiella pneumoniae
atgacctcaagcgccaattccgagtctgtaacctacgccaaagctttcggcgtcaaaaccgccgctgaaaccggtgaccgcattgaccacgtgaaactgtcgctggcttttctgccgctggccacccccgtcagcgatgccaaagtgctgaccggtcgccaaaaaccgctgaccgaagtggcgattatcatcgcggaaattcactcccgggatggatttaccggcgtcggctttagctactcaaagcgtgcgggcggccagggcatttacgctcacgctaaagagattgccgataatctgcttggcgaagatccaaacgacatcgacaagatctacaccaaactgctgtgggccggggcttccgtcggccgtagcggaatggcggtacaagctatctcccctatcgatattgccctgtgggatatgaaagccaagcgcgccggtctaccgctggccaaactgctgggctcgcatcgtgattccgtgcagtgctacaacacctccggcggcttcctgcatacccccctggatcaggtgttgaaaaacgtggctatctcccgtgaaaacggcatcggcgggattaaactaaaagtcggtcagcctaatactgccgaggatatccgtcgtctgacggcggtgcgcgaagtgctgggtgatgacttcccgctgatggtcgatgccaaccagcagtgggatcgcgaaaccgccatccgcatggggcgcaaaatggagccgttcaatctgatctggattgaggagccgctggatgcctatgacgtcgaaggccacgcgcagctggctgccgcgctggatacgccgattgccaccggcgagatgctgaccagcttccgcgaacatgagcagttgatcctcggcaacgccagcgacttcgtgcaaccggatgccccgcgcgtcggtgggatctccccgttcctgaaaataatggatctggccgcgaagcacggtcgcaagctggcgccacactttgcgatggaggtgcacctgcatctcgccgccgcctacccgctggagccgtggctggagcacttcgagtggctgaacccgctgtttaacgagcaattagaattgcgcgatgggcggatgtgggtttccgaacgccatggtctgggcttcaccctcagcgagcaggcgcgccgctggacccagcagagctgcgagttcggaacacgcccgtaa

SEQ ID NO: 218435 - DNA, 1005 bp, Klebsiella pneumoniae
gtgaaaagcaaaaaaccgacgcgggcgccgacgctggaggatgtggctcgcagcgccgggttgtcgccgatgacggtcagtcgggcgctgaatacgccccagctggtcaggccaaaaacggtagagaaagtgatgcaggcggtgcaggcgacgggctatatccccaatgcgctggccggggggctcgcctccaggcgcagcaagctggtggcggtcgtggtgccgcagatcaataacaatatgtttgtcgataccatccaggcgctaagcgatactctggcggcgcgcggctaccatatgctgctgtgcgtggcgggctatgaccggcagaccgaagccgagctggtctccaccttactgtcgcggcgccccgatggcgtggtgttaaccggcatccagcatgcgccgctgttaaagaaaacgattcttaacgccgccacgccggtggtggaaatctgggatctcaccccgacgccgctggatatgctggtcggtttttcccatgaaaaagtgggcgaaaccattggcgagtacgtgctggagaaaggctatcggcgtccgggtctgctgtgggcgggcgatacgcgcgcgatgttgcgtaagcaggggctctgtgcccgactggctaaaaaagggctggacgatgcgcctcaggttgaagtgccgctcccggcgtcgctggcgctgggacgaagcggtctggctgagctgctggccgccggcgagtttgatgtgatcatctgcagctcagataccctcgcccagggggcgattatggaagccgaaagccgggggctacgcgtaccgcaggatctggcggtgattggttttggcgatctggatttcgccgccagcaatcgtccggccatcactaccgtcagcgtcgaccgtcatgccatcggcgaacgggccgctacgttgctggccgaccgtatcgaagggggagaagaaagcgggttgattatagatatcggctttcagctggtggcgcgggaatcggcgtag

SEQ ID NO: 218436 - DNA, 1545 bp, Klebsiella pneumoniae
atgaaaatccgttctcaggttggaatggtgctgaatctggataaatgcatcggctgccatacctgctccgtcacctgtaaaaacgtctggagcagccgcgaaggcatggagtacgcgtggttcaataacgtggaaaccaaaccgggcattggctaccccaaaaactgggaagatcaggacgagtggcaaggcggctggatccgcggtatcagcggcaagctcactccgcgcctgggcaaccgcgtcagcgtgttgtcgaagattttcgccaacccggtgctgccgcagattgacgattattacgaaccctttacctacgattatcagcacctgcacaacgcgccggaaggcaaatacttgcctaccgcccgcccacgttcgctgattagcggcgagcgtatggataagataaaatgggggccaaactgggaagaactgctcggcggcgagtttgaaaaacgcgccaaagaccgtaacttcgaagccatgcagaaagagatgtatggccagtttgaaaacaccttcatgatgtatctgccgcgcctgtgcgaacactgcctcaatccgagctgtgtcgcaacctgcccgagcggcgctatttacaagcgtgaagaagacggcatcgtgctgatcgaccaggataaatgccgcggctggcggatgtgcatcagcggctgtccgtacaaaaaaatctactttaactggaagagcggcaagtcggaaaaatgcattttctgctatccacgcattgagtccgggcagccaacggtctgttcagaaacctgcgtcgggcgcatccgctatcttggcgtactgctgtacgacgctgaccgcattgaagaagcggccagtaccgaacatgaaaccgacctctatgagcgccagtgcgaggtgttcctcaaccctaacgacccggcggtcatcgaagaggcgttgaaacagggtattccacataacgtgattgaagccgcgcagaaatcgccggtctataagctggcgatggactggaagctggccctgccgctgcatccggaataccgcaccctgccgatggtctggtacgtgccgcccctgtcgccgatccagtcggtggccgacgccggcggcctgccgggcaacggcaacatcctgccagcggttgagagcctgcgtataccggtgcaatacctggcgaacctgctgagcgccggcgataccggtccggtcctgcgcgcgttaaaacggatgatggcgatgcgccactacaaacgttcgcaaaccgtcgaaggcgtcaccgatacccgcgccattgaagaagtgggcctcagcgttgagcaggtcgaagagatgtatcgctatctggcgatcgccaactacgaagaccgctttgtgatccccaccagccatcgcgaactggcggaggatgccttcccggaacgtaacggctgcggctttaccttcggcgatggctgccacgggtcagatacgaaattcaacctgtttaacagccggcggatcgacgccatcgacgtcagcggcgtgcgtaagcatggggagggcgagtga

SEQ ID NO: 218437 - DNA, 327 bp, Klebsiella pneumoniae
atgatgcttgaacaattcaatgtttatcggaattgttctgctcagacaaataaaaccctgccgtattatatgatcgtgcagaatgattattatgcagacctggccacgagagtcattattcctttaatgcgaccacaacagttaccgcgctggcatcagcatgtcgtaccaaggataaatatagaatttgacagctttttactttgtacgccaatgattagtaacttaaataataaacggatccagccacaggatttcgtctgcaatctgaatcatgcgcgccagggcgttatcgattcaatcgatacacttatcacgaactcctga

SEQ ID NO: 218438 - DNA, 1521 bp, Klebsiella pneumoniae
atggcgttcgattggggatactttttttcattgtttagcattggagcattctggcaggcgtgcgtgaccgtcatcgtggtcagcaccttgtcctgggggatcggcctggtggtcggttttctgttagcctgcgcgaagctctccgcgccgcgctggatcaagatccccgtcgaactctatatctggttttttcgcagcgtgccgctgatggtgctgctggtgtttgtctacaacctgccgcagctgtttccggtgacccagccgctgctcggggtgccgtttatcgccgggctggtgtcgatgaccgtcaccgaagcggcctatatggcggagatccaccgcggcggactgctgtcggtggccaaagggcaaagcgaggcgggccatgcgctgagcttcagctttatcggcatccagcggctgattgtgatccctcaggcgtttcgcatctcgctgccgacgcttatcaatgaatacatcaccatcattaagctgagctcgattttgtcggtggtctccttacccgagctgctgctcaccggccagcgcttatatgcgcagaattttctcgtgatggagaccctgctggcggtggcggtgtactacgtgatggtggttaccgtcttcacctggctgttccgggcgctggaaaatcgtctcgatattcagcgtaagcgtccgcaaaccctcagcgaggcggaatgccaggcgctgcgccagagcctgccggcgctgacggaggagatcaaaacgccggccgtcaacggcgcgccgccagcgctcgatctgcggggcatccgcaaatcctggggtcagcatgaggtgctgaaaggcatcgatctgcaggtggagaacggggaggtgatcagcatcatcggcccgtccggctccggcaaaaccaccctgatccgcaccatcaacgccctcgaaagcattgatggcggggagatcattctctacggcgaagactatctgaaaggcggagccatcgttgataagcgccagatgcgcgccggggtgcggcgcatcggcatggtcttccagagcttcaacctgttcccccaccgcacggtgctcgacaacgtgatgctggccccgcgctatcaccagctgctggaccagccggtcgcccgagaacaggccctgatattgctcgaccgcgtcggcctgctggcccatgcccacaaatacccctggcagctctccggcggccagcagcagcgcgtggcgatcgcccgggcgctggcgctgaaaccggacatcatgctgtttgacgagccaacctcggcgctggatcccgagctggtgggcgaagtgctgaaggtcattcagtcgctggcccgcgaaggcatgaccatgctgattgtcactcacgagatggacttcgccctgtcgatttccgaccgcgtagtgctgatggagaacggcgtggtgcaggccgatatcgccccgcaggtgatccgcagcccgctggaggccccttctctgcaacgaattcgtgaatttatgggagtacgctaa

SEQ ID NO: 218439 - DNA, 768 bp, Klebsiella pneumoniae
atgagactgacggtggggctggggctggcgctgacgctggcgattatgacctgcggcgcccaggcgcgcgatatgcaatctatcgagcacagcggtgaactgaaggtgggcgtgccgggcgattacgcgccgctggcgtttcgcaatgccgccggcgaactgcagggctatgacgtggacatggcccgcgatctcgggcgcacgctcggcctcaaggtgagcttcgcctacaccagctggcccgcgctcgccgccgatctgcaggcggacaagtttgatattgcgatgggtggggttaccgagacaccggcgcgggcgcaagccttcgccctcagccatccggtggtggcgaacggaaaaatcgccttagccaactgccaggccgccccgcggctcggttcgctggaaaaaattgaccgtccggacgtgaaagtgatcgtcaaccctggcggcacaaaccagagttttgtcgatgaacacatcaagcaggcgcaaattattcgcgtgcagaacaatgtcgataacctgcaggcgctgcggcagaaaacggccgatatgatggtgaccgatctgattgaaggcgactattaccagagcaaagagcccggcgtgttctgcgttgctaacgaaacaccgttcgccggtaccgccagcaacaaggtgtatatgatgagtaaagataacccggcgctgctggagaaagtgaaccagtggctggatagccaggacaaagaggttctcaaacggaagtggaaaattcgcggttaa

SEQ ID NO: 218440 - DNA, 702 bp, Klebsiella pneumoniae
atgatcgcgcttatcatcttatttactcccctcttctccagcagtaatacttggttacagaagcagtgtataaggaaatacattatgattattatcatttccgccaataaattttttattaacggcgtccggtctctggttaacatgaccatgagtgctcaacgtcggtatagtcaaacattgtttctggataatatttctgacgtgaatgataaaagtctaaccatagccagaaccattatcgtggactatagccacccggacattcaacaattagccgcactgctctatcgtaaaaaaaagatcattcatggcgatatcgtttttgtcgttaaaagtgagattcttgccgatccagtcgaaaacattatcataaactctatttcgacgatcgtgcttgattatatagatgttacccaacggctgcagaaatacttacagaatgcgtctgatcatcgctgtattaaagtgttcagaaaatcaattagctcgctggacagttgtgtcaatattaaacttacgaaacaggaggactctcttctcccctatatcatctcaggtttaaataataagaaaattgctcaggccaccgaccttagcaatatgatgatcagtcactatcggagaaacatctaccagaaactcaatgtccgcaatattgcaggcctgtatcatttcctgcactccctggaggggggataa

SEQ ID NO: 218441 - DNA, 552 bp, Klebsiella pneumoniae
atgaaaatgaaatcactttgcctggcaatggcactcgtcggcttgacctcacactatgccgccgcggcggacggtacgctgaattttatcggtaaaattgtcaactcaagttgcaaactggaaggtgccgataagaacggtgtcattgaagttacgatgggctctgttccgctgtctaaattaaaaaatggtaccaatggcaccgggccagaagttggggtcaatattagcgtcagcgattgtgaaaagggcacgtactatattgtgctcgacggaccttcagccaccgaggcgcctatcactaacgtactggctctcgatacggatccgaattcggctaaaaaagtcggcattaagctaaccgaccgcaataataccccggtcacactcgataaacctttcgatcccaccgtcgacccgagtattacgatcgatgccgatggcggctctggtaccttctacctgaaagcctattactacacctgggatacagacgaagtcgacgctggcgccggcaatgcgaccgcccggtttaccattatgcaggaataa

SEQ ID NO: 218442 - DNA, 2514 bp, Klebsiella pneumoniae
atgccattgaccgcaggacgggcgctggcgctggcgacggtgccgacgatgatgttttgtctcagtccgccgaaccgggcgctggccgacgactattttgacccggcggcgctggaatttgccgacccgcagcagcaaacctccgacctgcactatttcgccaaacccggcgggcagcagccgggcacttactctgtcaccgtggtggttaacgatcaggagctgggtcaggccgatattacgtttgttgacgatggcgggaagctgcagccggtgctaacgcccgctcaactggcggattatggggtcaacgtcagcgcctttcccgcctttcaaacgctgcatgaaggagagaccttcacccggatcgagaagtttattcccgacgccagcagccggttcacctttgctaaccagcgcctgacgctgagtattccccaggcggcgatgaacgtgcaaagtcgcggctatgtcgatccctcgcgctgggacgatggcgtgcccgccgcgtttgttgattactatttttctggcgcgcagatcaagagtgccgatgatggggagagcagccgctcaaactatctcaatttacgcagcggcatgaacctgggtgcctggcgtctgcgcaacgtctcctcgatgcagtacgaccagcagcgtcggcactgggattcacagagtacctggctgcagcgcgacgtccgctcgctgaagagtctgctgcggatcggcgatacctataccaccggcgatgtctttgacagcatcccctttcgcggcgtccagctgatgtctgacgatgagatgctcccggacagccagcgcggttttgcccccaccatccgcggcgtggcgcacagcaatgccaaagtgaccgtctctcagcacgggtatgtgatctatgagaccttcgtgtcgccgggggcgtttgccatcagcgatctctatcccacctcgcagagcggcgatctggaggtgaaggtgaccgagagcaatggcgcggtgcgcacctttacccagcctttttccgcggtaccgttcatgctgcgtgaagggcgcggcaaatttagcctcagcgccgggcgctaccatgccggatcggattcggtacgctccccggaattcctgcaggggaccctgttctacggcctgtcggcgggatttaccctctacggcggcacgcagctggcccaggactatcagtcgtgggcgctcggtctgggccgcggctttggcgagttcggatcgctgggaggggatgtgacccaggccgtcacccgcacgccgtcgggcaagcgctacgcgggtcattcgctgcgcgcccagtatcagaaagatttcgtcagctcgggcacctcgttcagccttgccagctatcgctactcctccagcggctactacgattttgccgaagccagcgcgctggaaagcgaacagggactggtggacaaccggcgtcgtcgggaagagatctcagtgtcacaaagccttggcggcctcggcagtctggcgatctccgcctggtcgcaagagtactggcaccggcagagtcgggatgaaaccgtacacctcgggttctacagcgcctggaaggggatctcctggggcgcgggctattactacacccgctccagcgatcaggaaaaaaatgaccgttcctggtcatttaatatcaacattccgctgggcggcccgctgtccgacagcacggtgagttacaacaccacctcggacagcaatggttatacctcgcaacaggtctcgctgtatggcgcggtgccgacgcggacaaatctgttctattcagttcagcagggctacggcaaccaggggcgaggcagcaacagcagcgtcgcgctggactaccacggcggcttcggcaacgcccagcttggctatcgtcatgatgccgccagcaaccagctgacctggggaggcgccggctcggtggtcgcccatccgcacggtattacctttggccagacggtgggcgaaagctttgccatcgtccgggcgccaggcgccgccggtgtggcggtgcaaaatggcaacaatgtccgcaccgactggcgcggctatgccgtggtgccgtccctgaccgcctaccggaaaaacgtgatcaccctcgacacagagtcgatggccgatgacaccgacgtcgaccaggaagggcagaccgtgatccccggcggtggcgcggtagtgatggccaactaccgaacccacattggcaaccgggtgctgtttaccctgcgcaatgcccaggggccgttgccgtttggcgccagcgcgcggctggtcgaagaggaggagagcggcaatgcgccaggcggcatggtagccgatggcggccaggtgtatctcagcggtgtgccgcagaagggaaccctggcggtgagctgggtcgtaaacaaccagtcgcagagctgcacgctgcattttcaacttccggataacccacaacagagtctgaatacggtgaaaaccgtctccgggctgtgccagacacgctga

SEQ ID NO: 218443 - DNA, 663 bp, Klebsiella pneumoniae
atgatgaagaaaataattgccgttgcggcttttctgctgtgctccacggcagcgcaggccggtattgtcatgggtggaacccgtgtgatttatcaggaagggaagcgtgaagccgctatttcagtcaccaatgccgatacccatacgccctatctggtgcagtcgtgggtggaaaattacgcggaaaacgataaggccaaggtgccctttattgtcacgccgcccttgttccgtctcgatccggagcaaaataacgttctgcgcattaactttattggcgcctcactgcccagcgaccgtgaatcggtctactggctgaacgtcaaaagtatcgccccaacgccccagggtgaggtgaacaagctgcaggtcaatattaagtcgaaattcaaaatcttctatcggcccaacggcctggcgggcgacccggcaaaagcctggcagcagctgaagtttacccagtccggcggtcatctgacggtggcaaaccccaccccttattttgtctcattttactccgtcgcggtgggtgggcagagcatcgacgagcctggcatggtggcccctttcggccagaaaacgtggccggtgagcgggcacggcgccgtcaaatggcgggcgattaacgactacggcggcgtcagcgacttcgcccagcagtaa

SEQ ID NO: 218444 - DNA, 585 bp, Klebsiella pneumoniae
atgaaaacccaacttcgtattatggcaattctcatgggcgcgctggtttcgggcgtaaccttccaggcgactgcggcaaacacgattaatccaaactcaggaaccagtgcgcaaggcgccggggggcaggttatcttcaatggatcaatcaccgacagctcctgcaacgtcgacagcggttcaaccggccagacggtggatttgggcaaatgggccagcacctattttaccagcacaggctccgaaaccaccaaaactccctttcatatcaaagtcaaagattgcccggccagcgtgaagacggtcgctgtgctgtttgatggtacgcgcgaacagacgaatacctccctgttggccatcaacagcggcggcgccagcggcgtagcgattaagctgtatgagcaagatcagacgacggcggttagcctcggtaaaacgaccgccaaacaagcggtcactccgggttccagcggcagcaccggttctgccgacctcgagttttacgccgattatgtctctaccggggcgaccgtgacggcaggtgacgccaacggtacggctaatttcaatatgatttataactaa

SEQ ID NO: 218445 - DNA, 597 bp, Klebsiella pneumoniae
atgaacgccctggaaaccctgaatcaatctgtttttctcgccctgaatgcgcagcctggcgccgcggaaggcttactgtcgctggcccgtttttgcgccactggcatcgtgtttatgatgccggcgatcgcgctcggcctgtggttcctcggtggccgtgaggggcatcgccaggcgctgtttatgaccctggccgtggtgatttccctcgggctggggatggtgtgcggaacgctctggttccatccgcggccgtttatgatccccctcggccatacctggataagccatccggcggataacagcttccccagcgatcacgggacggtgatgttcagcgccgcgtttgcgctgctgtcgctgcgcctgcgggtgcctggcctgctgatgctgctggccgcgctgccggtggcctggtcgcgcatctatcttggggtacattttccgctcgatatggtgggggcggccctggtcgccgtcggtggggtcatcgtggcaaaacggatctggcaggtggccggctcacgtctggtgctgctgtgcgaggccgtcagccggcgcatgttctcctggctgccggcgcgctttacgccgtag

SEQ ID NO: 218446 - DNA, 531 bp, Klebsiella pneumoniae
atgactatcgccaccgtaacccctgccgaagcccgggcgctgattgcccagggcgccagactgattgatatccgtgatgcggatgaatacgcgcgcgaacatatccccgatgccgagctggtgccgctcgccgccctgaccagcggtacgtccctcaatgcccgggccggagagacggtcatctttcactgccaggcgggttcccggacgcagaataatgcgattcgcctggccgcggccgccgcgccggcgcaggcctgcctgctggcgggaggaattcaggcatggaaagccgcagggctcccggtagcagaagataaatcccagccgctgccgctgatgcgccaggtacaaattgccgctggcgccctgattttactcggtgtgctgctgggctataccgtgagcagcggcttcttcctgctcagcggcgcggtcggtgccgggctcaccttcgccggggtgaccggcttttgcggtatggcgcgcttgctggcagtcatgccctggaaccggcgccaggggcgttaa

SEQ ID NO: 218447 - DNA, 2235 bp, Klebsiella pneumoniae
atgaacggggtgcaaatccgcattcgcggcaaagtgcagggggtcggtttccgcccctttgtctggcagctggcccgggctcaggcgcgctgtggcgatgtctgtaatgacggcgatggcgtactggtgcggctggttgggggcgacgatggttttactgccgccctggctgaccactgcccgccgctggcgcgtatcgacagtaccgactgcaccccctatcgctgggcggctctgccgcaggatttcaccattcgcgaaagcgggacgggacggatgcgcactcagatcgtgcctgatgccgcgacctgcccgtcgtgcctcgcggagatgaacgatccccgggcgcgccgctaccgctatccctttatcaactgcactcactgcgggccgcggctgaccattattcgcgccatgccctacgaccggcccttcaccgcaatggcgccgttcccgctctgttccccttgtgaggcggaattccgcgatcctgccgatcgccgttttcacgcccagccggtggcctgtcccgactgcgggccgcagctgcaatggcaggcagaaggggaaacgctggacggtgaggcggcgctgcaggcagctatcgcgcggctggcggcgggcgacattgtggcgataaaaggcatcggcggctttcatctggcctgcgacgccggtaattccacagccgttgccacgctgcgggcgcgaaaacaccgtccggcgaaaccgctggcggtgatgttgccgtcagcggcgggcttacccgccgacgccgcggcgctgatgggctccccggcggcgcccatcgtactgattgctaaagcgcaggtctccggcctgtgcgacgagattgcgccagggcttgcggaagttggggtgatgctgccgtctaatccgctgcagcatttgcttctgcaggccctggcgcgccccatcgtgatgacctccggcaaccttagcggccgcccgccggccctcgataataccgaagcgcttaacgatttggccgacatcgccgacggctttctcctgcataaccgcgatatcgtacagcggatggatgattcgctggtgcggtcgagcggagaaatgctgcgccgcgcccggggctacgtcccggatgcgctgccgctaccgccggggctacaagacatcccgccgctgctggctcttggcgcggatatgaaaaataccttctgcctggcgcgtggcagcgaggcggtgctgagccagcactttggcgaccttggcgaggagggcgttgaacagcagtggcgccgcgccctgcagctgatgcaaagcatttacgcgtttgtgccacagcgggtggtggttgatgcccatcccggctatcgctcaacgcagtgggcggcgtccctgtcgcggccggtggagacggtgctgcatcaccatgctcatgccgcggcgtgcctggccgagcaccgctggccgctcgacggcggcgatgtgattgccctgaccctcgatggtattggcatgggcgaaaacggtgcgctgtggggtggggagtgcctgcgggtgaactatcgccagtgcgaacatcttggcggactgccggccgtggcgctgccgggcggtgacctggcggcgcgccagccatggcgtaatctgctggcccactgtctggcattcgtccccgactggcaggattatccgcaaaccgccgcgctggggcagcgaaactggccgctgctggcgcaggccatcgaacgcggcattaattcgccgcgagcctcttcctgcggacggctgtttgacgccgttgcctgcgcgctggattgcgcgccggagagcctgagctatgaaggcgaagcggcctgtcggctggaagcgctggccgccagctgccccggcgtcagccacccggttacgctgccgtggcgcgacgacacgctggacatggcgaccttctggcgacaatggctgagctggcaggcgaccccggcgcagaaagcctgggcattccatgacgccctggcctgtgggctggcggcgatggcccgcggctgcgccaccgcccgcggtatcgagacgatggtctgcagcggcggggtgctgcataaccgcttgctggcggcgcgattgaccttttatctggcggattttactctgctgtttgcgcagcagttgccggccggcgacggcgcaatcgcatatggtcaggcggtgatcgccgccgcccgcgggcaggctcaaggaacacaatcatga

SEQ ID NO: 218448 - DNA, 309 bp, Klebsiella pneumoniae
atgaccgcacagcacaccaccgctaccagaggcattgccagggcaagtcgtcagttaaccgtgggctatatcagaaaacgccatgaaaaccgcaaaacgcgagagacgcggcgctacacccgccacgcggcattaagcttaaacggcaactggctggagcaggcgggatttccggtcggcacgcaggtcagagtctcggtgtcgcccggtaaattagtgatagagaatcttgagctggtgccgccgggaacggggctcccgtccggccaggcgagcgccgccggggagcctgattcgccgctgggttag

SEQ ID NO: 218449 - DNA, 1029 bp, Klebsiella pneumoniae
gtgcgcgtggtgcatcaatcgactaagccggaaaatctgtccgaccttgccgccaacagcagcgtgctgaccgagtcgtcggtagcgaatctgtatggcaaaaacagcgatacccaggtgctgccgtcgttgaccttccagtacgacattacgccgcggctgatgacctacctgcagtaccagcgcggcgcgcagttccccaacgccagccagttgtatggctcctggaacctcggctccagctacgccggcagccagcaatatgccctgatcggcaataccgatctgaagacggaaaccagcgataatctcgagtgggggctgaagggggaagtcaccgaaggcatcaccctgcgcaccgcgctgttctacaacagctataagaactttatcgcctatacccgctatacccgcgccaataatccgggccagttcaccaacgtgccgtcgaacatctacaccatttatcaggcggaaaaccgcgataaagcctatatctacggcggtgaaatcagcactaaatttaattttggcacctggtatgagcaggtggacggtctgagcgccaccctcgccctcggctatagcgaagggaaatcgaaatccagctacagcggcgataaatacgtcgacctcgacagcgtggcgccgatgaaagccatcgtcggcgtggcctgggacgatccggcgaaacgctacggcaccgccctgacggcaacttttgtcaaagggaaacaggcgaccgccaccaaccgcgaaagctacagcaacagcggatccgccatcaccgatgccagcagcgactatatgcgcgtgccgggctacggcatgctggactggaccgcgtactggcaggtggcgaaaaacgtgcgcctcaatggcggggtctacaacctcaccgatcgtaaatactgggattacctgagcagccgcaatatcgagaccggcaccaaccaggacgccaacgataaagcgctggcggtgatgccgggccgtacctggcagctgggcgtcaacgtcgacttctga

SEQ ID NO: 218450 - DNA, 819 bp, Klebsiella pneumoniae
atgatgcgctggttactgcttctcatagtcttcccgttgctgagccacgccgccgttgagcggctcgtcaccctcggcggagatgtcactgagatcgtctatgctctcggcgcggaacagagcctggtggcgcgggacagcaccagcacctggcctgtcgccgcgcagaagctgccggacgtcggctacctgcggcaactgaacgctgaggggatcctcgcgttacgcccgcagctggtactggccagcgcgcaggcgcagccctcgctggttttacacaagatacaggcgagcggggtgaaggtggttaacgtgccgggcggcgaaagtctgtccgcgatcgataacaaagtggcggtcattgccgacgcgttagacaaaacgacggcgggcgacgcgctgcgccagcagctccagcagcagatcgccgccattcccacgcgccctgccgccaaacgggtgctgtttattctcagccatggcggaatgaataccctggtggccggacagcacaccgcggccgatggcgccattcgcgccgccggactgcagaacgcgatgcaggggttcgatcactatcgcgccatgtcgcaggagggggtggccgccagtcaggcggatctggtggtgatctccgcggatggtctcaaagggatgggcggcgaagccgggctgtggaaactgcccggcctggcgcagaccccggcagggcgtcataaacagctgctgacgatcgacgacatggccctgctcggcttcgggccgcgcacgccgcaggcgataatcgccctgcggaacaaagcggagcagttgccctga

SEQ ID NO: 218451 - DNA, 378 bp, Klebsiella pneumoniae
atgaatccttatctgcaggaagtccttgatgcccatgttcttatcgaacgctggttaggtcagggagaaggaagcgcgcaggcgctgatgacacgttttgccgccgaattcaccatgatccccctgagcggcgagaagatggatcacccgacggtgagccactttttccaccacgccggcggcagccgtccggggttacacatcgtcgtggatcggatggcaatcatcagcgagtggcacgacggcgccgcagtgctataccgtgaaagccaaacgctggcggatggcagtaaaaatgtacgctggtcgacggcggtttttcagcaagcggaagggaaaattgtctggcgccatctgcaggagacccgcctcggctag

SEQ ID NO: 218452 - DNA, 909 bp, Klebsiella pneumoniae
atggaccaaaaacgactcactcacctgcggcaactggaggcggaaagcatccatattattcgtgaggtggccgccgaattttctaacccggtgatgatgtactccatcgggaaagattccagcgtaatgctgcatctggcgcgcaaagcgttttatccgggaaccctgccgttcccgctgctgcacgtcgataccggctggaaattccgtgagatgtacgagttccgcgaccgtaccgccaaagcctacggctgtgagctgctggtgcataaaaacccggaaggggtggcgatgggcatcaacccgttcgttcacggcagcgccaagcataccgatatcatgaaaaccgaaggcctgaagcaggcgctgaacaaatacggctttgacgccgcgttcggcggcgcgcgtcgcgacgaagagaaatcccgcgcgaaagagcgcatctactccttccgcgaccgcttccatcgctgggacccgaaaaatcagcgtccggagctgtggcacaactacaacggccagattaacaaaggggaaagcatccgcgtcttcccgctctccaactggactgagctggatatctggcagtacatctatctggaaaatattgaaatcgtgccgctgtatctggccgctgagcgcccggtgctggagcgcgacggtatgctgatgatgatcgatgacgaccgtatcgatctgcagccgggcgaagtgattgaaaaacggatggtgcgtttccgtaccctcggctgctggccgctgaccggcgcggtggagtctgaagcgcagacgctgccggaaattattgaagagatgctggtatcgaccaccagcgaacgtcaggggcgcgtcattgaccgcgaccaggccggctcgatggagctgaagaaacgtcaggggtatttctaa

SEQ ID NO: 218453 - DNA, 1416 bp, Klebsiella pneumoniae
gtggattacttgcctctttttgccgaactgaaacaaaggcccgtgctggtgatcggcggcggcgagattgcggaacgcaagattaagttcctgctgcgcgcccaggcacaggtacaggtggtcgccgggacgctgtctccggcgctggccgacctggcggcgcgccaggcgctcagctggcgagcgacggaatttagcgactcgctggtggatgatgtctttctggtaattgcggccacggaggatgaggcgcttaaccagcgggtgtttgcggcggctaatgcgcgctaccggctggtcaacgtggtggataaccaggcgctgtgctcgtttgttttcccttctatcgtcgaccgttcgccgctgctggtggcgatctcctccagcggtaaagcgccggtactgtcgcgcatactgcgcgaaaaaatcgaagcgctgctgccgacgaacctcggacggctggcggaatcggcgagctactggcgcaaccatctgaaaacccgcctgacgaccaccgaagcgcgtcgccgcttctgggagcgcgtctttaccggccgcttcgccagcctgatggtggcgggcaatcatgcggaggcggaaaaggcgctgcaggatgagctggataagcccgaacgtgagacaggagagattattctggtcggcgccgggccgggcgatgccgggctgctgacccttcgcggtctgcaggcgctccagcaggcggacgtggttttccacgaccatctggtgactcagccggttctcgagctggtgcgccgtgatgccgagctgatctgcgtcggcaaacgcgccggcgagcactcggtgccgcagcatgaaactaatcagctgctggtggatgccgccaaagcggggaaaaccgtcgtgcgtctgaagggcggcgatccgtttatttttggccgcggcgcagaagagctgcaggctgccgccgaggcggggatcccgtttcaggtggtgccgggcgtcaccgccgccgccggagcgacggcctacgccggtattccgctgacccaccgcgactatgcgcaaagcgccgtctttgtcaccggccactataagcccgacagtacgccgttcgactgggcgctgctggcgaagagccaacaaacgctggcgatctacatgggcaccatgaaggcggcggaaatcagcgcgcagctgatcgcccacggccgcgacagcaacacgccggtcgcggtgatctcccgcggtacccgcgacgatcagcagacgataaccggcacattgcaacaactcgaacacctggcgaaagacgcccccatgcctgccctgctggtggtcggcgaagtggtgcagctgcatcagcagctcgcctggtttcaacatacatcatccgccgaggggtttaacgcttcggtggtcaatctggcttaa

SEQ ID NO: 218454 - DNA, 1056 bp, Klebsiella pneumoniae
atgttttccgcgttgtgccgccgcctgcttccgctggcgctcggcaccggttttgttttcgccgccgcccccgcattcagcgcgctgggcgataccgccagtagccaggcccgccatatcgccaccgtcttcccgggacgaatgaccggaacaccagccgagatgttgtcagccgagtacctccgccagcagttcgcccagatggggtatcagagcgacgtgcgcagcttcaatacccgctacatctataccgataacaatcagcgtaagaactggcataacgccaccggcagtacggtgatcgccgcccatgaaggccagtcccgccagcaaatcattattatggcgcatctcgatacctacgcgccgcagagcgataaagacgtggagaacaaccttggcggcctgacgctgcagggaatcgacgacaacgcgatggggctcggcgtgatgctggagctggcggatcatttaaagaatatccccacccgctatggcattcgctttatcgccaccagcggtgaagaggaaggtcgtctcggggcgcaaaatctgctgcagcgcatgagtgaggcggaaaagaaaaataccctgctggtgatcaacctcgataatctggtggtgggcgataagctttacttcaacagtggccgccgcacgccggcctcggtgcgcaagcttacccgcgaccgcgcgctggctatcgcccgcagcaagggcattgccgcctataccaatccaggactgaatccggattacccgaaaggcaccagctgctgcaatgacgccagcgtctttgacaacgccgggatcccggtgctgtcggtcgaggcgactaactggtcactcggcaaaaaagatggctatcaacagcggcagaaatcccgcgccttcccggacggtaacagctggcacaacgtgcagcttgataatcagcagtatctcgacaacgcgctgccggggcgcatagaccgccgcagccgcgaggtagtgaaagtgatgctgccgctggtgaaagagctggcgaaggtggagaagccatcgtcattaaaataa

SEQ ID NO: 218455 - DNA, 1188 bp, Klebsiella pneumoniae
atgatcaatttacgctgttcaggcattttttttctgctgctggctgtcagcgcgggcgccctcgccgacagccaggtttatatctggcagcgggtctggaatgaccagcataagaccgcgctacagcaaagccaggcgctgttttccaccttgcgcgttctggggatccagtttcatcctcaggaaggcgtccgcctggcccgcgtggatacttccttattaaagcaggacggccgtccggtgtggctggtcgtccgtctcgatggcagcctgacgcagcttgatgccgccacaatactgccgccgatccagcgcctggtggcccactggcgtgcggcgggcgttaatctcagcgccattgaaatcgattatgatgctcccacagggcggctctccgattatcaacgtctcctgatgaccttgcgccaggggctgccttcagatattacgctcagcatcacggcgctcccgacctggctcacctcccccggactgcgtcctttgctgaaagcggtagatagctccgtattgcaacttcatagcgtgcaatccccggggaccggcttgttcgacccgacactggcccggcgctggagcaggcaatatgcgcttatcgctcctcaccctttttacctcgcgctcccggcctatggttccgcgctcatcactgccccgggacagcccgccagcgttgaaagcgagtcaccgctgtggattgcggctgaaaaacaagaactgagcgtttcaccgcagcaaatcgacacgtttattcgcgaactggaacaacagccgccgcatcatttttcaggtatcgtctggtttcgtctgcctctggataacgatacccgcgcctggtcgctcagcacgctgtcggccgtcatccgccatcagccgttaacctcccgctggcagtggctggcgcttcccgataaggccagcgccagcgtagagtctacgctctacgaactggcgattaaaaacacaggcaatattgactccccactcccggcgaaaattacgctaaccacggaagattgtctggccgccgacggcgtcggaagctaccgctttagcgaacaaacgttttccctcaccgcccctgcgctgttgcgcgccgggcggacgcaagccattggttgggcaagatgctcaacgccaccacaaggaaagtttcatgttaacccgtaa

SEQ ID NO: 218456 - DNA, 2022 bp, Klebsiella pneumoniae
atgttaacccgtaaattacctctggccgccttcctggcggcgacgtttgtcgctgccagcagccacgcctgtgggccgtttttccccaactacttgttagcagatcgccaggccaatctgctgtacctgccggaggggagctttgctttggagagcagccgcctggtgcctgccgacccacgacttccacaatggcgtgatacttctgccgacaagcctgcagcccctactgtgcaggaccttttgctcaaagagatccgcgccagcggttcgttagccgccgcggaaaaaatggccgccgatcttccgaccgccagccgcctgtacgtgctcggcgcagtggcatttactgaacgcgatagccgggcgcgcgactattttcgccagcttttggccttgcccgtggaacaacagggcgagtgggggcttaaggcgcgttattcgctggcccgcgatttgatgcgtgattatccgcttgctgacagtcgttcttctcacggtagtgagcaggagttgcgcgaagccttcgatctctaccagcagatcattgacgccgttcgtgaaggtcagcaggatccggagctgctctcgctggcaagtcttggccagcagggacgtatcaaacactggcaaagcgaccccattgccgcggcccatctttatgcccggcaagcggcgcagggctcacccagtggtagcctctccttacgctacactgtcgacgtcctcaaccacccggaaaacgaacagttcctgcaacccggcctggacgatccggttattcagcaactgctgattgcgagcttttttactcgttcgtccaattccttgtacgagccgaaaccgcggccctttgatccgacagagatcaaaaattaccataatgagttaatagcgaagctggcgcagaaagtcgatcgcgatatgcccggtagcgaccgcctgatcgccctcgcctatcgtaacggccaatatccgctggtgacgctgatgttgaaaaacgccaaagaaaatgggctcaccgcctgggtaagggccaaaatggcgctgcgggccggtgatgtcaacgcggcagcggcatggtacgccaaagccgcggcgtcattcccgccaaatgaaacctggggtttccagtcctatagtgatgacattgtcggcgaggagtttgttacgccggtctgccgtattcacgccgagcaggcgatactcgcgctcaaccgcgacgactatctgcaggcaatgcggctgatgtatcaggcgaaagaaaattactggccagatgtggcgcacattgccgaacgagtgctcacggtcaatgaactccttgctttcgtggataaatatgtcccggcaccttctccttcagcccctactacgccgaaaaatgccgggcgcgatagcgctgacgccaggctacgcaacctgctcgcccgacgcctgatgcgcacgggccagtatcaaaaagcgctggcctattttgcgctgaacgcggatcgagacgccgcccgggcgtttatcgatgccttgccgacaacgggtaacaaaaccgcccgggcgcagggctggtggcaagcagcgcttatcctgcgtcatcagggaatggaattgtctggctatgagatggcgcccgattttacgctgtatggtggcgggtattcatggccctattacaaccgggggcctgaagatgattcggccgtgacatcgtggataagtgatggcgaacgacaacgcgttcagcgatccctgccaaaacaggacagtcatttcttacactatcgctggcaggcggtgacgctggcggaaaaagcggccgacctgttgccatataaatcacaggcctatgctgccgtgctgtgtaatgcaacaggatgggtatgggggcgggatgctcaattaaccaaacgcctgtatcagcgctatgttaaatacggcgccccatacccatgggccgaaaattttggtcgggattgcccggagccggattttagcgcgatccaggagacggtgaaaaagcagtga

SEQ ID NO: 218457 - DNA, 294 bp, Klebsiella pneumoniae
atgagtatgcttatggtggtgacggaaaatgtccctcctcgtctgcgggggcggctcgccatctggctgctggaggttcgagcgggagtctacgttggcgatacctcaaagcggatccgggaaatgatctggcagcaggtgatacagctaagtgacggtggaaatgtcgtgatggcctgggcgacaaacagtgaatcaggtttcgagttccaaacttggggtgagaaccgccgtataccggtagatttagatggcctacgactggtttcatttcttcccattgaaaatcaatga

SEQ ID NO: 218458 - DNA, 921 bp, Klebsiella pneumoniae
gtgacctttgtgccgctaaatcccatcccgctaaaagatcgcacgtcgatgatctttctccagtacgggcagatcgatgtgctggatggcgcatttgtgttgatcgacaaaaccgggatccgtacccatatcccggtagggtcggtagcctgcattatgctggagccgggaacgcgggtttctcatgcggcagtgcgtctggcctcgaccgtcggaacgctgctggtgtgggtgggggaagcgggcgtgcgggtttactcctctggccagcccggcggcgcgcgggccgacaaactgttgtaccaggctaagctggcgctggatgacgatttgcggctgaaggtggtgcgcaaaatgtatgaactgcgttttcgcgaggcgccgcccgcgcgtcgttctgtggagcagctgcgcggcattgaaggatcccgcgttcgccaaacctacgctctgttggcgaaacgctacggcgtgaaatggcacgggcgcaattatgatccgaaagactgggccaaaggggatatcgtcaaccagtgcatcagcgtggcgacgtcgtgtctgtatggcatttcagaggcggcgatactggcggcaggctatgcgcccgccatcggttttatccacagcggtaagccgctttcgttcgtttatgatattgctgacattattaaattcgatgccgtggtgccaaaggcatttgagatagccgcgcgtcatcctgctgaaccggataaagaagtcaggctggcctgtcgcgatattttccgcagcacaaagctgacaggaaaattgattccgttgattgaagaggtgttgtcggcaggcgaaatcgaaccgcctcaaccaccgccggatatgctgccgccggcgatccctgagcctgaatcaatgggggatagcgggcatcgagggcatggctga

SEQ ID NO: 218459 - DNA, 651 bp, Klebsiella pneumoniae
gtgtacctctcaagaataacgttgtataccgcgcagctttcgccattacggctcttgcacctggtggaacgcggtgaatatgtcatgcatcagtggttgtggcagctttttccaggcgggcaacagcggcagtttctctatcggcgcgaagcgctgcagggcgcatttcgctttttcgttttgtcaccacagctgcctgctgagagcgagacttttgagatccaaagccgttcgtttaatcccgaactgcgggctggccagagattatgttttagcctgcgggcaaatccaacgatttgtaaagccggcaagcgccacgatctgctgatggatgctaagcgccaggttaaagagcatgttgaacctcgggatatctgggcgcatcagcagcaggctgcgctggcctggttaacgcggcaaggtgaacaaagcgggttttctttagcggagaccgtggtggatgcttatcgtcagcagcagatacggcgcgaaaaatcgcgccagaccattcagttcagcagtgtggattacaccggcatgttggtggtgaacgatcccgcgctgtttttgcagcgtctggcgtcgggatacggtaaaagccgggcttttggctgtggaatgatgatgatcaaacccggagacggcgagtga

SEQ ID NO: 218460 - DNA, 747 bp, Klebsiella pneumoniae
atgagccaatatctggtttttcagcttcatggtccgatggcgtcgtggggcgtggacgcccccggcgaggtccgtcatagccatgagctaccctcccgttcagcattgctggggctgctggcggcggcattagggatccgccgtgaagaagaacagcggttaaacgccttcaaccagcattactcctttttgctctgcgccagcagcgaaccgcgctgggcgagggattatcatactgtacagatgccgaaagaagtgcgtaaggcgcgctatttcagtcgccgcgaagagttacaggatcctgagctactcagcgcgctgatctcccggcgcgattattataccgatgcctggtggatggtggcggtggcggtcacgcctgatgcgccttactcgctggagcagttgcacgaggcgctacgttacccggtatttccgctgtatctgggacgcaaaagtcatccgctggcgctgccgttaatgccgctgctgcttgaaggccacgccgcagaggtacttcgccaggcttatcgccagtatcaggataaatttaacctgctgaggctttctctgcgacagctgcaggatcaatgctggtgggagggtgagcatgctggtttattcgccaataaaatactgcggcgccgcgactgtccgcttaaccgccagcattggctgtttggcgagcgctccatgaatcagggaacctggctcagtaaggaggaaacgtgtacctctcaagaataa

SEQ ID NO: 218461 - DNA, 1056 bp, Klebsiella pneumoniae
atgacgacttttattcagcttcacttactgactgcttaccctgccgctaacctcaaccgtgacgataccggcgcgccgaaaacggtgatgcttggaggggcgacccgtttgcgcatctcttcgcagagcctgaaacgcgcatggcgtacttccgaactttttgagcaagcgctggccggccatattggcatccgcagcggccgcatcgcccgcgaagccgcggaaattctggtgaagagcgggattgaaccaaagaaagcggtggattacgtcaaagctattggcgaatgctttggcaaagttaaaactaaagcggatcaaaacgatccgctgaagtgttcggaaacggaacagctggcgcacattagccccgcagagtttgacgccgtgaaagcgctggcgcaccgcctggcggaagaaaaacgtgcggccacgaaagaagaagcagcgctgctgcgccacgaccgcatggcggtagatatcgcgatgtttggccgcatgctggcggaccaaccgacctataacgttgaagctgcctgccaggtggcgcacgcttttggcgttagcgaaacccttgttgaggacgatttcttcacggcggtggatgacttacgcgcagcctctgaagacgctggcgcaggccacttaggggaaacgggttttggctcggcgctgttttatacctatatctgcattgataaagatctgctggtgaacaacctcaacggtaatgaagaactggcgaacaaaacgctgcgcgcgttcgccgaagcggcgctaaaagtctctccaaccggcaaacagaacagcttcgccagccgcgcctacgcgtcctgggcgctggcggaaaaaggcaccgatcaaccgcgctcactggcggcggcattttatcagcccattaatggcggcgatcagctggatgtcgcggtacagcggattactgcgctgcgggaaaatatgaataccgtctacgggcagcagacggcatttcagcactttgacgtgatgaataagcagggaagcatgaatgacgtgcttgatttcatctgcgcgtaa

SEQ ID NO: 218462 - DNA, 543 bp, Klebsiella pneumoniae
atgaatgttgtaagtgatgaacataaggccacgctgcgccaatggcatgaagagctgcaggagaagcgtggtctgcgggccagcctccggcgtagcgcgacgctgaacgatgtctgcctgtcggaaggctttcactccctgatggtgcaaacacattctctgtggaacacccaggggaaggcgtggcgttttaccgcgctggcgctggtagcggcgctggcggcgcaggtgaaaacgattgatgaccgccagacgttcgccgctcagctggggcagaaaacgggcgataccccggtgatgtcgagactgaggtttgcccggctttcggcggtcaaaacccccgatgagctgctgcgccagctgcgtcgagcaataagcctgctccacggttcagtgaatctcttgtcgctggcggaagatatctttcgctggtgtcgtgagcaagacgatttactgaatcaccgccgccgtcagcagcggccaatcgaatttatccgtatccgctgggcgctggactattaccaggccggcgatgccgaatga

SEQ ID NO: 218463 - DNA, 1557 bp, Klebsiella pneumoniae
atgaatactttctctcttttaactactgcctggcttccggtccgttaccgcgatggtacaacgggcaagctggcgccggttgggctgacggatgaggacgtggtggatattgccgccacgcgagcagatttacagggtgccgcctggcaatttctgattgggctgttgcagtgcgctgttgcccccaaaaaccgcaatggctgggaagatacctgggacgcggggctaagcgcagagacgctcgttacggcattcgcgccgctggaggctgcctttcagtttggcccggatacaccgtcgtttatgcaggatttcgattcgttagcgggcgataaggtgtcgattgcttccctgttaccggaagtccccggcgcgcagaccactaaattcaataaagatcattttatcaaacgtggcgtgaccaactctttttgcccgcactgcgctgcgctggcgttgttttctttacagctgaatgcgccatcaggcggcaaaggctaccgcaccggactgcgcggcggtgggccgctgaccacgctgattgaactgcaggagtatgagggggaccgcctcacgccgctatggcgcaagctgtggctcaacgtgctgccgcaggatgccgcggatatgccgttacctgccgcttacgacgagtccgttttcccgtggcttgctccgacgcgcaccagcgagcaagccagcgccatcactaccccggagcaggtggataagctgcaggcgtactggggaatgccccgccgtatccgcctggattttgccgccactcagcaagggacctgcgacatctgcgccagcgaaagcgatgggctacttagccagatggcggtcaaaaactacggcataaactacgacggctggcgccacccgctcacgccgtatcgtctggcgctgaaaggtgacggcggcttcttttccgtcaaaccccagcccggcggccttatctggcgcgactggctggggttaagccaggataatcagacggaaagcaacagcgaatacccggcccaggtcgtgaaggtgttcaacgcacgcggtcccaggaacatcaaagccgggctgtggggatttggcgccgacttcgacaatatgaagattcgctgctggtacgaacatcatttccccctgttgacggatgaaagcacgatccccgatttacgcaaagccgcgcaaaccgccgtacgcctgctgagcctgctgcgcagcgcgctaaaagaggcatggtttgacgatcccaaaggcgcgcgcggcgactttagctttattgatatcgatttctggaaccagacccagccgcgttttttgaacctcatccacgagctggagaatggccaacccgcgcaggaacggctggacaaatggcaaagcgagttgtggttattcgttcgtcactgctttgacgatcgtgtctttaccaatccctatgaaaacaacgacctggcgcgctgcatggccgcgcgtaaaaaatatttcgccacgtcggcggaaaagcagagtgcaaaagccgccagggctaaaaagcaggaggctgcgcaatga

SEQ ID NO: 218464 - DNA, 2664 bp, Klebsiella pneumoniae
gtgtcaatttataactactggggtaaaactcgccagggagaagccggtgggggtgatgattaccatctgctgtgctggcactcccttgatgtcgccgccatgggctactgtatggtaaagcgagatatctatggtctggcggggcatttcaggcgtttagggattaatgatattgaaaacgccgcgcaattctttgcctggctattatgctggcatgatattggtaagttctctcgttcgtttcaacaactttatattcatgaagatcttattgcgcctgttgataatcgaaaagattatgaaaaaatagcgcactcaacgctcggttattggctgtggaatacccacttaagagattgtactgaattatttccagcctcatctttgccagtgcgtaatcttaaacggactattgcgatgtggatgcccttaaccactggtcatcacggacgtccaccggtggggatgcgcgatgtgggtaattttcatccatcagatatcaacgcggcgcatgattttctgttggctattaaaccgttattttcagacattgaaatcccggcttgctgggatgacgatgaaggcgttgagctgttcaatcagctgtcgtggtttatttcggctgcggtggtactggccgactggacaggctcatcgacccgcttttttccccgagtcgcccaacgaatgccgcttgatgtctactggcggcaggcaaacgtgctggcagaacaggcagtgaatgtttttcctcctgctgcggctgttgcgccatttacgggaatagagacattgtttccttttatccagcacccaacgccgcttcagaaggcggtacttgagctggatatcagccagccgggaccgcagctgtttatccttgaagatgttaccggagcaggcaaaacggaggcggcgttaatcctgacccaccgcttgatgtccgccggaaaggcgcaagggctgttttttggtctgccgacgatggcgacggccaatgccatgttcgaccggctggcgcaatcatggctcgctttataccaggctgatgcgcgccccagcctggtgctggcgcacagcgctcgcgggttgatggagggttttaatcagcgtatctggcccggcgctgtctccggttcggaagagcctgatgacgaacagccattcagccagggctgcgcggcatggtttgccgacagcaataaaaaagcgctgctggccgaggtgggggtgggcacgcttgatcaggcgctgatggcagtcatgccctttaaacataacaacctgcggttgctgggactcgacaataaagtgctgctggccgatgagatccacgcctacgatgcctatatgtcgcggattctggaaagcctgattgagcaacaggcgcgcagcggcaactgcgttatcctgctttccgccacgctctcgcagcagcagcgcgataagttggttgcttcctttagtcgcggtagcggctgcgcgcttgcggcgccgcttctgggtaatgacgactacccctggctgacgcaggtggcgggacgagaggttatctcccgctatgtcgccacccgcaaagaggtcgagcgcagcgtgaacatcggctggctggataacgaagaagcctgcctcgcccgtatcgaacaatccgccagcgaaggccgctgtatcgcctggatacgcaattccattgacgatgccgtgcgtatctatcgccaactactgtcccgaggcgcgatccccgccgaaaaaatttcgttattccatagccgcttcgccttttatgaccgtcagcgaattgagaaagaaaccctgtcgcactttggcaaggacgacagcacgcagcgggcgggtagggtgctgattgccactcaggtcatagagcagagcctcgatatcgatatggacgacatgatctctgatttagcgcctatcgacctgttgattcagcgcgcaggtcggcttcaacgccatatccgcgatcgtcacggtcggctgaacgtcggcggagaggacgagcgggcggcgccacagttaatgatccttgccccggaatgggatgaggcgccacaagaagagtggctgaccagcacaatgcacaacagcgcttacgtctatcccgatcacggccgtctgtggctgacgcagcgcgttttgcgacagcagggggccatccggatgccgcaatctgcccgattattgattgaattcgtctacggggaagatatcgctattcccgatgggttagccaaagccgagcaagcgcagttggcaaaatattactgcgatcgcgcgtttgccaaccaaatgctcctgaacttcaagccgggatatagccccgatagcagtgatttcctggctgacaagctctctactcgcctggcagaagagtcggtcacgctgtggctggcgaaaagcgtcgatgggcagctgctgccttacgccagcggcgcgcatccgtgggaaatgagcatgctgcgggtgcgggaaagctggtggcgtaaacacaaagctgaattcacgcttctggctgaaaagccgctgcagcagtggtgtgtacaacagcatcaaaacccggatttcgccgtggtgattattgttacagattcgccggactgcggttattcggccagtgaaggattaatcggaacaatggaggtctag

SEQ ID NO: 218465 - DNA, 735 bp, Klebsiella pneumoniae
atgtccgtactcgatctaaacgcgcttaatgcattgccgaaagttgaacgcatcctggcgctggcggagaccaatgcgacgctggagaagctcagcgccgaagaacgcgtcgcgtgggcactggaaaatctgcctggcgagtatgctttatcttccagctttggcattcaggcggcggtgagtctgcacctggtcaaccagctgcgcccggatattccggtgatcctcaccgataccggctatctgtttccggaaacctatcagtttattgacgagctgacggacaagctcaaactgaacctgaaagtctaccgcgcggcggaaagcgcggcctggcaggaggcgcgctacggcaagctgtgggagcagggcgttgagggcattgagaaatacaatgagatcaacaaagtcgagccgatgaaccgggcgctgaaagagctcaacacccagacctggttcgccggtctgcgccgcgagcagtcaggcagccgggctacgcttccggtgctggcggtccagcgcggggtgttcaaggtgctgccgatcatcgactgggacaaccggacggtgtatcagtatctgcaaaaacacgggctgaagtaccatccgctgtgggatcagggctatctgtcggtaggcgatacccacaccacccgcaaatgggagccaggcatggcagaagaagagacccggttctttggccttaaacgcgagtgcgggttgcacgagggttaa

SEQ ID NO: 218466 - DNA, 1713 bp, Klebsiella pneumoniae
atgagcgaaaaacatccggggcctttagtggtcgaaggtaaactgaccgatgccgagcgcatgaagctcgagagcaactacctgcgcggcaccattgcggaagatttaaacgacggtctgaccggcggttttaaaggcgacaacttcctgctgatccgtttccacggcatgtaccagcaggacgatcgcgatatccgcgcggagcgcgccgcccagaagctggagccgcgtcatgcgatgctgctgcgctgccgtctgccgggcggagtgatcaccaccacccagtggaaggcgatcgataagtttgccgcggacaacaccatttacggcagtattcgcctgactaaccggcagaccttccagttccacggtattctgaaaaagaacgtgaagccggtacatcagatgctgcactcggtggggctggacgcgctggccaccgccaacgatatgaaccgtaacgtgctgtgcacctccaacccgtacgaatcgcagctgcacgctgaggcctacgagtgggcgaaaaagatctccgagcatctgctgccgcgtacccgcgcttatgccgagatctggctggatcagaaaaaggtcgctactaccgacgaagagccgatcctcggtcagacctatctgccgcgtaagtttaaaaccacggtggtgatcccgccgcagaacgatatcgatctgcacgccaacgacatgaactttgtggcgatcgccgaaaacggcaagctggtgggctttaacctgctggtgggcggcggcctctctatcgaacacggcaacaagaaaacctacgcccgcacggcgagcgaatttggttatctgccgctggagcatacgctggcggtggcagaagcggtcgtgactactcagcgtgactggggcaaccgtaccgaccgtaagaatgcgaaaaccaagtacacccttgagcgcgtcggtgttgaaaccttcaaggcggaagtggagcgtcgggcagggattaagtttgagccaatccgcccgtacgaattcaccggccgcggcgaccgcatcggttgggtgaagggcattgatgataaatggcacctgacgctgtttattgaaaacggccgcatcctcgattatccgggccgcccgctgaagactggcctgctggagattgctaagatccatcaaggcgaattccgcatcaccgccaaccagaacctgatcgtcgccagcgtaccggaagatcagaaggcgcggatcgagaagctggcgcgggatcatggcctgatgaatgccgtcaccccgcagcgtgaaaactcaatggcctgcgtctccttcccgacctgcccgctggcgatggcggaagccgagcgtttcctgccgtcgtttatcgacaaagtggaagaggtaatgagcaagcacggcgtgagcgatgagcatatcgtcacccgcgtcaccggctgcccgaacggctgcggccgcgcgatgctggcggaagtggggctggtgggcaaagcgccgggtcgctacaacctgcaccttggcggtaaccgcagcggcacccgcatcccgcggatgtaccgtgagaatattaccgagtcggaaattctcgactcgctggacgaactggtagggcgctgggcgaaagagcgtgaagcgggtgaaggcttcggcgactttacggtgcgtgcgggcatcattcgcccggtgctcgacccagcccgcgatttctgggaataa

SEQ ID NO: 218467 - DNA, 1800 bp, Klebsiella pneumoniae
atgacgacacaggccccaccttccaatttgctgccgctcaacccggagcaactggcgcgcctacaggcggccaccactgacttcacgcccactcagctcgcctgggtgtctggttatttctggggcgtgctgaatcagcagtccggcgcggcagtagccgcttccgccccggccgccgaagtgccgacgatcacgctgatttccgcctcgcaaaccggtaacgcccgccgcgtcgccgaagcgttgcgtgacgatctgctggcagcgaagctgaacgtgaagctggtgaatgcaggcgattataaattcaaacaaattgctgctgaaaaactgctggtggtggtgacctccactcagggggaaggcgagccgccggaagaagccgtcgcattgcataagttcctgttctcgaaaaaagcgccgaaactggacgggaccgcgttcgccgtctttggcctcggcgatacttcttatgaattcttctgccagtccggcaaagatttcgacaacaagctggccgagctcggcgcggaacgcctgctcgatcgcgtcgacgccgacgttgaatatcaggccgcggccgcggaatggcgcgcgcgcgtggttgaggtgctgaaggcgcgtgcgccggttgcggcacctgcgcagctggccaccagcggcgcagtgaatgatattcacaccagcccatataccaaagaagcgcccctgacggcgaccctgtcggtcaaccagaaaatcaccgggcgtgattcagaaaaagatgtacgccatatcgagattgaccttggtgattccggtctgcgctaccagccgggcgacgcgctgggcgtctggtaccagaacgatcctcagctggtcaaagagctggtggaactgctgtggctcaagggcgacgagccggtcaccgttgagggtaaaaccctgccgctggcggaagccctgcagtggcattttgagctgacggtcaacaccgccactatcgtcgagaactacgccactctgacccgcagcgagtcgctgctgccgctggtgggcgataaagctcagctgcagcagtatgccgccgcgacgccgatcgtcgatatggttcgtttctccccggcgcagctggacgccgaagcgttaatcggtctgctgcgcccgctgacgccgcgcctgtactccattgcctcctcgcaggcggaagtggagagtgaagtgcatgtcaccgtgggcgtggtgcgctatgaaattgaaggccgcgcccgggctggcggcgcctccagcttcctcgccgatcgcgtggaagaggatggcgaagtccgcgtctttatcgaacataatgataacttccggctgccggctaacccggagacgccggtgatcatgattggcccgggcaccggtattgcaccgttccgcgcctttatgcaacagcgcgctgcggacggagcgcaaggcaagaactggttgttcttcggcaacctgcacttcaccgaagatttcctctatcaggtggagtggcagagctatgtgaaggaaggtctgctgacccgtatcgatctggcctggtcgcgcgatcaacaacaaaaagtctatgtacaggacaaactgcgcgagcagggggccgagctgtggcgctggctcaatgacggcgcccacatttatgtctgcggcgacgccaatcgtatggcgaaagacgtggagcatacgttactggaagtgattgccgaatacggcgcgatggacgccgaagcggcggacgaatttttaagtgagctgcgcgttgagcgccgttatcagcgagatgtctactaa

SEQ ID NO: 218468 - DNA, 366 bp, Klebsiella pneumoniae
atgatgtccaccacgctgtttaaagatttcaccttcgaagccgcccaccacctgccgcacgtcccgcagggacacaaatgcggtcgcctgcatggccactcctttatggtgcgtctggagatcaccggtgaagtcgatccccataccgggtggatcatggatttcgccgagctgaaagccgcgtttaaaccgacctacgatcgtttagaccactattacctgaacgatattccaggactggagaaccctaccagcgaagtgctggccaaatggatttgggatcaaatgaaaccgcaggtgccgctgctgagcgcggtgatggtcaaagagacctgcaccgccggctgcgtctatcgcggcgagtga

SEQ ID NO: 218469 - DNA, 1272 bp, Klebsiella pneumoniae
atggcagacgattttgatattataattatcggtgcaggaatagcgggcaccgcctgtgctttacgctgcgcgcgggccgggctttccgttctgctgcttgaacgcggcgaacttcccggcagtaaaaatctatcgggagggcggctgtattgccatgcgctcgccgaactccttcctcattttcaacgctccgcaccgcttgaacgccgcatcacccacgaaagtctggccctgttaaccgaccatggcgccacgatgtactccagcctgcagcccaacggcgattcctggagtgtactacgcgcccgctttgacccatggtttgtcagccaggccgaagccgaaggcgtccagtgtattaccggcgcgacggtggaggcgctgcatcgtgaaaataaccgtgtttgcggtgtgatttgcgataaagacatcctgcgcgcccgctacgtggtggtggctgaaggggcgaacagcgtgctggccgagcgtgagggtttacttccccgtccgtccccctccgccatggcgttgggcattaaagcggtcctgtcgctggagcaaaaaacgctggaggatcgcttccatcttacggataacgaaggtgccgcgatgcttttcaccggcggcgtttgcggagatctccccggcggcgcattcctctataccaatcaggataccctctcattcggtatcgtgtgcccgctcgcttcgctgggaaaagggcccatcccggccgccgatctgctggaacatctcaaagcacacccggccctgcggccactgctgcgcggcagtgaaaccctggagtatggcgcacatctggtgcctgaaggcggcctgcatagcatgcccgaacagtatgcaggagaaggctggctgctggttggcgacgccctgcgtacctgtataaataccggttttaccgtgcgcggcatggatatggcgctaatcggcgcgcagtcggcggcgcaaaccttgattcgggcctgccagcaaagcgcgccgcaagacttgtttccacagtatcgccaggagattgagcgcagtctgctgtgggaggttcttcagcgctaccagcacatacccgcgctattacaacgccccggctggtatcgccgttggccggcgttgatggcggatatctcccgcgaactgtggcaacagggtgagcgccccgttccacccctgcgccaggtagtctggcgtcatcttcgccgtcacggcctgcgccctctggcaggcgatctgctcaggagtttacgatgtctgtag

SEQ ID NO: 218470 - DNA, 261 bp, Klebsiella pneumoniae
atgtctgtagcccgcaacgtctggcgccctgccgacagcgcacatattgttccgtccacatcgccgaacgaggaaatcgctgaactcctcgtcaaagcctgccccgccgggctctttacgcgaacagccgaaggcgagttgcgtgtcgactaccgcggctgtctggagtgtggcacctgtcgactgctctgtgatgaagcaacgctgaaagaatggcgctatcctgagtctggatttggtattacattccgctttgggtaa

SEQ ID NO: 218471 - DNA, 576 bp, Klebsiella pneumoniae
atgcccctgctccacctgctaaaacaaaatccggttattgccgccgtgaaagataacgccagcctgcaattagccatcgattccgagtgccagtttatctccgtgctgtatggcaatatctgcaccatcagcaacatcgtaaaaaaaatcaaaaatgccggtaagtacgcgtttattcacgtcgacctgctggagggagcgtccaataaagagatcgtcattcagtttttaaagctggttaccgaagcggacggcatcatcagcaccaaagcgccgatgctcaaagcggccagagcggaagggtttttctgcattcatcgcctgtttatcgtcgactccatctcttttcacaatattgacaagcaggtggcgcaatcgaatccagactgcgttgaaatccttcccggctgtatgccgaaggtactgggctgggtcacggagaaaattcgccagccgctgatcgccggtgggctggtctgtgacgaagaagatgcgcgcaatgcaatgaacgccggcgtggcggcactgtcgaccaccaacaccgcagtctggaaattagcgaagcagcttagttga

SEQ ID NO: 218472 - DNA, 858 bp, Klebsiella pneumoniae
atgaagatagcgatggtaatggcgagcggcgatagcgcagcgatgaatcaccggctgatgagcgccaacctcgcagcggcagagctggagtgctggattatcgatggcgaaccggcggtggctgaaccggtcctcgctgcgctggctacccagtggcagcaaacaccggttgatatgttgctgttttctccgggaatggccggtgatgagctggcgacacggctggcctggcgtctgcagggagggagcgtatgtcaggtgctgtcagtgaatacgcaggaaggttgggtcacgaagtcgcattgggggaatgcgttaatagcgacgctggacgtggcggccaggccactttgcctgtccctggcgcgccagccaggggttactatctccgccgctcttccggacaaactgccggtacgctacctcctcgtaccggcagcccggcctgactggctggccagcgttgaaaacctcgaacattctggcggccatcctctgcaggcagcaactcaggtgctggttgtcgggcagggggaaccgcatatcaatgctgacggcatcgcggcgctggcgcgacgtctcggaatggaggttggctatagccgcgcgcgagtgatgaatggcggttatgatgtggaacgtctgattggtatatcaggtcatctgctggcgccggatgtctgcatcgtggcgggagcatcaggcgcggcggcgctgatgacgggagtcagagatagccggtttattgtggcgattaatcgtgacgccagcgcaccggtatttgcccaggcggatgtcggcattgtcgatgactggccgacagtacttgaagcgctggtcgcctgtgcagagacataa

SEQ ID NO: 218473 - DNA, 783 bp, Klebsiella pneumoniae
atgaacattctattggcgtttaaagccgagccggacgctggcatgctggcggaaaaggactggcaggccgctacgcaggatctctgcgggccagatgtttcgctattgcgctgcgccatcggtgccgatgagcaggccgccgccgcgctgctgctggcccagcgtaatgcgggctgtgagatgacgttgaccgcattaagcattggcgatgaacgcgcgctgcactggctacgctactttgctgcgttaggttttgagcagccggttctgctggaagccgcgggggatttacgttttgcaccggcgtttattgcccgacacattgtcgactggcagcgtcaatacgctcatgaactgattgtaaccggctgtcagagtgctgaaggacagaatagccagacaccgtttttgctggcggaaatgctgaactggccttgttttactcaggttgaacgattcactcttgagccaccttttgttgttgtcgagcagcggacgacatcgggtatccggcgctgtcgggttcggttaccggcggtgatcgcggtcaggcagtgtggcgacgtcgcgctgccggttcccggtatgcgccagcgtctggcggcggcaaaggcggaaatagtacgccaggaggtggctttagacgcgacgccggccatcaagtgcgtgcgtctgacccgccctgaacagcggcgcaatgcggtgatcatcgacggggcaacggcgcaggcgaaagcgaggtcgctatgggagaactatctgcgggagaggatgcagccatga

SEQ ID NO: 218474 - DNA, 1350 bp, Klebsiella pneumoniae
atgaacacttcaccggtgcgaatggatgatttaccgctcaacggttttcactgccgtattgccgcgctgactttcggcgcgcatctggttgatggttatgtcctcggcgttattggttacgccatcattcaactgacccccgccatgcagctgacgccgttaatggcgggcatgattggcggtgcggcgctgctggggctttttatcggcagcctcattctgggctgggtttcggatcacattggtcggcagaaaattttcaattttagttttatgttgattaccgtcgcttcatttctgcagtttttcgctaccacacccgaacagctcattggcttacgcatactgatagggattggcctggggggcgattactccgtgggccacacgctgctggctgaatttgcaccacgccgacatagagggattttgctcggcgcattcagcgtggtgtggaccgttggttatgtgctggcaagtctggctggtcatcattttattagcgaaaacccggatgcctggcgatggttgctggcctcgtcggctttgccggcgctactgatcacactgctgcgctggggaacgcctgaatcgccgcgctggctaatgcgtcagggaaggtttgccgaagcgcatgccgtggtgcatcgctgttttggtatgcacgtacaattgggtgatgaagtaacaaaagaaacgaataaacagatcagcaccctgttctcatcgcgctactggcggcgcaccgcatttaatagcatcttttttgtctgtctggtcattccctggtttgttatttacacctggcttccgactatcgctgagaccattggcctcgaagacgcgcttaccgccagcctgctgctgaacgcgctactgatcgtgggtgcgctgttgggcctggttttaactcatctgctggcccatcgccatttcttattaggcagctttctgctgcttgcggcgactttactcgtgatggcttgcttacctcctggtagtcactggacgctgctgctttttgttctgttcagcaccacgatttcggccgtcagcaatctggtggggatcttaccggcggaaagcttccccaccgacattcgttcgctgggcgtgggatttgccactgccatgagccgtctcggcgccgcgatcagcactggcctgctgccctggatccttgcgcagtgggggatgaccgtcaccctactgcttttgtcgggcatattactgatgggcttcacggtgacctggctatgggcgccagagactaaagcgctgccgctggtggcggccggaagtggagataaaagacaaggaggtaccaatgaacattctattggcgtttaa

SEQ ID NO: 218475 - DNA, 1455 bp, Klebsiella pneumoniae
atgtctttatcccgtgaagcaattgttgaccagttaaaagaaattgtcggtgttgaccgcgttattactgatgaaacagttttaaaacgaaacagcatcgaccgctttcgtaaatatgctgatattcatggcgtctttactttgccgttgcctgcagcggtcgttaagttaggttccaccgaagacgtttctaacgtgttggcgtttatgaaccagcataagatcaatggggttcctcgcactggcgcatcggcaaccgaaggtggcctggaaaccgtggttgagaattccgtggtgctggacggtgccgggatgaatcaaatcctgaatatcgatattgaaaacatgcaggcaaccgcgcagtgcggcgtaccgctggaagtgctggaaaatgcgctgcgggcgaaaggttacaccaccgggcattcgccgcagtccaaaccgctggcgcaaatgggggggctggtggccacccgcagcattggtcaattctccacgctatatggcgcaattgaagacatggttgtagggcttgaggccgtgctggcggatggtaccgtcacccgcatcaaaaacgtcccgcgtcgtgccgccgggccggacattcgccacatcataatcggcaacgaaggcgcactgtgctatatcactgaagtgacagtgaaaatctttaaatataccccggagaataacctgttctacggctatatcctcgacgacatgaaggttgggttcaacatcctgcgtgaagtgatggtggaagggtatcgcccgtcaattgcccgtctgtatgatgcagaagatggtactcagcactttacgcattttgccgacggcaaatgcgtactgatctttatggcggagggcaatccgctgatcgccaaagcgaccggggagggtattgcggaaatcgtggcgcgttacccccaatgccagcgcgtggacagcaagctgatcgagaactggtttaatcacctgaactggggcccggaaaaagtggccgccgagcgcgtgcagatcctgaaaaccggcaatatgggctttacgacagaagtgtcgggctgctggagctgcatccacgaaatctatgaaagtgtgatccgccgtattcgtagcgaattcccgcacgctgacgacattaccatgctgggcggccactcctctcacagctatatcaatggtaccaacatgtactttgtgtatgactacaacgtggtcgggtgcaagccggaagaggaaattgataagtatcacaacccgctgaacaagatcatctgcgaagagacgattcgcctcggcggctccatggtacatcaccacggaattggtaaacatcgcgttcactggagcaagctggaacacggtagcgcgtggccgctgctggaagggctcaaaaagcagttcgatcccaacggtatcatgaataccggaacgatttacccgattgagaagtag

SEQ ID NO: 218476 - DNA, 786 bp, Klebsiella pneumoniae
atgtcgatcgaatctcttgatgcattctcaatgaatttcttctcactacaaggtaaaacggcgatagtcaccggggggaatagtggattagggcaggcctttgcgatggcgctggcaaaagcaggtgccaacttatttatcccaagttttgttaaggataacggcgaaaccagggaactcattgaaaagcagggtgttgaggttgaattcatgcaggtggatatcaccgaaaaaggtgcgcctggaaagattatcgctgcctgctgcgagcgtttcggtacggtggatattctggtcaataacgccgggatttgtaaactgaataaagtactggacttcggccgtgcggactgggatccgatgattgatgttaacctgacggcagctttcgaactcagttatgaagcagctaaaattatgatcccgcaaaagagtgggaagattattaatatttgctctttgttttcatttctcggcgggcaatggtctccggcttattcagcaaccaaacatgcgcttgccggtttcaccaaagcctattgcgatgagttagggcaatataatattcaggttaatggtattgctccggggtattacgcaacggatattacgttagcgacccgcagtaatcctgagacgaatcagcgggtgctggaccatattccggctaatcgttggggtgatacacaggacttaatgggggctgcaatatttttagccagtcaggcatcaaattatgttaacggtcatctgttagttgtcgatggtggttatctggtgcgttaa

SEQ ID NO: 218477 - DNA, 1299 bp, Klebsiella pneumoniae
atgcaacagacttcatatcgccgttggataacccttgccattattagctttagcggtggtgtcagctttgatcttgcctatttaagatacatctaccagattcccatggctaaatttatgggattcagcaataccgaaattggcttaattatgagcacatttggcattgccgccattattctttacgcgcccagcggcgttattgctgataaattttcccatcgcaaaatgattacttcggccatggttattaccggtcttctcggtttcttaatggcaacttatccgccgctgtgggtcatgctttgcattcaagtcgccttcgctatcaccacgattctgatgctgtggtcggtgtcaattaaagccgcttcgctacttggcgaccatagcgaacagggaaaaatcatgggctggatggaaggactccgcggcgtgggcgtgatgtcgttggcggtatttaccatgtggatattttcccgcttcacccccgacgacagtaacagcctgaaggcggtaatcattatctacagcgtggtttatattctgttgggaatactgtgctggttcttcgtcagcgatgcccctcagcacagcgatgccgcgaaagaagagaaaaaagcgtttcagctaagcgacattctcgccgtcctgcgcatcagtacgacctggtactgcagcatggtaatttttggcgtctttaccatctatgccatcctcagctactccaccaactatctgaccgaaatgtacggtatgtcgctggtggccgcgagctatatggggattgtcattaataaaatcttccgtgccatctgtggcccgctgggcggcattatcacgacgtatagcaaagtgaaatcaccaacccgcgtcattcagctgctgtctatcgttggggtgttggcgcttatcgcgctgctggcgaccaactctcatccgcaatccgtcgctatggggatcggcctgatcctgctgctgggctttacctgctacgcctcgcgcgggctttactgggcgtgccccggcgaagcaagaacccctaactacattatgggaaccaccgttggtatttgctcggtcattggttttctacccgacgtctttgtctatccgattgttggccactggcaggataccctccctgccgaagacgcctatcgcaatatgtggctgatgggcctggccgcgctgtgcatggtgatcctctttaccttcctgctgttcaggaaaatacgcagcgccgatgccgcaccagaaaacaaaacctcgctggccgcggaaacgactggcgagtga

SEQ ID NO: 218478 - DNA, 1479 bp, Klebsiella pneumoniae
atgtcaaataaatacatcattggtattgatggcgggagccaaagcaccaaagtcgtgatgtacgatctgcagggcaatatagtttgtgagggaaaaggcctgttgcaaccaatgcacaccccggatgctaatacagccgaacatcctgacgatgacttatggacttctttatgttttgccggaaaagatctgatgagtcagtttgcgggcaacagagaagatattgtcggtatcgggctcggctccatccgctgctgccgcgcgttgcttaaagccgatggcacgccagcagagccgttaatcagctggcaggacgcccgcgttacccggccttatgaacataccaaccccgatgtcgcctgggtcacctcattttcaggctatctgtcgcaccgcttaaccggcgagtttaaagacaatatcgccaactactttggtcagtggcccgttgattataaaacctggtcatggagtgacgatgacgaggtaatgaagaagtttaatatcccgcgtcacatgctttttgatgtacagatgccgggaacaatcttaggccatcttaccgaacaagccgctctcgccaccggtttcccggctgggttgcccgtggtctgcaccaccagtgataagccggtcgaagcgctgggcgctgggcttctggatgacgatacagcggttatctcattaggcacctatatcgccctgatgatgaacggtaagcatctgccgaaggatcccgtggcgtactggcctattatgtcctctattccggaaacgctgctgtatgaaggatacggcattcgtaaggggatgtggacggtcagctggctgcgggacatgctgggtgaatccctgcttcaggatgctaaaacgcaggggctctcagcggaagatttgctcaataaaaaagcctcaacggtaccgccgggctgtaacggcctgatgaccgtgctggactggctaaccaacccgtgggaaccctacaagcgcggtattatgatcggttttgattccagtatggactatgcctggatttaccgctccattctggagagcgtcgccctgacgttgaaaaacaactacgacaacatgtgcaatgaaatgaaccacttcgctaaacacatcatcattaccggcggagggtcgaacagtgacctgtttatgcaaatctttgccgatgtgttcaaccttccggcgcggcgcaacgctattaacggctgcgcaagtctgggggccgcgatcaacaccgcggtaggattgggtctgtatccttcctacgaggtggccatcaaaaatatggtccgggtaaaagatgtatttatgcctgttgcacaaaacgcaatgcgctatgaggccttaaataaggggattttcagagagttaacgcaatataccgatgtcattttgaagaaatcatatcaagtcatccacgggaatctggaaaacactgatgcgattcaaagctggtcgaacgcgtaa

SEQ ID NO: 218479 - DNA, 762 bp, Klebsiella pneumoniae
atgtggctcgcgaagcgtgccgaatgggggtgtaaaccccggatagcggcgctacgcgcctcatccgggctacgccctacggtccggtactcggttggtagccccggtaagcgcaagcgccaccggggacggttcccagatcgcagtgttacggtcctgtactcggttggtagccccggtaagcgtaagcgcaccggggacggttcccggatcgcggtgctacggtccggtactcggttggtagccccggtaagcgcaagcgccaccggggacggttcccggatcgcagtgttacggtccggtactcggttggtagccccggtaagcgtaagcgccaccggggacggttcccggatcgcagtgttacggtccggtactcggttggtagccccggtaagcgcaagcgccaccggggacggttcccggatcgcggtgctacggtccggtactcggctggtagccgcgataagcgtaagcgccaccggggacggttcccggatcgcagtgttacggtccggaactcggttggtagccccggtaagcgtaagcgccaccggggatggttcccggatagcggtgctacgcaccttatccgggctacaaataccactgcgccagccgggttaccgcttaccgcctatctgcaaaaccgcggcgacgttacgtgccgtcatccgcaggttggcggcggcattggccagcgcttcatcgagggtacaaagggtatacaacacgctaaataccgcatccagcccgtgctga

SEQ ID NO: 218480 - DNA, 1140 bp, Klebsiella pneumoniae
atgaagatagtgatcgcaccggattcctggaaggagagcctgagcgcgctggaagtggccagtgccatagaacaaggctttcgcgagatttatcctgacgcggaatacgtcaagctgccggttgccgacggtggtgaaggaacggtggaagccatggtggcggcgaccggcgggcatcaggttccgctgacggttaccgggccgctgggtaagccggttgaggcattttatgggctgtccggcgatcgccagtgcgcctttatcgaaatggcggcagccagcgggctggagagcgttcccccggcgcagcgcaacccgttgctgactacttcctggggcaccggggagctgatccgccatgcgctggacgccggggtaagacagatcattattggcatcggcggcagcgccacgaatgacggcggcgctggcatggtgcaggcgctgggagcgaaactgttgaccgctgacgggcagcaaatcgcctccggaggcggcgcgctggagacgctggcgcgtatcgaccttagcgaactcgatccgcggctgacagattgccagattgacgtcgcctgcgatgtcaccaacccgttgaccggcccgcagggggccagcgcggtgttcggcccgcaaaaaggggcgacgacgcagatgatcgaccgcctcgacagcggtctacagcattatgcccggatcatcgcccgtgatttggatatcgacgtgctgggccttgagggcggcggcgcggcggggggcatgggggctgcgctgtacgccttttgcggtgctcagctgcgcccgggtattgagatcgtcgccgatgcgttgcagctggccgcgcgggtagcggatgctgatttagtgatcaccggcgaagggcgtatcgatagccagacgatccacggcaaggtgccggtgggggtggcgaaggtggcgaagcgttttaatgttccggtgatcgggattgccggcagccttaccgccgatgttggcgtcgtgcatcagcacgggctggatgcggtatttagcgtgttgtataccctttgtaccctcgatgaagcgctggccaatgccgccgccaacctgcggatgacggcacgtaacgtcgccgcggttttgcagataggcggtaagcggtaa

SEQ ID NO: 218481 - DNA, 1341 bp, Klebsiella pneumoniae
atgactacccaatccagcccgattattactgagatgaaggtcattccggtggccggccaggacagtatgctgctgaacatcggtggggcccataacgcctggtttacccgcaatatcgtggtattgaccgataacgccggtcacaccggcgttggcgaagcccccggcggagaggttatttaccagacgctgctggcggcgatcccgcaggtggtggggcaggaagttgcccgactcaatcgcgtggtgcagcaggtgcacaaaggcaatcaggcggcggatttcgacacctttggcaaaggggcgtggaccttcgaactgaaggttaacgccgtggcggcgctggaagcggcgctgctcgacctgctcggccaggtgctgaaggtgccggtctgcgagctgctggggccgggtaagcagcgtgatgccgtcaccgtgctgggctatctgttctatattggcgatcgacagaaaaccgaccttggctatctggaccacacgccgggcgatcatgaatggtaccgcctgcgccatcagcaggcgctgagcagcgaggcggtggtgcgtctggcggaagccgcgcaggatcgctatggcttcaaagattttaagctcaagggcggcgtgctgcccggcgagcaggagatcgataccgcccgggcgctgaaaaagcgctttccggacgcgcgtatcaccgtcgaccctaacggcgcctggttgctggatgaggccatcgcgctgtgcaaagggttgcaggatgttttgacttacgccgaagatccgtgcggcgccgagcagggattttccggtcgggaagtgatggccgagttccgccgcgccaccgggctgccggtcgccaccaatatgatcgccaccaactggcgcgaaatgggccatgcggtgatgctcaacgccgtcgatatcccgctggcggacccgcacttctggacgctctccggggcggtacgggtcgcgcagctgtgcgatgactgggggctgacctggggctgccattccaacaaccactttgatatttccctggcgatgtttacccatgtcggcgctgccgcgccgggtaaccccaccgccattgatacccactggatctggcaggagggcgacgcgcgcctgaccaaaaatccgctgcagattgtgaacggcaatatcgccgtacccgacgcgccgggactcggcgtggaacttgactgggagcaggtgcgtaaagcgcatgaggcctataaagcgctgccgggcggcgcgcgcaacgacgcgggcccgatgcagtacctgatccccggctggactttcgaccgcaaacgtcccgttttcggccgtcactaa

SEQ ID NO: 218482 - DNA, 1353 bp, Klebsiella pneumoniae
atgagttcattaagtcaggcggcgacggcggctgaaaagcgcaccaacgcccgctactggatagtggtgatgctgtttatcgtcacctcttttaactatggcgaccgggcgacgctgtcgatcgccggttcggaaatggccaaagatattggcctcgatcctgttggcatgggttatgtgttctctgccttctcatgggcttatgtcatcggccagatcccgggcgggtggttgcttgaccgcttcggctccaagcgcgtctatttctggtcgatcttcatctggtcggtgtttactctgctgcagggcttcgtcgacatctttagcggctttggcattatcgttgcgctgtttaccctgcgcttcctcgtcggccttgccgaatcgccgtcattccccggcaacagtcggatcgtcgccgcctggttcccggcacaggagaggggaacggcggtatcgatttttaactccgctcagtactttgccaccgttatcttcgccccgatcatgggctggctgacgcatgaggtgggctggtcacacgtcttcttctttatgggcgggctggggattgtgattagcctggtgtggttgaaggtgatccacgatccgaacaaccatccgggcgtgaacaagaaggagctggaatatattgcccagggcggggcgctgatcaacatggatcaaaaaggtagcgcgcagaaagtaccgttcagcgtcaaaatgggtcagatcaagcaactgatcggatcgcggatgatggttgggatctatatcggtcagtactgtatcaacgccttaacctacttctttatcacctggttcccggtttacctggtgcaggcgcgcggcatgtcgatcctcaaagcgggctttgtcgcatccattccggcagtgtgcggttttgtcggcggggtgttggggggggtcatttccgactggttaatgcgccgtaccggctcgctgaatattgcgcgcaaaacgccgatcgtgctgggcatgctgttgtccatgaccatgctgatgtgtaattacgtgaatgtggaatggatgatcatcggctttatggcgatggccttctttggtaaaggcatcggcgcgctcggctgggcggtgatggcggataccgcgccgaaagagattagcggcctgtccggcggtctgttcaacatgtttggcaatatctccggtatcgtcaccccgatcgccatcggctatatcgttggcaccaccggctcgttcaacggcgcgctgatttacgtcggcattcatgccctggtggcagtactgagctacctggtgctggtgggcgatatcaagcgtatcgaactgaaacctgtagcggaacgttaa

SEQ ID NO: 218483 - DNA, 654 bp, Klebsiella pneumoniae
atggcaagaaaaacgaaagaagaggcgctgcgcacgcgccagctcctgattgaatctgctatccagcagtttgccctgcggggggtgagcaacacgaccctgacggatatcgctgatgccgcgggagtgactcgcggtgcggtgtactggcattttgccagtaagacagagctgtttaatgaaatgtggcagcaacagccaccgctcagggatttgattcagccaaactcagcgcaagcgaatgaccaggaaccgttaagtattttgcgggagcgatttattgccgggctgcgctatattgctgagaatcctcgccagcgtgccctgatgcaaattctctatcagcgctgtgagttttccagagatatgctatcagaaagtgaaattcgccaacgtattggctttaactattgtgttattggtgagattctccagcgctgtgtacgtaacaatatattgccagccgaaacaaatattgaagtcatcttaatcgtcttacatagtgctttttccgggttgattaaaaactggttactcgacccgcaacgctttaatctttatcagcaggcacctgcgctggtggataatattatggcggtaatatcggcttctcgtattgcggcggggccggcgctgcgggtggtgaaccagtag

SEQ ID NO: 218484 - DNA, 930 bp, Klebsiella pneumoniae
atggaacgactaaaacgcatgtccgtcttcgccaaagtggtcgaattaggttcattcaccgcggcggcccgccagcttcagatgagcgtttcctcgatcagccagacagtcgcaaaactggaggatgaactgcaggtgaagctgcttaaccgcagcacccgcagccttggcttaacagaagccggtaaaatctattaccagggctgccgtaggatgctctttgaagcgcaggatgtccatgagcaattatacgcatttaacaacacgccaatcgggacgctgcgcatcggctgctcttcaactatggcacaaaatgtcctggctcgcataaccgcggagatgctgaaagaataccctggactctccgtaaatctggtcaccgggatacccgcgccggacctgatcgccgatggccttgacgtcgttatccgcgttggcgcgctgcaggattccagcctcttttcccgccgcctgggctcaatgccgatggtgttatgtgccgcaaaaagctatctgacacaggctggtcatccggaaaaaccggccgatctggccagccatgcatggctggaatatagcgtgcgaccggacaacgaatttgaaattattgccccggaagggatctcaacccgggtgaccccgcagggtcgctttgtgaccaacgatcccatgaccctggtgcgctggctgacggccggggtgggcatcgcttacgtaccgctgatgtgggcgatcgaggagatcaaccgaggtgaactggagatcctgctgcccagctatcagtccgatccgcgtccggtctacgccctgtatacggaaaaggataaactgccgctgaaagtgcaggtctgcatcaactatctgacggagtattttgtcgacgtggcaaagatttatcagggaatgcacggacgcgggatcgcccggtga

SEQ ID NO: 218485 - DNA, 1023 bp, Klebsiella pneumoniae
atgaaaacccttccttttatactgaccagcggcctgatgctgggctccatcgcggcaacggcttatgccgcggaactccccggttacgctgatggcgcacagattattcgcgtggatcaaacccgtggccgtattgataccttcaacggcgtggtttacagccagattaaaaatgcagtttccgttcgtcagatgcatatgtctttgctggtgccgcgaaaccacgatctgaagcccgccattgtttacttccctggcggtggtttcaccagtgcggcatgggataaatttatcgaaatgcgcatggcgctggcggaagccgggtttgtcgtcgcagcagcagaataccgtaccgtgccagacacgtttcccgcgccggttgtcgatggtaaagcggctatccgctatctgcgcgcgcacgcagcggaatacggcattgatcctaaacgtatcggcgtgctgggcgattctgcaggtggctatatggcacaaatgatggcgctaactcagggagagaagagctgggaacagggcgattttctcgaccagtcctctgcggttcaggctgcagtgacgctatacggcatctctaatctgttgaatataggtgaaggtttcccagccgatattcagaaagtgcacgcctcgcctgccgtgacggaagcgctcctggtgcatggcagcgcatttcgcaactggcctggcgctacgattggcagtgacaggcaaaaagcgctcgacgccagcccgatgggacatattgcccgtaacgaaccaccgatgttgattatgcatggcagcgctgactctctggtgtcacccgtacaaagcgcccagctttataaggcgttaatagcgaaagataataaggcagagtatgtgctgatcgacggtgctgaacatggtgatgatagctggtatcagaagccggttatcgaccgggtcgttaactggtttaaagcgacgctcggcgcaccggtacagacagccgacgggacgaaagataaggatgccaatctgtaa

SEQ ID NO: 218486 - DNA, 1596 bp, Klebsiella pneumoniae
gtggcggttctcaaggaacttcaggccgggttgcgggaacagcgccacggtgagcacgtcgtcgatggcgttctgcgcgagggtgatgcccttctcctgcgcctggcgtttgacgtcggcttccagcgcggccagctccggcttcagcaggtcggccgggcggcaggtgatggcctcagcgccgtcgagcacccgcgcctgcagggcggcgttcaccggtaccggggtgcggccgtattcgcctttcagtatcccggcggtttccttcgcgatggttttgtagcgctcgccggtcaggacgttgagcaccgcctgggtgccgacaatctgcgaggtcggggtcaccagcgggatgaagccgaggtcttcacgcacgcgggggatttccgccagcacctcatccagacggtgggcggcattctgctgcttcagctggctttcgaggttggtgagcatcccgcccgggacctgggcgacgaggatacggctgtcggtgcccttcagctggccttcgaaggcgtggtattttttgcgcacctcgcggaagtacgcggcgatgctctccagtttgtggatatccagcccggtgtcatattgcgtgccggccagggtggccaccagcgcctcggtggccgggtggccgtaggtggcgctcatggacgaaatcgccgtatccacgccgtcgaccccggcttcaatggccttcagcagcgccatctccgccatgccggtggtggcgtgacagtgcaggtgcagggtgacgtcgtagcgcttcttgatttcgctgaccagctcatacgccgcccccggcgtcaggataccggacatgtccttgatggcgacggagtcgacgccggtctccagcagctgttcggtgaggtcgagccaggtctgcagggtgtgggccgggctggtggtgtacgaaagcgtgccctgggcgtgggcgccgtggcggcggaccgcctgcagggcggcctgcatattgcgcgggtcattcatggcgtcgaagacgcggaagacgtccatgccgtttttgacggcgcgttcgacaaagcgctccaccacgtcgtcggcgtagtggcggtagccgagcaggttctggccgcggagcagcatctgcagcggggtcttcggcatcgcctttttgagctcgcgcaggcggacccacgggtcctcgccgagaaagcggatgcaggcgtcaaaggtggcgccgccccagcactccagcgagcggtagccgacgtcgtcgagcgcagcggcaacgggcagcatatcgtcgagacgcagacgggtggcgaacagggactggtgggcgtcgcgcaggacgacatcggtaatggcaacggtcatgaattcctccgtgaattaagggtgaagacggcgatggtggtgaatggcggcgacaatcgccggcttcaggcgggcgaagtcgtccgcgggcgcgacggcggccggcgccgctgcgggggcggcaggcggctcagggaacaggcggttgacggcgagggacattccccggatggcaaagatgagcagcagcaggaaaaccagcacaaagcccatgccgagacacatcagggtgaagccttcgcctaa

SEQ ID NO: 218487 - DNA, 963 bp, Klebsiella pneumoniae
gtggatatgggctactccgccggggtgctggcggtgttctataaggtcgccatcggctcgggcattgcgccgctggtcatctttatgggcgtcggggcaatgaccgacttcggcccgctgctggccaacccgcgcaccctgctgctgggggcggcggcgcagttcggtatcttcgccaccgtgctcggggcgctgacgctgaactacttcggcatcatcagcttcaccctgccgcaggcggcggccatcggcattatcggcggcgccgacggcccgacggcgatttacctgtcgggcaagctggcgccggaattactcggggccatcgcggtggcggcctactcctacatggcgctggtgccgctgatccagccgccgatcatgaaggcgctgaccagcgacaaagagcggaagatccgcatggtgcagctgcgcacggtgagccggcgggagaagatcctgttcccggcggtgctgttgctgctggtggcgctcctgctgccggacgccgcgccgctgttggggatgttctgcttcggcaacctgatgcgcgagagcggggtggtggagcggctgagcgacacggtgcagaacgcgctgatcaatatcgtgaccatcttcctcgggctgtcggtgggggccaagctggtggcggacaagttcctgcagccgcagacgctggggatcctggtgctgggggtgatcgccttctgcgtggggaccgcggccggggtgctgatggcgaagctgatgaacgtgttcagtaaacacaaaatcaacccgctgattggttccgccggggtgtcggcggtgccgatggcggccagggtgtcgaacaaggtgggtctggacgcggacgggcagaacttcctgctgatgcatgcgatgggcccgaacgtggccggggtgatcggctcggcgatcgccgccggggtgatgctcaagtacgtgctggcaatgtaa

SEQ ID NO: 218488 - DNA, 624 bp, Klebsiella pneumoniae
atgtctgaaacagcaatacctgaatataccgcctcccgggtcaccaggacctcgctggcaggctaccttcatcagtcgctggaacaggtctgcaagctggcctctggcctgaaaatgctccagctaccggtcaatgacaccgatcgaaccgctgtagtacttacggagccggtctacgccgctgccgggttgcgccttgcccgccagcagcccctggcgcagaacccgctttgtgacgatgtgctgcggcgctttcgtcatgcccccggtctgacggcagatctgcccgccctggttgagaccgtgcgcagcgtggcgctgccggtctggtcacgcctgcgtcgcgatggacacggcgatgatacggctgtcaggcagacgctgctgcatattctggcctggcgaagcgagtcgccatggctgcaggatcaggcccagagaatactctggcagggcggcgtactgggggagaaagggtacgccgtgttaacatccctcgacgatgaagccgccccccggtgcattgggttctgcgggctgagtgaactactgaccaccaccggttttttagtccactttccggcaggacctctgttttctgaagaatatccagagagttattaa

SEQ ID NO: 218489 - DNA, 951 bp, Klebsiella pneumoniae
atgaacgtaaccatttgcaccatcggcgaactgctggtggagtttctcgccaaggaagagaatcagggtttttcccgccccggtgaattttgggggccctatcccagcggggcgccggcaatctttgccgatcaggtggcaaagctgggttttggctctgtgttgtttagctgcgtgggcaacgacgcatttggcgagatgaatattgcgcgtctggagaaagatggcgttaacgtcaacggtatcgccatgctgcagaaagcgaccaccggtagcgccttcgtcagctatcgtagccaggcgcagcgcgattttatttttaatatgcctaacagcgcctgcggtttgctgactgccgaccacattgatgaggcgctgctaaatcagtgtcagcattttcatattatgggatcgtcgctgttctcgttccgtattatcgatgcgatgcgtaaagcgattgaaaacattaaaggccgcaacggtacggtgtcgttcgacccaaatattcgcaaagagatgctgaacattcccgagatgtcgcaggcgtttgaatacattctcgattacaccgatattttcctgccgagcgacggtgagctggattattttggcctcaatccggagcgcaatgagcagatcctggttgataaactattgaaacgcggcgtgaagcatgtggtgattaaacgtgggccgcgtggcgccagctactttagcgccaacgagacacaccatgtcgccggcttcaacgtgccggtggtggatccgacaggtgccggggattgttttggcgccacctttgtcagcctgttcctcaatggcgccacgccgcaggaggcgctgagatgggcaaatgccagcggctcgctggcgattagccagcgtggaccgatggaaggcacctcgacgcaggcgcagatcagcgcttttcttgccgcacagcacgcttaa

SEQ ID NO: 218490 - DNA, 168 bp, Klebsiella pneumoniae
gtgagtaacaagaaaaatagaaaaaaggcgtcaccaacgccgttagccccgccgcagccggaagccgccggggttaccagctttggttatgatgagatgcttagcgaactggaagccattgttgccgaagcggagcttcgcttgcgggatgaagaaagtctcgcctga

SEQ ID NO: 218491 - DNA, 777 bp, Klebsiella pneumoniae
atggaaatcattgaaccacgccgtctgtatcagcagctcgccgctgagctgaagacgcgcatcgaacaaggtgtctaccttgttggggataagctgcccgccgagcgctttatcgccgatgaaaaaaacgtcagccgcaccgtggttcgcgaagccattatcatgctggaagtggaagggtatgtcgaagtccgcaaagggtcgggtattcatgtcatctccaaccatccgaaataccagcaggtggccgacgaaagtcttgagttcgctaactatggcccttttgaactgctgcaggcgcggcagctcattgaaagtaatatcgccgaatttgcggctactcaggtgaccaagcaggacatcatgaagctgatggaaattcaggagaaagcgcgtaacgagaaatgtttccgcgactccgagtgggacctgcaatttcacgtccaggtcgccctggccacgcagaacagcgcgctggcggcgatcgtggaaaagatgtggacccagcgcgtgcataacccgtactggaaaaaactgcatgagcatatcgacctgcgtacggtcgataactggtgcgacgatcacgatcagatcctgaaggcgctgctgcgtaaagacccgaacgccgccaagctcgccatgtggcagcatctggaaaataccaagcaaatgttgtttaacgaaaccagcgacgactttgaatttaatgccgatcgctatctgtttgctgaaaacccggtcgttcatctcgatacggcggccaacagcgcaaaataa

SEQ ID NO: 218492 - DNA, 1248 bp, Klebsiella pneumoniae
atgacaacacgcactcccccaacagggtggctcactcgtctggcgcaaggcagcctggtgaaacaaattttaatcggcctggtgcttggcatactgctggcgctggtttcaaaggaggcggcgattgccgtcggactgctggggaccttgttcgtcggcgcgttaaaggcggtggcgccagtgctggtattaatgctcgtgatggcctccatcgccaaccatcagcacggccaaaaaaccagcatccggcccattctgtttctttatctgctgggtacctttagcgcggcgctgaccgcagtgttgttcagttttgtctttccgtcgtcactgcatttaaccaccgccgccgacagcatcaccccgccatcggggattgtcgaagtgctgcgcggcctgctaatgagtatggtatccaacccgatcgacgccctgctgaacgccaactatatcggcattctggtgtgggcggtggggctaggcttcgccctgcgtcacggtaacgacaccaccaaaaacctgatcaatgatgtctcccacgcggtgaccttcatcgtcaaagtggtgatccgttttgcgccgctggggatcttcggtctggtctcttccaccctggcgaccaccggcttcgagaccctgtggggctacgcccagctgctgctggtgctggtgggctgtatgctgctggtggcgctggtgattaacccgttgctggtgttctggaagatccgccgtaacccctatccgctggtgcttacctgcctgcgcgaaagcggcgtctacgccttcttcacccgcagctcggccgccaatattccggtgaatatggcgctgtgtgagaaactgaatctggatcgcgatacttattcggtgtcaattccgctgggagcaaccatcaatatggcgggcgcggcgatcacgatcaccgtgctgacgctggcggcggtgcatacgctgaatatccaggtcgatctgccgacagcgctgctgctaagcgtagtcgcttcgctgtgcgcctgcggcgcctccggcgtagcgggcggttcactgctgctgatcccgctggcctgtaatatgtttggtattccgaacgatgtggcgatgcaagtggtggccgttggctttattatcggcgtgctgcaggactcctgcgaaaccgcgctgaactcctccaccgacgccctgtttaccgccgcggcctgtatggcggaagacgaccagctggcgaaaaacgccctgcgcggataa

SEQ ID NO: 218493 - DNA, 1488 bp, Klebsiella pneumoniae
atgaagccactgtttgaagctcgtcagatttgcaaacagttctccggcgttgcggtgctgaagggcatcgatttcacgctatgcgcgggccaggtgcatgcgctgatgggcggcaacggcgcgggtaaatcaacgctgatgaagatcatcgctggcgttgaaacgccggacagcggtgaactgacgctcggcgaccgcgcgtttgcgcgtctcaatccggcgctagcgcatcagttaggcatctatctggtgccgcaggagccgatgctgtttcccaacctcagcgtgcgcgagaacattctcttccgcctgccgaagcgggcggacaccgccgcgcggttgcaggacaaactgcagcagctgaactgccagatcaacctcgacgccagcgccagcacgctcgaggtagccgatcaacagatggtcgagatcctgcgcggactgatgcgcgaggccaggatcttgatcctggatgagcccaccgcctctttaacgccgggtgaaaccgagagactgtttagccagatccgcgcgctacaggcgctggacgttgggatcgtgtttatctcgcacaaattgcccgaaatccgccagcttgccagccatatttcggtgatgcgcgatggcgcggtggtgctgggcggcgagaccgcggcttatcgcgatgagcaactgattaacgctatgacgccggccagccgcgaccatgcgctgagcgacacgcaaaagctgtggctggcgctaccgggcaaccgccgtacgcaaccgcaggactttcccgtgctgcgggtggaagatcttaccggagaaggctttatcgatctcaatctggagatccgcgccggggagatcgtcggtctggcgggactggtgggatccgggcgcaccgaatttgccgaaaccttatacggcctgcgtcctccgcgcgccgggcggatctggctggagaaccgcgagattagccgcgacagtacccgcgcccggctggccagcgggctggtctatctcccggaagaccgtcaggtctcggggctgtttctcgatgcgccggtgcgctggaacacggtgatgttcaatcagccgtcgtggtggcagcaggggaaacgggaggcggcggtggttgaacgctatcaccgggcgctggggatcaagctggccgatggcgatcagcccgtgcgcactctctctggcggcaaccagcagaaggtgctgctggcgcgctgtctggaagctaatccgttactgctgattgtcgatgagccgacgcgcggcgtggatgtctccgcccgcgccgatatctatcaactgctaaaaagcgttgccgcgcaaaacgtggcggtgctgatgatctccagcgatctggatgagttcgttggcctggccgaccgggtgctggtgatgcatcagggccgctacagcggtgagctggcgcgacaggcggtgaccgtcgatcgcatgatgaccctggccttcggagggcaggcatga

SEQ ID NO: 218494 - DNA, 249 bp, Klebsiella pneumoniae
atgtcatccgtaacccggtgcgtcgtgacgggcgcgaggggaaagcggcataaccgctccgaattattcacccggattatctttgtcgtcaatatcctgatccgctgcctggccgcggcggaaaaggcggcggatcgggttgcgccgcgccgccagccgccagcgcaacttttgcctttccataccgctaacgcattgttacaaaagggggatgtggcgatgatcgcctttgatggcgaggaggcgtaa

SEQ ID NO: 218495 - DNA, 870 bp, Klebsiella pneumoniae
atgaacgatattaaggccagcccggcgtatgtcgggcgcttccagcgtgtctgtaggtacattgcgcgccatcttgatgagccgctgtcgctggaggcgctgagcgcgatagcgcacagttcgccttaccattttcaccggcaatttagcgcttataccggcattccattgtaccggtacatccagtggttgcgtctgcgacgcgcctgttggcgcctggcgttcaacccccgcgataaagtcatcgacattgcccttgatgccgggtttcagaatgcggagtcgttcagccgtgccttccgtaccgcgtttgaccaaagcccgacccagttccggcagcaaccggactgggccgagtggcatcgacgcgtaccgaaacatacgctacaggagcaaacgtcgatggacgtcaatatcatttccttccccaccacccgggtagccgtactgcaacatcgcggcagcccggaccttgtcaacgccaccgccgcgcgttttattgcctggcgtaagacgagtggattatcgcccgtcgccacccgcgatacctgggggatcgcctgggacgatccgcagaccaccccgcaggaggcatttcgttttgatatctgcggcacggtcgagcggccggtcggtgaaaacgcctttggcgtgattaacggcgaaatccccggcggacgctgcgccgtcgtgcgccatcacggctcgctggacaccctggcgcagagcgtctggtttctctatcgcgactggctacccacctcaggcgagacgttacgggattttccggtgtacttccgttacctcaattttgtccatgaggtggctgagcatgaactgcaaaccgatatttatctgccgctggcctga

SEQ ID NO: 218496 - DNA, 1413 bp, Klebsiella pneumoniae
atgtcactcagtcggcgtcagtttattaaggcttccggcgtagcgctgtgcgctggcgccgcgccgctgaaggcccatgccgccggccagcagcctgcgctgccggttccgccgttgctggaatcccgtcgcggccagccgctgtttctgacgctgcagcgttcgcattggtcatttacccccggcacccgtgctcccgtctgggggatcaatggccgctatatggggccgacgatccgcgtctggaacggggatgacgttaagcttatctacagcaaccgcctgactgagaacgtggcgatgaccatccgcggcctgcaggtacctggcccgctgatcggcggcgcggcgcgtatgatgtcgccgaatgccgactgggcgccggtgctgcctatccgccagagtgcggcgacgctgtggtatcaggccaatacgccaaaccgaatggcgaaacaggtttacaacggcctggcgggcatgtggctggtggaagatgaggtcagcaagaatctgccgatccctaaccactacggcgttgatgacttcccggtgattattcaggataaacggctggataacttcggcacgccggagtatagcgaaccaggaagcggcggctttgtgggcgatacgctgctggttaacggcgtgcagagcccgtatgtcgaagtgtcgcgcggctgggtgcgcctgcgcctgctgaacgcctccaactcccggcgctatcagctgcagatgagcgatggccgactgctgcatgtgatttccggcgaccaggggttcctgccggcgccggtttcgctcaagcagctgtcgctggccccaggggaacggcgtgaaattctggtcgatatgaccaacggcgatgaagtatccattacctgcggcgaagcggcgagcattgtcgaccgtatccgcggcttttttgaaccgtcaagtattctggtctccacgctggtgttgaccctgcgcccgaccgggctgctgccgctggtcactgacagtctgccggtgcgtctgctgccgaccgagctgctctccggcacgccaatccgcagccgggatatcaccctcggtgacgatcctggcatcaacggccagctgtgggatccgcagcgtatcgatatcacggcgcagcagggaacctgggagcgctggacggtgcgcgccgaccgcccgcagtcgtttcatattgaaggagtgatgttccagatccggaacgtcaatggctcgatgcctttcccggaagaccggggctggaaggacaccgtgtgggtcgacgggcaggttgagctgctggtctactatgcccagccgtcgtggccacacttcccgttccagtatctgagccagaccctggagctggccgatcgcggctcgattggccagatgctggtgaatcccgcgccgtaa

SEQ ID NO: 218497 - DNA, 174 bp, Klebsiella pneumoniae
atgggtatgactggattggtagtaatcgttaagttaatcagtgcaattactattgggaccttcatggcagttgccgtctggttgtgcttcaaaagagtaaatacaatcatcatcttcagcctgatctggctatcatccattatcctgatttatatttttattgagctaaaataa

SEQ ID NO: 218498 - DNA, 1185 bp, Klebsiella pneumoniae
atgccagaggacgtaaaaaacatgcttagcgctacggggaaaagagttgctaagcttattccctatgtcgttttgttatcaggagtagttgtctggagctatttgaacagtatagggcgagtggatattttccctgatatactttcgtttaatgctgggcttatgtcgattttggtttcagttatggtatttgcactggcaatttcaatgacattgattgtacccagttttatattgatagttattaagtcaacttatgaaaaaaacagtcgtgctgtgagtgtattatcgaagcttcctgctgcatgtttgtgtttatccatactgtatttggctatggtttttatcccattcatacctgaagtggcgaaagtaactaagggatatgaaccagggattgttctaatagtctcaattattttgtttttgtcattttgctttgtattcctgacgttaatgagaaattttaaatggaataaagatgatggtgtaataagtaatataggggtttttatcgggcatacactcgtaaatttgtttgggactttttctgcgacattgtcaatttctatcccgatctcgttcctgatgcagtcaagtaaaggggaaagtactactgctgtaatttttgcactgttatttatgattgcattctcttttcttacgttttttccttcaattatttattttaccagtatggaaagaacaaaatgcagtattgtttcagccattcatcaaatatcattggcaattgtgggggtggttttggtgacatttttattcttccctaatgtctcaacaatatttatatattcatcactcaatgcgattggtcttgttagtaaaacaccacatttttatctcattaacggagaaaagtataaacctgctatgtttcataaaacgtcatgggatactcaggtgctatcagatatgggagaacatttttacattaaaggcgtgagtgtattttctgtggaaagtaaaaacctgatttgtcctatggcagtggtaaaaatcagggatgagacatatgagagagattacgtatcttttgttccgtttgctgatagtaagaaaattgcggaattaaaaaaaattaccaaagactgtctgatattagacgatgttgatattcaacaatgggatacattgtttgatgataatgggaaagtgagggagtga

SEQ ID NO: 218499 - DNA, 207 bp, Klebsiella pneumoniae
atgcagcatggtttttttagcgccgctatgtgtggagttcccccactatatgtgggcctcaggccgttatgtgtggacctgactccacacataactaaagtaagcgttcccggcaaatatttattattttatcgcaaaatatcactccctcactttcccattatcatcaaacaatgtatcccattgttgaatatcaacatcgtctaa

SEQ ID NO: 218500 - DNA, 1143 bp, Klebsiella pneumoniae
atggctcaatttaatcactttgaactctcgcttctgaatcccagctttgactcccctttggtcgatgcgctgacagagctggagttactccggcacctgcggctggaaaccgatgttcatcctatcctgtttgcgcagttgaaggccgttttccacatgctggagagtcttggttctgcaaggattgagggaaaccacaccacgcttgccgactatgttgaaagtaaggttgaaggaacccagagttcgacggaccagctcaaagaaatcaataatattgaaaccgcgatggagttcattgacgaatacctgaacaacggcgatgagataacggaatattttatccgcgagttgcatagcctggcggtagtcgggctgcaacaggaaggtgaccgaacgcctggcgcatatcggcaacataacgtcagtatcgctcagtctgaccatttaccgccggaccacattcgcgttcctgattatatggcggaactgacggcctttattaatcgtgccgataagccaaagtacgatctgatgaagattgcgctggtgcatcaccgctttggctggatacacccctttggcaatggtaatggcagaacggtcagattgctgacctatgcgttgcttatcaagtatggttttaatgttcaggctggtgggcgggttctcaatccaactgcggtattctgtaatgatcgtgagcgctattacgccatgctttcgttagccgataagggcacagaacaggggctggaagaatggtgcttatatgtgctttcggggatctcctctgagctgaagaaagtcgatcaactgacaagccacgcttttctgagcgaaaagatcctgtatccggctatcgatttttcgtcggagcgagggctgataaatctgctggaatcgaaggtactgaaacgcgccgtcgagttggggacgataaaagcgggcgatctacgtaccgttttgcctgatctgaaaccgacgcaggtgacttatcagcttggtaagctgattgagcggggattgctccagccggtagaagaaggggctcgttcctatacggcgaagttttctaattcgtatctgatacgtggggtgattaaggttctgcgggaagaagggtttatccctgatttgtga

SEQ ID NO: 218501 - DNA, 2139 bp, Klebsiella pneumoniae
atgagtgatgtatcctataacgatcaaccgatacaaattccctcagaagatcggtttggtatagatccttttgccagaacactagctagcagcatcctcaaaatgaagtcgccacaaggctctgttattgcgcttaatggcccctggggttcagggaaaagtagcgctgtgaatttgattaaacatcatcttgaacaacctgttagagatgacgatattgttattatcgattttgcttgctggtggtttcggggcgaagaagcactggcattagcgttttttcgtgaattatatgcggggctatcaccatctttgggggaaaaacttaaacagtctcttcctaagttgggggcaaggctattgaaggctggttcagtattaggtggagcagcagatttggttggcgcagggggaatcggtggcgttgctggtaatgcaatggagtggctgggagagttaattgagcaagaagaaggtgtcgagaagcttcatgcaaaactatcagcgtcattgcaagaacaatcaaagagattccttgtggtgattgatgatattgacagactttctcctgatgaagcgttattgatttttcgactagtgaaatctgttggacgtcttccaaatgtgatgtatttgctcgtatatgatcgacttctggcagagaaaattgtgagtgaacgatttccttccgaggggccacattatttagaaaaaattgttcaggcagcgtttgaattacctgaaccaataatgagtgatgtgcaacggcacctgttagaacaagtaggtgttatttgcggtgatattcctgatgagcaggtagttcgatttttaaatattttttatgagggaattgcagacgagatgcgaacgccaagggatgtggcccggtttgttaattcactctctgtcacatggcctgctgtcgctggggacgtcaatgctgccgattttgttgcgctggaagtattacgtttactgcattcggatatttaccgcgcgataaggcagaataaatcattactttgtagtatagagttgagggatcagacaagtaagactcaggtagctgagagatttgatggtctattttttaaaaacaaagaaccagaacaacagaatagattacgttctttattgaaaagaatatttcctgcgttggaaagtgtctggactaacatggtgtatacgcatgatagggaattggtatggtccagagagcggcgtgtgtgctcaatcactcattttgacacatattttcgtttctctataggttgtgatgttttatccgctgaggaactcaatgatattttgttaaaaatatccgatattgaatatatcaaaagtgtattgcgagattctttaactattaatcgtagtactggtggtacaaaagcggctgttatattacatgaattgaaagtcaatgctgagaaaatttcagtagataacatagaaccgcttctgactgcattatttgaaattgcggacgagatggatatcgatgccgatcaagccagaggactggattttagcaataacgcatttcggctacactggttattgcgtgctctgactagagagagattgtcgctggtggagcgttcaggaatatttgtctctgcttgtaggcaagcctcattaggttggttagcggattttacaaattcggcatggacagattatcaccctactgatgaaagaccaccagagtgtgaagacaaatgcttaacaactgaagaagatgctgggtatctgagaacgatgctggcagatcgttttgctagggaacttgatagggataacggttatgctttattaaggcataaggacttttcattattggtatatcaatggcaacagttactcggagaaaatgatttacgcattaagcaatggatagaaactctccttgacgatgacgaaagtattagattaattgcaattgcatttacctcttacggatggactcaaacgatgggagatttagttgccagaagaaagacccatgttaatattaaggggttagagcaatttatagatattaatatatttaagaaacggatagaggaattagctgaaaaaggttgtttctccgaggttaacgaattttgggattgttggcttaaactgaaatag

SEQ ID NO: 218502 - DNA, 540 bp, Klebsiella pneumoniae
gtggaaaaaatccaaaacgatattgatacacttttagtttttatgaacgatgatttagaaaaccaagggatgacaattaagcaagcatactttgactttaccgaaggagctggtgattttgtttcttttaccaaaaagaacgactggaataaagatgacctctacaaaattattaggatatgtataacacgttctcttattatgaacgattatggaaatactttctgcgcgatcaaaattacagaagagggtcagagcagagcgatttccgtaaagcatggtaaaaaacgcgcctatgaactcggagcaagtatgcaaatagcaacactcaacgtcaatggtcctgctcaggttgggaacggaaacactcagaatttcaacatggtgttccatgaactggagcaaaaaattgatgcctcagaggcttctgatgaagagaaaaaagaagccaaaagccgactcactaaattactcgagcatcctctggtttcagcaattacaggcggtattgctggtggtatttctggcatagccggataa

SEQ ID NO: 218503 - DNA, 885 bp, Klebsiella pneumoniae
atgctcttgcgccatctttcctacttcatcgccgtggctgaacatcgcggctttacccgcgccgccgcagcgctgcatgtctcgcagcccgcgttgtcacagcagatccgccagctggaagcaatgcttgaggttcagctcttcgatcgctcaggccgccatacccgcttaactgatgccggagaggtctggctggagtatgcccgacgcgccttacgcgatcttgaggagggacgtcgcgccctgcatgatgtgcaagatctccagcggggaagactacgcatcgctatgacgccgacttttaccacttacctgctcgggccgctgatgggagcatattatcgacgctaccccggagtgaaagtgcttattcaggaaatgaaccaggaacggatggaggcgatgttgctggaggatgaaattgatatagggattgcctttgacgaaagcctctcgcgggatattgtggctcagccgttgctgactgaaactctcgcgctggtggtgagtcgtgcgcatccgctggcacgagagagctacctgcagttgccggctctcgacgcgcagccactgattttactcagcagcgagtttgctacccgcgaacagatcgatcgttattgccaccgtcatcggctcgaaccagacgtgcggatggaggctaattcgattggcgccgttctgtcgatcattcgatgcacgccgcttgcgacgctgctgccggcgacgatcgccgggcagtatgatgatgtggtggcgcttgagctaagacctgcgctgctacaacgaacggcctgtttattgcagcgccagggcgcctggcagagcgccgcggcgcgcgaattcatcgccatggcgcagcagattgctgccacgctggtttga

SEQ ID NO: 218504 - DNA, 840 bp, Klebsiella pneumoniae
atgaatataacagaacggaacatctggaagctaaataatttaccgcccatggagtactgctccctggcgcgggcgcaaaaattattaaactgtgaacttgaagacattcttcactggcatgatattggcgcgatcaatctatgtctgaagctcaacccaacgcggggcacattaaaaatcgccgtcctttctcatcaggaaaaagacgtcacgaccgcgttcagtccgcttgcctcagccgaggccgcggagactatctggtcgccccactcccatatccgcagcattttgcggcttgaaggggatattccgatgatggaaaccctgcgcggaaatacggtgacgcagttcaacgttaaggtatctgcctcaggactctggcatccacattgccggaatttaatggcattgctggaagcgccggatgatattgttcgtgagcgtagacttagcatgatgctgccagacaaaccgtttgtttattgtcatttcattccggatgaagccgaatgtccggtcatatcattaaaccgtatttatatcaccagtcaggcgattgagaaaatatacgctcacagtattagcgcccgaccgatggatgtgacaaaaaacccactactcgagcattcctcttatattcaacaggaattaaccttgctgccgcaaaatgaggtattactggagtttattcactatattattcagtctcataccatatttaatgaaaagctgcagaatatggctgagccagacaggactcagctctttcgtcatgtgctggaaagactcaaagaagaaggaatgctcaggaaagatactctgtccagtgagcattattag

SEQ ID NO: 218505 - DNA, 939 bp, Klebsiella pneumoniae
atgcaaactcctaaaaaattatttaaatataaaagttttaacgatgattgtatggagttgataattgatgattatttgtattttgcaaacccaatccaatttaatgatccgttagattgtaaagtcacaatattcgatgatgtgaatgatgaggagcagttacgaaatattctttcaacgcttcttcagcaaaactctgaaaagaaattaaaggtggccgcaaaaaacctacgttacaatggtccaaaaaccactgacaaaatttctcttttaagcatgagtgaaacagataaaataatttcaggtatctattctgaattttcatttggactatacgactataatgccccgacgatcaaacaagtattagctaatacgattgggaatattatattgtcagggtataatagaggggtgctttctttgtcaaaaaaagataagtgtccgctaatgtgggctcactatgctgataaccataaaggcctttgcttaggttattctatacctgaaagtgttgctaataaaataagaccaataagctatacaagtgaatctagagagttaaagattagtcagatacataggatgttagcgggggatcaaaaggcaaagacagaaatagagcatgatatatttttgagaaaggccaaacagtggaaatatgaagaagagtggcgaatgttatcagatgttggtttacaaaattcatctatatatctgtctgaaataacttttgggcttcgttgtaaatatacaactattttcagtgttatgatgtctctctctaaaagagagaccccgattgatttttatagaattatcgaagtcccgcataaattcactctcaaaaaagaaaaaatatcatttaatgatgaagaattgcaaggcttgccgagatgcatggaaagccttgttcaaatgttgaatgatgatgattaa

SEQ ID NO: 218506 - DNA, 255 bp, Klebsiella pneumoniae
atgactgatgccctgaccaaagaaaaaattattgatgctatgcgcggttctattgagggcttcgccttcttaatcgtcgattcgctggagtttgaacttaagcgcgagctaaccgacgctgaacagcaggaagtttccacagttgttgagcagttggttctgacgtttcctgaaccatgtccacgctgtggtgtaacgtctacgcgcccgaatggtgagcattattgccatgctaacagcgtggaggctgaataa

SEQ ID NO: 218507 - DNA, 129 bp, Klebsiella pneumoniae
atgaactcagaatccctcagcaatcgccctctcaggaaggcgctaatcctgaacggtattgcgctgatcgcaatcatcgttctatcagtattgggtatctggctggttaacgaatgggtgatgttatga

SEQ ID NO: 218508 - DNA, 861 bp, Klebsiella pneumoniae
atgcccagcttaggccagctctataacgataaagaatccgggttaactacccgtaaaacctataacgtcccgatcgcctcaatttatgcggaagaaggttacaacgttcgcgaactgaatcaggcgcatgtcgatgagttccgcgatgcgtttattgccggtgaatatataccgccgctggccgtagaagttactgagcgtggtgtaaaggtgatcgacggccaccaccgctatcacggagcgctcgccgctatcgctatgggacacgatatcgtgcgccttgagtgcaaagattttgttggtactgaagccgataagatcgcgtttatggtgaccagctcgcaagggcttgcgcttactccccttgaacgtggtgcagcgtatcaccgccttcagaatcagggatggagcccggcagagattgccgcaaaagttaagcgttcagagtcagatatccttcaacatctccagcttcatgaatgcaccccgtatatcaaaaagctggttcgcgatggctctatgaactatgccattgcgattggtatctctcgtgaacatggagtttatgcagaccgggaagctgccaggctgatgaaaaaagcagaagcagccgggaaaacgaaagtcacaaagagcattgccaagccacaattcaacgcaggaaaggcgcggaagtttctggagatcatctcatcctgcaaagagaccaccagcggcggattaatcattgaagtaccaccagcgatgcaggccgaagtgctgtcgattcttcaggaattccgctacgaaacatcggcacctgaggatgacgagcaatccaatgatcaggcctcattatctgaagaaagtgatgccgcatga

SEQ ID NO: 218509 - DNA, 813 bp, Klebsiella pneumoniae
atgtctcaaattgaaggctctgccgtgcacgacatccgcgatctggttgctgcaacgctgaaaactaataccgacatcccttccgtcgtcgtcccggatggcttcgatatcaaatcgctcgaaagcctccagagtgccccgtctcgtattcgccagaatacaaacctgatttctcccggttcgctaatcgcatatatccagcgattccgtgatgcgcgttctgttgttttcgctgacaagaccaaaacccggatcgtcgcggtgctggacttccaccagaacgccgataacccccattggggaatgcacaaagcagtttatgactgtcctttctctgatgactggaaagcatgggtggggtctgatggtaacaagatgaatcagatcgacttcgctgagtttctggaaaacaacatccagaacatcgcgccgattagcgataactataaaggcccgtccggtaccgatctcctggaaatggtactcgccttccaggagacaaggaaagttgagttcaagtcggttaagcgcctgcaggacggaacctgtcagttccagtacagcgatgataaatccggctcaggcaataccatgatcccggaaaaaatcagcctggcaatcgcgcctttccataatggcgcaccgtaccagattgatgcgcgaattcgctaccgcctgcgcgacggtcagctggtcctctggtatgagctgatcgagccgaaaaaaatcattgagcacgccttccaagagatcgtaaccgatatggaaaaccagctcggcgatgaactgcctatctacgaaggctctatctaa

SEQ ID NO: 218510 - DNA, 360 bp, Klebsiella pneumoniae
atgtccgaaaccaaaaataccacgccgtttagccagcagctggcgtacatcaacaaaggcactctcgatgccgagctgaccgaagcgctggcagaagtcatcaaggctgtacgtgaaacggggaaaaagggagctgtgacccttacccttaactgttcaatgctgaatacccgtgacgaaaacaccatgaaggtcacgccaaaagtaacccgcactatcccagaactggaccgcgccgataccatcatgttctctaccgctgatggcgatctgctgcgtgatgacccggcgcaagttcagatggatttgaaagttatcgaacaagcaccacaagctgcgcctattaagctggctcagtaa

SEQ ID NO: 218511 - DNA, 915 bp, Klebsiella pneumoniae
atgctttacatgaaagaaaatggtgtattgatcaaactggatagctgggagcaggtttattcaagacctaatttcattaaagacttagacctaaaagataaaaaactaaaggcactaattggttactacaaaaatgaacctccacgtaagtgtggtattaaaagctgccacagcagtcatatgaagggagggatcgtcattacagaggatgatttcgaagcctcaattggtcacatctgtggtagtaaaatatttcaagaaaaattcgatgatttaattaaacaacttgaaaaagaagttgatttcgaaatttataaagaggctgtggcaagtcgtaagtcaagactttttgaatattggaataaagccgccgcgctcacatctgggaaaaacggtatcctcaagcttgccgaaaaaatttctgacattaaaaatgccttagttgctggtagatatgccgcaaccgaattagtcagaatggcatctaaccagcagacaatagtaacgaaagaagtctgggttgagaaaaagaaaaaagaactcactgaagaagaggcaagcagtggtgagaaaaaatacaaaatagaaactgtagtttgtgggcagataaaaaatatcgaagttctactagccgcgaacgatttaaaaagactttacaatgaagagattgagtccgtgattaaggggcttgaaaagctggatctacagactgcctcaccaagtcaaattaaaaacattgggcgttctgtatcctctttggatgtcagactagaaacagcagcaaagttgaaggagcttgcaataggctttttgacctacgataacctgtatccaatgcttgagaaaatgcatcctatggatacgatcagtcgtaaggatcttgagttatatgagaattttataaagtccctttaa

SEQ ID NO: 218512 - DNA, 213 bp, Klebsiella pneumoniae
atgaccaacattgtttttaatactccagaagagcttccctttgaggatgacataggtcaacaatttctgttgataaaccatgatgacgattatctcgttgcgactgctttttttgatgagcttagcggttttgtatgtttcatgacaaatgtggggccgattcatccacatgaatataaaaagtgggcattgctgcccatagtgaaggattaa

SEQ ID NO: 218513 - DNA, 648 bp, Klebsiella pneumoniae
atgaaagatagaatccgcgcccgtagggttcagcttgacatcacacaacaaacgctcgctaaaaagctgggggttagtagggtgtcggttacaaaatgggaaagcgggacaactaaacctgatggagagaacctccaccagcttgcacttgctcttcaggttactccggagtggattctctacggcgaaggtgatgtcgtagttgatgacacgaaggtaattccatacctgaaacctcctgttgcgatccctattatttctgctgtacaagcaggcacatggactgaaacttattcaagctcaagactaactgatgtgatttcctggacccaaaccactgcaaatgtttcagacgaagctttcggacttgttgttcgtggcgaatccatgacaaacccgaacgggataccttcaataccagaagggtcgatagttattgtcgaacctcattacggacaaattgacgacctgtatgggaaagttgttgttgctatgttggatggttcaacagaagcaacggtaaaaaaactggtatgggatagcccatatgcgtacctgatgcctttaaaccccgcattcaagccaattcaaattgacggaaactgccggataataggaagagtcgtccaaatcacacaaaacatctaa

SEQ ID NO: 218514 - DNA, 198 bp, Klebsiella pneumoniae
atgcgcaaacatgaagtcatagagtatttcggcggagtatctaaaaccgccagtactttagggatctctcatccggctgtctgccgctggggcgaggtgatccctgagaaacaggcgtttgtgatcgagcgaatcactaacggaaagctcaagtacgacgccagcctttatcaaaagtctacagattctgcgtcataa

SEQ ID NO: 218515 - DNA, 402 bp, Klebsiella pneumoniae
atggctggcgctctagggatgacgctcacgcagttcaataacaacctgtacgagaaaaatggatgccgtttctttgaagtcgctgaacttgaagcgatggaggacatttctggtacagctgagcttgccgattacttcgcgaaaagacgcggcgcattgctggtggatgtaccaaagctagaagacctggatcaggtcgaactattcaataaagccatgaagacagccgccatgcgtgggcatgttgatctggtcatcaaccttgcgcttgccgatggtgtgattgatgaagctgaagcggatgaaatcaggcactaccacagaaaacacctcgcggcacgagaagaagaagtgaaatccatccttgcagtctttggccgacgaaaaccaaagcgagagtaa

SEQ ID NO: 218516 - DNA, 279 bp, Klebsiella pneumoniae
atgtaccaggacgaatatttccacgtgactatgcccacggtttttgctcgtgaggacgccccgtggattaaagagcagttggcaacactcccggcaggcatgcggggaaaaatcgcgatggcgtatgcgcaggcgtaccaggaagcgtttgatgcagagccggtgtcattccggcagcagaacgccgcacgacggacggcaaaccgccgattgcgagagttttgcacgaggtataccccagcggttaggggatatacgtcgctcccacccagggtttga

SEQ ID NO: 218517 - DNA, 276 bp, Klebsiella pneumoniae
atgatttattcagacgctaacgaaaaatgggcccccgttccggttgagccgtattccaaagcctacgaagtcagcaacctcggacgggtacgcagtattccgcgcctggctaactctgaatattttattcgacacattcacggcggttttcttaaaggccgccagcgcaaagacgggaccaaaaccgttacgttgtcggttcagcgtcagcgcactaagtttgtcatcgccgagctggtggctatggccttcggggaggttactgctaatgcttaa

SEQ ID NO: 218518 - DNA, 1530 bp, Klebsiella pneumoniae
atgcttaacatccagccccgcgaaaaacaggtagttgcgttaaacatgctgcgcagcgcctggaaacagaataactccttcatgctctacgcccctgtagggttcggcaaaacagcaatagccgcgctgataactgatggctttgtaagccgtgaaatgcgcgtaatgtttgtggctccgtatacggttctgctggaccagacggcagcccgattcatggaatacggccttcctggcgaagaaatcagttatgtctggcgtgatcacccgtcatacaaccccacagctctgattcagattgccagtgcggatacgctgattcgccgtgagttcccggacaatatcgacctgttgatcgttgatgaagcccacctgaagcgcaaaaaactgctggaggttatcgacaatctcactcgcaacacagcaacgaaggtaatcggcctttccggtacgcctttcgctaagttcctgggcaattactaccagcgcctgattaagccaacgaccatgaaggaactgatcgccattggtgcattgagcaaatatgagttctatgcaccgtcgcatcctgatctgtccaaagtggaaacgtcatacgtagcaggctatggcagcgactacaaagaaaaccagctcagcctggtaatgagcgaagccaagctggtaggcgacatcgtgaaaaactggctggagaacggcgaagaccgcccgacgatttgtttttgcgtcgatgtcgctcactccaattttgtcacggttgaatttgccagcgctggcgtgacggttgaagtgatgacagccagcacaccgcacgacgaacgacagctcacgatccgccgcttcgaacagggcataaccaaaatcatcattaacgttggtgttttggtagccggttttgatagtgatgtccgctgcattatcttcgccagaccaaccaaaagcgaaatgcgctggattcagattctggggcgtggcctgcgcgccgcccctggtaaagatcactgcctcatcttcgaccacacaggcacggttaataaactgggctatcccgacgatattgaatacgactacctcccttcatcgtctgatggcatggaagacgcgccgcagagagccgtaaagaccgaggaagcggaaaaactgccgaaagaatgcagccagtgccactacgtcaaaccagctgggatttacatctgcccgaaatgtggttttaaaccgctcgccggtgaagacgtggaaactgataaatcccgtggactgaaaaaggtaagcaaagcggaagtcaaatataccgctgagcagaagcaatcctggtggtctcagattctgttttatcagcgaacccgtgcagcgcagggacgcccggtcagtgatggctggtgtgcgcatacctacaaacaaaagttttcagtatggcctcgggggttacatcacactccgaaacagatcacgcctgaagtaacgaatttcatcaaatcaaaacagatcgcctttgcgaagagaaaagagaaagaaggagatgccgcatga

SEQ ID NO: 218519 - DNA, 972 bp, Klebsiella pneumoniae
atgaataccaaacaagctgcgattggtcgctgggcggaaatatacaaatactatggcctcccaggtattaccgggaaaaaccatctcaaaggagagtgccctctttgtggccgtacagggaaatttcgctgcgatgataaagacggcacgggatcatatatctgcgtttgtggctctggcgatggctgggcgttgctgactgccaagactggcaaagaatttaaggttctggcctcggaaatagacaggctgatcggaaacacctacacctcggatcgcaccagattaaatccggtgcgtacatctctggcacaacaacgtgacaaagtcagccgtaagttttcgaagctcatccctctccgtggtaccggtgcagatagctacctgaaggggcgcggtattaactccctcccagcagagagcatcaagtactgcgataaacaaccagtagatggaaagaacctccaggctatttatgcgctggcgacagatgaccgcggggaattgtgttatttgcaccgcaccctgcttgatggtgataagaaggcgcaaacaggcggcgcagccaagaagatgatgaaactgcaggaggatagctatttagagtatgccaaatccgttgctattcgcatgttcccaataacctcaacgctgggaattgctgaagggatcgaaacggctctggcctgccaccagatcacgaagtgcaacacctgggcgacgatgaataccgccttcatgaagaaattccgcgttcctgccggggtaaagaacctcatcatttttgctgactctgacgccaacgcggcagggcatgccgctgcttttgaatgcgctgcggcgaatctgcacgcgaagaatgatctggaaagtgtctccgtgcgctggcctgcgcagggtgattttaatgatctgctgcttaacggctcagaagtattcgaatgggtatttcaccgggggatgaaacagtga

SEQ ID NO: 218520 - DNA, 645 bp, Klebsiella pneumoniae
atgggtatttcaccgggggatgaaacagtgaagaaaccagcgcctgcaaaggtgaaaacgtacaaaccgaagaagtgcgccagctgtggtgaaaccttcactccggcccgcaacctgcaaaaggtttgtggcccgctctgtgctatagcccacaacagggcgctgaaacaaaaaaaagcggaggcggaacagaaggacaagctgaagatgcgcaaaaaggctctgcttacccgtggcgactacatcaaaaaagcccagtcagcctttaatgcctttatccgtgaacgcgacgaggggaaaccatgcccatcatgtggcacttatcacccacctatgatctttggcggccagtgggattgcggtcatttcatgggggtaggcgctcgtcctgaattgcgctttgaagagaagaatgcttaccggcagtgcaaagcctgtaatggtggatcgggtcggttcgctgcaaagaatgccactgtacatgcccgctacagggagacgctgatcgagtggtatggcttgccgctggtggaatggctggaaggcccacacgaagcaaagcattactcaaaagaagacctggaaaacatagcggctaaataccgccgtaaaactcgcgaactgaaaaagcagagggccgcatga

SEQ ID NO: 218521 - DNA, 645 bp, Klebsiella pneumoniae
atgaattacgatcttatctactgtgatccgccgtgggaatatggcaaccgaattagcaacggcgcagcctgtaatcattacagcacaatgagcattgaagacctgaaacggctccctgtctggtctctggctgctgataacgccgtactggcgatgtggtatacggggacccataaccgcgaggctgtagaactggctgaatcatggggtttcagggtcagaacaatgaaaggctttacctgggtaaaactgaatcagaacgccgctgaccgcttcaacaaggcactaaacgccggagagctggtggacttcaatgatcttcttgagatgcttgaccgtgagacgcgcatgaacggcggcaatcatacccggagcaatacagaagatgtcctgatagcgaccaggggaaccggactaacccgcgccagcgcatcggtaaaacaggttgttcacacctgcctcggtgagcacagcgctaaaccgtgggaagtaaggaaccgactggagcaattatacggcgatgtgaaacggatcgaactattcgctcgggaagagtggaaaggatgggaccgctggggaaatcaatgcaagaacagtatcgaaattattaccggactgattaaagaggtgaaccatgcagcgtga

SEQ ID NO: 218522 - DNA, 405 bp, Klebsiella pneumoniae
atgcagcgtgatattcaactggtactcgaacggtggggaacctgggctattagtgaaggctctcaggttgactggtcaccaattgcagcgggttttaaaggcctcctgataaatacctcaaagtctcgcgagtcatgttgtgacaatgatggccttattgtagacgctgccgtaggaatgcttaaacgggctggccgggatgatgagttaaatctggtgatgttgcattacatgcataacgtttctaaatcgactattgcccgctgggaaaaatgttcagagggaaaaatacgtaacaggttaatgatagccgaaacgtttattgatgcctgcatcattatgagtggtgccagattagaaatggatgattgggcccataaaaaagaagtagagaaagttgcataa

SEQ ID NO: 218523 - DNA, 387 bp, Klebsiella pneumoniae
atgtccgaaccaataaccggcacaggcttagctggtggcgctttaactggggcgagtgtttacgggctgttaaccggtactgactacggtgttgtgttcggggcatttgccggttctgtcttttatatagcgacagcggcagatttgagcgccccacgacggatggcctatttcgttgtgtcctatatcgctggagttctgtgctccgggctggtcggttctaagctatccgacctcaccgggtataacgataagcctctggatgctattggtgccgtaatcatttcggcattagccgtgaaaatactcactttcctgaacaatcaggatattggctcgctggtggcgctaataacgcgccggggaggttccggtggtactaaatga

SEQ ID NO: 218524 - DNA, 282 bp, Klebsiella pneumoniae
gtggtactaaatgatcctactgcaaccatcaatgcgctgttatgtgctggtgtcgttgttacgttgatgttctatcgccgcagagactcacgtcatcgtaaatgggtgtcgcggctggcatggctgataacagtgatatacagctctgtgccgttggcttatctgtgcggcatctatccctattcatcatggcccaccattgcggccaatatcatgatccttgttgtgctgctgagcgtaagaggcaatgtagcgcggctggttgatgcactgaggcactaa

SEQ ID NO: 218525 - DNA, 630 bp, Klebsiella pneumoniae
atgaatcaaacacaattccagaaggcggctggcatcagcgccgggttagctgcgcgctggtttccgcatattacagctgcgatgaaagatttcggcatcactgctccactcgatcaggcaatgttcattgctcaatgcggccatgaaagcctcggttttaacagggtggtggagaatttcaactacagcatcgccgggcttgctgattttgttcgttacggcaggttaacgcaggatcaggccaattccctcgggcgtagccagtcggaaacagtgttacctctggagcgccagcgggctatcgccaacattgtctatagcaagcggttgggtaacaacagggcaactgatggatgggcttatcgtgggcgcggacttattcaaataaccggattgtctaattaccgggactgcggtaacgggctgaaggttgatctagtggcacagccagaattactggagcagtcctcgtacgcggcccgtagtgcagcgtggttctatgtctcaaaaggttgcttgaaatatccgggtgagcttgtccgggttactcagattatcaacggcggacaaaacgggattaataaccggcgcgctcgcttcctgaaagcaaaatcggtactggtggtgtga

SEQ ID NO: 218526 - DNA, 228 bp, Klebsiella pneumoniae
atgtacagcaaaccgttagtcatatgcctgatgacgatgttgatcgcgagctgcgcgaaaagtttacccggcccggtagtcgttgatacggcctgcagctgggtgagggtcatctacctgaccgaccacgatatcgacgtgctggataagcagaccaagcgcgacattctggcgcacaacatatcggtgcaggctaactgcccgaaccttaaccccactaagggataa

SEQ ID NO: 218527 - DNA, 246 bp, Klebsiella pneumoniae
atgtcagagatcaccgcatccgagcaaatccgcctggatatcatcaagaaagttaactacgacactgcagcggccaagctggccattgactgggttggtgatagcaatctgaaagctgagctattcgctgactcttttgatcgtgtcttcactgaaagtgagattgtctcgaagacccgcaaggccatccaggaagcgactgaggcgctggcgctgtttgataccatcgcagaacaggcgagctaa

SEQ ID NO: 218528 - DNA, 204 bp, Klebsiella pneumoniae
atgctttggacttcagtgaaatttaaaatgcctgaaactacgaaaatgacgtcgtggtttatcgttaatacagcgaagggggttggtgtcacaacttactcaccactgaacggtttctcaaaaacagtcttcatagataacgaaacacatcacgatttagaggttactcattggatgccgctgcctcatccgcctgagagttaa

SEQ ID NO: 218529 - DNA, 234 bp, Klebsiella pneumoniae
atgcgcctgacagttctcgacgacgatccgggtgaacgcatcgaacccggtcgcgagcgtatcacggtgtacctcgatagtgttgaggtgaagcacgtcttctcggctgatagcgataaaggcgaagtgattgccgccgtgcttgatagccggggttacctcactgctgagaacggcgaggttaagcgcgagactctgttcggtcacgtgaggatagagcgatgcccgcgctga

SEQ ID NO: 218530 - DNA, 450 bp, Klebsiella pneumoniae
atgattgatgtgaatctggatttttccggtttgcaggatatcgcccgagacctgcaaaccctcagcaaagccgaaaacaataaagtcctccgggattcgacccgtgccggggctgaagttctccggcaggaagtgattgatcgtgctccggaacagaccggtaagctgaagaaaaacgttgttgtcgtcacccagaaaagccgccgtcgcggtgaaatatcatcgggggtgcatattcgaggcgttaacccgcgaacggggaacagcgacaatacaatgaaggccagcaacaagcggaatgcgttttactggcgcttcgtggagctgggaacatctacagcgcctgcacatccgtttgttcgtcctgcctttgatacccgcatggaagaggctgcgcaggtggcgatgcagcggatgaatcaggctattgatgaggtgctggctaaatga

SEQ ID NO: 218531 - DNA, 348 bp, Klebsiella pneumoniae
atgacagaagatgatctctatgacctgctgtcgccgctggcagacgggcgggtttatccgtatgtggtatcgctgggcagcgacggccttcccgatgttcccgcgccttacatcattttctcgataccgactgatgttgccggggatgttttctgcggccaggcagagtcgacgctgcgcatccaggttgatgtatgggctgaaacgaatgacgaagccagagcgttacgcctggatgccctggctcgcctgcaggtgctttcacctgtcgaggtgacaaaaattcctggctacgacacgacaacccatcttcatcgggcaaccctcgaaataacggttattgcctga

SEQ ID NO: 218532 - DNA, 306 bp, Klebsiella pneumoniae
atgcctggcatgcagttcctgatggcgctggcgctccggatgggccgcacgctgggcgaactgcgacaaaccatgacggtcggcgaattcaggatgtgggctgaatacgaccgtatcagcccaatcggcgatattcgcggcgatattctcaatgctcagctggtatctgcggtttacggagcgcagggcgttaaagtcaccattgaagatgctcagcttcagtggagcgcagatgaggaagaggcaagcgacggcagcgatccctttgcagggctggaagcggcgctgctggctgcgtcagcatag

SEQ ID NO: 218533 - DNA, 3354 bp, Klebsiella pneumoniae
atggcaaccctgcgtgaacttatcattaaagtttctgctaactctcagtcattccagaccgagatagcccgcgcgtcacgtatgggggctgattattataagacaatgcagaatggcggcaggaaggctgcggcttcagttcgggaaactcgccgttctgttgctgagctaactgaccagatggagtcagcaaaggctaccgcactggggttaaccggggcatttgctggtgcttttgctacggggcatttgatatccctggctgatgaatggaattcagtaaacgcccgcctaaaacaggcatctcaatcaactgatgattttaccagctctcaaaaacagctgatggatatcagccagaagacagggacggcgttttcagataacgctaaccttttctcacgatccgcggcttctatgcgggaatttggatatagttcaacggaagtattgcagattaccgaggctatctccacaggactaaaactttcaggagccaatgcccaagagtccagctctgtcattactcagtttagccaggctctggcgcagggcgtgctgagaggtgaagaattcaatgccgtcaacgagagcggcgacagggttatacgggcgcttgcggcagggatgggggttgcgcgtaaagaccttaaagcaatggcagatcagggaaagcttaccattgataaagttgtacctgcattaattagccaactcggaaaacttcgcgacgaatatggagaattaccgcaaacagtttcttcatctgcgacaagaatcgaaaactcttttatgcagtgggttggcggagccaatgaagccagcggagcgacacgcactttaactggcgtccttaattctgtggctgaaaatattgacactgttgccactgctgctggtgtgctggttgcggttggagtaagtcgatattttggggggatggtttctggtgcttattcagcaacagcgggaataattaatgcagcaaaaagcgaagtggcattagccgaagctcaggtcagaggaactcaaatttctacagcgcgagcacgggcggctgtttatcgagctcagcaggccctggctgcagcccgcggcaccgatgcacaaaccgttgcggaaaacaggctaagtctcgctcaagcctccttatcaagaaatataacagcaagagcttccgcacaagcagccctaaatacagtcacctctgttgggacaagattaatgggcggggctctaggtcttgtcggcggtataccaggggcagtaatgctgattgcaggtgcatggtatgccgcataccaaaatcaggaacaagcgcgcctgtcggcacaggaatatgccaaaaccattgatgaggtcagggataagaccaaatcaatgtcgcttcctgaggcgtctgatagcgagggtaaaacaaggaaggcattagatgagcaaaacagactgatagatgagcagagaacaaaggttcgtaatctgcaaaacgatgtcgaaacacttaataaagctcgtgagcagtataaaggtaggctgaatgattctgatttaattgacggtatagcatcagcaacggcttctcttgcggttgagcaatccagactgaaccagatgcaagaaaaagcacaacagattcaacaagttcttgaaggccttgaaaatcggcgtgtcgctctgattcgccagcaagccgctgaacagaatgctgcctatcagtctttgataatgatgaatggtcagcatacagaatttaaccgtcttcttgggctaggaaataatttactgatggcccggcagggattggttaacgcgccaatgcgaatacctcaggcagatctcacaacgcaacaacaggcagcgattgataaaagccgccgtgaccttgagctatctaaacttaaaggtgaagcaaaagaacgtgcaagattgggttatacagccgatgatttgggttttactgcagacaacccaaaatatcagactgtaaggcaggaactcattaataatggacttgctgagtggcgaaataacgaggctaataaaccaaaaagaaaagggccaaaaactgatgaagaaaaagctgaggatgtttataagcgcttactaaaacaacagcgtgaacaaatagccctggaaagtcagaatactgagctggcaaaagttaaataccaggttacacagggcgaattacatacgcttgagcaatctaaaaaagaaactcttctgcataatgctgcgcttatcgatcagaaaaacattgctgaacagttaaaaacgttccgtgagggcttggctgacagcaacgctgctgcgcgtgaccgggggaatattgattttcttggtgccggaatggggaataaggctcgcgaccgcatgaaggaaatggcggatatccgtactgatttcctgaaacagcagcgggacctgcagcgggatttcagcaaaggtcaaatttctgaggacctgtacaaacagcaaacggaagcacttcaggtggcgcttactgaacggctccagattcaggaggaatactacaagaaaaccgatgagcaacagtcagactggcgcgcggggatcagcgattccctgatgaactatgccgatcaggcctctgatcttagttcaatgtcagcatcagcgaccagtgagatactgaacaatgctaccaactcgatctctaccaatatgacgaatgtgctgacgggggctaccacctttaaagaaggtatgtcgaatatcttcacctcccttggagaaagtgtcattcagtcgctgatccagatggcaacgcaggcgctgatcaccaaagcgattctggcttcagtggggggcgggtttggcgggatatttggcagtatttttggcggggcgagtggtgcagccagcagcggaacggccattcaaagcgccggggctaacttctcctttaatgccttgggaggtgtatacgattcaccgtcactttctgcatatagcggcggcgtgtacaacactccgcagtattttgcttttgcgaaaggcgcaggtgtatttggcgaggccgggccggaagccatcatgccgcttacccgtggcgctgatggttcgctgggggtcagagctgttgggcgggaatcaccggcggtacagaacgctgcgaagcagatccaggcacagccacgaattgctgtcagcgtagatgccagaagtacgttcaccggtaaaccggatgacataacgatgcaggcaattgagcgaaggaatgacgctctggaacagcggatagttaacaccttaaccgccgaagtaaataaccctcagaagaaattcggtcgggctatttattcaaatctccaatctaaaaaaccaagatag

SEQ ID NO: 218534 - DNA, 2904 bp, Klebsiella pneumoniae
atggccgaacttaacccgcctttgggaacgacgacgcctgaaattttcctggataacgtcaagcgcgctgatgagctggttaacggccctgccggaacggttaacgaccgagcaggtgaaccgctggatacgtggcgtcagatgatggcgaaaaacgatgagatcaggcagaacctgatcccattgagtaagcagtacatgacgctggcagcggcacaggctgatattgccaatatccctgatggctcaacaacctacgtgcgcagtcaggacggtagtgcgctggctgatgaatacatcaacaacggcggcacgcttgaggccaccggacgaaaaatgccgtctcagggatatatcgacagcattatcagaaaggacgatattaattcccctgcagcgtcaattgccacgaaagacggattctcagtctgttcgttttacgttaacgaggaaaccggcaatatagaaatgattgttgacaaaatcccgcaagtgaatgctgacactgttgattttaacggggttacgctggcgcgttctgagtccggtatgctgctgttcgaggataagcttgggtttcaggttgagctgagcgacttgattcagcaggtgtctgccggaacggcgggggccactggcgtggttctggaatatgcgaccctcgcacgcgctaagaatgctgtggatatcgggactatccctgacggctcgacggtctgggtggctgattcgggaaccacgttgaccgtggaatacgtcaataattctggcacgctggagttaaccgggaggaaatctcagtctctggatgatatcgacaaacttatcgggaatgtcagtataaattccccggtcttttccctgtcttctgaggacggactatccttgatttcgttttatgcaaacgaaaacacaggagaaataggaatgagcgtggataaaatttatcgtgtcgacaccgacgaactgaatatcggtgaggcccgaatggtagcctctgacggtgggctgctcgtgtttcaggatgagaacggcgtggaggttgatattattgacctggtctcgcagattgccggcgagagcgttgtatcaaccggtgatactgcagcactgctcagtgccgacgctgcggcgtatattgcgcagaactacaacctgaaacggcaccctgttgccgttatcaggcagggacttaacctctggttcgtatacgggcagtcctttacgctgggcactgcggcaaaaggcattctaacccgcaccgatagcgcactcggcaacctgatgctgggccagtctccacgcgggagtaatctcaaccccggcattcagaacgcgtttgcccctgtcggcggggagaataaatataccctgctgcgggaacgtcgccagaaagacgacggcacaatgacagcggatgattcgactgacagcaccacgttcggtgaaaccattctctccgggctgcttgaaacactgaaagacaaccataaccgaagcaaaggggtcgtgaacgatgccagcgtaactttggcgggttcatgctgtggcactgttggcgtatcaattactgcgctgaagaagcggacggcggctgacccggcaaacaatgtcgtgggcaacccgacattcgcaaactcggcgagcggctggagcgccgggacggtaacgcccgttgacggcgtgaacgttctgtattctggctcgtcatacgttgagagtgcgaaattcgacgtgactgccggggcggttattgaggtgacagggcgggtctatttcccgaccgccatcaccgggacggtgcgtgtcaatatccggtttgatggcccgtccctgtccaatgtcgccgtcgcggcactggccatcactaatcctgctgcgggctcggtttatccggtcagtcgtcgtataacggttcccgccggcgcgacaaccggcatttaccagattgccaaacccacatccgtcagcacagggatttcctcgccatcggctatcccggtgacgggagaccagttaactgattattacggtcgttggctgagttgcctgaaggggcacatggaggcagctaaaactgccggatatgagcagacgcaggtggcgggcattatctggatgcagggtgaaaatgataccggagggatgacaacggctgaatatcttggccatctcaacgatatcaaatcatcgatgatttctgactgtattgcagcaacaggccagaaggaggcgccgggatttttcgtttatcaaaccgggggcatgtatgcggggaacacgcagaaactgaacgtgcaaatggcgcagattggcatcactgatacagaccgtggcgcgtttttcctgcacaacgagttcccgtatccgcgccctgctaatcactggtacgcaaacagctatcgctgggcaggttgtcagtacgccaaggagatttaccccgttgtctccgggctgaatttcaacccgttcaaaccgctggatgcggtatatgacggcaaggcgatttacatatcgttcagtccgctgtatgcgccgcttgtcaaacagccgttctataccgggactaccgttactgaccatgccgattacgggtttactgttattgacgcgaacggcgttcactacggttcggctgtcgctgttgagatagcatcagatacggtgatgaaaatcaccccgacattcacactaacgggcgcaatgacagtagtcctgggtgatgcgaatcatgcaggtggccacaacatcgcagacagcgatgaccagctggcgttgtatcaatggacctacgaaacaggctacggactggatgccggggaaaatatcgccgcgctcgttaaccgttcctatcccctgtttaaccgctctgcatcttattcaatttctgtgaggactttgtaa

SEQ ID NO: 218535 - DNA, 744 bp, Klebsiella pneumoniae
atgtctggactgcgtatcattgtagataatgacgatattctgaaatatgcgaaaagtgtcaatattccggtcagaaatggcctggttcgcgctctgctgatggtgggagataacccggagaaaaactttaacggctccggcgacctgttatctaaaacgggggctccgacaaaaacgaccgaccactcctacacgtttaacaactcggcgtatatcgatacaggttacgcctgggccggggatatcacgatttttgcggtagcaaaacggcgtatttctgcgctgtcaggtaaagctaaatgctatgcaacgagctggttttctggtaacggcggtgctgttggcctgctgacgttgcaggactccaacctgtacgcgcacgctatcgccaaaaacgccagcaacacgttctcattccagaacgtgaccattccgatagcgtccgggtcggataaccctgtctggcaggcaatggcgcagcgtatctccgggcgtgtaaacaccgggtataatctgactcagaatctgagcgcctccctgacgctggctgacggactgagctgggccactcgctccgacgtaacaatcaaaattggcacaggcaacggacaggcagatacagccatagaggattgcgagattgcctgtgtgtttattttcaaccgcgcgctgactgacgcggagataacgagcatgcatgcctggatttctgagtgggggaaaaactacagcctgattgtttag

SEQ ID NO: 218536 - DNA, 468 bp, Klebsiella pneumoniae
atggcatacccaacgttagctgtggctaatgccttcatcgaaaaagcattagcaaatgaactgtctgatttgacgccaatgaagcttcaaaaactgatgttctatgcacaatcttggcatctcaagatttacgatgaaccattgattgatgactttttctccaaatggcagtatgggccagttatcccatcgctttaccatgaagtcaaaagctacggttcatctcaaattaatagcctgataagcaatctgatgcatactccacaaggggtaatgattgctacaccaagcgtaccaaagcaggattttaaaaccaggcagttgatagacaaaattgttagcgtttacgggccattgcgtggaacccagctttcctacctgacacatcagccggggacagcatggtccagaacgcaggactatagctcagtcatcgacaatagccttctcaaagaatgcattgagtaa

SEQ ID NO: 218537 - DNA, 240 bp, Klebsiella pneumoniae
atgccgcgaaattcagatatcgaaatagcctggcgtcaggcaattgtcattgagcctaatggccgtcgcaccgtgacaacgtccggttttatccgggaactcgcaaaagttaactggatatggtcaccgcgccaggctaaccagtggatagagcactatgtgacgacattccgggatgtctcaacgcaggaaggcgatgagcgcacgttccagttatacaacccgaacggagggctataa

SEQ ID NO: 218538 - DNA, 372 bp, Klebsiella pneumoniae
atgagcgcacgttccagttatacaacccgaacggagggctataacgtgggatttccgtcgccagcagcagactatgtagaagtgcggctgaccgtcgataaactctgcggtaccggcccaaatactaggctcgttcagacagaaactggttacaccgtagtcgatgtctccggtaaaccaaagcaaggagataccgttttaattcaatacggcggcggcactgattttgcaaaaattatgggccgggtatttattacacgagacggtgaagcgctggaaggtgaggccctggatgatgttacagttgtcggggtggtgacattcgtcatcaatcgagcttggcctactgatgacgaatgtcctgtcatataa

SEQ ID NO: 218539 - DNA, 738 bp, Klebsiella pneumoniae
gtggtttacaaaaatatcgtcaatttgcttaaaaacaaaattaatagcccgttctacaacattggcgatcttctgccagccgaaaaagagttggcagaactttatgatgtttcacgcaatacgttacgtaaggcgctgaaaaccctggaagaggatggtttaatcgaacgtcgacacggctcgggcacatggattagaaataagcatttccaggcgtcggtgacgcatttagacagttttaccgaaattgcccgtaatcaggggaaaacgccctccagccagatcctaaaatttgagttacagcccgcctcggaggaaattgcccgtgggctgcaattgcagcacggtgaagcggtatattatgctaaaagattgcgttttatcgataatattgcgatgcaattagaggaaacctggctgtcagcgacccgctttcccgacctgaccatcgcgcatatgaagaaatcgaagttttcatatatagaaaacgaatgcggagtaagaataaatggatgttatgaatcaatagtgccggtgcttccaacgcctgagctggcaacccttctgcatatcagcgccaaagatccgattatccgcatgcagacgcaggcgattgatgaacaccaccagcctattgattactccattctgtataccaatatgtttgaattccaggtgaagtattatctgccacggcagacagcgtccagcctgcccgtgggcaaggccggactgtaa

SEQ ID NO: 218540 - DNA, 315 bp, Klebsiella pneumoniae
atgcaaaatatattgttagtgtgtgcagcaggaatgtcgaccagtatgttagtgaagcgaatgcaggagcaggcggcgaatattaaggtttcggtgaatatcaatgctatggctatttctgaagccaaagaaaagattaagaacaacgaagtggatgttgtgcttttaggcccgcaggtgcgttttcaaaaaaatgaaatagaagaggtggctcagggtaaaatgccggtagcggtgattgatatgaaatattatggacagatggacggtaaagccgttctggataatgcactggcattactggcaaagcgttag

SEQ ID NO: 218541 - DNA, 1347 bp, Klebsiella pneumoniae
atgagtttcatggatacctttgagcgtggcatggaaaaaattctcgtgcctgtcgcgattaaattaaattctcagatccacgtttcagcgattcgcgatgcgtttattctttcgtttcccatcgtaatggccagttcgctgattattcttatcaactttgctattttatcgcctgacggatttatcgccagtattctgcatttaggctcgatattccccaatctggcggaagcgcagcagattttcaccccggtaatgaacgggtcggtcaatatcatggcgatattgatcacctttctggtggcgcgcaatatggcgatcagctatcaacaggacgatctcctgtgcggcctgacggcgatcggcgccttttttgtcgtctacaccccttacaccatcattgatggccaggcctatctggcgactaaatatcttggcccgcaggggttgtttgtggcgattatcgtcgcgctgatttccagcgaggtcttttgtcgcctggcgcgtaacccaaaagtgaccatcactatgcctgccgcggtgccgccggcggtggcgcgttcatttaaggtattgttgccgattttcttcgtgatgatcttcttttcgatcctcaattatctgttgacgcgtatttctccaaatggccttaacgacctgatatatacccttattcaggccccgctgaaggatatggggaccaacattgttaccgttctggtgctggggctggtggcgaatttcctctgggtactggggatccatgggccgaataccgtggccgctatccgggagactattttctcggaagccaatctcgaaaacctctcctatgccgcttcgcatggcaccacctggggagcgccgtatcccatcacctggaccggtatcaacgatgcgtttgctaactgcggtgggtcgggtatgacgctggggttgctgctggccatttttatcgcctcccggcgcaaagattaccgtgatctggcaaaaatggccttcgtgccgggcctgtttaacatcaatgagccggtgatgtttggtctgccgattgtgcttaaccccatcctggtgatcccgtttattctggtgccgtttgtgaattcattgatcggttatttctttattagcatggagtttattccaccgattgcttacgccgtgccctggactacgcccgggccgcttatcgccttctttggcaccggcggcaactggctggcgctgtttgtcggcattctgtgcctcgcggtttcaacattgatttacttaccgtttgtgattgccgctaacaaggtcaataccgcggcggcggcgaaccaggaggatggcgatgtttgcagatga

SEQ ID NO: 218542 - DNA, 312 bp, Klebsiella pneumoniae
atgtttgcagatgaaagtacggtcatggagttgctgatttatgccggtcaggcacgctcagacgccatggaggcaattgccgcctcgcggcagcaggtatgggggcgggcagcggatttgatggccagctcggaagcggcctgccgggcagcgcataagatccaaacggcgttgataggtcaggacgagggctgcggaaaaattaccgttaaccttattctggtacacgcccaggatcacttaatgaccgctatgctgtgccaggatttagccaaagaaattattgccctgcgccaggagcgctccgcctga

SEQ ID NO: 218543 - DNA, 1674 bp, Klebsiella pneumoniae
atgtattcaagtcaattgaaggtgagcttattgtctttatcggtactgctggctatttcgacaagtgatgtgatggcggctaaattaaccattgaacagcgtctggaattactggagtctgaactttcggcgaataaaaaagaactgcaaaaaacgcaatcacaattatcgacctataaaggcaaggtggccgaattacaaaaaagtattaaggagaatgaaaaacgccatgtcacgacgggttatccgacagcaacgtcgccggtggcggaaaatatagccaatgaaaataatgaactgagtaaaaaagcggctccggtgcaggtgaaagccagtcaacaggtggcggttatcgataccgacggtcagaagccgaaactggaaagcgtcaccctgaaggacatcagtaaatttgtcaaagacgatattggctttagctaccaggggtacttccgttccggctgggggacgtcaaaccatggatcgtcacagacctatgcccccggctcgctgggccgttttggtaatgaaatgagtggctggttcgacttaacgctgaatcagcgggtctataaccaggatggcaaaacggcgaatgccgtcgtgacatacgacggcaacgtcggcgagcagtataacgacgcctggtttgccggccaggataccgacagcattttgcagtttagtgatattttcctgaccaccaaaggtttcctgccgttcgcgcccgaggcggatttctgggtcggcaaacataaactgcccgagtatgaaattcagatgctggactggaagtcactgaccaccgacgttgcggccggggtcgggatccagaactgggcgctgggggtgggtcagctggatgcttctgtcagccggaacgacgtcgacgtgtactcccgtgatttcacgcaaaccacccagatgaacaccaactccgtcgacctgcgctatcgcaatattccgctgtggcagtcggggtcgctgtcgttaatgggcaaatacgcgtttgctaataaaaatgacgagcaggagagaaacgaagataacaacagctacttccggttcaaagatacctggatggccaccgctattattcgtcaggagctggagcgtaaaggcttcaacgaatttacgctgcaggtggcgaataactcatacgccagcagtttcgccaacttctccggcgccagtaactccatggccagcggacgctattactatggcgatcataccaacggcgtggcctggcgtttgatctcgcagggagaaatgtatcttgccgatcgtattatcatggcgaattcgctggtatgggcccacggtaacgatatctatagctatgaaagcggggcgcacagcgattttgacagcctgcgcgcggtgatccgcccggcctggatatggaatacctggaaccagaccggggttgagctggggtggtttacccagaaaaataccaccagccagagcggcgatctgaaagagtcggcgtataaaaccacgctgtaccatgcgctcaaggtcggcccgagtctgttggggtcgcggcctgaaattcgcttctatggtacctatatcaatattcttgataaccagctgtcgcagttcaccttcaatgacgaaagcaaagatgagtttatggttggcgttcaggcagaggtgtggtggtaa

SEQ ID NO: 218544 - DNA, 660 bp, Klebsiella pneumoniae
atggacttgattcactttttaattgatttcatcctgcatattgatgtgcaccttgccgagctggtagcccagtacggcgtctgggtttatgccattctgtttttgattctgttctgcgaaaccgggctggtggtcacgccgttcctgccgggggattcactgctgtttgtggcgggggcgctctcggctttgccgacgaacgatcttaatgttcacctgatggtattgctgatggtcatcgcggctatcgtcggcgatgcggtcaactacaccattggccgactgttcggcgagaagctgttcagtaatccgaactcgaagattttccgtcgtagctatctggataaaacccatagcttctatgaacgtcacggcggaaaaaccattatcctggcgcgctttgtgccgatagtccgaaccttcgcaccgtttgtggcgggaatgggacatatgtcctatcgtcattttgcggcctataacgtggttggggcgctgctgtgggtgctgctgtttagctacgctggctatctctttggcgacctgccggtggtgcaggagaacctgaagctgctgatagtggcgatcatcgttctctcggttctgccgggcgtgattgagattattcgccataagcgggcggcggcaaagcaggctaagtag

SEQ ID NO: 218545 - DNA, 879 bp, Klebsiella pneumoniae
atgacattaacgcagatccacgctctgcttaccgtgctgaaatacggcggttttactgaggccgccagacgtctctatatgacccaatcggcggtcagccaggccattgccggactggaagaggagcttggcgtggcgatagtcgaacgagaacggcgaaaagcgctcaagctgacggcggcaggagaacgccttgttccggcgatgcgacgactgatgagtgaagtgagcgccattaaggagatagccgaacaggaaaagaaaacaccgctgcgcctgctgcgcatcggctgtttccccggcatttgtgccagtatcctgccccaggtcgttcactacttcgagcaacatcatccgcatattaaaatagtgccttatgaagcaaacagtacggagattattgaagccattcgggagaataatatcgacgccggattcacccatatttccgttaacggcctgtttgccacaccattttataaagacagatttatggttgtcgttcctcaatcgcatccttttgcccgccggagcagtattcctctcgaagcactgtacgatgagccattaattatcagcaaagggcggtacgaaatgagcattatgtcgctgtttgcgaacaggaatattacacctaatataaaatatgaatttaaccacccaggcactgccatgagttttattcgtctgggattaggtatcgctttgctgccggaactcacgctaaaaacgctggaacaaccgctgtactccgtgcctctggaacctgccttttatcgtcacgtatcgcttatcaccagcacctcaccggttagcggcagcccgattcagttgctgcatgattgcctgcgtcagctggtggaccaaaagcgactttga

SEQ ID NO: 218546 - DNA, 174 bp, Klebsiella pneumoniae
atgattttcctgaaacttaatcacacaatcacgcacgcaattattggtattcacaatgtatttctgaaattatatattcgttatgaatgtggtaatgcgcgccgttacagtaaggtgcaattagatgaaagaaaaactgtggacgaaagatttttgggccatcacgattgttag

SEQ ID NO: 218547 - DNA, 1191 bp, Klebsiella pneumoniae
atgaaagaaaaactgtggacgaaagatttttgggccatcacgattgttagttttattattttcttcgtattttatgttcttctgacgctcctgcctatttatattgccgacaatttgcatgcgactgcggataaggctgggttgctggtgaccttcttcctggttgccgcgattattgtccgccccttcgccggtcagtgggtgggtaaatattccaacaaaggcattttgctgatttcctctttagcctttttggtggttacggctctgtaccccttttgccataccattgaagggctgctgttcattagggttcttcacggcatcaccttcggtgtgatcaccaccgtcaaggggaccatctctgcgcgcttaattcccgcctcgcggcgaggagagggaattagctttttctccttagcaatgggactggcaatggtagtgggaccatggattggtctgaatatggcgcgtcacagcgcgtatattcccgcattctggatgtgtacggtggtgtctgctatcgcgattgtactgtcgatgatgatctgcgtgccgccggttattcgtcatgccgatggttcgcagccaaagcttggcttttctgctatgttcgatcgcgcggccatgccttttgccctggtcaccttctttatgacgttctcatacgccggggtttccgcctttcttgccctctatgctcgcgaactggatctgatggcggcagccagtaactttctgttgtgctatgcgatttttctcatgatctgccgggcgtttaccgggaatgtgtgtgataaaaaagggccgaagtatgtggtttatccgtgcctgctcgcctttaccattggtttagtggtgctgggttatacgcacggtagcgtttcaatgatcctgtccggtgcgctgattggtattggatatggctcagtaacgcctgttttccagacgcagatcatcagttctgttgaaacgcataaaattggcgtcgcgaactcactgttctttaatgccatggacgcgggcctggcgataggggcgttcgtgatggggatcatggttgacggcgtgggttaccgtgctatttatctggtgggggcgctattggtggtggtggcggggctaatttatgtcttgcagatgaaacgccatggcacaatgcaattagtcagtgcacacgaagtgcactaa

SEQ ID NO: 218548 - DNA, 255 bp, Klebsiella pneumoniae
atgaagcggattttcctgaaaatctctgacactcgccttgagtgtcaggatgaacacccttccctgctggcggcgctggaatcgcataacatcgacgtcgagtatcagtgccgcgaagggtattgcggctcctgccgcacccgtctggtttccggccaggtcgactggctgaccgagccgctggcctttatccagccgggggaaattttgccctgctgctgccgggcaaaaggggatatcgaaattgagatgtaa

SEQ ID NO: 218549 - DNA, 1197 bp, Klebsiella pneumoniae
gtgacgatcaagcagaattcttctctgggaattgtgtttattcttggcctgctggccatgctgatgccgctgtcgatcgatatgtatctgccggcgctgccggtgatcgccgcgcagtataacgtcccggacggcagcgcgcagatgaccctcagcacctatatcctgggctttgcgctgggtcagttgctgtatggcccaatggcagacagcctcggtcgtaagccggtgatcctcggcgggacgctggtcttcgccgcggcggcgatggcctgcgcgctgtcgcagaccatcgatatgctgatagcgatgcgcttcttccacggtctggcggccgcggcggccagcgtggtgataaacgccctgatgcgcgatatttatccgaaagatgagttttcgcggatgatgtcctttgtcatgctggtcacgaccattgcgccgttgatggcgccgatggtcggcggtgcggtgctggtctggtttagctggcatgccatcttctggatcctcgcgctggtggccctgctggcatccctgatgatcggcttgtttatccgcgaaacgctgccagctgacaggcgtcagccgttccatctgcgcaccacgctgggcaactttgccaccctgttccgtcacaagcgggtgctgagctatatgctggcgagcggctttagcttcgccggcatgttctctttcctcagtgccgggcctttcgtctatatcaatattaaccacgtcgcgcctcagcactttggctactattttgcgctgaacattgttttcctgttcctgatgaccatgttcaacagccggtttgtgcggcgggtgggggcgttgcgcatgttccgggccgggctgtggatccagtttgccatggcggtatggatggtggtttgcgcgctgctggacgtcggcttctggtcgctggtgatcggcgtggcggcctttgtcggctgcgtatcgatggtgtcgtctaacgccatggcggtgatcctcgatgagtttccgcatatggccggcaccgcctcgtcgctggccgggacgtttcggtttggtattggggcgattatcggcgcgctgttgtcgatggcgacgtttaccaccgcgtggccgatgctcatctctatcgctttctgcgctaccagctctattttcttctctctttacgcttcccgccggcggaaaatcgcacgctag

SEQ ID NO: 218550 - DNA, 201 bp, Klebsiella pneumoniae
atgcccctgttgccggataatttcctcaaacacggtccgcgtattgatgccggatggcggctgacgccttatccggcctacgatccgggcgccctgtcgttaagttattcactattcttgctgaaactgccggtgttggcggcctcaacatcgctgagacgttcccggaaggccggggcagcccgcatggatgcgggctga

SEQ ID NO: 218551 - DNA, 933 bp, Klebsiella pneumoniae
atgttgaaagacttcaaaatggatgaactcaggatcatcagcaccatcgccgaaaccgccagcgtgagccgggccgctcagcgcctgaatatgccccagtctaacgtctcacgaacgctgaccagcgtggagcggaaagtcgggctggctattttcctgcgcaccgctaaagaactggtgcgtaccgagtttggcgaacagtttattcacgccagccgcgccgttcttgagcagcatgagcagcttatcaaccttgccgaccgttataagaacacgctgcagggcgcagtcaccctcggggcccctatcggcatccatcaatttcttgggcgatatattttgccagcgttgagaaaaacccttccgcagttgcagatcaatctggtcacccgcaaccccagcgagcgggaacagaaatacggcgcgatcttcaatagcgactgcgatctgctgattagcccttttaagccgcaaaatgaaaatcttatcgcccgtccctttacccgctttcgtaccggcgtctttgcctcaccagactacctggcgcaacatcctctcgccgagccagaggcgctggtggatcatgagtgcattactctgcggatgctgggcggcagcgacaatatctggacgttcaaaagtaaaagcggcgagccgctcgacctcagcgttagagggggatttgtgtgcgataacacgctgccggcggtggggctggcgaagctggggatggggatcgtgtatgcgccctattattcactcgctaccgagctggcagcagggcagctggttccctgtctgaaaaaagagcgctgtatcgacctgcaggcctggctaatctaccagcggcgggacattcttccgttacgcgtgcaggcgctgctcgacggcctcagcgcccatattaaaaatctgtctcacctgctgctttaa

SEQ ID NO: 218552 - DNA, 345 bp, Klebsiella pneumoniae
atgctgcttaattattttgctttgtttgtattaatactggtttttcttatattattttatggagtgattattatccacgatattccctatcacatcgcgcaaaaacggcagcatcctcatcaggacgcgattcatgtggcgggctggataagcctgtttaccctgcatgctatctggccttttctgtggatttgggccacgctgtaccgccccgaccgtggttggggaatggcgtcgcagaccgagggccagcagcagcgagtagcgcttgaacaacgtattgcgttacttgaagcggcattaaaaaacagccagcaagcgtcagcggggaataacgagaaataa

SEQ ID NO: 218553 - DNA, 1137 bp, Klebsiella pneumoniae
atggatctgttaattatcctttgctatgtcgctatcgcctggggcgtttttaagatatttcgtattccggtaaataaatggacgatccccacggctatattaggcgggattgtggtcgtaggcgcgttaatattaacaatgaactataaccacccctatacgatgcgggcgcaaaaaattgtcgtttctgttccgatggtgccgcaggtctcaggcgaggtggtggaggtcaccagtaaaaccaacgtgttattaaagaagggcgaactgctgttccgcatcgatgacacccgttatcgcgcgcggctgaacaagctgaaagccgatctggcggctgaggaagcgtcgctgcgggcgaagcaggcaaccattgacgatgccagcgcccgagttcagcaggcgcaagcggagtacgatcgcgttacccgcgattatcagcgttatgcccagggggcggctatgccggtcaatcctttctcggaacaggatgtgactcacgcgaggcagcaggtgcagatccagacggcggtattgcaggcggcgaaagcgcagttacaaaacgccagagagcaggtgtcgggccgctatcacgggctggatgccaacattgccagtctgaaatcacagatccttgaggcggagtataatctggcgcaaaccgtggttcgtgcgccgagcgacggctatgtcacacagctactggcgcgaccggggatgaccgcagtgcgtctgcccttcaagccggtgctggtgttcatcccccagcaaaagcgccaggtggtcgcggtatttcgccagaactcggtcctgcgactgacggccggggacagcgcggaagttgtctttaacggtctgccgggcagcgtctacagcgggaaggtttcgcgggtgctgccgaccgttccggacggtagctatcaggccagcggtgcattgcaggggctgaacgccggggcagggaaagagggtatctatgtgctgattgatcttgatccgcacccggaagtggaacatttaccggacggggttagcgcgcaggcggcggtctataccgattattttgcccatgtgtcgattatgcgcaaagtcctgctgcgaatgaccagctggctgcattacctctatctggatcattaa

SEQ ID NO: 218554 - DNA, 1182 bp, Klebsiella pneumoniae
atgcaaaaccgtagcgccgcccttccccgacgcgggttcgatgtaacctcttccgccttcttgatcgtcgcctttctgacaggcattgccggggcattgcaaaccccaaccctgagcctgtttttgaccaacgaagtacacgtccgtccggcgatggtcggcttcttttttaccggcagcgcggttattggcattctggtcagccagttcctcgccggccgctccgatcgtcagggcgaccgcaagcagctgattgtcgtctgctgcctgctgggggtgctggcctgcgtactctttgcctggaaccgcaactacttcatcttgctgttcatcggcgtttttctcagcagctttggctcgaccgccaacccgcagatgtttgccctggcgcgcgagcacgccgacaggaccggccgggaagcggtcatgttcagctccattttacgtgcccaggtctcgctggcatgggtgattggccccccgctggcctatgccctggcgatggggtttggctttaccgcgatgtatctcagcgccgcggcggcgtttatcgtctgcggggtcatggtctggctgttcttgcccagcatgcgcaaagcaaagccggtggcgaccgggcgactggaagccccgcgcacgcaccgccgcgatgcgctgctgctgttcagcatctgcacgctgatgtggggcaccaacagcctgtatatcattaatatgccgctgtttatcattaacgagctgcatctgccggaaaatctggccggactgatgatgggtaccgccgctggactggaaatccccacgatgctgattgccggttactacgcccggcgcttcggcaaacgctttctgatgcgtctttctgcagtcgccggggtgctgttttacgtggggatgctgacggtgcatacaccggcgctgctgctggcaatgcaggcgctgaacgccatttatattgggatcctcgccgggatcggcatgctctatttccaggatctgatgcccgggcaggcgggtgcggccaccactctctataccaatacgactcgcgtcggctggatcatcgccggttcactggcgggggtggtggcagagatatggagctatcatgcggtgttctggattgcgctggcgatgggcgtagccactcaggcctgcctgtggcggatcagggacgtgtaa

SEQ ID NO: 218555 - DNA, 1695 bp, Klebsiella pneumoniae
atgaaaacgctgctgattattgatgccggactcggacaggcgcgcgcctatatggcgaaaaccctgctgggggccgcggcgccaaaagcgcgccttgaactgattgataacccgaatgacgccgaactggccatcgtgctggggaccgcgttgccggccgatagcgcgctgaatggcaaaaacgtctatctgggcgacattaaccgtgctgtcgcccatccggagctgttcctgggagaggcgaaagaccacgctaaaccctacgttgcgccagcggcggtagccgttccggccgccgctcaggggcagaaacgtattgtcgccgtcaccgcctgtccgaccggtgttgcccatacctttatggcggcagaagctatcgaaaccgaagcgaaaaaacgcggctggtgggtgaaagtggaaacccgtggctccgtcggcgctggcaatgccatcaccccggaagaggtggccgaggcggatctggtgatcgtcgccgccgatatcgaggtagacctggcaaaatttgccggcaagccgatgtaccgcaccaccaccggtctggcgctgaagaaaaccgcccaggagctggataaagcggtggccgaagccaaaacctatcagccatccggcaaaccgcaggcggctgctgaagggaaaaaagagtcggcgggcgcctatcgccacctgctgaccggcgtctcctacatgctgccgatggtagtggccgggggcctgtgtatcgcgctctcctttgccttcgggatcaaagcgtttgaagtgaaagacacgctggcggcggcgctgatgcaaatcggcggcggctcggccttcgcgctgatggtgccggtgctggcaggctttatcgccttctccattgccgaccgtccgggtctgaccccgggtcttatcggcggtatgctggcggttagcggcggctctggctttatcggcgggatcattgccggtttccttgccggttacgtggcgaaagccatcagtacgaagctgaaactgccgcagagtatggaagcgctgaagcctatcctgatcattccgctggtctccagcctgatcgtgggcctggcgatgatctacctcatcggtaaaccagtctccggtatcctcgcctggctgacccactggctgcaaaccatgggcaccgccaacgcggttctgctgggtgcgatcctcggtgggatgatgtgtaccgacatgggtggcccggtaaacaaagcggcttacgcttttggcgttggcctgttgagtacccagacctacgcgccgatggcggcgatcatggcggccggtatggtgcctccgctggcgatgggtatcgccacgctggtggcgcgcaacaagttcgataaagggcaacgcgaagggggtaaagccgcactggttctcggcctgtgctttatctcggaaggggcgattccttttgccgcccgcgatccgatgcgcgttctgccgtgctgtatcgtcggcggcgcggtaaccggcgctatctccatggcggtcggcgcgaaactgatggcgccgcacggcggtctgtttgtcctgctgatcccaggggcgattacgccggtgctgggctacctgctggcgattgttgtcggaacgctggtggcgggcctctcctacgccgtgctgaaacgtccggaagcgcaggcagcggaagtcgaaaaagcggcataa

SEQ ID NO: 218556 - DNA, 447 bp, Klebsiella pneumoniae
atgaagaccctgaataaaaaagaaacagaaatccaaaataccttagccaggctgcgggcggataacccaccatccctacccgccaccggggtaacggctacggaaaaaaaagctcgttcagagataagcagacaacgcgtctcggctggtttaaaaaaagtcaaaacggtcgatcgtcaggcggtcattcacgccattatccatgacatcatgctaggcgccatcagccagggagaggccctgaaaaaactgagagtagaagttctgggtttacgccaggatgaatatgcccggctagtggatgtctctcgtaagaccttatctgatgtggaaaatgataaaggcaattattctgccgagatcattaataaaatctataagccgtttggccttgaaacaggactcgtccctatttctaaaacacttatttcttctctatttaaatag

SEQ ID NO: 218557 - DNA, 543 bp, Klebsiella pneumoniae
atggagtcagtctattctctgttacaaaaagcgccagcgacgatacttgatcatgaaaccacgctgcggatcctgatcgaaaagatcacatccagtaatatggtaagagtacagaattatcgctttgatgttcaaggatttatcatcgattgggtacgtcgagacttattaaacattatttttggcaatagtgataaccatggacgtaatactgcatttatgaaagcagataatgaaattacccttgcgccaatctacgattttgcaccaatgaaagccgacccggaaggtataccgcgcacgatgaagtggtcattagcctgcgaatcaggaggcgaatataactttggcgccatcgcacaagctttggctgaatggatcgcccctgacacattgcttaatgctttaagtgaaaccgcatctcaactcgttgatttaccatcccgtcttaaagcacgcggcgttcctgttcagattctggaaatgccatccattggttttaaatttatacctgacaaactcgctcgctgggggctgttatga

SEQ ID NO: 218558 - DNA, 522 bp, Klebsiella pneumoniae
atggaaacattaacggtacaagcctttctcaatgcggagtggcaagacattgcgttgataaaattccccggtagtgagcaaggggactggtttacaacacaaatcgactatcttaccgattacgccatcgactttctggaacgcgatgactatcacgccgtgtcgctcaaccatcccgtttcgctttattttgaggatcacggaaatcctggatggttaagatttatagacgatatcattccaggcggcgccagccgacgttactgggttaactttttagatatcagtgaacttcctcagggccagcagaatttcatcttgctcaaattcggcacgatgtcgccagtgggaaatttacgcattaaagactcggtgccggactgggatagtctggcaagcagtaaaacgttctctgtcactgatgtcatgaatcgtgccagtgattttctcgactatgcccaggaacgaggagccgcagcaggaggggctacattatccctctctctggttgccgcgatttga

SEQ ID NO: 218559 - DNA, 381 bp, Klebsiella pneumoniae
atgatcggtaaacgctgggctttactgtggctgccgctgtcgctgctggccgccgggcgagaccctttcctgccggtagaggatccctgccgtacggcgcagctatcgcaatggcgctatggcggggccgccggcgatgacgcaggctggaggggatttctgcaggacgggagcggcaagtggcagcgggtgcaaataaatgagcaattacccaccggatggcgagtgaaccggatgacccccggtgagctggagatcgccacccctgcggggtgtgaaccgccagcgtggcgctggcaacgtgaagggaaacaacataatgcgatggataagcctcctgtttctgctgctgcctctggcagtggccgccgcgcgaaatga

SEQ ID NO: 218560 - DNA, 420 bp, Klebsiella pneumoniae
atgcagattaacatccagcgcagccagaagctgctgctgatcctgtttatgctggggggcggtgcggctctctggcacgctacccggctgccgctggcatcggtgtcccgtgaagtggccctgcaaacacagtggcgccgggtgatggctttgcgcatacctgccggtgatataccaggtgcgcgcatcgacaagcagccgttttcgcccatagccattccactaaccggcgtcaggcttattgcctggcgtccacaggggaacggcggtgagatggaactgaccctgccctggcagacggtgcccgcgttttttgcctggctggcgcgctgcgggatgagtccgcgctcgttctcattgtatcgcgaggcgcaggtactccgcctgcatctgcaactggaggcggaagatgatcggtaa

SEQ ID NO: 218561 - DNA, 534 bp, Klebsiella pneumoniae
atgacgcatgtcgttaatcttcttccctggcgtgaccttcgccgccgccagcgcttgcgctacgccctgttgttagccatcggcattgtgctgctgggcgggatgagcctgctggtgagccgaacggcgcgtctgcagcacggcttcctggcgacgctccacgcgacggcagacgcgcagctgctcgcctcgctcaaactacgcgagaaggcgctgcgcgaggcccggcaggagtaccatcgcctgctcgcgcagcaacggcgcagatcggcgatcgcggcctggcaacccaggctgcaggcgctcgcggcagatctgcctgcacaggcgtggctgacgcggctggattaccacgaggcggttctgacgctcaacggcctcgctttgaacctacaggcactggccagcgcggaggccattctggctagcgtccctggattcgcgccggcaaaagctggcggaacccagcgtgacgccgagggccgctggcagttcagctttaccctgacgggagagcgttccgatgcagattaa

SEQ ID NO: 218562 - DNA, 228 bp, Klebsiella pneumoniae
atgcaattcacacctgatagtgcgtggaaaattattggattctcccgcgatattagcccagcataccgtcagaaattgctctccctcggcatgctgcccggttcctcttttcatgtggttcgcgtggcgccgctcggcgaccctattcatatcgaaacccgacgcgtcagtctggtattacgcaaaaaagatctcgccttaatcgaactggaagcggttgcacaataa

SEQ ID NO: 218563 - DNA, 240 bp, Klebsiella pneumoniae
gtggcgtcgttaatggaagtccgcgatatgctggccctgcagggccgcatggaggcaaaacagctcagcgctcgcctgcagacgcctcagccaatgattgacgccatgcttgagcgaatggaagccatgggtaaggtggtacggatcagcgaaacgagcgaaggctgcctttcaggcagctgtaaaagctgtcctgaaggaaaagtcgcgtgccagcaggagtggtgggcgctgcgatga

SEQ ID NO: 218564 - DNA, 543 bp, Klebsiella pneumoniae
atggaaatgtatatcgggctggctattgtcgccgtaatccttatctgggcgatcttcacctataatcgttttatctctctacgccgtttcaaagatgaagcctggagcggtattgccgtccagctcaagcgccgtcacgatctggcgcccaatctgttcagcctggtcaagcgctatgcgcagcacgaaaaggagctgctggaagagatcggccgccagcgcagcgttctgattggtaatccccaacaggtggccgacagcgagcagcactatgccggaacgttgagccgtgtattcgccctggcggaagcctatccggaactcaaagccagcgaaaacttcctctcgctgcagcaatcccttggcgaaatagaagaacaactgcaaatggcccgccgttacttcaacgccacggtccgcgagtttaatattctggtggagtctttccccagcctgctgctggcccgcctgtttagcttcagggcggaacttttctttgaactggagtcccctgaagaagccaaattgccccggatggagtga

SEQ ID NO: 218565 - DNA, 2046 bp, Klebsiella pneumoniae
atgccaacgttgtccacccggatactgcgcggtgttggcctgttgctgctgctgttgagcatctctggcttagccgtcagcgacgataaagctatcaccgaggcgtcgccactcccggccaatgcccgccgggttcccgcgtatgaacatattctctttttcgattccctggcgcgttttcagccaaacggcagcatggagatgcgggaaaatatcaccgtgctgtccctcggaaaggagattcgtcgaggcattttccgcacgctacctctctcctggcaccggcaggacggcaaaatttttagcgttgattacgtcatcaaatcggtctcacgcaatggactccctgaaccctacagcctcgatcgcacgacaaaagcgctgaccgtgcgcattggcagcgccgatcgcaccctgaagccaggtatctataactatgaaattcgctatcaggttagcaaccatttcagccgcttccccgactgggatgagctgtactggaacgtgacgggcaacgactggagctggccaatcgggaaagcccgtttccagcttgtactgcctgacgccgccgggcagctgaatgcggatggcagagatgcaaggttgcgcaccattgatgtttacactggtcgtcagggggcgaaagaccaccatgcgatcatcctgcctgatggcagcatacaaacttcccgcccccttgccaccggcgaagggctaaccgtggtctatacctggcctcgagatattctggcaggcgccgccgcgcccgaagcggtctggccgttggtccatttactggtgccgacgctggccaccagccttatctggcttcccctgctactgctcgttggctactacgggctgtggtggcgcaaaaacgtcacggcggcggggttaaaaatgccgccggtgacgccactattttcgctgcccgccgcgatgtcgccaggctatctgcgctttattacgcaacgtaagtatgacgatgtggcattcagtagcgatttgctggggctggttgccaaacgagcaatcagattgacgagtaaaaaaagccaaaccaaaggcgcgtggtcttcatcctctgttgatgagcagtggctttcccgccagccagacgaaaaacataagccgctgaaccccaatgaaaagcagttgatgagcctgcttttcagcgctaaacgtaagaacatcaatctcagtacgccgcatcaaacgttgatgcaaaacgcgcgcagatggctggaaaaatgttgtgaagagcagaaaccgcagctgtgccggacatggggtaaaccactgcgtcattgtatctatattgctctgctgatcccgatcgtttgcggcatcggatttagcccggcggcggcggcgctcaccgttcccagtctgctgtttgtatcggtcggcggggtgatgacgtatttgtgcctgaggtttttacgcaacccgatgaaaaccctgcgtagtttgggaccagttatgatcctgatggcgctggtatttagccctttcgccaccgtggcgggcggtgttttcctgcttggcatgctacccctcacccaacttcctgccggctatcctggcgccttgttaaccgccatcgcactgtgcgcgttcgtcgcctggaaaacacctcgctatacgcagaaggggttaaacgatctggccgtcgccaaagggctgaaacggtatattaaaacggccgaagagaagcggtatcagacactgtatccgcccgacgagaggattgcgcactttgaaagtctgctgccggtcgccctggcgctcggcgtaggaaaaacctgggcaaatacctttgcccgatacttaagcagcaccggcgcgatgtcggaagtgttacagcagacggactggcgggacatgcatcatttctaccagagctgtcattccgcagccagtgagaaaccggtgcggcgttcagaaggtggctcttcagggtcgggctatagcggttccggctcttccggcggcggatcgtcaggaggcggttccggcggcggcggcggtggcggctggtaa

SEQ ID NO: 218566 - DNA, 360 bp, Klebsiella pneumoniae
atgatcaaacctaaaacgccaaactcaatggagattgccggccagcctgccgttatcaattacgtgcctgagctcaatgcattccgcggtaagttcctcggattatcaggatattgcgattttgtttccgatagtattcaagggttacaacaggagggcgagatatcattacaggagtatctcgcagattgtcatgaagcggggattgagccttatgctcacccggaaaagatgaaaaccttcacgctgcgctatcctgagtcatttggcgagcgtcttagctccgccgctgcggaggagcaggtttccgtaaatacctggatccttgagacgctcaatgaacgtctcaaacaggcttaa

SEQ ID NO: 218567 - DNA, 276 bp, Klebsiella pneumoniae
atggagcagcaggttttatctttacgtaataaacagcgccacacgttggagcaactgtttaaaacccctgtcccacagggcattaaatgggccgacattgaatcgctaattaaagcgttaggcggggagattaaaaaaggacgcggctcgcgctgtaaatttttgttgaaccacagcattgccagctttcacaggcctcatccttcgccggataccgacaaaggcgccgtggagagcgtgcgcgattggttaatcactataggggtaaaaccatga

SEQ ID NO: 218568 - DNA, 1014 bp, Klebsiella pneumoniae
atgtcttccattcaactctgcgccgcccatcaggcgacctctggcttcgacggcgatgcgatcgcccagtacatgcgtaccgattttattacgctgcaggaacatctcagcgtccatgaggcgcgggagcactttatctcccagctggccagcgatgatattcccggccaggtatttgtcgtcgccggtaacaagctgcgcggcagcttatcagtcaaaaaactattgcaggaggcagaggtaggccagtctattcgctacctgatggacagctgcctgttccgcgttaaacctggcgatgagcgcccgcaggtgattgccgagctcagcgagcgcggcctcgatctggtacccgtcgtcgataaaggcgagctggtcggctgcctgatggaaaaagaaattgcccatctgctggaggacgacgtcaccgaagacgcccagctgcagggggcgacgctgccgctggaaaaaccgtacctggaaatcagcccctggacgctgtggaagaagcgctcggtgtggctgctgctgctgttcgtggccgaagcctataccagcagcgtgctgcagcatttcgaagaggcgctggaatcggccatcgcgctggccttctttattccgctgctgatcggcaccggcggcaacagcggaacgcaaatcacctcgacgctggtgcgctcgatggcgctgggggaagtgcgactgcgcgatatgggacgggtgatccgcaaagaggtgtcgacctcatttctgattgccctgaccctggggctggcgggctgcctgcgcgcgtggatgatggggattggcatggaaatcacgctgatcgttagcctgacgctggtgtgcattaccctgtggagcgcgatcgtctcctcggtcattccgatgatgcttaagcggatcggcatcgacccggcggtggtttccgcgccgtttatcgctacgctgattgacggcaccgggctgattatctatttcaaaatcgcccagtattttcttgggttgaactga

SEQ ID NO: 218569 - DNA, 3699 bp, Klebsiella pneumoniae
atgaaaagaaaaataataataacgatgaaaaacacccgtcggctcaccacgttctgcctcaccggcgcgttgactctcgctgcctcgggcggcgcgctggcggcggggaacgacgcggcgctacaggcgctgttcgctcaggccaactactggcatgagaaatctcatgacgagctggcgatggagtccctgcagaaggtgctctcggtggatgccaacaacacccaggcgctgtatctgatggcgctctggtcgcagcagggcggcgatatgcaggcggcggcgcagtggcgcgcgcggctggcgaaagcggcccctgacagcccgggactacaggatctggacaacgccaaaaagatgtcgcaggtgccgcagggccagctcagcctggcccgccagcaggcgcgcggaggcaatatccccggggcgttggcgacctggcgcagcatgttcaatggcaatacgccgcctgccgggctggcggcggaatattacctgaccatggccagcgacaaatcgctctatccgcaggctatcagcgagctgcgccagtacgtggcgcagcatccgcaggagaacgccccgcgggtggcgttgggcaaagcgttaacctggcgggaagagactcgccgggaagggatcgccctgctcgagccgatggccagcggcaataaagaggcggacagcggcttgcgccaggcgctgctctggctgggcccgcaggccggggatgagcagtattacgacacctggatgcagcggcatccccaggacagcgaagttcagaattactttcgccaacggcgcagcggtcaggcgcgcggccagggctacgccaatctcaacagcggcaataccgccgccgcgaaacagcagtttgaagaggtattgcagaccaacccccaggatgccgatgcgctggcgggcatgggctatatcgcccagcgcagcggcgactaccaggccgcgtcgcagtatttgagccgggccgcggacctcggcggcgacgcctcggcgacccgtcgtcagcaggcggccgatgcgctgttctacggccagctggcgcaggcccagcaggcctataagcagggcaatatcagccaggcgctggcgctctccgcgccgttggcgcagcagagcggggcgcggggcgcctcggcgaagctgttccgcgccgatgtgctgcggcacaacaaagatttgccccaggcggagcaaacgctgcgctcactgttaaatgacgatccgcagaacgcggcggcgcgggaaaacctctattacgtgctgcgcgagcagaataaatccgccgaggcgcaggcgatgctgcagacgctgccgcagagcctgcggcaaaaactgcagccgcgggtggtggccggtatgccgggcgatgccctgcgccgtcaggcccaggcgcaggtcagcggcggtaacccagccggcgccattgccaccctgcgcgaaggcgtcgcccgctatccggacgatccctggctgcgcctcgatctggcccggctgctgcaaaaatcgggtaacggcagcgaggcctcttcgctgatgtcggcggcctatcgccccggcgccagcaacagtgcgctgtatgccgccgccctgtttgccagcgaaaacggcgcctggcagcaggcgcagacgctgctggcgcgcattcccggcggcagccagaccagcgacatgcgcgatttgcgccagcgggtgaactacaacctgcagttggtgacggccgaaaactacctggcgcagggcaataccatcgccgccagcaataccctgcgggcgatggcctccgcgccgccaaaagccccggcggacgccggcaagctggcgcgtctgctggccgagagcggcgacctgaccaccgcggtctcgctggtgcgcaacaatatcagcagcggcgtatccggcaatgccggggattacgccgatcagatcgccgtcctgaatcaggccgggctgaccggcgaggcgcagaacctgatcagcaatccgcagctgcaggccagcagtacgccgacgcagctggcgagcattcgcaatggctatgtgatcaacgaagccgaccgcctgcgcgagcagggcaattacgccgcggcgtatgacaagctgatccgcgctatgcaaagcgatccgcaaaataccgatctgatgttcgccatggcgcggctgtaccagagcggcaaaatgaacaaagaggccggggtggtctatgactacctgatgacgcgcgatacgccgaaccaggatgcgcgcgccggggccatcgacgtggcgctgtccgcagggaacaacgatcgcgctgaacagctggccggcggtttgcgccaggataactccccggatcgcctgctgctgctggcgagagtggcggaggcccagggacatcatcagcaggcgatgacctatctgcgcagcgcccgcggcaaactgctgggtatgcaaagcaccaacagcagcgaaacgccgaccgtcggcggggtgctggcggcggataacccctttatcggcgtgtcgcaaacgtcggcgccgacgcggaccgcctccgcctacgggcagtatatgccgtggcaggtcgcccagtcggccgccgcgcccggttccacgctgccggggatccagcgcaccgatctgccggtggacaccgcccagacgcggatgctgcgtcaggtggacaccatgatggagtcgctgcaggagaaaaccggcagctggctgcaggggggaatggacgtccggggacgcgacggcgaatcgggcaccagcaagctgacggagctccggacgccgctgacctggtcctcctcgccgtttggcgactcgcgctttgactttaccgtcaccccggtgtcgttgaacgccgggaccgccagcggcgacgcctggcgtcgctacggcgccaacccgctggctaacgcggtctccaacatggtgagtaccgccaccagcgagcaggcggcgatcgcctcgatgaccgaggcggagcggacggcctatttcgccagcaatccaggggccgaggcgttaagcggcctcggcaccctgaacgcggcagatttcaatccgaccaccagcagcgggatggaaaacctggcgaagctcgggagctatgatgcggggcaggtggccagctatctctcttcgtccagccgcaagccgaacgttgaccagaccagcggctcgaccgattcgcagaaggccaatggcgtcgaactggcgctggcgttaagcggtgacgattaccgggtcgatatcggcagcacgccgttgggccaggatcttaataccgtagtcggcggggtgaaatggtcgcccaagctgaccaactatctgtcgctgatcctcaccggagaacgccgctcgctaaccgacagcctgctttcctacgtgggtctgaaagacgcctattcagggaaaacctgggggcaggtgacgaaaaacggcggcaccctgcagctgagctatgacgacggcgacgcgggcttctatgtcggcggcggtggatacagctatctggggcaaaacgtcgccagcaacaccagtatcaacgccaatgccggggtctatcttcgtccctaccatgacgaataccgccagctgcaggccgggttgagcatgagctatatggattactccaaaaacctcagctacttcacctatggtcaggggggctactttagtccgtaa

SEQ ID NO: 218570 - DNA, 522 bp, Klebsiella pneumoniae
atgaatataggtctgttttacggctccagcacctgctacaccgaaatggccgcggagaaaatccgcgatatcatcggccccgagctggtgacgctgcacaatctgaaagatgattcccccgcgctaatgagccagtacgatgtcctgatcctcggcatcccgacctgggatttcggcgaaattcaggaagactgggaggcggtctgggaccagctggataccctcgatctggcgggcaaaatcgttgcgctgtacggcatgggcgatcagctgggctatggcgaatggttcctggacgcgctgggcatgctgcacgacaagctggcgaccaaaggcgtgaagtttgtcggctactggccaaccgaaggctacgagttcaccagcccgaaaccggtgatcgccgatggccaactgttcgttggcctggcgctggatgaaaccaaccagtacgacctgagcgacaagcgcatccagagctggtgcgagcagatcctcggcgaaatggccgaacacttttcctga

SEQ ID NO: 218571 - DNA, 717 bp, Klebsiella pneumoniae
atgttaattggtccgtatgtaaatggttccgccgtgattatcggcggattaattggcgcaatggccggaggcaaacttccggaacgcgtcaaaacagctctgccgatgacctttggtctctgctccgtcggcctggggatcaccctggtgctgaaggtgaaatatatgccggcggtagtgctggcgatggtactcggcgctttccttggcgaactgttgcacctggaaaaacgtatcggtcgcgcggcgggatcaacgcgtgggttgattaataaagtcctgccccccgttcagggattaggtcacgaagagttcaccgaaaaattcgtggctattttggtcctgttttgcgccagcggtaccggtatttttggtgccatgaccgaaggtatgagcggcgatccatcgatcctgtacattaaaacgatcctcgatctgtttaccgccgggatcttcgcgacgctgctgggttacgcggtgatgaccatcgctatcccgcagattgtgattcaggtggcgctggcgatgctggcagtgtttattctgccgatgatcaccccgtcaatgatggcggatttctcctgcgccggtggattgctgatggtggccacgggattacgcatctgcaacattaagcttttcccggtcgccaacatgctgccagggcttgttttggtaatgcctttctcccatttatgggctaccctagtggcctga

SEQ ID NO: 218572 - DNA, 579 bp, Klebsiella pneumoniae
atgacaccacgcatcatcattggcattagcggcgcttccgggttccagtacggcgtcaaagcgctggaacttttgcggccactggcggtagaggttcatctggtggtctccaaaggcgcggaaaaaacttgcgagctggaaacggattaccgcttagacgacgtgatggcgctggctgacgtggtacatcccatcaaccatctgggcgcgtccatctccagcggctcgtttaaaacgctggggatgttagtcgccccctgctcgatgcggtcattgggcgctatcgcccattgtctcaccgataatctgcttacccgcgcggcggacgtagtgctcaaggaacgccgacggctggtgctgctggcgcgcgagacgccgcttaatctcggccatatacgcaatatggcggcggtgaccgagatgggcggcatcatctttccgccggtgcccgcgctctatcagcgtccgcaaagcgcagatgacattattacccatagcgtaaaccgcgcgcttgacctgtttggcctgaaggtcaataacatcccacgctggggtgaaggcgagctgcattacgcgtaa

SEQ ID NO: 218573 - DNA, 1494 bp, Klebsiella pneumoniae
atggcaaactcagataaaaaaacaccgtcaccggtacatgatttacgttcggctctggcgctgttaaaaacgctgccgggcgaatatgttgaaaccgataccgaagtcgatccccatgccgaactctccggcgtttaccgctacgtgggcgccggcggcacctgccagcgtccaacacgcaagaacggcccggtcatggtctttaacaaaattaagggcttcgacgatatcagcgtagccatcggtctgaacggctcgcgccagcgcgttagccagttcctgcagtgtgagccggcaaaactgggtcatttgctgaaagattccgttgaaaatgctattgccccaaccatggtgcagggcgcggcggtatgccaggaagtggttcacctcgccagcgatgctgatttcgatctgcgtaaactgctgcctgcgccaaccaacaccgaagaagatgccggcccgtatatcaccatgggcctgtgctacgcctccgatccgcaaactcgtgaatccgatatcaccattcaccgcctgtgtgttcagagccgcgatgagctttcaatgtggctgacgccgggtcgtcatatcgatgccttccgcatgaaagctgaagcggcgggccagccgctacctatttcgatcagcatcggcgtggatccggctatcgaaatcgccgcctgctttgagccgccgactaccccgctgggtttcaacgagctaagcatcgccggcgcgctgcgtggccgtgcggtggagatggtgcagtgtaaaaccattaatgaaaaagccatcgctcacgctgaaatcgttattgaaggcgagctgctgccgaacgtgcgcgtgcgtgaagatcaaaacacccataccggccgcgcgatgccggagttcccgggctataccggcgaagccaaagaggcgattccggtcattaaagtcaaagctgtcacccatcgtatcaaccccatctggcgcaccaccgtcgggccaggcgaagaacatgtcaacatggccgggatcccgaccgaagcgagtattctcgatatggtagaacgcgccatgccgggcaaattactcaacgtcttcgcccactcggcaggcggcggcaagctgctggcggtgctgcaattcaaaaagtcgtctccagccgatgaaggccgccagcgccaggcggcgctcctggcgttctctgccttccctgagctgaagcatgtcattctggtggatgaagacgttgatattttcgatagcgacgacgtgctgtgggcgatgcaaacccgctaccagggtgatgtcgataccgtaatgatcccgggcgtgcgctgccatccgctcgacccgtcgcaggtgccagaatacagcccgagcgtgctgcagcagggaatgtcgtgcaaaaccattttcgactgcaccgtaccgttccatctgaaacacaactttgagcgctctaagttcaaagcggttgatgtaaaacgtttcctgccggacttcgaataa

SEQ ID NO: 218574 - DNA, 900 bp, Klebsiella pneumoniae
atggatcttaaacgcttacgctatttttgccgggtagtggaacacggttcggtgagtcaggcggcgaagtcgctcaacatggcgcaaccaccgctcagcaagcggattcaggagcttgaagaagagctgcaggtttcgcttttcgagcgccgcggcaaccgcattgaaccgacggaagcggggtatttcttatatcggaaaggctgtgaaattttacgccaggttgaggatactgcccgcgagacggctgatattgcgcaaaaggcccgtgtggaagtacgtattggcttaactcatctgtatcagaattatttccagcctttattaatggagctctatcggcgcaaccctgagaccgcgataaatatctcggtgaccgactcaagtcatctggaaacattattaaatgaaggtgctatcgacctggcgttaatacagcggccttatcgcagcgaaggcttcgattatatctccttcgaccccattaaactggtagcggtcattaataaaaaatgtctgtcgcagccgccttccaacccctatgactacaatgcgctggcggcgatgccgctggtgctgctgcaccgggcgaaagattccggcacctatgaaatgctcatggacctgttccgtaaatccggcgttagcgcgaaggtgattatgcatattacccagcccggagtgatcctcgactggctggaagacgggctggaagcggcgacattgctgccatcttcggaagtgaatgccgaaaaactgcctcattgctatgtggttgatgtcttcccctcaccgcagatattttatccggcgctggtgaaattgccgtcgatgccgtatctcccggcgctgatggatattatcgccgggggttatccgtttatcgcgccgagggagtag

SEQ ID NO: 218575 - DNA, 267 bp, Klebsiella pneumoniae
atgggcagacgcttcatggtcggtatcttcgcgctggtggcgttttcggccagtgctgcgcatggcggccatcatggccagtcggtgatagctggcgccgacggcggaaacggttcggacggcggcgatagtgataactcatcgggccgggcagggtgcccgggcggcaccgatcccgataagcacggccatttttacctgcctggcacccacgagccttgcaatcccgggccccaggatgcacagaaagtcgggtcttcccgctag

SEQ ID NO: 218576 - DNA, 1926 bp, Klebsiella pneumoniae
atgtttcctttcgccgattttttacgccaggaactgcgcgacgcgccgggacgcgccagctacacgctgcgcctgacgctgagctgtgcggtgctcatcaccctgtttatgaccctgcagatcccctttctggccgttgcgctgatcgtcgtgttctacgttagtcagcctaacgtgctgatgatcaagctggtcagcgtggtcttttttgtcaccgtcaccgtggcgctcggcggcgtgttgctgatcatcaagtggacctatgactacccgctgatccgcctggccgcctcggtggcgctctttttctgcgccctctatctgatgcgggtgctgggcaagctggggctggcttttttcgtggtggcgctggcggtgatttacgctcagaccttcccatcaatgaccagtcagagcgagattctggtgcggctgctgctctggctgtgggtggcgattaacaccgcaatcctggttaccctgctggtcaacgcctgttttcagcaagctttccccggcaaccagtttaaggcgcgtctggcggagatgctgcaggcagtcgccagccggctggcagccccgggcgcggaaacgccgcccacgttcggcgagaccgccgcacagttcaaccagctgcagtcgctgttcgcccaggccagccgggcgacgccggagatcgccgccgatccgcaggcctggcgctcgcggctggccgccaccctgcgctgctatcagctggcggccctgctgcaagcggacgaagcggatagcgacgatcgccagcagctgtcgcaggcggtactgcagctaaagaacgcccttagcgaggggccgtttgacggcgcgattcctcccctggcgctcagcggtcgtggcattaatcgcgcggttctgcaggagatggcttcccttctgcagcagctggcgcagggtgagcccgttgccctgccgcagggggaagtggagaaggcgcctctgctggcgccggacgcctggcgcaacccggcctatctccattttgcgctcaagaccctgctggcgacgctaatctgctatgtcttctataccgctgccgactggcagggactgcacaccattatgctgagctgcgtcatcgtcgcccagccgggtctgggcgccacgatgcaaaagacatggttgcgcatcggcggggcgctgctcgccaccctgctggcgctgctgttaattgtctttgttcagccctggaccgattcgctgtcgggcctgctggcgatgtccctgccggtgctggcgctggcggcgtggatcgccgccggctcggagcgtatcgcctacgccgggatccagattggcttcacctttgcgctggccttcctcagctggtttggcccgctgaccaacctcacagagctgcgggatcgggtactcggcattctgctcggggtgctggtctcctccatcgttcatctctatctctggccggacagcgaagcgccgcagttgaaatcccgccttgcggcactttatcgccgactggcggactgcctcgccgccccgaaggaggcggttccgctgacgcccctgtttgtcgccttcaccgacagcgaagcgctgctccatcgggttcgcgctgaaccgctgggcacctgggcccatccctggccacaggcgaaagactggccgatgcgcgccacccttgctcaggccgaggagatcgcccgcctcagcgaaggctaccggctcaacgccgcgccgggagacccgacgctggcccgctgcgccgagcagctgcggcgctacgccgaacgtatcgaacaggaggcggccgcacctgacgggacgctggccgccgatgtcagtaacccctttggtccggcgctggctgccgcgctggccaccctgcccgactggggcccgactgagcaacaggctaaaacgtcatga

SEQ ID NO: 218577 - DNA, 246 bp, Klebsiella pneumoniae
atgaaaagaggcttacttaccctggtctgcattacgctactggtaccctcgcttgccgcacacgccacctggcgtggcgacaaacgccaggacgcccgcgatatccgccaggatagtcgcgaacaaggtcgtgataccaaacaggaatgcgtccgcaataacaatcaaagcaacgccagctgtcgtcatgataaacgggaaaatcgccgtgaaggtcgccaggaggcacgtgacgaaaaatggtga

SEQ ID NO: 218578 - DNA, 594 bp, Klebsiella pneumoniae
gtgataaccttggaaagtatattgttgtacaccaatgataatctcattggtcactcaatctatcactaccttattgatagctatgaaaatgcctcccgcctgggttatgaggattttctacacgggaatcatactccggtcgcacagacggttattttcaatttaatcaataaggatatttctgtcatcagactggtgggcttgttgaatacgctgcgcttttccctgctgcgctgccagcaaccggtgctggtggtaaaaagcgagattgccgggctgtgcagggagttgataaagattgataatgcgatgattattagtgaaaaatcaccactcactctgttttcctctatcatccagcgcgcgagcggcgtcaatcaactgccgccgcagcgattgcgcaaacagctgtcgcaacgcgaatgtcagatcctggaactcttgattgccaacaataataataaacggattgcggccctgcttggtattgcccataaaacggttcatagccaccgaatccatatcatgcaaaagttaggcatcgagaattcccgtaccatgaatcagcgtattgccgctctgcatcaatgttaa

SEQ ID NO: 218579 - DNA, 321 bp, Klebsiella pneumoniae
atggctaagaaaaagcagcccaactgggtgatcagaaacatcaaaaacatcgtgctggtcatttccctctatccctgggcgctgttgctgataatgattatggcgggtagcggaggcccctcatccggcgccatggcggccgggatgatggtgttcttgctgttcatcgtcatatcgatagccaacctgattatttcactggtggttatcgttattgccgatctctcaacgtcatcactccccatgcgctatggggcctatttttgtgccatgaactcgatatcggtgttctggctcatccccctgttcttcagctactga

SEQ ID NO: 218580 - DNA, 1077 bp, Klebsiella pneumoniae
atggccttactgaaaagcgcccatggcggtaacatccgcgaggccgccgccctgctgggcattgcgcccggcgagctgctggattttagcgccaacatcaatccgctggggatgcccgcctcgctcaggcaggcgatcatcgacaacccaggctgcgccgaacgctaccctgacgtcgagtatcaacagctgcatcaggcgctggctgcccaccatcagctgccggcggcgcagatcctcgccggcaacggcgaaactgaatcaatcttcaccctcgtccacggccttaagccgcgacgggcgatgatcgtcattcctggtttcgcggagtaccggcgggcgctgcagacggtggactgcgaagtagtggagtatgccctgcgggagtgcgatggctggcagctgactgacgccatcctcgatgccctgactccggcgctggactgtctgtttctttgcaccccgaacaaccccaccggcctgctgccggagcggggcctgctggaagccattgcgcagcgctgccgggccctgaatatcagcctgatccttgatgaggcctttcttgattttatgcccgaccagccgggatttattcccctgctggcgcagtacccgcacgtctgggttctgcgctcgctcaccaaattttatgctattccggggctgcgtctcggctatctgctcaacgctgacgcgcaggcagtggcccgactgcgcgagcgacaaatgccgtggtccattaatgcctatgccgccctggccggggaaattattctccaggaccgggcgtatcagcgggccacctggcagtggctgcaggaagagggaacgcgcttctatgcgcgactgaaagagattaacgggctgaccgtgtggcccgggcgcgccaactacctgtttttacgctgcgacagaccagagtttgacctgcaatacgctctgctgcgccagcacgtgctgatccgcagctgcgccaactacccggggctggatagccgctatttccgggtggcgatccgtagcgccagcgaaaacgaccagctgctggcggcgctgcgccgggcgctggcctga

SEQ ID NO: 218581 - DNA, 555 bp, Klebsiella pneumoniae
atgacccaggctatcggaattttagaactgaccagcatcgccaggggcatagagttaggcgacgtcatgctgaaaagtgcgaacgtacagctcctgctctgcagaaccctttgtcccggaaaatacctgctgatgctcggcggcgacgtcggcgccgtgcagcaggcaatcgccgccggtaccgcgcgcgccggggaaatgctggtggacagcctggtgctggccaacattcaccccagcgtactgccggcgatcagtggcctcaacgtggtcgagcagcgtcaggcggcggggatcgtcgaaacctggagcgtggcggcgtgcatcagcgccgccgaccgcgcggtgaaagcggccaacgtcaccctggtgcgcgtccatatggcgttcggtatcggcggcaagtgttacatggtggtagctggcgatatcgctgatgtcgacaacgccgtcacggtggccagcgacagcgcaggcgagaaaggattactggtttaccgggcagtgatcccgcgaccacacgacgcgctgtggcaacagctgatggagggataa

SEQ ID NO: 218582 - DNA, 426 bp, Klebsiella pneumoniae
atggcagcatcttctttatttgaaatgctgactttcagcttcagtggtgagctgccgctggagcaggtcagcgagcgggatcagcttattctttccgttatggacaacatgcagcgcatcatcaactgccgggcaggaacgctggcgcatttaccggattatggtttgccggatctcagcatgattcatcagggaatgaccgcgggtattcatggtttgatacaccagatagaagagacgttactgcgctatgaaccccgcctgagccagttgcgtgtggagttgcagccgcagccccgtccgggtcaccttaattaccttattcatgcccaacttcccgataccggctggatacgctttgatggtatattttctgcggaaggccggattgtgctgcgtcatctcaaacagcaggagcgcgcgtga

SEQ ID NO: 218583 - DNA, 534 bp, Klebsiella pneumoniae
atgtttcttacaccctataaacgacatgctgtcagcgtacttgccgccgcgacgctgctgagcggctgcggtctgacccagagagtgactgacggcactaaagaagtagcatcggcgattttctacaagcagatcaaaacgctgcatctcgattttgtatcgcgcagcgcgctgaatacagatgcacaagacacaccgctttccacgatgatccatgtctggcaactgaaaacacgtgagcgttttgacgaggccaactatgacatgctgcttatgcaggaagaaaaaacgctgaaatcaaatgtactggccaaacataccgtctggatgaagccggcaggtgcggtttccctgaatgtccctctggataaagagacccagtttgtcgccatcgttggtcagttttatcaccccgatgaacaaagcaacagttggcgactggtactcaaaagggatgaactggaagctgacaggccccgcaccatagagctgatgagaagcgatctccgcctgctcccccttcaggataagtaa

SEQ ID NO: 218584 - DNA, 1083 bp, Klebsiella pneumoniae
atggacagaacaccacagccagcgcgtaccgggctgacggaaaggcttgctccggacattaaccgaattaacttttaccgtttctgccagcttcttgaacaaagccaaccacagacgccactgctggggagcacaaccaatccggcagacgatcccgtccgttttcgcccacatccggggatggggttcccggtaagcgaactaaaaagcgtcgaacaggatttggatcatcctgacgcgccacccacggtgcgcaccatgtttctggggctgtacggtgtggattcaccgctgccgacagcctatctcgactacatcgcgcagcgccgggacggccatgaagcgatgatggcgtttctggacatttttaaccatcgctttatcactcagtactatcgtatctggcgcaaatataattaccctacgtcgtttgaaccgggagccgtggataatatttcccgctgcctgctggggttgattggtttgggcattcccggcagcgaaaatcatatcgccacgccggtctcgcgttttctggcattactcagcgtgatgcgtctgccgacgcgtacagcagaaggcataacggcgctggtcagattactggccccccagacgaaagcgacagttatcccgcacgatccacaacagattgtcctgcctgaacctgcgggtttatcaaaaagatcgcgtatttgcctgaaaactcgggcactgctgggcaacaccggcactgacgttaacagccagttactgctgaagctatataccgaagacgacggagaggcacgcggctggctgccgggcgggcaactacataccgacctgctggtgctgttgcgtgtctatctgggctggcgctaccaggcccgcctgcaactgaccttgcccgtcagtctgctgcctccggcacagttgggaaaacagcgcgttcaggtaagccgaacgggcgtgctgcgggcatcttttgctgccccagtcgccggtacggtcacggtcagtctcgggcgttatcagggactcatgcccacatcatccacccgcaacagggagagtgttactcatgtttcttacaccctataa

SEQ ID NO: 218585 - DNA, 1761 bp, Klebsiella pneumoniae
atggacgacctgacccaacgctattacgaagccgaaatgcgctacctgcgtgaagcgggtaaagagtttgcgcaagcgtatcctgatcgcgccgctatgctcaatctcgataagcccggcgcgcgcgacccttatgtcgaacgtctcttcgaaggtttcgccttcctgatgggccgcctgcgggaaaaactggatgacgatctacctgaactgactgaggggctggtgagcctcctgtggcctcattatctgcgtacaatcccgtcgctgtcggtggtggaactgttaaccgatcatcggcaaatgaagcagagcgaaacactgagggattttcaggtgctctcgaggcccgtcggcgaacaccgggcacgttgctgctacagcgccacgcgggatatcaccctgcttccgctggctttaccagaggtgtcgttacagtacgaacaggatggacgctcggttatccgtctgcgctttgagtgcagcccgctggctggcgacgggtcacagattgatttatcgagactgccgctctatctcaatgcggacagtccgctggcttgtgcattacaccgggcgctgacgctgggggtgcagcaaatctggtttcgcctgccgggggaggaacgtcggacactggacggttatttttccccgatggggttcggtaaggacgatccgctctggccaaaaggcgaatcggccttcagcggctaccaactactactggagtatttcaccttccgcgagaagtttatgtttgtcgccctcaacgggctggagaatgtggtctggccggcaggaatgagtggattcgaaattgacgtggtgctcgcggaaagctggtctcacgatctgccgttcagcaccgaaaatatccgcctgcactgcgtaccggtgatcaacctgttccccctggaagccgatccactgcatctttctccgctggaaaatgaatacttgctgcgccccatgcgtattcaggacgggcatacggaaatttactccgtcgataatattatttcttcgcgacacaccggcagtcaggcatatgtgcccttttccagttttcgccaccggggcgggatgttgcgtcatgattcgccggaacgttattaccatacgcggataaaacgcggcccttccggtttgcatgatacctggctgatccttgggggcgacgcattcgatatcgaccgcctgctggaagacgaaaccctgtccctgagtctgaccggcaccaacggtcagcttccgcgtaaagcgctgcagagcacggtgctggacacccccgtctacgccacgcagcatacactgcgggtgcgcaacctgtgcgcgccgacgcagccctgttatcccccggcgcgtgaccgtttccactggcgggttctcagccacttaggctccaacttcctgtcaatgatggacaacgccgaaatcttgcgcggcacgctggcgctgtacgactggacggaaagcgaaatgaaccgacgccgtctggaggcaatcgttgacgttcagcatcacctgattcagcgttttgaaaaaggttttctactgcgcggcgtggatattcaggtcacgctggacagcaacggtttcgccggcgaaggcgatatcaccctgtttggcgaactgctgcaccgctttttcgccctgtatgccgacatccacttatttactcagttgacgctgattctgcaacctacaggaaaatgtttgcaatggacagaacaccacagccagcgcgtaccgggctga

SEQ ID NO: 218586 - DNA, 546 bp, Klebsiella pneumoniae
atgtatcaacagcaatacagaatggcggtgcatgtgacaccggagagtgaaaacgatccggagtggccgtcgaaaaagaagtggtttgatgccagtgaatggttaagtactccacagtatataaaaatcaatgatttttatgtgataaatacccgctatgttccaattggtgatcttaacagcgatcagataatattttatctgaagaaaggtattaatggttcagaaaaaagattttcagagttatctgtattatctgatctggataatcaagagtttcgggaactaatgaaagataagctatcctctgaatatctcgaaacccagtttgacaaagagaccttaacgccaactattgatttctttcttatctattttatctacaataataagaggtatgaggtgccgatccgtagggagtattcggggaataaatatcattattgggtattcgagggttcggtgaaaaaagccggatactggcatgaaagatttcccgcctcatattcatacagaaagtatctgaataaggaaaaaattaaataa

SEQ ID NO: 218587 - DNA, 1542 bp, Klebsiella pneumoniae
atggcgcgaaggctggcaagactgggagataaaacgacatacggctatgtggcaagcgctacgtcatcgatcatagacggcaaaaaactggcgctgaatggcgacagggcgtggtgtaacaagtgcaaagggatgttcgggattgtcggcacggcgcgtgggtggtctgaggattcgctctttgtcggtaacggcgaccgtgtggcgtgtaaatgcgcgaacaatcaggtgattgccacttcggatttgtttgatgaatgtggtggcacggaaaaccataccacatcaggcaagacgaataatcttaccgcagcaagtacaaagccgcagaataaaaaatacagccatcagataaaacttttaacgaaagaggatgacgttggtttagagggtatcccttatgtattcattctgagtgatagtaccttcagaaaagggaaaacgaatccgaacggggaaacggagcgaatttatacggatgcgccggagaaggttacggtgttagttggtaagctggcgtattcttgggaaaaaagaggcggcaacttcggttcattaaaggagataaatgaaagaaaaattgaactgatgacagctgagcaggagccggttgaaaatgttcagtggattactggccgggattatattgtggtggtggccgcaagaacgaaatttaaagattctatggggaatcagtatcgttttgtaaactgcggattgagacagctacggctttttcctgaagtgaataaagataattattctatacagcgtattttcctgatgtttcagcagggatatgtggagaaagacattgaattaattaatgaatatgttgaagcattaagtggtcgcgtggtttatgtgaaagacaaggctgaatttattaaattcctgaacagcagaaaagacaagaacagagtaattaaggagatggttattctgtgtcacggaattatcgacactgcatcattccattatcatcatgaaaataaaggaaaggaaaagaccggtgagtttaaatccagagatgtcgttgacgttcaggaggctgtctttgattatgatgccgttgtcacaacctatgcctgccgggccggtatttctgttgatggaaaagacctgaccggaatggatgccggacaggaaaacagtccggcacaaaagatggcggattgctgggacgtgagtgtcagagcgtttgaaatgcggtcggattattcatcgatttacggaacgaaaaaagaaatacgtgcagcagaaaattatgaagatgttattgaagaatacgaggaaagcctgagtggatataataagaaaaaggcgaatagtgatgtcgatattacgccgccccagaaacccgaaaattatgatgagatgtcaaaacgctatgatgatgtcacagcgagagatgctaacgctaaacgcggtgctggtccaattgcgccaaatggtgcgtggcgtatgccgggaaccggggatagcccagaggggctgaaagaaggattacagacctatcaacccggagagtggacattgtga

SEQ ID NO: 218588 - DNA, 393 bp, Klebsiella pneumoniae
atgagtgagttactgcaacagttaacccggaattgtttctctgaccgggatgcgacgaccgtcgcacaggagcaggctgcactgtggcagagctggctgctgccggtgacggaggattcgccggtgggtgaagacccctgctatcacgacgtttttttgctgatgcgcgacgaaatgaacaaatccaccgcgcaggggctgacgctgacgcagtgggaatcggaactgctgtttgaggtaaaaacgcggcaactgaagctgttgcgcctgcgggcgcaccgccacgcggacaaagcggcgcttgcccggaaaatgggaaacctgctgggaacgctggtggtaatggatccggcacgggcggcggtactgcgcgacacgcagcataaggactga

SEQ ID NO: 218589 - DNA, 3363 bp, Klebsiella pneumoniae
atgaaatctgcaaacaataagttaacgattattgcagacgtattgctgctcctgctttttgcggctgtattgggttttattatctggcgttttggtgatctttttggattaaccggggataaaaataagttttatatatggctggctggcataatgtcgtttatttttctgcgggcatcctggtatttttcccgtttatacagggttcgcagggaacggcggcagtctgaggaacagggggaatacccggaaaaagaaattcgttatgaacctgggcaaagaacatctttgtattctgaactattttttcatcttcgcgaccgttacggtctgttctggcagcgtcaggtccgtctgctgctggtgacgggcgagcctgagcaggtggaagccatcgcgccggggctgacagagcagcgctggcaggaaggcgaccatacggtgttgatatatggcggcaaggcgtcggcagagccggataccaccctgctggcctccctgaaaaaactgcgccgcttccgcccgctggacggtattatctggccgctgacggagaaacagagttgccagacggcgcaactggataagggctggcgcgaactgggtaatggtggaaaattgcttggctttcaggctccgctgtatctgtggctggtctgtgatgacggaggttatcaggccgggcgcacactacaaagcgtcggctgcctgctgccggagcgaagcacaccggaacaactggctacacaactggaagcacaaaccccgcaactgacggaacagggaatgtcgcagttgctgaccaataaccggcacgattttctgttgcgtcttgcccacactcttacagagcgcggcatcgttcactggcaaaccgtcctgaagcccttgctggcaggcggcgcattcccttctctgcacctgcgcagcctgatgttcagccctccactggccgccgtgccggaagcggctccccacgcgtggctatcatcgctggtgtgggcgggcgttactggcgacaatgcaaaaggccgcaccgtgggctttccgtggctgcgcaccgcgctgatggcctgcttctgcgtgctggcgatatggtggaccggaatgatgacctcgttttttgccaaccgcgccctgattcaggaaaccgggacgcacacagcgcgggccatcaatacccgactgccgctggcagagcaactggttgcgctgcacaccttgcagggcgagcttgagcgtctgcagtatcgtatccgccacggtacgccgtggtatcagagtttcggtttggagcgtaatgctcagatgctgaacgcggcgttccccggctatgcgcaggcggcaaaccgactggtacgcgatgtagcggtcgcccacctgcagcagcaactgaacgcctttgtcgccctgccgccgaacagtccgcaacgcaccgcaacggcagaacagcgttataaacagcttaaggcgctgctgatgatgtcccgcccggaaaaatctgacgccacctttttcagcaccacgctgatggcagagcatctgcgctatgcagatgtaccggaaggcacccagcaaagcgtactgccgtcgctgctgaccttctggatggcgaatctgccggagcatcaacagtggaaaatcgccccgcagccgcaactgaccggtgaggtacgcaaaattctgctgcgccagattggggtgcgcaatgcggaaaacaccctctatcagaacgtcctgaaacaggtctcccgtaactacgccgatatcacgctggcagacatgaccggcgacacgctgacagacccgcttttcagtaccgaacagaccgtaccgggaatgtttacccgtcaggcatgggaaggacaggtaaaagaggcaatagaacaggtggtcaccgcccggcgcgaggaaatcgactgggtgctcagcgaccgtcgccaggacgcatccgccgttatctcgcctgaggtgctgcgcgcccgcctgacggaacgctactttaccgacttcgccggaagctggctggcgtttcttaacagtctccgctggaagcacgaagattcactttccggcgtgctggaccagttgacgctgatggctgatgcccgccagtcgccgctgattgcgctcacagatacggtggcatggcaggcggcggcaggaagggaaagccgtagtctgtcagactcgctgacacaatcagcaaaagagttgtttaacggtaaagaaaaaacactgcagaacacccgtgccgcccgtgaagaagcaccaacaggaccgatggacaaaacctttgccccgctgctgcggctgaccggtgataaagccgtgggcactggcgacagccagctcagcctgcaaacttatctcacccgcgtgacccgcgtgcgcctcaagctccaacaggtcaccaacgccccggacccgcaggagatgatgcagcagctggcgcagacggtattgcagggcaaaaccgtcgacctcaccgatacccgcgattatggccgtctgatagccgccagcctgggtgaagaatggagtggttttggccagtcgttgtttgttagcccggtggagcaggcatggcgacaggtgctgacgcccgcagcggatagccttaaccggcagtggcagcgcgctattgtcaacctctgggagcaggattttgccgggcgctacccgttcaaagacacagcgaatgacgcctcacttcccctgctggcgcagtacctgcgtgacgacgggcggataaatcagtttattgcctccaacctcaccggaatgttgaaacgcgaaggccggtactgggtggctgacaccatgaacacgcaaggactggcgatcaacccggcgtttttacgcgccctgaatcgcctgcgcgatgtggccgacacagtctttgccagcggcgatgccggggtacattttgaactgcgggcaaaaccggcgcgcgacgtaatgaaaacgcatctggtgattgatgggcaggaactggaatatttcaaccagaaagaacgctggcagcgtttcaactggccggatgaacagtggcagcccggtgcgtcgctgagctggaccagcacgcagaatatggaacgaattctggccgaccaccggggaagctggagctttatccgtctgctggagcaggcgcaggtgatgcaactggacagcagtaactttaagctgcagtggaaagcaccggacggcctgccgctgcattacctgatgcgcgtcgaacagggtaaagggccgttggcgctgcaggcgttgaaaaacttccgcctgccgggacaggtgtttctgaccgggaaagccataagtgatgcagaagaatacagggacaacgcagatgagtga

SEQ ID NO: 218590 - DNA, 1140 bp, Klebsiella pneumoniae
atggcatggaaaagaaaacatattgaagagccagatagcccagtgaaaatacctctttataaatggcttctcaccttccttattcttagtgcgtttttattgctactcttttatctctttcgtgatgaaatcattagagataatgttactttattaatcttattttctcctctaatcctgtgtcttttcctcttctgtttacaaatatatttttatgccagagccatgcaaaattatacggtaataatgcataacatcaataatatcaacacagaatgggaaaaatggggaggccgttatgtctctgtgctgggcagtaaacttttccttcccggcgaagtggatggatcgtcactatcagacaatcagtcagaggtaatgtatggtttatccgtgaggattgattattttacatggaaaactaatgactggttttctttctttactcttcttattgatgaaaatgatatttttaatcttcccgttcggattgcaaaagagtttattatccttacggactgtaatgaaagagaatatacccgtatggaggccgatttttccagagtgctggaggagatgaacatcatgttgccgtccggatctgtccgtcttgttccttctcttttatttgaacaacttgacgtctggctgaaagtgacagaagaaaaaatatatattgttctggttttacagcttaacggcaaagaaaattattcagatggcatagtttcctttttattcgcagcagatgatgtagtaaaaaaatatcaactggatgaaaaagccagaatttttcgtccgatggttgtggtagccgatcgttttgataaagatctggatatttttattgatacgcaaaaaatagccggaaatgccacaggactgacaggggactgcgctggtctgttacccgtcagcggcagtattcttcaatgcttcaacgaaaaagaagggaaattacaagttgataatatccacgtaatggaaagcctcagtggtctacccggattgaattcggtctggttaactgcggcgttagcagtctcggcggcgtcttatcaaaaatcagattatctgatgatggccagatatgaagacgactggataattactactgtccacccggtggaggcttcatga

SEQ ID NO: 218591 - DNA, 222 bp, Klebsiella pneumoniae
atgaaaatagtcaggaccgcagatgctaatcaagaaaatatagaaaaagcgtaccagacgtttaatcagagtaaaagccagtcgatgtattttgcgtttatcggaaacgtcaaagataccggaaatggcaattatgtatttaatatgtatgacgtgatggagacgaaaacggggcgctgtaatctgacagatgcgctcaataactggaatgtgtcacagtga

SEQ ID NO: 218592 - DNA, 147 bp, Klebsiella pneumoniae
atgctgaaatcattattgacaggactgttctttatatattttctagcaggcaatgcatatgctgaggattataatgatattttctggggcatgttaaaaaaagaaaatcaggagatttttttgtccgttgcgacagcccgccattaa

SEQ ID NO: 218593 - DNA, 1074 bp, Klebsiella pneumoniae
atggcgatattgcacccccaagagtgctggctgctagagcgagcaatgtcggtggaatattatcggaagcgttatgaggcgtggcggacattggttgagttatgtgagtatcaggtggctgaatgggcaaaaagcatgcctctggatatccgtcggcgcccgctgtatgaacagattgatgctgtctggggggggcgggtactgcccaatattcgcggtacattaaagtcggtacattatgattttctacagcgtcagcaaaacgatccaaatgcactgcattctgggggaaatatcagtagtgatcggcgggggttgatagattatttcccgaactggatgcctgatgtagctcagaagcaatatcagaaactactctggcgggcggggttctatgatgatctgataaaagacacttcgacgggttattggtacgaaggttcgctgacttattactatgaagagagtctttatggtccactggcgctacctatgcaactgccactctatgaactggatcacagcgtgtatctccgggaaggcgatccggtgacgattgacggtttgtacctgccggatctacttgatgcgggggcgcgcctgatgtatctgagggagaatattcctgatgcatggcagggacgtatgcgaactcagtatgtcaatgatgttggtcagcaggagtattactgggaggaaggggcatggacaaaaaccaactggatacggatacggcgggtgaaaaaccggtttatcaacgtgccgctggaaggctttttcccgcggggaaccccggaggagctttacaactggccgcaacgccagcaacagtacatcacggaacagcagcggataagcgcgtccagcggcgaaccctgtccacacggcggtgaatggtcgatttttgtggaggacaaaccggtcacggtaacgctggagcagggggaactgatgccggaatgggaagacagaataatggaggaggagcataaacaaggcgaaaagtttcatgttttgtggtccctgatggcgcgacacgacggcggcccggtgtgggtttctgaagcgggataa

SEQ ID NO: 218594 - DNA, 981 bp, Klebsiella pneumoniae
atgaaatatatgaagatttataacccctaccaatatgccgagaagcaggtcagagagctgattgcgcagctaaatgtgtccgtgctgttgacgaaatttgatgaattaatggaagtcactggaagcctgctggataaagccaaatcttgggggccggaatctattcgccagccgattgagacgacctggaaattgctggtttctattcgtagtcaggccaatactatgctggagaaggcactggctccgctgaatgagacactggaaaagctggcctcgcgtctacgacaggaaggcgataattattataaggctcatactggcgctaatccgcatcgcccggctcgtcttaaagatgcagaagaggctgagttattggttcataataagccggactgggtggatgtgggggtaactgagaaatatccagggctgaaacaggcgagcgcagagcagaagagtctgatgcgactggaaaaggataaggaaggctggcctgctttgtcggaagataatataaaaagctttcatcaaatgcgttatgttgagctgccacagaatgaaaaattgtaccgtgtattggatcctgccagtagtgataacagtttttgctggatgcgtgaggctgagtttatggctctgaaaagcaaatcgcagtggcggcgacgttttgcggtatggaagagctggaatgaaaatggcgaatatgtggtgtataccgtcccgccaggcaccacaatgaaagtctgggaaggtcccgctgcctcacagtcgcgtagagtgactgataatggtaaaaatgtggacatagtgttggaaggtgggggaattcagatagtgatagacccggccgatctgaatctgaattatctggggaaacgtcagcacacagggtggggatatagggatttttctgatgaagtagatatgtatatcggcattccccagttgcaaactaaaattttcgtgcctgaagagtga

SEQ ID NO: 218595 - DNA, 1194 bp, Klebsiella pneumoniae
atgacgtcatcgcatcagcgcgccaccagtggggcgctttttattttgattctgagcggcctgatggccttcacttcactctccaccgacatttacctgccggccatgccagtgatggccgcgcagttgcagggcgacgcggagctgaccatcactggctttctgattggctttgcgctggcgcaactggtatggggaccgataagcgatcgactcgggcgtcgcataccgctgtttatcggcatggtgctgtttattatcggttccgcgggctgtgcactatcgaccactatcgatcagattgttttctggcgcgtatttcaggccctgggcgcctgtaccgggccgatgctggcgcgggcgatggtccgcgatctctttgcccgtacccgcgcggcgcagatgctttcgacgctgactatcgtgatggcgattgcgccgattgccggtccgctcattggcgggcagctgattaaattcaccagctggcacgccattttttggttgctggtggcgattggcgggctgatgctggttgcgctgtgctggctaccggaaaccctgccgccggcgcgtcggcagccagggtcgccgctgggcgcttttcgcaactacgccgcgctggtgagaaaccgcacgttcatgcgctataccctcagtctgacctgtttttacgtggccgcttacgcgtttattaccggttcgccggatgtctatattcgctattttggcgtcgccccgcagcattacggctggctgtttgcggtcaatattgtcggcgtcatgctgatgagcgtggcgaaccgccggctggttcagcggcatgcgctgggcaccttgctgaaagcggcgctggcggtatcggcaatcgccgttagcgtactggctaccggcgtgcgtttacaggtcggcggcctgccgctgatcgtggtgagcattttcctctatttctcaatgaatggggtgattgccgccacctccaccgccgcagcactggatgaggccggggaatatgccggttctgcttcggcgctaattggctcgctgcagtacggcagcggtattgtctcctcgctgctgctggcatggctgcacgacggtacaccctggaccatggcatggattatggcggcatttactctcgccagcctgttcctggcatggactcatcgccatagcggcggcagacaatag

SEQ ID NO: 218596 - DNA, 834 bp, Klebsiella pneumoniae
atgcgtaacgatcgcagctttatcgaactgcgcgctcgtgaacgcgcccacgccctgctggacgacggcagctaccgcgaactgctggatccgtttgaaggcattatgtcgccgtggctcggcgcgcagggcatcgtcccacagtccgacgacggtatggtggtcgccaaaggcacgatcaacggccaacctgcggtggtaattgccatcgaaggcaccttccagggcggcagtatgggcgaagtctccggcgccaaaatggccgccgcgctggagctggcggcggaagataaccgcaacggtatcccgacgcaggcggtgctgtgcctcgaaaccggcggcgtacgtctgcaggaggccaacctcggtctggccgccatcgccgatattcatgccgcgattgtcgacctgcgccgctacaccccggtggtcgggattattaccggtaccgtcggctgtttcggcggcatgtccatagccgcggcgctgtgcagctaccttatcgttacccgtgaagcccgtcttggcctcaacggcccgcaggttatcgagcaggaggccggtattgaagagtatgactcccgcaaccgaccgtttatctggagtatgaccgggggtgaaattcgcgccgccagcgggctggtcgacgcgctggttaacgatggcgttaacgccgttaaaaccgcaatgaacgaggccatcgccaaaggcgtaccggcacagcaccgcagcgacaattatgacgattatctgcgtcgcttgagccaattcgatacccgccagcaggcggataccgcgcagattaaacagctttttgcccgggaggataaataa

SEQ ID NO: 218597 - DNA, 300 bp, Klebsiella pneumoniae
atggaacagattacattgtcatttcctgccaaccgcgccctcagcggcaaagcattggcaggagtcgtaggttcaggcgatatggaagtgctttataccgccgcacagggcgccacgctcaacgtacagatcaccacctcagtggataacagccaggcgcgctggcaggcgctgttcgacaggctgaacctgatcaacggtctgcccgccgggcagttgattatccacgacttcggcgccacgccgggcgtcgctcgtattcgtattgaacaagtatttgaggaggccgctcatgcgtaa

SEQ ID NO: 218598 - DNA, 1656 bp, Klebsiella pneumoniae
atgaatgctgaacaaacgacggcgcgggtctggaaccgtcgccggacggaaaaacagcggcggctggccgaagcgaagatcgccggcaaagtcatccccactgaccagctggtcagcgtactggaaaatctgctcgccccgggcgatcgggtggtgctggaaggcaacaaccagaaacaggctgatttcctctcccgcatgctcgccgaggtcaatccgcaaaaaattcacgacctgcatatggttatgcccagcgtcgggcgcagcgagcatctggacctgtttgaaaaaggcattgcccgtaaactggatttctctttctccggcacccagagcctgcgcatttcgcagctgctggaagatggcctgctcgaaatcggcgccatccacacctatatcgaactctactcccgcctgtacgttgatctgtcgccaaacgtcgcgctgatcgcgggctataaagccgaccgcaaaggcaacctgtacaccgggccaagtactgaagataccccggcgctggtcgaagccgccgccttccacgatggcattgtgatagcccaggtcaacgaactggtggacgacgaatgcgatctgccgcgcgtcgatattcccggctcgtggattgattacgtggtggtcgccgacaaaccgttcttcattgaaccgctgttcacccgcgacccgcgcctgattaagcaagaacacattctgatggcgatgatggcgatcaaaggcatctacgcggagcatcaggtgcagtcgcttaaccacggtatcggctttaataccgctgctattgaactgctgctgcccacctacggcgaacagctcggcctgaaaggcaaaatctgtaaacactggacgctgaatccgcatccgaccttaatcccggccatcgagagcggctgggtggagagcgtgcactgtttcggcggcgaactggggatggaagagtacatccgcgcccgcccggatatcttctttaccggcccggatggctcaatgcgctctaaccgcgccttctgccagctggcaggtcagtacgcggtagatatgtttatcggttcgaccctgcaggttgatggcctggctaactcctccaccgtcacccgcggccgcctatccggcttcggcggcgcgccgaacatgggccacgacccgcacggtcgccgccacgccaccccggcctggctcaatatgatcactgaaccagacccgatgcagcgtgggaaaaaactggtggtgcagatggtcgaaaccttccaggccggcgtgaaaccgaccttcgttgaaaccctcgacgcggttgaggtggcgaaaacctccggcatgccgctggcgccggtgatgatttatggcgatgacgtgacccatgtgctgaccgaagaaggtatcgcctacctgtaccgcgcggaaagccttgaagagcgccgggcaatggtcgccgcggtggccgggatcactgatatcggtcttggggtggacgccaaacgcgtcgccgcgctgcgccagagtggcaaagtggtgtacccggaagatatcggcattcgccgtagcgatgccactcgctctctgctggccgccggcagcgtcgccgacctggtggagtggtccgacggactgtacaacccaccggctaaattccggagctggtaa

SEQ ID NO: 218599 - DNA, 1035 bp, Klebsiella pneumoniae
atggctaaacccattattacacttaacggattaaagatggtcatcatgctgggcatgctggtgatcatccttaccggcattcgctttgcggcggacattattgtcccttttattctcgccctctttctggcggtgatcatcaatccgctggtacaactgctggtccgctgccgggtaccgcgcgtactggcgatttcgctgctgattggcctcattgtcatgctggccgtggtgctgctggcttcgctggggacctcgctgaacgagctggcgcgtaccctgccgcagtatcgcaactatctgtatgagccgatgcagaccatcgccccctggctgcagcgcatggggttcaccgtctcggtggtggagctgaataaatacatcgaccctaacgcggtgatgacgctggtcaccagcctgctcactcagctgtcgaacgcgatgtcctcgatttttctgctgctgctgacggtggtatttatgctgctggaggtcccccagcttcccgccaagctgcaacagctgatgtcccgtccggttgaagggatgggcgccattcagcgggccatcgacagcgtgtcgcattatctggtgctgaaaaccgcgattagcctggtgaccggcctggtggtctggggcatgctagtgctgctggacgtgcgcttcgccttcatgtggggactgttggccttcgcgctcaactatattcccaatattggctccgtgctggcggccatcccgccgatcctgcaggtactggtgtttggcgggctgtacgaggcgctggtggtcctggccggctacttgatcgtcaacctggtgttcggcaacattctggagccacgggtgatgggacgtggcctggggctctccacgctggtagtgtttctgtccttgatcttctggggctggctattgggcccggtcggcatgctgctgtcggtgccactgacgattatcgccaaaattgccctcgagcagaccagcggcggtcagagtattgctttcttattaagtgatgtcagtaaagaataa

SEQ ID NO: 218600 - DNA, 618 bp, Klebsiella pneumoniae
atgagcacgcaatatggattctttatcgattccgctcgctgtaccgggtgtaaaacctgcgaactggcctgtaaggactacaagaatctcacacccgaggtcagcttccgccgtatttacgaatatgccggcggcgactggcaggaggacaacggcgtctggcaacagaacgtttttgcttattacctctccatcgcctgcaaccactgcgaagatccggcctgtaccaaggtctgtccgagcggcgcaatgcacaagcgcgaagacggttttgtggtggtcaacgaagatgtctgtattggctgccgctactgccatatggcctgtccctatggcgcgccgcagtacaacgccgacaaaggccatatgaccaagtgcgatggctgccatgagcgcgtcgccaaggggaaaaaaccgatctgcgtcgagtcctgcccgctgcgggcgctcgatttcggtccgattgccgagctgcgcgcaaagcacggccagctggccgcggtggcgccgctgccgtcggcgcacttcacccggccgagcattgtgatcaaacctaacgccaatgcccggccgtgtggtgataccaccggttacctggcgaatccgaaggaggtgtga

SEQ ID NO: 218601 - DNA, 1284 bp, Klebsiella pneumoniae
atggccatcgatacacttaccgcccatccgggcgcgacgcctgtgcgcatccgccgggtgcagaagatcacgttaacgctgttatttatcgccggtatcgttaactttcttgatcgctcttcgctcagtgtcgccggggaggcgatacgcgccgatctggggctgagcgccaccgagttcggggtactgctctccgccttctcgctctcctacggctttgcgcaactgccgtctggtattttgctcgatcgcgtcgggccgcggattgtgctgggcgccggactgattttctggtctgcgatgcaggccctgaccggaatggtcaattcgttttcacattttattttgctgcgcattgggctcgggatcggcgaagcgccgtttatgcctgccggcgtgaaatcgatcaacgactggtatgcgcaaagagagcgcggcacggcggtagggatttttaactcctcgacggtgctgggtcaggccatcgcaccgccggccctggtcattatgcagctggcctggggctggcggatgatgtttgtggtgattggcttagccgggatcttggtcggtctgtgctggtatgtcggctaccgaaaccgccggcacttctccctgcaggaggaggagcagcgctatctggccagcgaggaggtggcccgcccggcgctgaagttcagtgagtggctggcgctgttcaaacggcgcaccacctgggggatgatcctgggcttctccggtgtgaactacaccggctggttatatatcgcctggctgcccggctatttgcaggcgcagcaagggttaagcctggcgcgcaccggctgggtggcggcgatcccgttccttgccgcggcggtgggcatgtgggtcaacggcctggtggttgatgccctggcgcgcagaggctacgatctggcgaagacccgcaaaacggcgatcgttatcggtctggtgctgtcggcgctggggaccctgctggtggtgcaatcgtccaccccgacccaggcggtcgctttcatctccatggcgttattctgcgttcatttcgccgggacctcggcctggggactggtgcaggtgctggtggcggaacacaaagtggcctcggtggcagctattcagaactttggcagttttgtgtttgcctcgttcgcgccgatcgtcaccggatgggtagtggataccacccattctttcaatctggcgctggtcatcgccgccggggtgacctttgccggagcgctctgctacttctttatcgtcagaacccgcattgagtaa

SEQ ID NO: 218602 - DNA, 594 bp, Klebsiella pneumoniae
atgctcaatggcagccattcgttcctcgcttatctcggctatctggccggttatcagcatattaacgactgcatgcaggacgacaactaccgtcgtgcggcgctgtcgctgatgctggacgaacaggcgccaacgctgaaggtgaagggggtggatctctcacgctatgccagtttgctgatcgaccgttacagtaatccggcgctgaagcaccgtacctggcagattgccatggacggcagccagaaactgccgcagaggatgctggactcggtgcgctggcatctgctgcaccagcgtgattttacgctgctggcgctgggtgtggcagggtggatgcgctacgtcggcggtgttggcgatgcgggtcaggcaatcgaaatatgcgacccgttgctgccggttatccagcaggcggtggccgcgagcgccgatggcgaagcgcgagtcaaagcgctgctgggcattgaggcgattttcggcgtggaactgccacaggaagcacgctttgtcgcggcggtgacccgtgcctacttagcgctacagcggcagggggccaaagccaccgttgccgcctgggccgaggcgcaataa

SEQ ID NO: 218603 - DNA, 432 bp, Klebsiella pneumoniae
atgtataaaaaaattttattgcctgttgatgtctttgaaatggatttaagtgacaaagcagtgcgtcacgcggaattcctcgccactgcggaaaacggtgaaatcacattgctcaacgtgctgccgaacagcagtcgttcgctattacgcggctttacggcggatattcgtaaattcgaagcctatatgaaagaagagtcggagaaaaagatgcgcgaggtagcgcgactgttcgacatcccgatgtcgcggatccatacccgggtggtgtttggtaacgtgcgtgatgaaattctggctatcagcaacaacgaagagttcgatgtgatcgtggtgggctcgcgcaaaccgggcatttctacccatctgctgggctccaacgccgagtccattctgcgctacgccaaaacgccggtgctggtggtcagataa

SEQ ID NO: 218604 - DNA, 123 bp, Klebsiella pneumoniae
atgagtaattttctgttattagttctcactgtggtgctgttgttaatatcattattttttggcctttcatatgttaaggagcgaagaaaactgaagatgcggtttaacaaaacccgtcgttag

SEQ ID NO: 218605 - DNA, 630 bp, Klebsiella pneumoniae
atgcctgattttttaattaacactgagaatattttcctgaaacgagggatttgcgaacttcttctcgaaatcgccaatgaagagaatatttgcactccctttttactgcacgcctacagccctgacaccattaatctggttgatatgttgtttactgaaatggaaagcggcgagcattatctatgccacccattattcaagaaaactcctcgtcagagccgtattttcatttttgtttccaaaaccgaacttgtacgcgctgaccggctaccgctttgtctgcagaatgcgacttttatcaataaaaataccgatctacacagtcttaaaaagctgatcgcttatcgtctggcggagttaatcaggcccaaaattatcgaatcggaaccagacagccgccgctgtcttaaatgcccgaggttaacattgaccaagtcacagctttttattatcgacgcgataaatacgggaatgagcaaccagcagatagcgcaagagctgggtatcagccacaaaacggtattttcacataaaattaatataatgaaaaaattccaaatcgacaccaggcaagagcttgcgatattttcatccgtcgcccatgcgctatcctcgggcagaaaccgctaa

SEQ ID NO: 218606 - DNA, 513 bp, Klebsiella pneumoniae
atgactgacgagaacggagactatctgaaaaccacccaggcgctgacggcagaagtggcccaggcgctgatcgcgcgcggatggcgactgacgacagcggaatcctgcaccgggggtaatctggcggccgcgctctgtgcgcaggcggatactgcggccttttatgataccggcgtcgtgacctttagcgatgaggccaagcgtcatgtgctgcaggttcgtgaggaaacgctggcagtccacagcgccgtcagcgaagcctgcgtcaaggagatgtccgccggtattctggagattgccagggccgatattgctatcgccattagcggctatgccggcccggaaggaggagaagatggtactcccgctggtaccgtatggttcgcgtggaattttcgcggccagactgaaaccaaaaggatgtgctttgccggcgactgcgaggcggtgttggcgcaggcagtgcgttacgccctgtcagcgctgggtgaaaagcttccccactggcagtga

SEQ ID NO: 218607 - DNA, 1218 bp, Klebsiella pneumoniae
atgctaaccaccctgatttaccgcagccaggttgatcctgcactcccgctcgtcgatctcgatgcccttatccttcacgccagcgccaaaaatttacccctggggatcaccggcattttactttttaatggcctgcagttcttccaggtactggaagggcacgaggagagccttgaggcgttattcagtgaaatacaacacgactcgcgccatcgtgacgtggtggagctcatgcgcgactactcggcctatcgccgcttcctgaacgttgggatgcacaagctggatcttcgcgattacgcaaacgatgccgcgctggaggaaatcctgcgctttagctcgttcggcgaatccgaaccggtcaatgaccgtatgttcaggctgataagcgcctttatcgccgatggcggacgctattgtctgcccgacgccttgcagccctctcgctggacgatgatgccctcctctaccaccgtgccgccgcgcaatcttcccggtcaaccctgccagtttgcgctgcaggcgattgttgagccggctaaaaaaagggtctcttcctatgaggcgctgatccgcagcccaaccgggggttcgccggtggaaatgtttgccgccgtccctgcggaggatcggtaccggtttgatctggagagcaaggcctttgctttttctctcgccggccagttgccgctcggcaagcagcaactggcgatcaacctgttgcccgggtcgctgtataaccatcctgacgcggtaggctggcttatggacagtctgcaggctgcgggtctcagaccgaatcaggtactgattgaggtcaccgagacagaagttatctcctgcttcgatcagttccgtaaggtgctgaaagcgctgcgcgttgctggcatgagagtggccatcgatgactttggcgcaggctattccgggctgtcgctactgacccgctttcagcctgataaaatcaaagtagatgcagatctggtgcgcaatattcatatcagtggcactaaacaggcgatcgtcgcctcggtggtccgttgctgcgaggatctgggtattaccgtcgtcgccgagggcgtcgaaaccctcgaagagtggtgctggctgcagtcggtcggcattcgcctgtttcaggggtttctcttctcgcgaccgtgtcttaacggtatcggagacattcactggccggtggcgcgccagaccaccgacctgtaa

SEQ ID NO: 218608 - DNA, 846 bp, Klebsiella pneumoniae
atgaaccacagcacactgcagatctttatccaggtggcagagacgcaaagtgtcacccaggcggcgaaacggctcggccgcgtgcagtccaatatcacgacccgtattcagcaactggaagaggagcttggcgtggcgctcttcgtccgcagcaataagaagatggtgccatccccggcaggcgcgcagtttctcagctatgcccggcggatcctgagtcttgcggaggaagcaaagcaggccctgaatccggtgacccccagcggtaccctgcggctgggcgcgatggaggcgaccgccgccagccggctgccgccgctgctgacctgctttcaacagcggtgcccgcaggtagagatcgtgctctccacccagccaacccgccagttaaccgagggagtggtcaacgccgctcttgatgccgcgctggtctgcctgccgccgggggccgatggtcaaccggcctgtcctgccgagctggcattcaccccggtgtttcatgaaaccctgatgctggtccgtccgcggaatccgggcccgctgcggttcgcggcatttgccagcgggtgcagttatcgggcgctgggcgaacgctggctggcagcgcagcaaataactgccgaggtgcatgaggtcaactcctaccacagcatgctcgcctgcgcggcctccgggcgctacgcctgcctgctgccgcagagcgtgctggcgcagatgacgcttcccgaaaactgccttagcgaaccgctgtgcgcggcgaccacccagcttatctggcgcaacggggacagcgctcccgccctgagcgaatggcgcaagctgttgcaaagtgtggcgaacgactaa

SEQ ID NO: 218609 - DNA, 1029 bp, Klebsiella pneumoniae
atgaacgcgaccaccctgccgattctcgacctggcccgctacgcggaccccgcggataaagcggccttcctggccgacctgcgtcacgccgctcgcgacatcggcttcttctatctgatcaaccacggcgtcgacgacgcgcttcaatatgaagttcagcgccagtcccaacgcttttttgccctcgatgaggcgcaaaaacagcaggtggcgatgatccactccccccattttcgcggctataaccgcgcggcctctgagctgacgcgcggccagcctgactggcgggaacagtttgatatcggcgccgaacgtccggcgctgaccctcagcgacgacgccccgcgctggcagcgcctgcagggccccaatctgtggcctgccgccctgccgtcgcttaaaccggtattacttcactggcaacagcaaatgacccaggtgggcatccgcctgctgcgcgcctttgccgaagcgctgcagctcccggagaatgctttcgaccagctctatggcgacaaacccaacgagcatatcaaactgatccgctatcctggccagcaggagacgcaaagcagccagggcgtcggtgcccataaagattcggggtttctcagcttcctgctgcaggacgagcagaaaggactgcaggtagaggtcgcgcctggacagtggatcgacgccgtaccgctggccggcagctttgtggtcaatattggcgaactgctggagctggcgaccaacggctatctgcgcgccaccgtccatcgggtcgtgtcgccgccggcgcagcaacagcgcctctctatcgccttcttcctcggcgcccagcttgacgcggtggtgccggtttacaccctgccgcccgaactggcgcgtgaagcgctgggtccggacagcgatccgcacaatccgctgctgcgcgatgtcggctggaattatctcaagggccgtctgcgctcccatccggacgtggcggaacgctactatcaggacgtgtttcgcgaacgcgccgagcaattgatcgtttaa

SEQ ID NO: 218610 - DNA, 288 bp, Klebsiella pneumoniae
atgtctccgtcccgtctcgctctgttatgtctgtgtctggcgccgctggcgtcgtctgcggccctctctggtcaggttcatttttcagggcatgtcatcaatccggcctgtcttatcaccccgcagcgcgatcgtatcgcggtttcgtgccagcaccgttcaccgcaacaggtcgctgtgacaggccaccgcccacgctatgcgatgccggataatcgcggcgaggtcagtatccactggcgaaatgcacagcatagtgaagcggatgtgattattcgctatcgctaa

SEQ ID NO: 218611 - DNA, 804 bp, Klebsiella pneumoniae
atgccatcaataatcattaaaactgccgatgaactcgcgcggcagcgccatgccggccagctgctggcatcggtgtttgatatgctggatacctttatcgtgcccggcgtcaccacgatggcaattaacgatcgagtggaagattttatcgtcaaccagctgcacgcccgcccggccagcaagggacaatatgattttccctatgtgttaaacacctctgttaacgatgtggtgtgccacgggatccccaaagcgaccgaacatctgcgctcggggatgattgtcaatgtcgacattacgctggaaaaagcaggcatgatcgctgactccagtaagatgtacctcatcggcgacgtctccccgctggcccgccggctggtaaagaccacctatgaagcgatgtggaaaggcattgaggtggtgaaacctggcgcgacgctgggcgacattggccatgctatccagcgctgggtcgaggaccatggctacagcgtggtcagagaatactgcggtcacggcgttggtcaggaaatgcatgaggagccgcaggtgctgcattacggcaggcccggggaaggcgccgtgttgcgcgaaggcatggtgttcactatcgagccgatggtcaaccagggcgacagccgcatcaagaccaaaaaagatggctggacggtggttacccgcgataaaaaactgtcggcacagtgggaacataccgtagccgtcaccgcgaacggttttgaggtgctgacgctacgcgacgatgagcaagcgcggatacacagcgtgtcttccctttctgtatga

SEQ ID NO: 218612 - DNA, 936 bp, Klebsiella pneumoniae
gtgaagcagagttcagggagcatcaccacaggccgggctagcgggctgctgacgctggcggttggggcactcttctacagtagcggcagctgcgcccggccagatcttcagccgctggggccgaacatcgcggacaaaggatcggctttctaccactttacccaacgccagtatgattctgtcgatggtgcacgccactaccgggtgtggacagccgtacccaataaagcgccccctgccgccggttacccggtgctgtatatgctggacggtaacgcggtgatggataagctcagcgacgcatttttgcagcagctttccgctggctccccgccggtgatcgtcgcgatcggctatcagacggcgctgcctttcgacaccgccgcccgggcctgggattacaccccaccgctaaagacgttcacacctcgcacgggtaaacccgcgccaccgccgcggaaaaccggtggcaattatatttttcgccagctcctgaccgaaacgatggtgccccaggcggaagctaacctgaaaatagatccgcgccagcgggctctctggggccactcctacggcggactgtttgtactcgacgcgtggcgaaaccactccctgttcaggatctactattctgccagcccgtcgcttggccaggcgcagacctctcccctgaaggacaccgcgacccttgatggcaccgcgtttaccgggacgtcactgtatctgctggaaggcgatggaaaagccgccgccgagccctccgggcatgaagcctccctgggcgtactgcgtcagacccagcggcagctggccggtaacggtctgacggtgcagttctggcgctaccctggactgacgcatgggcagatgttcgatgtctcgttgcgctccgcgctgcttcatctctccgggcagcctccgttggcgcatcagtaa

SEQ ID NO: 218613 - DNA, 141 bp, Klebsiella pneumoniae
atgacgctggcgatgctgtgggtgcttatcagccaccataaagggctgacgcttttgctggtcgtgattattgcgctgctctttatcgcgatcgccccgctgataaagaggctgttgcgtaacctccaccgcgacccctga

SEQ ID NO: 218614 - DNA, 240 bp, Klebsiella pneumoniae
atgtgcaacgcacttaatggtatcgcgattgtactctgctttcgtgggataagccgcatcactggctacagcgaagcggtctggcaggccatcatcacgctggctattattatatcaacctggtatagcgcgaattatttcgctgcgctggaatcacgtcatgacaaacgacgctttttgctgctggcctgggtggtgatgactattttgttgaatttcattcacctcagtgacggctaa

SEQ ID NO: 218615 - DNA, 1329 bp, Klebsiella pneumoniae
atgaaagataattttgtggtcacgattgccggcggcggcagtacttataccccagggattgtgatgatgttactggaaaatatgtcacgctttcccctgcgggagatccgtctgtacgacaaccatcaccagcgtcagaagaccatcggcgacgcctgcgccattctggtggcagaacgcttcccgcaggtgaagttcagctataccaccgatccgcaggcggcctttaccggcgtggatttcgtgatggcgcatattcgcgttggcctgtatgagatgcgggaaaaggatgaaaagatcccactgaaatatggcgtgccgggtcaggagacctgtggcccgggtgggattgcctacggtatgcgctccattgccggggtgctggagctggtcgattatatgcagcagtacgcgccaggggcctggatgctcaactactccaacccggcggctatcgtcgcggaagcgacccgtcgtctgcggcccgacgcgcgcatcatcaacatctgcgatatgccggtggccatcgaggggctgtttgccgacatcctcggcctgccatcgcgtaaggcgctgaacgtccgatactacggcctgaaccacttcggctggtggaccagcatcaccgataaagccggtaacgatttgatgccggcgctgaaacgtcacgtggcggagcagggatacagcagcccaaaggaagactttcagcataaggcgccgagctggatcgagacgtttaaaaaggtgaaggatgtgtttgccctcgatccgtcgacgctgcctaacacctatctgaaatactatctctacccggactatgaggtggcgcacgccgatccagactttacccgggccaacgaggtcatggccgggcgtgaaaaagaggtgtttgatatggcccgggagatcacccgtcgcggtactgcggaaggcgcgcatttccatgccggggcccatgccacttttattgtcgacctcgcctgcgccatcgcctttaacacccaggagcggatgctgctgatcgtcgagaacaacggagccatcgccaactttgatgagacggcgatggtggaagttccctgtctggtgggcgtcaacggcccggaaccgctggcgatggggaaaatcccgtcgttccagaaaggattgatggagcagcaggtggcggtcgagaagctggtggttgatgcctggattgagggcagttaccagaaactgtggcaggccatcaccctgtcaaaaacggtgcccagcgccgcggtggcgaaagccatcctcgatgaactgatcgtcgccaacgaaggctactggcccgcactgcactga

SEQ ID NO: 218616 - DNA, 1470 bp, Klebsiella pneumoniae
ttgaaatgggtaacctggttaaaacgtatcgtgttgtccctgctgctgttgatcgttggcgctctgggactacgcctttatgacattcagcgcggacccgagctgcagctctggcatacctgggttccgcatgagatggacgcggaggaaatcgacaatgctgactggaacgattacatcaacaaagagaatgcgctcttcagtgaggtaaaacgccaggttaccgataagctggacgctgagcagcaaaccgaactgaatcgttactatagtcacagccccatctatccggactcgtttccaaccaactggaatcggtcatatatcatgatgccggatggcaaaccgaaaggcgccgtggtgttgctgcatggtctgacagataccccctacagcctgcggcatatcgctgaaaattaccggcaacaggggtatgtcgccatcggtatcagattaccggaccatgggacggttcccgccgggctgaccgatgtggactggcaggactggcttgccgccacgcgccttgcggtgagagaagcgaaacgactgacgggtaatgatgtgcccctgcatatcgtcggattttccaacggcggcgcgctggcaatgaaatattcgctggacgcgctggataatgccgaactggcaaaaccccagcgggtgatcctgatttctccgatgatcggtattaccagcttcgcgcgtttttccggcctcgctggctggcccgcgtttcttcccgccttctcgaaagccgcatggttaaacatcatgcccgagtttaatccgttcaaatataactccttcccgacgaacgccgcccggcagtccttcctgctgaccaaagcgctgcaaaagcagatagtgactgactcgagaaatcacagacttaacagcttaccgccggtattgacctttcagtccgttgtggattcaacggtcagtacgcgggcgatcgtgacggcgctgtataaccgtttgccggaaaatggcagtgaaattgtcctcttcgatttgaatcatgccgtcaggtttaattcattattacgccggacgtcttacaccgcgctggcgcggttgctgcccgcgccgccacgcgcttatcagaccacgatcatcactaacgcgaattcagccagtaccgatatggaaatccgcacaacatctgccgggaaaacagacaccacagtggaaaagctgcagggaatgcgctatctgccggacgtatactccctttctcatgtcgcgctccctttcccgttaagcgattcgctgtacgggcgctatccccatccgctgaatcaatatgggatcagcctcggcacgtttgctgctcgcggcgagcgttcggtgctggttgtgggtctggactcgctgatgcgtcagtcttccaatccgttctttccctatatgatcaagcgcattgacgaagggatcgacactcgcccggctctctccgggaaatag

SEQ ID NO: 218617 - DNA, 3075 bp, Klebsiella pneumoniae
atgaaacccgtattgaatgagaaatttaacctgtcctcctgggcgctaaatcatcagcagatggtcagtttcttcatgctgctgatcattgctatgggcgcgttctgttatgagaacctgccacgtaacgaagatccggcgtttacgattaaaacggccgttgtttctgcgcaatggcccggggcatccgtaacggataccacccgactgctgaccgatacgctggaaaaaaagctgcaggaaaccccttggcttgattatctcgaaagtgagacccgcgccgggagctccgttattcatgtcaatcttcgtgacgataccccgccgcaaaaggtgccggatatctggtatcaggtacgtaagaaaatgcaggatattgccccctctttgccagaaggcgttcagggccccgccgtcgacgacgagttcgatgacacgtacggtacgatctatggctttatacctgagggctataccctgcgggaggtccgggaccgtgttgagacaatccgccgggaactcatgtcgttaccggatatcggaaaaaccagcctgctgggtgagcagcaggaacagatagttctctctttttctcctgcgcgtctggcaggtatggggttgaacatccagcaggtagcagatgccctcaaagcacaaaatgcggttgtcccggcaggtatcatccgcaccggacaggaaaatatagcgataaaggtcagcggggagctgacttctgaagcgagcttacgtgccgtcacgctgcatattaacgatcgttaccttcctctgacggatattgccaccgttagccgtgaaaacgccgagcctccccagccggtttaccgggtcaacggcaaacccgccatcgggctggctatctcgatggcgccgacgggtaatatgctgcgtttcggcgccgcgctgaatgcaaaaatgcatgccatcagcgtcacgctgccgcacggtattgagatggtcaaggttgccgatcaatcagcggtggtcagcgatgccgtaagcgggtttatccgggtgcttatcgaagccgtggcgatcgtcctggccgtttcgtttgtctcgctgggtttacgagccggactggtagtggctgcggccatcccactggttctggccatgacctttacaggaatgatgctggcaggaataggtctgcagcgtatttctctcggcgcattgattatcgcgctgggcctgctggtcgatgacgccatgatcaccgtggaaaccatggtctctggtctggaagccggggattcccgccgacaggcggcgacccgggcttttaaaacgaccgcatttccgatgctgacgggcacccttgtgatgattgccgggtttattcccgtgggatttgctgcgtccagcgccggcgaatattgcttttccctgtttgccgtggtgctcatcgccctgctgtgctcatgggttgtcgcgatcctgttttcaccgttaaccgggacgtggctgttatctgacaacatcagacagaaggcgaaaggtcctggacggatggcccgcggataccagtggctactgcgcaaggcgttgcgtcaccgcttcgccaccgtgtgtattgctctcattgcgcttggtctgtccgtttacggaacaacctttatgcagggggagtttttccccgcctccgacaggccagaattgctggtaagcctgacgctgccggcaaatgcctcgcagtcggaaacgcaaaatacggctgaaaagctggagaaggccctggcaggcaaccgcaacgttgatcgcttttcgacatacgttgggtcgggagcgatccgtttttacctgcctatggatgtgcttctggcaaatgaaaatatcgcccagatagtggtggtagctaaagatcttaaagcgcgggatcgtcttcatcgacagttaaacaggatactggctacgcgctttagcgacatcatcacgcgcgtatcgcccctggaacttgggccccccgtcggctggccagtgaaatacagggtgagtggaccagattatctgaaggtcaggtcgatcgcgaaccgcctgagcgatgtcattggccggtcaccctcctctcgcgaggttaatcagacggcgggagaaccggagagagtcattaccctcaaggtcaatcagaccgcagcccgggctgcgggcgtgtcgtcagaaagtctggcccggatgctcaataccgtctggtccggcagtgtggtcacgtcggttcgcgataatgaccgccttgtcgatgtggtgctccgggccagggacaatgagcgtcttaacctcgccaccttttcttcgctgactgttcaggggaatgacgggaaacaaatcccgctcagcgcctttgccacgccagtctggggcgtggatgatccggttatctggcatcgacagcgtttgcctttcatcaccgtgcaaactgacctcgccccgggacttcgcgccgaagcggtatccgcagcgttgcgacctgcggtagacaggttgcgcgcggaactgcctgaaggctacagcattgaagaagggggcgcggttgctgaatctgaaaaaggtaatagttcggtctatgcggttctgccggtgacactggtcatcatgctcttgctgttgatgctccagttgcgcaactattcccgtatggcgttggctatactgatggccccgtttggtttaccggggatcgtgctggctatgttacctggcggaacaccgatgggatttgtcgctctgcttggcgtgattgcgctcgctggcatgatcattcgtaacgccgtcatactgattagcgaggttgacagcaatcttgctcagggaatggcaagcgatgccgccattattgcggccgcagagcatcgtgcgcgccccatctgcctgacggcctgtgccgccattctgggaatgatccccatctctcatcaggtattctggggaccgatggcctatgcgattatcgggggactactggttgccacgctggttacactgaccgttttaccggcatcgtttagcctgttgttacacctgagaataacgtcctcaggcgagactcgagaaaaatga

SEQ ID NO: 218618 - DNA, 1149 bp, Klebsiella pneumoniae
atgtcagatgaatttttactctccctccgccacagtctgcaccatttgtacgacgtggcgcgccccctttcctggctgcactttctccccctgaccattctttcggtagtgatttttctgctgcccggatgcggggacaaccagggtaatacgactgatcctgtgcgaacggtgcgctacgttgttgttggctcagcgcaaacccttcccgcgctggaaagaaccggagagatccatgcgcacgatgaaacgattctgagctttcgtaccggcggccggatagtgacgcgtagcgtcgatattggcgatcgggtcaatgcagggcaactgctggccacgcttgaaaatacaaccagtcagaatcagctcgatggcgcacaggctgattatgaaggagccaaagcctctgctcaggttgctgcacttaacgtcaaccgaatgcaaaagctaatgccaacaggcgcgattgcccgcacgcagctcgataccgcccgcgcagactggcttgtcgcccgcgcgcgtttaaaaaacagcgagtccgcgttgcgtaatgcccgggaaagccttggctggacgcgtctgattgcgccgcgaagcggcgtgatcaccgaagtaagcgcctctgcgggtcaggtggtcaatggtggtcagtcggtattgacgctggcgaccggtgaagcccgcgatgtggtgtttgatatcgctaaacccgaggcgatcccgccacaggaacaggctggcttgcgagtttccctcctcagcgacccgtcggtgcaagcgtccgccgcggtaagagatattagcccgcaggccgatcctcagacccgcacatggcgcgtcagggctaccctgcaaaacccaccgctggcaatggcgctgggcgccagcgtcaccgtcacgttacccgcaacgggtccgcatggatacgcccttcccgcttcagcgctgagccgcgtcgacgacaaaccggcggtttatgtgattaacccacagtcgcaggcgcagcttcgcgtggtggtaccagcatactataccgccaccacggtcattatctccggcggccttgaaccaggcgaccgggtgattaccgccggcgtgagtaaattacgctccggcgagccggtgattgccggggagtgcgaatcatga

SEQ ID NO: 218619 - DNA, 1197 bp, Klebsiella pneumoniae
atgacaaaaacccgctattcctccctgtggcgctggatttgcgcacgtatattagcgctggccatcggaagcgtaattgtcattgcgacctgtatgtggctacgttatgcggtgcagaattactggaacataggcagaatgccggcatcggtccgacaagagtttcttgcgctcagccagaacccgcaggcgaacccggtgcgcttccatcaaatcgtcgatacctggtgggggttgagttattcaaccccatccatcgcctcggcggactgggtcaccgtggcgttactggtcctggtcatgatcccttttattgtggtgatgggattgagatatgccaggccactggcgctgcagttcagccggctgcgtgatgcggcaaaggaggtcgccgaaggacaatttggccgccaggcagaactcatcaggaatgcgccggctgaaatggtcagctttgccagtgactttaataccatgacggggaaactggctcgctatgaaaaagagttacgtacctctcatgtggccatggcgcatgagcttcgctcccccctgactgccgctatcggacgtttgcagggcatgctggatggtgtgtttgatgccagcccggaacaactggcaatggtaatgaaacagcttcagcacctgaatcgcctgaccgatgaacttcatctgctctcgctgtctgatgccgggaatttggtgctggaaaacgaaccctttcgtctggatgagctgcttaaagaacgggcgacatggatcatgccccaggctgatgcacatcgttttacaatcaggcttcatcattctcaggcgtgtcccttcaaaggcgatacgttccgtatgggccaggttttcaccattcttatggaaaatgccctccgttacgggcgtgatggcggccatcttgatgtcacgctgcactacgccagcgggcaatattgcctcgaatttcgcgatgacggcccgggggtatcctcccagttcctgccggaaatgttcaaccgttttagccgggaggagcagtctcgtgcccgccactccggcggcagcggtctcggtttgtcgattgctcgcgcgatttgtcaggcccatggtggcagtatcagcgcgtcgttacctgaaaccggcggactcgcagtcacccttttgttaccctggacgtcgtctgagatggaaaatagccgctcttga

SEQ ID NO: 218620 - DNA, 693 bp, Klebsiella pneumoniae
atgttgtccagaagagtgctgattattgaagatgacgccgatgcggctggcgtgctcgaagcctatttacgccgtgaaaattacgatgtcgtcattaccggagatggtctttccgggctggatatggcgcaccggtggaaacccgatctgatcctgctggatgtgatgcttccggggcttaacggcaccgaagtcctggctggcctgcgccgtaaaaatgatgttccggtgatcatggtcaccgccatgggagatactcccgatcgtattggcgccttgcgctatggcgctgatgattatgttgttaagccttaccatccgggagaagttgtggctcgggtgcaggcggtactgcgccgcagcaatcaaacagaaacaaaggaagagatccttcgctggcaatcgctcgaagtggatgttacggccatcgtggcgagcattgtcgacgggaccacaccgcggacgttggatctgaccccaaccgaattttcactactgaccacgcttatgcgctctccttcacgccctttttcccgccagcatttacttgagcactgcttgccggaaagtgaagccctggagcgcgtggtggatacccatatttataacctgcgtaaaaaactcgaggcggcgggtatttccggcgtgctggttaacgttcgcggcgtaggctacaggttcagacaaccatga

SEQ ID NO: 218621 - DNA, 786 bp, Klebsiella pneumoniae
atgatagcgataaaaaaagccctgtatatgaccgtaccgcttttgacggccatgacatcctgcgtacaagcaaatgatgacacttcctccggcaccttcaccattgggctgggaggccactacactccgcgatattcaggttcagacaagcaggtatggcaggtggttcctgtacttcaggggcgtaacggcgcattttttattgatacgcagaaaggggggggatatgacctgcagaacgccagcggctggtacttcgaacatacgctgggatacgatctgggaagggcggataaaaatgccagctggcgggcaggggcaaataatctgaaagggatgggagacattgacgcctccctgaacacggcccttgccgtcggctggcaggcgctttcgtggctcagtgttgaaggtaaagcgacgctgcctttaacggacagccaaggggtaagctatcaggcatccttgacgttgctccctgtacaaactgaccatgacacggtcgcctttcagacggcggccctgtttggcgacaaccgttacctgaatacctggtatggggtggatccgcagcagagccagcgctcaggttatagccgctattcagcaccggggggattttatggcatagacaacagtctgacctggagtcaccagtttgatgcccactggggcacggttatcagtgctgactatacctggcttggggagcatgcaaatgagagcccgatcgtgttacgacgtaacgaggcggcactgacagcagctgtcatctggacattttag

SEQ ID NO: 218622 - DNA, 600 bp, Klebsiella pneumoniae
atgcaggatagaaacgtgactattaaactgattgtcggcctggctaaccccggtgcggaatatgccgccacccggcataacgctggcgcctggtatgtagatttactggcggatcgccatcgtgcgccgctgcgcgaagagagcaaattcttcggctatacctcgcgtatcaacctggcaggcgaggatgttcgcctgctggtccccacgacctttatgaacctcagcggtaaagcagtcgctgcgatggcgaccttctatcgtatcaatccggatgaaattctggtcgcccatgatgagctggatttgccgccgggcgtggcgaaatttaagcttggcggcggccatggtggccacaatggcctgaaggatatcatcagcaagctgggtaataaccccaactttcaccgcttacgcgtcggaattggccatccgggcgacaaaaacaaggttgtcggtttcgtgctcggcaaaccgccggccaacgagcagaaactgattgatgacgccgtcgacgaagcggcacgttgcacggaaatctggttaaaggacggtctgactaaagcgaccaaccgtttacatgcctttaaggcgcaataa

SEQ ID NO: 218623 - DNA, 1368 bp, Klebsiella pneumoniae
atgatgacaacatacaacgaccgccactataaaaccggtggcgacccgcgcacgctggctgattttattgccctgcgtgcggaaatgaacaagcttagccacccggcgcggccggatattaactggtcatatgccgagcagcttgcccgcgcgttgctcgagcatcacggcgcagatctgcagaccgtcgcctggtatacgctggctcgcgcccggctgggcgggctggcagggatcaacgagggcctgtcgctcatggaaacgctgctggcccaccaggggaaaaacctgtggccgcaagcggtccccgcccgcacagagatccttcgtactctgagtaagcggctgcggcaggtgatccgcaccctgagcctgaccccggacgatcttgagtcgcttggtcaggctgaacgtttgttgcaaactttcgaagcggtcctgctgcgccttgagattgctcctgaaaaccagctgagtgaactgcgtgcattgctgcacagcgcggcaactcgcttcgatagccttgactctgcgccagcgcttcccgccgtaccgccgatggtggcgtccagcctggaacactctgtttctctggccagcgaagaggatgcagcgaaggctgagccagcggcagacctaaaactaagaccacaggctgagccgctggctccgccttcaccagcaacgcgctggaagccgtttatcggcgggatggtcaccatgctggcggtggcgggcatcgccgtcggcggatggctggcgctgcgtcaagccgctccgccaccgccttctctgacgcaaaaggccgggccgataccgggcctgccggcagcgcttctccagcggccgggcgatgttcgtcagatgcaggacctgctggacgagcttgcccacctgacgccggactgggcggtcagctacggcgaccagctggtccgccatgccctgagccgctggccggatcaggcgcaaccgctggcacagcagtggcggcagcagttgagtgctgctgcgttgcccgcggaaaaccttaccggctggtcggagggtatgcagcagctgcagcggctcgccgaccggctcaatgcccttgacgagcagaaggggaaatacctgacggtgagcgaactgaagaccgcagtatttgccattatgcagtcgttcaaccgcgccgttccgctggaggagcagctgcgccagctggccgcgcttcccgctgatgaaccctggcctgccgcccgcggaagcctcgcggagctgcatctgcaacagctgttagtggagtatgccctgttgaagcgcaagcagtcgacgcccgctgcgctccccccaaccggtgagtcctcggtgagtcagacggcaaaataa

SEQ ID NO: 218624 - DNA, 444 bp, Klebsiella pneumoniae
atgcctcgtccctccctgtatgacatcctgtacggcaatttcgccggcgggcttgacctgaatactgtcagcgaaacggatcaggtcatcctgtcggtgctcgataacatgcagcgcatccttaactgtcgggccggaacgctggcgcatctgccagactacggcttgccggatatgaccgctatccttcagggcatgccggcatcggcgcaccagctgatgagcacgttgtcggcggtgttgctcaaatacgaaccgcgcctgctgcggatcgcggtagtgatgctcgatcagcatgcacccggcgagttgcgctatgccattgatgcggagctgaaaggaatcggtctggtgcgctatggaacggcgtttatgcccgaaggcagggtgttgatccgccaccttaaacgtcagcagtatcttgacgcccgctccgccctctaa

SEQ ID NO: 218625 - DNA, 267 bp, Klebsiella pneumoniae; identical to SEQ ID NO: 138787

SEQ ID NO: 218626 - DNA, 1089 bp, Klebsiella pneumoniae
atgattaaattaacgcatctttttaaaacctatccaggcagcgcccagccggccattcgcgacctcagtctggatattgctcatggcgaattctgcaccttcgtcggcccgagcggctgcggaaaaaccaccatcctgcggatgatcaaccagctggatattcccgacagcggcgacgtctatattcagggcgtccgcctcgctgacgccgatattatccagatccgccgtcagatcggcttcgtgatgcaaagcgccgcgctctttccccatcgtaccgtggcgcaaaatatcgctaccgtgccgcggctggcgggctggagcaaagcgcggatccgcgcgcggattgacgagctggtggcgctgatgtcgctcgacagccatctgctgcaccgctatccgcatcagctctccggcggccagcaggggcgcgtggccatcgcccgcgccatcgccgccgatccgcccattttactgatggatgagcccttcgccgccatcgacccggtggttcgcgaacgcctccaggatgagctgttgctcctgcagcagcggctgaaaaaaaccattgtgctggtgactcacgatatcaatgaagcgatccgcctcggcgataaaatcgccattttccaggaaggcggcgtgctggcgcagtttgatacccccgaccgtattctggcccagccggcaagcgagttcgtgcgccgctttatcggcccggagcccaatctgaagcggctgggcatgattcaggtcggccagctgccgcgtcacgatgtccccctgctcgacgaagcgctgacgccgatcgccagcgcccacccgccgctggccagcccgctgcgtctggtgcttgaccgacagcgacgcccgctgcactggttcgatccgcagcggggtctcaccctgccggtggagcgcccgctcgccagcagccacagcctgcgttttgcctacagcgcgctgctcgacgtggcgaccggcgtgctggtgcatgttaatggcgaagggcaataccagggagcggtatctcacaccctgctgcagcaggtgctcgacggcgcggtaggagtgggacctcatgattga

SEQ ID NO: 218627 - DNA, 630 bp, Klebsiella pneumoniae
atgattgactggagctgggttatcgataacgacgcgatgatcggcgatctgctctggcagcatgcgcggatggtcctgctggcgctgcttttcggctccctgctcaccggcggcctgttagcgattaccttacgctggcccgcgacggcgcaaccgctcatcaccctgtgcggggtgctctttaccattccctcgctggcgctgtttattttattgctaccgtttaccgggctgtcgctgaccacctcgctgattggcctgacgctgtattcgctgctgatcctgctgcgcaacgtgctggccggcatggagaagctgccgcaggcggcgctggagtcggcgcgggcgctcggctacacccgcgggtttcgtttcttcgatattgagctgtggctactgctgccctctctgtttgccgggctgcgcattgcctcggtgacgctggtcggcctggtcaccgtcaccgcgctgatcggccagggcgggctggggcagctgctgctggcgggttttaatcaggactttctgacgccaattgtcgtcagcctgatcctgagcctggttctgtcgctggtctttgactggctgattgcccgtcttggcgactggcttacgccctggacggaataa

SEQ ID NO: 218628 - DNA, 669 bp, Klebsiella pneumoniae
atgaccctgctgcttgcaacctttcactggctaacccagccggagcactggctgggtgatgagggcatcctcctgcgcctgggacagcatctttattacgtgctggtcagcatggccgtggcctgcgtcatcgccctgccgctcggcatcgcgctgggctactggcgcaaaggcgccttcgtggtgattaacctgtttaatctcggccgcgccattccgtcgttagggctgattttattgtgcatcatcgttttcggttttaacgatatcccggtgctgacggcgcttatcgcgctctcgatcccgcccatcctcactaacacctgggtagggatttatcacgccgaccgtccactgtgcgatgccgccatcgcgctgggcatgaccccctggcaaagcctgtggcaggtgcggatcccgctggcggcgccgctgatcctcgccggggtgcgcacggcgctggttcagcttatcgccacggcggtggtcgcggcctatgccggtttgggcgggctgggacgatttctgatcgacggcctcgggcagcgggatatcccgcaggtgatcggcggctcgctggtggtttccctgctggcgataggcggtgaactgcttttcgcccgctgcgccggccgcctgacccaccgccgtattgccgcgccttattag

SEQ ID NO: 218629 - DNA, 900 bp, Klebsiella pneumoniae
atgaagcaattatttggcaaggccgtcaccgtccgtcgatttcgtctctcgctgctggccgccgggctcttcagcctgagcgttagcacctttgccgccagcgtcaccgtgggcggagccaattttaccgaaagctccatcctcgccaatatttacgccagcgcgctaaagaaaaaccatatcgaggccaacacccatctcaaccttggcaaccgggaaattattattccggcgctgcagagcggtgagatcgatatcgtgccggaatatcttggcgccctgctcaattattacaacggcaaaaccgaagccaccagccagcaggccgttagcgccgagctggcccaggccctgcccgctgatttcaccctgctgacccccgccccggccacctcgatcaccgcctgggcggtacgtgccgagaccgcggagaaataccatctgcgcaccctctccgacctgaagcccgtcgccccgcagctggtgatcggcggaccaccggagctggcggtacgtgctctgggcctgccggggctgaagcgcgtctatggccttgagttcaaagcggtgaaatcgctggacatgggcggaccgctgacccgactggcgctcaattcgggcaaaatcgacgtcgcgacggtgatctccacccagggcaacctggcgaaagagaaatgggtggtcctcgaggatgataaacatgagcaaccgagtcagaacgtggtgccgctggtgcgcaaagccagtctgacgccggagatcggcgccgtgctcaatgcggtttccggcaagctggacaatgccacactaattgccctcaaccagcaggtcgatctccagcataaagatccggcagccgtcgccgagcagtgggttaatgccaacttcccgcaaccctaa

SEQ ID NO: 218630 - DNA, 1332 bp, Klebsiella pneumoniae
atgtctacccgacacatgatcctgaacctgttcttttacaatccgcagggagattaccgcttctcctggcgccaccctgatgcaccagaagcggaaatatttaccctcaactattacgccgagctggcgcgcaaggccgaagcggcgaccctggacgctatctttgtcgccgaccatatcgcggtgtgggatacggtgcccagcggcctgacccactatgccaacgcccggcttgagccgctgacgctgctctccgccctcgccgcggtgacggagcatatcggcctgatggccaccgcgtcgacctcctataacgaaccctataacctggctcgctactttgcctcgctggatttcctcagcaatggccgggccagctggaacgtggtgacgtcgtggctggaagaagaagcggcaaacttcggtctggagcagcttccccgccacggcacccgctaccagcgggccagtgaattcatcgacgtggtcactcgcctgtgggattcctgggaagatggcgcggcgatcttcgataaaacgcgcggcgtattcgccgatgccggcaaggtgcatcacctcgactatcagggcgagtacttccgcgtgcgcggcccgctcaacgtcccccgtccgccgcagggccatccgctgctggtgcaggccggctcttcagaggcgggcaaagcgctggccgccgcctggtctgatatgcacttcgtgtttattcactcgatcgccgaggggctggcctatcgcgaagagatgaaccagcggctgcgccagcacgggcgcgatccggtccatttcaaaattatcgccggggtcctgccggtggtggtggattccagcgaggagaaagcggcccgccagcagcttaacgagcagctgatgagcgaccagatggctatcgacctgctctcctcttatctgcgaatggatctcagcgccctgccgcgggaccaccccctgccgccgctgcccgatgaagagagctttgacggcatccgcacggcgctgaagcttatccgccagtacgatccgcggctcaccctgctggagttggggaaattgttattacagagttccgatagctggctgctgctgggcagcgccgaggagattgccgccaccttaacggagacctggcaggcgggcgccgccgacgggttcaatctgatgttcccgctgctgccgggagactttgaccgctttgttgaccaggtggtgccgattctgcagcgtaacggcgtcatgcgcgatcgctatccgcccggcaccctgcgggaaaagctcggtttgcccgcggtggaaaaccgctttaccgcgccgtag

SEQ ID NO: 218631 - DNA, 747 bp, Klebsiella pneumoniae
atgacctactgtgtggccatgtgcctggcggatggactggtgtttgcttccgactcccgcaccaacgcgggcgtcgaccatattgccacttttaaaaagctacacgttttccatcaggagggggaacgggtgctggtgctgcaatccgccggcaacctggccaccacccagagcgtaataagcctgctcagcgcgcgcatccggacccagcaggagccgaacctgatgcaggtcacctccctctacgacgccgcgatgctgatcggtaaaacgctgctggaggtgatccagcgcgacagcagcaaccagcagacctgcagtaacaccaacttcaactgcaacctgctgcttggcggtcagatcgccggcgaaacccatcgtctgttccacatttatccggagggtaactttattgaagccacccgcgacacgccctatttccagattggcgaaagcaagtacggcaagccgatcatcgatcgggtgctgaccatcgatacgccgctggagcaggcgatgtgctgcgcgctcatctccattgactcgacgctgcgcagtaatctgtcggtcggcctgccgctggatacgctgctctaccgcagcgacagtctgagcagcgccgggcagcatcgcatcaccgacagcgatccctattttaaccgcatccgcaaggcgtggtccgaggggctgctgcataccttccgcaccctgccgacctggacgccagcggagcgggaagaggagtag

SEQ ID NO: 218632 - DNA, 816 bp, Klebsiella pneumoniae
atgaaactggtcatcgatcatctcactcgctatggctacgatgaagaagtgaagttttccacccagtatttgcgcctgacgccgcgcagcaccggccggcagaccatcaccgcctggacgctgaccctgccggacggtgcggcggtgaccaccaccgacggctggggcaatgtgctgcatgtgctgacgctggataacccgcacaaggagatcaccattcgcgccagcggcattgtcgatatcgccgacgaggaagaggaggtgaggggggaagaggccgaactgctgtcgccgctggtgtttctgcgcagtacgccgctaacccgcgccgatacggcgatccgtgagtttgcccagcgcctctatcgtcccgatgcggcggaggagagtctgaatcagctgatggcggatctgctgttaagaatgccatactcccccggcgcgacccgggtgcaggactccgccgccgacgccttcgcccgcgcgaagggggtgtgtcaggatcatacccatgtttttctcgcctgctgccgggcgctggagatcccggcgcgctacgtcagcggttatgtatacagcgataacgcccggcatgtggcgatgcacgcctgggcggaagtctggctcgacggccgctggcgatcgtttgatatcaccaataatacccgtcgcctgaatcagcatttgcggctggcaaccgggctggattatctcgacgcctgcccggtacggggcacccggctgggcggcggcggggaaattatgttaaccaacgctgaagtgcgcgaacacagccagcaggcgcagcagcaataa

SEQ ID NO: 218633 - DNA, 1440 bp, Klebsiella pneumoniae
atgataaaaattacgcttcctgacgggcattattatgacgagatgctgaccgcgcagggggaacagcggccgcactataatgcctggtggcaatggtttcgcaacaccgatcaattctctatccggcagaaaaaagcgcaagcggaactgctttttcaccgtatcggtatcacctttaacgtgtacggcgaggatgagggaaccgagcggctgatcccgtttgacagtgtgccgcggatcatacccgccggggagtggcagcgcattgaccgcggcattcgccagcgggtgaaagcgctgaacgccttcctctatgacatctatcatgagcagaatatcctgcgcgcggggctgatcccggccgagcaggtgctggccaacgagcagtatcagccgtgcatgcagggcatcaacctgccaaacaacacctatgcccatatcaccggcgtcgatatggtgcgcaataacgatggtcagtactacgtgctggaggataatttgcgtacgccgtccggcgtctcctacatgctcgaaaaccgtaaaatgatgatgcgcctctatccggagatgttcgagcagcatcacattgcgccggtggagcgctacccaagctacctcctgcagaccctgcgcgaaagctcgctggtggatgacccctgcgtcgtggtgatgaccccggggcgcttcaacagcgcctacttcgagcacagcttcctggcacagcagatgggcgtcgagctggtggagagcgccgacctgttcattaagaacggctcggtgtatatgcggaccaccgaggggccgcgccgggtggatgtgatttatcgccgcatcgacgacgcctggctcgacccgctggccttccgcgccgattcgatgctcggcgtgccggggctgctgtccgtctatcgcgccggcggcgtggtgctggccaacgccatcggcaccggtgtcgccgacgacaaatcgatctatccgtacgttccggagatgatccgcttttacctcggcgaacagccgatcctcagtaatatccccacctggcagtgccggaaagcagaggacctgcgctatgtgttgagtaacctcgagttgatggtggtcaaggaggtccatggcgccgggggctacggcatgctggttggcccgcgttcgaccaaagaggagcgagaggccttccgccagcgcttgctggccaatccggccaactatattgcccaggacaccctcgcgctgtcgacctgtcccaccttcgttgatgaaggtctgtcgccgcgacatatcgatttacggccctacgtgctgtccgggcaggagatgcggctggtgcccggcggcctgacccgcgtggcgctgaccgaagggtcgctggtggtcaactcgtcgcagggcggcggaaccaaggacacctgggtgatggaggatgacgcatcatgctaa

SEQ ID NO: 218634 - DNA, 915 bp, Klebsiella pneumoniae
atgaatcgacgtcaatttctgctgttcagcgccgccgcgctgtctgcggcgcggggcgcggcggccactgctccggtgctgacgctgccgctgtggccggaacaaccgccgggtggcggcgggccggggggcgaggcccggttatccgcccgcggcgcgctgagccatatcgctcgtcctgtgctgacggtctggcaacccgcccgggccactggccacggggtgctggtggcggccggcggcggataccagcggatcgagatggccagtgaggcctggccggcggcgcactggctgacggcgcacggctataccgcctatgtgctgagctaccgcttgccgggggaaggatggcgggccggggcgctggcgccgctgcaggatgcgcagcgggccctgcggctgattcgcgcccgggaatcgcaggtcagcgtgctcggtttttcggccgggggacatctgctggggatggccgcctgtcggccggcgtttgccagctatccgccggaggatgtgctggaccaccagcccgccaccgccgacggcgccgcgctgatctatccggtgatcacgctcctgccgccctggagccatacggcgactcatcgccagttggtgggaccgcaggcgagcgaagcagccgaccgcgcctggtcggtacaaacctgggtgacacaggccacgccgccctgtttcctggtgcaggcgcaggacgatccggtttccgacccgcataatacgctgttgatggccgacgcctgccgtcagcatcaggttccggtgcagctctggcgctatgccagcggcgggcatggctttggcatggggcgcccgggcacgccgacgaccgcctggcccgcggactatgccgcctggctgacggcgctggcgtccacgatggcgcaaaaaacatag

SEQ ID NO: 218635 - DNA, 852 bp, Klebsiella pneumoniae
gtgaacccagtcattagctatatcgttgatttacatccgttatcatttatgggttatcatgtattattcaccactgttatatatattctggtgaatattattattgcgaagacccgcccgactgaaaataccaccgccgttccggcgccctattctatctccccttcttttttagcctggctacgtaatagcgccaccagcgtcattcagctggccatgttccggctgttaagaaaaaactatgtcactctcatccattctgcggaaaatattcagctctgtgccaatcagcagtatgcagaatgcaaaatgacctgtgtggaaaaaatactgtttgaccatttcgcgacgccaaaatccagtcaccaggatctcccgctttctctgcatgttgctgaacggaaccactggaccaccgatccccagtgcaacgggctgcggctaagtccgacacagcaaacgtggaatatgatactggtggtcgcgccatcactggtgttaattgccgcgctcgcctggaaaacactttttgataatcaggcgatgattcactccagcgtaatgagctggctggcgatgtttatggtatccggcctgtggtggctgtggctgttatgcatcaccttaaacgccacccggctcgaccgggaggggatcgctattactatcctccaccactatattgataccctgaaagagacgcttattgctgacgccgatatcctgaccgatgaaaacgccgattattgcgtggcgattggttcaaccaccctgcttcccgaaagatttgctgaatatgtaaaagtcatcaaacttattcagtatcccttttgtctgcaacggctggattaa

SEQ ID NO: 218636 - DNA, 825 bp, Klebsiella pneumoniae
atgtggaattttctgatgcatctgcatccactgctgtttctcgccggatttatgtttatcgtcccgggtatctttattgctatcggaacgacgatcgtcctgacacggacagcagctcagccccaaccgaacgcgacggaggtcagtccatggctgctggcctggctgaccggagaagggacctgggtgatccagctggcgatgttcagcttactcagtaaaaagtatctgtggatcccggaggccgggcaggttttggccaacggacgctatgcaaacgaggaaatgaacgtcattgaaagactcctgtttgaccattttgaggagcgaaagccgtgtcatgaagatctgccctgcagcctgagtattgccagacgtaacctctggcaggaacagatagcgagcgcgagcttagccttaagtccgctgcgccgcgggtgtaatatgctggccatcggcatcccttcgatcgccctcggcgttatcgttgtcagtaagacctttatctggctcgacttcaccgcttacagcatcttcagttgtctgctcatgcccgcgggttgtgtgctgtggggcgggttatggatagaggccattagcaaaaccatacgtctcgatatttgcggcatctcacaccatgacgcccatgcctgcatcgatgcgttaagagaagcgttagcgctgaaaggcgatcagggggatgacgcgacagccatgctctgcgtggcggtaaacggcccaggatcccttcccgagcgctatcgcgactataccacgctaattgcgccgataagcgatatcacctcgctgcgcacagaggattag

SEQ ID NO: 218637 - DNA, 600 bp, Klebsiella pneumoniae
atgatgtacaacctggcgcgaccgacgtcgcgcccattacgactcctgtcagatatgcaggcaatgatggaagaaacacaagcatttgaaaaccgtgtgcttgagcgtctgaatgctggcaaaaccgtacgaagcttcctgatcgccaccgtcgagctgttaacggaagcggtcaatattctggtgcttcaggtgttccgtaaagacgactacgcggtgaaatacgccgtcgagcccttgctggagggcagcgggccgctcggcgatctctctgtacgcctgaagctgatttatggccttggggtgataagtcgtgccgagtatgaagacgctgaactgctgatggccctgcgcgaagagcttaaccacgacggcaatgagtacagcttcaccgacgacgaaattatcggtccgttcggcgagctgcactgcgtcaccgccctgccgccaacgccgcagtttgatgacagcgatgcagaactgctggcaatgcagaagctgcgttaccagcagatggtgcgctcaacaatggtgttgtccctgactgagctgatttcacgaatcagcttaaaaaaagccttccagaaatcaacgctctga

SEQ ID NO: 218638 - DNA, 777 bp, Klebsiella pneumoniae
atgtcgaaccggctttccgtggtgatgatcgccaaaaatgcagccgatctgctgccggattgtctcgactccgttagctgggcggatgaaattatcgtcctcgactccggcagtaccgacaataccgtcgagctggcccgtcgtctcggcgcccaggtctatacccataccgactggcgaggctatggcattcagcgccagcgcgcgcaggactatgccaccggcgactgggtgttgatgatcgataccgatgagcgcgtcacgcctgaactcaggcaggctattctcaaggtgctggcagcgccgcagcgcggcgctatctacagcatcgctcgccgcaactatttcctgggacgctttatgcgccacagcggctggtatcccgatcgcgtcctgcgcctgtacgaacgcgcccgttaccgctataacgataatctggtccatgaatcgctggatagccttggcgccgaggttattccgctgaccggcgatctcctgcacttgacctgccgcgactttgcgggcttccagcaaaaacagctggcgtatgccgccgcgtgggcgcttgagcgccaccgcaagggcaagaagacctcgatggcagggattttcagccatacgctgggcgcgtttctcaagacgctgctgctgcgcggtggggtgctggacggtaagcagggctggttactggcgatggtcaatgcccagtatacgtttacaaaatataccgagctgtgggcgctgaaccacggctactcggagaaagagtcatcatga

SEQ ID NO: 218639 - DNA, 810 bp, Klebsiella pneumoniae
atgcctgaattaccagaggttgaaaccagccgccgcggcatcgagccgcacctggttggcgcaaccattctgcacgccgtcgtgcgcaacggacggctgcgctggccggtttccgaagagatttatcgcctgagcgacgttccggttctcagcgtgcgtcgccgcgccaaatacctgcttctggagctgccggacggctggatcatcgtccatcttgggatgtcggggagcctgcgcatcctgagcgaagagctgcctgctgaaaaacacgatcacgttgacctggtcatgagtaatggcaaggtgctgcgctacaccgatccgcgtcgctttggcgcctggctgtggaccaaaacgctggaaggccatccggtactggcgcatcttggcccggagccgctcagcgatgaatttaacgctgactatctccagcaaaaatgcgcgaagaagaaaactgcgatcaaaccctggctgatggataacaagctggtagtgggggtcggcaatatctacgccagtgaatcgctgttctccgccgggatccatcctgaccggttggcgtcctcgctgtcgcgggacgagtgcgagcaactggtgaaggtgatcaagctggtcctgctgcgttcgatagagcagggcggcactacgctgaaggatttcctgcaaagcgatggcaagccgggctattttgcccaggagctgcaggtctatggccgcaagggcgagccatgccggatctgcggtacgccggtcgtcgggaccaaacatgcccagcgggcgactttttattgccgccagtgtcagaagtag

SEQ ID NO: 218640 - DNA, 2334 bp, Klebsiella pneumoniae
atgacgctgaaattaagatatctcattctctttttcgcgttgctgatggcttttgtagcgccggatctcgtcttcttgctgtggtccgcgccatttcgcttaatggataagctgccgctgttacctgctgcgcttaatgatccccagcgtttatatctctatggcctgtggctggggggaacgatctatttttccgccctgatgtgggtggcagttacccgacgcaataaaggctatctgattgttgctgtggcgcagctggtttttgtcatgggcattacgttattcaaggtgccgattggcgagcaaaatcagcggcgctggcagagtatgaatcagctggaaacgcccgcctggagcgattttctttataaacgacatgcccgttttattcagatagcgctacagggggggccgttggatcagcataagatcaccgagcaatttcttgcgcagaaaaaaccgctgacggcgctgccgcttggctggaatgacgaagatgccgccgccgcggatgcgctctggcagcaggcgctgggctatcgtgaacgggaagcgaaagcattacccaaaatgatggattatctggcctggatgccggatcgtggcgatctgacgctggccacggccatcctgacgctgacgagcgaggcggataaagcgcaggcggaaacggcgtttcgccgggccatcgccattgcgccggaaaacccggatgcctggctgggttgggcagtcgcgctgatccaggcccgcgatattgcgcgagtgcgaaatacgcagtttcaggcgctcacgcaaagcattacaaccggattgttgatggcggagggtctgaaggatagaccgcggcagcctgcgctacagcagcggctggcagcatacatcgcgcaaatgccggtggacgatcggcaaatcctgcacattttgcaggcgcgcatgcagacgcgctcctgcgatttgccactggataagtatgcaacggagcagggcgaagcgagcaaggtgctgcctttggcaaaatcaatcgtgtttaaaactgctcccgtgcgtagcgtcagcccgattaacgaacgctttcccggccacgtcagcattgatacggagcactatggcatcaggaaagagagtttgcaggcgatgccgtatccggcgatacataaatacatcaagtcagcgacaaccatcctctcgctggatactgacgccagcggcgagctgttaaacgtggtcgttgagtgcagcagcggcattcccgagttcgaccaggcggcgctgtactatgcgcagcagtggcgtttgggttctcaccggcagggaaaacgtgtgttgctgccggtgagctttatcagcgatcgtgtaccgccggaggagtactatgaggagatggaggcgcgggcgatgcgcatcgcccggctggccgctcgccataataaaacggcgatggaaagcgccagcaaggagatgattgcgcaatttacgcgaatgaaaacactgtttccgcaacagaaactgagcgcggaagaggcgcgtcagttacagcttatctacctcaaaaaacgggataaaacgaccaaaggcagaatagaaagctttactgaaatgacgcaggcgatggaagccctggtggatacgcacccgtactacgcgccgctactgaaagatctggccttcagaaaaagttacgcttcctttgagaagaagcgggccacatggtcgcagctgctggcgctggcgccagaggatccgcaggtgtggatggcctgggggagcgtgtgggccgatcgcgatcctgagctgtacatgggcgcgatgatcgcttccatgctgctacagccgttcaccgaggataccgagcagaaaatagagaatatcaaaacgaagctgctgatgcgggttggcatggggccacgtaaggcgattctttcggcaaaagtctacgccgactatggcgatatcctcggggaaagagcgaaaggagagaatacggcaaaggccgcggagatcttacccgccagtgaaaaactggatcgtcaggaagccgtcgcccccctggatcccgcgcagcgcatgacggttgatatcgatcgggatgaggtgttgaatgctgctctcttcaacgtggagtggaaagcgccgcagctgccggacggacagcgggtagaactgaccgttgatatcgatgacacaggcatgccgacgctggtactcgtcagcaaaagcagcgcagtggaacagtatgatgcgcaggcggtcgatatgctgtggcgctggaactttaagccgctgcctgatgcgaggcgcataaccgttggcgtgaattttctccactaa

SEQ ID NO: 218641 - DNA, 1374 bp, Klebsiella pneumoniae
atgaagcataaaaaactgccggtctgctatacggaacagcgtcgcacggtacgtctggggaaactgatcaagagcggtggcgcagggagtgtctatttcctggcggatgatccttcccgcgttgccaaactttaccatccgcacaccgataccgcttactaccagcgtaagctcagcgccatgctggcgcagcggcccgagatccccgctcccgcggaagatgcgtcgattgtccagctggcgtggcctgactatttgctctacgacgagcgcaagcgcgttgtgggttttgtcatgccggttctggacacccagcgcaccattgagctggagtatattttacaggcacggcaggcgaaggcgcaccatctaccggaaggcatcggcgcgaaagtgagcctggcttgcaaccttgctaccctggtctctacgctgcatgcgcgacagcaccgggttatcgacatgaaaccggtcaacctgcggttctatcgcgacagcctttatatcgcgctgctggactgtgatggctttagcattcagggcgagggagagcgtttccctgccgggcagttcacgccggattatctggcgccggagtttcagcgtattgggcaggtacccggtgagcaggaagaagcgcaggatcgtttctcgctggcggtgattattttccaactcctcaaccatggtattcatccctacagtggtcgctcgctagcggcgaaggtacctgatgatttgccgggtcgtatcgctgctggctgttatgcctacgggataaacgcagcgacgactatctcgccggtgccggccagtacacaccatttgttgccggttgagctgcgtaagctgttcgatcgcgcatttagcggttcgcccgcccgacgtccttccgccgatgaatgggcgcaggagctgcgtccttatgcgctacgcagcacgcaaaaaattattctttgtcatcaaaaacaccagcatttcgccgggatgccgtgtctggtctgcgcgcgaaaaaaacaggttgttgcgggaataaaacaggcaaaacagcgtaaacaagcggaaaccaatcgcccgcgggtcgcgcctgtagtgcggcaggctcgtagggcgccagccgctgccgtacctcgtcagcctaccgggccggggccgttaaccctgctgtggcgcagtattcgcagcagcgttccttcgtttgcctggcatggcgcgctggcgctgatgagtacgctgattatgggggggctggcgcgcagttttgcccggctcaacgacgctggtccagcatggtttgatattgcggcgttactgattatttttatctgggtggcagcgctgatattccggtccattattcggagtaagccataa

SEQ ID NO: 218642 - DNA, 564 bp, Klebsiella pneumoniae
atggtcgcgcatgatctggctaatcgactggcgacgttcaccactgcaccggatgaaaagcagctggtggcgctggtcgggagcgtgcgtgagactgttctgttacaggcgcaggcacaggatatttccccgggcgattttgcctgtaccgttctggccgcgtggctgggcgagactgcctctgtgatagtgcatattggcgatggcgctgcggcgttaagcctgggtgccgaacagcacttatccctgcccgaaaacggcgaatacgctaaccagacctggttcctgaccagcgacgactggcgggagcatttacatatcagcccgttttctggcagagccacgcggctggtgatgatgactgacggcgtgcagccgtttgcgctcaaccggcgtggggatgcgctgttctctccgtttatcgatccagttttgcgttatatacaacagtcttcagaggcagagggaagcgaagcgctgtgcgccacgctggatgacccgcgcacctgggcgataaccggtgatgacaagacacttctggtagccctgcgtcatgaagcataa

SEQ ID NO: 218643 - DNA, 678 bp, Klebsiella pneumoniae
atggcctcttttattccagatgtttcatttattgataatagcgaacagcgcacaccattaattttagtcctcgattgctcaggcagcatgcagggccagccaatggcccagctgaatcaggggctaaagctgctggaagaggaacttaagcaggatgtgatcgccgcgaagcgcgttcggctgctggtggtcaaatatggcggctatgatgaatgcgagctgtacggcgactggtgtgatgcgatggacttcaccgctccggtgcttgaggccaatggcctgacgcccaccgggcaggctgttagcctggcgctggacgaaattgaagctgaaaagcagcgcctgaaagcggctggcgtcccctatacccggccgtggctgtttttaatgtcggatggcgaacctacggacaactggcaggcggctgcacaggcgtgccgtgatgcgcaggcggcgaacaaagtcgctgtgtttccgattagcgtaggactcgaagcaacagagtcgatggggcagttcagccgtagcggtattaacggtgtgaagcagttgaagggattacagttccgcgagctattcctctggctcagcgccagtatgcaggtggtgtcgcagtcgacaccaggcggtaaagcgcagctgccgccgacggatagctggtcagaaatttcggtctga

SEQ ID NO: 218644 - DNA, 1218 bp, Klebsiella pneumoniae
atgatgactctggcgggtaaaaaaatcgtcctgggcgtcagcggcggcatcgcggcgtataaaaccccggaactggtgcgccgactgcgtgaacgcggcgcggaggtgcgtgtcgcgatgacagaggcggcaaaagcgttcattaccccactcagcctgcaggcggtatccggctatccggtttccgacagcctgctcgatccagcggcggaagcggcaatggggcatattgagctcgggaaatgggccgacctggtgatccttgctccggcgaccgccgatttaatcgctcgcgtggcggctggcatggccaacgatctggtgtcgacgatctgtctcgccacgccttctccggttgccgtggtgcccgccatgaaccagcagatgtatcgcgcgcaggccacccagcataatctgcagacgctcgcttcccgcgggctgctgctgtggggaccggacagcggtagtcaggcctgcggtgacgtcggcccgggaagaatgctcgatccgttaactatcgtagacatggccgcgcaacatttcgcctcccctgtcaaagatttgcaacatctcaacctcatgattaccgcgggcccgacccgtgagccgttggatccggtgcgttatatcagcaaccacagctctggcaagatgggcttcgcgattgccgcggccgccgcccagcgcggcgcgaacgtgaccctgatcagcggcccggtatcgctaccaacaccgccgtttgtgcagcgcattgatgtcactaccgcgctggagatggaagcggccgtccaggctggcgctcagcagcagcacatttttattggctgcgccgcggtggcggattaccgcgcggctgtcatcgccgaagataaaataaaaaaacaaggtgatgaattaacaataaaaatggttaaaaacccggatatcgtggccggggtcgcggcgctaaaatcgcatcgcccctatgtcgttgggtttgccgccgaaacgaataatgtggaagaatatgcgcggcaaaaacgtgcccgcaaaaacctcgacctgatttgtgccaacgatgtttcccagcctaatcagggatttaatagcgatagcaacgcattacaccttttctggcaggatggagaaaagcgcttaccacttgagcgcaaggaactcctgggccaattattactcgacgagatcgtgacccgttatgatgaaaaaaatcgacgttaa

SEQ ID NO: 218645 - DNA, 1701 bp, Klebsiella pneumoniae
atggacgctatctttgacagagttattaaggagttttttcctaataaaaatatcccatgttggaagaaatgggttttcgagaccgcgtttggcaataggatattttctcgcttagtaaataatgataaagtcttcaataagcatgggattgattgggtcaattctgttgttgagcttcttgaagtacaatgtgaaacgaaagacgaagattttaataatatacctcggcatggtgctacggttgttatctcaaatcatccgacagttatcgatggccttaccttaatacatacggtctctcgggtcagaaaagatataaagattattgctaaccatattttgccaattatatttccagaggtgtctggactaaccattggtattgaaaatatggctggtaaaatgagtcacaaaaaatttagagagatgaatgaccatctgaaaaatggtggggtactgattatttgtcctgcgggtaaactggcaaactggtctctttctggtttacaggaacataaatggaatcctggttttttacagctggctatcagaaataatgcggcgttgatacctgtgcatattacaggaagaaatagtaaaagatattatttaactgcaacggtgtggcggcaattatcaaatattatggttattcgtgaagctttacgccatcgtggaaaagtgatgaatatcaaaataggggagcaaatatcttcaacttcctttaagcacgataataaagatctttctctggcagcaagtacatgcaggatgcatctccagagtataggaaaaaatgggccgacactggtagatacaatttctgcgcaggaatctctggcaagcaggaaagcactaatcagtgaaattgatgcgtgtgaagtattaaagcagtttaatgacggtaaaaaactattgatatatcgctataacactagcggaatctcacccataattgatgaattagggcgtttgcgcgagcgttgttatcgtgatattggtgcaggatcgggcacagataaagacaacgatatttttgatgagacttattaccatatcattttatgggatccttcggaggaagaaattctcggggcctatcgtctcattcctgtcggtgagcaaatggcccgctatggaataacgggattatacagtagtagcttatttaaatatcatgagggcgcgtattcctgcttagagaaatgtgtggaaataggccgcggctttatccaaaagccctatcaaaaaagcaatgcgcttgattatttatggcgaggaatattcgattttataaaaagatatccagactataagtatttattaggtgtattgactattcccggttcttttcctgaggatgtgcaaaaactcatcgtggccttttataatatgtactttgccacctcaatcgatttctgtacgcctatagaattattcagtgcagaagataaacagaacgatagtcctttttgcggaaaagactttagacatgactggggggtgcttaatcattttttgagaaaaaaaggttatgaactcccctggccttttaagcagagcgccaaatggttttctccgggtggttcgacgattatgtcattcacaaaagataactcttttaattcgatagcagggttaaacctgagtgctattgataaactgaatgaaatatactttaagcattatttaaaagattaa

SEQ ID NO: 218646 - DNA, 753 bp, Klebsiella pneumoniae
atggacttcaatgcgcttcatcagcaaaaccaacctttgttgcttgccaacgtctgggatgccagcagcgcccaggccgctcagcaggctggctatcgggctctgggaacctccagcgccgctatcgccgcgatgctggggtataaagatggcgaagagatgcatgttgacgagctgttatatgttgtctcacgtatcaaagccgttagcgaacggccgttaagcgtcgatttagaagcgggctacagtaccacaacgagccagataattgacaacattcagcgcctggcgcgtctcggcgtgagtggaataaaccttgaggatagtcatgtggcgaataatacgcgccgtcttgacgatgcgcagagctttgctgtcaaactgagggaaattacccgcgcctgtcccggcatgtttgttaatgtccgcaccgatacctttcttctcaacgtacaagatgcgctggttcagacgctctatcgcggtcaactttatgcggaccacggtgcatgtggtttttttgtgcctggcgtcacctatgcgaaagatattaccgccattgtccgccatgtggctttacccttaaacgtgatgtgtatgccagaactggcagacttcagcagcttatctgccctgggcgtaaaacgtatttcgatgggcaattttattcatgccgccacgcaggccagactgaaagacctattatgtcaggtgcaaacccatcactctttctcgggtatttttttaccatga

SEQ ID NO: 218647 - DNA, 699 bp, Klebsiella pneumoniae
atgtcgatacctgcagccagcctctctaccgaccaggcgttaccgtcattttattacggaagacagacaaagccgctattcgcggtggagtccttggtatctgcgttccggcccgccagctcaccctttgcgctgccgcgatcgacctattatcgttttccgccgacccaggctgaatccggattaattctgctcgaagagggaattgcctcgctatgccatgcggaaaacaacatggtgatatcaacgatattttccccttcgctattgggattaatcgatggttacggcgtctttaacggtattccggaaaaacaccactgctctctgtttgctgagacagatttgcgcggacactggatagggcatcaggccgcggtcgagatcctcaatgagaagaacctgtggcaggatatggcccatgttctggcgcagcggctgatggtgttgagcatgcgttcgcaggagatgatgggggtggattcttatctgatggtgcgaaccctgctaacagagctggcggactacccggaggcatatcgtcgccaaatcaacgtcctgagctttattcagcgccgtaccaacttgtcgcgtagccgcattatgtcgattctgtcggagctgcgcaaaggcgactatattacgatccatcgcggcgtactgaggagcatcgcccacccacttcccgcccacttttaa

SEQ ID NO: 218648 - DNA, 495 bp, Klebsiella pneumoniae
gtgacagcgagggaacgattttttaagaaactgcagcaacagcaaaatccgcagcggacactgcccctcgacgggtcggccgctgcggacatcaacgcctttcgccagcagatggcggcgctggcgcagcagatcagccagtggtttgacggctcaggtatcgatgtggaggtttcgacccgatacctccacgatctgagcaccctcggctatagcctcaacagcggcatctgccggtacgatatcccggctatccgcctgcaaaacggcgagcgcagcgtcaatattgtgccgcagcagctgtggaacggcgttgaaaaaggggtcgtgagccttagtcttgatactcacggcggtacggcgacccgccaggtttattatctgagcctggcgccggacgatggctggatgatccgcaaagcgcaccagccaccggaggcgcgtcttaatctcaccgaggatcgcttttttatggcggtcgacagcctggcctga

SEQ ID NO: 218649 - DNA, 1176 bp, Klebsiella pneumoniae
atgcctgattttactgcttcaccgctggtggacgccctggaagagaatttattcagtgttctggaaaaactggccgccgaggtcaacaccgagacactgccgctgatcgatctctccagcggtagcccggatcagcctaccccgcccgaagtgattgatgcattgcaaagcgctatccagcgtcgtgaaaaccatggctatccgtcgttctggggcaagccgcaggtccgcgaggcgatcgcccagttctatcgccggcagtatgatgtggaactcgatccacatagcgaagtcgccgtgtttcagggttcccatatcggcattggcggcatcccgcgggcgctgctcagccccgggcaatacctcatctccaccgatccgtgctatccgatttaccgctcggcggcgctgcagtctcaggcggcgttttttggcctgccgctgagggcggagaatcagttcctgccggattttgacgaccttcctcaggaagtggcggacaaagcaggccttgtggtgctcaactacccgcataacccgaccggcgccctcgccacgccggcgctgttcgccagcgccctgcagtttgcccgtcgtcaccatgtgccgatcctgcacgatttcgcctatgcggccatcggcagcacggctggcgacgcgccgctaagcctcttctcccagcccgacgcgaaagcgtggggagtggaaacttataccttttccaagacctttaacatggccggctggcgcttcggcttcgcggtcggcaacgcctcgattatccgcgcgttcaaaaagctgcatacccatagctacagcacggtgtttggcgcaatccaggatgcggcgatcgccgcgctgaacctgccggcggagcgcattgcgcagctgacggcggtctatcatcagcgccggacgtgggttttgcgtcgactggccgcgctgcgctggccggctcgtgccgcccaaggcacgttctttctatggctgggcgtgccgccaggatacagctcacagcagtttgcccagctgctgttgcaggacgcgcatattctggtggcgccgggcagcggttttggcgaaggaggagaagggtttattcgcattagcctgaccgcaggggacgacgcgctgagcaacgcgctggaccgtcttgcccggctggcgctgttttag

SEQ ID NO: 218650 - DNA, 1026 bp, Klebsiella pneumoniae
atgaataacgcgatgattgaatttcgccacgtcagtaaatccttttccaggaaagggcatccggtactggccttacaggatattaatctcagcattgagcggggcgatattttcggcattattggttacagcggcgcaggaaaaagcaccttattgcggctgattaatcgtctggaaacgccgggcgagggcgacgtgctgctgaacggcgagtcgttacaggcctgcaacggccagcgtctgcaggcgatcaaaaaagatatcggcatgatctttcagaattttaatctgctgaattcgaaaaccgttttccataacatcgccatcccgcttattttgcaggggcgtgacaaggcctatattcaggcgcgggtggcggagctgctggcgtttgtcgatctgagcgacaaaatgcacagctaccccaatgagctgtcaggagggcaaaagcagcgtgtcggtattgcccgggcgctggccactaacccgtcggtgctgctgtgcgatgaagctacctcggcgctcgatccccacaccacggtgcagatcttacttctgctgcaggagataaatcgccgctatggcatcaccatcgtactgatcacccatgaaatgtcggtgatccagaaaatctgtcacaaggtggcggtgatgcaggcgggccgtatcgttgaacagggaacggttttcgacctctttgcccagccgcagcacccggtcaccgccagttttgttcagtcggtggtgcacgaccgcctgccgcaacgggtggcgtcgctcctgcagcgcgataacggcgcccgggctttacgcctcgaatttatcggcgcgacggcgcagcagccgatcattaatcacctgatccgcgaatatgcggtcgaggtcaatatcctgttcgccagtatgtccgaagttcagggccggattctgggatttatgattgtgcaactcctcggcgagcctgacgaaaccgaacgcgccatcacccatcttgctgatgcaggagtgaaaatcatccatgtttga

SEQ ID NO: 218651 - DNA, 186 bp, Klebsiella pneumoniae
atgaagaagctgttactggccatggtggcgtcgatgctgctcgccggctgtacgccgcgcatcgaaatcgcggcatcgaaagagcccatcaccatcaatatgaatgtcaaaattgagcatgagatccatatcaaggtcgataaggatgtggaaaatctgctgaaatcccgcagcgatctgttctga

SEQ ID NO: 218652 - DNA, 891 bp, Klebsiella pneumoniae
atgacagcatttcctaaggttgcacttattggtcccggcgccatcggcacgacgatcgccgccgccctgtttgaggtggggagggcgccgatggtctgcgggcgtaccgcccattcggcgctggtgctgcgcactgacgagggcgagatcgtggtgcccggcccggtgcataccgacccgacggcgatagccgcccccttcgacctggtgtttgtcgcggtgaaaaccacccagacggaggccatcgccccctggctgacggccctgtgttccgcagacaccgtggtgtgcgtgctgcaaaacggcgttgagcagcgccagcagtttgcccccctgaccggcggcgcgacggtgctgccctcggtggtctggtttccggcgcagcgcgatgccgatgcctctgtctggctgcgcgccacgccgcgactgaccctcccggatctgccgggggcagagcgagtgcagcaggcgctggcggggacccgctgcgcggtggagctggcggcggactttatcaccgtggcctggcgcaaactgttgcagaacgccgtcgccggactgatggtgctgaccggacgccgcgccgggatgttcgcccgggaggagatcactgccctcggactggcttatctgcacgaatgtctgctggtagcgcgggcggaaggggccgccctgggcgacagcgtgccgcaggagattatcgccggctttcaccgggcgcctgccgacttaagcacctctattctgatcgatcgcctcaatggccggccgctggagtgggatattcgtaacggcgtggtgcagcgtcgcgggcgtcagcacggcattccgacaccgctcagcgatatcatcgtgccgctgctggcggcggccagcgacggcccgggctga

SEQ ID NO: 218653 - DNA, 732 bp, Klebsiella pneumoniae
atgcgcgataccgatgaagagcagatccgcatcgacctggcggccacctttcgcattattgcccatctcggcatgcatgaggcggtggccaaccatttcagcgccgcgctctccgccgacgggaaaacgtttttactcaacccgaagtggaaacacttttcgcgcatccgcgccagcgatctgctggtgctgaacgccgatgatgaaggttgcgccgcgcgccctgacgtcgatgccaccgcgtgggctattcacgggcagatccatcagcggctcccggacgtgcgggtggtgctgcatctgcacccggtgtacaccaccagcctcgcctgcctggcgacgccgcagatcctgcccatcgaccagaacaccgcccgctattttaaccgggtcgccgtcgatacgctgtacggcgggatggcggacaccgcggcagaaggcgccaggctggcgggcctgctggcggataaacgccgtctgctgatggggaatcacggggtgctggtgactgccccgaccatcggcgaggcgttcgatgatatctggaccctggagcgcgcctgtcagatcctgatcaccgcctggtccaccggccagccgctgaaggtgctgtcagacgcggtggcggaaaaaaccgcccaggactgggagaagattgccgatttctcgcggcagcattttgccgaaatgaagcagttgatgatcgacctcgatccctccctggtggactaa

SEQ ID NO: 218654 - DNA, 831 bp, Klebsiella pneumoniae
atgacacgctttttcgcaccacgcccgctggccctgctgctctgcgcagccggcgcgctgacatcttttagcgcgctggcttttcagcaaaacggcaaaatcaccgccggttcggacatgacctttttcccctacgagtacatggagaacaataagccggccgggtttgacatcgagctgctcgatggtctggcgaagactatgggccgtgaagcagtgaatatcgatacccgtttccccaacctgatccccgggctgcagggcgggcgcttcgatatcaccaactcgtcgatgtacattaccgccgaacgcctgaaggtgatcgatatggtgccgtacctgaaaagtggggaagcgatcctcgcccgcaaaggcgacaactaccagcctaagaccccggaagcgttctgcggccataaaatcggctcgatgggcgccacctcctggctggctcaactgcaaaagctctccaccgactactgcgtgaagaaggggctgcagccgattgcgctgagcgtttataccaccgacccgcagaccacccaggcgctgctgtcgcgcgccgtcgatgcgcagatcaccgacgccgccgtggcgcgcggggtggtggaaaagctgggtgaccgggtggtgatctcctctgacaccctgatctacccggtgctgaacggctttggcgtcaaaaagggcaacactgaggtgaaaaccgccctcgaagaggggctgaaaaaatacagcgcgacgccggaatatgccgccctgctgaagaaatatcacttccaggcgccgacggcggacgatctgcagaccctgatgccgaaagcggagtaa

SEQ ID NO: 218655 - DNA, 873 bp, Klebsiella pneumoniae
atgattgcgcagtggcaaattgatcagtttcatcagcagggttttctggtggtcgaaggggtgctttccgcgacggagatcgccgccctgcagagcgatttcgacggctgggtggaggagagccgcggtcacgcgacggtgtggggagaaaccctcgacgggcggccgcgcttcgatatcgagcgcgaccatgcgcctgaccatccgtcgctgcgccgggtcgcctccccgacggagatctccgaggcctatcgctacaccgcgctgaattcgcggatggcgaccatcgccgcgcagctgatcggcggcagcggtacccgttttcatcacagcaaaattaactccaagctgccgcacaccgccaccgaggtgaaatggcatcaggatttcctcttcaccccgcacagcaatgacgacattatcaccgccctgctgatggtcagcgaggtgacgccagagaatggcccgctcaacgtggtgccgggcagccatcaggggccgctgtggtcccactggcaggagggacgctttaccggcgcggtggatgacgacgtggtgaccgcccactgccagcagccgcaggcctgttttggcccggcgggctccgtctgctttatgcatacccgcctgctgcacgcctccagccccaacgagaccgccctgccgcgcaccctgttcatcagcgtctacgctgcggaggatgcgctaccctacggcgaaaacccgctgccgagccgccatgccggccagctggtcgccggagaagagagcggcctggtgcgcagcaccggcaatcagcttcgtctgccgcaaaagccgcgcggcgcttcatttttcgttcagcaggccggtgccgatcgcgccagcatgtaa

SEQ ID NO: 218656 - DNA, 1521 bp, Klebsiella pneumoniae
atgacgtttaactggaactacatgttaagcctgctcagcgatgccgatttttggtgggccacctggaccgtcattaaattaagtctgctgacctggggctgcagtattgtgctcggatttattctggcgctggccaaacagtcgccgcgcggctggttatccacccctgcccggctgtatatttggttatttcgcagtatgccgctgctggtcctgctgatttttgtctacaacatgccgcaggcgctgccctccttcgccccggtgctcaacgatcccttctgggccggcctgctggcgatggttctcagcgaagcggcctatatcgccgagatccaccgcggcgggttgctctccatccctcgcgggcagagcgaagccgcgcgggccctgggtttacgctacgccgggatccagtggcgagtgatcatccctcaggcgctgcgcgtcgccctgccggcgctggccaatgaatatatcgccatcgtgaagctcagttcgctggtgtcggtgatctccctgaccgaaatattgatggtcggccagcagctctactcgcagaactttctggtcatggagaccatgacggcagtggcgctgtattacatctttatcgtcacggtgttcgattttctgctgaaacggctggagaactaccttgacgtgacccagcgcaacaccgcccgtccggtggatgccgagatgcagcggctggccagcgcccgccgcccggcgatggcgcgcagcgttaccccgagtcatgaaccggcgctgcaggcctctaagctgcataaggcctacaacaacgtcgaagtgctgggggcggtaagcctgcagatccagcccggcgaggtggtctcggtcatcggcccgtcgggctcggggaaaaccaccctcattcgcctgctgaatggtcttgagcagatcgacaacggtgaaattcagatcaacggccaaccctttattcacctcgaccgccagggacagcagaagccgcgctttatggagaatgccgaacatcgcctgaacatcggcatggtgttccagagcttcaacctgttcccgcacctgacggtgttcggcaatctgctgctggccccgcgctatcaccgcctggcaagtgacgcggagctgcgccagcacgcctgcgaactgctgcacaaagtgggcatgctggagcacgcctggaagtatccgcaccagctctccggcggtcagcagcagcgggtggcgatcgcccgcgccctgatgatgcgtccgcagatcatgctgttcgatgagcccacctcggcgctggatccggaaaaggtgaatgaagtgctgcaggttatcgaatccctggcccacgaaggcatcaccatggtcatcgtcacccacgagatgaacttcgccttcaaagtatccgaccggatcgtgtttatggagaaaggccgggtggtgtgcgatgacacgccgcaggcgatgcgcagcgggcaacacccgcgcgtcgaggcctttctcaaagatgtttctctggcttaa

SEQ ID NO: 218657 - DNA, 150 bp, Klebsiella pneumoniae
atgcagacgcagagcgataaaaaatattgttgccccctggcgggcaatgcgccgctcttttccgcgggtggcacgcggattgcttgcgacgtagaggaaaactattccgcctgtgcgccggaccatattttatcaatggtgatgctatga

SEQ ID NO: 218658 - DNA, 915 bp, Klebsiella pneumoniae
atgaaccgatttaccctgaagcagctcaaatatttcgtcaccgtggtggagacggagagtatcgccgaggcctcccgccagctgcacattgcgcagccgtcgatttcgattgccatcaagaatctggagagcaccttcgaccagcagctgtttattcgccaccatgcgcagggcgtttcgctcacctccagcggccggcggatctacgataaagcgaaagagttgctgcgcctgtcctgggagttcgaacagaattcgcgagcggataaagagctggtttccggcatgatctccatcggttgctttgaatcggtggccccgctgtatatgccgaagctggtggccgggtttagaaaatgctacccggacatcaccctgcagttgtacgacggcgaacagcatgagctgatgcatggcctgcaccgcggccgcttcgacctggcgctggtttacgatctggagcttggtcattcgatcaataaagagcggctcaatgccccgcataaaccctacgcgctgctgcccgccgcgcatccgctggcgcaaaaggcgcaggtgacgctgcaggagctgagccgcgaaccgatgatcctcctcgatgcggtcccgagtaaaaattattttatctccatctttaaggaaaagggttatcacccggaagtggcttacagctccccctccattgaaatggtgcgctgtatggtgggccaggggctgggtttttcggtgctggtcacccggccctgctgcgatatgacctatgatggcgaaagggtggtgcagcgggatattgccgatgagatgcccgcctcgaccttaattatggcgcatctcgcaaataatgaacccacgcggccgacgcaactgtttatggattattgtcgcagtattgaattaaccccaactcacgcctga

SEQ ID NO: 218659 - DNA, 1260 bp, Klebsiella pneumoniae
atgactgaacagattaccgagatcgataccctggtggtgggcgcggggcaggcgggcgtcgccatgagcgagcatctgacccggctggatatcccccacctggtgctggaaaagcagggtattgcccaggcctggcgcagcggacgctgggattcgctggtcgccaacggtccggcctggcacgatcggttcccgggcatggtgttcccggactgcccggcagacagctttgtcggcaaagagcaggtggcagactattttgccgcctatgcccgcagcttcaatgcgccgatccgtaccggggtggaggtcttcagcgccgaacgcctcgtcggacggccgggctttcgtgtcgacacctcgcagggggtgattgaagcgcagcgcatcgtggcggccaccgggccgtttcagcggccagcgatcccggccatcgccccgcagagtccggctattcaccagctccactccgcgcactattttaacccgcagcagctaccggagggcggtgtgctggtgattggcgcaggttcctccggcgtgcagattgccgatgagctacagcgagccggacgcgcggtgtggctgtcggtgggagcgcacgaccgcccgccgcgtcgctatcgtcagcgcgatttttgctggtggctcggggtgctgggaatgtgggatgccgcggccaatgcgccgggtaaagagcatgtcactatcgcggtgagcggcgcgcgcggcggccataccgtcgattttcgccagctggcgcatcagggggtcacgttagtggggcagacccgtggctttgacggtgacaaagcactgtttcaccacgacctggcggagaatatccgccgcggcgatgcctcctaccttgcgctgctcgacgccgcggacgcgtgggtggcccgcaacggtatggacctgcccgaagagccctccgcccgcgaatttctgcccgatccggcctgcgttaccgacccgctgctcagtctcaatctggcggaggccgggatcggcaccatcatctgggcgacgggctacaccaccgactatcgctggctgaaggtcaacgccttcgatgacgcacagcggccacagcatcaccgcggcgtatcgacggagccgggcgtctatttcctcggcctgccttggctctcgcggcgcgggtccacctttatctggggcgtctggcacgatgccaaatatattgccgaccagatcgccattcagcgccagtaccagcgttaccagccgtcctgttaa

SEQ ID NO: 218660 - DNA, 435 bp, Klebsiella pneumoniae
atgccaactcatacccgtattcgcatgtttaacaccaaagagacctacccgaaccaggcgctgaacaacgatctgtgccaggcggtgcgggccggcaataccgtctacgttcgcggccaggttggcaccgatttcgccggcaatctgattggccttggcgacccgcgggcgcaggcggagcaggcgatgaagaatgtcgcgcagttgctgaaagaggccggcagcgacctctcgcatatcgtcaagaccaccacttatctgatcgatccccgctatcgcgagccggtctatcaggaggtgggcaaatggttgaaaggcgtctttcccatctccaccggggtggtggtgtcggccctcgcgcagccgcagtggctgatggagattgacgtcacggcggtgatccctgacgactggcagggggaggcggcggaatga

SEQ ID NO: 218661 - DNA, 675 bp, Klebsiella pneumoniae
atgactctctctattagcgcccgctgcccggaatcaggtcagctgggcattgccattagttcgtcaagcatggccgtgggatcgcgctgtccgtggctattgcctggcgttggcgcggtcgccagtcagaacatcacgttaccgtcgctggggccgcagatcctcagcgcgctcgaggcgggggccagcgttgggcaggccctgaagcaggctctggcggaggaccgcttccgcgaatatcgccaggtcgcggcgattgacgccaacggtgaagtggcggcgttcagcggggaacatactctcgggatcggtggcacccttgcgggagataactgcgtggcggcgggcaacatgctggccagtcacgaggtgatcgccgcgatggtggccgccttcgaggcggccaccggtgaactggccagccggctgctggccgggctgcgcgcagggattgccgccgggggcgaggccggcccggtccactcggcggcggtgaaggtggtggacgattacccgtggccggtggtcgatctgcgcattgactgggcggagacggatccgctggcggcccttgagcaactgtggctggcctgggagccgcaaatggacgcctatattacccgggcgctcgacccgcgcgaggcgcccgcctatggcgtccccggcgatgaataa

SEQ ID NO: 218662 - DNA, 1173 bp, Klebsiella pneumoniae
atggcgtccccggcgatgaataacatcctcgccgcgctgctggcctttgataccaccagccgccattcgaacctggcgatgatcgactggatcgccgattttctcgctgaccgcggcgtggcgtcgcgtcgtttttatgacccgtcgggcggcaaggccaatctctacgcccggctggggccgtccggtggcggtggggtaatgctctcgggccacaccgacgtggtcccggtggacggccaggcctggagcgtgccgccgttcagcctgaccgagcgcgatggccgctactatggccgcggcagcgctgatatgaaggggtttctcgcctgcgtgctggcggcagtggatgactttctggcggcgccgctgcgcatgccactgcatctggccttctcttatgacgaagaggtcggctgtctcggcgtgcgcagcctggtggattttctgcaggcctcaccggagaaaccggcgctgtgcctcatcggcgagccgacggagatgcagccggtgttcggacataaaggcaaactggccatgcgctgctgcatcgaggggcaggcctgccattcggcctatgccccgcagggggtgaacgctatccgctacgcggcgaggctgatcaaccatctggatcggctgggcgcgcgtctggcccggcagcaggacagccgcttttcgccgcccttcagcacgctgcaggtgggcaccattcagggtggggcggcgctgaacattgttccgcagtcctgccgctttgattttgagatccgctacctgccggggatgcgtcccgaagcggtcaccgaggcgctggcggcctacgcccgtcgccagctgctgcctgagatgcgccgggtcggcagcgggagcgacatccagttccagctgttaagccactatccgccgctgctcagcgatccgctgtccgacttcgcccgctggctgtcacagtggtgcggcagcgatcgcttctccaccgtggcgttcggcaccgaaggggggctgttcgatgagatgggcgtcgcgaccctggtctgcggaccgggcagcatggcccagggccataaggccgatgagtacatcagcatcgcgcagaccgagcgctgtatgaggatgctgagacagctttgcgcgtggatgcgtgccgaaccggcggaaccgctcacctga

SEQ ID NO: 218663 - DNA, 819 bp, Klebsiella pneumoniae
atgcacaatcaacactctccccacatcgatcaagcgaccatcgaccgctggcaggcggatggcgcggtgttattaaaaggcgtctttaccccctgggtcgatcgcctcgccgagggggtcacggcgctgatggccagccccagcgagtatggtcatgcgcgcacggtgatccccaaagatggttcgccgcctttttttcaggactactgcaactggtcgcggatcccggcgtttagcgagtttgtctttcagtcagcggccgccgagatcgcggcggcgctgatgcagtcgcagacggcgaaatttttccatgaacatacgctggtcaaaccggccggaggcagcacggtgactccctggcatcatgaccagccttactattgcgtctccggcaggcagaacgtcagcttctggatcccgctggacccggtggcggaggccacttcgctgcgctgcattcgcgggtcgcatcgctgggaggaggagttcagtcctacccgtttcaatggcactaagctttacgagcacacccggttcagcgcgctgccggatatcgacgcccatgaggacgaatacgatatcgtcagctgggcgctggagccgggggatgcggtggccttccatttccgcaccgtccatggcgcccgcggcaaccccggcgcgcgggcgcgacgggtcttctccgcccgctgggtgggggatgacgccgcgtttgccgatcgcggtggcgtgacatcgccaccgttccccgagctgaccctgcgggacggcgacccgctggattccccgctgttcccccaggtttggccgcgggcgtga

SEQ ID NO: 218664 - DNA, 2268 bp, Klebsiella pneumoniae
atggcaaacggcttaatgttttcccctcgtaaaaccgcgctggcgctggctgtcgcggtgatttgcgcctggcaatcaccggtcttcgctcacggtagcgaagcccacatggtgccgctggataaaacgctgcaggaattcggcgccgatgtgcagtgggatgactacgcgcaaatgtttaccctgataaaagacggcgcttacgtcaaagtcaagcccggcgccaaaacggcgatcgtcaacggcaaatcccttgatctaccggtgccggtggtaatgaaggaaggtaaagcctgggtctccgatacctttatcaacgatgtgttccagtccggtctcgatcagaccttccaggtggaaaagcgccctcacccgctaaactcgctctcggcggcggaaatcggtgaagcggtgaccattgttaaagctgcgccggagttccagccgaatacccgctttacggagatttccttacacgagccggacaaggcggcggtatgggcctttgccctgcagggaacgcccgttgatgccccgcgcaccgccgatgtggtgatgctcgatggcaaacacgtgattgaagccgtcgtcgatctgcaaaacaaaaaaatcctctcctggacgccagttaaaggcgcccacgggatggtgctgctcgatgattttgtcagcgtgcagaacattatcaatgccagcagcgaattcgctgaggtgctgaaaaagcacggtatcaccgatcctggcaaagtggtcaccaccccgctcaccgttggctactttgatggcaaagatggcctgcagcaggatgcgcgtctgctgaaggtcgtcagttatctggataccggcgacggcaactactgggcgcacccgattgaaaacctggtggcggtggtcgaccttgaagcgaagaaaattatcaaaattgaagaaggcccggtgatcccggtgccaatggaaccgcgcccttatgatggccgagaccgcaacgccccggcggtgaaaccgctggatattaccgaaccggaaggcaaaaactatacgattaccggcgataccatccactggcggaactgggatttccatctgcgccttaactcgcgcgtcgggcccattctctcgacggtgacttacaacgataacggcacaaaacgccaggtgatgtatgaaggttccctcggcgggatgatcgtgccctacggcgacccggacgtcggctggtatttcaaagcctacctcgactccggcgattacggcatgggcaccctgacctcgccgattgtccgcggcaaagatgcgccatcgaatgcggtactgctggatgaaaccatcgccgattacaccggcaaaccgaccacgattccaggcgcggtcgccctattcgaacgctatgccgggccggaatataagcatctggaaatgggcaaacctaacgtcagtaccgagcgccgggagctggtggtgcgctggatcagtaccgtcgggaactatgattatatctttgactgggtgttccacgacaacggcaccatcggcatcgacgccggcgccaccgggattgaagcggtaaaaggcgtgctggcgaagaccatgcatgaccccagcgccaaagaggatacccgctacgggacgctgatcgaccataatattgtcggcaccacccaccagcatatttataatttccgcctcgacctcgacgtggacggcgaaaacaacaccctggtggcgatggacccggaagtgaagcccaacaccgccggcggcccgcgcaccagtaccatgcaggtgaatcagtacaccattgacagcgagcagaaagcggcgcagaaattcgacccgggcaccattcgcctgctgagcaacaccagcaaagagaaccgcatgggtaacccggtctcttatcagattatcccttatgccggcggcacgcacccggcggcgaccggcgcgaagttcgccccggacgagtggatctatcatcgtctgagctttatggataaacagctatgggtgacgcgctaccacccgacagagcgttatccggaggggaaatacccgaaccgctccgcccaggatactggcttaggccagtacgcgaaggatgatgagtcgctgaccaaccacgacgacgtcgtgtggatcaccaccggcaccacccacgtggcgcgcgccgaagagtggccaatcatgccgaccgagtgggcgcacgccctgctcaagccgtggaacttctttgacgaaaccccaacgcttggcgagaagaaaaagtaa

SEQ ID NO: 218665 - DNA, 1317 bp, Klebsiella pneumoniae
atgataactactacaaaattagatccgattgaaaccgcatcgcgtgacgaactgcaggccctgcaaacccagcgcctgaaatggacgctgaagcatgcgtatgacaatgtgccgatgtatcgccgcaaattcgacgccgccggcgtgcaccctgacgactttcgggaattaaacgatctgcaaaaattcccctgtaccaccaaacaagatctgcgcgacaactatcccttcgataccttcgcggtgccgatggagcaggtggtgcgcattcacgcctcttccggcaccaccggcaaaccgacggtggtgggctacacgcagaacgatattgataactgggccaatatcgtcgcccgttcgctgcgcgccgccggcggcacggcgaaagataaaattcacgtcgcctacggctacggcctgtttaccggcggccttggcgcgcactacggcgcggagcgtttaggcgcgacggtgatcccgatgtccggcgggcagaccgaaaaacaggcgcagctgatccgcgattttcagccggatatgatcatggtgacgccgtcctactgtctgaatctgattgaagagctggaacgccagatgggcggcgatgcccgcggctgttcattgcgggtcggcgtgtttggcgccgagccgtggacgctggcgatgcgcgcggaaatcgagcgccgcctggggatcaccgccctggatatttacggtttgtcggaagtcatggggccgggcgtagcgatggagtgtctggaaaccgttgacggcccgaccatctgggaagaccacttcttcccggaaatcgtcaacccggacgacggtacgccgctggaagatggcgagcatggcgaactgctgtttaccaccttgaccaaagaagcgctgccggtgatccgctatcgtacccgcgacctgacgcgcctgctgccgggcaccgcgcggaccatgcgccgcatggatcgcatcagtggacgcagcgacgatatgctgattatccgcggagttaacgtcttcccctcgcagctggaagaggagatcctcaagtttgaacacctggcgccgcactatcagctggaggtgaatcgccgcggtcatcttgattcgctggcggtgcgcgttgagctgaaagagagcgggctggcgctgagccacgaacaacgctgccagatttgccatcagctgcgtcaccgcattaagtcaatggtcgggatctctaccgatattactatcgtcaactgcggcagcattccccgctctgaaggaaaagcctgtcgggtattcgacctgcgtaaagcggtggttagcggttaa

SEQ ID NO: 218666 - DNA, 285 bp, Klebsiella pneumoniae
atgggttactttgacgagcttaaagcgtctctggaagaagctattgagatcaaagacggcaataaggccccagcccggacgacgcgctatgaagttgctgatgtgaaagccatccgcgcgcagcttaatgtttcacaggcggaaatggcaaaagcgctgggtaccagcgtggataccatcaaaagctgggagtccaggcggcgcaaccctacgggcctggcagcaaaagtactggcggttatccaggccaacccggcgttctttcgcgaactggctgagcactaa

SEQ ID NO: 218667 - DNA, 333 bp, Klebsiella pneumoniae
gtgtgtcatgccattgaatttatcgaaacgtcgctatttacccgccagataaaacagctggccagcgatgaagagctgagggcactgcagaggctactcataggcaacccggattttggcgatcttatccaggataccggcgggttacggaaaataagaatggcgacaggctcacaggggaaaagcggcggcgtgcgggtgatatattttctggcaacctgcgagatcatctatctggtcttagcctactctaagcacaccaaagagagcctgagcgcagcggaaaaaaacgaactccggaaactgacccggcgactaaaaaatgaggtttga

SEQ ID NO: 218668 - DNA, 678 bp, Klebsiella pneumoniae
atgactaactcgatatataaaaaatatttattattcattaaagtgacatgttgtgtggtaatgattttagggataacaggatgcagcacgctttgtcttaaggaatatatccgaggtcaggaatcacaagttaacgtatatgcgaatgatagcctcgtcgggatcacattgagccaggatgggaaagcaaacagcacagttgcatttattggtgaacgctttgattacccgctacagcgcggcggggaaaaaattacgaaaatttatctattgaaagaaaattatttgcctgagctaaagatcaccgatctgaagagttttatgatggggaaaacacgtagcgaattttcaggtaatatccggtttcgctatgggcagcgaataatagatgaaacgacgcgcgatgttctcgcgaaaaatggcttcgaatgctatggctatggggtgaataccgggccttgttatctgcctgttaacgcgttgcagggtacgatccagaagaaaggcaaaatcccggacaaccgcgctattcgctattttgaacagccctacccggtgaccttctataaaaagaatggcctgtcagcggcgcgcgtcctttatccggtggccgttgttgttgatattgtcacatcgccttttcaactgctcgcgcttgccatctatgactggcgataa

SEQ ID NO: 218669 - DNA, 792 bp, Klebsiella pneumoniae
atgtataaaccgctaatgctactccccgccattgttcttgtcgcggcatgtaaaccgttttctgactcttcgccctgcgatgaagcacagcgtgccattaatgatgccaatttttttattctcacttatctttctcctttgaacggcgatgtgcaaagcgtgcaaattgacggtaagcaaaataacgacgcaggcacgctgcgtttttcccagtgccgtcggctggtaagttatgagagagcaaaaacctttaataccgcgaatgactcaacgatagtcagagataatgtccgctggcataatgataaaggatgggtacgggaatatatcaggcagacccgaaatgtgaacgggaatatcagaaaaatggtcatgcgcgagcagttctataccgataatctgggacggattgtgcgctccgaaaatgtgtccaccacccagcaatcatcaaagctcctgagcacgaccacctatcactatgacgagcggcaccagctggtgcgtaaaacggtcaatggcggcctgatggctatgctgtctgtcaattatcgctacgtggcagggcatttaagcggtatctccgactcggattccacctcgacgctgcgttgggatgaaaaaggacgttggctatccgaggatagaaccaccacttatcgtaccaaataccagtcccgctgcttaggctgggatcccgcggggaactgtagcggagaatatagtgaacatgaaggatacggcggaaaaagcgaagagtctctgcattatagctatacctattatccccaatga

SEQ ID NO: 218670 - DNA, 660 bp, Klebsiella pneumoniae
atgcaacaccagtggtctgcagtcgataatttcatgatttcttcgcttattcctgacgatgacgtactgagtcaggtactggaaaacaacaaacgcgccgggctacctgaacacgatgttgcggccaatcaggggcaacttctggcgctgttggtgcgtataacacaggcgcagcggatcctggagattggtaccctcggcgcctatagcaccatctggatggcgcgcgcgctgcccgccgacggcaaattgatcacccttgaggccgatcccacccatgccggggtggcgcgccagaatatccgcctcgcggggctaaacgatcgtattgaactcattgaagggccagcgctgaacacgctggaaaatttcgcggatgtgcagccgttcgacctgatctttattgatgccgataaaccaaataatcctcactatctggagtgggcgctgcactattcgcgccccggaacgttgatcgtgggcgataacgtggtgcgcgatggcgaagtgattaacgggcaaagcgaggatgcgcgcgtgcagggcgtgcgccggtttatcgaaatgatcggggataacccgcggctcaccgccaccgcgctgcagacggtgggcattaagggatgggatgggtttacgctggcgcgggtgaatggatga

SEQ ID NO: 218671 - DNA, 1371 bp, Klebsiella pneumoniae
atgatccgcccgctcacccttgctgtcgtcctggcactggtcggctgccaatccgccgacgtgcagcgcgcgcaaccgaccctgaccattcctgccgcctggcgggccgaagttggcccggcgagcccggtggaaggcgtatggtggcgcaattttcatgacagcacgctcaatcagtatgttgatcaggcgctgcgctataacagcgatgtgctgatcgcccgtgagcgagtgaatgagtatcaggcgcgcgcttacgccgccgacagcagtctgtttccgtcactggacgccagcctgaccggcacccgcgcccgggcgcagtccgccgccaccggtctgccgatccacagcacactgtataagggcggcctgaccgccagctatgatgtcgatatctggggagcgaaccgcagcgcggccagcgccgccggggccagcctcgaggcgcagaaagccgccgccgccgcggccaatttgagcgtcgccagctcggtggccgttggctatgtcacgctgctgtcgctggatgagcagttgcgggtgacccagcagacgctaaaatcgcgggaagacgcctggcgcctggcgaaacgccagtttgagaccggatatacctcgcgccttgagctgatgcaggcagattcggagctgcgcgcaacgcgcgcccagatcccgccgctgcagcaccagatagcccagcaggaaaatgccctcagcgtgctgctcggtgataaccccggcgcggtaaaacgcggcgaatttgcccagctcacgccgctgaggctgccgtcgcagctgccgtccaccttactcaaccgccgcccggatatcgtacaggcccagcgtcagctggtggctgccgacgccacgctggcgtcatcgcaggcgcagctgctgccttccctcaacctcaccgccaccggcagcctgcaggatcgcacgctgccggatctgctggataacccgctgcggctgtggagcgtgggcggcagtattctggcgccgctgctaaaccgccaggcgttaaatgcccaggtggatgtttccatggcgcaacgcaaccagacgctctacagttatgagaaagcagtgcgcggcgcgttcaaagaggtcaatgacagcctggatgccatcagtcgctacagcgaacagttaaacgagcttcaggaacaagagaccgttgcccaggaaaccttacgtattgcgcaaaaccgctaccgcaacggctactcttcgtatctggaggtgcttgatgcccagcgaacgctgttctccacccagcttagcgtggtgcaggtgaaaaataacctgttgctggcgcagatcgatctgtatcgggcgctgggaggcggctggttgaacgcgtga

SEQ ID NO: 218672 - DNA, 1653 bp, Klebsiella pneumoniae
atgccccgtcgccaggataacccctatgctccgcatgactgggcgccgcatgaaaaaccggccctgcttggctcgccctctacgccgctgcacagtccgcagaaacgcctcgcttacggcgtagtcggcctgctggtgtgcctcaccggcgcgctgggcaatgcagtggtcaccgccaacctgcagctgctgcagggcaccttcgccgcctggtcgaccgagatcgcctggctgccggctgtgtacgtcatgaccaatgtctccatcaacctgctgctggtgaaatttcgtcagcagttcgggctgcgcgctttcaccgaaggctttctggtgctctatgtgctggtgacctttttccacctgttcgtcaacgacctcagctcggcgatgatggtgcgcgctgcccacggcatggtggccgcggcgctcagttcgctggggatctactatcaggtacaggcctggcccgcacgccaccgcctgaaagggctaatcatcggcattaccggctcgtcgctggccattcccctggcgcgcctcttttccaccgagctgctgcagatagatgaatggcgcggactctacttttttgaactggggctggcgctggtgtcgctggcctgcgtcatcgcgctgaaactgccgccgagcgatcgcaaaaaggtcttcgagaagaaggattttattaccttctttctgctggcgcccggcatggcgctggtctgcgccgtgctgtcgctggggcggctggagtggtggttcgaagcaccgtggatcggctgggcgctggcggcagcggtggtgctgatcgtcgccgccattactttcgagcataaccgcagcaatcccctgctcaataccaaatggctctccagcggcagcatcgtgcgcctcggcctgattatgctgctgatccgcatcgtgctggcggagcagaacaccggggtcatcggctggctgcagtacgttggtctgcaaaacgaacagatgactaacctcgcgtggtcgattttcgccggtattctgtgcgggatcgttgccagctgtctgacgctcaacccgcagaagctctactggccgaccgccaccgccctggcgctgatcatgatagcctcgctgctcgacagccagtccaacgccctcacccgtccggaacaattaatgttcagccagtttttactcggcttcggcagcgccttctttctggccccggcgatgctcgccgggattggcggcgtgtttgccgacccgcgcaacctggtcagcttctcggtgctgttcggcatgagccagaacattggcggcctgctcggctcggcgatcctcggcacctttcagacctggcgggagaaattccattccagccagctggcggaccagataaccaccctgaatccgctgatcgtcgagcggttgcagcagtacagccagatgtatcagagccagattggcgacagtacgctgctcaacgttcaggccaccaccctgctgcaaaacgccgcgacgctgcaggccaatattctcgcctggaatgacacctatctgctgacggcggcgatctccgccgggacattagtgtgggtgttctggcgcttaattcgcttacgtctgaccgcccgtatcgccttaaaacgcgccaccggcagcaaataa

SEQ ID NO: 218673 - DNA, 393 bp, Klebsiella pneumoniae
atggaactgctggcaagattgggtcatttttttgaacaagttcgctcggatgctgattttgccaccttcgccggtgagctacggcggcatcaggtctcctactacatctattttgtcaccaccggcaatgtgaatttcgtgatggcgaacgatgacgtgatttcgataaaaagcgctcgcggcctgctgcgcgtatgcgctgaggtcagccactgtctgaccagagccgcggttatccgccacttcgccggggccatcaattttgaacagtactgccaggatttggccagcgccggggtatttaagtggaccgtcgatcttgaggacaatacccgccattactggtcgaaggataataccctgctgtttaaagagcgtttactgcccccctga

SEQ ID NO: 218674 - DNA, 204 bp, Klebsiella pneumoniae
atgaaaacctatgaccgtaatcgtaacgctattgctaccggcagtatggtaatgatcgctggcaatgggggaaccggggtgattaaagctatccatggcgaggggaaaaccgccgagcagctgcgccgggcagactgcgttgaaatcgacggccgcgaaggtcgtttctgcccgatagatctcattcgcctcggcttccattaa

SEQ ID NO: 218675 - DNA, 153 bp, Klebsiella pneumoniae
atgcaatatatactgaccggcgtactggtattgatcgtcagcggcttagggatccacgcgctgacgctggtgattgagcgggggtataaagcgttgtggtataaattcgccagcgtggaacaggccagccgcaaagtgaagatttcccgctaa

SEQ ID NO: 218676 - DNA, 531 bp, Klebsiella pneumoniae
atgaaatctgcattaatcagcccgctgctggcgggtctgctgctgttaacgggctgtgcacagccagccgcacaggccggaggcggcggtggcggaacaataaaagccatcaaccacacaaaatgggcgatcaaccacttcagtgtcaacggccagtcggggatcgacattataggcccgtttcagggcggcggaggcggctgctgcttcagcgtgcccgcccgctggacgccgggtatgacggtgcgcgttgactgggaaagtggtgaggcatcgactgaaggttttcctggatttgctgattcaaaaaaatacagagagtggagagataatttaaaacaaaacaaccgccagcacagcaaaactgtcccgctgcccgactataacggccaggatgtgtgcggcattacggtgcactttttagcctgcgatgacgtgaaggtgaccaccagctgctggtcaccgagaaatgcgaactatccgataaaagagcccgtcaggatgaaggagcccgccgtatgtccgaagtag

SEQ ID NO: 218677 - DNA, 1215 bp, Klebsiella pneumoniae
atgtcggcacagcacgtcctgattgttgaagattcgctggtttatcgtcggctgttgagccgaatgttgacgcagtggggctatatcgtcagtgaggcggaaaacggcgtcgctgcactggcgatcctggagaaccagtccgtcagcctggtgattagcgactgggaaatgccggagatgaatggcctgacgctgtgccgggaagttcgccgccgccactttggccactacgtttatctgatattgctcaccgcccgcgaaaatccgggcgatttaacgctggggtttgaggccggggccgacgattttctcagtaagccggtggagcagagtgaactgcgggcgcggctgcatgccggggcgcggatcctctctctggagtctgacctcgccgcgcgcaatgcgcggctgagcgaagcgctgcggcagattgagcacgatttggagctggcggcgcgcattcaacagtcggttctccccgcccatcagctgtgccatcagggttttttctccgactggatattcctgccgtcggcctgggtatcgggggatatttttaatgttttcccactgggggatcatctcgggttttactgcgtggatgtctccgggcacggcgtaggggcggcgatgatgtcgcttgccgtcgcccgccagtttctgcatggcagggcggttgagcgttttctttttactgcagacaaccagccggcgtcaccagccgaggtggtgcagatcctgaatggtcgtttttgtagcgacgaggcagatatcgtcagctatttcaccctgatctatggcgtcatcgacatgaagaccggcgcgggtaaactgtgtcagggcggtcatcctaccccctttattgttagcctggatggaagtgttcggcgggtcggcagcggtggcgcgccggtggggctgatagacaatctctcatgggcagatgtcagcttctcgctggcgccgggggagcggctgtgcctcttcagcgacggtattaccgaatgtgaaaacctgagcggcgaacagtttggcgacgtgcgcctgcagggttgtctgcaggatggcgtgaggctttcgctacctacgctgctggcggaatttgccgggcatctcactcgttggcgcaatggtgatggccgtgaaccgcaggcaatggctgatgatgtgtcactcttgattattgaacgtacaggggacagtgatgaaaattga

SEQ ID NO: 218678 - DNA, 255 bp, Klebsiella pneumoniae
ttgccattctgcggtaaagcgggccgccgctcacccgtctttatccagcatcagccacacgatacttttgctgaccagccatttttcgccggtttgtcgctacagtcgattggcgttgccgtcaggttggagtatagcctggttgacaaccccgttgctgatgagcaagccaacccgctactgactaaactgataacgtacagcggcaagtttcgtgaaggcacggtcagcctgatttggttcctgccgatttag

SEQ ID NO: 218679 - DNA, 435 bp, Klebsiella pneumoniae
atgaagttttatcgcgatctttttgaagccagtctgaatcgcgtcgtaccggagcacgataaaaagcgcttttttcaggccttctacagcacctttatccatatgtcgcccgagacggagcagcacttctcacgacgcccgggcgaggaaggccagcagatgatctttaaaagctttttcgccatgctggcggtcaacggcgacctctttgtacccgattttctggaacggctggcacgcgagcagagcgaggaaggcctgcgtctgccgccgcggttttttgcgctgtggcgagaagcaatgctcaaaaccgtccgcgccagcgatccactgtgcgatgaagagatcctcactgcatgggcaatggcgatcgcccctggtcttgagtatctgcgccgccaggcggagctccactatcagaccgcaggtcagtga

SEQ ID NO: 218680 - DNA, 1158 bp, Klebsiella pneumoniae
atggagccacgccgcgtgaatggcaaaaaccactggtatcacgaaacccagtcaacaatctgcccggtggatgtcctgccgcttgtccccgaagccgcccatgttgaagaccgctttttgctggacctgacgctgccggacacctggttatctactcatgctggctggttacaccccgctcgccagctggccggactgctgtttcccgatcaggtgactgtcagccgcctgcaaacctttaccgcctacgatcgcctgagcaccgcgctgactgttgctcaggtttacggcgtccagcgcttgtgtaaccactacgctgcccgcctggcgcccctgccgggtcctgactcttcgcgcgagagcaaccgccgcctggcgcagatcacgcaatacgctcgtcagcttgccggttctccctctgtgattaacgccctctcccgcagccagctggatgaagtcggtttaaccagccgggatattattttgatcaaccagattattggtttcgtcggcttccaggcccgggcaattgccgtcctgcaggcggcgctgggcttcccggtgcgctggatccccggtatgcctcagcaagaggaggcgcccgccgacctgttcacttccccgacgggtgagtggcaaagcgaccttgacgatcctgacctgcagtacgccgatgatgagcgccagcggcgcatcgccagctggcagtcgctacctggcctcggcgaattagcccccctgctggcctgcgacccgccgttgatcgcgcctctggagacactgatccgccagctcagtactgacgatgcctttggcccgcagatcgccctactcacggcgcgtaccaacggcagcgccacctgttttgacgcctggcttaatcgctggcaagacgaagaggattttgccagccatctgcggcaaggcgagcttgcgctccagcgctggcttaaccggcaccctcagtcgcgtgcgctcgtcaccgcggtccagttgttgacccgctcgccagaccggtttagcgccgctcagctaacccccctcgcggaatatggactttctgcggaacagacaatcgatttgttaacctggagcgggttgtgcggctggatgaatcgtctgaaaatcgccctcggcaatgtgcgtcagcagacgtaa

SEQ ID NO: 218681 - DNA, 1170 bp, Klebsiella pneumoniae
atgctggagttgttgtttctgcttttacccgttgccgccgcttacggctggtatatgggccgcagaagtgcacaacagtccaaacaggacgatgcgagccgcctgtcacgtgattacgtggcgggggtaaacttcctgctcagtaaccagcaggataaggccgtcgacctgttccttgatatgctgaaagaggataccggcaccgtcgaggcgcacctgacgctcggtaacctgttccgttcccgcggcgaagttgaccgcgcgatccgtattcatcagagcctgatggaaagcgcatccttaacctacgatcagcgcctgctggcggtgcaacaactggggcgcgactatatggccgccgggttgtacgatcgcgcggaagacatgtttaagcagctggtggatgagaccgatttccgtctcggcgcgttgcagcagctgctgcagatctatcaggcgaccagcgactggcagtcggcgattgaagtggctgaacgactggtgaagctgggtaaagagaaacatcgtggcgagatcgccaacttctggtgcgagctggccctgcagcaggtggcggccaacgatctggataaggcgatggccctgctgaaaaaaggtgccgccgcggaccgcaacagcgcccgggtgtcgatcatgatgggtcgggtgtggatggaaaagggggactacgccaaagcggtggaaagccttgaacgggttatcgatcaggataaagagctggtgggagagacgctggagatgctgcagacctgctaccagcagcttggcaaagccgaggagtgggaggctttcctgcggcgctgcgtcgaagagaacaccggggcgactgccgaactgatgctggcgcaaattctcgagcaacgggaaggggttgaagcggcgcaaaattatgtgacccgtcagctggaacgtcacccgaccatgcgtgtcttccataagttgatggactaccatctcaacgaggcggaagaagggcgggcgaaagaaagcctgggggtgctgcgaaacatggttggcgagcaggtgcgcagcaaaccgcgttaccgctgccagaaatgcggctttacggcgcatactctttactggcattgcccatcctgccgctcctgggcaaccatcaaaccgattcgcggcctcgatggccaatag

SEQ ID NO: 218682 - DNA, 309 bp, Klebsiella pneumoniae
gtgaaatatttactcattttcttactggtgttagcaatcttcgtcatttcagtgacgctgggggcgcagaatgaccaacaggtcactttcaactatttactcgctcagggtgaattccgcatatcgacgctgctggcggtgctgtttgccgcgggctttgccatcggctggctgatctgcggcctgttctggctgcgggtgcgtgtctcgctggcgcgcgcggagcgtaaaattaagcgccttgagcatcagattgcccccgtcagtccggccactgccgtcgcaggcgtgcctgccgtgaaggaataa

SEQ ID NO: 218683 - DNA, 1089 bp, Klebsiella pneumoniae
atgcgtcactacaaaattgctgctatccctgcggacggtatcggaccggaagtcatttcggcaggtattgaagtcttgcacgcgctgacgcgccacgatccgcaactgaaatttgatgtagagacctttgactgggggtcagactattacaaaaaacatggcgtgatgatgccggaggaagggctgaacatgctgaaagcattcgatgccatttacttcggcgcggtgggcgcgccggatgtccctgaccacatcacgctctggggcctgcgcctgccgatttgccagggctttgaccaatacgccaatgtgcgacccaccaaaattctgccgggcgtcacttcaccgctgcgcaaccgcgggccgggcgatcttgactgggtcatcgtgcgtgaaaactccgaaggtgaatattctggtaacggcggccgtgcgcaccgtggtttacctgaagaagtcggtaccgaagtggcaatctttacccgtgttggggtgacgcgcattatgcgctatgccttcagactggcgcagtcccgtccacgtaagctgctgaccgtggtgaccaaatccaacgcccagcgccatggtatggtgatgtgggatgagattgccgctgaagtggcgcaggaattcccggatgtgcagtgggacaaaatgttggtcgatgccatgacgcaccgtatgacgttgcatccccagaccctggataccatcgttgccaccaatctgcacgccgatatcctttccgatctggctggcgcgctggcgggtagtctgggcgtagcgccgaccgcgaatattgatcctgaacgccgcttcccttccatgttcgaaccgatccatggttccgcattcgatatcaccggcacagggattgcgaaccccattgccactttctggaccgcggtacagatgcttgaacatctgggcgaacgccatgccgctgcgctgattatggaaagcattgagtatgtgtgtgaaaaaggcattctgacgccagatgtcggtggctcagccaataccgcggaggtgacacgcgccgtggtgcactacattgacgctaaagccgacattgccgagaccgcataa

SEQ ID NO: 218684 - DNA, 1293 bp, Klebsiella pneumoniae
atggcaaatattagcgatcagctcgcggctgatattcacaacgcgtttaacaaatactacacagacctggcgaaccaagatcagatcttcttcggcgtcggtgacgtgaagattacgaagcaggacggcaccaccgccactgtgcgctcatggaataaggtcattggctcagtggacaccgccgcgcagcgcggggcggagaacacttttaccgctgtacagacgttcagtgctggggtgaaggttaacggcaacgtcaactgcatggccgacaacgcgatgatctacctgggcaagaactcagatcttgcgctgcttaaaaagagcgggcagggtggaaccatcgccgtcggcagcggcacgacgtttaagatccagcgcacgaacacggcgacagtatcaccggcgtcgacggtcgaggacattctgaccatcggcacggataagaaaaccacggtttccggagcgcttgccgctggtggtgatgtaacggcgaaggggaacattgacaacgctgccagcgggaagatgtattcccaggcgattgagctgtcatttagcacgccatacatcgactttcattttaactacagcaccgacgacttcaccgggcggattatggccactgccgccgatcaaattagtgtacaggggagtcattggcgagttgacagggatcttcgtgttggtggtatggcagatattgcagggtggacgcaatgcggagtcgacctttcgtccaacagaacagacttcggttcccctccagatggttcgttggtttcaggtggacgtattcgatccagaatgctggggcgcggcggtaacgttgacccctcaggggcgtggggaggtttctatattgaagagtacgtaggaaccgaacacaggatcatcatgtatatggacggcttcgggagaaccgacgcatggtcattccgcgcaggtgggacaatctccacacctaaaggcgacgtcatgacgaccggttcagacgtccgcctgaaaacagactttacacaagcgcctgtgaacgcctcagagcgcattgatcgcttaggggtgtgtgagtataggatgaagggcgaaacgcgcgtgagacgcggttttatcgcacagcaggtggaaaccgtagacaagatctacacctaccaggatgttgaacaggaaattgacggcgagcgaatcaaggtaatgaatatcgactatgtggcgatcattgccgaccttgtggcctcggtgcaggagttaacaaaacaagtgcatgatttgaacaagctggttcaaacataa

SEQ ID NO: 218685 - DNA, 414 bp, Klebsiella pneumoniae
atgaaaaaaattgcactggcgttagtgatcgtgggaattacaggatgcgcgactaagcctgtaactaatgagcaggcaaaaaacataccttctaaacaaattttaaatccatcgcttttcactaaaaaagaaggtacgggcaaagtcatcataaaaagagattcgggctttatgggaagtgcttgtatgactcgaatttatattgatggtaaagaaattgctgatttggatacggcggaaaaagcagttatttatcctgtaataggtactcatatctttagtgcctggcctaaaggaatgtgtggtggaggtatgagtgaacaatcaggagaagttaccgaagggaaaacgttaatgtatcgtgtaggttatgggaccaacggtgattttggtatataccctacagctttttaa

SEQ ID NO: 218686 - DNA, 756 bp, Klebsiella pneumoniae
atgagtcttcacgccgattatcagaaactggagccgggagatgaaatccggctttttgaaattgatggtagtgcttttaacatgggggatgttttatatttccacggatataacattccccatactgaagcggaaattttagccgctggtggcgatgaatcgaaattgcccgctaaaagtatctggtggcagggaaccgaatataaagcgtggccgtgtgaattagaggggatcgaatcctcgacttcaggaagcgacgcgcagccgacactgagggtgggcaacattgatggttcgatttccgcgttgtgtttgcattatgacgatctggcgatggctcgggtcattatccatgagacacaaaagcagtatctggatgcgcgaaacttccctgaaggtaatgccacagcggacccgacgcaggaaaaacggcatctgtattttatcgacaccaaaagccttgaaaccgatgaaatagtggagttcgcgctttccagcccgatggacctacaggggatgatgattccgacccggcaatatcattcggtttgcacctggtgtattcgcaataaataccgtagtggcgatggctgcgattatgcagggacaaagtatttcgacaagaataacaagccggttgatgacccatcgaaagacgtctgcaacggaacactcactgcctgcaaactgcgttttggtgagcataacgagttgccgtttggcggatttcctggcacgtcgctgataaggagctga

SEQ ID NO: 218687 - DNA, 348 bp, Klebsiella pneumoniae
atgactattgaaacattttcctggcgaattcaggccgccagtcagcccgcgataacgagtaaggataatattcgaaaggcgcaatttggcgacggctatgcgcaggtttcaggggagggaataaacccggaaaccttaaattatgcattttcatttaccggagatctgcaaacaggcctggatatatataaattcctgcgacggcataaaacaaaatcctttgcgtttaaaccaccgtatgacgagctggcgctatggcgggtccaggctgacagcctgcaaaaagccgttctgaataacagagtcatgacagtcactgcaacatttgaacaggcattcgtaccatga

SEQ ID NO: 218688 - DNA, 3147 bp, Klebsiella pneumoniae
atggcccagcaaattagcgaccttgtcattaacctggatgtcgacaacgccacattcaccgaacagattgccaggattaaggggcaactgtccggtatggcgaatgaatcggacaaagtgcagacgcgtatgcgtagtgcagcagaggcacaaattagcgcgctgaaaaccaccagcgccgccagcgcaggcgccgtgtccgatatgcagaagcgacaggcggatgccgccgccgggcttcagagcgaactgcaacgggtctccaaatcggtcgatgagacttaccagcgcgtcaccgggctaaaccagcgttatcgggagaacgacgctcaggcagaggcgctggcgcggcggcaggatgcgctggcggaatcgttctttcggcagatagatggcgttcgatccctcagcggtgaaacacggtcgctggccagtatccaggaacaatttcgtaaggcccgcgcgcaggggaacatcactcagggcgattatctctccttgatatcccgtaccacggcccgacagaaagaacttcagctggttgaggaaaaagcaaaccaggcgcgcgaaaaatttcttcgccagctgaaggcccaggtggtcgaacaaaaactatctggtactgagctgctgagaatgaaagccgcgcaggtaggcgccagcgatgctgctgaagtttatatccgcaaactggaagcggcaaaggtcgcaacgcacagccttggtctcgagagcgctggcgcacgtcgggagcttggtgttctggctggagagttattgcggggcaactttggcgcgctgcgtggctccgggataaccctggcgaatcaggccgggtggctcgaaaaaatgatgacgctacgcggactggggatcgctggcgtggtcggtggcatagcggcatccgtcgttatgctgggaaaggcgtggtacgagggcgggaaggaagccgaggagtttaacaaacagctcattctcaccgggaactatgccggtaaaacctcgggacaactgcaggcgctggcacgcaacatctcaggaaatggagtcactcagcacgccgctgcagccgtattagcgcaggttgtgggaagcggggcattcggcggcgccgacgtcgaacggattgccaatgtggctgcgaggcttcaacaggctaccggccaggctgtggatgaaaccattaaccagtttaagcggctaaaagaagatccggttaatgcggtcgcaacgctgaatgaatctctgcattttctgaccgcaagtcagtttgagcagatttcagctgctcaggcgatgggcgattctcaacgcgctgccgagctcgcgatgcgcgcatattcagatgctgttatccagcgcgcaaatgcagtaaaggacaacctgggaacgctggaaacggcgtggaactgggttaaaaatgccgccagcggcgcctgggatgccatgatgggcattggtcgtaatcctgatgcggccatgaagcggcagggggcttttgcagaatggcaggccgcggaaaaagaacgccgtcaactggccgccaatctaaacgtcgatcccaactattccggtaataaccccctcattaaggctgatgcagaacgtttgcgtattgccactcaacgtgctgagttgctgaaacaaacttatgatgaggccgataaagcatacgctaaggaaggtttagccgcggcacgcgagaagctgcgtaacgaacaacaacagcaagccatcagaaaccagcagcagtttaatcaacttctggaagcaggcctcaagccgtcagaaagacgggctcgcgctcaggccgaatttaataagctcgttgagaaaaacaagcaagatgcgatcgatgggattgccacccgctggacagccagcgatatagaaaaaatccgcgcaagtattgatgccaagtacaaagaccctaaaacaccgaaagggaggcagtacacaacacccgccgggagtaaagcagaggaaggggctcaggccgaattactgaccctgcaggctcaattgaaaaccctccagcagcatacagacgtcaacgacgtgatcagtaagcaacgtcgggatctctggcaggcggaaaatcagtatgctgttttgcaggaagctgccggccgccgccagctctccgcccaggaaaaatccctgctggcccataaaaacgaaaccctggaatacaaacgtcagctggcagatctcggtgataaggtcgcccggcagcagaagctgaataatctggcagatcaggccaataaattcgctcagcagcagagtgcgatacgggcggggatcaaggctcaggccgaagggctttccagcagggaagcgaacagaaggagcacgcttgaaaagctgagtgaaacgtatgctttcaaccctgatgcgcagcgcaaggtgctggcggaacagcaagccacctatgaagccgaggacgcattgcgcggtaactggctggccggcgccaaacagggctgggcggagtatcaggattctgccactaatgtattttcctctgttcaacaaatttcgcaggccacttttggggggctggcaaatcagctgacattgctcaataccactggcaaagcgagttttaaggaattcaccacatccattctgaagatgatcgctcaggtcatcgatcagcttattgtggcctacacctttcaggctgcaatggggtggatcagaggcgggagcagttcttcaaattctggtcagtcttttgccgttccttcctatcgtccctctggctttgatggtggtggttataccgggcatggggggaaatacgagcccgctgggattgtccaccgcggcgaattcgttttcaccaaagaggcaaccagccgcatcggcgttagcaacctttaccggatgatgcgcggttatgcctctggcgggtatgtcggcaacgctgccagtccggcgagtgtgtcctccggtggtgtgatggtcaacatgggcggcgtctatatcagtagcagcaacgaacagcagtctacgcagcggccagcgattgacagtaacggtatcctcaagcaactgaaacccgccattattagtgtcgtcagtgaacaggcccaacggcccggaacgccactctggaaggcaataaaagaagggcgttaa

SEQ ID NO: 218689 - DNA, 156 bp, Klebsiella pneumoniae
atgggcatcgagttgcgcatcctgaaaataacgatcccggtaaaagtgatgccagtcgcccagctcggaggacgtcatgccagcaagcatggcgcgccagtcgggccgcccgaactcgcgcgccagtttcaggacaaaatcaagctcgctggctag

SEQ ID NO: 218690 - DNA, 429 bp, Klebsiella pneumoniae
atgagcatgtttttgaagaaagacgaatttacccataacggcgctacggtgacgatcactgaattatcggcactgcagcgcattacttatctcgaatatctggccgcagaagaaaaagccttatccgccatttctgatgacgtggatgaccagacaatgtccgccggactggtcagcatgagtattcgcgcaggcgcgcgcctcattgcgctctcgctctggcataacgatccgaaggggccatctgaagaggaactccaccagcaggtgatgagtacctggccggctgaagcgattggcaaagcggaaatgcagatcaagctgctctctggcatgctggcgccggttgccgaagaagatcaacccacggatgaagatattgatgacaccgcgctgggtgatgaacctgttactgcggaaaagccctag

SEQ ID NO: 218691 - DNA, 744 bp, Klebsiella pneumoniae
atggctactccaaatccaatggccccggttaaaggggcgggcaccacgctctggttatataccggaacgggaaatccctacgctaacccactatccgatgccgactggcagcgcctggcaaaaattaaggaactcacgccgggcgaaatgacggcggagtcctacgatgacacctaccttgacgatgacgacgcagactggaccgcgactgcacagggggcaaaatcggcaggtgatacatcattaacgctggcttggaaaccgggtgaagaagggcaaaagtcgctggtggcctggtttgtcgatggcgatgtgcgggcctacaaaattaaatacccgaatggcaccgtggatgtgttcaaaggctggtgcagtagcctgggtaaagccatccccgcgaaggaagtgatcacccgtaccgccaaaatcaccaataccgggaaaccggagctggcggaagaaagcggtaatccgccaatcgcagtgaccggcattaaactcgacaaggcaacggccagcgtggccgtcggcgcaaccacaacgctaaacgtcaccttcctgcctgccagcgcgtcggaacagtctttccgtgcggcgacctcggatagcacgaaggctaccgtggccgtgagtggcaaatctctgattgtcaccggcgtggcggctggcgcggccgacattattgtcatgagcaatgacggtaattttgtggcgacctgcaaaaccaccgtgacggcgtcctga

SEQ ID NO: 218692 - DNA, 402 bp, Klebsiella pneumoniae
atgagcaaacacaccgctattcgtcttgcggtactggaacaactaaaggcgtccattccggatcgtgtgacatggtttgacgggcgccctgtttttctggaagagcaggacctgccggcgctggcagtctatctgtctgatgccgaatacacgggagacagccttgatgaggacagctggcaatcagtcctccatatcgaggtatttctgaaatcaaccacgccggatagcgcgctggatgcgtggatggaggaaaaggtgtacccggcccttgagactatcccggcgctatctcccttaatcgaaacgatgatccccatgggctacgactaccagcgcgatgacgaaatggctacctggggatcggtcgacctgacgtacaccctcacttacctgagataa

SEQ ID NO: 218693 - DNA, 579 bp, Klebsiella pneumoniae
atgtcactgaaaggtcttgagcgtgctatccagaacctgaacagtctgagccgcctgatggtcccaacggctgccgcccaggcgctaaaccgggtcgccgggcgggcgattacgcagggcagcaggaaggtcgcaaaagaagcgacagtgggcgataaccacaaaaaggggttgccggtgaagctggtccgccagcgttcgcgtcttaagcgcgcgaagcctgaaaggctggtggcggcaattcgtattaaccgggggaacctgcccgcaatcaagctgggtgccgcgcgcgtgcaactctccaggcgaaaaggagaaaagcgcgggcgcggtagcgtgttacgtattggcccgtacattttcagaaatgcgtttattcagcagctggcgaacgggcgatggcaggttatgcgccggctgggtaaaccccgttacccgatagatgttgtcaaagttcccctcgaaatcccattaacccaatccttcaccgcgatatcaaagcagcttatcgacagcgatatgccgaaggagctgtctgccgcgctgaaaaatcaactgaggatccacctgaagcgatga

SEQ ID NO: 218694 - DNA, 276 bp, Klebsiella pneumoniae
atgcctaaccctttcgacaagatggcggcccggatggatgccgccaccctcaaaaaaatgggcagggaggcggttattaacggcatccgcgttgatgttgttcctgctgaattgctggaggagatgagcgcgctttccggtaccgcaacggtgctggtcgtttttgccgctgattatcggcccaccagaaacgatgccgttgaatatgacggtaaggactggatcgttacccgctatcagctttttaacgggaagcctcaaatctggctggagtga

SEQ ID NO: 218695 - DNA, 327 bp, Klebsiella pneumoniae
atggctaaaaattatgtgcaggaaggaaagactatccctgtggagaatgccggacaggaaatcatcctgagcggggcgccggttgttatcggtcaaatgattgcagttgcgatcacggatattccgggcggcgatacaggtgatggccttaccgaaggtgtattccagttgccgaagctggccgccgatgaaatcagcgcgggggaaaaggtgtatatcaaggcgggcaaagtacaactggaagccactgatgccgtcctggcaggtgttgcctgggaaaatgctgcggctaacagtaccgtcattgacgtcaaaatcaatgcctaa

SEQ ID NO: 218696 - DNA, 2022 bp, Klebsiella pneumoniae
atgccaaagaaacgggcgtatcaacgtccgaaagccagcgtaaaaagtaatacatggtttcgtatgaaggcgaacgccaacaatgaagcggatatctatatctatgatgaaattggttattggggagtaacggccaaacagtttgttaacgatcttaaagcgctgggtgatatcagccacattaaccttcacattaattcgcctggtggcgatgtctttgatggcatcgccatttttaatgccctgaaacaccacggcgccgcgatcaccgttcacatcgacggcctggctgcctccatggcttctgttatcgcaatggtgggtaacccggtcatcatgccggaaaacaccatgatgatgatccataagccatggggctttgccggcggcgatgccaacgacatgcgcgactacgctgatttgctggataaagttgaatcggtgctgatccccgcctatgcagcaaaaaccggaaaaacctctgatgagattgccgcaatgctggaagatgaaacctggctggacggcgccgaatgccttgccatgggttttgctgaccaggtgatcccatcccttcaggcaatggcctgtattcattcaaaacgtattgaggaatttgaaaaaatgccaaacagcattcgtaatatggtcaccccgccgcgtaattccacccagcgcgaaccgcagcagccagtaccacaacctcaggcacatcaaccttccgcccctcagcctgccgctgtggatgagactgctatccgggcgcaggtttatgccgaacagcgtaaccgtgtgaacgggattaatgatctgtttgctatgttcggcggcaagcaccaggaactgcaaaaccagtgtattgcggatcccgattgcactgttgagcaggcgaaagatgttctgctggctgctctgggcaaggctgctactccatcgaacaaaagcgaacagccgcatatttatgccggaaacgggaattttgttggtgatggcatccgccaggcgctgatggcccgtgcagggtatgaaaatcaggagcgcgataacgtgtacaacggtatgacgctgcgagagtatgcgcgtatggcactgacggaacgcggtatcggggtcgccagttacaatccgatgcaaatggttggcctggctttgactcacagtacctctgattttggcaatattctgctcgacgtagcgaataaggcgcttctgcaggggtgggatgaggcagcagagacctttgatctgtggacgaagaaaggccagctgtctgattttaaaacggctcaccgcgtgggaatgggtggttttaactccctgcgtaaggttcgcgaaggggctgaatataaatatgtgaccacgggcgataaaggtgaaacgatcgcactggctacctatggggaaattttctccatcacccgccaggcgattatcaacgatgatcttaacgcattaaccgacgtcccggcgaaaatggggcgcgccgcgaaagccaccattggtgatttggtgtatgcgattctgctggataacccgaaactgtccgacggcaaaccgctgttccatgccgatcacaaaaacctctcctctggcgccatatcggtttcgagcattgatgatgcccgcaaactgatgcgcctgcagaaagagggcgagcgcactctgaatattcgtccggcttatatgctggtgccggtggggctcgaaacgctggccaatcagacgattaaatcggcaagcgttaagggtgcagatatcaactccgggattaacaaccctattcagaattttgcggaagttatttctgaaccgcgactggaccacaaggatcctaacgcctggtatctggctgctgctaaaggcaccgataccatcgaagtggcatatctgaacggtgttgatacgccttacattgaccagcaggaaggtttcaataccgatggtattgctacgaaggtacgcatcgatgcgggcgtggcgccgttagacttccgcggtctgacgaaatccactggtaagtaa

SEQ ID NO: 218697 - DNA, 1503 bp, Klebsiella pneumoniae
atgtctttacttgatgatgcgataggtgtcatttctcccggctggaaggctgcgaggctaagatcccgcgccatgatacaggcatatgaagccgttaagcccacccgtacccacaaagcccgaagagagaatcgttccgctgaccagctcagcaagatgggggccgtctctctccgtgagcaggcgaggtggcttgataataaccacgatttagtgattggcattttcgataagcttgaagagcgggtggtaggtaaaagcgggattatcgtggagccgcatccgaagctcaagaacggcaagatcgctaaaaagctggcggcggatatccggcagaaatggggggaatggtctattcgaccggaagtgacccatcagtttacccggcccatgctggagcgcctgatgttacgcagctggttgcgcgacggggaggtttttgcacagatcgtcagcggcacaggcaatggcctgacgcctaccgccggggtgccgttctggctggaagcgcttgaggctgattttgttccccagaccagcaacgagtcagacaagctaaatcagggggtatataccgataactggggcaggccaaagggctatctggtctataaaagcctgccggtctctggcaggcaactggaaacgaaacgggttgatgcggaaaacatgctccacctgaagtttgtccgccggctgcatcagacgcgcggaacgtcgcttttatccggcgttcttatgcgtctcagtgctctgaaagagtacgaagatgctgaactgacagcagcacgcatcgccgccgcccttgggatgtatatcaaaaaaggggatgggcaaagctgggatgaaaacgccggtaaggatgatgatcgtgagctgaatattcagcccggcattatctacgacgacctgctgcccggcgaggatatcggcatggtcaaatccgatcgcccgaatcccaatcttgaaaccttccgcaatggccaactgcgagctgtgtctgccggcagccgtctgagtttttccagtaccgccagaaactataacggcacttacagtgctcagcggcaggagctggtggaatcgacagacggatatctcattctccaggactggtttattggcgccgtgacacgtccgatgtatcgcgcctggctgaaaatggcagtcgccagcggcgagatcaccttaccgcgtgggctggatgttgagtccttatacaccgcggtgtattccggccccgtgatgccatggattgatcccgtcaaggaggcgaatgcctggaaggctcaaatccgtggcggtgcggcgacggagtcagactgggttcgcgccagcgggcgccatccggatgatgtgaaagcgcgccgcaaggccgaaatagacgaaaaccgtgagcaggggctggtatttgatactgatcctgccaatgacagaggaggcaccagtgccgatgccaaagaaacgggcgtatcaacgtccgaaagccagcgtaaaaagtaa

SEQ ID NO: 218698 - DNA, 213 bp, Klebsiella pneumoniae
gtgaataaaagtgatattgaggccatgatccagcgctatgccgaagcggagatggcggtactggatggcaaatccatcaaatttaacggtcaggaaatgaccatggaaaacctgtccgaaatccgtaaagggcggcaggagtgggagcggcgtctttcttccctgaataatcagcgccgggggcggcctggctacaaactggcgaggttttaa

SEQ ID NO: 218699 - DNA, 2103 bp, Klebsiella pneumoniae
atggcaaagcgggcatccgccagggggatccgtcgggatgtctccggaattttacgcgcgccacgccgcatgctggttgccgacgcggtggctgagtatatgcgtgtaccaatgggcgccggtaactcggtcccgtgggatcctaatctggccccttatgttatcgagccaatgaattgcctggcgtcacgcgagtatgatgctgtggtgtttgtcggcccggcacgaacgggtaagacgattggcctgattgacggatggatcgtatacagcattgtttgtgatccggcggatatgcttgttattcaggtatcagaagaaaaagcgcgtgaacactcgaaaaaacgtctggaccggacattccgatgcagccctgaagtaaaaaccagattgagtccgcgtcgtaacgataacaacgttcacgatcgtactttccgcgctggtaactatctgaaacttggctggccctcagtcaatattatgtcctcgtcggactataaatttgttgcgctaaccgactacgaccgcttcccggaagacattgacggggagggggacggattctcgcttgcctccaaacgtactactacgtttatgtcttcgggtatgaccctggtcgaaagctcaccgggccgcgacattctcgatacgaaatggcggcagagttcaccccatgaagcaccgcccactacgggcgtgttgtcgctgtataaccgcggcgaccgccggcggctttactggccttgcccgcattgtggggaatattttcagcctgaagttgccaacatgacgggctaccgcgacacgacggacctggtcacagccagcgaagcggcctatctgcaatgcccggcctgcaaaggaaaagtgcttcctgcgatgaagcgcgagctgaacatgaaaagcgtctggctacgtgacggacagtcaattgatcgggatggaaacattacaggggagggccggcggtcacgcattgcttctttctggatggaagggcccgcagctgcttaccagacctggtcacagctaatttataaatatctggcggctgaacaggaatacgaaaaaaaccaaagcgaagagacactaaaaacggtcgttaacactgactttggtcgcccttatctgccgcgggcgagtaccgaacaacgtaaaagcgaattgctcgaacagcgggccgaggatgtcccgaaacgttgtgtgcctgatggtgtttgtttcctggtggcgactgtcgacgtgcaggggggacgtaatcgccgctttgtcgttcaggttactggctacggaagcatgggcgaacggtggctggtggaccgttacaacattcgccagtcactccggtgcgacgcgaacggtgaaagcctgcctatcgacccagccagttacccggaggactgggatctgctgctgactgatgtcttttacaagacgtggcgaatggcatccgatccccgccggtgtatgcgcctgatggcaatggcagtcgattccggcggtgaagatggtgtcaccgataatgcctaccgattctggcgtaaatgccgtcgggagggaattggccggaatgtttacctgtttaaaggtgacggtcatcgacgcgaaaagctgatcactcaatccctgccagataacaccggccgttcggcgcgccgggcgaaagccgcgggggatgtcccgctatatctgctgcaaaccaatgacctcaaagaccgggtaaacaatgccttgtggcgcgaaacaccggggccgaattacatccatttcccgaagtggctgggaagctggttttacgacgaactgacttatgaggagcgtgattctgatggcaaatggagtaagccagggcgcggcgccaacgaagcttttgacctgctggtttacgctgatgcgctggttatccttcgcggatacgaaaaaattaaatggcctgatgcgcctgaatgggcgaggcgggaaacgtggatggagaacgtgccgcaggaaactggcgaagaagcacccccggcgccagcgcctgtccagaccaaaaagcgaaaacgcaaaaaaaccgtaacagatgacgctaacccatgggccacatcaggaggctggttgtga

SEQ ID NO: 218700 - DNA, 489 bp, Klebsiella pneumoniae
atggatcaggaaatcgcttctctgaagctgaatatcaatcagctggcgggcataacaaatgtccaccgtcagacggtggccgccaggttgaaaaatgtcgagccggcgccgggcagcaacagcaaactaaaactgtatttagttaccgacgttctgactgagttaatgattcccacggttgcaacaaatcttgaggacatgccgccggctgacaggctggcgcactggaaagcagagaacgagcggatcaagtttgagcaggatacggggcaactgatcccggcagatgaagttgccagggagttttcagtaatggcaaaagctgtagtgatggtgctggaaaccctccctgatgtactcgagcgcgattgtgcgcttccaccagcagctgtttcccgtgttcaaagtgtgatcgacgatttgcgcgaccagatggcccagaaggtcatggaagccgaagcagaggaggacgagccagaggaggactga

SEQ ID NO: 218701 - DNA, 420 bp, Klebsiella pneumoniae
atgtttaaccgtaatgatctaaccctcacactgttctatgcatccagcacgagtgatgaggggagtaaagtcgcaatgttcactgtgcaggtaaacaatacagacatggtgtctgtgcagagcaatacgctgcaatgcattactgacaagtctggtaagaagggttattccgttggtgaacaaacgataagcaatggctcagatccactgttgattgctctcgaaaactactggcgagtgaataccgaggccgtcgttaatggattgatggcagatgtgagcgactttatcgcgggtaacgtcagccagtcctctacatacctaggattcagtggtctgaagatcttcaacaatgtgcctttggtggaacgtatccctgaaagtgtattgcaggccgacggcggcgcgtctgcaggctga

SEQ ID NO: 218702 - DNA, 309 bp, Klebsiella pneumoniae
atgaagagcttaaaaattgaatacgtagacgggaagctggtggctctcgaacgggatggtaaatcctacatggatttgccggtaagcgcggttcacttcacacacagtatgaaaactaacccgtatctcaaggttgagattgaggctggtggtgagccatatgtgccggcagaaccagcgcagccaccagcggccgccgaaaaaacggtgacagtgaaagaaggagagcttatgcctcctgatgttagtgcatccaaggcagaacgccgttcccgtcatcgcaaccgtaaccgtaacaggagccagtaa

SEQ ID NO: 218703 - DNA, 255 bp, Klebsiella pneumoniae
atgctcaagcgcaaacagctgcagcgcgtactgctgccgctaatctctctgatagtgttatccagctgcgtcagcaggcaaaaaaccttgccacccgcctggacgccgcaagccacaccgcaagtcttgccgctaccgtcagaagcaaaacaaccggcgccaccgccggagtgctcgccgacatgcttggaaaccttgcagaagaagctcgacggtatgctgcaatcgctgacgaacgctacacagcaggaatga

SEQ ID NO: 218704 - DNA, 531 bp, Klebsiella pneumoniae
atgggaaacagagcgaaacttagtgccgcaatgctagccctcatggctgctggtgcatcagctccaacattgatggatcagttcttggatgagaaagaaggaaacagccttacagcgtatcgcgatgccagtcaggggatctggacaatttgccgcggggccacgcgtatagaaggtaagcccgtcactcagggtatgaaactgaccaaggccaaatgcgatcaggtaaacgcgatagagcgcgacaaagcgctggcatgggtggatcggaatatccatgtccctttgaccccgccacaaaaagtaggcattgcctcgttctgtccatacaacatcgggcccggaaaatgcttcccgtctacgttctatcagcggattaacgctggtgatcgtaaaggcgcatgtgaagcgattcgctggtggataaaagacggagggaaggattgccgggtgcgctccaataactgctatgggcaggtaacacgccgtgatcaggaaagcgcgctgacttgctgggggattgaccagtga

SEQ ID NO: 218705 - DNA, 237 bp, Klebsiella pneumoniae; identical to SEQ ID NO: 184524

SEQ ID NO: 218706 - DNA, 747 bp, Klebsiella pneumoniae
atgcgcattccgacatcgttgaagaagcaacctgtgatcgaggctgctttcgagttacgttacccaaaagatacccaagtttctgaaatagttccgggctttctttttcacgcattaggttgcaagaaaccagtaattagtttgccacctagccaaatcccaaaaaacgtaagggaagatgatgagcagttacattatgcacttgtttcacgcttagaagttgaagattatttcattggtctcagtgatcatggcatcgttatatcaacctctggtgcttacaagggctggacacattttaagtcaatgattctaaaggttttagtggaacttgataagctacaccttaataacaacattagtagatactccatcaaatatgtcgatttctttgaagcaaaagataatgacaatctatttccaaagctcaacattgatgtagttatggctggggaatcaatgtcatcttatccattaactcttcgtttagataaacctcatcagagttttgatattattatacaagttgtaagtcatgcattggtattagcaaacaatgagacatataatcgcaatggtttaatattggatatcgatacaatcaagagaatacaagatgaatccgagctaatatcttttaatagcgatcgacaaagtgctcttgatcagattcacgaatgcaataaaataacatttttcagttgcattagagaaagtacattagaagaattagaaccagtatactag

SEQ ID NO: 218707 - DNA, 360 bp, Klebsiella pneumoniae
atgtctaatatttacagtaatacgactagttataaatctcacgctcaatttttaagttatcttatgtgtgggatttacattgcttcgatccccagcgaagctaaagataatcttctttctggtccaattcagcgtacgtcaatatctggctcacaaaacttgtcttcatataagcaactcatgccctcaactacgccaacgatctcactgtataaaagtgatgaaagcacctttaatgatgctaaattcgcctcagtcgtttcaaatttctatggcaccatgctctccaaccaaatcacattaggcaatgaaattgaatcagtgattgccggttccttatgggatatttatgtggactaa

SEQ ID NO: 218708 - DNA, 618 bp, Klebsiella pneumoniae
atgagcacgaatttttttaatgatgttgataaattcaaagatcagataccctattatttgacccaaccacaaaaagaaggtcttgttaaagcattagcagactttccggagggtataaactactatttgtcaaattatcctgttgatttaaaagcagcagctttgcaaggcgatgtttttaaaggattaactatttatggccctagaggaagcaaagaagcaaaagggataattttaagtaacagttgtgatattgacactaataacaagcgtgatttccctatgcgcgcagtttttgcgcccttagttaatttagccaccctagttgagagacttcaaaaagcaggcattccacaagacaaaattgacaccaaattagatgctatgaaaaaacaacttgtaacaaacattgtttatttaccaagttgtgacaccattcctgaaagcattatatttttagatgatgtgtatcaagtatcaacagaagaattacgtcaatctctcgagagttcgaataagattctgacattaagccaagttggtttttatattctacttttcaagctttcgattcatttctgtagattccatgaagatgttgcgcgttatgacaactaa

SEQ ID NO: 218709 - DNA, 348 bp, Klebsiella pneumoniae
atgaaagatatgtacgaaatcatggaccgttggggggcttgggcggcatccgacaatagtggtgttgactggcaatcaattgctgctggttttaaaggtttgttgcctcatggaaagaaaactcgtcttcaatgtgatgatgatgaaggaataatgatcgatggatgtgtagcaagattgcggaaatataaacaggaagagtatgagttaattatatctcattttgttatcggtatctcattgcgaggcatcgctaagaagcgcaaatgttcggatgggactataagaaagaatatggaaacagcgttagggtttattgctggagtactagctatattgaatgattaa

SEQ ID NO: 218710 - DNA, 1884 bp, Klebsiella pneumoniae
atgctcgaaaaagaaaaccctgaatttgtcaatcataattcccctacacagcgagtaggggctcctgctgtagatggctttagaaaaattacgcatcgcgtaccgatgttatcactggacaatgtgtttgaagagaaaggcttccgctcttttgattcgagagtgcagcagaaggcaaacgaaaaagtttcttattgttgtgagcttaaacttgatgggttagcgataagcattttttatgagaacggtcagtttatcagtgctgtgactaggggggatgggattcagggagaagatgtcaccgcaaatgttaaaactattaaatctgtcccccttgttttgcatggaaacaacattccgagacttcttgagattagaggtgaggtcattctttttaaaaaggaattcaataggttaaatgatatttcccgacgggatgggggaaagttatttgttaaccctcgcaatgcagcagcagggacactacgtatacttgatccagcaatcgtaagccgcagaaatttgtatttttactgttacggatacggtgttgttgagggcggctccctgccgagtggtcaatttgaaaccttacaattattcaaaaaatggaggatccctgttagcgatgatgttcgcctctatgaggatatcaatgatgtcatggactactataatcgtattgagctgcgtagaccctttatggcttttgacatagatggcgtagtgatcaaagttaatgaccgaactttacaggaaagccttggttacgtagcgaaagcacctaggtgggctgtagcttataaatttgctgcacaagaaaaaaccacccgtgtggttggagtagattttcaagttggtcgaacgggggccattactccagtagctagacttacacctgtctatgtgggaggagctactgtcagtaatgttacattgcataatgaggatgttgtcaggaatctcggcttaaagataaatgattggattatagtgcgaagagctggagatgtaattcctcaagtggtaaaagttattgaaaatcaaaatgatggactccctcgtaaagaaattgtcttcccgacccactgcccggtatgtcagtccgacgttgagcgagtggagggcgaggcggtagcccgctgtacgggcggccttatctgcggcgcgcagcgtaaagagtcgcttaagcactttgtctcccgtcgcgcgctcgacgttgacggcatgggcgacaagatcatcgaccagctggtggagaaagagtacgtccatacgccggcggatctgttccgcctgagcgccgggaaactcaccgggctggatcggatggggccgaagtccgcgcaaaatgtggtcaatgctttggaaaaagccaaagagacgaccttcgcacgcttcctctacgctctgggtattcgcgaggtaggcgaagcgacagcggcggccctggcggcgcatttcggcactcttgaagccctggagcaggcttccattgaggagctgcaaaaggttcctgatgttggcatcgtggttgccacccataccttcaacttctttgccgaagagagtaaccgtgatgtcatcgcgcagctgctggccgaaggcgttcactggccggcgccagtcgtggtgaaggcggaagagattgatagcccgtttgcgggtaaaaccgtggttctgaccggtagcctgagtcagctgtcgcgggatgatgccaaggcacgtctggtggcgctgggggcgaaggtagcgggcagcgtgtcgaagaaaaccgatctggtgattgccggcgaagctgcgggctctaagctggcgaaagcgaaggagctgggcattgaggtgattgacgaagccgaaatgattcgcctgctgggagaataa

SEQ ID NO: 218711 - DNA, 510 bp, Klebsiella pneumoniae
atgggtttgtttgataaattgaaatctctggtttctgatgacaagaaagacaccggaacttttgagattattgctcccctttccggtgaaatcgtcaacatcgaagacgtgccggatgtggtttttgcggaaaaaattgtgggcgatgggattgccatcaaaccgaccggtaacaaaatggtcgcgccggtagacggtaccattggtaaaattttcgaaaccaaccatgcgttctctattgaatctgatagcggcattgagctgttcgttcacttcggtattgataccgttgaactgaaaggcgaaggcttcaagcgtattgctgaagaaggccagcgcgtgaaagtcggcgacccggtaatcgaattcgatctgccgctgctggaagagaaagccaagtctaccctgacgccggtggttatctccaacatggacgagatcaaagagctgatcaaactgtccggtagcgtgactgtgggcgaaaccccggttatccgcatcaagaagtaa

SEQ ID NO: 218712 - DNA, 708 bp, Klebsiella pneumoniae
atgcgggtccattttattgttcatgagcattttgaagcgcccggcgcttacctgacctgggtgcaaaagcatggctattccaccacctggtcgcggatttatgccggagatccactgccggcaaacgcacacgattttgatatgctggtggtgcttggcggcccgcagtctccacgcactacgctggcagaatgtccctactttaatgcgcaggcggaacagcggctgatcgctcaggccgttcacgcgggtcgcatcgtggtgggtatctgcctcggctcgcagctgattggcgaagcgctgggcgcgccggtgatggaaagtccggaaaaagagattggccattatccgctgacgctaaccaccgccggactgatggatgacaaaatcgctcacttcggccataccgtagtggttggccactggcataacgatatgcccggcctgaccccaacggcggaagtgcttgcctccagcgaaggctgcccacgacagatagtcaaatatggcgaacgggtctacggtttccagtgccatatggagtttgatactgcggtaatcgaactgctgatcgccaattcacagcaggaacttaacgccgccagaggccgtcgttttgtccgtcgcgaagaggaaatgcgcacctgggactatcgagagatgaatcagaaactctggacatttctcgacaaactgacggaaaaataa

SEQ ID NO: 218713 - DNA, 375 bp, Klebsiella pneumoniae
atgaaaagcattttctgcgcgctgctgacactgttactctcttttcccgttatagctaaacttaacgcctaccaggaagcgcgcattaatgcgatgcttgatgccctggcgcaaaaaagcgatctcatcttcgtgcgcaatggcgatgcccatacttgcgatgaagccgtggcacatctgaggctgaaattaagtaatacgcgcaaccgtatcgatactgcagaacaatttatcgataaggtggcatcatcatcctctgtcaccggcaagccttatatcgtcaggttccctggtaaaaacgatcagcaggcccggccgtacctgcataccctgatcgcccagacggataaaactgtgacggtggcggaaaaataa

SEQ ID NO: 218714 - DNA, 237 bp, Klebsiella pneumoniae
atgcatgatgtgctgacctgtggccgtcgttttcgcacgttcaatgtcgttgatgactttaaccgtgaggcgttgtcgattgaaatagatctgaatctgccatctccgcgagtagtctgtgtgctcgacatgatcgcggaaaaccgcggttatccggtcatgctgcgcatggaaaatggtccggaatttatctctctggcgctggctgaatggacagagaagcatacagtaaactag

SEQ ID NO: 218715 - DNA, 321 bp, Klebsiella pneumoniae
atggacagagaagcatacagtaaactagagcttatccagccgggtaagccgaaacaaaactctttcattgagcgttttaacaggtcatatcgtaaagaaatactcgatttttatctgttcagaacgctgaatgaagtacgtgaaatgacgggaaaatggttatcagaatacaactgtgaacgtccgcatgaatcgctgaacagtatgacactggaggaataccgacagcactataatttggctgaaactcaaaaaatgcacgggactaaaacgagtctatttacattgaggcttattgggtatataaatcttattgaatag

SEQ ID NO: 218716 - DNA, 1530 bp, Klebsiella pneumoniae
gtggtattcagtaaatttgcaaaaaagcaaaatgcggcactttttctaggtgctccagaagcagaagcagaatcgctgccgacttctaaagtatcattatttgatgtttatgaagatcatcacgatttgttcggtgaactgtcgaacgaaaaatttatcgttgtcggtcgaaaagggtgtgggaaaagtgcatttgctgagtatgcatacaccctatcaaaaggagatgcaaatctgttctgctcttttattcgacaagatgttgtcaatatggaaactcttgttcaaataggtgctgtcgaaggtaatgagtcacatagcaaagaatatttgttcaaatggttaatctatacacatatattgaaattattctttgaaaatgaagcatcccaggatgcaaaacaatttggattattaaaagaatttttgaagaaaaactctggatatattgatattgataaaggcgaaatattagagcttgtcaaaaaacataaatttgaagtcagcattgagcaatttaagagattttttaaagggaaatatggtcaggatgtagaaataaaggaatccagagctgcatattataaattactgcctcatttagaaagagttatagtttccgttttacaatcacctttgaatgtggagaatgaaaattcttatgtcgtattctttgatgacttagatattgggtttaatgcagaaaataaagactctgtagatacaattataaatctacttagaatatccaaatatgtcaataataatattttctccaaaaataacattccagccaaggcaattattttgattcgtgatgatgtcgaaagaatgctatcccccttgggggcagatattgcaaaattgttctctagctatgcaactagtctagattggtatcaagaagaattcctaaataaagacaaagagaatgaattgggtttaaaaaaactaatagagaaacgtgcaaagaatgcatttgtaaaatcatgtattcctatgagtaaatcatcagcatgggaaagtttagtaagtgaagaattcgcaccaaagtctagttttaagtacatttgtgatcatacatatttccgtcctagagacttaatattattttttaaaccgctagaaaccggaagatatgagataccattaaataaatatagtgtaaatggtttgttgggtcaatatgcttcggagttagttaaagaattaaataatgaactatcttcattttatagcacaatacaaatacaaaatatttttgactcattaaaattaatagacaagaagtataactgccagtacgagcaagctaaagaaatcatagaagacaactgcaatgagattgattctgagcttcttttagaagacttgtttaatagatccttaattgggacaatcgatcggggtaataactttgtgaaatttaaacataaaatttccaagaaagaggttgttgaatatagtattgataaaaatgcttatataattgttcatagcggtttgaaagtttacttacagaaccgatga

SEQ ID NO: 218717 - DNA, 378 bp, Klebsiella pneumoniae
atgttgactgacaccaggctgcgttaccttaagccgaaggagaaactctataaagttaatgaccgtgatggtctgtatgttgcggtcactccggctggaacgatctcatttcgttataactattcaataaacggaagacaggagaccgttacttttggccgctatggtgtgggagggatcacgcttgcagaagcgcgtgaacggctcaatgaagctaaaaaaatggttgccggtggaagatcgccagcgagggaaaaagccagagataaagcgcgtatcaaagatgcggagacttttggtgcatgggctgagaaatggttatgcggttatcaaatggctagaatttggacattatcgcagttagccatttatttttaa

SEQ ID NO: 218718 - DNA, 837 bp, Klebsiella pneumoniae
atggccgcaaatatcctttctcccgcgcagagcgggcggttctattatggctgcgccgctgtcgccgggctgctggtggggctggcgatcgtctactggtttccggcgctggccagctggtggccggcggatctggtgcgtgtctaccacgccatgccatatgttatgggattcggggtggcgagtgtcggggatatcccgctggcggcctacgccactttaacgctgtcgggcttcgtcatggccttttgccatcctggtcacagtaaactgcccatcgttgcctgggccgtgcataaccagccctcaccgcgggaaatggttgactggatcctgcgcagctgggtgctacagttcggttttctggtgatcattttctggcgtttcgcgtttatggggaagctaagcagcgacaggctaatgcagattgcgggcatctgtaacgacgtttgctatctggccacgctggtactggcagggatcctgctgcgcgacagctggcgcggcgttaaaggcgttgtcgcgccggcaggtaacattcgcttaccgctgatctttgccctgagcttttatctgccgtttcagttgatatggattttactcagtgcgcagcagtatgaactgcccctgtggggatggctgctgctggccccggcaatggtaggcgtgttgctggcccggctggcgacggtagggatagcgctgtgtctccagcgctggctggggcaacagggctgtctgcgctggcgcggaccgctggccctgtttagcggcctgacggtgctgtgcatcggcggcaatgcggtgattcgccagatcctcaacatgataaaatga

SEQ ID NO: 218719 - DNA, 981 bp, Klebsiella pneumoniae
atgtcagtgatttttaccccgcgcgcgcgatcctcgcgctggaaagcgctgtggccgctggcgctgttgctggctgtgagcatcatcggcggtatttggctgtggcaggcgtggccgcaggtgctgatgcagagcgctgtctggcagcgttcgctgaatctggaactcagccgtctgctgcaggcggtggcggagaacccggcagcggcggggctgtcgctgctcgggttcagtttcgtttatggtgtgctgcatgccttagggcccggccatggtaaaattgtcattactacctggctcgccacccatccctcgaagctgaaatcgagcattaacctgacgctggccgcctctttattacaggggctggtggccatcgtgctggtggtcgtggtgctggcgctgctgcagctgccggcacgccagctgcatctcagcagtttctggctggagaagggcagctatctgctggtgggcgcgttaggtttgctgctgtgctggcgggcgctaaaaaagttgtgtctgctgctgagtcggccaacgtttaccgcttttaccccgcatcatgttcatcacgagcactgtggctgcgggcaccagcatctcccggcgccggatcagcttcagagcggcgacgactggcgggcacgcgccgcgattgtcctgtcgatgggcatgcgcccctgctcgggggcaattatggtcctgctgttcagcaaggtgatcggggtgttcagttgggggatggcggcggcgctggcgatggcggcgggaacctcgttgaccattaccgcgctggcgttgctggtgcacagttttcgccagctggcggtgaagctgggccagcatcagacgccaccgctgtggcgccaggtgggctggctgacgctggcgctggccggaggcgtctttttgctggtggcggcaggggtgatgtgggtcagtgctgtcccggccggcggtgggatccgcccgttttag

SEQ ID NO: 218720 - DNA, 1581 bp, Klebsiella pneumoniae
atgaacgcaaacttgctatcacgccggtttatcgccaggcttatctgcctcgcgacgctgttattcgcccctttcctgcttgcggcggaggcggaaaaagcgccgccgttagcaagcgaagacaatacgctgtcgatccacatcgacgatatgctgcagccatggaaaggcgatctgcccggcatgaccgagcggcgtaccattcgggtattaaccacctacagcaaaaccttcttttttattgataaaggcactcagcgcggagcaacgcacgacatctttatcgcgctggaaaacgatctgaataaacagctggcgaaggataaaaagctcaaacagcgccacctgaagctgcatatcgtttttgtgccggtcagtcgggataatctcttcaccgcgctcaatgaaggtaaaggcgatattgccgccgccaacctgaccatcacgccctcgcgggaagcccaggtcgatttcgcccagccgctctacagcaacgtcaaagaattactgatctccggcccggcatcgccgaaggtcgacagcctggagcagctttccggtcaaaccgtctttgttcgccgctcctccagctattatgacagcctgcaggcgctgaacgcccgatttgcccgtgagtcgcgcccaccggtgatactggaggcggcgccggaagcgctggaggatgaagatctgctggaaatgctcaacgccggactggtgccattgatcgtcgtcgatcagcataaagcgatgttctggaaacaggtgtttccaaaaattcagatccatgacaacgtggtgctgcgcgacggcggtaacattgcgtgggcggtacgcaaagacagcccgcagctgctggcggtgctgaacaactttgttaaaaagaaccgtcagggcaccacgctgggcaataccctcctgctgcgttacctgaaaaatgccagctatgtcaaaaatgccgcggcgagtaaggagcggcgcaagttcctcgccatggtggaagtcttccgcaaatatggcgatcgctacgatgtcgactggctgctgatggcggcccagggataccaggagtcgcggctgaaccagtcggtgcgaagccacgtcggggccgtcggggtgatgcaggtgatgcccagcaccggaaaagagctgaaagtgggcgatattaaacagctggatcccaacatccatgctggggtgaaatacatgcgctggatgatagatcgctactatgccgatgagcccatgacccggcttgataaggcgctgtttgcctttgcctcctataacgcgggtccggcacgtatcgcccgcctgcgcaccatgactaaacagcgaggatttgacccgaacgtctggttcggtaatgtcgaaaatctggcggcagaaaaaattggcgccgagacggtcacctacgtcagtaatatctataagtattacatcgcctatcggctgatcgtcgatgatatggcccgcaaacagcaagcgacggccgtaccgcggcaggagccggtggcgcagccagccaaaccacagcccggcgtggcgacgcccgccaccgctaaggtgcccgtcatctga

SEQ ID NO: 218721 - DNA, 714 bp, Klebsiella pneumoniae
atgcgcaaacttactctcgcccttgcggcggcttctctcctgttcacgctgaacagcgccgttgtggcgcgcgcctccacgcctcagccactgtgggtgggcaccaacgtggcccagctggccgagcaggcgccgatccactgggtttcggtggcgcaaatcgagaacagcctgctggggcggccgccgatggccgtcggctttgatatcgatgacaccgtcctcttctccagtccgggcttctggcgcgggcaaaaaaccttctcccccggcagtgaggattacctgaaaaacccgcagttctgggaaaaaatgaacaacggctgggatgaattcagcatgccgaaagaggtcgcgcgccagctgattgcaatgcatgtaaaacgtggcgatagcatttggttcgtcaccggccgcagccagaccccaacagaaaccgtttctaagactctgcaggatgatttcctcattccggccgccagcatgaatccggtgattttcgccggcgataagccgggccagaacaccaagacccagtggctgcaggcgaagcagataaaggttttctacggcgattcggataacgacatcaccgccgcccgtgaggccggcgcccgcgggatccgcgtgctgcgggccgccaactcctcttataagccgctgccgatggccggggcgctgggtgaagaagtgatcgtcaattctgaatactga

SEQ ID NO: 218722 - DNA, 1194 bp, Klebsiella pneumoniae
gtgtttcaaaaagttgacgcctacgccggcgaccctattctttctctgatggaacgcttcaaagaagatccgcgaagcgacaaagtcaacctgagtatcgggctgtactacaacgatgacggcattatcccgcagctgcaggcggtggcggaagcggaagcacgcctgaacgccggaccgcatggcgcctcgctgtatctgccgatggaagggttgagcggctaccgtcaggcgattgcgccgctgctgtttggcgcagagcattccgcgcttaagcaaaatcgcattgcctccattcagacggtcggcggttcgggcgcgctgaaggtcggggccgacttcctcaaacgctactttccggagtctcatgtctgggtcagcgatccgacctgggaaaaccacatcgccatctttgaaggggctggcttcgaagtaagtacttacacctggtttgatgaagcgaccaacggcgtgcgctttgcggacctgctggcgagactgcaaacgctgccggcacgcgacatcgtgctgctgcacccctgctgccacaacccgaccggcgccgacctgacgccggagcaatgggaccaggtggtggagatcctgcaagcgcgtcaactgatcccgttcctcgatatcgcctaccagggctttggcgccgggctggaagaggatgcgtacgccattcgcgccatcgccagcgccgggatgccgatgctggtcagcaactcgttctccaaaattttctccttgtacggggagcgcgtcggcggcctgtcagtggtttgtgaagacagcgaaaccgcaggccgcgtgctggggcagctgaaggctaccgtgcgccgtaactactccagcccgccgagctttggcgcgcaggtggtggcgacggtgctgaacgatgcagatctgaaagccacctggcaggcggaagtggacgccatgcgcgcgcatattctgactatgcgtcaggcgctggtcgacgcactgctgcaggtagctcccggcagcaaagtcgattatctgcttaagcagcgcgggatgttcagctataccggcttcagtgcggcgcaggtggatcgtctgcgcgacgagtttggtgtctacctgatcgccagcggtcgcatgtgcgtggcggggttaaactcacgtaatgttcagcaagtggcgaaagcctttgccgcggtgatgtaa

SEQ ID NO: 218723 - DNA, 177 bp, Klebsiella pneumoniae
atgacgaattttcagtacgatggcctggtcattctggccattgcggtaggcctggcactggcaggcctgatttgtctgttatttttttcgttgaaagcagggtcaggcagaaaattttttatatttatctgcatgataatgcttatgttcctggcgctggccgtcatcggtagatga

SEQ ID NO: 218724 - DNA, 984 bp, Klebsiella pneumoniae
atggcaacacgcatcgaattttcgaaacacggggggcctgaggtgcttcaggcggtcgagtttacccctcgcgatcctgcggaacatgaaattcaggtcgaaaacaaagccatcggcatcaactatatcgacacctatgttcgcagcggcctctatccgccgccgtcgctaccgagcggtctgggcaccgaggcggccggcattgtcagtaaaattggccacggggtgacgcacattaaagttggcgatcgggtggtgtacgcccagtcggcgctcggcgcctacagcacggtgcacaatgtgctggccgacaaagccgcagtcctgccggatgctatctctttcgaacaggccgcggcatcgtttcttaaagggctaacggtctggtatctgctgcgcaaaacctatgaaattaagcctaatgaggtgttcctgtttcacgcagccgccggcggcgtagggctgattgcctgtcagtgggcgaaagcgctgggcgctaaacttatcggcaccgtcggcagcgcgcagaaagcgcagcgtgccaaggaagctggcgcctggcaggtgattaactatcgcgaggagtctatcgtggagcggctcaaggcgctcaccgacggtaacaaagtggccgtggtttacgattcggtggggaaagatacctgggaggcctcgctcgattgtcttcagcggcgtgggctgatggtcagcttcggcaattcatcgggcccggtgaccggcgtcaatctggggatcctgaatcaaaaaggctccctgtacgtcacccgcccatcgctacagggctatatcaccaaccgggaagagctggcggaagcctgcagtgaactgttttcgctgatcgccagcggggtgattaaagtggacgtccccgagaatcagacctacccgttgagcgaggcccgtcgggcgcatgaagttctggaaagccgggtgactcaggggtccagtctgctgctgccgtaa

SEQ ID NO: 218725 - DNA, 510 bp, Klebsiella pneumoniae
atgctaaaaattcgtaccgcactggcagaggatgcggctttgctcaacgaaatgggtaatgccagctatcgccatcactttgctcaccactggcataacgccgatgagctggcgcattacctgcaacaagagtattccctggcctctttgcaacgtagcctgaccgattcgcagtgctgttggttgattgctgaagccccccaccctgtcggctttgctaagtacacctgttgtcaggcgttgagtgccgaaggtccgtccggcacgctgctgcacaagctctatctgctgccgggtgagaccggccaccgctacggcgagcagatatttcacgccgtcgagacgcgagcaaaaacggccggtgaaagctggctgtggctggaggtactcgctgataatcccgccgcgcgccgtttttaccaacgccaggggatgcagcacgtgaaagatgtcacctttcattccgccagccagcaaagcaccttacatattctggccaaaccaatctga

SEQ ID NO: 218726 - DNA, 339 bp, Klebsiella pneumoniae
atgaatcgtaagagtgtggatggtatccgtcatgtgacctctgaagagagcaatatattcagtgaactgggctttgatgatgctgacgcagagcagcttcggggacaagcggaaaaagaagttgagcagttgatagcgcttaaacgacagttaatgcaggaaatcgctgagtggatagatgaacatcaattgaagcaggccgatgctgccgcgaagttgagcatttcgcgcccgcgtatttcagatgtggtcaaccagaaaaccagtaagtttaccctggatgcgttagtcatgatgttaatgaagttaggtaaaccagtacgtttgcagattggataa

SEQ ID NO: 218727 - DNA, 363 bp, Klebsiella pneumoniae
atgctcaatcagcaacagagattaaggcgtatcgtctggatgggctcttcctttgacgatctgcgccagtttcctgaggatgtccgcagagatgccggattccagctttatcgtttacagtcgggtttagaggctgcggactggaaagcgatgcctcaactggggcggggcgttgaagaaatccgcctgcgccacttttccggtgcatatcgggtaatttatctggcccgttttgcagaggcgatatatgtcctgcactgttttaacaaaaagacgcggcgtaccgccgaacacgaaaacagattgtcagaagccgtttgcaggttatacagcaggaacacaggagtcataaatgaatcgtaa

SEQ ID NO: 218728 - DNA, 165 bp, Klebsiella pneumoniae
atgcgccgctgttttgtcgggtggcgcttcgcttacccgacctgggattcgcgcaacctgtcgttaatttattcaccagtcttgctgaaactgccggtgctggcggcctcaacatcgctgagacgttcccggaaggccggggcagcccgcatggatgcgggctga

SEQ ID NO: 218729 - DNA, 1257 bp, Klebsiella pneumoniae
atgggttctttaaataaagagccacggactatatttggcttaagaacagatttagtctggggacttgtcggtgttttgctatttattgtcggcgatggtgttgaacaagcatggatctccccttatcttattgagcgcggaatgaccatgccgcaaagtgcaacgctaatatctatctatggtatcgcggttgccgttggcgcatggctgtcaggcgtttttgccgaggcctgggggccaagactgacgatgcttatcggcgccggggcatggctgctcggccaggtgctgttcctgtcaattgcgcttccaacaatgagctttgcgattctaatcccgacttactgtattcgtggtttcggctatccgctattttgctattccttcctggtttgggtgacttataaaaacccgaaggagacgctgggcgccgccgtcggttggttctatcttgctttcaccggcggcctttatattgtcgcgaattcctatgcttcactcatgatcccgatcattgggcatgtgggagtcctgtggagcgccatcgcctgggtcgtgctgggaacgattatcgttcttctgtttgtcaaaggtgcgctgcgtgagaaagcaccgttcaaagaacaactcaaaattctgcttagtggcattactatcatgaaagacaacccccgcattggtattggcggtgtggtgcgtatgattaacgggatatcacaatttggccttcccgtcttttatcctgtttttttgcgccagtttggcttctctaccgaagaatggttaaaaatctgggcggttgccttcggtgttaacattatctttaatctgatctggggcgtggttggcgataaaattggttggcgcaggactattcagatctttggcggcttcggttgcggatgtaccatgctgttgatggcatacgctccagtctggtttaccggcagctttgtgctaatggcgacagtgtcaggtatttatggcgcattcctcgccggattctgcccaatttccgcattggttccttctcttgaaccaacgcgtaaaggtgcaaccatgtcagtactcagcctgggcgctggtctggcaagttttgttgggccggccattgtcgccctttcctttacttcaattggtgccaatggcgtactgtatatcttctcgatcctctactttctcagtattccacttaccggattcctgaaagaaaaaaaaactgaacaatccccgttaaacgaagctaaagaatattaa

SEQ ID NO: 218730 - DNA, 798 bp, Klebsiella pneumoniae
atgaataccgaatttaaaaataaaacagtcgttattaccggtgcagcccaagggattggcgaagggattgcaattcgctttgctaaagctggcgctaatctggtcattggcgattattctgacaagatcaccgccaccgccgaccgcattcgtgcagaatatggcgtcaacgtgattccttttaaagttgatgtcactaacgaagaacaagtcgttgccttatataagctcgccgcagacaacttctcaacagttgatgtttcagtacaaaacgcaggtattattaccattgagcattttgacaaaatgacgcgcaaagagtttgacgatgtcctacacgtcaatacgaccggtgtttggctgtgctgccgtgaagcggctaaatatatggttaaacaaaataaaggctgcctgatcaacacctcatccggccaggggcgcaacggatttattttcactccgcactatgccgccagtaaaatgggcgttatcggtattacccaaagcctggcactggaattagctaaatataacattaccgttaacgccttctgtccggggatcatcgaaactgaaatgtgggattacaatgaccgcgtttggggtgaaattctgagcacgccggaaaaaacctataaaaaaggcgagctcattcaggaatgggttgaaggcattccattaaaacgtgcaggaactccggatgatgtttccggattggtttatttcctcgcttcgaaagatgcggcttacattactggccagacaattaacgtcgatggcgggttaattatgtcttaa

SEQ ID NO: 218731 - DNA, 1518 bp, Klebsiella pneumoniae
atgtcagccgtaaaagagataattattgcccttgatgagggaactaccaacgccaaagccgtcgccctggatggtatgggcaacgttttgtgtaaattctcacaagcgctttctatccaaacaccacgcgagggatggatagagcagtccggtgagatgttaatcgaagcatcgattaacgttattgcacaagcgattaactttgtcggcgcagaaaatgtagccgctttagctatcagcaatcagcgggaaactgccattggctggtaccggggcaatggcaaaccactgaactcagcgattacctggcaatgttccagaactgccgactactgcgacagcatgcgaaaagatcatctggaacaaaaagttaaatccattaccggcctgcctattgcacctctcttctctgcgtccaaaatgcgctggctactggacgccatccctaacggctactcactcgcggaaaaaggtgaaatttgtctcggaaccattgacgcctggctgttatggaattttaccggcggagagtcctttgcctgtgactattccaacgcatcaaggacgcaattactgaatattcacagcgggaaatgggatccggaaatgctcgctatttttcaaatccccgaaatcgctctgccacaggtacaaccatccagtagccatttcggcgtcacgaagggcctaaatggtatcccagacaatatcccaatcctctcaatgatcggtgattcccacgccgcgcttttcggtcatgcactcggtcaacttggctgtgtgaaagcgacctatggtaccggttcgtcagtcatggcaccggtgaaatccgcacagtgcgatatcgattccttagcgacgaccatcgcctggcacgacggtaaacgcatcgtttatggactggaaggcaatattccgcacaccggggatgccatcgcgtggatggcggatagcaccgggttaagcgaactacccgacgatgaattatctcatgagttaaataccctacccgcctccgtggaatcaacgatgggcgtttattttgtcccggcgctcaccggtcttggcgccccctggtgggatgaaaacgctcgaggagtcatttgcgggctgagccgcggcgtgaagcgcgcgcatctcatacgtgcagccttagagtccatcacttatcaaattgccgatgttgttgtcgctatgcgccagcattctgactttaccatcagtgcgctcatggttgatggcgggccaacgaaaaatgactggctgatgcaatatcaagctgacctgcttggttgcccggtcatgcgtagcgacgttgccgaactttcggcaattggcgccgccttattagccagaaaagaactaagtggatcgacgtctgacgacctccgtcctcttctcgcccaacacagtgaatttcgcccaaatatggagcgacatgggcgtttgcaaaaacgctggcgcgaatggcagagcgccgtcgaacgtacgttatggaaatctggtttaaataaatga

SEQ ID NO: 218732 - DNA, 609 bp, Klebsiella pneumoniae
atgcctgtgagctttaaggcgctgattttcgatatggacggaactttgtttgataccgagcctttgcaccgcaacgcctggagagaggctttcgcgccgttcaatatgacctttgaggatgaggatttcatcccctacaacggctcgtcaccggtgaacgttgcctgcgcgcttatcgcatcacgaaaactaaacgccgatcctgtagccatcgcaacacgcaagaagtctgcagtggagcgcatgctccgtgacgatcccgtcgcttttctaccggccgccacactactcgaacgatatcacgccgattttcggattggcctgggcaccggtagcggggcaagtaccgcttcaaccttactcgggcggttcagttttttaaaacactttcaggcaatagtcagcgctgatgacgtacttcaccctaaaccacacccagatacatttacgcagtgcgccgcgatattgggcgttgcccctgcggaatgcctggtattcgaagactccgatttcggccttgttgccgcgcaacgcgcagggatgtcggtggtagatgtgaaagcaaaaacgttcgatgaactacgtcagtacttactgcctgatggttaa

SEQ ID NO: 218733 - DNA, 939 bp, Klebsiella pneumoniae
atgagtaatagcgaacatctcgccacggtgatggtgaatgcctttattgacgccgtggatcgcggcgtggatctggtgccagtggtagcggactcaacctccaccgccaaaattgcgccctttatgaagaagtatcctgaccggctggtaaacgtcggcattgccgaacaaacgctggttggcgccgcagccggactggcgcttggcggtaaagtcgccgttacctgcaacgctgcgccattcctgatctctcgcgccaacgaacagatcaaagtcgatatttgctacaacaacactaatgtcaagctgtttgggctgaattcaggcgccagctacggcccactggccagcacccaccactgtattgacgacatctcagtgctacgcggctttggcaatatcgaaatctacgcgccatccagccctaatgaatgccgacaaattattgattacgcgctgacccacatcggaccggtatatatccgtctcgacggtaaagcactgccagagctgcacgatgacgattaccgttttacccccgggaaaatagatgtgctacgccagggggatgatatcgcactcgtggcgatgggttccaccgttcacgaagcggtcaacgcagccacacagctggcagaaaagggcattgaggcgtcggtaattaatgtaccgtcaattcgcccttgcgacactcaccagttgctaacgctgcttaaatcacaccgggcagtagtcagcgtcgaggaacataacgttaacggtggcgtgggcagtctggtagctgaagtactagcagaagcgggttgcgccattccattacgccgtcttggtattgccaacggcggttacgccatggcggcggatcgcgcaacgatgcgcgcgcaccacgagattgacgccgccggagtagtgaaaaacgccacggcgctgtgtcagtaa

SEQ ID NO: 218734 - DNA, 351 bp, Klebsiella pneumoniae
atgagccagataaccctgaaaacccctgccccgacagaacagacggccagcagcccgctggcctggctatcgcgggccggatttggcgtcatcaccctgctggccatcgccctgtttggctgggcgaatccggtatttttaaccgtggataactgggccaacctgctgcagggcagcgcgatcctgctgattgtggcgatggcgatgaccctgatcgtcagcgccggggcgattgatctgtcggtgggcgttgcgctcgatttcggcgccgccttcgccctcgtcgccctgaaaacctggcatctgccgtggcaggccgcggtgggctgcgccctgcttgcggcgtgctga

SEQ ID NO: 218735 - DNA, 990 bp, Klebsiella pneumoniae
atgagtaccgctatcctgcgtcgcggccgtccgggcctggcgacgctgattgaaaaatttcccctgatcctgtttctggcgctgctggtatggctgagcgtacagtctccctactttctcagctggcaaaatatcagcctgatgctggtccagagcgttccgctggcgatcctctgtttcggcctggtctgcgttatcgccgtgggcggggatgacgtggtctccggcggcatcgacctctccctgccggcgacggcggtgctcggcgtcgcgctgctcagcctcggtctggccgaatggcacacgccgtacctcctgctgctggcgctgctggcggcggtttgcctgctctgcggggcaattaacggcttgctggtgctggcggccggcctgccgccgctgctggccaccctctcgacctccgtggcgtttaccggcctgacagatctgttgaccggccagcggcgcatcgcggtcagcgatccgctgatggtcgcctttcgcgataacagcgtgctgggcctgccctggccgctgatctatctgctgggggtatttatcctgttccagttcctgctccaccactcccgcttcggccagcatgtgcaggcggtgggcggcaaccgcgatatggcgcagatgagcggcctgaacgtgcgccgcctgaccctgctggtctggctgttagcgggcattgccgccgggctggctattctgccgctgctcagccagggctccggcagttccagcgggacggccacgccgctgctgctggaaaccgtgctggcgacctttatcggcgccgccttctcgcgccgtcgggtggtcaccatctggggggcgctgctgggggcgatcctggtcaatgccctctctaacgggctcggcctgctgggggtcaatatcttctggatgggcgccattaaaggcggcctgatcctggtggtgctggcggcatcggcggtcagacacaaaggaggcgaggcatga

SEQ ID NO: 218736 - DNA, 1551 bp, Klebsiella pneumoniae
gtgataaatcaacaccctggcggggagcgccccgccgcgggtctggtcatggaccagatcggcaaacgttttgccagcgtcaccgcgctcaatgcggtcaccctgcgcctgagcccaggggaaattcatggcctgattggcgagaacggcgccggtaaatcgacgctgatcaaaatcctcgccggcgtctatcaggccgacagcggcagcgtgacgctggacggtcacccgctgcccctcggcaacccggctgccatcgaagccgccggcatccgcgttatccaccaggagctgaacctgatcccgcattttaccgtcgcggaatcggtgtttctcggccaggagtatcgcacccgctggggggcgctggatcgccgacggatgaaggccgctacggcgcaatttttccagcaacactggcagttgacgatcgaccccgaacggctggtgcgcgacctgagcctggccgaacgcaagctggtgcagattgcccgcgcgctgatcgacggcgcggcgcggctggtggtattcgacgagcccaccgcgccgctggaggcgcaggaggccagtctggtctcctccgccatcctgcgcctgcgcgaccagggcattgccattctgtatatttcccactacctcaatgagatagccaccctctgcgaccgcggcaccgtgctgcgtaacggggaagtggtcggctatccggaccgcgacctgctgcagaacaccgaggcgctgatcgccatgatggttggccgggaaatcgaccagctctataccccgcgccagcgcccggcggcagacaccggggcggccccgctgctctcggtgcgccagctgagcgacgggcggcagctgcaggatctctcttttgatattcagccgggcgaaatcgtcggcgtcgccggcctgctgggcgccgggcgcgatgtgctggtcgacttactctacggcttacgcccggcggaacgcggtaccatccacctcgacggccggccgcggcgcatccgcacgccaaagcaggcgatccgcgccggcatggcgctggtgccgcgcgaccgccgccatcaggggctgatcctgcccttcaccaccgccgacaatattaatctcgcctcgctgccggagaccgccaccttgggctgggagcggcggggtctcgccgagcagaaagcgcgcgactggatagaacagctggcgatccgcccgggacgcccggggctgccggtacgctacatgagcggcggtaatcagcagaaagcgatcctcgcccgctggctggggaccgatgcccggctgtttattctcgatgaacccacccttggggtcgatatcggcgcccgtcgcgatatttatcaacggacgcgccagctggccgataaaggacgggcggtgctggtctcctccagcgacgccaccgaactgctcggactatgcgaccggatcctggtcctctggcgcggcgcgctggcggccaatctgcccacccgcgggctaacgctggacgccctgctggtggcgatcaacggcggacaggagccttcaccatga

SEQ ID NO: 218737 - DNA, 981 bp, Klebsiella pneumoniae
atgtcgcagaagagaaaattattgcctgccgcgctgggactgctttcccttgcctcgctgagcgtcactgccgcggacgccctctccttacagggaaaaaccattggcgttgccgtggtcggcactcagcatttctgggatcgcgaggcctttaaaggcgcgacagaggaagtggagaaactgggggggaaagtcattggcgtcgatggcggtcgcgataaccaggtgcatgccaataatcacgatattttactgtcacgcaaggtggatgcggtaattagtattctcggcgacagcgccgtcgaacccaaatttaaagcattgcgtgatgccggtatcccggtatttaccgtggatcatgtttcacaatattcagtcaacaataccacctccgataactacactttaggctcaaccatcggccgctatatggcggatgaattaggcggcaaaggcaacgtcgctgtatttaacgcattctccagcgcgctgcgtatttgcggcattcgttacgatcagtggaaatatgtccttaaggattatccggatattcatattatccagcctgagcttgcggaacagtttgccaactcaccggaagatgcgcggaagaaaaccctcgaattactcagtcagtatccgaaaggcaaactggacgccatccatgtcgcctgctgggatcaaccggccatcggcatcgtccaggcgctggaagagaccggtcgcgataaggacgtgaaagtaacggcgatcgacgccggtccggagaccctggagatcatggcagagcctggcagtccgttcgtggcgaacgtcgcgcagcagccgcatctgatcggccagacctctgccgacaacgtggcccgctactttgccggtcagaaactgccggtgcaaacctttatcccggtggtcccggtgaaaggtccgcaggaggcgaaagcggtgtataaacagttgggatacggcgaactgcagtga

SEQ ID NO: 218738 - DNA, 543 bp, Klebsiella pneumoniae
atgagcgcattaaccctattttccgtgaccgatccgcaaacaccgctctggcacagcaccgacgccaacgcgattcaggcgcagcttaacgccaaaggcgtccgcttcgaacgctggcaggccgaccgcgacctcggcgcaaatcccagcccagaaacggtgattgccgcctatcagcacgcaattgacaaactggtcgccgaaaagggctaccagagctgggacgtcatcagcctgcgcgccgataacccgcagaaagcggcgctgcgggaaaaattccttaacgagcacactcatggtgaagatgaggtccgtttctttgtcgaaggcgccggcctgttctgcctgcatattggcgacgaggtgttccaggtgctgtgcgaaaagaacgatctgatttcggttcccgcccacaccccgcactggtttgatatgggctcagaaccgaacttcaccgccattcgcatttttgataacccggaaggctggatcgcccaattcaccggcgacgatatcgccagcgcctacccgcggctggcgtaa

SEQ ID NO: 218739 - DNA, 300 bp, Klebsiella pneumoniae; identical to SEQ ID NO: 101412

SEQ ID NO: 218740 - DNA, 276 bp, Klebsiella pneumoniae; identical to SEQ ID NO: 56170

SEQ ID NO: 218741 - DNA, 588 bp, Klebsiella pneumoniae
atgaaattacaaacgcttttcctcgccgccatcaccgcgctggcgggctgcagcgcgcagggagataccgccagccagcagcgggccagcattcagaagatgcgcagcgaaacccttaataaactttacgccctgcagcctgaggcgcgcagcgacatccaacaggcgaaagggtatgcggtgtttgccaataacagcagcaagatcctgctgttcgggtttggcagcggttacggcgtggtacgggataaggccaccgggaaagacacctatatgaaaatggcccagggtggcgccggcctgggaatggggattaagcagcagcgcacggtgctggttttccatgataaagcggccctggagacctttatccgccagggatacatggttggcgccgatgcgaacgccgcggcaaaatatgatgacaaaggcatcgcgccgatcgccgcctccaccagcggcgtggcgtcagataccgcctccctgccctcgaaggtcaacgtctacgacctgaccgaaaaagggctggccgcccaggcaatgatcaatggttataaatactggccggatgctgcgctgaacccgtag

SEQ ID NO: 218742 - DNA, 1485 bp, Klebsiella pneumoniae
atgaacgcttttgcccttgaagccgaaggtatcagtaagttcttccccggcgtgaaggcgctcgataacgtctcattgcgcgtgcgtccgggaacggtgcatgccctgatgggcgagaacggcgccggtaaatccacgctgatgaagtgcctgatcggtatctatcgccccgataaaggatccattcgcgtgaaaggtgagccggtggagtttaccgacactatggatgcactgcgctcggggatctcaatgatccaccaggagctgaatctggtgccgcatatgacggtggcggagaatatctggctggggcgcgagccgatgaagtacggctttgtcgaccacggccagctgacccgccagacccaggcgctgctggataagctcaatatccgcttaaccgccgaccggctggtgggcgacctgagcatcgccgcccagcagatggtggagattgccaaagcggtctcgtggaacgcggatatcgtgatcatggatgagccgacctcggcgctgaccgaaggcgaggtggcgcacctgttcaccatcatccgcgacctgcgcgcccagggcaaagcgatcatctatatcagccacaaaatggatgagatctttgccattaccgacgagatcagcgtgtttcgcgatggcacctgggtggggagcaaaaacaccaccgaatttacccgccagtcgctgatcacccagatggtgggccgcgaattaacccagctgtttccgaaatttaataacaccatcggcgaagaggtgctaacggtgcgcaacctgacgcgccagggcgtgtttcatgacgtcagctttagcgtgcggcggggcgagatccttggcgtggccgggctggtgggcgccgggcgcagcgaggtgatggaaagcctgttcggtatggaacgcttcgacagcggcgaagtgctgatcgacggagcgccggtgaccattgattccccctcggtggcgattgaaaaggggatggcgttattaaccgaagaccgcaaaaagtcgggcctgtttctggtgctgtcggtgctggaaaatatgagtatcgtcaaaatgccggaatatatcggcaagagcggttttgtccagcacgtgaaaatggccgaagactgcatggagcaaattcgccggctcaatattaaaacgccgacgatggatcaaattattaataacctcagcggggggaatcagcaaaaagtcctgattgcgcgctggctgttagcgcaaccgaaaatcttaattctcgatgagccgacccgcggtatcgacgtcggggcgaaggcggagatttatcatctgatcagtgaactggcgaatcggggggtggcggtgattatggtctcctctgagctgccggaaatccttggcatgagtgaccgggtcatggtgatgcatgaaggccgtatcaccggcatcctggaaaaagacgaagccgaccaggaaaccattttgtcgttggcatcccattga

SEQ ID NO: 218743 - DNA, 1008 bp, Klebsiella pneumoniae
atgatctgcaaacgttttgccctgataggcagtggttttatcggtcaggttcatgccgccagtcttgcccgtcatgaaggaagtgcgctgacgatggtggccgatgccgccccggagcgcgcccaggcgctggccgcccgctatggcgcccgggcggtgacggtgagcgaggcgatccacagcgacgccatcgacgcggtgctgatcgccagctccaccccgtcgcatgccgaactgctggaagccgccgcccgggcgggcaaggcggtctattgcgaaaaaccgatcgacctctccctggcgcgcgcccgtgaggtggtggagcgggtgctccccctgaacgtgccggtgaccgtcggctttaaccggcgcttcgacagcagccatcagcagctccgccgccagctggagcaagggctgatcggccgggttgagctggtgcagatggtctgccgcgcctccagcatgccgccgctcgattatctgcgcagctccggcggccagatgcgcgatcaggcgatccacttcttcgatctcctgcgctttctcaccggcgatgaggtgtgcaccgtggcggcgatgggcgcggcgctggccctgccagacatcgccgaatttggcgatgtcgacacctccatcctgatgatgcagatgcgcggcggcgcgctggcgcagctggacaacacccgccgcaccggccacgggtacgatgaacggatcacgctgctgggcgccgaaggcgcgctggagtccggcagccagtcgccggcgggccctaccctgtggcgcggcaatcagcgcattgagccgggcctgtggccggactggttcagccgggtacagggatcttattaccagcatcttgacgcctttattcgttctctgaatggtgaaaccgtggccgatttgcccggcctgctggacggcctgcaggcgcaggccattgccgaagcggcggttcagtccctgcagcgcggccagtttgtcgccgtcgacgactgtcgctga

SEQ ID NO: 218744 - DNA, 1032 bp, Klebsiella pneumoniae
atgtttccctcacacttaccgaccccgcgccgcccggcggcgcagagcattccctccctgcgctggggcattatcggtcccggctggatcgccgagcgctttgttcatgcattgaaaacctacagccggcagcaggtggtggcggtggcctcccgcagccaggcgaaggccgagcgggtggctgcggaatgggggatcccccaggcttacggccatatggaggagatgctggcgcgcccggatattgatgcggtgtatattgcaacgccgcacaaccatcactttcccgacggcatgcaggcgctgaaggcgggcaaacacgtgctgattgagaagcccttcgcgctcaacctcggcgaagggcgtgagctgcaggccgaagccgcccgccagggaaaactggcgctggaagcaatgtggtgcgattacgcgccgaaatatgatgtgatccgccagctgctggcggatggggcgctcggtgacctgcataccctgttggccgatcacggcgagtatttcacccccgaccaccgcatcttcaatgccgaccttgccggcgggccgatgatggacctcggcagctatctgacctcgtttgcgctgatggtgggcggcatgccgcaggagattgtcgcccgcggcagcgccacggcggaggggctgaacggtcagacgtcgatgctgtttagctggcagaacgggatgcaggggatgttaaacacgacgttgttcagcaacacgccgggcggggcggtggtggccggacgtcaggcgaccctgacgatcgacggccagttttacgcccccggcggcttcacgctcgccgccagccagggcgggcaggtgctgcgctgggaagagccgcgcaatcgctacgaccagctgttctggcaggcggagcattttgcctggtgcatcgggcaggggttgcaggactcgccgctgcggccgctcagtcgggtgctgcagaatctgcaggtgatggatgaggtgcggcgccaggtgggcgtggtgtttaacgaagaacgctaa

SEQ ID NO: 218745 - DNA, 1173 bp, Klebsiella pneumoniae
atgagcgcgcggttaaatatcggtcttatcggctcgggttttatgggtcaggcgcacgccgacgcgtaccgtcgcgcggcaatgttctatcccgatctgccgaagcgcccgcatctctacgcgctggcggatcaggatcaggcgctggccgaacgccatgcggcgaaactgggggcagaaaaggcctacggcgactggcgcgagctggtaaacgatccacaggttgacgtggtggatatcacctcgccgaaccatctgcactacacgatggcgatggcggcgatcgcggcgggtaaacatgtctattgcgagaagccgctggcggttaacgagcagcaggcgcaggagatggcgcaggcggcgcggcgagcgggcgtgaagaccatggtggcctttaacaacattaaaaccccggcggcgctgctggcaaagcagattatcgcccggggcgatattggcgaaccggtgcgctttcgcggcacctttgatcaagggttttataacgacccgaacctgccctggtcctggcgctgctcgaaaaccctcggcggcagcggggcgcttggcgacctcggcgcccataccctgtccgtcgcccagtttttgctgggcgggatccgcgaagtgaccgccagcgcgcaaacctgcctgcgacagcgtccggtaccgcagagcgatgccgggtatgccagccgggtcgcggccgatgccgagtggcgggaagtggaaaatgacgatcaggttcagtgcctggtcactttcgacagcggtgcggcgggagtgatagaggcctcgcgcattgccgccgggcggatcttcggcgtgttctgggaggtctccggcaccgaaggcacgctgtatatggacggggagcgctttaacgaactgcaggtgtatcgcttcaacgatgataaacacgaccgcggctttaagacgctgtatgccgggagccagatcccggcctatgccggcttcttcggcttcgattttggcggcggcgggctgggctattttgacgtcaaggtgatcgaagtacatgacctggtgcaggggatctgcggggacgacgactgctatcccaactttgaatttggtttgcagaatcagcgcgtgctgtcggcgattgaatcctcgatggccagccgtcgctgggtgaacgtggttaaagactaa

SEQ ID NO: 218746 - DNA, 432 bp, Klebsiella pneumoniae
atgagcaaattcggtattgccctcatgaccgcggcggctattagcctgctgagcggctgccaggcagcgaaggagaagcatccgacgcaggaggaactgatccgccagatgcagcagcgggccgcggccccggatacgcacccactgccgccgggcaaagccacgcaggaccaactgatgcgctacgccttcgcgctcagagaggcggttatggttcaattgcccaacagcgcgcgctaccaggggaaaatatgctccgtgcggctgtcgcttaaccgcagtgcaaaactgaccggactgcagcaggaggggggcgatccggcgttctgcgcggcgatgaccgatgcggtactgcgcacaaccttcccgccctttgccagcgaaggggtctaccagatctttaaccatccgctactggattttaagccttag

SEQ ID NO: 218747 - DNA, 1518 bp, Klebsiella pneumoniae
atgtctgaacaacaagcacaaggtgccgatgaggccattgaccttaataatgaactgaaaactcgtcgcgaaaaactggctgcgctgcgtgagcagggcgtagccttccccaacgacttccgtcgcgatcacacctctgaccaattgcacgctgaattcgatgcgaaggacaacgatgaactcgcttccctgaacgttgaggttgcggtggccggccggatgatgacccgccgcgtgatgggcaaagcctccttcgtcaccctccaggacgtcggcggccgcattcagctgtacgtcgcgcgcgatgacctgccggaaggcgtctacaacgaacagtttaaaaaatgggacctcggcgacatcatcgccgcccgcggcaaactgttcaaaacgcaaaccggcgaactctcgatccactgcaccgagctgcgtttgctgaccaaagccctgcgcccgctgccggataaattccacggcctgcaggatcaggaagtccgctatcgccagcgttatctggatctgatcgccaacgaagagtcgcgtcatacgttccgtatccgttcgcagatcctcgccaccatgcgtcagttcatggtggcccgcggctttatggaagtggaaaccccgatgatgcaggtgatccctggcggcgcgtccgcccgtccgtttatcacccatcacaacgccctggatctggatatgtacctgcgcatcgcgccggaactgtatctgaaacgtctggtggtcggcggtttcgaacgcgtgtttgaaatcaaccgtaacttccgtaatgaagggatctccgtacgccataacccagagttcaccatgatggaactgtatatggcgtatgcggattacaaagacctgatcgaactgaccgagtcgctgttccgcaccctggcgcagacggtgctgggcaaaaccgaagtgccgtatggcgaccaggtgtttgacttcggcaagccgtttgaaaaactgaccatgcgtgaagcgatcaagaaacaccgtccggaaaccaacatggcggatctggataacttcgacgcagcgaaagcgctggcggaatctctcggtattcaggtagagaaaagctggggtctggggcgtatcgtcaccgaaatcttcgatgaagtggcggaagcacacctgatccagccaacctttatcaccgaatacccggcggaagtttccccgctggcgcgccgcaacgacgtcaacccggaaatcactgaccgcttcgaattcttcatcggcggccgcgaaatcggtaacggtttcagcgagctgaacgatgccgaagaccaggcgcagcgcttccaggatcaggtgaacgccaaagcggcgggcgatgacgaagcgatgttctacgacgaagactacgtgaccgccctcgagtacggcctgccgccgaccgccggtctgggtatcggtatcgaccgcatggtgatgctgtttaccaacagccataccatccgcgacgtgatcctcttcccggccatgcgtccgcagaagtaa

SEQ ID NO: 218748 - DNA, 1476 bp, Klebsiella pneumoniae
atgaaaacaccctcacagccgcgcgcgatttactacatcgttgcgatccagatctgggagtacttcagcttttacggcatgcgtgccttactcatcctttatctcacccaccagcttggctttgacgacagccacgccatcagtctgttcagcgcttacgcatctttagtttacgttacccctattctcggcggctggcttgccgaccgcctgctcggcaaccgcacggcggtgattgccggggcgctgttaatgaccctcggccacgtggtgctgggcgtcgagtcgacctccgcatggagtctgtacgtcgcgctggcgatcatcatctgcggctacggcctgttcaaatccaatatcagctgcctgctcggcgaactgtacgctcacgacgacccgcgtcgcgacggcggtttctcgctgctgtacgccgccggcaacgtcgggtcgatcgccgcgcccatcgcctgcggactggcggcgcagtggtacggctggcatatcggctttgcgctggcggggatcggcatgtttatcggcctgatgattttcttaagcggcagccgccatttccggcatacccgcggcgtcgataaaccggcgctgcgggcagtgaaattcgtactgccgacctggggctggctgctggtgatgctgtgcctggcgccggtgttcttcacgctgctcctgcaaaacaactggtccggctatctgctggcgatcgtctgcctgttcgccgcccagatggtggcgcggatcatgatcaaagccccggagcatcgtcgcgcgctgtggcagatcgtcctgctgatgctcgccggaacgctgttctgggtgctggcgcagcagggcggcagctcaattagcctgtttatcgaccacttcgtcaatcgtcgcctgctgaactgggacgtgccgaccgcgctgttccagtcggttaacgcggtggcggtgatggcggctggcgtggtgctggcgtggctgatgcgcccggaaggcagcgtgcgttcggtgctgcgtgtctggctgaaattcgccttcggcctgctgctgatgggcggcggctttatgctgctggcgctcaatgcccgccacggcgccgctgacggccaggcctcgatgggcatgatggtcgccgggctggcgatgatgggctttgccgaactgtttatcgacccggtggcgatggcgcaaatcacccgtctgaacatgcccggcgtcaccggcgtattaaccggcatttatatgctggccaccggcgcggtggccaactggctggcgggcgtggtcgcccaacaaaccaccgaatcgcaaatcagcgacacggcgattgccgcctatcagcatttcttctcgcagatgggcgaatggaccctcggctgcgtggcggtgatggtcattatcgcctttgccgcggcctgtagcgtcggcaaacgccgtgcggctgccggtgaagttcccggcggcggcgcctga

SEQ ID NO: 218749 - DNA, 1335 bp, Klebsiella pneumoniae
atgagttctgccaagaagatcgggctatttgcctgtaccggtgtcgtcgccggtaatatgatggggagcggtattgcattattacctgcgaacctggccagcatcggtggtattgccatttggggctgggtgatttcaattattggtgcaatgtcgctggcttatgtttatgcccgactggcgactaaaaacccgcagcagggcggccctattgcctacgctggggaaatatctccggcattcggtttccagactggtgtcctttattatcatgcaaactggattggtaacctggccatcgggattaccgccgtttcttatctctctacgttcttcccaattttaaataacccggtgccagcaggtattgcctgtattgccatcgtgtggatctttactttcgttaatatgctcggcgggacctgggtcagccgtctgaccaccattggtctggtactggtgcttattccggtagtcatgaccgcggttgtcggctggcactggtttgatgtcgctacctatcaggcgaactggaacacctccagcaccaccgatagccacgcggtcatcaaaagtatcctgctctgcctgtgggccttcgttggcgtagaatccgctgccgtgagtaccgggatggtgaaaaacccgaaacgtaccgtaccgctggcaaccatgctgggtactgcgatggccggtatcgtctatatcgccgcgactcaggttatcgccgggatgtatcctgcttctcagatggctgcatccggtgcgccgttcgcgattagcgcctctaccattctcggcggctgggctgctccgatggtttccgctttcaccgccttcgcttgcctgacgtcactgggctcgtggatgatgctggttggccaggccggtgtacgtgccgccaacgacggcaacttcccgaaagtgtatggcgaagtcgatagcaacggtatcccgaaaaaaggcctgctgctggcggcggtgaaaatgaccgcgctgatggtgctgattaccctgatgaactccgccggtggtaaagcctctgacctgttcggcgaactgaccggtatcgcggtactgctgaccatgctgccttacttctactcctgtgttgacctgattcgtttcgaaggcatcaacatccgtaactttgttagcctgatttgttcggtactgggttgcgtgttctgcttcatcgcgctgatgggcgcaagctccttcgaactggccggcacctttatcgttagcctgattatcctgatgttctacggtcgcaaaatgcaccagcgccagaacaacgcatcagataacaacaccaccgctaacgcgcactaa

SEQ ID NO: 218750 - DNA, 1626 bp, Klebsiella pneumoniae
atgtgttatcatcgcgcctttccctttttgtctggggctttttgtatgctacaacctgttgttcgcgtcggtgaatggctggtaaccccctctgtaaaccaaatcagcaggaaggggcgccagcttacccttgaaccgcgtttaatcgatcttctggtcttttttgcccgtcatccgggggaagtgctaagccgggacgagcttatcgaaaacgtctggacccggaacgttgtgaccagccacgtcgtcacgcagagtatttctgaactgcgcaagtcgctcaaagacggcgacgacgtgagccttgagtacatcgcgacggtacccaaacgggggtataaactcacggtgccggtgatctggtgcaccgaagagggagaggaactcgccccgcagggggagacgcaggcggctgcgccgtcgaccgcgatccccgcgccaccggctgccggcgggccgccagaagcccccgactccaccgccgatcttaccgcgccggtgacagcgccggcggcggcgcccgctgtcgccagcgcgccgtcagcccgcaaacgcctcaccaccgccctggtgtgggggctgttcctgttggcgctgggcacctgcgtggcgctggtggcgctgtcgagcatggagtcgcggccgccggtcaacaaggcgcgcctgctgctcaatccgcgtgatatcgatatccacctggtgaatggtaattcctgcgccaactggtcgtcgcagcactcctacgccgttgggctggccagcctgatcaccacctcgctgaacaccttctcgacctttatggtgcatgacaaaacggactacaacatcaatgagccgagcagctccgggaaaacgctgaccatcgagttcgtcaatcagcgccactatcgggcgcagcagtgctttatgtcggtccagctggtggacaatgccgacagctcgacgatgctggataaacgctactttgtgaccaacgataaccagctcaccatccagaacgatctgatgaacagcctgtcggatgccctggcgcagccgtggccggcgcggatgcaggcgatgctcaggcaatatcagccttcgcagagcgtggcgttaacctatttctaccagtcgcaccagctgttaatgaagggcgatgtcgattcattaagtaaagccagtagcctgctggatgatgtgattaagcgggcgccggattttatttacgcctatgccgaaaaaacgctggtggatgtattacgccattcgcaacagccgctggacgataaacagctggcggccctctacagtgaagttgagcgggtaggggagatgccgggtattaaagacatggcgatttattatcaaataaaagcggtggattcgttgggtaggggtaaagtcgatgaagcgaataccgcgattaacagcgcgattgatttagagatgtcgtggctgaattatgtgctgttaggcaaagtctatgagatgaaaggagagaaccggctggctgctgattcttacatcactgcgtttaatttacgtcctggcgaagataccctgtactggattgaaaacggtgttttccagacgtcagttaatcgggtggtaccgtatctcgacaattttctctcttcagaataa

SEQ ID NO: 218751 - DNA, 2787 bp, Klebsiella pneumoniae
atggttcagatcccagaaaaccctctcatcctcgttgacggctcctcctatctttatcgcgcatatcatgcgtttccgccgctaactaacagcgcaggggagccgaccggggctatgtacggcgtactcaatatgctgcgcagtttgatcctgcagtatcaaccaacccacgccgtcgtggtctttgatgcgaaagggaaaaccttccgtgatgaattgttcgaacactacaaatctcaccgtccgccgatgccggacgatctgcgtgcgcagatcgaaccgttgcataagatggtgaaagcgatggggttaccgctgatggcggtcccgggcgttgaggctgacgatgtgattggcaccctggcgcgggaagcggaaagggcgggacgtccggtgctgatcagcaccggtgataaagacatggcccagctggtgacgccggggatcaccctgatcaataccatgaccaacaccatccttggacctgatgaggtggtcaccaaatatggcgttccgccggagctgattattgatttcctggcgctgatgggtgactcgtcagataacattcccggcgtaccaggcgtgggcgaaaagactgcccaggcgctgctgcaaggccttggtggcctcgatacgctgtatgcggaaccggagaaaattgctgaactgagcttccgtggcgcgaaaacgatggcggcgaagctggagcagaacaaggatgtggcttatctctcttatcagctggcgaccattaaaaccgatgtcgagctggagctcacgtgcgaagagctggaggtgcagccgccggcggctgacgatttgctggcgctgttcagacagtatgagtttaagcgctggacaaccgacgttgaggccgggaaatggctacaggcgaagggcggcaaaccggctgcgaaacctgcagagcctgcagcggcacaagcagaagacgttgaaccggccaccgccctttcagcagagcattatgtcactattcttgatgaggccacgctgctcagctggatcgataagctcaagcaggcgccgctttttgcctttgatacggaaaccgacagcctggataatatctccgccaatatggtcggcctttcattcgcggttgagccgggtgtggccgcctatgttccggtggcgcatgattatcttgatgcgccggatcagatccctcgcgagcgtgtgctggcgctgcttaaaccgctgctggaggatgagaagctgctcaaggtcgggcaaaatctcaaatacgatcgcggtattttggccaattacgacattgagctgcgcgggattgcattcgataccatgctggagtcttacatcctcgacagcgtggcgggccgtcatgatatggacagcctttccgatcgctggctgaagcataaaaccattacctttgaagaaattgccggcaagggtaagaatcagctcacctttaaccagattgcgctggaagaggctggtcgctacgcggcggaagacgccgacgtcacgctccagctgcatctgaagatgtggccgaagctgcagcagcatgaaggtccgctgaatatctttaagcatatcgaaatgccgctggtgccggtgctgtctcgggttgagcgcaacggcgtgaaaatagaccctgccgtgctgcatgcgcattcgcaggagatcgctcagcgtctggtagagctggaacagcgcgcgcatgagattgccggggaagcgtttaatctctcctccaccaaacagctgcaaacgatcttgtttgaaaaacagggcatcaagccgctgaagaaaacgccgggcggcgcgccgtccacctctgaagaggtgctggaagagctggcgctggattatccgttgccgaaagtgattctggagtaccgcgggttggcgaagctgaagtccacctataccgataaactgccgctgatgattaaccctaaaacgggccgagtgcatacctcctatcatcaggcggttaccgctaccggccgtttgtcgtctaccgatcccaacctgcaaaatattccggtgcgtaacgaagaagggcgacgtattcgccaggcgtttatcgcgccggaagattacgtcattgtctcagcggactactcgcaaatcgaactgcgtattatggcgcacctgtcacgagataaaggcctgctgaccgcctttgctgaaggtaaggatattcaccgggcgacggcggctgaagtgtttggcttaccgctggacagcgtcagcagcgaacagcgccgcagtgcgaaagctatcaacttcggtctgatctatggcatgagcgccttcggcctggcccgccagctgaacattccgcgtaaggaagcgcagaagtacatggatctttatttcgagcgttacccgggcgtcctggagtatatggagcgcacccgcgctcaggcgaaagagcaagggtatgttgaaacgctggatggccgtcgactctatctgccggatattaaatccagcaatggtgcccgtcgcgctggagcggaacgtgcggcgatcaacgccccaatgcaggggacggcagcggacattatcaagcgggcgatgattgctgttgatgaatggctgcggaaggagcaacctcgcgtgcggatgatcatgcaggttcacgatgaactggtctttgaagtccataaggatgagcttgatgctgtatcgaagaagatccatgaactgatggagaacagtaccaccctggcggtaccgttgctggtggaagtgggcagcggcgaaaattgggatcaagcgcactaa

SEQ ID NO: 218752 - DNA, 711 bp, Klebsiella pneumoniae
atgactgaaaatctctccactgtcgaaaatgcgaaagagaaactggatctgtggcttaagcaagggctgacggttgcgggggggaaactgccgtcagaaagagagcttggtgagttactgggcatcaaacggatgacgctgcgtcaggcgctgctcggcctggaagcggaatcgaggatttttcgtaaagaccgtaaaggatggtttgtcgcccagccgcgttttaattatagccctgagctctccgcgagctttcagcgggccgccattgagcagggcagagagccctcatggggctttattgagaaacagcgtacccgagagtatcccgacgttgctaagcccctgctcgcagcaaccccggctgatgatttatatctggtgaccggctggggagcgctggaagggcataaagttttctaccacgagacctttatcaatcctaacgtcgcgccaggttttattgacagacttaagaaccagtctttttcctccgtttgggagcgtgaatatcacaaacctgtcgtcattaaaaagctggcctttcgacccgtaagaatgtcgggagaggtgagcaaatttatcggcggctctgcgggcctgccagccatcctgattgaaaaacaccgtgccgatagtgcaggtaatattgtgcagatagatctcgaatactggcgatttgaagctgtggatctctttattaacttgtag

SEQ ID NO: 218753 - DNA, 981 bp, Klebsiella pneumoniae
atggtcactaaagataacgccgggaagatcctttcccgtattgataatataccgctctaccttcatgcctatgcctatcatttgaatatgcggcttgaacgtattttaccgaatgatttgctgaacatcgcagacagcctgcatttaaagggggtgaaaatacatgttcttgatggcgagcgctactcgctgagcaatatgaaggatatccagttagctgagtttggtgataaagcaaaatcgttgcagctggatattcatatcgagaccagtgcctccgataaacagactatcgatcaggccgttactatcgccttaaaaacaggcgcatcctccgttcgcttttatcctcgttatgaagggcatttacacgacgttattgaaaaaatcgccttcgatattcaatatattaaaaaagcatatagccataccggcctgacgttcgcccttgagcaacatgaagatctgaaaagcgttgaactggtgaatttaattaaacacagcgagatgccatctctatcgctcctttttgactttgccaatatgatcaacgccaatgaacgaccgcttgaggcgttagcgttgatgtcaccttacattacgcaggttcatattaaagatgcttgtattattgctgagaacggtgggcttgggcatcgggcctgtaactcaggccagggcgatatgccatttaaggcgctgctgacgaaattaatttgccttggcgatgaccagccgcaggtcatcgcgtacggcctggaagaggaggtggattactatgcacccccgttccgatttgccacggaaggtgacaacccgtggatcccgtggcggcagatgagcgaaaccccactgcctgacgctgaccagcttgaagaacgactgctgaaagaaaagcaggatgcaattgcgcagttgaaatatgtcgaagatactttgcaaataataaaagacgaagcgcttgccgtactggcacactaa

SEQ ID NO: 218754 - DNA, 1263 bp, Klebsiella pneumoniae
atgctcacgaaaaagaaatgggctatattcagtttattaaccctgtgcggcggcaccatttataaactgccttcactgaaagatgctttttatattcccatgcaggactattttcatctgactaatggccagataggtaatgccatgtcggtgaactccgtggtgaccacgattggttttttcttgtcaatttactttgccgataagcttcctcgccgttacaccatgtcattgtcactgattgcgacaggtttattaggaatttacctgacgacgatgcctggatattgggggattctcttcgtttgggccttatttggtgtcacctgcgatatgatgaactggccggtgttattaaagtcggtgagtcggctgggtaacagcgaacagcaggggcgattatttggtttctttgaaaccggacgggggattgtcgacacgattattgctttctctgccctggctattttcacctggtttggtagcggtttgctgggttttaaagccgggatctggttctacgctctcatcgtgattgttgtcgggatcatgctgttttttatgctgaaagaaaaggatgaggatgcgcctgagaaaactatcgccgagagcgctacagagaaaagtagcatctcttcggtattaaaagataaaaccatctggctcatcgcgttcaacgtcttcttcgtttatgcagtttactgtggacttactttctttatccccttcctgaaaaatatctacctgttgccggtggcgctggtgggcgcctacggcatcattaaccagtattgtttaaaaatggttggcggaccgattggcggcctgatagccgataaaatccttaagtcgcctagcaaatatctcttctataccttctgtgtcagtaccgtggccttagtcgcgttaatattgttgccccatgaaagtatgccggtctatctgggcatgatctgtaccctcggatttggcgcgattgtgtttacgcagcgagcggtattctttgctccgatcggggaagcaaaaatcgctgaaaaccggacaggcgcagccatggcgctggggagctttataggctatgcgccggccatgttctgctacagcctgtacggctacattcttgatctcaaccctggtctggcaggctacaagatagtctttggcatcatggcgggctttgcgctctgcggcgcgttcgtttcggtcatgttagtgaaacgaattagcggtggcaggaaaacgctgcgcgctgcgactgaataa

SEQ ID NO: 218755 - DNA, 942 bp, Klebsiella pneumoniae
atgtatcaccttcgtgtaccgcaaacagcagaagagttagagagctactaccagttccgctgggagatgctgcgtaagccgctgcatcagcctaaaggatcggaacgcgacgcctgggatgcgatggcgcatcatcagatggtggtggatgaagagggcaatctggttgccgtcggtcggctatatatcaatgcggagaatgaagcttctattcgctttatggccgttcatccctcggtgcaggataaagggctcgggacgctgatggcgatgaccctcgagtccgtcgcgcgccaggaaggggtgaagcgggttacctgtagcgcccgcgaagatgcagtggagtttttctctaagctgggctttgtcaatcagggggagatcactaccccaaccaccacgccgatccgccattttctgatgattaaaccggtcgcgtcgctggacgatattttgcatcgcggcgactggtgcgcgcagctgcagcaggcgtggtatcagcacattccgctgagtgaaaaaatgggtgtacgcattcagcagtacaccgggcagaaatttattaccaccatgccggaggcggggaaccagaatccgcaccatacgctgtttgccggcagcctgttttcgctcgccaccttaaccggctggggacttatctggctgatgctgcgcgagcggcacctggggggtaccatcattctggcggatgcgcatatccgttacagtcagcccattagcggccgccccagcgccatcgccgacctgggatcgctgagcggcgacctcgaccgcctggcgcgggggcgtaaagcccgcgtgcaaatgcaggtggagctttttggcgacgataaacaaggcgccgttttcgaggggatctacatcgtgctgccggcgaagccctttggctcgtacgaagagggtggcaacgaagaagagtaa

SEQ ID NO: 218756 - DNA, 249 bp, Klebsiella pneumoniae
atgagcatgctggctgaaagcgatatgggcagaattcttctcgatttaccagacgatgtcatcaaacggctggatgacctcaaagcgcagcgtaatcttccgcgagcggagctgttacgtgaagccgttgaacaatatctggagaagcaggatcgggctaaagagagcatttcaggcgccctcggcctgtggcaaggctgcgaagaagacggcgttgaataccaacgtaaactgcgcgaggagtggtaa

SEQ ID NO: 218757 - DNA, 375 bp, Klebsiella pneumoniae
atggttaagggcgtcgcgctatttgatactaatattctcattgatttatttagcgggcggcgtgaagccaaggaggcgttagagtcctggccgtcgcagaatgcaattagtttaattacctggatggaggtcatggttggcgccaaaaagtatcaccaggagcagcgtacgcggattgccttgagctcttttaacatcattgatgtttcgcatgagattgctgaacgaagcgtcgatctgcgacatgagtatcgcatgaaactgccggacgccattatcctggcgacggcgcgggttcatcgtcttgaactgattacacggaatacgaaggattttgcaggcattcccggtgtgctcacaccgtatgaattataa

SEQ ID NO: 218758 - DNA, 690 bp, Klebsiella pneumoniae
atggaaattcgttcgatatggctaaatgatatgaaacaaactctctccagtctcagcggagacacgataaaagcgatcgttttggtctgccttgccgtcggggtggtgggcatgtcctatgggtcgctggcggtggcttacggcttccccttatgggtgccgctcttgctttcggtgtccgtgctggcaggcgcttctgaattcatgtttatcggcattatcgccagcggcggtagcccactggccgccgctgccgctggcctgttagtcaacgcgcgccatatcccgttcggggtgaccgtgcgcgaactggttggtcggcgcgccttaagctttatcgggtgccacattatgaacgacgagagcgtggtctttggcttgtcgcagcccacccctgcgcagcgcaaagcggcctactggctgtgcggcgccggcgtcgcgctgatctggcccctcggcacgctaaccggcgcggccgtcggcaaactgctgccagcgccggaaaccatcgggcttgatgcggtcttcccggcgatcctgctggcgctggtgatcccggcctttaaaaaccgcactacgctgatccgcgccgccagcggcgccgcactggcgcttgccgccgtgccgtttgtgcccaccgggctgccagtgctgctttcactgtttggtttactgtcgaggaaaaaataa

SEQ ID NO: 218759 - DNA, 996 bp, Klebsiella pneumoniae
atgtcgctgaaagccattgctaaacaacttgggatctccgtcacgaccgtcagccgggcgttgaacggctatgacgatgtgtcgcaggagacccgcgcccgggttgaggctgaagcgcagcgccggggctatcgccccaacacctttgcccgccgtctgaaaatgggcaccatcgatgccgttggtctcgtctttcctgtccgtcccgtaccgctcaacaataacgtttttctcgagatggttggggagatcagccacgagctggcgcgccatgatattgatttgttattgatcgccgatgatgagcaggcggataaacatggctatatgcgcatggtgcagggccgtcgcgtcgacgcattaatcgtggctcataccctggatgacgatccgcggctggcgcagctgcaggcctctggctttccatttctggcgctcggccgtagccgcctgacgcagccctacgcctggtttgatttcgataactatgccggtacctgtcgcgccacccgccatctgattcagcagggccaccagcgtatcgctctgctgggcgagaacaataatcaggcgtttattttgcaacggcgtaacggctaccttgatgccctgcgcgaggcggggttatccgatgcatggctgcgcagcgtgtcgccgacgcgccgcggcggctatcaggccacgctggagctgctgcgcctgccggagccgcccaccgcgattatcaccgactgcaacacccatggcgatggcgccgcaatggcgctcgcccatctggggcgtttgaccggtgacaaccgcgtcgccttagtagtgtatgacggcttgccgcaggacagcatcattgagaccgacgttgccgcggtgatccagtccacgcgccagggcgtgggacgccagattgccgatatggtgcgccgcttaatcgccggggaggatctcgccacgctgcaggtgctgtggcagccagaatttatcccgggtgaaaccgcctga

SEQ ID NO: 218760 - DNA, 1266 bp, Klebsiella pneumoniae
atgaacccgaccgtctgtacccacaaaaacaaccccaacttctggattttcgggctgttcttctttctctacttcttcatcatggccacctgctttccgtttctgccgatctggctgtcggacgtcattggcctgaataaaaccgaaaccggcctcgttttctccagcctgtcgctgttcgccatctgtttccagccggttctcggggtgatctctgacaagctggggctgaaaaaacacctgatgtggatcgtgaccgttctgctggtgctgatcgctcccttcttcctctatgtttttgctccgctgctgaaagccaacatctggctcggggcgttgagcggcggcgcctatatcggctttgttttctctgcgggcgccggcgcgatggaggcctatatcgaacgggtaagccgcaacagcgggtttgaatacggcaaggcgcgcacctttggctgcctgggatgggcgctgtgcgcgaccaccgccggaatgctgttcagcattaatcccgaatgggtgttctggatggggtcggccgccgcgctgctgctggtggtgctggtggccatcgccaaaccgcagaccagtcaggccgcgcaggtgatggactcgctcggcgccaatcgcccggccgtcgatttaaaaacggcggtgcgcatgttccgccagcggaagatgtggatgtttattctgtatgtcatcggcgtggcctgcgtgtatgacgtcttcgatcagcagttcgccaccttctttaaatcattcttcgcgaccccggaagcgggcacccgcgcctttggtttcgccaccaccgcgggagaaatatgtaacgccatcattatgttcagctcaccgtggattattaaccgcatcggggcgaagaataccctgctgatcgccgggatggtgatggcggcacggatgattggctcttccttcgccactacggccgcagaagtggtggcgctgaaaatgcttcatgcgctggaggtgccgttcctgctggtgggcgcctttaaatatattaccggcgtgtttgatgtccggctgtcggcgaccatttacctggtgggcttccagttcgccaagcaggtggcggcgatcttcctctccgccttcgccggcaatatgtacgatcggatcggctttcaggatacctatatgatcctcggcggtattgccctgaccgtcaccttaatctccgcgtttacgttagcgggtaaggcgaaaaccgagccgctgcgcgataatgcgatgaccgtttaa

SEQ ID NO: 218761 - DNA, 594 bp, Klebsiella pneumoniae
atgatggatatgaaaaaacgtatgaacagcggcgagctttacctggatgcaggatatggcttgccggagcagcgactgatgggtaaagcgcgggcctatgaatataatcattcgcatccgtttaatcaggaattgcgcaacgatattattcagcgcatgttcgctaaagttggcgaacaatgctggatagaaccgccgatcaatattgcctatgggatccatacgacgattggtgacaatttttacgccaattttaacctcacgttggtcgacgatgcggacattatcatcggcaataacgtcatgtttgcaccaaatgtcactatctccaccgccggacatcccatccaccccgcgctgcgccatacgcatcaacagttttcattgccggtggtgattgaagatggggtctggttaggcacgggggtgattattaatcccggggtaacgattggggagaattcggtcattggcgcgggcagtgtggtgaatcgttccataccggcgaatgtggttgccgcaggcgtaccttgccgggtattaagagaaattaccgaggcggataaagacaaatacgctcttttccccggatga

SEQ ID NO: 218762 - DNA, 696 bp, Klebsiella pneumoniae
atgaagacagaacggcagcagacgttgcaggcagagcaccgcgtccgggcccggctcatccgcgcccggacagccctgagtaatgagatacggggcctgctgggtgagttcggtctggtactgccggtgggaataaggcagctacgtaaggcattgccggagatactgtcgcaacaggagctgtgggatgaccgctttatccgcctgctgagcgaactggcggaagagctgcagatgctggatgagcgggtcgcccgccatgacaggcggcttgagcagtcggcacgggatgatgtccggataaaaaggctgctggcgatagagggtatgggaccggtggtggccagtgcgctggtggcggcggtcggcgatggcagacagttcaaaagtggccgtgagatggcggcgtatctgggtctggtcccgcggcagcactccagtggcgggaaagcgcggctggggtctgtcagcaaacggggagacagctacctgcggacgctgataatccacggtgcgcgtgcggtgctgaacgcgtgtccgaataaaaccgacagacgcagccagtggctgcaggcgttatcggaaaggcgaaaccggaatatcgcgacggtggcgctggcgaacaagaatgcgcgaatagcgtgggcgctcctgagccgcgaagaagattaccatgggttacaggccgccggttaa

SEQ ID NO: 218763 - DNA, 1494 bp, Klebsiella pneumoniae
atgacgccagccgccgaacgccgtccgctgctgccttttgcctgggcccgtgcgcaccatcttgtgctgctcagcgacggcgaacgctgcgaagcgctgtgccgccccgataccaccgcccgggcgctgctggaggcgcgccgcctggcggacggtccaatgaacgtcagccgtctggcgccggaggcattcgagaaagtgctggtgctcagctatcagcgcgactcggcggaagcgcaccgcatgatggctgacatcggcaatgaactcgacctctataccctcgccgaagagctgccggacaccgacgatctgctcgacagcgaggacgatgcgccgatcatccgcctgatcaacgccatgctcaccgaggccatcaaagagaaagcctcagatatccatatcgaaacctacgagcgccatctgcagatccgctttcgcgtcgacggcgtgctgcgcgaaattctgcgcccgcagcggcggctggccgcgctgttaatttcgcgcatcaaggtgatggccagcctggatatcgccgaaaagcgggtccctcaggatggtcgcatggcgctgcgcatcggcggccgggcgatcgacgtgcgcgtctccaccctgccctccagccacggcgaacgcgtggtgctgcgcctgctggacaaaaacagcgtcaacctggacctgctgacgctgggtatgccgcccgccctgctcgatagggtcgacgcgctgatcgcccgtccgcacggcatcattctggtcaccggtccgaccggatcggggaaaagcaccaccctgtatgccgccctcagccgcctcgacgcccgggagcgcaacatcatgaccattgaagatccagtggagtacgagctggagggcatcggccagacccaggtcaacgccaaagtcgagatgaccttcgcccgcggtctgcgcgccatactgcgccaggaccccgacgtggtgctggtaggggaaatccgcgatggcgaaaccgcccagattgccgttcaggcctcactgaccgggcacctggtgctgtcgaccctgcacaccaacagcgcgctgggcgctatttcccgtctgcaggatatgggcgtggagccttttttactctccacatcgctgctggcggtaatgtcgcagcggctggtgcgccaactgtgcccgcactgtcgtcagcccaggcaggcggatgccgacaccgcccggcagatggcggtcccgaccggcacgccgctgtggcagccaacaggctgcgcccagtgtaatttcaccggctatcgcgggcgtaccggcattcatgagctgctgctaatcgacgatcgcgtgcgtgccgccatccaccgcggcgagaacgagatcaccctgatccagcagctggggccaacctggcagaccctgcgccatgccgggcgcgacaaagcgctggcggggatcaccagctgggaggaggtgatgcgggtcaccgaacagcaaacggcggaaaacgactga

SEQ ID NO: 218764 - DNA, 378 bp, Klebsiella pneumoniae
atgatgcgtattccgcttatatttccgctttgcgtggtagcccttctctctggctgccaacaaaaacccgcctcaacgctcagcccggccatcagcagccaggcgcagctggagcagctctcgtccgtggcggcaggaacgcgctatctcaagaataaatgtaatcgtagcgatctccccgccgatgaaacgatatatcgggcggcggtgaatgtcggtaaagcgcgcggatggggaaatattgacgtggcgacgttaagccaaaatagcgaccggctttaccaacagcttttacaggacagcactccggaagccacgcagtgcagtcaatttaatcgccagctggctccctttattgccagcctgcgcggcgactaa

SEQ ID NO: 218765 - DNA, 636 bp, Klebsiella pneumoniae
atgacaacggacttactaaaagacgttatttatcgtcgtatcagagatatgatcattaacggcacgttaccaatgggtgggaaaatatcggaatccgcactcgcaacacgcctctcatcaaccaaggcccccgtacgcgatgcgcttcgccgtttgcaaagcgaagggttagttcatattcgcccgaaaagcgggacatttgtatttaatctaaatgacattgaattcaacgcgttactagagtttcgttacattgtcgaagccaaagccctggagctttctttacaacataatccgcgtcagttggtacaagccttatcctccaaccttgaccacatgacttattgtctcgagaacagtgccacgcacgaatatatacgcctcgataatctgtttcatgaagcgttgttcacttattgcggaaactcttatttacagcaatcatacgtcttaatctctgctcaaatggcgacaatacgtaactacctgggtagcaacaacgaacatatgcaccgctcccatcaacaacatgttgctatcattcaggcgattcaggacggcaatgcagcgaacgcgttaaacgagctacaaaaacatatcctgccagacaaaggcgcttactgggggcagttctaa

SEQ ID NO: 218766 - DNA, 939 bp, Klebsiella pneumoniae
atgaagcagttcgatattctttcatttggtgaaccccttttcgaattcaatcaacttcccacggagcattctgagcagcattacctcagcggatttggcggcgatacatcgaatttcgccattagcgcggcgcgacagggcgctaaagttgccatgttaacccaactcggcgatgacgtatttgggcagaatttccgcgcattatgggatgcagaaaaggtcaatcatcaatgggtttacacgcataaaactgccccgacggggatctattttatttcgcacaatgaacaaggccaccactttactttttatcgtaaaggctctgcggcctcaacgatgactgtcgatgatatcaatgagtccgccattgccgccgcgcgcttatttcacagttcagccatcacgcacgccattggcaataacgtcagcgatgcgctttttcacgccattgaactgtgccaaaagcaccaaacgctgatttccttcgacaccaatctgcggctcaaactgtggccgttagcccgcgctcgcgccatcattcatgaaaccatacgccacgtagattactgcatgcctagcctcgacgaggctcgtctgctaaccggcaagcatcacgcagatgaaattacggatttctatctgcagctcggggcaaagaatgtggtgttaaaaatgggcgcggaaggcgcgatgttcgccaatgagaaccggcgggttatctactcaggccataaagtcgccgccgtcgacgcgaccggggccggagactgcttctcgggcgcgtttctttatcgcattatcaaaggcgattcgccggaagatgcgctgtgctacgccaacgccgccgccgcgctgacaacaaccggttatggcgccgtcgcgcctattcctcgccaacaacaagtaaaggcatttctccagcaaaccgaacaacagtaa

SEQ ID NO: 218767 - DNA, 657 bp, Klebsiella pneumoniae
atgtacagcaaagatattatcgacggttttcgcgctattttctcgaccgcttccgtcgctgacgcctgcgatcagatcctgggcaaaacgatgttcctgccttttgaaatcaaaaaccgcatcaacgacaagaaaatcgttggcccggccgtcactatttatgaagacgtcaccgacgaaaaactgccaccgcagcatgcgctggacgccattgacgaatccgccagcggttcggtcatcgtcattaccggcaacccgtcgctggaaaccgttgccgtctggggcgggctaatgaccgccggggctgttgtcaataaacatgaggccgcagtgttgaacggcggcgtccgtgacctggcggagatccgtcgcgattacgatttcccggtttacgccaagaccgtaaccccaggcactacgcttggtcgcttcaagaccatttcagccaaccagcccgtcaccatcggcgatgtcacggtgaatccaggggatttgattgttggggatatcgacggcgtggtgtgcgtaccgcaggcggtcgctgccgaagtcttagcgctggcgcaatccattgatatccgcgagctggaacaggctaaactgattattcagtccggttctctgcgtgaaggcctggcgaaatacggccgaatctaa

SEQ ID NO: 218768 - DNA, 960 bp, Klebsiella pneumoniae
atgaagaagatagttgttattgaacccggatatttaaattattctgcagaagaaagtattttacagaattgggatccgcagtttgttgttgttccagcaaacgcctcgctggaagagaagctgcgccaggtaagcaatgctgacgccatcatggtccgcgaagcaaccgtcagtcgccctatgattgaagcgatgcagcaatgccgcgttatcgtgcgctacggcgtcggcgtagacaatatcgatagccaggccgccagggaaaaaggcatttacgttgctaacgtaccggactacggctcggaagatgttgctgagcacgctctggcgctgctcctggccgcaacgcgccgcatcgccactcgcaaccgtgatgttcgcgatggtcagtgggacattggccagcgcgaacccatgttccgcctggcaggaaaaattctcggcgtcgtcggctttggccgaatctcccgctgctttgtgcaaaaagcatcagggatcggttttaagcgcatcctagtagtcgatccgctgcttaccgatgagcaggctttacaggccggcgtgacgcgagtcagccttgatacgctgtgccatgaagcggacttcatctcccttcacgctccgttaaccccggacacccatcaccttatcggcgaagccgaactggccaaaatgaagcccagcgccgtactggtcaatacctcgcgcggcgggcttatcgatgagcaagcgctgatcaacgccctgctacaacaacgtattttcgctgccggactcgacgtttttgaatccgaacccctcagtgcaaaaagtccattactgcaaatggagaacaccttatgcacggaccacaccgcctggtttaccgaagagtcggtagtcgagctgcaaagtaaagccgcgcatgaagtgcgtcggtcatttgaaggcgagcatccgcttaattgggttaatccataa

SEQ ID NO: 218769 - DNA, 1338 bp, Klebsiella pneumoniae
atgagtcaatcaatacagcaacagtccctggatgcaaaaaatgatttagaaaaaatcattgtaacaaaaacgaccaggaaacttgttccactgatggtcttaatgtacatcgtggcatatatagatcgtcaaaatattagttttgctaaattacaaatgatagatagcctgggctggagtgaatcagcatttggcctcggtgcatcactttttttcattggctatttagttttcagtgtgcccggtaatttaattttatctaaagtaggagcaaaacgctggtttaccatcagtttattatcatggggaattattaccatggctctttcgtggacagagaaaatgtccacattctatgcccttcggtttattttaggtattgccgaagctagtttttatcctggtttaatttactattccaccaaatggttccccttaaaataccgtccacgcattgttggttttttagtcaccgccagcatggtggcaaatatgattggcgccccaattaacggctcgctgcttagcatgcacggctttatggggctggaaggatggcagtggctattcctggcgactggagtgcttgcgcttctgctaattgccccggtgctgctgtggtttccgcaaggtccggaacaggctcgcttcttgaacgcagaagaaaagaactggttgattaaaaaactggctgccgaacaggatgccaacaccgacaaatcggtcaatagcctgggtaagtcgctgaccgactggcgcgttctggccctcgcgctggtatacggattcatctgctttggcgcctacggtatcagctactggatgccgactatcgttaaaaccttcggtgcttcggatatgatgaatggcctggtcaatatgatcccatgggcgatggttatcatcatgctacgttggataaccagtaaaccagaacgtaccgagaacccttatattaatgtcgcattacctatgttcactgccgcaatatgtctgctgctctcggtctggacattcgcccagccggttattagcttcatctgtatttgcggcgttgtattatcagtatttgcaattcaaccctgcttctggaatctgacgaaattcctttcaggcgcaacggcggcagcaggcattgctattattaactcactggcaaatctgggtggatttttcgcgcaaaatactattcctctggtacgtgacttagaaaaaagcgactcggcaccaatgctatatttaagcgcggctatgctgatcggcgggatcgtcacaatcttaattattcgctggttaaagaatattgccatcaaggacgccaaacccgttacgctgtga

SEQ ID NO: 218770 - DNA, 723 bp, Klebsiella pneumoniae
atggctataggtatatttgtctgtagcggttcacttctcgtcggtgcgctggctggggcctcactgaatcgctttattccggaacacttcaaaaaaaccttaccgttgatcgctggactgatctcaatcagtatgggcatcttctttgtcaataaattgcataatctgccacctattgccctggctattattgtcggtacgattattggcggcctgctgaatatcgaaaaatggattgaacgagccggtacaaaactgcgcagccccattgaacgtattttcccggcgcagtccagcgccagcgtcagtgcggaagactttatgaatcagtttattgccgtgttgatcctgttctgcgccagcggcaccgggatcttcggtgcgttgactgagggcatgactggcgatccgactatcctgctgaccaagtcaatcctcgacttttttactgccgcgatttttgcctccacgctggggtatatcatcaccgtgatttttattccccagctgattgtcttcattatcctttttttcgcggcaacctttatcatggcattgatcaatccggcgatgatcgctgacttcaccgcctgcggcggcatcattatgctggcaaccggttttcgtctgtgcgggatccgcgcctttcccaccgccaatatgctgccctcgctaatactggtgatgcccttctccgccgcctggcaacagtttattgtctga

SEQ ID NO: 218771 - DNA, 294 bp, Klebsiella pneumoniae
atgaagacggtgcaggatgtgctgaagagtaaatatggcccagctcaggcgactcgcgctggcgtgagagatcaagccgctttcgagtcaagtccaggcttctgcaaagcgtacaatccagaagcagggttagaacagaaccactgccctatggactattacgaaatttacggcaatgtagatgaggcatatatgctggttaagactaagagcatctacgctaacggccctgagaagttgacagtggtaggaataaccagagacgcaaaaaactacgaggacagcgttaagtaa

SEQ ID NO: 218772 - DNA, 228 bp, Klebsiella pneumoniae; identical to SEQ ID NO: 199009

SEQ ID NO: 218773 - DNA, 321 bp, Klebsiella pneumoniae
atgagcctgaatatcactgagtcatataaagtcgccgttatcagcaccgcccatgtcacccaggctgattccgagatactgcctcaaatctccttcgacccgattactgatcgcggccacaactggattcacggcactgagtatggctggattgttcgtgccgggcttcatgctgaggcatggaaggagtctttacgtgaagcggggatcagctggtcggcgatcgagaacatcgagaaagtcttgggcgctggttttgaggtcgtgcattttgactgcgacgcagatacgattgacggcttgcaagtttgggattggtaa

SEQ ID NO: 218774 - DNA, 177 bp, Klebsiella pneumoniae; identical to SEQ ID NO: 199010

SEQ ID NO: 218775 - DNA, 210 bp, Klebsiella pneumoniae; identical to SEQ ID NO: 199011

SEQ ID NO: 218776 - DNA, 369 bp, Klebsiella pneumoniae; identical to SEQ ID NO: 199012

SEQ ID NO: 218777 - DNA, 330 bp, Klebsiella pneumoniae; identical to SEQ ID NO: 199013

SEQ ID NO: 218778 - DNA, 447 bp, Klebsiella pneumoniae
atgagccttaaacgtaccgatttggtatacgacctgttttacgcatctaacactgacccgatgaccgcggatcgcatcgcaacgctgaccattcagctacgcgacgaagccggcgtaactcaactatcaacccaactgtctcgcaccgttctgcgctccaataagcagaaagtctatgccgtagggcagcagatgattaacgacggcggcgacccgctgctggtggccgcggaagcattcttccgtaaagacaccgcaacactgaccgaagggctgatttccgaggtactggacttcatcgaagggaatcttgccgccggcagtacctggatgggtgtttacggtatgaagatttactccggcgaagcactgaccgagctgctgcccgtagacgttctgaaagccgacgggaccgattcagcgacaaccggtgcaaccaccgcctaa

SEQ ID NO: 218779 - DNA, 483 bp, Klebsiella pneumoniae
atgaaccagttactgaccgttaatactcgctttggcacatccaccgcgctgttcaacactatccataagcgcttaataactgtcatgcacggcgatgaggatgtaaccaccagcctgcaggaatgggaaaggaattcattacagcaggatctggcaaatggcttcggttacacgcaaacctttaaagccgctcgcgtcgtctccaccggattcggaacatttattttcccactgcgcgggagagactgtgaaagccgccgtttcgaaatggctgtgcagatcgcaggatggatggccgaaacgcgaccgcatcaggattcagcctaccagacgagcgcagccgttcgagctgtcgaaaatagtgagcggtacaccaacgtcgtctataaagccggtcacgaccaattcagtatcgtcataaacggcaacacgctggggaaaacacgcctcaaatccgacattatcgtgctggaaggtaagtaa

SEQ ID NO: 218780 - DNA, 651 bp, Klebsiella pneumoniae
atgtctaatttaaatctcaaaaaatccgacgtcctgaatgctgcaatcgttgtatcaaaagaattgagcgcaagcgctgaagcgatggctatcaagttcaacgaacgtttaagcgctggcatggataccaaaaaagataaagcggatctacgtgctgcgcaaacaaaaagcgcttactttgataacaacattctggaagcgatgcgcgacgaaaagcagtgtggtgttttctacttctcaataaaaatcgcaaagaaagatccagagctatttttccgtgaaacattagcgaatagctatgcgctcgaaaagctggcttatctgatggcttccatggcttctggtaaatgtgtattcaatagcgcgctttctactaactcacgcgtttttgcaatgattgagcttatcaagaaagatccgacaacgttcagtaatggcgacgttttcaagatcatgaacaaagcaaaacaagaaaacgagatgaagccagatgcaacatatacgcaagccaaccagctgatcaagttattccgcgatttgggaatcgtggaagcgatcaaagatggcggaaaatctgaatttggcatggctaaattcaagtttataaaaaatgatttgtttaatcatatcgctaccagttttagcaagtga

SEQ ID NO: 218781 - DNA, 534 bp, Klebsiella pneumoniae; identical to SEQ ID NO: 199014

SEQ ID NO: 218782 - DNA, 495 bp, Klebsiella pneumoniae; identical to SEQ ID NO: 199015

SEQ ID NO: 218783 - DNA, 642 bp, Klebsiella pneumoniae; identical to SEQ ID NO: 199016

SEQ ID NO: 218784 - DNA, 552 bp, Klebsiella pneumoniae; identical to SEQ ID NO: 199017

SEQ ID NO: 218785 - DNA, 360 bp, Klebsiella pneumoniae; identical to SEQ ID NO: 199018

SEQ ID NO: 218786 - DNA, 1578 bp, Klebsiella pneumoniae
atgacagtcagaatcgtgtttgacgcagtcaatgccatcgtcaagggagcaaatgacgatgtgaaattgaaaatacagaaaatgctaagctacgaggtagatggtggcagatacagcggtggcgatagtggctggaacggtcaaagttcaatgttcagctgggccaatggcgtatttccggccgggttcgctcgtgccgttgctgcagaccttggccggtctggcatcaagtgtgctcttgtgaggaaagagcttaccaaacctctcggcgtcccaaatcccgtggtaagccctttcccctacaacccagactatgcctatcaggatgaaacctgcgagcgtctggttcggtttggtggaatgattgctcaagtggctaccggtggcgggaaatcgcaaatcgcgtgcaaagccgcagcgaggatcggcaggatgacactgtttatcaccactcgctcgatgctaatgttccagatggctgacaattttcaggagtccatcgattatcgagctgcccatggtgagccgtggctcaaaaacgaaaaggtcggcatcattggttcaggcgagctgaagttttctcggtttatcaatgtggcaacagttcagacactatccagcttccttagtgagcctggcggtgatttgtcgaaggataaacgcgaattccatctccgccggcgcgaactaatcaagcaaatgctgtctaaagtctcacttctgatccttgaggaagcacatgaggcgtcaggggaaagcttctatgaaatcgcgagactctgcaaaaacgctgactatcgtctcgcgctgaccgcaacgccgttcatgaaagatagcactgaggccaacatgcgtcttatggcagtatctggtcgcatagaaatcaaagtatctgaaaaatatctgattgataagggtattttagcaaaaccagttttcctttatcgtaaaatcggttacgttccagatatcgagcttctaaacaaagaattaacaggaaaacatgtcaacttccgcgttagtatgtcgaccgcataccagaaagcctatcagctaggcatcacgtataatctcgccagaaatcgagctatcgtggataccgctgaagagtttaagcgtcacaatctgagctgcatgacgttggtcagacatgaacggcatggacagattctaaaggctatgctgggagagcgcgggctggtggcgagctttatcaacggcaagtcgtctgccgcaactcgttccgcaaaactggcagaactggcagcggggaaaatcgacgttcttatcggctcgacaatactggacgtcggcgtagatgtgccaagcgtaggcgcggtcatcatagccggtggtggcaaggctgaagttgaacttcgacaacgcgtgggtcgtggtctacgaaagaaaaaggggaaagcgaacgtatgtttcatcgccgattttctggatacatccaacaaacatctgatgtctcactcttacgagagaaagcacatcatttccactacgcctgggttttctgaaggcattttagacatagacggaaaattcgacttctcaattcttgcatcataa

SEQ ID NO: 218787 - DNA, 675 bp, Klebsiella pneumoniae
atgaaaaagtcatttgaaattcagtacctcgacccgcgcactctcattccgtatgagaaaaacgccaaaaagcacgacgagcgccagattaaagacctggctgcagccatcgtcagtcgtggattcgaccagccaatcaccgttgacaagcatcgtgtaattattaccggccatggtcgtcgcgaagcggctctggtggctggcttagctcttgtgcctgtcattgttcgtgacgatctgtcagaaagtgctgttcgggcgaaacgtctcgaagacaaccgattagccagtatcgattatgacgccattcgtatgcaggaagagctaaacgaactacttcaggatgaagacgttgagatctacggctttgatgatcgagagttgaaggtatttatcgaagacctgaccgaaaaaatggccgacgatacgttgattgacgacttgaacgaagaggctgaacgtcagcgcgaagagcataaagcgataacggaagaagttgctggtggccgaactcgtatcatcgacattttgggtttcaaagacatcccgaccagttgcgcgatcgctgttggtgatttgctcgctcacatggaagagaaaaccggtctgatgggagaagccgcttttattgcctttgcggagaagatttccgaagaggtggccgagtatgagtaa

SEQ ID NO: 218788 - DNA, 642 bp, Klebsiella pneumoniae; identical to SEQ ID NO: 177557

SEQ ID NO: 218789 - DNA, 558 bp, Klebsiella pneumoniae
atgagcattgataacaaggttttcccgatttatgagggcgcccagctgaggcgccgttttaccactgaagaagagtggaaagactggctgcgtgcgcacggtgcatatggtttccgtgtggccccgtattacagtcgctgcgttgtggtatttggcgcagatcattatgtcgagacgatgaagcagctttacggcgtcgacgatagcgagtttatcggcgacgctggtggctgggtgacggatatgggttacttcgaagcagaccgttcggttcacggcgttttcctgcctgacgtccgggacgaaaaaacgttatggcatgaggcgctgcatgttgccatgtcgaccgcagaatcgcacggcgttcatttggtcgatcaggaggccattacctatctgcaggggtacatcgccgagaagctggatgctgcattcagacaattcaaggctgataaaaaagcaggtggcttacctccagtagaagccatcgtgacccgagatccgcattccatccgtcgcggagtttatggcagtgtcaagaaggtggtgaagagatga

SEQ ID NO: 218790 - DNA, 891 bp, Klebsiella pneumoniae
atgaccgacatcattatcaaacgccaccggcctgaagagttcccgcgccacctggacttcatggaacgcatagttgtgaagaaaggcacggtagacgactggaatacgttgaaaggcttgcattacaaaactgacggtaaaccttttgccccgtcttattaccgagctgagctggacggccgtctcatcggtgttctggtcatggcttacccgaaacttctactggcgccgcgtcatcgcatgttcccggatatcaaaccgacatcaaatacgcgtgaggcgaaccagatttggggtaagcgtgtgaatcaggaattcgccgtcgtcagccgtctggtagccgatacgcagtatcgtggtctgggcttatcgtatcgtttcatgaatatggtttgtcgtatgcacgacaagccgatcctcgaaattcagtcgtcaatgagcaagtacaacccattcgctatgaaagcagggtttaagttcatcaagccagaaagaccaaagtcctacgaaagcgctctgaaagtcttccagcgccattttagagctgaccctggtgataacgagtctgtggtgaaagaactgctgagaatggcggaggggcgcaggaaacgtgcattgcatgatctggttgcgaactaccacaaaaattcgtcgctggcgaaagctggacgtaaccgcgggacgactgttcaggacattgcagacacactgacggacgaagcgagcattgtgaagcttctgaaggatattcacacgctgagtttcaccagtccgctctatggtgtgtatcggaacccggattttggacgtcagctgcctgacgctctgccacttctcgcatttgataaccagccgctggatgcgccgctggatttaacgaaaattttgtaa

SEQ ID NO: 218791 - DNA, 267 bp, Klebsiella pneumoniae; identical to SEQ ID NO: 177554

SEQ ID NO: 218792 - DNA, 588 bp, Klebsiella pneumoniae
atgacagaatccgcaaaaaaaccgcgcctgtctccggcgcaatgggcagagattgaggttaagtggcgctcaggcgaatacaccctatcgatgctcgaagaagagtacgggactcgctctgagacgttctcgcggtacttcaaaaagaaaggtatcgctaaaggctcagacagtgtcggggagatgatccgcgaatcgttaaagtcggatgcggaaattcgtgcgcgagcgcgagcgcaaaaagtagaaagcaggaaagaagaatatgacaagtgggcaatatggctgagcggtctcaccattaaccagatcgccaccgccaagaaggagggtcgctcacttagtttagttgaagacgatatcaaggctcttcagcgtgctgccgctgtcgttcagaagtgtttcgacgtgtcgagccgcgctctcggtctggaaaaagatgacgttatcactgacgaaatcccgaatcttgtgttcggcgagctgacttcagcccaggtagatgagcttaaaaaaatggacgaggacaaccttgtcgatgaagaggaactgtaccttcctgatgtagacgatgagggggaggaataa

SEQ ID NO: 218793 - DNA, 1257 bp, Klebsiella pneumoniae
atggctattccatcatccctgagtctggttcagttgcattcggggcagatgaaggtcttcaagtctccacatcgttttaaggttgtttgcgccggtcgacgttggggtaaatctcgtctgtcgatctccaaaattatcaaagccgccgctgccgatcgtaagcagcgcgtttggtacgtcgcgccgacataccagatggcacgtcagatcctgtgggacgacctgcaggaagttttgcctcgcaaatggattgcgaaaaagaacgacactacgatgactatcgtcctgaaaaacggtagtgaaatcgcactgaagggtgcagataagccggatacgcttcgcggtgttgcgctgaactttgtcgtgcttgacgagtttcaggacatgaagccggacacctggtacaaggtgcttcgaccgacgctgtcatctacgcgcggcggtgcgctgatcatcggtacgccaaagggattctctgagttccataagctgttcatgataggtcagaaccctgagatgcaagcgaaaggcttgtggaagagctggcaatttgtgacggcggactccccgtttgtaccagacagcgagatcgaagcggcgaagaacgatatggaccctaaatcgttcgcgcaggagtaccttgcgtcgttcgaaaacatgtctgggcgcgtatattacccgttcgatcgcaacgtgcatgtcaggccgctacagttcaatccgcgtttgccaatctgggttggtcaggacttcaacatcgaccccatgtcctcggtgatcctgcaaccgcaacccaatggtgaggtctgggcgattgatgaggttgttctgttctcttccaacacctcagaggtgtgtgatgagctggagagaaggtactggcgccagaaaagccaggttacggttttccctgacccggccggcgcatatcgacagcacgctcgcggtgagtctgatgtggacatcttcaaggagaaggggttcatgcgagtggatcacccgaagaagcacccgccaatcgctgaccgtgttaacgccgtgaaccgtctgcttctgaccgcttcaggcgatgttcgtctatacatagacccgaagtgcaagcacctgattgaatcgcttgagaaggtgatttataagcctggcggccgagacattgataaaacaggtaacgtcgagcacagtgccgatgccttgggttatccaattcaccgtcgcttcccggttaaaactcgtgttattcttggcggatcaagataa

SEQ ID NO: 218794 - DNA, 1575 bp, Klebsiella pneumoniae
atggaattgtcgaacaaaatgattcaggatctggtgaatcgccgccatcctgattatgagctacgaaaagctcattgggactttatcgcagccacctacgccggtggccgcacttggtttaaagataacatcttccgctactttaaggagggtgatgccgagttcaaggagcgtctggaacgcgcttaccggtttaaccatacccgcgaagtcgtgaatctgattaataaatatctgttcaaagaggacattcagcgctgcgaggatgatgccccgccgtcagtgaaggagttctggaagcgagcaacccgtcagaatatgaacattgatgattttatggttgaagtagacctccagtcttcaatttatggccgtatctgggtggttgttgatagcaccgtatcgggcgacatcgagtcgaaagaagaccagaaaaagtctgatggccgtgcctatgcatattgggtttcacctcagcagatgctggactgtgcttgggatgaagaggggaatctgagttggattctgatctgcgaagtgagccgcgacgacgctgaccccttcacctcatcgggtaaagagtttctgcgttaccgtctatggacgaaagaccactggtatcttttccgcgaagatcgcaaggggcagcggtcaggtagtagaacgaaagttgttttggaagatactggagagcacggtctcggcatggttcctgtcttccctgttgactgtatgggtcagagcgaatcgccgtacttcagtccatcactgattgacgatattgcctatctcgaccgggctgttgccaactatctgtctaaccttgatgccatcattcaggatcagacattctcacagctggccatcccggttcagtctcttctgcctggtgatgagaatcacaaaaaagtgctggagtttggcacgaagcgcgttttcacctatgacggtgaaaatggcgcccagcctttctatctgtcgccagacccaaaacaggcgagcatgatcatttcgaccgtccagcagatcatcaacgagatttatcactctgttggtgttgccggggagcgcacgaagcaggacaacgcaaagggtatcgacaactccagcggcgcagccaaactgtatgacttccagcgagtaaatagtctactcatcaataaatcgagtcgcctgcagcgagccgaagaaatgttgatgacgttggtaactgcatggatgggtgagaagatgccagagagcgaagaattggtcacgtacccggagagtttcgacatccgtggactggttgatgaattcgaagtcgcgagcaacctgaaagatctggaagcgccagattctgtccgtcgttatcagatggaaatccttatcgataaaatcttcccgaatctttccaaagacaaaatgaaggatattgagaaagatttattgcaatttcctccaaaaaatgacgccttggcccttgaaagtaagttagcacttacttatgataaagatacggcccgagaaaatgggcaagaaaaatcccaaggaaccgggaaaccatcacccaagaaaccgggtaatgacgaataa

SEQ ID NO: 218795 - DNA, 885 bp, Klebsiella pneumoniae
atgaaattatggcagtggatgcagctgaccaatacccatcgcgggtatatggatgttgcaggtaaagaagagttaggtggcggcggtggcgaagcatctgtcgaagacaagagcgccgcaccggaagacaaaggcgataagagcgaaactacagctgacgatctggaaggtctgagcgctgaagagctgatcgctaaggttcgtgaagagcgtaaaaacgccgcgtctctgctgaaagagagcatgaagcgcaagagtaacgagcaaactctgaaagaaaaactggctaagtacggcgatatcgcaccggagcgtgcgcttgagctggttcaagccgagtccgctgctcaaaaagctcgcgaagacgctgagcgtcaggagcttgagcgccgcggtgaatttgacgctgtgaaaaagcagatgatcgaagcacacggaaaagacctggaaggtcgcgacgctcgtattgctgaactcgaagctgaaatcgcaggtatgaagaacaagttggttgagaaaaccatcggtacttcgtttggggagtccccattcctgcgtgaaaaagtcctgatgactccggcaaaagcccgcgttatctacggctctcacttcgaaattggcgaagacggtcaggtagttggttacgacaaaccagctggcgcgaaagatcgtgcggttctggttgatggtcaaggcaacccgctggcatttgagagtgcgattgaacgcattctgcgtgctgacccggaggctgatgctctgttgcgcagtgaagcgaaacagggtgctcattccaaaaccaccaccaaaccgaaactgaataccgaaaccaaaaagtcgacactggataagttgaccgccggcatcggtaaattgaacaagtaa

SEQ ID NO: 218796 - DNA, 873 bp, Klebsiella pneumoniae
atgcctttactgcgtgaagaagctgaaaagctgagtaataacgaactggagcagggcgtaatcgagacgattatcgaccgtgatgacctgttcgcaatcctgccgttcttcaaagtgaacagcaaagcgtacctgtataaccgcgaagcgactctgtccgaagccggtttcatcgacgtgaacgaagttatcccggaaggcgcggcgaccttcaccgagcataccgctaaactgcgtattatggccggcgatgtggacgttgataaattcctggctaccaccatggatgacactaacagccagctggcaattcagatccgcgcgaaagttaaaggtctggctcgcgcattccgccgcaatctgatccagggtgatgaaaccgtcaacccgaaatcctttaacggcattgctaagctgatggctgctgaccagcacatcgcggctaacgcttccatgaccttctccatgctggacgaactcgtcgatgctgtgaaagatctgggcgctgactgcctgatggttcgttccgagcacctgcgtgcttaccgtgcgctgctgcgtaccgtgaacgccggcccgagtgaaatcatggtcgaaaacttcggtcgtccgatgctgacccacaacggcattccgttcatcgtgaacgactttatcccggttactgacggcgcggctccgatttattgcctgcacatgtccgaagagaacggcctgtccggtatctacggcggtgacaatgccggtatcgttgtcgagtccatcggcaccgttcaggataaagacgcaacccgtacccgtgttaagtggtacaccggtctggttaacaagcatgacaaagccattgcagctctgggcggcgttaagatttaa

SEQ ID NO: 218797 - DNA, 444 bp, Klebsiella pneumoniae
atgcctgagcaaaaaatggaaatcacggacgagcagttcgctaatttcaccggaacgatgtttaacacgtcgtttaccaaatcagtgtctgacgcgccgatgaccgaatatcgccagaatcgcctgactgcatgtttcaagtctaagccacacgccgatacagccgctgtcattcacgtccagagcgtaacggttgccccgaagacggcgactgtgctggtgggtgatacggttcagttgggaggctctattaagcctgatgacgccaccgaccgctcttaccattgggttactgaagattccggcattgcgaccgtcgatgtgtctggcctggtgacgggtatcgctgaaggcagtgtgaagattcgtctggtagccaatgacggctctgtattcggcgaagcggctatcaccgtaaacaatccagagacagtccaagtttaa

SEQ ID NO: 218798 - DNA, 426 bp, Klebsiella pneumoniae; identical to SEQ ID NO: 177547

SEQ ID NO: 218799 - DNA, 834 bp, Klebsiella pneumoniae
atggagcagcttggcgtttataaagacggggatgatgtcacgttacgcttttctctcgatgtgatgagcgctacctcagccagttactctgtgaaagacgccagcggaaatatcgtcacgtccggcgtcgatgtccctgtctctgatgggcagatgttcgtcactgtcactgtccctggggcgattaacgctctgggtgagcgtgaacgcgatttgcgacgcgttacgctgtcagttgatgcaggtggcgctttcattaccaaagagcagcagtacatcgttttacgcagttttgagctgtctgtcccgaagcagtcgtttatctccattggcgaagcgcagctgcaggcgatcgacatgcttaacggcggaagtttgctaaccggtggcgaaggggacttgcgacgccagctgatagaggcgacgaagcgcattaagtcgatgtcgttttcaattcgtcggatctacggcatggattgggatgactatgatcgccctcagaatatgcttcagacgtcgactctgcctttccgctgggctggtcagtacacctccgacattgttgattgggataagctgaccgacgatgactttatggagtttccagaagcttttcggaacgcacttgctctggccgttgtgaatgaagccagtgagattgccggcggcagtgatattcagcgtgcgcgtgaggatgggatcgtctctgagtcgattggtgaaacgaccatggcttaccgccagggtaaaggcgctgtctctattgtcgccaaaacgacgtggagaatgttgctgaagtacatggataaccgcgtcatcgttcgcagacagtaa

SEQ ID NO: 218800 - DNA, 345 bp, Klebsiella pneumoniae
atggatattgcctggcaggttgagggtgctctgtacaagaagggtggtatggacttgtacggagaggcgaaatacgagttcgctgctcagataaagatgggcgtagtttcgttcgttgacagtatcgataaaacgtctgttcgtgctgatagttccgcaagccgtggcaaggcggagattgcgctgtttgatgcggtctttatcgtgccattgtcggcgccgatcgccaaagaggatgtgcttatcgttaacggcaaaaaaatgcgagtcgaaagcatccaccagcgatgggggttgcgcggccgtccggggcattatgaagtcggggcgaatatatgggtttaa

SEQ ID NO: 218801 - DNA, 495 bp, Klebsiella pneumoniae
atgggtttaaacatcaacacgctgaatctgaagaaggcccagagtcgtctcagtaacagccagaaagcctataaacgcgtacttgtttctgaaatggcaaagctggctaatgtcgctcagagaatggcaagagcaatggccccgatggaaactggatctcttgaaagtgccatttttgctcgcgtggtgaagactggttacgacagcttgcacatcgaaatgaaggttgatgaaagccgaccaagacagagcagtggggcggtgaaggttaaacccggcactacagttggtgattatgcgatctatatggaaaagcacaaatacagcctcggtgccggttctattctgaagcagatgacacaggggccggtagatactcgacgggttaacgtcgggcgtcggtacatggaaagagccgtcgaatacattcgaaagcggtttcctgaaatagtagaaaactcagccaggaaagcagggtttataaggagacgatga

SEQ ID NO: 218802 - DNA, 381 bp, Klebsiella pneumoniae
atgtttgtagagggtctggctttatatttggcgaagatgggggttggcaaagtcggctccactatttttgctgatgcaatgccacaagatgccaaaagcgccgtgatggtgacttcaccaaccagcggcattgaagtcgatcatgaacttgccggcttctatatggactcagtgctgattgttgtgcgtgatatttctctatcagccgcacagaggaaaatgcaggtgataaatgatttgtttcctgtcgacaatgtcacgtcaaagagtgttttttttaggatgcttcgacccatgacactcccgattgtgtatccccgaaatgatggtgctctgttcgagattgggcttcctgtggaatttgccgggtatatgttgtaa

SEQ ID NO: 218803 - DNA, 450 bp, Klebsiella pneumoniae; identical to SEQ ID NO: 177542

SEQ ID NO: 218804 - DNA, 492 bp, Klebsiella pneumoniae
atggctaatacccatgtaaaaaacatcaaattaggtgcgtgtgcggtttcattcgctggcaccgatctcggttacaccaagggcggcgtagaggtagaagtctctactgaaactctgaaagtgaccgtagaccagctggggcaaaccacgatctctgagttgattcagggtcgtaacatcaaagtaaccgtgccactggcagaaagcgtgctggcgaacatggttaatctgatgcctggctccaccatgtccaccgacaccaaaactctgagcatcaaatcagcacagggtgtaaacctggttgacgtagcgcagcagctgatcctgaccccgcaggacggcaccgacttcattctgactctgccgaaggccgctactggcggtaacttcaccatggcgtataagtctgatgacgttcgtgtgttctctgtggagttcaatgcgtacccagatgataccggcgttttgggaactctttctgccccaaagtag

SEQ ID NO: 218805 - DNA, 318 bp, Klebsiella pneumoniae; identical to SEQ ID NO: 177540

SEQ ID NO: 218806 - DNA, 4578 bp, Klebsiella pneumoniae; identical to SEQ ID NO: 199019

SEQ ID NO: 218807 - DNA, 336 bp, Klebsiella pneumoniae
atggcaagacaaacctttaactggttcccggattttgagtcagagaaaaccgtaaagccagaagtgaccgttctgaagtttggtgacgattacgagcagcgccagtcagccggtcttaaccgcattaaagaagaatgggcgctgacgtttaaaagaccttacagcatcggtaatgctatcgacgattttctgacagctcgcggcgcagttgagtcattttactggacgaccccgcgcaataagaaaatcatctgtgtgtgtgattctcatactgttaaacgctatccggggtatttggagatcagttgtacctttagacaagtttttgaatcttga

SEQ ID NO: 218808 - DNA, 699 bp, Klebsiella pneumoniae
atgagtattcgcacggaaattcagaggttggcgccatcctccgttatcgagcttttcgagcttgatatgtcggtaacaacctcgggcgggaagcttttctttcacgccggaacgaacaatctcgacacatctgtcgtctggcagggagttgagtatctaccatggccgattaaggcgagtgggttcgataaaacgggttcgggttctttgcctcgaccaaagatgaccgtctctaactatggcggcacaatttcagccgaagtcgcggcaaatgacgatctggttggttgcacaatcacgcgtcgtcgcacgctggctcgtttcctcgacgcatcgaacttcccatctggaaacgcgaccgccgacgcctctcagcacttccctgatgaaatctggttcgttgagcagaagacactggaaactaaagatagcgttgaatttgagctgtccagtgtatttgatttgatgggcgttcagttacctgcgcgtcagatcatcaaaaacagctgcccgtggaaataccgcggagcggagtgtggctactcaggcccgtacttcgacaagaacaacaatcaggtcacatcgctcagcgacgactactgcaccaagcgtctcgatgcgtgtaaggccaggcgaaacttcttcgccaacgggatcatcgcttttggcggctttccgggggcaacacgtgttcagtga

SEQ ID NO: 218809 - DNA, 828 bp, Klebsiella pneumoniae
ttggcggctttccgggggcaacacgtgttcagtgatattaaatccattgccggctccgcggtgacgcagtcgctatatcaatgcgctattgcccgttatccaaatgaggcgtgcgggttcatcgtccagacatcgggggagaaatatcgctttattgaggcgcgaaacgtctctgaagacccggccaatgagtttgtcatgcatcacgaagacgtgattgctgccgaagacgagggcgaggttgtggctatctggcatagccacactgatcgccctccagtggcctctgacgccgaccgcgctggttgtgaggcaacggagctaccttggctcatcttctccgtcacgaaaaatcttaacccggagattgatgccgagtttcgtttaagcgagatggaagtgatcacgcccaatggctttgaaatgccgtacaccggccgaccgtatgtctttggcatcttcgactgctggatgctgtgtcgagactatctgaaacgcgaattcaatatcgagatcaacgccaacgctcacctgcatatcccgtcgtggtatctgggcgacgacgacattctcgacctgaattatcgcaatgaaaatctcgtccgtcttgcccatggcgaagagcctcagaagggcgacatcttcttcattcagtacgggaagatgccagatcactgcgctgtttacgttggtgacaaccgcatcctgcatcaccaaatcgacaggctaagcagtcacgccacttacggcggtatgtaccagaaaaatactacgcatcatttgcgtcatcgggcgttattaacagggaaggaaaaatgtctgaattag

SEQ ID NO: 218810 - DNA, 612 bp, Klebsiella pneumoniae
atgtctgaattagttcatgtccagctgggcggcgcacttgcaaaccgcttcggccgacactggcatctccgcgcatcaaatgcggcgcaggccatcaatcttatcgacgcaaacaaaccaggcttaaatgcctggattcgtcgtaatgcgaaggtttacgaccgttatcacattcaaatcacaaccaaaagtggagccacatggtcggttgacgaaaccgaatacatgatgaaaggcgccggtaaggatgttgagaaaatacgcatcacgccaataccaaagggacgtggcgggaagacgcttggctacgttcaggtcgcgattggcgccgcgatggtggtcattggtgcattcacagaaatcttcactgcaggcacatcctcggcgctggttgtggccggcatgagcatgatgatgggcggtctggctcagatcctatccccacaagcaaaaaacccggaagtgagacaagcggataactccgactcgttttatttcgacgggcctcaaaacactactaatcagggaaacccggttcagctgaactacggcgaagaaattctcgttggctcgcaaatcgcaagttcctctatcactattgaccagatttaa

SEQ ID NO: 218811 - DNA, 10752 bp, Klebsiella pneumoniae
atggaagttccaaatttcaaaaaaagccgtctctcgcaattagtcgcgcacggcctgattatctcaggacgcggcggcagtaagggtggcggtagctcaaggacgccagtggaggctaatgacacggtaaacagccgcgctatggcttctgtattggatttgctgggtgagggtgttatcggtggtctgattgatggggcaaaatccatcttcctgaacgacacgccgctccagaatagcgacaattcctacaacttcagcggtgtaacctggtggttccgcgacggttctcaggatcaaagtgtcatcgatggttttgacttcattgaaacgccgaaatcagtagggcgtcaattgaagcaaacgagccaggttaacgtgtctctggattctgcggacagcgatcgcgttcgtgtagtgatgaagtttccttcacttcgcagcatcgataaaaagagcggcgatactaacggtacgacagtccagtttaaattccagatcgacgcaggtaatggcggcggctttgttgacgttgttgcagagggagagtccaacgcaaccatttctctgaccgcgaagaagacaggtgtttattaccgtagttatgttctggacttaccgaagccggcaaaggcatatactctgcgtgccattcgtctgactgaagatcataccgataacagctatctctacgatgacacctacatcgattcgatcggtgagattgtcaataccagcctgaactatccgaactctgcgctcgttggcctgaaaatcaactcagagcagttcggttcttcaatgccgactcgttcatacctgattaaaggtttgaaaattcgtgtcccgtcaaactataacgctgacacgaactcctacgacggcaattgggacggtacatttaagctggcatcatcctccaacccggcgtggattctcttcgacttgctgacgaacactcgttacggtctgggtcagtttgttcaggagtcgatgattaacatcggcgagctgtatcagattggtcgctactgtgatgcatacgtcgacgatggcttcggtggcaaagagaaacgtttcgctatcaatacccagataaccagtcgccaagatgcatatcgcgtcgtgcaggacattgcaggggcattccgtggcatggtttattgggctggtggcatggttcacatcacgcaggattctccagcagaccctgtgatgctgttctccaacagcaacgtggtgaatggatcatttgcctacaaaggttcggcgcgtaaagatcgctattccgttgctcttatcacctacaacaacaaagaggacggttacaagcagagcgtcgagtatgtagaagatcaggaagcgattaaacgctatggcatccgcaaaactgagtcagtcgcattcggctgtacttcacgcggccaggcgcatcgtgttggtctctggacgctctacacctctcgcatggaatctgacgtcatcacctttgcagtaggtatggactctgtattcctgatgcctggcgacatcgtgctgatcgcagataaattccgcgctggccgtcgcaacagtggtcgtattatcggctacacctccaatagcatcaagctggacgctccggttgatctgacttcagttggaaaccatatcaccttcctcagcgcagaagggaagatggttgggcgtgatattttggagaatgggaagaacatcaccaccgtcacgtttaaaaccgctctcagctccaatgagacgccggtaagcgatgcagtgtgggtcattgctcaaccagacttaactccgctacaagcacgcgttgtgagcgttgctgagggtgacgatggtacgtcgttcaatatcacggctattcagaacaacccgaccaaatacgaagctattgatagcggcgcacagctgatcccgcaaaataccactgttcttgacccaacgttctcaaagccgtcaggtctggcgattaccgaaggcacttatctgtcctctccgggtaacttgtccgtttctctgaccgctacatggcagggcaagtcggctcagtattacatcagctggcgccgctccgatgccgggaatgtttcaaactggaaatctgagcgcgtaactgaagaacagttcgaacttcgtggagtagcggagaacggccagtacgacttccaggtgtacgctgtttctgttggtggtcgcaaaactgatcctatcagcatcacctacaaagttctgggaaccatgacggcgcctgatgccccgaccggtctaactgcggtaggcgattatcgttcaattgttctgaattgggtaaacccggcttccgttgacttggatcacatcgaggttctggcatccaagaccaacgataagtctaaagcgcagctgattgccaaggtatctggcacaaccttcagtcacaacggtcttgaagactctgtcacctggtattattgggtacgtgcagccaacaaacgtggaatgctcagtgcgctgaactctccactagcgacggtcgcaacgacgcgcgacgttctttcgttcctgcaaaataaaatcaccgagtccgagctgggtcaggatctgattgccgacatcgacagtaaggccgtggccacagaagttgatgccgccatcgaagaagcgaagagccaggcgacatctcagattgatgatgctcgcgccgagtccgcgaatgccgtcaacgaagcgaaaaaagccctgaactctgcaattagtaaagagactaccgaccgcacaagcgctattgctggtgaggcaaccgctcgtgcaaaagctattgctgatgaagtggacgcccgtaacaaggcaatttccgatgaggcgtctactcgcgcttctgcgatctctgactccattgccgtggaagccagcaatcgtgcaaaagccattagtgactcagcctcttctctcaatgcgaaaatagagaaagaagtcagcgatcgttccgcggctgtttcagcgcttgatacgaagacggctaatgctatctctgaggaaacctctaaccgaatcgcgaccattgaaagtgaagcacgcgcacgcgcagacgggctgctgcaagagaagaataaccgtcagtctgagatccagaatctctccacgcaaatgcagacggctaacgaatctctggcacagcaaatatcccagattgcggctggtactggcgagcaatttgacagtctgaacatctggtatttcgataccgataatgaaggctggactgaggacgacggcagcgctgttccgatgaatgtcaccagcgatggttggttgaaagctgcaaatagcacttcaacatgccgttctccgaacaatatggcaatcgacgcaaatgcctatcgctttatcaaactgcgcattaagaaagtcggtaagccggtatgggctgggaagttgttatgggttggcgcatcggagcagggttggagtgacgcacgttccatcactttcgatgagccggagtatgacgccaatggtattgccactttgtccattcatgacatcgactggcgtgcctcgacgactattcgccgtttccgttttgacttcttaaaaggtcaggatgacaagaactatcttctgattgactggattgctgtgggtcgaccgacgcctggcgctggcatggccgcacttcagaatgagaaagccgctcgcgtagatgctgacgcagctgaagccgcaaaccgcaatgctctagcggtccagatgcgaggttcttacgacggtaacgatctgtccaaagtaggctcgggcctgattttccaggagcaacaggcgcgtgtagctgctgataaagcggaagcaacagctcgtcagtctcttgagaccaaagttaacgacagtgtttcgaacattaacaagtccctcgacaccctgagcactcaggataaagcgatggcgtcggacatcaccggtcttaaatcatccctgaaggataaagcggatgcctcagcattgcagacgctgaagacgtcagtggatcaacagggttcgagcatttcgactcagggtcagtcgatcaccaaactgcaaaatgacctgaacactaccaacgccaatgttggtaaaaaggccgaccagacagcgctaaccgcactgcagggaacagtgacgcagcagggtaaagatatttctgccgcgaatagcagcatcactaacctcaaaacgtctcttgataccacaaacaacaacgtagcgaagaaagcagacgcgacggcggtcaatgatctgacatctcgtgttagcgcgaccgaggataaagcatccagccaggcggacagcatcgttcaactgaacaactcactgaacaacgcgatcgccgatactgacgcgtccgccgcgatgccgaataacctcatcgtaaacccgtcgtttgagcgaggactggatggttatatcggacagttagcggcagccagtgtggttgagatctccactccacatggtgggacacgggcgctgaaggttgatgttggttatgtgtcaccgggacagtatgtaagctttgtacagggtcggacgtatgaaatcggggtatgggttaaggatctcggagcgaccactgataatggagcaggtaacaacaaactgcggatcggcaactccgctggtcagccggtgtttgagcgaccgtacaatagcgggacgatcggttccgactggacgctgatttccggtcgctggaaggccacggagacagccaagcttccggttacgctgagcaacggtttgacagccgggagtcgttgctttgatgatttctatgtcatcgatgtgacagatagtgtcaaaatcgacgccaacgcctccgcattgtcttctctccagaatactgtaacccagcagggtaaagatattgcgtcgcagtccaccagcatcacttcgctgtcaaaccagatggttaacggccgccagaacatgtgggtgcgtagcgtatacagcgtacaactggcgaacaataccaccgagccgacttttagcgatatcaacggtaaggcgccaatctcgatcgatgaggttcctgacgcggcaaaactggactttgcgagcgccggcagttacgtgatcgcgcattacaaagccttcgtgaaggttaatgctgataccaccatcactatggcaccagggtcccgtgtttttgatgatacgggcgccgtgtacgtgaacggtgttagggttgcctttggtaatgcaggctggaatacggttagctttgatctgaaagctggctggaatacggttgagttcctggtgaaccaatggactggtcaggcttacattaacctcggctttaaactgtccgagaaggtagcccagctgaattctgctcttgggatgaacgcgctttcgaatgccattagcgccgtcacctcaaacgtcagcaccgtaggtgatcgcgtcacgagcacctcgcagagcgttactgatctgcgaaacagcctcgaacagaccaacgcgaacgtcgcgaaaaaagcggacgccgcagctctccagacactgcaaaatacggttacccagcagggcaaggatatcgcaagccagagcgacagcgtgacgaacctcagcaacgcactcaataatgtttctattggcggtgtcaacctgatcaaaaactcaggcgacatgaccggctggtctggcaaaaccaatgagatcttccgtggcaatgcggtgattagtgcgacttcaaaggctggtagctcttatcgagatctcaaagagatcattctcgacgctccagtcgacaatgcagagtacgtttacagtttctttgcaaaaggcggtgagaacggccagagcatgaccgcttacttctacaatcctaactcgacgatatctagtgttagtagccagggtgtgtcaggcggtgatgtcgatggtcgtatgtcattcactttgacaactgagtgggttcgttattgggttaagtggaagcagaagccgggaactggatctaagagactaatccttgctcgcatccaagcatcttcgacgaaagatcagaccgtctctatcaccagccctaagctggaagttggcaatatgcctacagagtggtctccggcgccgagcgatatggcatcgtctaacgatctgtcatcgctgaagactacggttgacgcgaatagcggcgctattcagtctgtaacctctcgcgtccagaaaactgaagacaatatctccacgcagaataccgcgatcactaagcttcagggtgatttgtcgaccaccaacaatctggtttccacgaaggctgattccaccgcgcttcagacgctgtcaggtcgcgtcgataagacggagtccagcatcagcacccagaacgatgcaataaccaagctgaacagcagccttgataccacaaataaagctgtggctaaaaaggcggagcagtcgtctctcgatacgctgagcggccgggtatccagcactgaaaatgggatcacggcggcgaactccagcatcacgtctctgaatgcggctattcgcgcagagaacgcgagcagtggggatttgattactaaccctacatttgaccctcagtacgctcagatgggctttaccgtcgtcacaaccgacacagatggtgttccagcaaactgtccattcagatatgcggctaaacttgcgtcccgtgaccatcatccgaacttcaacgccatcgttgcaacattgggcgatgtgtttgagatttcggtgctggtggcgtgcggcgctgggaatgctgactttaacctctatctttgcacagcaaacggcccaactggtgggataggtgccccgctttataatggcggaaataccaaagctacaagcacctggactcgcgtaacatggaagttcactgttagccaggcaatggttgacaaaggctacattcgtccgttcctgcaaatcaaccagtcttcaccgttcggtacgatctggtacgtcactgactggcatatgcgcaacatcactgcggcatcaaaggcgcaggatacggcgaatgccacctctaaggcggtcgattctctgacgtccacggtgaaccaacagggcagcgatatttcctcgatcggctctcgtacaacgtcgcttgagaatggtcttagcaccacaaacgccaacgtttcgaagaaggctgattcttctgcgcttcagacgctacagaactcggtaacacagcaaggcaatgacatttctggccaaggttctcgcgtaacgtctctggaaaataacctgacggccggagcaaacctcattcctaacccagcgatgcttaacggcgctcagggttggggtggttctgagacaactgttgatggttacgcggcggtcgtcagcagctcaggctggggaccatcgtcgtcctacttccaagtgacgccaggcgacattatcgatttgagcctgatgagccagagcgcgggcgcagcatccatctcatggggactccgcttcgacggccctggactgagcaatttctgtctctacgcccctgcgttgaccttcgcggctggcgagaagaagagtgtatctgcggctattaccgtacctgctggcgcaacaaaggcgatgttccaggcaagcgctagggcgacttccgcacgtaccgtatataacatcattgctacccgccgtgatgctggaaccaaagccaacagctctgcgattgatacgttgaacagcaccgtcaaaacgcaaggtgacacgcttagctcgatcggaagtcgtacaacttcgctggaaaatgggctgagtagcgctaacagcgctctctcactgaaagcggacgcgtcggcactgtcatcgctgacaaatacagtgacccaacaaggcaaggatctggatgcagcagaagccaatataactgcggcgaacaccagcatcacctccatgcaggcgtctctgactcgtcgcactgtatttacggtaacggcgaaaggcaacggtaacagcgctaatcacggtttctttgatgagtcaggtaaaaatctgtttacgcctggtcgcagctatgcgctgatcacgtttaaagcgaatagcgacggctcgacggtcattgataccagcaaaacctatgacgtttttggctctgccaacaacgggaaggcgatgtctgacgatattgcggctctggctaatggcgtttacgtttgcgtgatgacttatgacgagccgtcgggtcagcgtaattcgattgcatctgccttagagttgctcggtggcacaactgaagttattaactctctgccatatcgcggcgcgtacattctccttggccgtaaaggtatgaaggccggcgacggtctggagttacgcgcacctacaggtggtgattccagcgcatttatttccacgtccgttgagtttgttaacggcatcatgaccgggttgggtgcggctggtggcgtgatgatgaaagctgatgtgaacgccagcgcgatcaccacgttgcaaaacaccgttaagcagcagggcgacactatcgcttcgagcagtagtgctatcacctctctgcaaaacgacatgaagacggttaatgacaatgtctctaaaaaggcagatgcatcggcgcttcagactttgcagaacacagtgacgcagcaggggaaagacctttccacccaaagcgcatcgctgacgcagcttaataacagcctcagcgcgacaaacgccaacatcgatgcgtcgggcaagattccgggcaacctgatcatcaacccgtcatttgagcgtgagaaggatggctacactggctggagctctatcgcctccgtcatcgcagcgtcggtgccacactcaggaagtaaaatcctcaagctggctgccggcggatctgtgggcgtcgggcaggatgttacctatctgaagggtcgcacctacaaaatcggcgcatgggctaagcaggactcaggcaccgtcatccaggctgcggacaatacgaagttccgtatcgctgacagtaccggtttgctggcgagcaaagtgtacggtcctttcacttccgactggcaggagattagcttcacctggaaaccggccaaggatacggtagcggcaacacagatcaccgcctatctgtccgccggtgcgatgtatttcgacgacttctacgtcatcgacattactgaccgcgtcgatctggatgccacaacgtccgcggtttccggtctgacgacgagagtgtccaatgctgaaggggatatttcaaatatctccaacagcgttaccagcctgaacaatagtttgagcacgttgaataagacagtcagctctaaggctgatgcctcagcactgtcttcgctgcagaacacggttacgcagcaaggcaaagacttgtcttctgcgagtggcagtgtcactgacctgaagagtagcctgaatacgctgaaggtccagagtaacccgtggatcgacggtactttcgaaacctatgacaacaatcagcagttaggcggcagcactgcgattgtaacgacggacttcaagagcagcggcagcaaatgtctgaaggttactcgcccggccaataccagcgggaattccgacaagatgatcggctcttattctgcggtgcgccagagcgcgaaatatcgcgttgagttttgggctatgatgccggcaagtgaagccccgccgtctggctggactgtggtcgttggtctgcactccatcaacaaagatggtgggaatgactggcagggcattacgttcaacgaggctggtcttggcggtcgcgaccagtgggttaagtttactggtgtagtgaaagtgagtccgagcgttacccgcagccatgtatggatttctactcgtggtcagagtggctccaacacacctggatacgcggtgtacattgatgatttcgtcattaccgatatcactgatgctgcggatgcacaggctacggcggatgcaaacgcaacagcaatctcatcgttgcagacgaaggtcagcgatatcgatgggaaagtgactgcccaaacgtcgcaactgtcttccatgcagtcgaaggtagacgcgtcttcttcgaaagtggatcagctgtctaagaccatttcggacagtcagagcactcaggcatcgttgaacaccagtcttcagtctcagattgatgcccaggcttcggccaacatcaaaaaccaggctgatctgaactcggcgacaacgagcatcgcgtctatcaaatcgactcaggcgactcaggcgactcagattagcgcaatggcaaaaacgcagactgacatgaccgcatcattgaacagtcaatctgcatctatccagacgctgcaagaggctgtttcaaacaatgacgcgctgaacagtacctggatggtgaaaatgcaaaccaacaacaacgggcagaagtatgcggcgggtatcgctctcggtgttgatggtaaaaatatgcagagccagttcttggttcaggcagatcgcttcgcgctgattaacacatcaaatggtaacacgactacgccttttgttattgacaacggcgtcacctatatgaatgctgcctacattaaggatggttcaataggcagtgctaaagttggggatttgatgagttcgggtttccaagaaaacgttagaggctggcgaatctctcgcgatggaacgatgaatataaatggctcagggccgggtagttccagaacggtaattacaaacggtaaaatcgaagtctatgattcaaacaaccgtctccgtgtgagaatggggattttctaa

SEQ ID NO: 218812 - DNA, 1542 bp, Klebsiella pneumoniae
atgagtatgtatgaagtaggcaccgtaactggtgctgcaaatcaggcgaaagtgaccggtgtaacgactaagtggtcgcagaccgctcttggcgttcaacagggttccattcttgtcgtgtatcggaacgggagcgcggacttgtacgcgattaaatccgtcgacagtgacacgcagctgactcttacccgaaacatcacgacagcgttctctggggcgtcctatggcattatcacatcagagacagccagcacctccgcatttgcaaaccaactcgccagcgccttttctctgtggcggagtgttgttgaaggatggtcgaccgcgctgacgtcgacaggtaacattacaatgactgatcctattaccggaacgtcagttactgttcctgctattaagggaatggcgaagcttgccggaggtaataattacaccggcacacaaagcctggatagcgacgactcaggcttcattcttggaaagaacggcgatattggtctggtcaagaagagcggcacttatgggaaagtcatggttggaaaatcatctcgattctcagtcgttcgaagtgatcaagaccggatatcggcaactgatgggcagactgaaatttttggcgttgaagctaacggtgacgtcaaagtcgcgaattcactttatgccaaaggcattctgcaaagtgattatcaggttagatcgcaaagtatcgagctttcattttccacgccttacatcgattttcattatgggaatagcgcagccgactatactcatcgaattattgcggatgatcctgtggcacttggttttgaatgcagtataagagtttccaaaaatataagagcgcaagaaggtataaaagcagataagtatgtacgcgctgcgagtagagctggtttaattgcgcaatatgacagtgaccccggcggaaatatcggtgatattcgagttgccccaatcttgtgtagccaattcgcaactgtaggctctgatggaaacgggaacgctggcgcgaatttttggtttgaggaacacataggttacaaccaccgtctcgttacccaagtcaaagggtatggtgcatccgtacaatactggcatcatcgcagcgacggaatgatctggaatagtcagcgaggtgatgtagcgtgggccgcaacttcagacaaaaacctcaagcatgatattaaacccacagatggattacagtcgctgaaaaatatcaatgccatgaaactagttactttcatctataacgatgacgagagagagcgccagcgtcgaggtgtgattgctcagcagcttcagaaaattgacccgtgctacgtgaaggtgagtaaaggtgtggtaaaccgcccagccataaaggatgatgaaggtaatgaaattgaaccagaacatcaggaggtaattgaaaaacttgtgctggactccaatcctttattaatggacgctctaagtgctatccaggtattgtcgcgggagattagtgaactcagagctgagaacagagatttacgcgcatttgttcattctgaatag

SEQ ID NO: 218813 - DNA, 315 bp, Klebsiella pneumoniae
atgtcaaacgagacgcccggtgtgagccacaaggaagtggaacgcattgctcaaatcgtcgcacgagaggttctgcaaggacttcgtgacgaggttggggaagaggtggataagcgactgaaagcgtacctgggagatatgaccgcgacccagcacagcattcagcacgcgaatctggacaagctactgaaccgaatggacgccatctcaagtgggttcttcggcggtgtcgtgtccaaagttacttctttcctgatcaccgccttgctgctgggactggcagcgtatggcgtaaaaagcggcattggaaactaa

SEQ ID NO: 218814 - DNA, 693 bp, Klebsiella pneumoniae
atgactccaagaggaatacgcaacaacaacccaggcaatctggacaacacgaatccgtggcaaggtctgatagctaacccggcagaaagtcgatttgctaccttcaaagacccgacatggggtgtgcgtgcgctggccgttacgctcattacctatcacgacaagcgcaaagcaaaagacggctcacgaatcgacacgatccgcgaagtcatcgaacgctgggcgccgccgagtgaaaacgacaccgaggcgtatgttcaggctgtcgccaaagcggtaggcgtttctcctgatatggaaatcgatctgcatcagtacgagattatgcgaccgaccgttgaggcaatcattcgccatgagaacggcaaaggcccgctgcgaactgataacacctggtacaacatcgacgtcattgacgaagggttgcgccgggctggtgtcgttaagcccgtgaagaccaccgcatccattccggtcactaaggaaacggccggcgcaaccgtcacagcaggtatcggtctggcgcaactggccgacgttgctccgcagatcagtgcggcaatggataaggctcagggcaatatttcgagcggggataccgttcgcattgtctttgggatcgcgacaatcgccgtagcggtattcatcgccatagcccaggtgcggaagtatcagcgaggtgttgcgcaatga

SEQ ID NO: 218815 - DNA, 252 bp, Klebsiella pneumoniae; identical to SEQ ID NO: 177530

SEQ ID NO: 218816 - DNA, 201 bp, Klebsiella pneumoniae; identical to SEQ ID NO: 177529

SEQ ID NO: 218817 - DNA, 669 bp, Klebsiella pneumoniae
atggaaaccaaactcatcatcgtcggcgggacgaagggtgggccgggtaagtctacggtcgcccagcaggtagcagcaggtctgcaactgaagagaggccaaaaggttcacattaccgacatcgacatccagcagacgacaacctcatggtgcgaagagcgccgcaataataaaaatctcgatctcatcgccttttcttacattgagaatgacattgtaaagcaccttcagtctttgaatggccggtatgagtacatcgttgttgatgctggcggcttcgactcagaaattcagcgtgaggctatgcttattgccgacatcgttctgctaccgctcagaccaaagcggcgcgatctgaagtcactgcgagatctggacactgtgctcgaaagcgtaaaatcatcaaacccggaagttcaaattcgtgccgtcttgaatcagtgcccgtcactgccgtctcaggtgtctcgtatcctttcgtccaaagatattatcgagtctttcggcattaaatgtgctccaaccaatatctacactcgtaacgtgtatgacgatgcagaagaggctggacggtctatcttcgaaatgaaaggaaaagaccgcgataaaaaggcggagtcggagattgaagagttggttgattatttgatgagtctggaggcgcagtaa

SEQ ID NO: 218818 - DNA, 366 bp, Klebsiella pneumoniae; identical to SEQ ID NO: 177527

SEQ ID NO: 218819 - DNA, 741 bp, Klebsiella pneumoniae
atggacagattattaaacacaccagacggcgaaaagtacgcgttcatgcaggagatgacaacctcagacatggacagatgggtatccgaaaacattggtctctctcgctgctcaggtgagacggagttgtttgcgacaaagtggttcgattaccgcaatatgcatccgctggttgccacctgtcttttctctgaaatctataagatcgagtacgcacgcatcatgctgactcacggtcgcgacgacttccagcgtgctccgtatcgtaccggactaaagcgcgtcgcctatcaggatcacggaatgggggtaaaaacctcactttggcgtgctcgccagtttgcggacaagtattgctgttcgtatgagtattacatctcaacgatactgagcatcgcggcgcagcgtctgtgggctaatctccctcgcccccagcatctttggcaagacgatcttgttgagatatttgagcagaagctttcccgccgctctcagatccgcatcgatgacagcatcttcagctaccacaacatgccgcagttggtggccccggaaatgcagaaagattactgcatgtgggtcattaagcacattgacgcgatgaagccttcgttgcgtgtcaatggtgtcctgtcagccgtctatctccgtcgtcttatcccggaagctgtggcagcaaagcggtatccaaagcttattcaggatgctcaaggcttgtatttgagcgcctgcgaagattga

SEQ ID NO: 218820 - DNA, 1362 bp, Klebsiella pneumoniae
atgaccactacctcttcagcgcttgagacgcctgttcacacaggacgaccgctatcggaagaatttgacgctgggtttgaagatcgcctgacagcgtactactgccgagacagagagtttctgatcagagccggcgatctggttctccctgagcaattctccaacaaggcaaatggatacctggtcagcattgtggccggctatttccgctcgtacaaaagctccccgtcgaaagagttcatcatcgacatgattaaggaggcgaagaagcgcggaaagattcgagaagagttcgtgcctgaagtcgttaatgcgatgaagcgtattttgaccgagaagctggaagacaccggctacatgattgaccgcgtcgtgacttttgcgcgttcggttgcttttgatgatgcgttcatcaaggcggcggagctgaaggagaaaggcgagtttgagcgtgcgatgcaggtcatgcagaaggtggacatggtcggcgcatccgatatggatgacgtgtacagcttctatgaacgttccggcgaacgacatgagcgtcgcgaatacgaggcgtccgatgacttcgtacctaacagcgtaacaacaggcattccgttactggataaaatgcttcaccaaaaaggctgggggcgtaaagaactggttctgttcatgggcttcgcaaaatcgggtaaatcgacggccatgggtgagttcggcatcaatgccacgctgaaaggctacaacgtcctgtatgtctcactggaggtacataaagacatcctgtcagatcgctgggatgcccgtatctccgaaacagaaatgtcaaaacttattgagcgccgcgatgatattgcggaaaagcttcgctctgtgggtgctgatgggaaaatcggaagcatgtggattgttgagcgtcgcgccaatacattttcacctgcagaccttgaccgcttactcagcaacatgaaagtgaatggcatgatacctgacatggtcattgtcgactatgcggatctgatgcgtgccaccacgccaaccaaagacccgcgcaatgatgtgaaggacatctacaccgacttacgtgctgtcatggataagcacgatgtggcgggtatgacagcgtcccagaccaaccgtgaaggtggttcctctgaagttgcgacgatgatgcacgccgcggacaacatcgagaaggtgcgtatctgtgacctgattatctcaatcaacaagaccgaagaggaagaagctaaaggcgaggcacgtctgtattttgctggttctcgtaaccagaaaggcggcgttagtttgcgagtgcttcaggatctggaacagatgcgattcattaagcgaatcattgacgttatgtag

SEQ ID NO: 218821 - DNA, 1116 bp, Klebsiella pneumoniae
atgtcagaattaaaagaactaatggaagaattcgactttgagcagtggcttgatacagaggggatctcgtatcgtcgtggctcaaggacttcaaaggggcgtgaagtcaacatccgtgaatgtccgtgctgcaaaagtagtaagtggaaggtttacttcaacctgactactggccttggcaagtgtttcgccggtgatcacccggaggaggtgcagtttaacaagctgaacttcatcaaataccataccggcgaatcatggcgcggattgcagcgttacatccgcaacgaactgatgcagcaaggctggcgcccaaaagaagaagagattgagctaaagtcggatgttgagctgacgtctgaagttatcctgcctccacattatcagctgccaattgaaggccaacttccaacgtatcttgttgatcgtgacatctccccggagctggcgacctactttgatctgcggtactgcgtagagggtacgcacgtttatctcgatgagcgaaatggacgaccgcacgtccagtctttcgatatgcgcatcttgatccccatttacgatttggacggcaaaatgcggacgtttcaggggcgcgacgttactggtgagtcagatcgtcgttatctctttccaatatcactgccggcatctggcaagttcctctacaacggacacaatgccatcgggaagcgcactgtaatcgtttctgagggcgcttttgacgttatgggcataaagcgtgctctttttgctgaggaatcgctgagagagtatgtggagccgataggaacgttcggtatgcacttgtccggcacgctggatggtgaaaccgaggatcagcttggcgcattcttgagattgaagcaaaagggattagagacggtcgtcatgatgtgggactccgaaaaacaggcaatacacaacacgtttggcgcagccaagcgattagccggcatcgggttgcgtgtgaaaatcgcgtgtctcggagaggaaggcttagacccaggcgatgcgacaatcgagcaggttctgaaagcctactatcgagcgaagccatacaccaagatgctcgaaatgatggcgaaactacacggtattaaagcacttctctga

SEQ ID NO: 218822 - DNA, 912 bp, Klebsiella pneumoniae
atgtatatcaagagcatcgacgaagccgtcagaaaagccattagcgaagcggcgcacatctttaaagatggagatgtagaacggatagttaaagaggcttgtgaaaaggcgaatcaacgcatcagcattaagatgcctgtcactatatccacccctaacgagccttggatttacatttcgtcaactttaacggctgatcggaacttcgagctgttcgtcatcgtcaaccttactgacgtcgccgaggactatctgaaggcgaaggtgttccaaggtattttttatgcaggaagcccgcggccggcgatgtcactctacgagaagtcgataatgataaaagccgaggattatgaatcatacgtcggccctgcagcggtaaaaaacttcgctaactatatgctggaaagcggcgtcctgcaggctccagagtttgatcgtgtcctgcgctcacttagggctacgatgacgacagaagttgtctcaatgccgaagatccctaaaattgtagatgatacaccagagactgctgccattacggccgtgcattcgagcgcattcgagacgccaggctattctcgtgccttctcacttaaagcacctggcggcatcattgacgcgatcctagaccagaagtcgtctcaggcaaaaaaccgtttcaatgaaagcattgaaatgcagctcttcagcgaatacgacggggaaatggatgagattgagtcggttaaggccgtgtcgaagtgcttcggcggtcttttcgcaagacctggtgaaatgattacccgtcttggttatgacaaagctgccatgctctcagaaggcaaaagctacgctctcgctcacgtccgtgaagcgataaaacatgcagaagtacacagcctcgtcgcggaaaaccctctttggggttcttggtaa

SEQ ID NO: 218823 - DNA, 456 bp, Klebsiella pneumoniae
atgaaaaccaactttagcaaatttccgtcaattagcggcagtaatagctattcgatgctgtgcgaggaacttctaatcaacggatcgccgacgcgctcttcctatacggtgtgtcagcacaccgtactggcatttaaagagaatcgactcccgcctggttcattcgattcgtgcgcgacagccattcgtgccggcaagtgtcgtgcggtcaagatgatgttggaagaagttaaaacaggcgagcggatttacttcatcgatggcctcgaagagatgcgtaagctgagagaggaaattgagagtcgtgcagctgaaagcacaacgcgcaacaagcgtgctgcgacgtttggctcaagagtgacgccaaagccggaaatcaaaaaaccaaccgttctcgtcgacatttacgccgaagcggtaaacgcagaagttaataaaacagaggaaaacacatga

SEQ ID NO: 218824 - DNA, 471 bp, Klebsiella pneumoniae
atgagtcagttcgagccacaagtaggccaagtatgccagatgatctacactaccgcggacgttccgcaatggattaattgcttgccaaaggcagcatcgtctcatggtattgccgtgagcattgacgttgtcaacgaaggtgaaagaacactctggttcgacagcttccagattaaccgcaacatcgttttccgcccgatcgttcctgaatgtaagctgtgggccgctaaggactctgacgacgtctacgagatggtgtgccttagcaacgtgcttaccgccaagcccggtttccctttgactgtcattttcaaaaacaaagacaatgagattttctccatggacgccgtcgattttcttgatgcctacgaaccaaaaccgagtgatctaccgatggtagagcaaagcgaacagtgcgacatcctcgattctcaggatgagcctgtcgttgttgcgggagagcttcaataa

SEQ ID NO: 218825 - DNA, 1329 bp, Klebsiella pneumoniae
atggaaaagttgattgctctgcgtggaaaactagacgccattaaagctatgggaaccaatgccaagaaagtagccctggctgagctggacgcattcgaacaaagcatggtgtcactgatgcttaacccattcatccgattcggggtgaagaaatacagcgtcgcggagccagcgcttgagaataaaatctctgatgaagacgctatcgatattctcaactccttggccagccgtaagctcactggtaacagcgctattgcgatggtggagcaagctatttcagacatgacagaggaagggcaagacgtgttccgccgcttcctgattaaagatccgaaggccggcatcggtattagcctgtgcaataaaatcttcgacaacccgattccggtgttcgaggttcagctggcgacgtcgtacaaagaaaaaggcgacaagtacccgttcaaggaaaacccgaaagccaagttcccgatgattgccagcctcaagctggacgggatgcgcgtcattgccgaagtcatcgttgacgaggcagaggttaacttcctgtctcgtaccggcaacccggtaacgtctctcgaccatctgaagccagcggtattagatttggcgcgtatgacgccgcataagcacatcttctttgatggcgaagcgacggccggttcgttcaacgattccatctcagcactgcgtaaaaaaggcgtatcagctattggcgccgtattccacgtcttcgattacttcttgccggaatggaaagccattgccaaaaccaaggagtacaagaaagaaggccgcaagttaaaagaccgccatatcgacttgtgcagctggacaaactggaagagccgcccggacagtcagtacaaaggcgacgtgcgtttgcatgacttccagttagtacatagccataaagagtttatcgacttgttcatggcggctctggacgccaacgaagaaggctatatggcgaaagatccgttctccgtttatgagtttaagcgcaccaagagctggtggaagatgaaggacgagatcgaagctgacggtgagattatcggcttcaagccaggtaaagaggattcggcattcgcccacactctcggctcggtaactattcgcctggagaacggtgttgaggtcgaggcatcgggcattaagcacatgtacctggatgagatctggaacaaccaggacaagtacatcgggcgcatcgtgaaggtcaatgcccacgaagagacgccagacggcagcttgcgtcaccctcgtctgaaatggccgtcctgtctgcgtgacactgaagaccgcataggggataaggaatga

SEQ ID NO: 218826 - DNA, 201 bp, Klebsiella pneumoniae; identical to SEQ ID NO: 177636

SEQ ID NO: 218827 - DNA, 216 bp, Klebsiella pneumoniae; identical to SEQ ID NO: 177635

SEQ ID NO: 218828 - DNA, 252 bp, Klebsiella pneumoniae
atgacagactatattttgctcgcatttattctagtttgtattttttacaccgtgacgagagctgtatctcggatcgtcgatatggtgacggttaagtttttcgttaatgacgacatgatggaaaacgtcgtatcgaggttgattagcttaacatctctccgctgggatgggattcgagacgatagaagttatactgtaacaacaaagggttacgtcgtaaccgtcaaaaaaaataaaaacaaagataaataa

SEQ ID NO: 218829 - DNA, 612 bp, Klebsiella pneumoniae; identical to SEQ ID NO: 177633

SEQ ID NO: 218830 - DNA, 768 bp, Klebsiella pneumoniae
atgggtacatcacgcaaacatgcgcgtaaggtagcgcgtaaagcagtaaaagagaatcgtgcgttccgcggccgtcgtgttgattacgttattgtcgatgagttgaccgacgctcagaccccacgaccaaagcgagacaatacgccagttgaggctcgtaacgaggctcaggcgcattatcttatcagcatcgaaaacaagcctctgacgttcgccaccggtgaagccggctgcggcaaaacgttccttgccacggctgtcgccgcgcagaagctgttggataaagacgtccgcaaaatcatcgtcactcgccccgtattacaagctgacgaagatctgggcttccttccgggcgatgtgggtgagaagttcgccccatacttccgccccgtctatgacgttctccagaagcgtctgggcgcatccttcctcgaatactgtctcaagccagagattgccaaagtagaaatcgccccgttcgcttacatgcgtggccggacgttcgaaaacgcagtggttattctggatgaagcgcaaaacgttacaccgtcacagatgaagatgttcctgacccgcatgggtgagaacgttacggttatcgtgaacggcgatgtgacgcagtgtgacctacctggtaataaagagtccgggctatccgacgcactgcgccgctttaaaccaaacgcgcacgttgggttgattgagtttgaagccgacgattgcgtccgctctgaactctgcaaagtggcattaaatgcctatcaataa

SEQ ID NO: 218831 - DNA, 279 bp, Klebsiella pneumoniae; identical to SEQ ID NO: 177631

SEQ ID NO: 218832 - DNA, 252 bp, Klebsiella pneumoniae; identical to SEQ ID NO: 177630

SEQ ID NO: 218833 - DNA, 1557 bp, Klebsiella pneumoniae; identical to SEQ ID NO: 177629

SEQ ID NO: 218834 - DNA, 1278 bp, Klebsiella pneumoniae; identical to SEQ ID NO: 177628

SEQ ID NO: 218835 - DNA, 3123 bp, Klebsiella pneumoniae; identical to SEQ ID NO: 177627

SEQ ID NO: 218836 - DNA, 321 bp, Klebsiella pneumoniae; identical to SEQ ID NO: 177626

SEQ ID NO: 218837 - DNA, 384 bp, Klebsiella pneumoniae; identical to SEQ ID NO: 177625

SEQ ID NO: 218838 - DNA, 417 bp, Klebsiella pneumoniae; identical to SEQ ID NO: 177624

SEQ ID NO: 218839 - DNA, 1035 bp, Klebsiella pneumoniae
atgttaaattcgttcgaaatcgataaagctttggaaaattgttctgctgaaacagttcaatatctccagcgctgccaagccatgaccggttcgcaaatgatgaccatggatgccgattcgaaattcagtgaagcctttatgtttttcacgcgcttatcactccttgtgacgcgacggcgcccagagctaggtgttcactgtattctcgttcacgcaatgccggcgatcggcaacaaaaaagtttcggatatcaaccgcctcacagttaacaggctaattaatgccctagtgttggatggtaagttagtacaaagcaggcgcgttttttctgttttaaaacagttccttgggtggtgtgagttccagggtgtgatcgagacctccccacttggagcgatgtctcttaacaaagtagccggtggactgaagccaagaccgcgggagcgagtgttatcggatgatgagctggaaaaattttggcacatgtgggactttgctgacgtttcagagagcacacgttgggccgcgcgtttcgtgctctgctcagccagacggccggatgaagtgcttcgggctaaacgagctgaattcgatctcaataatgatgtatggaatcagggtagtaggaataagtctggtcgtgaacattcactacccattagccccataatgaagctgtgcattaataaaatgatggccgcagccgggaatagcgagtggctagttccctccccaaagaatgcaatgaagcctgcatctaaggttctgatagctcaggcatcaagaagaattatgagtagaggttatctttccgataacattccggcgcccttcgaaatcagagatttacgaaggacggccagaagtacactctctcgactcggtgtagagcaagacgtggctcgtaagatcatgaaccacagtcttgagggaattgatcgcgtatatgacagacatgactatctggacagaatggccgaggcaatgtcagcgtactctgaattcttaattgaaacatgtaagatcaatcagtaa

SEQ ID NO: 218840 - DNA, 306 bp, Klebsiella pneumoniae; identical to SEQ ID NO: 177622

SEQ ID NO: 218841 - DNA, 1989 bp, Klebsiella pneumoniae
atgaaaaagacttcagttaaagatatcactaagtttcgcgaagcgattaaaaacgtcgtttcaatgctggttgcacgcaacatccccgtcatagaacgtggagataaagcatatgttgaatacaacaaagccggcgaaccactctgcatctgcataccatcaatacccgatgacgccagcgacaagtttctgatggcgatacgcggattcatcgaccacgaagtcgctcacgtccttttcacagacagtacgaaagccaccagcttcgtctggaacgccgtagaagataccttcattgagcgaaaaatgggagagatgctcaaaggctccagagcaaacctcatcaacacacaaaagcatgttatcgatacggttttcattcctaaagaaatggaggctatcgctgaaaagctgggcgatcagacccgtatgtttatggagttctatcttgttcccgtgctgcgtgcgtggaatggccaaataccgttcatcgactacatggaagaccgctgggagcgcgttaaagagcctgtatcaatcctgattaaacatggcgtcgataagatgatccccaaaatatgcagcacgagcgatagtgtggcagtggcctcgctaattgtccgactactggtcgacaagccaatggaaagtgaagacccaggtgaatcaaaggaaaatggggaaggtaaaggaaagtcttcaagcgaatcgtctaatgacgattgcggtgatggcgatctaccctggcatggcgatgatgagcctgaagatagtgaggaaaaggattccccaggatcagttgataacgaagagggggaaaccgaatcggccgacgacggagatggcggctcttcacagtcagaagaagacaaaaaggctgatggtatcggagacgaacctggcgacccggaaagcggagcgagggatataccaaaaccaacgaaaggtgatctggaaaagctggagtcaaccaaacttccaaaaggcgccatggatatgtctatggaaggggcaatgaagatgattatttccagcgaatccgaattgtcgaccggctatcgtccgtatgagcgcacttacgactttatggggaggcttgagcacgcatcggagttcttcagaaacgttctggccacttcgccgaaagggttccacatgtacggtgacgctgataactacatggtgatcccaaaacatgaggccgtcttcaataagaatattaagcctctaattggcgatgacatcgtcgcgacactcgctaaagaccttgagcgaacgatagccagccagaaccgcaatcagtttgttccaggtcagcgtcgcggccgactgcatggcccaagtctgtatcgcctgtccgtcgatgatgaccgagtttttcgcaagctggaggtcaaacgcgcggtcaactcatgcgtgcagattgttattgatatgtctggctccatgagagggcaaaaaatcaagacagcttgtgcagcagcctacacactggcggatgcattggcgcgtatcaacgtgaaaactatgataaccggcttcacaacatcttctctggcgatgcctgggaagtccgagtttaaccgctctgaagcgctttttctgccaattatcaaggggtgggagacgccgatatccagcaaacaaacgatatgcaacctaggtgctctcgcaggtacgatgatactggctgaaaatatcgatggagaaagcatactggccttgcttcaacatttctctggccgccaggaagatcgcaaaatcatgattgtgcttagtgacggaagcccagcggctcaggggcgtggtttgactggccacctgaaaatggtcacaaaacagattgagcaggataccgatatccatcttctagggatcgggattttgacagacgctccgcgtcacttctaccgcgacaacatctgtctgaacaatgttggtgatttagccgaaacgctcatcaagcaaatgcaacgcctactttcgtag

SEQ ID NO: 218842 - DNA, 1251 bp, Klebsiella pneumoniae
atgtcggtcgaattgcagaacaaaacagtcgctgaacaagaaaaatctcgcgagatcgaagaaaagcctattttgtgcaaatggtgtggcggcgagacccatcatgtcggttctcatttcattggaaaaaaatgctctagcatcccgaaagagcacgaaaacaagacgcctaatgaattgatgaaaatctatgttgctgcatttcctgaagccccgactatgtctgcagctgccgccaaacgtctgaaagagcaccaggtcaaaaagaaagaagagccatctgtgactcacgtcggatatgccggtttcgaagactacatggtcgaaaaggttgcagtgcatgaaatactcggtctcgatgctgacttattgaagacggcatctggcgaacctttgcgcatcaccgtaaacatcaacaaaccattcccggaattcgtgccaaaagcgaatcctgactatgtgttcggcgacatcgagttgcttaaagacgtgcttatgatgatcgagatgcgtatccctgggtatctatggggtcacgcaggaaccggcaagagcacgctaccaactcagctttgcgctcgactaaaccgccctatcatccgtgcgcagcacaccgcgtccactgaagagtcgcatatctgcgggcaaattcttgtgcgcagtggtgcgacttatttcgagccaggtcttctggcaagtgcaatgcgtaacgggtgggtttatctggcagatgaatatgatttcgcgttcccgcaaatccttggcgtttaccagccagtgttggaaggcgaaccactgatcatcaaagaagcgaccccggagtggcgctacgtcgaaccgcataaacgattcgctttcatcggaactggcaacaccaatggttccggtgatgaaactggattgtatcagggcacgaatatccagaacgcagctaacttctctcgtttcggcatcgtctcacacgtcaagtacatggacaggtctcatgagtccgcgatgctggagaaaatgggtttaccgaaagtgtacgcgaccatgcttatcgatttcgcaacccgaatccgtagcgggtatgaggcaggaaatattagccaacccatcgggccacgtgaactgcgcaatgcagcagtgattggaatggcgcacaaaaacttcaagaaaggcgtgacgaagtctttcatcaataaattaccgtccaccagcgcggtatccgcaaccgagatagcgcagcgcatctttggtgatgaataa

SEQ ID NO: 218843 - DNA, 2373 bp, Klebsiella pneumoniae
atgaaggcattaatggtacgcaccgatttttctcttggtgaatcggcgctgaaagcaagccgcgtagcgaaggctgcgaaagagttaggttattcagccattatcagcgcagacacaatgagtctggcttcaatcatcccgctgcagcagtcggctggtgatgacctggctgttatttgcggcgtccgtctggtcattagtgacaatccgctttatgaaggcatggtcagaaaagccaaagaggaaggtacagagattccggtatgcaagcctggtcgtctgtacagcttcacagcgttgataaagaacgatgaagggtataaagatctgtgtgagctgatgacgttgggcaaccgccgcgaacagttttactttttcccgcgcatctcgttggagcagctggccgaaacgtattcaaagggcaacatccttctactgacgtctgatcgcgatagcatatttcatcggcaggacttcgttaaaatcctgactaaattgctggaggttggtgggcgtggcaacttctacagcgttgtgtatccgattgctacgcctctctacgatcagttgaacatgaaggcgatgaaggtggctaatgcgcttaaaatcgcccctgttgcgttctatccagcttattacgagaaagaagaggacgcagacctgcgcgacattgcgcatatggttatcaataacatcaaaacggatcagccatatcgttttcacatcccacaccagcgcgacaactcaatccagaaccgcaagcatttgctggttcgcttgatggaattctcgaaacgcatgggtatcgagggtattagttccgcgatggttaacgagactcaggacgaaatcattgcggcgtgcagctggcgctggcatgagatgccggtcagtctgccagttatggcggaagatgagggtgatacgttgacgcgaatggcggcagaaggattgaagcgtcgtttaacaacgcttgaatttggttggaagccaccagcagagcagtatcaggtttacatcaaccgtttacgttatgagttgagtgttctgaaaaagctgggattttgcggctacttcctgatggttgaaaatctactgtcatgggcgcgtaaacaggatatcccggtcgggccgggtcgcggatcgtccgccggttcacttgttgcgtgggcgattgggatcaccaacatcgacccgctacgccacggtctcctgtttgagcgcttcatcaaccctgaacgtctggatttgcctgacgcggatctggactttagccaggcgctccgcccccgcgttctcgaatatcttgaagagcattacggcgaaaaatatgtggctggcattccaaacttctcttatctgggtatggcgtcggcactacgtgacacggcacgtatctacggcgtgtctaccgaagatatggcggtatctaagcagttgaagcaattcgatgatgagggattatctcttgaagagactcgtgagcagctgggcgccctcgacaaatacgcgaaagcaaacccggaagcattcgacgccgcgtgcaaactccagtcactgatgcgcagctatggtaagcacgccgcgggtgtcatcgtttctggcgtaccactgactgagcgaacaccagttgaattacgcaacggggtgcgctgtatcgcgtttgacaagcgtttctgtgaatctatggggcttatcaagctggacgtgttagggctggctacgctcgatctactggctctcgctaaacgctacatcaaagagaacgaggggatcgacgttaacctcgacgcaatccctctcgatgataaacgcgtccttgagggtatggcgttgggtgaaacaactggcgtgttccagttcgagtctggcggcatgagaaacctgcttaaaaaccttggaagcggcatcaaaccaatgtcgtttgaaatggccgtcgccactaccgcgctatatcgcccaggcccaatgcagtccggcatgatggatacctacgtcagcgttgcgcgtggttatgaggacgctcactcacttcacccaagccttgacgaattgaccaaagaaaccaacggggttttggtctatcaggaacaaatcatgaaagcgtcgcagatcctcgccggcttctctctgtcggaagcagatatggtaaggaaggcgattggtaaaaaagacatcgagaagatgaaaaagattggtgccgacttttcagatcgtgcgcagcttggttggttggaagtccagactgacgacggccagattgtcactgttcatcgcgccgcgcttcatccgtgctctgatggtaagaagcgcactgtcgagcaagccatgaaagaagatgccgacattattgaatttgacacctctaagtaa

SEQ ID NO: 218844 - DNA, 1161 bp, Klebsiella pneumoniae
atgaagattactaaaatcatctcagagaagcccggactcagcgaatcaaaagcaaaagaggtctgggatgctttcgagaaattcgggtcgtatggctttaacaaatcacacgccgtggcctataccgcaatcagctaccaggcaatgtatctgaagactcaccatccggctgcattcttcgccgccgcactgacaattcaggatgatgaaaaacaccgagctgttgtaaaggatgcactggcacgcggcgttattgtgatgccgccagacatcaatctctcaactgaccgcatcgaaatagtcgaactgaaggatggccgggcggcgctatatgcccccttctcagctgtcaaaggttgttctgaaaaaggcagcttagccattatgcgtgctcgcgagcgtgtaggtggtaagtttgagtcgcgagcacaattcaaggaagcgatagaggccagactttgcaatatccgagttcaggaggctctggaagccgttggtgcatttgccagtattgagcctggcagcgaaccggcgatggcagaatcccgccgcaaggctcaatcagagctgatgggaagcctcattatcgatgcggtaaaagtgagtcgcccgttcgagatgaatccgaaacgccaggcagaagtgtcgatgttgatggaagagctgcgtaaagaggtcggggtgggcgaagatctggttactccgcatatcggcgtatcgccaaaaataatgattatcctcgacacagcaaacggcaacgatatcaggacggggatcttcatggagaacggctacgaagattttaaggcgaaaatgctcgttaatggcgatctgcgcatgagcgaggtgtacgttaccggcgtcattaagcaagataagaagttgccactgtcccgcgacgcagagaacacctacatcgagtttatgaagaaagagcttgagctggttaaaccaacctacgtcctgacgtgtggtcgcctatcggccagtctcttcaacgacaaaaccaaggcaacggatttggtcggacgtaaggaatactttggcgcaatggacttgaccgtgttttacggattcaatccgggcatacttcacttcagaccggaagaaggtgagaaattggaacttattatggaagacattaaggaagcattgtcatga

SEQ ID NO: 218845 - DNA, 423 bp, Klebsiella pneumoniae
atgagcgaggttacagtgtcacaggagtatatcgataaggcaattatcgctctaaataagtcagcattctgggagttcgcagactgtcccgtcaccattcgtctcgctatgcggcaggcggagcttgatgggcgccgagcgaatagcgcagcacgtagcgcagcaaagataattctgaagcgcgtgcgcgacccgatggttcgagattatgtcgctgtgatagctaaatcaagcaatgtcaaaaaacaccttgctgagtttgaggcttatcgagaccgactgatatcaaaggttgcggaggaatttgtcgaggtaggtaaagcggccagcgtcaaagactaccgtctccagcgtgctcagcgtatagccattaccgggcggggagtcggaaaaagaacgctggcagaaatgtacgtagcctaa

SEQ ID NO: 218846 - DNA, 165 bp, Klebsiella pneumoniae
atggatttaaccattccaatgttcgttttagcctacttaatcgctggtatcggtttcgcgaaaatctggtctgaagcggcgagttgcggtgatgttgagctgaagataatcggctgcatcttctggccgattggactgtttgttagcgctttctggagctggtaa

SEQ ID NO: 218847 - DNA, 441 bp, Klebsiella pneumoniae
atggataaggcgatcatcaaagaagtgatggatgacatcaggcttgatacgcatgatttggacgctgtctggcgtcgtcagccggagcttgtcgccatttatggttttaaacaggttgaggctgaaagcgccgcgaatgctgcaaagcgagatttagaatccatcgaagcacgtctctattcgacgacgcgtgccggtctgagtttcgacggtgtgaagatcagcgaatcgacgattgaagccaaaataaagtcgtctccggcgtatctttcggctcgccaaaagtacgatgacgcgaagtatctcgctgagttttacaagcaggttgtaaacgcactcggacaccgtcgagacatgatcgttcaggcgtctaaaaaggcaatttccgaatacgaaagaacaggtgttgaacgattcaacgcccctaaaaatgtatcttga

SEQ ID NO: 218848 - DNA, 978 bp, Klebsiella pneumoniae
atgtccgctttaatgaaccttctgaagaaaagccaagaagttgcgaaaaacgcacgcggcaatcgcgggaacgatctgcaaaagatgcaaccaggcgaaaactacgttcgcatcatcctgaacaaagacgaccctgacaatattccattctcccacaagtacggcattcactatgccaaatctaaaggcgaagatgggaaggacgtatacagcgctcatctgtgctttcagcatacccatgataagccgtgcgaaatgtgcgaaatggttatggaagctaaagcgaagtacaaaggcaacaaagccatggaaaaagtcattgacgatatgcgtgcctctccgcgcatggctgttgtcggcatgtggtctcagaaagaagacttcagcgacaccgacaagacttctctcatcgatatgcctatgtccgtgtttgacgacctgatggacgccattatgcaggatatgaacgatgagatcggcgagccgctgagccgcgaaaaaggttacgcgtatcaaattactcgcaccggctctggtctggacactgattacaaagtcaaaccgatgcgtaaaaacaaaacagccgttccggctaagttctgggataaccaaccgtctctggaacagtttgtaaaccagaccgatccgacaaaactgatggcgacctccaaaatgattgctcgcgcgaccggcatcgcactgccagcgtctatgggttcaagcgccggcgctctgccaaccccaaccggcaaagcagctgcatctcttccgggcatgaccattaccggagttgatgactcaactgccgaagcctctttgctggataaagaagttgaatacgcgaaagaagccgtattcgagccagaagagaaagaggtaaaagaagtaaaagaagcgccagcaagcgagccagcagctgagccggaaaacgaagatctggatgacatttacgcgcaacttaacgcgctttcaatgtaa

SEQ ID NO: 218849 - DNA, 963 bp, Klebsiella pneumoniae
gtgaacattttaataatcgacggaaatagcctcggttactaccaccagcagcaaccaaaaaaactccatagcggcgatatggagacccacgcagtgtttggttttatcaccaacatgcgccgctatgcttcgcttctgaaggctcgaccaatagttctgtgggatggtttcagcgataagcgtcgcgagttttacccggactacaaagccaatcgtgacgacaacgcagaaatgaaacagatgaaagaaggttttgcagtccaaaagcccttcatcaaaaaagcaatcacctcgctgggtgttgatcagattactgcaatcgacggtgaagctgacgatttggccggaattctgaagaagcgttatgttgcgtcgaaagacgtcgagcacatctacctgttaaccgcggactccgactggattcagctggttgacgaaaaggtaacatgggtcagtttgcgcgaggatgctaagcataagcgcatcaatatcgaggcgttccctgagttgactggctacccaacgccacgcggctatctggaaggtaaagcgctgcagggtgacaagtcggacaacattcagcaagtcggtggcattggtgacaaaggcgcgatggatctgattaacgagtatggctccattgttacgctggttaaggggatttgcgatggatctattgtcatggacaaaggtcgcaacaaaacggcagtgaataacctggcaaagaacgctttcaatgagaaaaccggctgtcggatgcttgaagcgtttatgcggaatattaagttgatggatctcatcgacaccaaattcgccccggagaagctggagattattcgcggtgagcaaagtctggaagcatttaagcaaatctgtatgcagttaaatttccagtcaatcctcagcgatctggatgtttttgtcgtgccgttcgttaagcgctgcgggttggtggctgaatga

SEQ ID NO: 218850 - DNA, 261 bp, Klebsiella pneumoniae
atgattgcgtcaattattactggaaaatccactacgccgaccgcgctggcgaaggagttagtcttcacctatggcgagtatgtcgtgtctgattttaacgcgtgcatcgtcggtcacaaaatcgctctgacagcgcgtgaagtagatatcgtgaaaggccatattctcaccatcattgagcgatccgcaaaaatgatgaactgcgacaccatcacatttaaccgtgaacaagccgaaaaagaaatcggcttaactaaataa

SEQ ID NO: 218851 - DNA, 1068 bp, Klebsiella pneumoniae
atgaaaaagtcaccattagcagtagccatgaaaaaacgtatcggcggaaatgatgagatccagaaagtcgagcaatggctggacaccggttttcccccgttaaacgaagccgtttctggtgatctggaaggcggtcttccttgtgggcgtattgtggagatttttggacctccgtctgcaggcaaaactttcctcgcaacccgcgcgatgattgcagcgcagaaggtcggaggtatcgccgtattcctcgatcatgaaaacagttttgacgttggtctggctgaagttatgggacttcaatctgatgaagatgaaggtaattgggtctataagcagcctgacacctttgaggatgccatcgacttgaccgggcaaatcttgtctctggttcgcaaggagagtctgatcccagctgaagcgcccatcgtcattgtctatgactcgctggcctcaatggttccgcgccagaagttcgagaagttcgagaagatggcggatggcacggccaaagagaaagacgagctgaatatgaacgacaacacggcactggctcgcgcgacttcggcaaatctcccaacgctggctaagtgggcgcagaagtacaatgcctgcctcattttcctgaaccaggttcgtacaaaaatgggcgtcatgttcggagaccctaccacttcaccaggcggcgactccccgaaattctacgcttccgtccgcatcaagctgggtggcggtcagttgaaagaaggcggcgatcgtgttggtcagctggttaaagcagagtgcgtcaaaaacaaggtggcgccaccgttccagaaatgtgaatggaacttctacttcgacccttcgcgtggtctggacgtcgtagaatcgcttgtagagtacatgcttgataagggatacattccgaagacgtccaccgggcgcatcgagattggcgacaagaagtatacaaagtcccagatcgtcgatatgtaccgcgagaaggatttgagcgaaatcgtgaaggctattaagtcgattcaggcgaagatgaagtcaaaggacgaattagagccagctgacgcgtaa

SEQ ID NO: 218852 - DNA, 630 bp, Klebsiella pneumoniae
atgggcatgagttcttcagctgaactcgttcattggctttcatcacaaggcacgatccgaggctccaagtccaaagaaaaaattaatgaaaacaggcataaagctgccgagttatggatttcaggtctgtatagcgcccccgaattacttgaaatgtttaaaggccgtctgggtatacagcgcaaggaatctcttcttttctggttccggcaaaatggatacgtaagaaactcggagtcgaccgacgctccgaagaatccgcgagcaattttgagagaaagagccgtggaattaaggaaagccggccagcacacaacccgacaaatctttgatgaactctctcccgagttaggtatgaaaaacgtcggcgcacttagacgctggtttaagaaaaatggcatcgtacctgagcatccgagaaaacctcgtgagaagccccctaaaccgaaaccggtaaatcctcgtgttcaacttagagctgtatgtactgatatgtgggcatctggcgaatatacaggcaaggacattcggtctcaaatgggcgaaaaatttccatttgccagccttggcgcaatgtatggtcatttctctaaagttggtgttagaaagggaagtaaagagagcgactga

SEQ ID NO: 218853 - DNA, 279 bp, Klebsiella pneumoniae
atgttttgcttgatgataagtaagcgcttatctattatgtgtaagcttttcaacaagagaaaacacatgaccacaaaactgtatttgaaaatctgcgtcacgatcgggtttgcgatgacgatggtagggttagttatcccctatctcatctctcaaaaaagcgacatcactgtcctgattggcttcgtgctgatgttcgcaacccccttcgcttcctataaagcggctaaaagcattatccatcaactaattctcttcacggcacattcacagaggtaa

SEQ ID NO: 218854 - DNA, 273 bp, Klebsiella pneumoniae
atgaaagccttattacacgtccacgcttcactgaactcttcgtactccccctattccattctggaatttcctgaagggacggacgaagatcagcttcaatccttggccattaaatttcttccgtctctttacggtgacgaggaaaccgttttcgttgacgaggacggtgtttgctggaacaacggagagtgttggtatatcgaggacttacgtctcattagtgaagaagacgcggcgcacttgacccgtattctgggcatttccacgctctaa

SEQ ID NO: 218855 - DNA, 159 bp, Klebsiella pneumoniae; identical to SEQ ID NO: 177606

SEQ ID NO: 218856 - DNA, 339 bp, Klebsiella pneumoniae
atgaaaaagattattgcagcctctatgatcctcttctcatccgtggcgtttggagagagtgagaccgtcatgaagtgccagatgaacattatgcgtataagcagcggaaaaatgatcggagatccgcatcagttggcggaggcgattctgacagcggatacgcgacagttctatgctgtcatcggtgagcgaatcatcagttcaccaatactttcagagcaaaaaggtggtttagccgcataccaagctggcgccgcttactttatgcgtaaagacacctttggtgttatttatgatgacttcggatatgtgtttgatgaatgtgaaaaggttgcgtaa

SEQ ID NO: 218857 - DNA, 216 bp, Klebsiella pneumoniae
atgaacaacatcgctaacagcatggaaattgaaaaaataagaccatactggcgtgcaaaaggatttactcgcccggaagacttctcaacaagactggagcgtgacgactgccagattgtgtaccgctatcgttcgtggcagatgattgaaatcggcgagacaaaagcaaaggctaaatcacatcgcctctacaaccttctgtcttcaatcacctga

SEQ ID NO: 218858 - DNA, 1113 bp, Klebsiella pneumoniae
atgtccacaggcaaaaaaaagaagaaagaaaacataccgttaatcgatgatgatgacgcgatcgacgaaagtgttccggcgttattcacaggcgacctcacccctaacagcaacaataccgtacaacccattgcgttgatgagacttggattgttcgttcccacgctcaaaggcacgaagaatagtaaacgaaataactccaaccagatagacgcctcaaaagaactggtgcaactggaggttgcgagatctgagggttattccgatatcaaaataaccggtccacgtctcgatatggatcacgacttcaagacgtgggttggtgtcgtccgatcacttgccgagtatggggaggccagtgggcgcgttgagctaagcatcacgaagtttgccaagttctgtgggtatccatcttcccagatacgcaagacgctgcgagacaggattacgaacagcctgctgaagataatgcgcacaacgctttcgttccagcgcacatacgaagagaagaacgtggacggctcgaacaagatatctctgctcatggttcatctggtgaatagcgtggattacaatgagaaaaatgacaccatcatatttcacgccgaaccaaagctgtcagagctataccggtttgaccacaaagttcttctccaactgaaggtcatcaacaaacttccacgtaaagaaaccgcccaggcgctatacaccttcattgaaagtcttccggcgcggccggcgccaatatctctggctcgtttgcgtgcgaggttgaatctgaatagctcaagcatcagctcccaaaatcagaccattcgaaacggtctgaagtctcttaaagagcttggctacctcgattactcagaggtgaagcgtggtcgctctgtatttattcagattcatggacgcaacccgaaacttaaagtcattggtgaagagaaaccgtcgaagcctgagaagcctgcagagcaagtggaagggccacaagagagcggcgagctggacgtcgtaaaacaaaacatgatcaagaagatagctgaactttctgcagatttgacgcctgagaatataaagctaattgagatacttagtaacggtctgaagttgctttga

SEQ ID NO: 218859 - DNA, 648 bp, Klebsiella pneumoniae; identical to SEQ ID NO: 177602

SEQ ID NO: 218860 - DNA, 1086 bp, Klebsiella pneumoniae; identical to SEQ ID NO: 177601

SEQ ID NO: 218861 - DNA, 1917 bp, Klebsiella pneumoniae
atgaaattcctaaatctgaaagttgaaaactttatggtcattgctgaggccagcgttgatttggatagccgaggcttggttctgattcagggcattaacgccgcggactccagtgcagcgagtaatggcgccggcaaatcaacgctgatgaatgctttgatgtggtgtttgtacggggaaacagccactggatacaagggcgatgacgttctgaactcaacgacgccaaagaactgccgcgtttccgtgaccattgaagacgaaggtaagcaatatgcggtaattcgtcaccgtgctcacaaagaattcaaaaatcgtctcattgtccgcagtgaagacggtgatttgaccaaaggcaaggacacgctgactcaggaactggttgagcggctgatcggctcttcgaaagaagtattcatggcatccatctatgccagtcaggaagccatgccggatttaccaggtatgacggataaaaacctgaaggcaattgttgaagaagcagctggcatcgaccgtctgacaaaggcttatgctatcgctcgcgacagagctaatgcgatgagcgctcgactggacagagcaaacgcacaagccgaaagcacagtgtcgcttatcacttcgacagagacagagattgagaccagtacagcagcagccgaggcgtgggagagaacgcgttccgttcgtctcgacgaagcacgagctgaagcgactatgatcgaagtcaaggtaacagaggccagcatggaaatggccgacatcccggccaccatcagcaaaattgagaatcaaatcacggatgaaaagaaaaagctttccggcagggctgaacatgataagaaagttcaggcagcgaacacaatggtggctgatgcagcggcggagatccgagcgactgaatcagcccgcgacagagccgttagcgcagcaaaaaaagccaagctgaatgcggataatgtcaattcaagcgtaggcaagccatgttcgacgtgcggtaagccatacactagcggtgatctgtctcacgttcatgacaactacgtcggcgaagtccgtaagtatgtagacgaagctaaatcactaacagcggatttagcggccaaaacggagcgtcacgataaaatcgtcgtgctgcgtgatcgtcttgtcgcctcgacccccgacgtctccgcaatcactgagcgcatttctgagcttacccgtagtctgggtaacgtaaagtcacgacaagttgaaataaaagcggcagagagtgctctggctcgcgcaaacgcacaagtgaaagcgatctcggaagaagttaaccctcacaatgcagccatttcccgtcatcgcgaaaatctggcaatccacaaagagaagctgaaagagatccgacgcgaaatcgaagggatgaaagatcaggcactgctgcttgagaaggcgcgtcaggtttactctccggccggagttcgttcacatattctgacggcggtaacaccattcctgaacgataaaacggcggaatatctgagcacgatgtcggacggcaacatctctgccatctggtcgacgatggataccacgaagaaaggagagatccgcgacaaattcaacattgccgttgagaagaccggattcagtaaagacttccgcggtctgtccggtggtgaaaagcggaaagtgcgtctggcttgtgcgctggctcttcaggatatggtcgcgaaccgggccagcaaaagcattcagttgtttatcggcgatgagatcgatgatgcactggattcggcgggacttgagcgtctgatggggattctggaagcgaaggcgcgtgagcgtggtacggtgatgatcgtctcgcacaaggagatgaagtcgtggttccgcgaaacggtgacgctggaagtcaaagagggccgcagctatgtcgtttaa

SEQ ID NO: 218862 - DNA, 699 bp, Klebsiella pneumoniae; identical to SEQ ID NO: 177599

SEQ ID NO: 218863 - DNA, 255 bp, Klebsiella pneumoniae
atggggggtagcggttttttgtcggaactcacatgtgaaaagagcccgtactttcgtacaggctctcatctcgaatatggcggtgagggggggattgactcgcttcgctcgcccctgcggggcagcccgctcgcaggctcgcggtctgtccaactggcgttgccagttgtcgaaccccggtcgggggttctcatcccccccggcgggtgccacatgcgaaaaaaaagcccgtacttgcgtacgagctcttcttaa

SEQ ID NO: 218864 - DNA, 1284 bp, Klebsiella pneumoniae
atgacctgcttattcgcaccttccctagcagagtatgaacgtaccagtggacaagccgattcaccttatccgctgcgactcctgcaactcgatatcgactgtaaagtgagtgagccatcttttattgcccaagaactcctgtctctgacaaaaaaatatctggctcataaattattttcatttgccgtcgacgcctgtaaaaccgcaatcccgattgcgaatagttgctgtgacagagatacacagtttgagttctggcggcttcttgccgatacacatcttgaagagtcaaaattccaagatggcggcatgatttcggcagcctgcatgcagaatgctattgaagcactgtctaatattccaggaacccgaggagaacgtcttgcgctgtatgaagaaatgcgtgattaccaaatcgaatcccgtcaccagatgtctatccttcagtctccccctcaagacattagtgagattgtccatcaagccaagagtcgggtagtcggaagagatttgtttgatatggttttcagacttgcgatgctggtctgtcggccaaccggcattgagagactcaaggctcaagcaatagaacaaaaggccaacagcatagcttggatgtttggatcaacacatattgatcatgagggaatgacacttgctcgcatacccgcaggattggggattgatgatgcaaatggggcagttatttggcctattatgatgacgagaatgcgtatcgaccatgagttggcagtagccgggcaaattattcctgctacggatgagatcacaatgaaatatccaatctcggaagcgttttttcgcgatatgttcatcaatcatcccttcatcccgtttgggcatgaagagtttttcatccagggtatggtttgcggtttcaatggagattttatgacggcatgccacgtattgattccacagatcgaaaatagtctgagatatgtggcgaaaatcaaaggtgaggagccatcacagcttcacggggacggttcgcaagagcgaaatggactcaagggactactagataatccactgattattgaagctttcggcgtagacataattggcaatcttcaggccttactggtagataaaatctatggtgatttacgaaaccaactagctcacggatatgtgcctgccggttactacaatcaacctccctgcatttttgcatggtggcttgtattgcacattctaatgaaccctacggcgagatactggcaagccacttacggccaagggagtgagactcagacttaa

SEQ ID NO: 218865 - DNA, 555 bp, Klebsiella pneumoniae
atgcaaaccacctcttttgaaaatcatactccggtgatgagtatgcaactgaaaacggaaaatcagtatttgccccgtcggcgtgacggcaagaaatgccgagccattttggccgccgttcaggaatgggagtcctcattacctgggcgtgcgcaagaccacgtcgcgcagctggtggccgaacagtgggagaaacaaaacgggcgcggtatcagcgtcaataaacaaaatctgtatcgctacctgaaaaacgagggcggttcagagaagtacaccagttatgtcatccagctttcggcggcgatcgctgatgcaatgccgatagagatcgcgcgcaaacatggcctaaaacatggcttaactgaaactgagctggtggccaatgcaatcaaagaatgcagcgaagcgcaccaggccaagttacttggcgcacctctgcagaaactagagcgtgaaatacgggaagctgcaattgcactttttaacatgctccctgcagatgcggcgggaccactactggcgagcatcagcgccgtagcgccgcagtttttctaa

SEQ ID NO: 218866 - DNA, 390 bp, Klebsiella pneumoniae
atgaaaaacactgaagaactcaacaaccaactgattgctcgtttggaagaaattactcaaagagggatcagcaaggcggatatggctcgcattgctggagttacacctcaagcggtgaatgggtggtttaagaaaggagtaatcagtaaaaagtccgcaattgccctcgcggaagctgccaatgtgtctgtaacttggttgcttggagagaaagtatctgaagattcaggcctcaagccaaatgagagcaaaatgttacgtctgtttaggcagttacctgaggctgaacaagagagaatgatcgatacgtttgaagtccgcctaaaagaaatcgatgattatgttgagaaatatctccgtggtcgatttaaggctagcgacactaactaa

SEQ ID NO: 218867 - DNA, 123 bp, Klebsiella pneumoniae
atggataaagcatacgaagactattttgaaagcctctctgaaggtgaggaggcactgagtttcagcgagtttaccgcggcgctttcaggtaaaccggcagactgcgcctcttctgaaatgtaa

SEQ ID NO: 218868 - DNA, 2139 bp, Klebsiella pneumoniae
atgaacaactacccgtatctcattaaagcgaaggcaaaagcaaacgaagcgaaaagtctcttctgctggttctctgctaaatccgattctcgcgccgagcgcaaaatcctggacatcctggaagacgctgaaattaacgttggccgcggcgccagccatcagctgccgatccgcaccaattggctcatcgttgatgacttaccggaagaaggtgtactggatgacacctggtgcgatcgctacgagcttggtggtgaagacgggctgacatggcaaaaaatcgttgcgccggcggctgctgaaccacagccctccagtaaaccagaaaacgatatctctcctgcaaatagcgatgaagaggactattcgaacaatgaagaagcactcttcaacctggcggaaatgtcattccgcacgcagctgcttgcccagtatatggccgacgagcgtcacgtgtatcatattagcattcctcatcgtaaccgcctttcagggatggaaatggatacggataatcacggtgtgcagaatctgctgctgacggcagaaaacattccggagcttaaaaaatatgatatgcctggcctgtggaaatttaccagtgcatttaagagcgtatttcctgtggggaaacgccatgagctcggcaagcaaattcagttcgccaaattgtggcttgaaacgtcgcacattgaccgcgggatccttacaaaggaatgggctgctggaaactatatcacctcaataaacaaaaccgatgccggcgccaatgctggcggcggtaacaaaactgaccgcaatccggattatcagcattcgctggatactctggatatagagatcgcccttgcgacgatgcctatggattttgatatctataattttccggcatcagtccaccgccgcgcgaaggaaatagtacagaagaaagaaagtccatttaaagaatggtctgcagcattacggagcacaccaggcatccttgattattcccgtgcagcgatttttgcactaatcagggaagcatccagtggaataactccttttccagatcggttgcgtggctacatcaacgcgaatctgactgaacataagcatgataccccgagcgctgaaacgcttgccaaggcgggacatattccatctgctgcagtcactctggatgcaataaaccaagcgatcgccggagaggatagcagcgcaaaactggaaacactctcctccgattttaaagcagttggtaccgaactggtaaaagaggctcaaaagcaacgtccagacgctaatcaggttctggcctccgagcgcggcgaatatgttgaagggattagcgaccctacggatccgaagtgggtaaccgaagaccttaccaagaccaggcaacctgaagtttcaaaaattggggacggagtattttccattgacggtcttgttgacgttacgggcaaggttaaccaaaaagaaaaaacagatgaagttgttcatcaaatggatgctgtagatattgaatccggtcatcacaataaggaggaagatcagccaattgattatgttcacgttatggttgatctggaaaccatgggtaaaaaacataacgcccctatcgtcgctattggtgcggttgtttttgacccggcaaccggctctattggagaaagtttctataaagtcgtatgccttgaatcctctgtgaactggggcgccgtaatcgatccctctactgttatctggtggcttaagcagtcctccgaagcacgctctgcgatcgtaaatgatgatgctatcccgttgctggatgcattactccagttcagagaatttgtttctgataatgtcgctggtgggagcaaaaaggcgcaggtatggggtaacggtgcgtcattcgacaactctattctgcgttcttcttacgattgcattgctgaagattatccttgggaatactggaacgatcgggacgttcgaacaatggtagaactcggccatgccataaactacgaaccccaaaaagcaatcccgtttgagggcgaacgacacaacgcacttgccgatgctattcaccaggcccggtatgtttctgcaatctggcagcgcctcatcgaaggaaatcaagtgctgcagaaactaactcaaaactga

SEQ ID NO: 218869 - DNA, 249 bp, Klebsiella pneumoniae
atgtcgcgattagttcttctgtctgtatgggctgaacatgagtttggggatcctattccgggcccatcaaccttaaataaatatgctaagaatggaatgatttcccctccacctcaaaaagtcgggaaaagttggcgggtagaaattacagcccgctttgtcgggatggcaacgaaaccagtgatgaaaaaacaagatcacccgttacttaggagaattcttgaagatgggcagaccacgcaaacataa

SEQ ID NO: 218870 - DNA, 1128 bp, Klebsiella pneumoniae
atgggcagaccacgcaaacataacgtcaatattcccgggctatctccgtactttgattcaaggacgaacaaagtatattggcgttataaacaccctgttacaggtaagtttcatggattaggtacagatgaaaagatcgctaccgagattgcaatagaagcaaacactcgactcgcagaacaacaaatgagaaatatcctcaaaataaaaaacgaagtacatgagcggatggggggatcatcgtcggtaacaacatttatcactcggtacaaaaagattcaagaagaacgatatagccgcggagaaattaaactcaacacattaaaacaaaaaaattcaccacttaaagtattggatgaacatcttggattacgttcacttgatcagataaccgttaaagacattgtcaacatattagatgagtacaaagaaaaagggcataacagaatggggcaaatattcagaaaagttgtcatagacgtttttaaagaggcacagcaactcggggacgtaccagttggttttaatccagcagaagcagcaaaaaaacctcatgtgaagatttccaggcagcgtctgacctttgatgagtggaagatcatatatgcatcggcagaaaaggaaaattattttcttcagcgtggaatgcttcttgccatcataaccggtcagcgccttgcagacatatgcaatatgaaattttcggatgttgaggataactatcttcttatcgaacaaagcaaaacaggggcaaagatagcacttccactacatttgaaatgctaccagttaggtatgagtcttggagaggttatctctttgtgtagggatagagttttgagtccgtatttgttgcatcaccatcatgcaaaagggactgcaaaaagaggaggcaaagtaaaacccggtacactcacagtggcattcagtaaggcaagagatgaggcagattacgattggtcaaaaaatggtacgcctccgagctttcacgaacaaagatctttatctgaacggctttatcgtgaacaaggcattgatactcaaattttgctaggacacaccagtaaaacaatgactgatcgatacaatgattcacgcgggaaagagtggaaaaaactggtcatataa

SEQ ID NO: 218871 - DNA, 465 bp, Klebsiella pneumoniae
atgacccctttttatcaattgacggccacccgcctgcgcggccagcccctctcaatgtctgactatactggcaaggtggttctggtggtgaatacggccagccattgtggcttcacgccgcaatatgctggccttgaagcgctctaccaaaagtacgcggctcaggggctggttgtgctgggtttcccctgcaaccagtttggtcagcaggaacccggcggtgcggatgaaatcgagcagacctgtcacgttaactacggcgtgagcttcccgatgtttgcgaaagtggacgtcaacggccctgccgcacacccgctgtttcgttatctgaaacaggcgttgcccggcatgctcggcggccggatcaagtggaatttcaccaagttcctcatcgctcgtgacggcacccctctcaggcgttttgccacgttcacctggcggtggctggctgcccatgcaaggtag

SEQ ID NO: 218872 - DNA, 1017 bp, Klebsiella pneumoniae
atgaaaacgatcgcaatccgtggttccgcctgtgcggtaggtcagcagcttggcgcgtttggtcgtgaggcctggcatactaaaatcaggcaaacagcgctgtggcaaaccgtcaccgccatgaaaacggcggaacagacccagcgtatgcgcgcagccgtgcaggctcagttcccgctgatctggcaggagctggagggcatggcggaggggctgcaggcgccagtggaggaggtgtttgcctggaactgtcgcggcgatctggtacgttcgacgtcggatggctgcaccaccctggcggggagaagcgctgagggggagttaattattgcgcacaacgaagacggcttcccgcagctgcgcggtgactgcgccatcgtccatgtgacgccggatgcgggcctcgccttcaccagcttcgcctatcccggctccctgtgcgggcacaccttcgcggtgaatgagaaggggatagttaatacggtcaacaacattcgtgccgtgcatcgtccggaggggatgccgcgccagatactggcccgcgcatcgctgaatgccaccaccttagatgaggccattagcctgctgaccgcctcaccgcgcgcgggcgcgtttcaccacacgctgggtcaaatgggcgatagccgtctgtttagcgtggaagctactggctccggcagctcagtgcgcgagctgaccgccacctttgggcatgcaaaccatctgatccatcctcagcttgagggcatggaacagatcgtgaccgggagctccggctcacgccagcagcgcctggacgcgtggctggcgtcgaacccgtcgctggatggggcagcagcgaaagcgatgctctccgaccagcatgatccgctgttaccgatttaccggctatctcccgacgatccggacgaggaaaatacgctggcgacggccatttttaccctgagtgcgacccaggtcgcgtggcaggtcttcaccctggatcgggaaaacgcggttttacagggcagcctttag

SEQ ID NO: 218873 - DNA, 729 bp, Klebsiella pneumoniae
atgagcatggttgaatttagcgcggtggcgaaaaacttcggcgccactcaggtactgcacgatatcaatttaaagattgaagcgggcgaggtggtggtgatcattggcccctccggctcgggaaaatcgaccctgctgcgctgcattaataagctggaggagatctcctcgggcacgctgctggtggcgggcatgcatattacggatccgcacgccaatgagtgtgatattcgccgcgaagccggtatggtgtttcaacagtttcatttgttcccgcatctgaccgccctggagaatgtcatgttcggtccggttcgcgtacgtaagcagagcaaggccgcggcgcgggagcaggcgctggcattgctggaccgcgtgggtctgcgtgaacgcgctaaccactatccggcgcaactctctggcggtcagcagcagcgggtggcgattgctcgcgccctggcggtgaaacccaaaatgatgttatttgatgagccaacctccgccctcgatcccgaactgcggcatgaagtgttaaaggttatgcgctcgctggccgaagagggcatgacaatggtgattgtgacgcatgagattggctttgccagagaggtcgcttcccggttgatctttatcgatggcggcaccattgccgaagatggttcacctgaggtgctgctcacagccagcagcaatccgcgtctgcaagagtttttacaacacgtatcctga

SEQ ID NO: 218874 - DNA, 660 bp, Klebsiella pneumoniae
atgatgaattttgacagtcgctatatttgggaagcattaccgctgctgatgcaaggcttgcagctgacgctgattatttcgttaacagggttgttgggcgggttaattattggtttgctggcggggacctgccgcgcattaggcggtaaaatagccaaaacggtgtcgctggtgtttgtcgaattaatccgcggaacgcctattatggtgcaggtgatgtttatctatttcgcccttccgatggtattgccggtgcgtattgacccggtccccgccgccattatcactattgtcattaattccggcgcttatattgccgagatcacccggggcgcgattctgtcaatcaataaaggatttaaagaagccagcctggcgatgggactatcgccgcgcagtacattatggcatgtcattatgccgctggcttttcggcgaatgatcccggcgttaggcaatcagtggattatcagtataaaagatacctcgctgtttattgtcattggcgtggcggaattaacccgccagggacaagagattattgccggtaactttcgtgcgctggaggtgtggaccgcggtggcgatgatttatctgttgttgacattgtgtctgagcttcctgctgaaacaacttgagaaaaggatccatattttatga

SEQ ID NO: 218875 - DNA, 753 bp, Klebsiella pneumoniae
atgactggattattgaataaattaaaactcacactggcattggttatctgttcagccagttttgctaccgccgcccaggataaaataacggtaggtgtcgatactgcctttgttccatttgaatttaaacaaggcgataaatatgtcgggtttgatatcgatttgtgggacgccatcgcgaagaaaatgcatatcagctacgaattaaggccgatggatttcggcggcctgatccccggtctgcagtcgcgtaatctggatgtggcgatggcgggaataaccattaccgatgcgcgtaaacaggtcgtggatttcagtgacgggtatgataatgccgatctgttaatggccgtgaaaagtactgacaatactattgttaaattcagtgatttgaccgggaaaaaagtcggccttaagcaggggacggcggcggccagctttatgaaaagcaaatataaagcgaattatatcgagttcccgaacatcgataacgcctatcttgacctgcaggccggtaatctcgatgccgtcgttcacgattcgccaaatgtcctttactacgtgaagacggcgggtaatggcaaggtcaaatccaccggtgagacggacagcattctgccacagcagtatggctttgcgatgcagaaaaacagtagtctgacgccaaaagtaaaccaggcgctgcaggccctgcgtgccgatggcacctacgataagatttacgttaaatggtttgctaagcagccgaaataa

SEQ ID NO: 218876 - DNA, 555 bp, Klebsiella pneumoniae
atgatcaatcgtttaccgcccctggcggaacaagaatgggacgaccagcaacgtcagttagcggaagagattatcaatgggccgcgcggcgccttgctgccgccttttgaaccgctgctgcgtagccctgagctgatggcgcatgcccagcgcatgggggagtacctgcgttatcgcagcgcgctgggccagcgtctttctgaactggtgattttgctgaccgcacggcactggtcacagccggttgagtgggcgatccatgcgccaatcgcacgtgagaaaggcatttctgccgcggcggtgcgggcgattaagcaacagcgcccgccagacgatctccggcccgatgagcaggtgatctatgacttttgtcagcaactgcatcaacagcaaaaggtcagggatgatacctggcagcaggccattgcgttatggggcgaaaagggggtcgtggatctgattgggataaacggttattacagttttctctcgatggtgatgaactgcgcccagacgccagcaccggatacctctgactcgctgttttctgaataa

SEQ ID NO: 218877 - DNA, 1329 bp, Klebsiella pneumoniae
atgagtcatgtcattcaccgcagcctgcgtagcacgccgatggtcgcctcacgcgcgcaaggggcctatatctttgatgcccagggcaaaccgtatctcgatgcctgcggcggggccgccgtttcctgcctcgggcacgcgcatcctgatgtgctggcggcgatgcaccgccagatcgatcggctggcctatgcgcacaccagcttttttaccagcgatgtcgtagagcagctggccgaccatctcacgcgcacagcgcctggcgagctgaactacgcctactttgtctcaggcgggtccgaggcaatagagacggcgctgaagatggcgcggcagtacgttgtggagatcggccagccatcgcgcacccgctttatcgcccgtaaacagagctatcacggcaatacgctgggcgcgctggcggtgggcggtaacgaatggcgccgtcgtcagtttgcccccttattaatggatgtcatccgcgtctcagcctgcaacgagtaccgcgatcgccgggctgacgagacccaacaacaatataccgagcgtctgcttaatgagctggagcaagccatccttgaggccggcccggaaacgattatcggtttctgtgcggaaaccgtcgtcggggcgacgacgggagccacgccgccgacgccggggtatctgaaaggcgtgcgccgcctgtgcgacaaatacggcatcctgtatatcgccgatgaggtgatgtgcggtatggggcggaccgggacgctgcatgcgtttgaacaagacgacgtagtgcccgatttagtggccatcgccaagggactcggtggaggctatcagccgattggcgcggtactggcgagtgagactattgtcgccgcgctgaaggcaggcagcgggttgttccagcatggtcacacttacatttgtcatgctaccgccgcgtcggcagccctggcggtgcagcaggtgattgcgcgcgataatttgctggatgccgtcaaacagcagggcgcctatctgcagaaggccctgcgcgaggtgctgggtgagttaccgcatgtcggcgatacacgcggacgcggcctgtttgccggcgtcgagctggtgcgcgataaagacgacaaaacgccgttcgatcctgacctgaagctgcatgcggcgatcaaagcacactgtatggcgcgtggactgatggtctatcccatgggcggcacgatcgatggtcagtatggcgatcacatcctgatcgcaccgccgtttatcatcaccccggcgcagatcgactttgtggtcgataccctggagagcgtgatccgcgaagagacagggaaattatga

SEQ ID NO: 218878 - DNA, 858 bp, Klebsiella pneumoniae
atgaatctcagggaaaatattattaatgaatttggcaagttgtcgcccgagctgcaacgcgccgccgagttctcactgcaaaatgccagccagctggtggtgctatcgatgcgtgccttcgcggcggaagctggggtaaaaccggcgacgctgctgcgtttggcgcaacggctgggctaccgcggctggagcgagctgaaaagcgattttattgacgatctgggtttgcgcgatgatacatacgtatcaaaagcggaaaaactgatggcccgcgggacgcaaacacagctgtatcaagaggtctttcaggcacatcaggcgaatctggcctttacgcaaaatgaaaatacgcaggagatggagcaggcagtgaccttgctcgatagcgcggagaatgtctatatctgcggattccgcgccagctttccgatcgcgtggtcgctgttttatgtctatcgtctgttcaaccggcaggtatcgttaatcgatggcctggccagcaatatcgaagtgttcacccgtgagctgaccgcccgggattgtgttttactgaccagttttgcgccttattcacgcgaatcactggatgttttacaggcagcccgacaggcaggggcgaagatcctcgccattaccgactcgccggtgtcccccttagcgcaggcggcagactgcacgctgctgttctccatcgatagcccgtcgtttttcccttccgtggtctccggtatggggctggcagaatgcttgctggcgatgctggtggtgcgccacggccgcgatgcggtgagtaaaattgaaaatgccgaacgctaccttatcgagtccggcgcctacgtgtcccccggtaaatcctga

SEQ ID NO: 218879 - DNA, 1221 bp, Klebsiella pneumoniae
atgacaaccaaccaatccgctcagaccttacccagtaccgctgcgccgccgcaaaaagcacgcacctcgtttggcatcttaggcgcgatcagcctgtcccatttgcttaacgatatgatccagtcgctcattctggctatctacccgctgttgcaggctgagttttccctcaccttcgtacagatcgggatgatcaccctcactttccagcttacctcatcgctgttccagccggtgattggctacatcaccgataaacgctcgatgccgtggtcgctgccggtgggtatgtgtttcaccctctgcggtttaattctcctggcgctggccgggagtttcggcatggtgctgctggccgcggcgctggtgggtaccggctcctcggttttccatccggaatcgtcccgcgtggctcggatggcctccggcggccgtcacggcctggcccagtcgctgttccaggtcggcggcaacttcggcagctcgcttggcccattgctggcggcggtgattatcgctccctatggcaagggcaacgttgcctggttcgtgctggccgcgctgttggctatcgtggtgctgtcgcaaatcagccgctggtatgccgcgcagcatcggatgaataagggcaaaccgaagcaggtcatcgttaatccgctgccgcgtaataaggttatcctggccgtcagcatcctgttaatgctgattttctcgaaatacttctatatggcgagcatcagcagctattacaccttttatctgatgcataagttcggattatcggtgcaaaatgcccagcttcatctgtttgccttcctgttcgcggttgccgccgggacggtaatcggcgggccggttggcgataagatcgggcgaaaatatgttatttggggctctatcctcggcgtggcgccgtttaccctcgttttaccctatgccagccttgaatggacggggattttgacggtgattattggttttatcctcgcctcggccttttccgctatcctggtgtatgcgcaggagctgctgccgggccgaattggcatggtttctggcctgttcttcggcttcgcctttggcatgggtggcctcggcgccgcggtacttggcctgctggcggaccataccagcatcgatctggtttataaaatctgcgccttcctgccactgctgggattcctgacgatatttcttcctgataaccggcaaaaagcctga

SEQ ID NO: 218880 - DNA, 1062 bp, Klebsiella pneumoniae
atgttggttacgctgccattcgcctctgttcagatttgcgcggccgcggaaccaacggcgccgctcgaaccggcgtatgcctatcacggcgcagagcctgcggatctgccggcgccagaaagtcgccagcctgcggcgacagaatcgtcctcgctactccctttgctaggcgatgaggccagaaagcgcggctacgtcctgccgctgccgtttggcgttagtattaactatatggatatgcggcagaatattaatgtcgacagcattaacttcaccgggctgtcgctggatggtcgcaatatcgattgcggtaagagcttcgcctgcaaacgtgcggtgaataatattttcgctaatgggcccgtctcgctggataacgctttccagattggcgtcggtaatacgcgggaaagcagtaaaaccgaaacgctcaagctggatgcctggctgctgccgtttatgaacgtttatggtctggtcgggcacaccgaaggacattcaatttcgcagattgccgtcggcctgaaggggccgaatggtaaagtggtccctctgccggggatgcaggatctcgactttcgcctcgattttaagggtaccacctacgggatgggcaccaccctggtgggtggcgtcggcaactggtttacggtgttcgacgccaactacacccagacgcgttttgatatcctcgacggtagcatcgacgcgtttaccttttcgccgcgcgtaggctatcgtttcactacgccatcggtcgatacgctgcatctccccgccggaaagctgaacctgtgggtcggcagcatgtatcaggatgtgcagcaggagtttaagggcagccttaacgatctctcgatgccgtcgccgatgctgcagaatatggtcaatctggccaaccaggacaataacggtcgctttgatgtgaaacagcatctccagtcgccgtggaacgtgctggtgggcgcgcagtatgagatgacgcagaactttaatattactaccgagtttggctttgccgaacgtaacagcttctttatcgccggtgagtatcgcttttga

SEQ ID NO: 218881 - DNA, 144 bp, Klebsiella pneumoniae
atgagtaaaaccgaaatgttcctgctgattattcttgccatcattctggttggctgcatatggtttattttcagcgatgaaatttggcttttactctgctatctcgaaagtcagatataccccacttttagcgttcctgaataa

SEQ ID NO: 218882 - DNA, 312 bp, Klebsiella pneumoniae
atgactcagaaaaaaggtgacaatcaccttaatggctactatgcatgtgtatctgaattaataaacaacccacccaacaatcatttactggctctccctgaatataataaattcctcacacatatgcttgattgttttaaatacaccaatctggatattgccaggcaatataaagatgagatgagacaaatgcaaattcaacatgagagtgaaattaatgagatcaaaagtcatatttcagcattaaaacagtcctcatcatggaagattacagctccgctaaggaaaataaaagatatcatcaaaaagtga

SEQ ID NO: 218883 - DNA, 375 bp, Klebsiella pneumoniae
atgcgactcctcgctggacgcgcgttgcgcctctccgttgcgtttgccggtatgttaaccgcggcaggcgccttcgcccacgctcacctgcaacagcagacccccgccgccggtgcccagctgacagccgccccgcagtcgttgacgctcagtttctctgaagggatagaacccgcgttcagcggcgtgaccatcacgggaccgcagcagcgcgcggttgccaccggaaaactgacccgtcatgccgataatcccgcgcaggtcaccatacccctggcggaaaccttgtcgccgggggagtactccgtgtcatggcatgtggtctcggtggatggccataaaaccaaggggcaatacacctttagcgtgaagtaa

SEQ ID NO: 218884 - DNA, 666 bp, Klebsiella pneumoniae
atggctaactggctaaatcaactgcagtcgctgcttgggcagaagggcgcgtcaccgactggcgagtcgtcaacaggaagcgccttactacccggcgccatcggtgggctggccggactgctggtggccagcaaatcgtcacgcaaactgctggcgaaatatggcaccagcgcgctgctggcaggcggcggggcggtggcaggcacggtattgtggaacaagtatcagcagaaaatgcgcgctcagcacacgcccgcacccggatctgtccctgaaacgactgcggtgccggcggatgtcgatccgcgaagcgtacggctgattacggccttggtgtttgccgcgaaaagcgacggccatattgatgaccacgagcgggcgaatattgaaacccagctgcgggcggccaatattgacgttcaggcccgggtattgattgaccaggcgctggcccagccgttggatccgcagcgtctggcagagggcattgttgatccgcaggaggcgctggagatctattacctcagctgcgcggtgattgatatcgaccattttatggagcgcagctatctgaacgcgctgggagaggctctggcattgccaaaagatgtgcgggccgacatcgaacaggatatccagtcacaaaaacaagcgctaagcggttaa

SEQ ID NO: 218885 - DNA, 753 bp, Klebsiella pneumoniae
atgagtgcgatagaagtaaaaagcctggtgaaaaaattccatggccagacggtgctccacggtatcgacctggaggtgcagaaaggggaagtggtggcgatcatcggccccagcggctcgggcaaaaccaccctgctgcgcagcatcaacctgctggagcaaccagaaagcggcaccatccgcgtcggcgaggtaacgatcgacgccggccgtagcctcgggccgcagaaagggcttatccgccagctgcgccagcacgttggctttgtcttccagaactttaatttgtttccccatcgtacggtgctggagaacattattgaagggccggtcatcgtaaaaggggaagacaagcaggagtcgatagcgcgagcccgcgatctgctggcaaaggtggggctcagcggaaaagagaacagctatccgcgccgcctctccggcggtcagcagcagcgggtggctattgctcgcgcgctggccatgcgtccggacgtgatcctgtttgatgaaccgacatcggccctcgatcctgaactggtaggggaggtacttaataccatccgccagctggcgcaggaaaagcgtacgatggttatcgtgactcatgagatgagcttcgcccgcgatgtcgccgatcgggctatttttatggaccaggggcggattatcgaacagggtgaggcgaaagcgctgttcgcctcacctcagcagccgcgtacccgtcagttcctcgaaaaattcctgatgcagtaa

SEQ ID NO: 218886 - DNA, 432 bp, Klebsiella pneumoniae
atgaaacagttagtttttgcgggcatggtcgtggcgctggccggatgtgtgcaggttgatcattacgacgacgttgttaaagcgccagcaccggccggtcttgagggctactggcaatcgaaagggccgcagagcgaaatgatgagtccggacgcgattgccagcctgattgtcaccaaagaaggggatactttcgactgtcgccagtggcagcgtgtgatcgcgcagccgggtaaactgatgaaccgcgatagtcaggtttacaacgtcacggcttccctggatatctatccgatcgagcgtgaaggtaacacgctgtcctatgatcgtatgacgctgacccgcgttgaacgcctcactcccgagtgtgaaaaggcatgggcgaaagcgcgtgcgactggacccgtcagcgcgcctgccactgcgcgttaa

SEQ ID NO: 218887 - DNA, 624 bp, Klebsiella pneumoniae
atgtcaacgatgattatggatttgtgcagctatacccggttgggattaacgggatacctgactagccggggtataaaaaagcaggatatcgttgaggtccgtgcagtcacagaactgcaaaaccactgcgcgtcgggtcgtccggcggtggtctttcttaatgaagattgtttcgtgcatgacgatgagagtaatacaattatccgtcagatcatcgtgcaaaatccggccacgctgtttgttatctttatgtcgctggcaaacatccattttgaccgttatctacgggtacgtaagaacctgttgatcagttcaaaatcgataacaccaaaagaccttgatgtcattctggttaattatctcaaatgcaaaaatagcagcctggggcagttaaatttacccaccttgtcattgagtaaaacagaatcaaatatgctgcaaatgtggatggccggacatgggacaacgcaaatttcaacgcaaatgaacatcaaagcaaagacagtatcatcccataaaggcaatattaaaaagaaaatccagacgcataataaacaagttatttaccatatcgttcgactcaccgaaaacatcacttcaggtattcaggtgaatatgcgctaa

SEQ ID NO: 218888 - DNA, 912 bp, Klebsiella pneumoniae
atgtctacccgtcagctgttaccgcttatcggggcgctgtttgcgctgtatatcatttggggttcaacctattttgccatcgccgtcggcgtcgccagctggccgccgctgatgatggccggcattcgctttctctcggccggcgtgctgctgctgggctggctactggccaccggtcataaactgccggcatggcggccgctgcttaacgctgcacttatcggaattttgctgcttgccgtcggcaacggcttcgtcaccctggctgaacatcaacatgtaccctccggcattgcggcggtgatggttgctaccgttccgctgttcaccctgtgcttcagccgctttttcggcatcgccacgcgaaaactggagtggctgggcattgcgattggcctggcgggtatcgtgatgctaaacagtggtggcaatttaaacggcaatccctggggggcgctgctgatcctgatcggctcattaagctgggcgtttggttcggtttacgggtcgcggatcgtgctgccgaccggcatgatggcgggcgctattgagatgctcgccgccgggatcgtcctgctggccgcctcatggctgagtggcgaaaccttaacccaggcgccctcctggtcagggattgccgctctggcctatctggctatctttggctcgcttatcgccatcaacgcctacatgtttttaatccgcaatgtcaccccggcggtagccaccagctacgcctatgttaatccggtggtcgcggttctcctcggcaccggcttcggtggcgagagtctgtcactcatcgagtggctggcgctggcggtgattattttcgccgtggtgctggtgacgctggggaaatatctcttccccgcccacagcgaggctaccccttgtaaggtggcgaagtaa

SEQ ID NO: 218889 - DNA, 618 bp, Klebsiella pneumoniae
atgacaactcagtatggattttttattgattccgcccgttgcaccggttgcaagacctgcgaactggcctgtaaggactacaagaacctgaccccggaggtcagtttccgccgcatctatgagtatgccggcggtgactggcaggaagacaacggtgtctggcagcagaacgtttttgcttattacctctccatcgcctgcaaccactgcgaagatccggcctgtaccaaggtttgtccgagcggcgcaatgcacaagcgcgaagatggttttgtggtggtcaacgaagatgtctgtattggctgccgctactgccatatggcctgtccgtatggcgcgccgcagtacaacgccgacaaaggccatatgaccaagtgcgatggctgccatgagcgcgtcgccgaggggaaaaaaccgatctgcgtcgagtcctgcccgctgcgggcgctcgatttcggtccgattgccgagctgcgcgcaaagcacggccagctggccgcggtggcgccgctgccgtcggcgcatttcacccggccgagcattgtgatcaaacctaacgccaatgcccggccgtgtggtgataccaccggttacctggcgaatccgaaggaggtgtga

SEQ ID NO: 218890 - DNA, 831 bp, Klebsiella pneumoniae
atgaaacgtattgcgtggttcgccctgctggcgttgctgctaaccggctgtgccggggaaaagggaattatcgatcgcgatggatatcagctggacactcgtcatccggcgcaggccgcgtatccgcgaataaaggtgttagtgatccactatacggctgataattttgatgtctcgctggccacgttgaccgataaagaggtcagctcccactatttaattcccgaaaagcccccgcgttttcagcacaaaccgcggatctggcagctggtgccagaagaagatttagcctggcacgccgggataagctactggcgcggtagcacgcgcatcaacgatacctccatcggcattgaactggaaaaccgcggctggcagaagacggccggtggcaaaagctttacgcctttcaacccggaacagatagcggccctgatcccgctggcgcgggacatcatcgcccgctaccacattgcgccgcagaacgtggtcgcccatgcggatatcgccccacagcgcaaagacgatccggggccgttattcccctggcaacagctggcgcagcaggggattggcgcctggcctgacgagcagcgggtggccttttatctgaatggccggccggccagcgagccagtggaccccgaagtcgtgctggatttgctgtcgcgctatggctatcaggtgacgccggagatgacccccgcgcagaagaagcgggtgattatcgcttttcagatgcacttccgcccgcagcgctgggatggcgtagcggatgcgcaaaccgaggcgatagccgaggcgttgttagaaaaatacggccagggttag

SEQ ID NO: 218891 - DNA, 1296 bp, Klebsiella pneumoniae
gtgctggaacggctgtcatggaaaaggctggcgctggagctctttttagcgtgtattccggccctgattctgggggcattttgggggcatttgccgtggtttttactggcggcagtgaccggtttgctgatctggcatttctggaatttgatgcgtttatcgtggtggctatgggtagatcggagcatgactcccccgcctggccgcggtagctgggaaccgttgctgtatggtctgcatcagatgcagatgcgtaataaaaagcgtcgacgtgagctgggaagcctgattaaacgctttcgcagcggcgcggaatcgctgccggatgcggtcgtcctgaccacggaagagggggccattttctggtgtaatggcctcgcgcagcagattttaaacctgcgctggccggacgacagtggtcaaaatattctcaaccttctgcgctatcccgagttcgccaactatctgaaacagcgtgatttttctaagccactcaacctggtgctcaataacgctcgccatctggaaattcgcgtgatgccttacaccgacaagcagtggctgatggtggcgcgcgacgtgacgcagatgcatcagctggaaggggcgcggcgaaactttttcgccaacgtcagccatgaactgcgcaccccgctgacggtgctgcagggctatctggagatgatgcaggagcaggtgctggagggggcgacccgggaaaaagccctgcacaccatgcgtgagcaaacccagcgtatggaaggtttagtaaagcagctgctgacgctgtcgcgtattgaagccgcaccggcgctggcgatgaatgaccgcatcgacgtaccgatgatgctgcgggtggtggagcgtgaggcgcaaaccctcagtcaggataagcagacgttgttttttactgtcgatgaacaccttaaggtgctgggcaatgaagagcagctgcgcagcgccatttctaacctggtttataacgcggtgaaccacaccccgccggggaccgaaattcgcgtcagctggcagcgaacgccgcagggggcgctgttcagcgttgaggataatggaccgggcattgcaccggagcatcttccccgcctgaccgagcgtttttatcgggtggataaggctcgctcccgacaaaccggcggcagcggcctgggactggcgatcgtcaaacacgcggttaaccatcatgacagccggctggaaatcgacagtacggtgggcaagggaacccgttttagtttcctgcttccggaacgattaattgccagaaacgacgactga

SEQ ID NO: 218892 - DNA, 189 bp, Klebsiella pneumoniae
atgtccggtagcgcaactgattctcgcgatcttgtcatcagccgtcagctcagcgcgcccgcctctgccctgtggcgcgcgtgggccgatcctgccttgctcaaaatctggtggtgcccgaagccctggcaaatcgaggtactggcctttgattttcgctctggcggcgcgtttcacacggtcatgtga

SEQ ID NO: 218893 - DNA, 645 bp, Klebsiella pneumoniae
atggcgggagtactgataaccgggtttgaacccttcgacggcgagacggtgaacccttcctgggaagtggtgcagcagctggacgggacgatgattgccggtcagacggtgatcgcccgccagcttccctgtgtgtttggcgaggcgctgtcggtgctctatacggcgataaacgcgctgcagccaaagctggttatcgccgtggggcaggctggcggtcgcgtcgatatcagcctcgaacgtgtggctatcaacgtcgatgatgcgcgtattcctgataatcaaggccagcagccggtcgacacgccgatcgtcgccggcgggccggcggcgtggttcagcactttgccgatcaaagcgattgtcagcgcgctgcgcgatcgcgggatcccggcgtcggtgtcgcaaaccgccggcaccttcgtctgcaatcacgtcatgtacggcctgctgcacaggctgcaggggcagactgaggtgcggggcggctttatccatattccctggctaccggcgcaggcggcggcccatcccggcgagccgagcatggcgaccgccactgtgcgtgaggcgctggaaacggccattgccgtggcgctgcgtcagccggtagatagcaaactgggtggcggtgctacccactaa

SEQ ID NO: 218894 - DNA, 753 bp, Klebsiella pneumoniae
atgatgattgatctcaatgccgatctcggggaaggcggggcgaatgatagcgcgctcctccagctggtctcgtcggcaaatatcgcctgcggctttcacgccggcgacgccgggctgatggtgcagagcgtacgcgaggcgctgaagtacggcgtagcggtcggcgcccatccagggtatgccgaccgggaaaatttcggccgcacagcgatggatctgccgccggaaacggtctatgcccagacgctgtatcagattggcgccctggcggcgatcgttcaggcgcagggcggtgagctgcagcacgtgaagccgcacggcatgctgtataaccaggcggccaaatcaccgccgctggcggacgcgattgcccgcgcgatccgtgatgtgaatccgaaactggtgctggtggggctggcgggcagcgaactggtccgcgccgggcagcactatggtctgacgacgcgccaggaggtgtttgccgatcgcggctacctggccgacggtagcctggtgccgcgcagccaacccggggcgctgattgacagcgaagagcaggctctggcgcaaactctcgagatggtgcaacaccaccgggtgcgtagcgtcagcggcgaatgggcgaacgtggtggcgcagacggtgtgtctgcatggcgatggcccacacgcgctggattttgcccgccgtctgcgggcggcctttgccgggcgccatattcaggtcagcgctcagctggacgcagaaatatga

SEQ ID NO: 218895 - DNA, 657 bp, Klebsiella pneumoniae
gtgcagcgagcgcgttgttatttgttaggagaaacggccgtcgtgctggagctggagccgccggtcacgctcgagagccagcaacggatctggggattggcccagcggctgtctcaccacgaagcggtggttgacgccattcccggcatgaacaatatcaccgtggtgctccgccgccctcaggagatggcatgggaggcgatagaccgtctgcagcgctggtgggaggagagcctcgcactggagccggagtcgagatcattgaccatcccggtggtgtacggcggcgaagccgggccggacctcggggtggtggcgcagcacagcggcctgagtgaaaaacaggttgtggagctgcatgcctcggtggaatacctggtctggtttattggttttcagccgggattcccctacctgggcgggctgccgccggcgctggcgaccccgcgtcgcgccgaaccgcgcgtgcgggtcccggccggatcggtgggcattggcggcgcgcaaaccggcatctatccgctggcgacgcccggcggctggcagctgctggggcggaccgcgttgacgctgtttgacccggcgcgtaaggagcctgcgctgttgcgcgtgggcgataaaattcgctttgtgccgcaaaaggagggggtatgttaa

SEQ ID NO: 218896 - DNA, 927 bp, Klebsiella pneumoniae
atggaacttcgccagctacgctactttgtgcgcattgttgaaaccggcagcatggggcgcgctgcgctcgatctcaatatcggcgtctcggcgcttagccagcagatcgcgcgcctggaaaacgaactagccattcgcctgctgcagcggacctcccgcggggtcacgcccaccagcgcgggccttgctttctactcccaggcgcagctggcgctgcgccatgccgatgatgccatcctcgccgcccgcgaggcgcgcctgtcgggccacgtcagcgttggcatggcccccagcaccgcctccgttctcggcgtcccgttcatcaatgcgatgcgcgaaagctaccccgacgtgcgcctgcatctggtggaaagcctttccggcaatctggaacggatgatcaacactcgccagctcgatttagctatcgttttccagcaggagaagatcctgcgctggagcgccagaccgctgctggaagagcgcctgttcctgattggcagccatgcgctgttagcccccctgcaggatgaccatatcactcctgaccagctcgcctccctgccgctgattatgccaagtcagggccacggcctgcgcggaaggctggaggcggtttgccagcagcatcatctcagcgttgaggtggtggcggagattgacggcctggccctgctgatgcaggccgtgcgcagcggactgggggccaccctgcagcccggggccgctatctcccatctcgaccatcaggcgctaagagtgatcggcgtcgccaatccggtgctgagtcgccccaactttctggtcagcctgtccgatgatgagctcaccccggcagggcttgccgcacgggtaatactgagcaaagtcatgcgtcagctggtggagtctgaccgctggccgggcgctaccctttacactaactaa

SEQ ID NO: 218897 - DNA, 1404 bp, Klebsiella pneumoniae
atggtggatgtactggtgattggtggcggcaatgccgcgctatgcgccgccttaaccgcccgggaggccggcgcctcggtgctgctgctggaggcggcgccgcgggagtggcgcggcggcaactcgcagcacacccgtaacctgcgctgtatgcacgatgcgccgcaggacgtgctggtcgacagctatccggaagaagagtactggcaggatctgctgcgcgtcaccgaggggaacaccaacgaagcgctggcccggctggtgatccgcacctcgtcacagtgccgcgactggatgcgccagcatggggttaactttcagccgccgctctccggcgctctgcacgttgcccgtaccaacgccttttttatgggcggcggcaaagcgctggtcaatgcctattaccgcagcgcagagcagatgggggtgcagatccgctacaacacgccggtgcaggccctggaactgcgcaacggggaatttgttgccgcgctggcaggcgaagaacggattgtcgcgaaaagctgcgtcctcgccgccggcggatttgaatccaaccgcgaatggctgcgcgaggcctgggggcagaacgatcgtggcgaatggcccgccgataatttcctcatccgcggcacccgcttcaatcagggggtattgctcaagtttatgatcgacgccggggccgatattatcggcgatccttcgcaatcccactgcgtcgccattgacgcccgggcgccgctctatgacggcgggatctgcacccgcgtcgactgcgtgtcgctgggggtggtggtgaatcgcgatgccgagcgtttttatgatgaaggagaagatttctggcccaaacgctacgccatctgggggcgactggtcgcccaccagccggggcaaatcggctactcgatcatcgacagtaaagccattggccactttatgccccccgtctttcccggcgctcaggccaatactatccccgagctggcgcgccagctcgggctggacggcgagcgcttagcgcaaaccctcgccgattataatgccgcctgtaccccgggtgacttcgatcatacccgcctggataactgcgccacctccggcctgacgccgccaaagacccactgggcgcgccccctcgatacgccgccttactacggctatgccttacgtccggggatcaccttcacctacctcgggctctacgtcgacgacaccgccgccgtccacttcgccggcaaacccagccgcaacctgtttgtcgccggggaaatgatggctggcaacgtgctgggcaaaggctataccgctggcgtcgggatgtctattggcaccaccttcggccgcattgccggtcagcaagccgcccgggcggcacagcaggagaaccaccatgaagtcgcttga

SEQ ID NO: 218898 - DNA, 1140 bp, Klebsiella pneumoniae
atgaagtcgcttgaaaagctgatcattgacgcgcagatcatcaccgagccggaggcggaagtcgaacgggtgatgcaggtgtgtaacgcctgccgttattgcgaagggttttgcgccgtgttcccggcgatgacccagcgcctggcctttggcaaggcggatatcaactatctggctaacctgtgtcataactgcggcgcctgcctgcacgcctgccagtacgcgccgccgcacgagttcgccatcaacgtgccgaaggcgatggccgaagtccggctggagacctatcagcattacgcccagcccgccgcctttgccagcctgtaccgccgggccggcgtgaccaccgtgctggcgctgatcgctggcctgatcgtctttctgctgctggcgatggggctcaacggttcactgctgcacccgccgctggccggtgatttctaccagatattcccgcataacctgctggcgtggatgtttggctcggtctttgtgctggcgattggcttactgatgaccggggtgatccgtttctggcgcgagatctccccgggtcagccgcaaccgattgatattgcaaaggcatcccatgatgcgctgacgctgaaatatctcgacggcgggcacgggaaaggctgcaacgaagccgatgacgccttcacgctgatgcgccgccgtttccaccacttcaccttctacggctttatgctctgtttcgccgcgacggtggtggccacgggctatcactatttcgccggccgggaagccccctacccgttcttcagcgtcccggtgcttctcgggaccctcggcggcatcggcctgctggtggggccggctggtctgctgtggttgaacctgcgccggtcgccactgcatggcgatgcgcgacaaaaaccgatggaccgcgcatttatcctgctgctgctgctgaccagcttcaccggtctggcgctgctggcgggacgggatacctcgtggatgggtattttgctcgccgttcatctcggggtggtgatggccctgtttttaacccttccctacggaaaatttgcccacggattttatcgctgtgcggcgctactcaagtgggcgattgagaagcggcgcggaaaacaggcggcagtcgcaggcgactaa

SEQ ID NO: 218899 - DNA, 1296 bp, Klebsiella pneumoniae
atgacccaacaacctacccgcgccggcaccgtcggcgctatcctccgcgtgaccagcggtaattttctcgaacagttcgactttttcctgtttggcttttatgccacctatattgcccgcaccttttttccggcagagagcgagttcgcggcgctgatgctgacctttgcggtgtttggttcgggctttctgatgcgccccatcggtgcggttgtgctgggcgcctatatcgacaggatcggtcgccgcaaagggctgatggtcaccctggcgatcatgggctgcgggacgctactcatcgccctggtaccgggctatcagaccatcggcgtgctggcgccgatcctcgtgttagtgggccgcttgctgcaggggttctccgcgggcgtcgagcttggcggggtgtcggtctatctggcggagatcgccacgccgggcaataaaggcttctataccagctggcaatccgccagccagcaggtggccatcgtgatggcggcgctgattggctacgcgctgaacgccaccctggcgcatgaagagatcgccgactggggctggcgcattcccttcttcattggctgtctgattattccgctgattttcgtgctgcgccgctcgctgcaggagaccgaggagttcctgcagcgtaaacatcgcccggatactaaagagatcctgaccactatcgccaggaactggcgcattattaccgccgggacgttgctggtggcgatgaccaccaccaccttttattttatcaccgtctatacgccgacctacggcagagcggtgctgcacctcagcgctcgcgacagcctgctggtgaccatgctggtaggcatctctaactttatctggttaccgattggcggggcgatctctgaccggatcggtcgtcgcccggtgctgatggggattaccgtgctggcgctgctcaccacctggccggtgatgcactggctcaccgccgcgcccgattttacccgtatgacgctggtcctgctgtggttctcgttcttttttggcatgtataacggcgcgatggtggcggcgctcaccgaagtgatgccggtgtatgtccgcacggtgggcttttcgctggccttcagccttgccaccgcgatcttcggcggactgacgccggctatctctaccgccctggtcgagctcaccggcgataaaagcgcgcccggctggtggctaatgtgcgccgcgctgtgcgggtttgtcgccaccgtcctgctgttcgtgcgtctgagccgcagctaccaaccggcagagagccagcgctaa

SEQ ID NO: 218900 - DNA, 1404 bp, Klebsiella pneumoniae
atgcgtacgtttagtggcaaacgtagtacgctggcgctggctattgccgccgtcaccgcgatgtcgggctgggttgtggtcccgcaggccagcgcagcaggctttatcgatgattcaaccttaaccggcggtatctattactggcagcgtgagcgtgaccgtaaagatgtgaccgacggcgacaaatacaaaactaacctttctcactccacctggaatgccaacctggacttccagtccggctatgccgccgatatgtttggcctggatattgccgcgtttacggcgattgaaatggcggaaaacggcgacagcggccacccgaacgaaatcgccttctcgtcacgtaacaaagcctatgacgaagattattccggcgataagagcggcatcagcctgtataaagcggcagcgaaattcaaatatggtcccgcgtgggcacgcgcaggttatatccagccaaccggccagactctgctggctccgcactggagctttatgcctggtacctaccagggggcggaagccggcgccaacttcgactatggcaccgcgggcgtgttaagtttctcctacatgtggacgaacgaatataaagcgccatggcatatcgagatggacgatttctatcagaacgacaagaaaaccaaagtcgattatctgcactccatcggcgctaaatatgatttcaaaaatgacctggtgctggaagcggcgtttggtcaggctcagggctatatcgatcagtactttgctaaagccagctacaagtttgacgtcgccggtgcaccgttgagcaccagctatcagttctacggcacccgcgataaggtcagcaatggcggggtcaacgacatctatgacggcaccgcatggctgcaggcattaacctttggctataaagtggcggatgtgctggatctgcgtctggaagggacctgggtgaaggccgatggccagcagggctacttcctgcagcgtatgacgccgacctacgcctcctccaacggtcgtctcgatatctggtgggataaccgctctgactttaacgccaacggcgaaaaagcggtcttcttcggcgcgatgtatgacatgaaaaactgggacatgcctggctgggcgtttggcgcctcttatgtctacgcctgggatgcgaagccgggcagaatgtcctctccggatgcgtactacgatcctgactatcgcctgaaagagtcggcctacagcctggatgcgctgtataccgtgcaggaaggtcgggcgaagggcacgctgttcaaactgcactttacccagtacgacaaccattccgatatcccgagctggagcggtggctacggcaacatcttccaggatgagcgcgatgtgaagttcatggttatcgccccgttcactattttctga

SEQ ID NO: 218901 - DNA, 741 bp, Klebsiella pneumoniae
atgtcaatagactggaactgggggatattcctgcaacaggcccccttcggcaacactacctacctgggctggctgtggagtggttttcagataaccgtcgccctctccatctcggcctggatcatcgctttcctcgtcggctcgctgttcggcattttacgcacggtccctaatcgcttcctctcggggattggcacctgctatgtcgaactgtttcgcaacgtgccgctgatcgtgcagttctttacctggtacctggtggtgccggagttcctgccggaaaatatcggcatgtggtttaaatcggaactcgacccaaacattcagttttttgtctcctccatgctgtgcctggggctgtttaccgccgctcgcgtctgcgaacaggtacgtgccgccatccagtcgctgccgcgcgggcaaaagaatgccggcctggcgatgggtctgaccctgccgcaaacctaccgctacgtgctgctgccgaacgcctaccgcgttatcgtgccgccgatgacctcggaaatgatgaacctggtgaaaaactcggccatcgcctccaccatcggtctggccgatatggccgcgcaggcgggcaagctgctggactactccgctcatgcctgggagtcttttaccgccatcaccctggcctacgtcttcattaatgcggtgattatgctgattatgtatgtggtcgagcgtaaggttcgcctgcctggcaatatgggaggcaaataa

SEQ ID NO: 218902 - DNA, 435 bp, Klebsiella pneumoniae
atgtttgactctattctcattgtttgtacaggcaatatttgccgttctccaattggagagcggtatttgcgaaatttattacctgataaaaaaatcgattcagcaggaaccggggcactcattgagcatgcagctgacaatagtgcgatcaaagttgctcagaatcatgggctatctctggaggggcatcactccagacagtttacatcatcccttgggcgccagtacgatttaatattagcaatggaaaaatcccatattgagcagatagggcatatagcacctgaagccagaggaaaaacgatgctgtttggacactggctggagcaacgggatatacccgatccttatcgcaaaagtgacgaagccttcttatcagtttataaacttattgagcaggccggtaaactttgggcccaaaagttaggtgcataa

SEQ ID NO: 218903 - DNA, 1416 bp, Klebsiella pneumoniae
atgacagacctcccggccagcgtgcgctggcagctatggatagtggcgttcggcttctttatgcagtcgctggacaccaccatcgtcaacaccgccctcccctcgatggccaaaagcctcggggagagcccgctgcatatgcatatgatcattgtctcctatgtcctgacggtagcggtcatgctgccggccagcggctggctggccgaccgggtcggggtgcgcaatatcttcttcaccgccatcgtgctgtttaccgccgggtcgctgttttgcgcccaggccaacaccctcgaccagctggtgatggcgcgggtgctgcagggggtcggcggggcgatgatggtgccggtgggtcgcctgacggtgatgaaaatcgtcccgcgcgatcagtacatggcagcgatgaccttcgtgacgctgccgggccaggtcggcccgctgctcggcccggcgctgggcggggtgctggtggaatacgcctcctggcactggatcttcctcattaacatcccggtggggatcgtcggcgccatcgccaccctctgcctgatgcccaactacaccctgcagacccggcgcttcgatctctccggctttgtgctgctggccgccgggatggcgaccctgaccctggcgctggacggccagaaagggctgggcatgtcgtcgtcgtggctggcaggcctggtggccactggcctcggcgccttgctgctgtacctgtggcatgcccgcgacaacgcccgggcgctgttcagtctcgatctgtttcgcaaccgcaccttctccctcggcctcagcggcagcttcaccggtcgtatcggcagcggcatgctgccgtttatgacgccggtatttctgcaaatcggcctcggcttctccccttttcacgccgggctgatgatgatcccgatggtgctcggcagcatgggtatgaagcggatcgtggttcaggtggtgaaccactttggctatcgtcgggtactggttgccagcaccctgggcctggccgctgtcagcctgctgtttatgtgtagcgccctggccgggtggtattacgtgctgccgctgatcctgtttttacagggcatgatcaactccagtcgcttctcctcgatgaataccctgacgctgaaagatctgccggacgatctggcgagcagcggcaacagtctgttgtcgatggtgatgcagctgtcgatgagtattggcgtgaccatcgccgggatgctgctggggctttacggccaacagcatctgagcctcgacgccgccagcacccatcaggtctttctctatacctatctgagcatggcggcgatcatcgccctcccggcgctcattttctcccgggtaccggatgacgtcggcagcaataccgttatccgccgacgcaacaggagtgaatcgtga

SEQ ID NO: 218904 - DNA, 1278 bp, Klebsiella pneumoniae
atgtctatcaataataaacagtggctcggtttacccctgaacctgctctggggatacatcgccattgccgtatttatgaccggcgacggttttgaattagcctttctgtcgcactatatcaaagcgcttggcttctccccggcggaggcctcctttgcctttaccctctacggcctggccgccgcgctgtcggcgtggatttccggcgtggtggcggaaattatcactccgctgaaaacgatgatgattggcttcgtgctgtggtgcgtgttccacgtgctgttcctcgttttcggcctcggtcacgccaactatgcgctgatcctgattttctacggaatccgcggcttcgcctatccgctgttcctctactcatttatcgtggcgattgtccataacgtcaaaagcgacaatgccagctcggccatcggttggttctgggcggtgtattccatcggcatcggcgtgttcggcagctatattccgagcttcaccattccgcacattggcgaactggggacgttgtggctggcgctggccttctgcgtcaccggcggcgtgattgccctggcttccctgcgccatattcaaacgccgcagcatatgcagaatctcaccactcgccagaagttttccgagctgggacgcgccgcgacgctgctctataccaaccgcaatattctgctgtcgagcatggtaaggattaccaataccctctcgctgttcggctttgcggtcattatgccgatgatgtttgtcgatgagctgggcttcaccacctcggaatggctccaggtatgggcagtcttcttcttcaccaccattttctctaacgtgctgtgggggatcctgggggaaaaactgggctggatgaaggtggtgcgctggttcggctgcatcggtatggcgctctccagcctggcgttttactacattcctcagcactttggccatagctttgcgatggcgctgatccccgccatcgccctcgggatctttgtcgccgccttcgtgccgctggccgccgtgttcccggcgctggagccgaagcataaaggcgcggccatttcggtttataacctgtcggcggggatgtcgaactttctcgcgccggcgattgccgtggtgctgctgccgttcttcagcaccatcggggtggtgatcgcctataccgcattgtacgtggtggcctttttcctctgcgcttttatccgcgtggagcagccggggttctcccataaggaaacgaccgcctccgagcaggttgaattctcttag

SEQ ID NO: 218905 - DNA, 1368 bp, Klebsiella pneumoniae
atgaacaatcaattcacttggcttcacatcggtctgggttcttttcaccgcgcgcatcaggcgtggtatctgcatcgtctgattgcgtccggggataagcgctggcacatcgcggcgggaaatattcgtaacgacgccgagcaggtggtccaggcgctggcggcgcagggaggacgttacgtcctggaaaccgtcagcccggaaggggagcgcgactatgaagagatcacctcaatccagaaactgctgccgtggcaggccgggctgcagccgctgattaacgagggggcaaacccgcagaccaaagttatcgcctttaccgtgacggaaggggggtactacctgaacacccgccatcagctggaaaccagtaaccccgatctgcaggccgacctgcaaggcgagtgcaaaaccatttacggtaccctcgcgcggatcctggaaaaacgcatggcggacaacgccgggccgctgaccctgctcaactgcgataacgtgcgccataacggcgagcgttttcacgacgggatggtggagttcctgcagctcaccggcaaacaggcggtcattgactggatggcggccaataccacctgtccgaacaccatggtggaccgcatcaccccgcgtccggcggccgatctgccggcccgtatcaaagcgcaaaccgggattgatgacaaagcgccggtgatgggggagacctttatccagtgggtggtggagaaccacttccgtgatgcccgcccgaacctggaagcggtcggcgtggagatggtcgagtcggtcatcccgtatgaagaggcgaaaatccgcattctgaacgcgtcgcacagctgcattgcctgggcgggaaccttaattggccagcagtatattcatgaaagcacgctgaccgatgctatctacgccattgccgaccgctacgtcacggaggatgtcatcccgtgcctcggcgataacggcattgatttgccgacctaccgggatgtggtgcttaagcgctttaccaacccgtatatccaggacaccaaccagcgcgtcgccgccgatggcttctcgaaaattccggcgatgatcgcccccacgctgcaggagtgctatcagcgcggcgttcgccctgaggcgaccgccatgctgccggcgctgttcttcgtctttatggagcagtggcataagggaacgctgccgtatgagtaccaggacggcatcctggatgcgcaggcggtgcatgaaatgtatgaggctcaggatccggtggctgtctacgctcgcgataaagccctgtttggtgacctggccaacaacgcggatttcctggcgctgatgcgcgagaaagtcgccgccgtttacacgctgattaaataa

SEQ ID NO: 218906 - DNA, 801 bp, Klebsiella pneumoniae
atgaaacgtatcaacgccctgactattgccggcaccgatcccagcggcggggccggtatccaggccgatctgaaaaccttctccgcgctgggcgcctacggctgctcggtgatcaccgccctggtggcgcagaatacccgcggcgtgcagtcggtctatcgcatcgaaccagattttgtggcggcgcagctcgattcggtgttcagcgatgtgcgtatcgataccaccaaaatcggcatgctggcggagaccgatattgtggaagctgtggccgagcggctggcgcgctaccgggtggccaacgtggtgctggatacggtgatgctggcgaaaagcggcgatccgctgctgtcggcctcggcggtggagaccctgcgtcaacgattgctgccgcaggtgtcactgatcacgccgaatctgccggaagcggccgcgctactcgatgccccccatgcgcgcaacgagcgcgagatgctggagcaggggcgggcgctgctggcgctgggctgtggcgcggtattgatgaagggcggccatctcgacgatgccgaaagcccggactggctcttcacccgtgaaggggaacagcggtttaccacgccgcgggtacagactaaaaatacccacggcaccggctgcacgctctctgcggcgctggcggcgcttcgcccgcgtcatgcggactgggcggccaccgtcgccgaggcgaaggcctggctgtcggcggccctggcgcaggccgactctctggaggtgggccacggcattgggccagtgcaccatttccacgcctggtggtaa

SEQ ID NO: 218907 - DNA, 774 bp, Klebsiella pneumoniae
atgcctgaattgctgaatcctgcgtctgtcgcgcacctgcgccatctgctgcgcgcccattccccccttgtgcactgcatgactaatgacgtggtgcagacctttaccgccaatgtcctgctggccgtcggcgcctcgccggcgatggtgatcgatccccgcgaagcggcgcagtttgccgctatcgccgatgcgctgttaattaacgtcggtaccctgaccgaagatcgcgcggtggcgatgcgcgccgcggtggaacgcgcccgccaggccggcaagccctggacgctggatccggtggccgtcggtgccttgaccgtgcgcacggccttttgtcacgagctgctggccctgcagccggcggccattcggggcaatgcctctgaaattctggcactggccgggatgagcgccggtgggcgcggggtggataccaccgatacggccgccgcggcgctgccggcggcccaggcgctggcccgccagttgaccaccattgtggcggttaccggcgaggtggattacgtcaccgacggcgaacgggtgcttagcgtggcgggaggcgatgcgctgatgacccgggtggtgggcaccggctgcgcgctgtcggcggcggtggcggcaagcacggcgctgccgggagaccagctggaaaatgtagccgctgcctgcgggctgatgaagcaggccggggagatcgccgcccgccagggaggccctggcagctttattccggcgtttctcgacgcgctgtatcaggaggtgcagggatga

SEQ ID NO: 218908 - DNA, 1977 bp, Klebsiella pneumoniae
atgaaattgaccccgatagttaaagggttagcgttagcgggtttgttaaatagtctcgctttcgccgcctgggcggatacgtcagccaaagaggcgaccgaagcgaccaaaaaagcgaacgatgccctctacaatcaactccccttctccgataacaccgatttcaccaatgcgcataaaggctttattgccgccctgccgccggaggtcattaaaggcgaacaaggcaatatcatctgggatccgggtcagtatgccttcatcaaagaaggggaaaaagcgccggagacagtgaacccgagcctgtggcggcagtcgcagctgatcaacatcagcggcctgtttgaagtgaccgatggggtctaccagatccgcaacctcgatctctccaatatgacgatcatagagggcaaagaggggctcaccgtcgttgacccgctggtctcggcagaaaccgccaaagttgggatggatctctactaccaaaaccgcggcaaaaaaccggtcgtcgcggtgatctacacccacagccacgttgaccactacggcggcgtgcgcggcgtggttgatgaagccgacgtcaaagcgggcaacgtgaaaatctacgcgccgtccggctttatggaagccgccgtggcggaaaatatcatggccgggaacgtcatgagccgccgcgccagctatatgtacggcaacctgctgaaacccgacgccaaaggccaggtgggcgccggtctgggcaccactacctctgcgggtaccgtcaccctgattgcgccaaccaacattattgacaaggacggccagaaagaagtcatcgacggcctgacctacgactttatgctggcgccgggctccgaagcaccgtcagaaatgctgtggtatatcgaagagaagaaactgatcgaatccgcagaagatgtcactcataccctgcataacacttactcgctgcgcggggcgaagatccgtgaaccgctgccgtggtcaaaatatatcaaccaggcgatcgttcgctggggcgataaggctgagatcattatggctcagcaccactggccgacctggggcaacgaaaacgtggttaacctgctgaagagccagcgagacctgtatcgttacatcaacgatcagaccctgcggatggctaacgaaggcctgacccgcgatgaaatcgccgctaactttacgctgccggacagcctcgccaacacctgggctaaccgcggctactacggctcggtcagtcacgatgtgaaggccacctacgtgctgtatctcggctggttcgacggcaaccctgccaccctcgacgaactgccgccggaagaagcggcgaagaaattcgttgagtacatgggcggcgccgatgccatcctgcagaaagcgaaagaggattacgaccagggtaactaccgctgggtcgcccaggtggtcagcaaaattgtcttcgccgatcctaataaccagcaggcgcgtaatctggaagccgatgccctggagcagctaggctatcaggcggaatccggcccgtggcgtaacttctacctcaccggcgcccaggagctgcgtaacggtgtggtgaaaggcccgaccccgaataccgccagcccggacaccgtccgcgccatgaccccggaaatgttctttgattacctggcggtgcatatcaatggcgagaaagcaggtaacgcgaagtcggtgttcaatatcgatctgggcagtgacggcggcaaatataagctggagctggaaaacggcgtgctgaaccacaccgcgaatgcgcaagcgaaagaggccgataccaccctgacgctggatcgcgccaccctgaataaaatcattctcaaagaagagactctgaagcaggcggaagagaaaggggaagttaaaatcagcggtaacggcgctaaactcgatgaaatgctgggctatatggacccgtttgacttctggtttaacattgtaacgccgtaa

SEQ ID NO: 218909 - DNA, 636 bp, Klebsiella pneumoniae
atgaattttcaggaaatacatagttattataaaacgttagccatcgccgacttttttgccgacatcgttacggaaggtgaagagattattcttaccgccaataaaaaatggcgcccggagttgggttatatttatttttgtaccgagggttcgttatcaatattaatgccggatgatggcttgagtattggtaattccattgagcatatgccaattggcctgatggagcggtattgcccgctggcgaaatttgaatataccggcagcgctccggtgacgctgcgtaaaattacctacgcgaccttcgatcggctgtttattgccaatcacccacagcgcgttgaggcgctggcgaaagtgctggtgttcatgagtatctttaccatcgatctgcacaatgaacgccgccaggtcaccagctatcagacgattcgccccatgctgtatcgctatctgtatcgacagcatacgcatgagggggaaaatgaggggctggcgttatttatcatcaggcgtaccaatctttcacgcacccatgtgtttcgcgtgctggcggacttaaaggcgggaggatacatcaccatgaaacgcggcaagcttgtctctatcgatcgaccgctgcctgcagagtactaa

SEQ ID NO: 218910 - DNA, 948 bp, Klebsiella pneumoniae
atgaaattaaatcagatagccaaaaacctggccctggccggaatgttatcctctttatcaatcaccgccttcgccgccgcgccacaacaggatgccacaccggccacgcgtgaggcgaaccaggcgctataccgcaaactgccgttcgcggataaaaccgactttaataatgcccatcagggttttattgcccctctgccgtcgacgatgctcaaaggcgcacagggaaatattatctgggatcccgccaaatataattttgttaaagaaggtgaaaaggcaccagacaccgtcaatcccagcctgtggcgacagtcgcaattgctcaacatcggcggcttattcaaagtcaccgacggcgtttaccagatccgtaatctcgatctttccaatatgacgattatcgaaggtaaaaccgggattacggtcatcgacccgttgctgagcgccgaaccggctaaagaggcgctggcgctgtattttgcccaccggccgaaaaaaccggtggtggcggtgctgtttacccacagccatgtggaccactacggcggtatccgcggcgtagtcaatgaagccgacgtgaaagccggtaaagtgaagatttacgcccccgcgggctttatggaggaagcggtttccgagaacatcatggccggtactgcgatgagccgccgcgccagctatatgtacggtaacctgctgaagccggacgccaagggccaggtcggcgctggcctcggcaccaccacctcggcaggaaccgttacgctgatcccgccgacccattacattacccataccggtcagcaggaggtgatcgacggcctgacctatgactttatgatggcgccgggctcggaagcgccgtcggaaatgctgtggtatgtcaaagagaagaaaatgatcgaggcggcagaggatgtgacccataccctgcacaacacctag

SEQ ID NO: 218911 - DNA, 942 bp, Klebsiella pneumoniae
gtgattatcgctcagcaccactggccgacctgggggaacgataatatcgttaagctgatgaaaggtcagcgcgatatgtatcgctatatcaacgaccagactctgcggatggcgaacttaggcatgacccgcgatgagatcgccgccagcttcaggctgccggactccctggagaaacagtggtcgagccgcggctactacggttccgttagccacgatgtaaaagcgacctacgtcttctatctcggctggtttgatggcaacccggccaccctcgacgagctgccgccagaacaggcggcgaagaagttcgtggaatatatgggcggcgctgatgcgatcatgcagaaagccaaagccgactaccagcaggggaactaccgctgggtggcccaggtgaccagcaaaatcgtcttcgccgatcctgacaatcagcaggcgcgcgatctggaagccgacgccctggaacagctcggttatcaggcggaagccggtacctggcgcaacttctacctcaccggcgcccaggagctgcgtaacggcgtgcagaaactgccgacgccaaacaccgccagcccggataccgtgcgggcgatgacgccagaaatgttcttcgattacctcgcggtgcatatcaatggcgaaaaagccggggcggcgaaagcggtcttcaacatcgacctgggcaaagacggcggcaagtacaaactggagctggaaaacggtgtgttaaaccataccgccaatgcggtggcggacaatgccgacgccagcatcgccctgagtcgcgacaccctgaataagattatcctcaagcaggaaaccctgaagcaggctgaagctcagggcaaggtcaagattagcggtaatggcgctaagctcgacgagatgctgagctacatggacacctttgccttctggttcaatatcgtcacaccgtaa

SEQ ID NO: 218912 - DNA, 900 bp, Klebsiella pneumoniae
atgttcaggctggaagatctgaccttatttgtccgcgccgcggcactgggcagttttagcgacgcggcgcgcgaggccgggcagcagccggcgcaggtgagcgcggcgattaaacgtctggagacgatcctcaatattcgcctgtttgcccgctcaacgcgcagcctgcgtctgacgccggagggagagacctggctgccctatgccacccagatgctcgataccctcgaggccggcctgcagaagatccagaccccggacgatgaaattcgcggcatgttgcagattgccgtgccgtcggatctcgggcgtaacctgctcctgaccctgttccgcgatttccgccaacgccacccggcgctgcgtctgcggctgctcttttccgaccagctgaccgacgtgtttaaagatccggtggacgtcgcctttcgctatggcaataacgacgatgcttcgtttatctcgctgccggtggcgccggaaaatcgccgggtgctggtggcctcgcctgagtggatcgcccgccacggcgagccgcagaccctcgaggagcttggccagcacaatgcgttgatctacattttgcgcggccggccgttcgaccgctggtcgctcagcctggacggcgtggttcagcagcagaaggtttccggcacggtgatgagcgacgacgccgaggtgatccgtcggctggcggtggccggggagggcattgcctataaatcgatgctcgacgtcagcgacgatctgcgggcgggacgcctgcggcgcctgctgccgcgctatcagggggatgtagtgccgttgaatctgatttgtccgcaccgcaaacagctctctgccgcggtgcgtttgttatatgaagaggtgaaatcacattgtgaagggcttaatgtctga

SEQ ID NO: 218913 - DNA, 1158 bp, Klebsiella pneumoniae
gtgaccattcgttgtactcaccgcgtcggcctgctgctgacaggtctgttgctggttacgctggcgctgccgtttatcacttacgcgccgaatcgcttactctccggcgaagggcgtgggctgtggctggtgatgccctggctcgccggcgttcagctggcggcagcccttgtcgggatgctgctttgctggcggcctggcagggtcgcgccgcttcttcacctgctgctggccgaactgctcttcccgctgcttatctggggcagcggccaggcggcgcttgagctctcccggcatggctcgccgctggcgcgcacctcgcccggcagcggcctgtggctgtcgctggcgctttgtctgctgctgaccagcgaggccatccgtcatcttaccgtccggccgctgtggcgctggctgcttaatgcgcaagtctggctgttgcccatcatcctgcttgctaccggggcgctcgatcagctctctctgctgaaggagtatgccaaccgtcaggaggtatttgacgacgccctgcgccagcatctgcttctgctgttcggcaccctgctgccgggcctgctcattggcctgccgctgggggtatggctgtggcgacgtccgcgctggcaggcgccggcctttaccgtgctcaatgtgatccagactatcccgtcggtggcgctgttcggcctgctgattgcgccacttgccggcctggcgcgctatttcccggtgctgggcgagctgggcatctccgggaccggcgtggcgccggccctgatcgccctgactttgtatgcgctgctgccgctggtgcgcggggtggtgaccggcctgcagcaggtgccgcaggatgctctggagagcgcgacggcgatgggcatgagcgccgggcagcgctttcgtcaggtgcagcttcccctggcgatgccggtactgttgcgcagcctgcgggtgatcagcgtgcaaaccgtcggcatggcggtggtggccgcgctgatcggcgccggcggctttggcgcgctggtgtttcaggggctgctgagcagtgcgctggatctggtgctgctgggcgtggtgccgacgattgccctggcggtggtggtggatgccctgttcgccctgtggggcgcctggctgaaaggagaggccaatgattga

SEQ ID NO: 218914 - DNA, 555 bp, Klebsiella pneumoniae
atgcccgcagaggccccgttactcgacagtgatttagaaattcgtgaagcgctgcccgacgatgcgcacgccatcgccgcgctgtatgtctggcacgtgcttaatggtcgtgcctccttcgaagagatccccccgaccgttgacgaaatgcgtaaacggatccagaccgtgcgcgataacgggctaccctggctggtggcgctgtggcgcggcgccatcgtcggctactgctatgccaccttctatcggcctcgtccggcctatcgctacacgcttgaggagtcaatttacgttgagtccggcatgggcgggcgcgggattggcagcgcgctgctgtcgcggctgatcgctgagtgtgaaaaagggccgtggcggcagatgatggcgatcattggcgatggccataacaatgccggctcgctggcgatccataaaaagtttggttttaccgtggtaggtcagttgcgcagcgtgggttataagatgggcgactggcgagataccttgattatgcagcgcgcgctgggtgacggcgactggacgctgccggagtga

SEQ ID NO: 218915 - DNA, 675 bp, Klebsiella pneumoniae
atggaaaaaaatagtacaacccgccatgtcgccatagtggaaaaatgtgtgatgacggaaatggcatggcgctatatctttagccgtgaagataatcgccactatcatattcattttttcaaaaatgtcagtcagctcagggaagtggaaaaatcatttccctggtcagctattattttttcactgtccggaagccgttcatcaagagcagagagtttgctttttcttcatgaaatggcgcgacgtcgaccggaggtgcaaacgattattctggcaaatagcgaaagtgaaatgcacctgattggccatctcatgccagcctgcctgcacggtatattgaataaatgcgcgccacgacgcgggttacaggagcgtttgttacagttgctggataatcaccctatcaccggccgtgaacagttttgcgacagagaggcgtgcaacgacccgttgagcccaacggagcacgccattcttcgctatatgtcctggggatattcgctgtccgaaattgcgatacagctgaatcggaacataaaaactatccgcgcgcataagtttaatgctatgaccaagctcggggttcgctcagacattggtttattaaacgcggcggatatcttgctgcatttacccgttagcggcacggcctgcgctgttaagcaggtggcgtaa

SEQ ID NO: 218916 - DNA, 459 bp, Klebsiella pneumoniae
atgagtctgcagtctgtacggcagttttttgccgaacacgcccccgatatcgaaattatcgagttaaatcagagtaccgcaaccgttgagctggctgctgccgcgcacaacgttgagccgggacaaatcgccaaaacgctgtcactgaagatcaaggataagattgtattgatcgtcgccaggggcgatgcgcgactggataataaaaaactgaaagagacctttggtgcgaaagccagaatgttgagcagcgatgaggtggtgacctggaccggtcatccggtcggcggggtgtgcccatttggcctggagaacccactgtccgtctattgcgatgtttctcttagacgctatcaggaagtgctacccgcggctggagccattcacagcgccgttcgtatcgaaccagaacgaatggcgcagctcactgatgcgacgtgggtagacgtgtgcctatag

SEQ ID NO: 218917 - DNA, 1029 bp, Klebsiella pneumoniae
atgtccgcttttaccccggcaagtgaagtcttgctgcgccacagtgatgatttcgagtccgcccgcgttctgtttgccggtgacctgcaggatgacctgcctgctcgtctggataccgcggccagccgcgcccacacccagcagttccatcactggcaggttctcaaccgccagatgggtgacaacgtccgttttagcttagtggccgaggccgctgacgtcgtcgaatgcgataccctgatctactactggccgaagaacaaaccagaagcgcagttccagctgatgaacctgctctctctgctgccggtgggaagcgatattttcgtcgtcggcgaaaaccgcagcggcgtccgcagcgcggagcaaatgctggctgaatatgcgccgctgaataaagtcgacagcgcgcgtcgctgtggtctataccatggccgtctggaaaaacagccatccttcaacgccgacgcgttctggggcgaatatgcgctggataatctgaccatcaaaaccctgccgggggtctttagccgcgacggtctggacgtgggcagccagctgctgctctccaccctcgagccgcataccaaaggaaaagtgctggacgtcggctgcggcgcgggcgtgctggccgcggtgctggccagccattcaccgaaggtgcgcctgaccctgtgcgacgtcagcgccccggcggtggaagccagccgcgcgacgcttgccgccaacggttttgcaggcgatgtgtttgccagcaacgtcttctccgaggtcaatggtcgcttcgacatgattatctctaatccgccattccatgacgggttgcagaccagcctcgaggcggcccaggcgttgatccgcggcgcggttcgccatctgaacagcggtggtgagctgcgtattgttgcaaacgccttcctgccatatccgcaggtgctggatgagacatttggcttccatgaggtgatcgcccagaccggacgctttaaagtctatcgcaccatcatgacccgacaggcgaaaaaataa

SEQ ID NO: 218918 - DNA, 795 bp, Klebsiella pneumoniae
atgagccaccgttttatcgatacccactgccacttcgattttccccccttcacagccgatgaaactgccagtctggaacgtgcggcgcaggccggcgtcgagcagatcattgtcccgtcgatctccgccgagcgtttcaattcggtactggcgttggcggcgcggcatgaggcgctgtatgccgcactgggcatgcatccgatcgtcatcgaagagcacaccgaggaggggctggcgcagctggacgccttgttggcgcagcgccctcctaagctggtggcggtgggagagattggcctcgatctttatcgcgacgatccgcggtttgatcgtcaacagacgttgctggaagcgcagctgcgtctggcaaagcgttacgatctgccggtgatcctccactcccgacgcacccacgataagctggcgatgctcctgaaaaagcatgccctgccgcgcaccggggtcgtccatggctttgccggcagcctgcagcaggccgagcgctttgttcagcttggctataagatcggcgttggcggcactattacctatccccgcgccagtaaaacccgtgaagtgatggcgcgtctgccgctttccgctctgctgctggagaccgatgcgccggatatgccgcttaacggttttcagggacagcccaatcgcccggagcaggttgcgcgggtcttcgagtcgctctgcgagctgcgcccggagcctccggagacgatcgccgaagagattatgcacaacacgcgcgcgctgttctcgctttcatctgcccaggtatggtga

SEQ ID NO: 218919 - DNA, 939 bp, Klebsiella pneumoniae
atgaagctgatacgcggcatacataatctcagtcaggccccgcacgggtgcgtgctgaccattggtaatttcgacggcgtgcatcgtgggcatcaggcgctgctgcagcggttgcgcgaagagggccgccagcgcggtttaccggtcgtggtgatgatttttgaaccccagccgcttgagctatttgccgccgataaagccccggcgcggctgacccgcctgcgtgaaaagctgaactatctggctgagagcggagtcgactatgtgctgtgcattcgttttgaccgccgattcgctgcgctgaccgcgcaggattttatcagtgaactgctggtgcgccgcctgggcgtgcagttccttgccgtcggtgacgatttccgctttggcgctggtcgccagggggatttcttgttattacaaaaggcgggggcggaatacggttttgacgtcaccagcacccagaccttctgtgaaggcggggtgcggatcagcagcacggcggtgcgccaggcgctggctgatgacgacctccagctggcggagacgctgctgggtcacccgtttagcatctccggacgcgtcgtccatggcgatgaactgggccgtaccataggttttccgacggcgaacttaccgctgcgtcgtcaggtttccccggttaaaggggtctatgcggtagaagtgacagggctgggcgacaaaccgattgcgggcgtcgccaatattggcacccgtccaacggtcgcgggcgtgcgtcagcagctcgaagtgcatctgttggacgttgtaatggacctctacggtcgccatatcaatgtagtactgcgtaaaaaaatacgtaacgagcagcggtttgcgtcgctggacgagctgaaggcgcaaatcgcacgtgatgagttaacggcccgcgaattatttgggctgaccagccaggcctga

SEQ ID NO: 218920 - DNA, 882 bp, Klebsiella pneumoniae
atggatagcgcacgcgcccttgttgccaaaggacggggaatagccctggtcagccgcaccatgggcgtgtcgcgtgcgcagctgtcactgcggaataaccgccctgccgactggcaggacaggcgctgtaaccggcgtagtggcgaagcagacgcagaaatactgtcggctatcctcaacattatcagcgatatgccgagttatggttaccgacgcgtgtgggggatcctgcgcaagcaacgtcgcacagagggacagccacctgtgaacgcaaaacggctttacaggataatgagcgaacataacctgttgttgttgcatgacaaaccagagcgaccgaagcgtgaacataagggcaaaatcgcggtggcagaaagcgatatgcgctggtgttcagatggcttcgagttcggctgcgacaacggtgaaaaactgcgtgtcacgttcgcgctggactgctgcgaccgtgaagccatagactgggcagcaagcacgggaggctatgacagttcgaccgtgcaggatgtgatgctgaggtcggtggaaaagcgcttcggcgacaggttgcccgacactgcggtgcagtggctgacggataacggttcagcgtataccgcgtatgaaacgcggaggttcgcaagagagctgaatctggagccctgcacaacagcggtgagcagcccgcagagtaatggcatggccgaacggttcgtgaaaacgatgaaagaagactatatcgcgttcatgccaaaaccggatgtgagaacagcactgcgaaaccttgcagcagcgttcacgcattacaatgaaaaccacccgcacagcgcgctgggatatcactccccgagggaataccggcggcagcgggcatcgttaacttaa

SEQ ID NO: 218921 - DNA, 396 bp, Klebsiella pneumoniae
atgtctaacactaacgccaattttgagatgaccgggatcctgttagggcaagaaatccgtaaacgtaaaactcctcaggagaagatcgccattatccagcagaccatggagccgggcatgaatgtctcccatgtcgcccgcctgcatggtatccagcccagcctgctgtttaagtggaagaagcaatatcaggaaggcagcctcaccgccgttgcagccggagaggaagtcgttcctgcttctgagcttacttctgcgctgaagcaggtccgggagcttcagcgccttctgggcaagaagacgatggaagttgagatcctgaaagaagccgtggagtacggtcagtcgcgaaaatggatagcgcacgcgcccttgttgccaaaggacggggaatag

SEQ ID NO: 218922 - DNA, 384 bp, Klebsiella pneumoniae
atgcaaatttcaactgcaccgaccacggagcctgtttcgtcacgcctgtcgcctgtcgaggtctggcagatactactcaaacatcttctggcacaacactatggtctaacccttaatgacactccgttcagcgatgaaagcactattcgtgaacatatcaatgctggtatctcactcagtaacgcagtgaattttatcgtcgaaaaatatgagctggtacgtactgaccgtagtggatttacgattttggagcagtctcccttcatcagcagtatcgacattcttcgtgcccgccgggccactggattgatgaaacgtcagggttataaatccatcagcaatatcactactggtcaccttctccaggagcgacatttacgatga

SEQ ID NO: 218923 - DNA, 339 bp, Klebsiella pneumoniae
atgactaaagaacctgttcaggaacacgtttggggtttacacagtcaaaccgttccatcattcagcgctcggttagttcaggaaggtcgacggctgcattttctggccgaccgtgccacgcttctcggcacattcagcccggaacaatccgcagcgctggatgcgatcttcccagcattaatccgggatatggaaaccgctctgcttagcggcaaactcgacccacttgaggctaaacaatacatctatatccgcaacggtttcgcctgcgagtcagatacgttggggagttgcggttacgtttacatcgtaatttatcctcaatcagaaaccagctag

SEQ ID NO: 218924 - DNA, 222 bp, Klebsiella pneumoniae
atgaaaatcatcagcaagcgccagacgatgatgatctaccgccaaacgcccggttcacgtctggcaacgtactgtaaaggtcgttaccgctggaccggtagcgtctgccattacaccggtcgccacgtccaggatatcagcggcgtactagccgtttttgctgaacgtcgtcaggaccgcgacggcccgtatgccatcctgcgtagcgtgacactacgataa

SEQ ID NO: 218925 - DNA, 501 bp, Klebsiella pneumoniae
atgagcactgtaatatcactgatacccgcatccgctcccaccgtaccactagccttaacgccatatgcacagcgaacaattcaaagggccttgaacctgctggataaacacctgcgacagcccggcgtgtcattcctctccgcaaccgaaacccgtgactggttgcggttaaagatggctgtgctggagcgggaagagtttgtcgctctgtttttggataaccagcaccagttgctggcctgcgaaactctgttcaccggcaccatcaaccatactgaggtccatcctcgcgaaatcgtaaaggcagctctgcggcataacgcagcagcggtgatcctcgcgcataaccatccctccggcatggcagagcccagcagggcagaccgactgctcaccagcaacctgcaaaacacgctgttactggttgatgtgcgggttctcgaccatctcatcatcggccaccgggagatcgtctcgtttgctgagcggggatggctatga

SEQ ID NO: 218926 - DNA, 819 bp, Klebsiella pneumoniae
atgcgcttagcttcccgctttggcagggtcaatcttatccgtcgcgaccgtccattaacgcacgatgaaatgatgaaccacgttcccagtgtattcagcgctgaaaagcatgaatcccgtagtaaacgatatacctgcattccaactattactctacttgaaagcctgcaacgggaaggttttcagccgttcttcgcctgtcaggcccgtgttcgcgatcccggtaaacgtgagcacactaaacacatgcttcgtctgcgtcgggaaggccaaatcacgggtaagcaggtgccagaaatcatcctgctaaacagccacgatggttcaagttcttaccagatgctgccgggattatttcgtgcggtttgccagaacgggctgatatgcggtgagagttttggcgaggtgcgagtaccgcataaaggaaacgtggtagagaaagtgattgaaggagcttatgaagtgcttcgggtttttgaccgaatagaagaaaagcgtgactcaatgcaaagcctcatgcttccccctccggctcaacaagcatttgcgaaagcggcgttgacctatcgctttggagaggagcatcagccagtaaccgaagaacaaatccttgcgccacgtcgctggcaggacgaatccagcgatctctggaccgtgttcaatcggctacaggaaaacctgataaaaggtggtttgagcgctcgtactgcccaaggcaagcgtagccatacccgcgcagtgaaagggatcgatggcgatctgaagcttaaccgtgctttgtgggtgatggctgagcaaatgcagcaggcgctgggctga

SEQ ID NO: 218927 - DNA, 678 bp, Klebsiella pneumoniae
atgaaaattcagacagccattgcaattgtgttatctgccgcttccatatcggctcaggctggtaattgggctgtgaaaaacggctggtgtcagactatgactgataatggtcaggcgctggtgatgctgaaaaatgacactattggcatattcggacagcttcagggttgccctaatggtcctcaggaattaatggggagccgcattagtgtcaacggcaatatggttcccacttcccagatgtgcaaccagcaaacaggatttaaagcagttgaagtcgaaggggggcaggctactacggcagctaaaaaggcaattgtctccattgccagccaggaggtttcaaccctgcaagtttttggcggacagatgactttcacccgtggcgacatgatgagcgtctgcccgaaatacgtctctgctcttcccaccagcaccgggagcagttcaccagagataaataaaggttcagtcatgaaagcagccaaacaggcgtatacaaaagagtatgacagcgaaaccgctgaggccgctgattttggcagctatgaagtgaagggaaatacagtggtatttgaagtctacaatgctggatatcgaacctacgacaaggtagtggtcattgtaggcaatgatggcaaagccaccagtgcaaaagtggaatatatgggtcgttaa

SEQ ID NO: 218928 - DNA, 894 bp, Klebsiella pneumoniae
atgcctgatcccctcgacatacccttctgcagtgatacattgcgagcctccctttctttcttaccccaacacgcttgcgaccgaattctttccagacttcagcacgccattcattacgaaccagtaatcggcatcatgggcaaaaccggtgccggtaaatcttctctctgcaatgcactgttccagcagccggtatgtctgaccagtgatctaatggcatgcacccgcgagccgcaacgactggtgctgaccgttggtgaacgtagcatgacgctggttgatttgccgggggtgggagagactccggaaaaggatgaaacctatctctcactgtaccagcaactgcttgctgagctggatttgattatctgggtcctcagggccgacgaccgtgcacgggcaacggatattgccacacatcgggctctgctgaacgccggtgccgatccaacgagatttctgtttgtgctgtcccaggcagaccggatacggccagtgcctgatggtgaggaatggcaggcacttccggatgcagagcaatgcctttctcttgccattattagttctatggttgccgggcagctttcatcctctttccccgtgatggcggtttctgcgcacactagctacaacctgtcggccttggtagagctgatagtgcatgctttgcctccacaagccagtagtacagtctatcgacaactgaagtctgaacataaaaacgctgaaagcgactccgctgtgcggctgcaatttggtgaaatagctggcagcgcatttgattcagtcattgattcaaactctctgccttccggattgcgggttttgctatgccggttacgtgaaaaattggtgcagttagcaaccagcctctgggacaaactcttcgactga

SEQ ID NO: 218929 - DNA, 1785 bp, Klebsiella pneumoniae
atgcggatttcccgaatccggttagttaatttcgccaacttctccaatgttgatgttgaaacgggtgagagtattgttattgttggtgaaaacaaggttggcaagagcaattttatccgcggcctgcagctgattcttgacccagggttgtctgagcgtgaccgtcaactgggttttgaacatttttgggatggattgggcgaagacaaattgggggagaccatcgaaatttcagtggatcttactgatttcactgacgatccccgattgatggctcatctgaatgactgtgtcctaaatccgggacctccgatggtggcccgtcttacctaccgttttcagcccaaaaccgagttaaatcgagctcctgaatcgttaaaagattatgagtatgtgatcttcggtggcgctgatcctgacatgcacattggtggtgcgtttcgccgtatgttgcccatcgatgttcaaggcgcgttgcgtgatgccgagaaggatctttcaagctggcgtaattcacccttaagaccgcttattgaggaactgtccgcatctctggacgacgagactcgtgaggagattcaaacccaggttgatgaggctcagcgggaactggctgatcatgatgaggtggcagcgacagccgaacgaattagcgaaaggttgattgctatcgctggtgagcaacatgccgttccggtatcgctcggacttgcaccaactcgcgttgatgcgctgctacgtagcctgcgtttgctgcttgatagtggaattcgtggcattggcgatgccagtctggggacggctaatctgatttttctggccctgaaaagtctcgaacttgatcgtcttgttaatgacggagaacgagaccatacgtttttcgtagtcgaggagccggaagcgcacctgcatccgcacgtacagcgcctagtctaccgctatttcttgggtactgaccgggaggatggtgatgaaggaacacctttgacaacgatcctgaccacccattccccgcatatagccagcgtcacaccaatcagatccatcgttttgctgcgccatgatccggaggaagggaagacgattgcggtttcaacggcaaacgcaccttttacgccgcgggacgaagatgatctgcagcgctatattgatgtcacccgcggcgaaatattcttttcacgtggtgtgatcctagtggaaggagatgctgaacgctttcttgtcccggcattcgccgatgctcttaatattcccctcgatatgcttgggatcacggtgtgctcgatcggtggaacaaatttcactccatatgtgaagctcctggggccacgggggctcaatataccgcacgtgattctgacagaccgtgaccctatggagaacggccctccgctagttcgtaggcggttcatcaatattctcgaggtgtttgaggaggatgttgaccatgatggtatggatgctgatgaggtgattgagcttgccagggagtatggatgcttcgtcaatgagaccactctggagccagagctgttcaccggtggactgggcgaagccatgaaatcggttatcgagcaggaattgtctcctagacgagctactctgaacaggatacaggcgtgggtggatgacacagaccagcttgataatgtccggttgttggaactgattgagcgaattggcaaagggcggttcgcccaagcgctggcaccttcggtgtcggaggataattgcccggattacattcgtgaagcactggagtatatttgcgatgccgtcacgtaa

SEQ ID NO: 218930 - DNA, 1818 bp, Klebsiella pneumoniae
atgccgtcacgtaatgtcagtgcagcctacttagctcaagctgccgagctggccgggaatccgggccagttagccgcgtatcactcccagggacactgcgtggtgctcgccgggccggggagtggtaagacaaagacgcttgtgctgaagctggcccgaatcctggctgaagatgttcaagctccacgtggtgcggcatgtatcacatatagccaagaatgcgcacgcgagctaacccgtcgtctcgaagcgctggggctcagagaggcgccgaatttctttattggaaccgttcatgggttctgcttgcgccatctgttgatgccctatggacgactggccgatctgccaatcccatttccgctgtcagtagcgtctcaacgcgagagcgaacggttacttcgacaatctggtgaccgtctctttggcgcaaaccatccctataaggctattgatctcggacggcatcgccgttcggtactgaatcgcaacagcgctgcctggcgtgcagaggaggaactcgctgcatgggccgaagcctacgaagcggcattgcggcagcaaggactaatagactacgaagatatggtgatattcggtcagcgtctgatcattgagaatgattgggttctgcccctggtacaggcgaaatttccgatcattgctgtggatgaatatcaggatttgggtgtggcgctccaccgtatggttaaacgcctggctttcgagggaggtgtacgtttatttgctgtgggtgatgcagaccaatcgatttacggtttcactggtgctgatggtgcgttactcctagaactagcagacaggagagacgttgaaacagtccggctccagttgaactatagatcaggagcgggcatcgtcaatgcgtcggagatggtgttgggtgaggttcgaggttatcgcgcaaacgacccgaaccgccagacaaccattgcgttccagctgtgtccgaatggcttgggggagcaggctgcccatgctgtcgaacagattattcctgctgcgttggctgctaagccgggtcgaacgctgggtgacatcgccattctgtacaaggactaccgtgctggcgatattgtggccgatgcggtgacagctggcggttttgattacattcgtgtggataccgcagcaccttatcgcaaagttgccttgactagctgggtggaggattgcgcggcatggtgtgctggcggttggcgtaccgggcgccctcaactgcgcggactgatagaccgttatctggcatttcatcgggcaaggctggaggatgcatgcgcccggcgtaaggggcaggagttaaccaggctgctttgggcacttcgtgccgaccaacatcctgcgtccgattttgtcgcttcgttgcgcaacggtctcgttgattccctgctggcaactgaaccgactctttctgatcaggctgagcaactagatcgcatgactgcagcacttgccgaaggcggtgcgttagcgatgttggatatcacgagcctgggtggtcgtgacggttcacctgagcacctcaatttgctgacacttcactcagccaaaggttgcgaatatgacgtggttatcatggtcggcttagatctggggaattttccgtggcgtaatgagacgccagagaagctgcgtgaaagccgacgtcttttctatgtggggctgacccgtgcacgggacgaggtgcatatgctgtattccggttttgttgaaggtcgctacggcgctatgcgtctggggcgttccccatttctggatgaactagaggagcgaatgcggcgggctggtttacgatag

SEQ ID NO: 218931 - DNA, 618 bp, Klebsiella pneumoniae
atgaaacaatatcaaggatcacatggtcttcatgtggcagcctggcgtgatagcataattgatgttcttgacaatgcttcaaatgaatttagtcgcattatggctgtgcgagttgaccttcactacccaaggatattggataacggagacactgtttgctgcttcccgaatctcaagtcaggtgagatatcgagatttattaactccctaaaagcgatgcttgctgcccatgaataccgacgagcacagagcggaacccgagtctacccaaacactttacgagatatgtggggaaaggagtactctcaatcaggaaaatgccattatcatgcctgtcttgtattcaataaagatgcatattaccatcttggtagctatgatgatgattgcttgaggggaatgattataaatgcatggtacagcgcattagggttgcagcttgaggattgccctgggctggttcattttcctgaaaacggaaaatatattctggaaaaaaataaaccaagttttatttttgattatcatgacttactaaagcggctagaatatcttaccaaggttgactcgaaggtttttggggaaggtgaacggaattttgggtgtagtaggatttaa

SEQ ID NO: 218932 - DNA, 1392 bp, Klebsiella pneumoniae
atggacaaaattccttacccaattgatgcctttccaacaatcatgagaaatgctgcgtatgaagaacaaaatatcaccaaagctcctatggcaatgatagggtctgcaatgttgagcgcagtatccttagcttgccaaagcaaagttgatgtagaaaggcctggaggacttaaaggtccaacatctcttttttttgttacaatcgcagaatcaggcgaacgaaaaagtgcaattgacaaaaatgtattttctgcgatacatgaatgcgaaaaaatgttcgcgcagcaacacgccgaagaaatgaattggtattccggtgccgttgagatctatgaagcagaaaagaaagctcaatttgccaaattaaaaatgcagataaaaaaaggtcttgatacctctcaaaccaaagacgatatcgatgaattaaattcaaaaaagcctgtccttccccgttcacgcagattaattatgagtgacaccactccagcggcattaaaagatcatttatctggggaaggtcgctcagtcggcattctctcagatgaaggtggtgtggtgtttggtggttcggcactgaataatccttcgctcatcaatacaatatggagtggcggggatgtacatattgacagaaaaaacaggccaccactgactataactgatgcaagactcacattatcaattatggttcagcaaaatttattggatacatttctaagaagcaataataaaattgcaaaggattcagggtttaatgccagatgcctattcagccatcctgtatcaactcaagggtatcggcagataaataaccccgtaacatctagagaacatatgccaattttcagtgaacgaattaaagaattaattctatctaatcagcacaatgatagaatcatgttgcagttttcaccaacagccgccagcgcatggatcgactggtataatttcgttgaaactcaaatggcctcaacaggagaactttttgagatcagagattgtgcatcaaaaattgctgagaatacagcaagaatcgcggcattgctgcatttcttcagaggcgatgaaggcgatatcacccctatagctacgaatgcggctgaaaaaatcagctcatggtatcttgaagagtatcaacattttttttcaagtggtaataacagcaacgatgaaaatgaactattcgactggattatctattattgccgttcccatggtctggcacgtttgaagaaaaacatcattcttcaatatggaccagttcgacttaggaataaaaatgctttagaaccattgttgaataatcttgcgtatacgcagaaaatcatttttgaagcgaggggaagaacgacttacttaatcccagtaaactcaggatcatggcatttataa

SEQ ID NO: 218933 - DNA, 1299 bp, Klebsiella pneumoniae
atggcacttccaagacaaaaactcaccttcgagcgcattcgaaaatttgctttaaccgaagggaaaaaccaggcatttctttgggatgcggatgtaacaactctggcatgccgggcaactcgcggaacaaaagcttttgtgttccaaagcgtatatgcgggaaaaacccttcgcatgaccattggcaacattaacgattggaggattgatgatgccagggccgaagccaggcggctgcaaacattaatcgatactgggatagatccgcgtatagctaaagcagaaaaaattgctgaagcggaatcacagcaggctgaatctcgtaaaacgaaggtaaccttctcaagcgcttgggaagattatcttcaagaattgagaaccggaatcagcgccaaaactaaacgtccttactctgcacgctatattgccgatcacgtgaacttgtccagccgtggaggcgaaagtaaaaaaagaggccggggcccaacctcggctggaccattggctagcttactcgacctaccgttatcggaactaacaccagagaacattgccgcatggctaagtacagaaagacaaaatcggcctactgttactgctcatgcttaccgtctgttgcgtgcatttatcaaatgggctaattaccagaagaaatatcagggaataatccatggcgatcttgcacaagatcataacgtgagaaaaatggttccagtatcagcgagtaaagcgggagattgcttacaaaaagaacagttaaaaaattggtttcaggctattcgtcaactcaataacacagttgcatcaacttaccttcaggtgcttttactcaccggagcgcgacgcgaagaaattgcgtcacttcggtggtctgacgtcgatttcaaatggtcaagtatgcggattaaagacaagatcgaaggcgaacgtatcatacctctcactccttatgtcactcacctgttaagcgcattggtgcaaacaccaaattttgacgtaaataaggaggattgggttttcaggagtaatagcaaaagcggcaaaattattgaaccgcgttccgcacacaatcgagccttagctaaggctgaattaccacacatcagcctgcatggattacgtcgtagttttggtacgcttgccgaatgggtcgaagtgcccactggcatagttgcgcagattatgggccataagcctagtgctcttgccgaaaaacattaccgacgccgtccattggatttattgaggaagtggcatgaaaaaattgagatctggatcttagaacaggctgatatttga

SEQ ID NO: 218934 - DNA, 126 bp, Klebsiella pneumoniae
atgaagcttaatgccagacaggtcgagactgccaagcccaaagataaaccctacaagatggcggatggtggtggcctctgcttattggttaaaaccaacgggtcacgctattggcgtttaaagtaa

SEQ ID NO: 218935 - DNA, 1101 bp, Klebsiella pneumoniae
atggataataataatctgctgttaatagagaagcggctggtcacccgttttctcgatatgtttattcggttcgggcttattctggcgctagcctcattctgttttaccgtcttttctccctttatcaatatgatgctctgggcgctgatcctcgccgtggcgctctatcctttacatcaatattttgccggactgttagccggcagacaggggctggcctcgctggtgctggtgttgttaggtattttactgatcgtgatccccacggtgctgatgatcacctcgctggcggaaagcgccagcgccatgattgataagatgggcagccaaagctttaccattcccccgccctcctcgcgcattgccgcgttaccgatcattggcgaacggcttagcgccctgtggatgagagcttccgtcgatctcccgggactgctcagtaattaccgctcgcaaatcggcgacattgccaaacagtttctcagcattttagccagcatgggcggcgggctgattggctttattatttcgtttatcgtctcgggaattatgatggcctggggcgcagcaggcgccatcagcgcccagcgtattgccatccgtattaccgatgagaataaaggcataacccttacccgcctgtgtaccagcaccatccgcgcggtcgcccagggcgtcatcggggtggcattgatccaggcgctgctggtcggtgtgatcatgctgatagccagcattcccgccgtcgggatcttctttattctggccctgatcctcggcatcgcccaggtgccggtgatcctggtgacggccccggccattgcgctgatgtggagtatcggcactcacagtaccggaatggatatcttctacaccatcctgctgatcgtcgccggcatggccgataacgtcctcaaaccgttgctgctggggcgcggggtcgatgcgccaatgccagtggtgctgttgggcgccctcggtggaatggcctctaacggcattctcggtatgttcctcggcgccaccctgctggccatcgggtatcggatcttcatgacctgggtcaatgaagggcaacccgccctgccgcaggataaataa

SEQ ID NO: 218936 - DNA, 672 bp, Klebsiella pneumoniae
atggaagaaaccgtgttactggatatccaaagaatacagacctccgaacagagcagtattatcctcaggtcgatacgggcgattgatttagtgaatcacctgaccccggcgctaggcatcattgagagcctcagcgaacaatacaatgtgcagaaaatactggtgacttgtctttatgccggacagcagcttgccatggaacggcggatcgtgttgccgctattacccgagtcgctctatttgttgggtggggtggtgatggccgccggaaaggcagtggaaaaaagagagactctcactcacaaccgcctgtgcgaagaggcgggaaagctgcttaaagacgatgcggcctgggagagctttgatgtgataagaagcattgctctgccggtttaccgccggctggttaaagagcagcgtacccacgtcgcctctttattacaggctctgctgcatatccttgcctggcgtagtgaaagcgcatgggcgcgggaccaggcgcaaagaatgctctgggcagggggcgtgttcgggcggggagggatagattcgctgatcgcctttgaccacgcgttggcagaaaaagagataacgttcccgtctctgcgcgagttgttaaccgtgacggcatttctggcccacttccctgcgggcccggtcttttctgattaa

SEQ ID NO: 218937 - DNA, 645 bp, Klebsiella pneumoniae
atggaacagaataaaggtttttggtatgccgactggtcgttcccgatctttgttggcctgctctcctccggcgtcttcgccgggacccacatgtattacctgtacggcatcggcgcctttaacgaagtggccttcgtggcgatgctgaagtcggggattgataccggcgtgtacggcgcggtggcggcgtttggcgccagcttcctgttcgcccgcatcatcgaagggtcgctggtagggatcctcgatatcggcggagcgatacagaccggtatcggccttggcgtgccggcgctgctgctcggcgcgggctttgtcttcccggtggcgaatttcgccgcgtcgctggtcaccggcctggtcctcggcctggcggtgggctacatcatcattctggcgcgtaagttcaccatcaaccagagcgattccacctacggcgccgacgtgatgatgggggctggtaacgcctctggccgcttcctcggtcccttgatcatcctcagcgcaatgaccgcctcgattcctatcgggattggctcgctggttggcgcactgctgttctacatctggcagaaaccgatcaccggcggcgccatcctcggggcgatgatcctcggctccatcttcccggtggcgattagctag

SEQ ID NO: 218938 - DNA, 1155 bp, Klebsiella pneumoniae
atgcctgtcgctcgtcatctgcttgtcgcttcactgtccctgtttgccgtcgccgcgagcgccgcgcaaacccactacgcctgggtaggtacctacaatcccaatggcgaaggtctgtaccgctttaccgtcgatggtaaaactggcgcgctgcatgacagggcgctggtgagcgcgttgccgaacgtcgcgcagctcaccgtctcgcgcgatggcaaaacgctgtatgccgccagcgaggtggagaaaggcgtggtgcaggcatggcgcattgagaaaaatggcgagctgaccgcgctcaaccaggtggcttccggcggcgccggaccggtctacctttcgctgacgccaaacggcaaacagctgctggtggccaactatgtcagcggcagtatcgccgtgcttccgctgaaagaagatggtagcctgggcgaggcggtggatgtgcatcaggatgaaggtccggccggcgccgaacgcccggcggcggccgttgagggcagctttgccattagcgatcacaatggcccgcacgcccatatgatcgccgccgatcccagcgggaaatatgtttactccaccgatctggggctggatcggatctaccagtaccgtctggatagcgccagcggcaagctgacgccgaacgatccgccgtttatcgccgcttcgtcgccgggagccggtccgcgccacttcgtctttacgccaaagggcgacggcctgtggttaatcaatgaagaagcgtcgacgctaaccttctatcatctggataaacaaagcggccttctgcgcgaaggcaaaaccgtctccgcgctgccgaaagagtataagggcaccagctttgccgccggtctggcgctgagcaacgatggcaaacagctgtacgtcgccaaccgtctgcataacagcatcgcccactttacggtgcaggctgacggcagcctgagccatcaggaagatatctggacgcgtggcgattacccccgcaccctgacgctggataatcaggggcagtggctgtacgtcatgaaccagcgtagcgataatattacccgcttcagcgtggcgccgaaggatggcaaattaacctttgcctcagactacacgccggtcggtagcccatcgcagatggtgatatccgcccaaccctga

SEQ ID NO: 218939 - DNA, 1911 bp, Klebsiella pneumoniae
atgcgatttcccaaccagcgcttagcgcaactcttcaccctgctgcgaaatgaaacgctgccgcaggatgagctggcgcagcgcctgtcggtttctacccgtaccgtgcgcgccgatattaccgcgctgaatgcgctactggcgcagtatggcgcgcagtttatcctcaaccgcggcagtggttatcagctgaagatagacaacccggcgagcttccaggcgctggaggagagtgcgccgaaggcgcagcacgtgccgcgtaccgcccaggatcgcatcacgtttctgctggtgcggttcctgacgtcggcgttctcgctcaagctggaagatctggccgatgagtggttcgtcagccgcgccacgctgcaaaatgatatggtcgaagtgcgtgagcgcttccagcgctatcagctgaccctcgaaacccgcccgcgccacggcatgaagctgttcggcagcgaggtatctattcgcgcctgcctgaccgatctgctgtgggagctgaaccagcagggcggtattcatccgttgattagcgccgaggcgctggaagcggatgtccctgcacagctggaaccggtgctgcaggagacgctcacccggcaccatattcgcctcaccgacgttggcgagcgctttatctgcctgtacggcgcagtggtggtacgtcgcgttagcgaaggctatcctctggccgattttagcgctgaagatgtggcgcaaaacgtccgcgacgccgcgcgcgatttggcgggagaactacagcggctggccggaaaacccttttcgcccgccgaagaagagtggctgtgcgtgcatctcgccgcccgccaggtacaggatgtcgatccggaaaccatcagcgccgacgatgacgaagcgctggtcaattacattctgcgttacatcaacagccagtataactacaacctgctggaagacgcccagctgcacgccgatctgctgacccacataaagaccatgatcacccgcgtgcgctatcagataatgatccccaatccgctgctcgataacatcaaacagcactatccgatggcatgggatatgacacttgctgcggtatcgagctggggcaaatacacgccttataccatcagcgaaaacgaaatcggctttctggtgctgcatattggcgtcgggctggagcgtcactacaacattggctaccagcgccagccgcaggtgctactggtctgcgataccagcaatgcgatggtacggatgatcgaggcgatcctgcagcgtaaatacccgcagctggagatcgccgctactatttcccagcgcgagtacgaacagcgagaagcgatcgatgaggattttgttatctcaacggtgcggatcggcgaaaaagacaaaccggtggtgaccatcgcgccgttccccaccgattaccagttggatcagataggcaagctggtgctggtggatcgcacccgtccgtggatgttgaataagtacttcgatgccgcccacttccgggtgatcgataagccgatagatcagcaaacgctgttcgccgagctgtgtcagcagctgctgctggaggggtttgttgacgccgagtttcatgcgtcggtggtggagcgtgaggcgatcgtcagtaccatgctcggcgatggcattgcgctgccgcactccctgggactgctggccaaaaagacggtggtgtatacggttatcgcccctcagggcatcgcctggggcgacgaaaccgcccatattatcttcctgctcgctatcagtaagcgcgagtatgaagaggcgatggcgatctacgatattttcgtgacgttcctgcgcgagcgcgccatgagccgcctcgccgcgacccgcagcttcgatgagtttaaaacggtggccatggaatgcgtcagccggttttga

SEQ ID NO: 218940 - DNA, 2391 bp, Klebsiella pneumoniae
atgattaacaccgtgcgttgcactctgctgaccagcggaatacttctgagcagcatggcgcttgccgctccggcaggcgatctgccgttgatgccgtggcccgcccatgtggagcgcccgcaggcgcagggggcgctggcgctgaacaatcagctgacgctcaacgtcagcggcgacgatcttggcgaggcggcaaaccgctggcgcgaccgcctggcgcggcaaaccggctggacgctgcagccgcagacagcgccagcaaaaagcccaaccattaacgtgatcgtcagtaaaaaagtgcctttcctgccgcagccggatagcgatgaaagctatcagcttaccgttaacgcagacggcgcaaccctgaaagccaatacgcgttttggcgcgctgcgcggcatggaaacgctgctgcagctggtacaaaacggccctgacggcaccaccattccttatgtcgccattaacgatgcgccgcgcttcccgtggcgcgggctgctgctggattccgcccgccactttatgccgctggcggcgatcaagcggcagattgacggtatggcggcggcgaagcttaacgtactgcactggcatctgaccgacgatcagggctggcgctttgcctccagccgctatccgaagctgcagcaggccagcgacggcctgttttatacccaggcgcagatgaaagacattgtgcgctacgccgccgaacgtggcattcgcgtggtgccggaaatcgatatgccgggccacgcctcggcgatcgccgtggcttatccggaactgatgagcgcgccagggccctatacgatggagcgtcactggggcgtgctgaaaccggtactcgacccaacgaaagaggccacctacgcgtttgccgaggcgatggtcagcgaactggcggctatcttccccgatccgtatctgcatatcggcggtgatgaagtcgatgacagccagtggcgggccaatccggccattcagaaattcctcaaagagaaggggctggcggacagccacgcgctgcaggcgtactttaaccggcggctggagactctgctcgaaaagcatcaccggcagatggttggctgggatgagatctaccacccagatttgccgaagagcattctgatccagtcctggcagggtcaggatgccttaggcgacgtcgccaaacacggctatcgcggtattctctccaccggtttttacctcgaccagccgcaatacaccgcctatcactatcgcaatgaaattatcccgcagggactcgacggcgtggatacgatcaccgatagcgacagcgcccagagctggcagttttcgatgccgcggctgaagggcagtgcggtggagggcagcttcacgctggtgaaaggcgatagcggctggcgtggattcattgatttcaaagggaaatctcgccgtgctgtgcaggaaattgaatggcttgacgataatcaggtcacgttccgcgtcgatacctggatgggcgaaacccgcccggtgctgaccatcaacaacgacacgctcagtggctacttcctgctgggcaatactcgctatccggttgacggcaagcggctggacgctgtgccgcagggtattcagccgacgctacccgacgcgcagcagcagaagaatctgctcggcggcgaagcggcgctgtgggcggaaaacgtcgccgcgccggtgatcgacatcaagctgtggccgcgggcttttgcggtggcggagcggttatggtcggctgaagatgtcaaagacagcgacaatatgtatcagcgcctgcaggcgatggacagctggtcaacggtctccgtcggcctgcagcaacatgcccagcagctggagcagtttacccggctggcgaacagcagccatacgctggcgttgcagatcctcgccgaggcgctggagccggcgcattactatacccgccagcatctcaagttccaggcgaacaattatcatcagtttgaaccgcttaaccggcttgccgatgcgctgccggcggagagcgacaccgtgcgcagcctgaatcagtgggcggagcggttgatcagcgatgccgaagacgccgagagcgccgacgggctacgccacgtctttacccgctggcagaacaacagcggcgatgcgctggcgctgaccgacaataactatcagctggcggcaatcaagccggtggtgcagcaggttgataagctggcaagcctcggactgcgcttgaccgacctggtggcgcgccaggggacgctggacgataaagagtacgcctcaatcctggcgcaactggatacggcggcgaaaacccaggatgaactggtgattgcggcggtctatccgctggaaaaactgctgcgggcaacgaagataaaatag

SEQ ID NO: 218941 - DNA, 1197 bp, Klebsiella pneumoniae
atgagtatgatttcaggacaatcgcagagttctggccatccttttgtgtttcatgggcaggctgggcgctattttgttatttgtctggttaatgttattttgtctgtaattactttggggatctttattccgtgggcctgggtgcgcaatcatcgttatctttgcgagaatatggaagttaatggtgtccgttttgcctatcacgggcgtggtatcaccattttcctgagctggttgctgatattcattgtgctgcttatagtgagtttagcgctcgccatattcgcccccggttgcgaagggctggaaacgttggtctttgttatcctgctgccggtcatgtttataaggggattaaactaccatgcgaacatgacctctttcgcgactattcgctttggagttcagtgcaatctgctgcgcggatggtggattatgcttggcttacccttgctgatatacgtgataacggcggtggtgttctcggtgttgggaagtcgtctctggttcggctatggcataaatggcatgttagtggggctcgttattctgtttttgctgacattgtgtattatggcggtaaccagcggtgtggtttacagtcactggtatgatctgatcggcaaaggcgcaaccttaggaaaaaataaatttaatatttatgtgagtactaagcgttgtgtggtgatttttttattggcaacggcgattttgttgccgtttataatcatttttgttggctttttattttccgcagtcgcccaactgctgacgggctgtatgtttggtttgtgccgtgagggttcggcactgtttatggcattgcggcatcttggggcgatattagggggatatttatttctcactatcggtattgtgttatccatagcataccttcgtgtcgctttacgtaatcacgtaataaataatctggtgctgggagaccacgttcatttccgttccaccctgacgttttgcggtcttgctccgcgtatactggcgctgatgtttctctcgctgctgacgttgggcctggcctatccctggtttaagattgttttgctgcgctatctcgcggaaaacacgacgatggtcggtgagctcgattcgctcgatctgcagccggcggcgccaccgcagccgacacgatctgacaaactgtgcggcggttttttccccacgctgccattcctgtaa

SEQ ID NO: 218942 - DNA, 288 bp, Klebsiella pneumoniae
atgccaatggagtttgaatgggatgcaaacaaggcattaagtaatctacgaaaacatggaatccggtttgaagaagcggtgttagtctttgacgatcccaggcacctttcccgccaggatcggtttgagaatggtgaatatcgctggcaaaccatcggtcttgtatatgggatccttgttatcctggtggcgcattcggttcgttttgaaagcggaactgaggttattcgtattatcagcgcccggaaggcggacagaaaagagaggaatcgttatgagcatggttaa

SEQ ID NO: 218943 - DNA, 303 bp, Klebsiella pneumoniae
atgagcatggttaagcataaacgcgacaacacggcggcgcttaccgttaagcgtgatgccgaactccaagcgctggcgagcaaagccgatgaagacatcgattacagcgatatccctgcgacagacgatgcgcaatggtcagatgccgtacgcggtaaatttttccgaccgctaaaaactcaggcttcggtgcgcattgatgccgatgtcatggagtggctcaaacgtccaggaaaaggctatcaaactcgactgaatgcgattttaagagaagcgatgattcgcgatctaaataagaaatag

SEQ ID NO: 218944 - DNA, 255 bp, Klebsiella pneumoniae
atgacaaccttcctgtttttatttcattccacggtgggggtggcgcgaatgcgcaaagccctgcaggcggcgggaataaccttcgaggtaaaggatattccccgccagctgcgcagcggctgcgggctgtgcattctgctggaggggacggaagacgcagcgcgaagctggatcctgccgaagctgacggcggcgctgtatcagcaggacggggaagcgtggcgctgtgtggctaccttcccgcaggcggattaa

SEQ ID NO: 218945 - DNA, 891 bp, Klebsiella pneumoniae
atgtgccaaagcccaatcgccaatatcgatatcaataaagagtacgacgagagtctgggcaccgaagaggtgcactatcagtcgttctcccgcatggcggccttttttggccgtgacatgcaggcgcatcgccacgaccgctatttccagatgcactaccttgataccgggcagattgagctgcagctcgatgatcatcgctattcggtgcaggcgccgctgtttgtgataacgccgccctcggtgccgcatgcctttattacagagtccgatagcgatggtcacgtgttgacggtgcacgaagaacttatctggccgctgctggaggtgctttatcccggcacgcgggagaccttcggcctgccggggatctgcctgtcgctggcggataaacccgacgagctggcggcgctggcgcactactggcagctgattcgtcgggagtccaccgcccagctgccggggcgggagcataccctggcgctgctggcgctggcggtctttaccctgctgctgcgtaatgccaggctcgacgatcacgccgccagcgggatgcgcggcgagctgaaattattccagcgctttaaccagatgatcgatagccactttcatcaacactggacggtaccggattacgccagggagctgcatctgaccgaatcgcggttgaccgatatctgtcgccgcttcgctaaccgttcgccgaagcggctgatattcgaccgccagctgcgcgaggcaaagcggctgctgctgttctccgatagcgcggtcaatgagatagcctggcaactggggtttaaagatcccgcctatttcgcgcgcttttttagccgccaggtcggctgctcgcccagcagctaccgggcgcaaaaagtaccggtgtcgtaa

SEQ ID NO: 218946 - DNA, 1377 bp, Klebsiella pneumoniae
atgagcgatacatcacctgccatcccggaaaagttcgatccggcgaaccagcacaaacagctgacggcacagcagcagtcggttatcaacaagctcttccgccgtctgatcgtatttttattcgtcctgtttatcttttcgtttttagaccggatcaatatcggctttgccggattaaccatggggcaggatctgggcctcaacgccaccatgtttggcctggccaccaccctgttttacgccacctacgtcatttttggcattcccagcaacgtaatgctcagcatcgtcggcgcacgacgctggatcgccaccatcatggtgctgtggggcatcgcctctaccgccaccatgttcgccaccgggccgaaaagtctctatgtcctgcgcatgctggtggggatcaccgaggccggtttcctgccgggtatcctgctgtacctgacctactggttcccggcctttttccgcgcccgcgctaacgcgttgtttatgattgcgatgccggtaaccaccgcgctgggatcgatcgtctccggctatatcttgtccctcgatggtctgctgaacctgcacggctggcagtggctgttcctgctggaaggcttcccgtcggtgctgctcggcattatggtctggttctggctggatgattcgccgtcgaaggccaggtggctgacggcggaggacaaaaaatgtctgcaggagatgatggataacgatcgcctgaccctggtgcagccggaaggggcgatcagccatcacgccatgcagcagcgcagcctgtggcgcgaagtctttactccgatcgtgctgatgtacaccctcgcctacttctgcctgaccaatacgctcagcgcgatcagcatctggacgccgcagatcctcaaaagctttaacgaaagcagcagcaatatcaccatcggcctgctggcggcgatcccgcagatttgtaccattctcgggatgatctactggagccgccactccgataagcaccaggagcggaagcatcataccgccctgccgttcctgttcgccgccgcgggctggctgctggcatcagctaccgatcataacctgatccagttgctcgggatcgtaatggcctccaccggatcgtttagcgctatggctattttctggaccacgccggatcagtccatcagcctgcgtgcccgggcgatcggtatcgcggtgatcaacgccaccggcaatatcggatcggcgctcagtccctttatgatcggctggctgaaggatattaccggcagcttcagcagcgggctgtggttcgtcgccgcactgctggtgattggcgcggtgatcatctgggcgattccgatgaagggctcgcgccctcgcgcgacgccataa

SEQ ID NO: 218947 - DNA, 792 bp, Klebsiella pneumoniae
atgaacaacgcatttaaagaggcgctcaaggccgggcgtccacaaatcggcctgtggcttgggctgtgcagcagctacagcgccgaactgctggccggcgcgggcttcgactggctgctgatcgacggcgaacacgcgcccaacaatgtacaaacggtgctgacccagcttcaggccattgcgccctaccccagccagccggtagtgcgtccgtcgtggaacgatccggtgcagatcaaacagctgctggacgtcggcgcgcaaactctgctggtgccgatggtgcagaatgccgaagaagcgcggctggcggtaagcgccacccgctacccgcctgccggcatccgcggcgtcggcagtgcgctggcccgcgcctcgcgctggaatcgcgtcccggactatatccaccgggccaatgacgccatgtgcgtcctggtacagattgagacccgcgaagcgctgaaaaatttgccgcagatcctcgatgtcgacggggtggacggcgtgtttatcggcccggcggatctcagcgccgatatgggccacggcggcaacccacaacacccggaagtgcaggccgctatcgaagatgccatccagcaaatccgtcaggccggtaaagcgccggggatcctgatggccaatgaacagctggcgaaacgctatctcgaactgggcgcactgttcgtcgccgtcggcgtcgataccaccctgctggcccgcggcgcagaagcgctggcggcaaggtttggcgcagagagaacctctctcggttcgtccggcgtgtattaa

SEQ ID NO: 218948 - DNA, 804 bp, Klebsiella pneumoniae
atgctcgataaacagacccgaaccctgattgcccagcggttaaaccaggccgaaaaacagcgtgaacagatccgcgcgatctcgctggattatccgtcgatcaccattgaggacgcctacgccgtccagcgcgaatgggtcgaaatgaagatcgccgaaggccgcgtgctcaaaggtcataagattggcctgacctctaaagcgatgcaggccagttcgcagatcagcgagccggactacggcgcgctgctcgacgatatgttcttccacgacggcagcgatattcccaccgaccgctttatcgtgccgcggatcgaagtcgagctggccttcgtgctggccaaaccgctgcgcggcccgaactgcacgctgtttgatgtctataacgccaccgactacgttatcccggcgctggagcttatcgacgcgcgctgccacaacatcgacccggaaacccagcgtccgcgcaaagtgttcgacaccatctccgataacgccgccaacgccggggtgatcctcggcggccggccgattaaaccggatgagctcgacctgcgctggatctccgccctgctgtatcgcaacggcgtgattgaagagaccggcgtcgccgcgggcgtgctgaaccacccggccaacggcgtggcctggctggccaacaaactggcgccgtacgatgtccagctcgaagccgggcagattatcctcggcggctcgttcacccgcccggtcccggcgcgcaagggcgataccttccacgtcgactacggcaacatgggcgccatcagctgccgctttgtttga

SEQ ID NO: 218949 - DNA, 381 bp, Klebsiella pneumoniae
atgccgcattttatcgccgaatgtaccgacaacatccgcgaacaggccgatctgccagggctgttcgccaaagtcaacgaggcgctggccgccaccggcatcttcccgatcggtgggatccgcagccgcgcccactggctggatacctggcagatggccgacggcaagcaggattacgccttcgtgcatatgaccctgaagatcggcgccggccgtagcctggagagccgtcaggacgtgggcgatatgttgttcgcgctgatcaaagcccactttgccgctctgatggagagccgctatctggcgctgtcgttcgccatggaagagctcgacccgacgctgaactacaaacagaacaacgtgcacgcgttatttaaataa

SEQ ID NO: 218950 - DNA, 858 bp, Klebsiella pneumoniae
atgggtaagttagcgttagcagcaaaaatcactcacgtgccgtcgatgtatctgtctgagctgccggggaaaaaccacggctgccgtcagggcgcgatcgacgggcataaagaaattggcaagcgctgccgtgaaatgggcgtcgataccattatcgtgttcgacacccactggctggtcaacagcgcctaccacatcaactgtgccgaccatttccagggcgtctacaccagtaacgaactgccgcattttattcgcgacatgacctacgactacgacggcaacccggagctgggccagcttatcgccgacgaggcggtgaagcttggcgtacgcgccaaagcgcacaatatccccagcctgaagctggagtacggcaccctggtgccgatgcgctacatgaatagcgataagcatttcaaagtggtgtccatttcggccttctgtaccgttcacgattttgccgacagccgcaagctgggcgaagccatcctcaaagccattgagaaatacgacggcaccgtggcggtgctggccagcggttcgctgtcgcaccgctttatcgacgaccagcgcgccgaagagggcatgaacagctacacccgcgagtttgaccatcagatggatgagcgggtggtgaagctgtggcgcgaaggcaaattcaaagagttctgcaccatgctgccggagtacgccgactactgctacggtgaaggcaacatgcacgacacggtgatgctgctcggcctgctgggttgggataaatacgacggcaaggtggagtttatcaccgagctgttcgccagctccggtaccggccaggttaacgccgtgttcccgctgccggcgcaggcgtaa

SEQ ID NO: 218951 - DNA, 1017 bp, Klebsiella pneumoniae
atggagtcggtaactctatcgttacctgaagcttatgacctggcgttagaggtactcagcgccaatggatttagcgccgaccacgcggcggccattgcacgtaatgtggccgccggggagcgcgacggctgcgcttcccacggcctgtggcggctgttgggcattgtcgataccttgcgtaaaggcaaggtatcgcctgatgccgagccgcaaatccacgaccaggcgccggcgattgcgcgggcggacgccggcggcgctttttcgctgctggcctacgagcgcgcgctgccgctgttgctggagaaggcgcggcacagcggcattgcggcgttggcgattaaccgctgcgtccatttttccgcactgtttgccgatattgagccgttgaccgaggcagggctggtggggctggcctgtacgccaagccacgcctgggtcgccccagcgggcggcacgcgtccgctgttcggcaccaaccctatcgcttttggctggccgcggcgggacaaaccgccgtttattgttgatatggcgaccagcgccgcggcgcgcggcgagatccagctgcatcagcgtgccggcaaagcgctaccgcaaggatggggaatcgacagtcagggacagccgacgaccgatgccgcggaggtgctaaatggcgcaatgttaacctttggcggccataagggctcggcgctggcggctatggttgagctgctggccgggccgcttatcggcgatatgaccagcgccgaatcgctggcgtgggataacggcgcgggcggtcttccctacggcggggagctgatcctggcgctggatccgcaacgctttctcggcgcgcaggcaccagagcagctggcgcgcgccgaaacgctgttcatgggtatgcaggaacaaggggcgcggctgccgggcaagtggcgtttcgcctgccgtcagcagagtgagcggcagggggtcaccatcagccgttcattgcatgatgagatttgcgccttgcgccagggcgagtaa

SEQ ID NO: 218952 - DNA, 570 bp, Klebsiella pneumoniae
gtgggaataaggcagctacgtaaggcattaccggagatactgtcgcaacaggagctgtgggatgaccgctttatccgcctgctgagcgaactggcggaagagctgcagatgctggatgagcgggtcgcccgccatgacaggcggcttgagcagtcagtacgggatgatatccggataaaaaggctgctggcgatagagggtatggggccggtggtggccagtgcgctggtggcggcggtcggcgatggcagacagttcaaaagtggtcgggagatggcggcgtatctgggtctggtcccgcggcagcactccagtggcgggaaagcgcggctggggtctatcagcaaacggggagacagttacctgcggacgctgataatccacggtgcgcgtgcggtgctgaacgcgtgtcagaataaaaccgacagacgcagccagtggctgaaggcgttatcggaaaggcgaaaccggaatatcgcgacggtggcgctggcgaacaagaatgcgcgaatagcgtgggcgctcctgagccgcgaagaagattaccatgggttacaggccgccggttaa

SEQ ID NO: 218953 - DNA, 2121 bp, Klebsiella pneumoniae
atgaataaaaaactctttgaaacgattattgcaaagttaaatttttctctgattaagaaaacaccggtaattttacaatcagaatcagcggaatgtggtattgctagcctggcaatgatctgcgggcactatggattagatatagatttatttaatttccgccaacgcttcggcagcccatcgcaaggcgcttcactgctgcatttaagcaaaacggccgagcgtgcaggccttaaaaatcgcgcgctttcattagatttagatgaaataaagcagctaaagctcccttgtattctccattggggaatgaatcattatgtcgttctaacgaaagtacgaaaatctagctatgttgtgcatgatcctgctttgggtaaacgtataattggtttgcaggagatgtctaataatttcaccggcgtggctctggaactttggcccgatcagaactttcaacaagaaaaggcaaaagcacgcttacgtttattagacctgatgcgaaacattgtcggattaaaatctgcattaattaaaatcttcgcattctctgtcgtaatcgaagccattggccttttactccctattggtacccaacttgtcacagaccatgtcatcatggcccatgaccagagtctgttatccgtcatttgtataggactggtctttttcactctcttccgtacctttgtcagtatgctaagggcatggacctcactgactctcaatactctgaccaatattcaatggaaaacgacattgtttgatcacttgacaagtttgccgttatccttttttgaaaaacggcatcttggtgatatccagtcacgttttacttcattggatactatccgatcaacgttcactaacagtattgtcagtggcatcattgactcgatcatgacaattggtctgttaattatgttaactctttacggcggctggctagtatgggtggttgtcggatttacgctttgctacgccattatgcgcctggcgacataccgtttttaccgtcgggtagcagaagagcaagtcattaaaggagcccgctcgagctctcatttcatggagtcactttatggaatatcaacgattaaagctcttaatttaaaagagcgccgttcgcagcattggcttaatattaacattgatgcatgtaatgcaggaattaaacaaactcgctttgatatgatgttcagtggcataaacaccttcatatcatctatagatcaagttgctatcctatggttaggcgccattatggtgattgataacaacatgacgttaggtatgtttatggcgtttaactcttatcgtgggcagttttctcaaagagcatctaacttgatagatctctttatgcaactgcgaatgttatcattacataacgagagactatctgagattgttttcagcgaacccgagaaagagctcccagcacgtcgagttttcgatgagaatagtggagtgaagctggagatcaaaaatctcagttatcaatatgacccgttctcgcaacctattttttctaactttaacctgcaggttgagccaggagaatctattgcgcttgttggaccttcaggtgtcggtaaaacgactttactgaaagtgatgtgtggtttgttatctccaacgtcaggtgaagtaattgccgataatcttgacatttataaaatagggcttaataactaccgtttggggactgcatgcgtcctacaagaagatcgtcttttttcagggtcaattagcgataacatcagcggatttgaagataatgcggatgaagagttaattgttgagtgtgcccgacgcagtaatattcatgatgaaatcatgaaaatgccaatgggttatgaaacaatgataggtgagttaggactggggatttcaggcggccaaaaacaaagactcttgattgccagagcgctttaccgcaaaccgagtattttgtttatggatgaagcaactagtcatcttgatttgaagaatgaagctgccataaaccaatctattgctagtctaagcataacccgagtcattgtcgcgcatcgtccttcaacgatagcgtctgcagaccggataattgatctttctcagtatggaaagcaagcatcataa

SEQ ID NO: 218954 - DNA, 261 bp, Klebsiella pneumoniae
atgaaaattacctcgctgctgttcgccgctgcgcttgtcatctatgccaacgcagccttttcccttccgccgccagatgccccgacgccggtcggggcgctccggcctgtcggtaccgtctccgcctccggtgccagcacccttgatgacctggttgccgctctcgcagataaggcccaccgccagcgggcactggcctggcgggtcaatgccgccagcagcggcaaccggctgtacggttcagctataatttatcaataa

SEQ ID NO: 218955 - DNA, 1356 bp, Klebsiella pneumoniae
atgtcttttgattcccttggcctgaatcccgatatcctgcgcgctgtcgctgagcagggctacgttgagccgacccctatccagcagcaggccattccagcggtactgcagggccgtgacctgatggccagcgcccagaccggcaccggtaagacggcgggctttaccctgccgctgctgcagcgcctgatccagaatgagccgcacgcaaagggccgtcgtccggtacgcgcgctgatcctgaccccgacccgtgagctggcggcgcaggtgggcgagaacgtccgcgattacagtaaatacctgaatattcgctcgctggtggtattcggcggcgtgagcatcaacccgcagatgatgaaactgcgcggtggcgtcgatatcctcgtcgccaccccgggccgtctgctggaccttgaacatcagaacgcggtcagtctggataaagtagaaatccttgtgctggacgaagcggaccgcatgctggatatgggctttatccacgacatccgccgcgtactggccaaactgccggcgcgtcggcagaacctgctgttctcggcgaccttctccgacgagatcaagggcctggccgagaaactactgcacaacccgctggaagtggaagtggcgcgccgcaacaccgcgtccgagcagatcacccagcacgtccatttcgttgataagaaccgcaagcgcgaactgttgtcgcagcttatcggcgaaggcaactggcagcaggtgctggtgtttacccgtaccaagcatggcgccaaccacctcgcggagcagctgaacaaagacggcattcgcagcgcggcgatccatggcaacaagagccagggagcgcgtacccgcgcgctggccgactttaaatccggcggcattcgcgtgctggtggcgaccgatatcgctgcccgtggtctggatatcgaagagctgccgcacgtggtgaactacgagctgccgaacgtaccggaagattacgtccaccgtatcgggcgtaccggccgcgcggcggccaccggcgaagccttgtcgctggtgtgcgtggatgagcacaagctgctgcgcgatatcgagcgcctgctgaaaaaagagatcccgcgcatcgcgattgccggctatgagccggatccgtccattaaagccgaacctatccagaacggtcgccagcagcgtggcggcggtcgtggtcagggtcagggacgcggcggccaggggcaggggcgcagcggacagccgcgcagccagagcagcgccccgcgtcgtcaggacggcgaggcgccgaaagcgcgcactcaggacggcaaaccgccgcgccgccgtcgcccgcgtaagccggctggcgaataa

SEQ ID NO: 218956 - DNA, 654 bp, Klebsiella pneumoniae
atgccttccatcgaaacgtttatgactttccttctcgcactgacgcttctggagatttctccgggcccagacatgatgctgaccattgccagaggagtggggcagggaagacgtattgccctgcttacggttctgggtaatgtatttgtagctggttttgtgcaagtttcttttcttttcctggggctggtgaccattgttcatgcctggccggtggcgctggatctgcttaggtgggtcggtgcggcttatctgatgtggttgggtgtaaaaatgattgcgacttcaggcacagatacgcggctgctgaaaacagcaaaaatttctgactggaatgccgttaaggaaggtgccctgaacagcctgactaacccaaaatccctgctgttcatgtttgcttttcttcctcagtttgtcgatcctgccgccggtcctgtctggctacaattacttgtcctgggcagtatccaaaagctggctggaattgtttccctggggtcagttgctatggcatcaggaacatttggaaactggctaggtaaacacccaggcgttatcaaatggcaggaacgattcacaggcgttgtcatgataggcctcggtatccgcatgttgtttagcgggtctggcatagtatcgaaaactgcccgttaa

SEQ ID NO: 218957 - DNA, 642 bp, Klebsiella pneumoniae
atgatagcggtaataaaggacctatttagtatcccggtggtatctgcagtagttcttgctattatcggagcgatgacaaaaaagtatattcagtttcatcgcagagactttttttcacgctcaccctcagagcagataaaagcaatcgaatggctcaggaccgcttctgtaccaacgtccgatccgttagctaaggcggaacaacagtttcgtctacagtcgttcggactgcatagagaccgtgatttatcttacaaaatcatatgtttctactctgagcatgcgcagtcattgattccatctttgaaggcggtcttgcgttatcagggcatgtacacaattgctgacgggaatatataccctcataaattccataagtggttaataccttttgtattaatatggttgctagtatttattggcgctgagatatacagaggttcttcacagagcgatggcatagagattttaaagtctctgttcgtctttgttgtggcttttataatatggtgttgggtcgcggcttgcgctttgaaagtatcaagtatcagtaaaaagctcaatgcctatatccctcccgcaaacgattttaaatctagtgcatacgatttcagttcaatactcaataatagatatccgtag

SEQ ID NO: 218958 - DNA, 2385 bp, Klebsiella pneumoniae
atgcacgagaataatatcactttgctgtgtgatgaagcagaacgattattgcggcttaatattagtttactgcagaaaatgattgatgagccgaatatccttctcgaaaatgaactaaacaacgacgaacaactctttaataaaagcaaagccataaaaagaattgaagaattacagggtgaacaaaccaaaattacccgtaaagagatggtgctggccgtcgtagggaccatgaaagccggcaaatcaacgaccatcaacgcaattgtgggcaaagagatcctgccaaaccgcaatcgcccaatgacctcaatcccgactctcattcgtcatgtaccgggcaaacatatcccggacctgcagttgaataatatcgaacctgttcagcaactgctgatcgccctcaagaagacgataacgaccgacgaaggcaaaaagcttgtacttgaactagataaggatccggagaaagggaaattactgcggattgtcatggatggtagctggttaaaaaataactatgcaggagaagctgaaattttcacctgcctggcttcgctaaatgacctggtacgtcaggctactgagctgcatgtagaatttccgtttgaagcctatgaagaggtgcatgaactgccggttattgaagtcgagttcagccacctgacggggatggatgatagccagggcacactgaccctgttggataccccagggccaaatgaagccgggcaaccccatctccagacaatgatgcgcgatcagttacaaaaagcttctgcggttctggccgtgctggattacacccagttaaattccgtagccgatcgtcaggtacgcacagaacttaatgatattgcgaatgtggctgccggccgtttgtttgtcctggtcaataaattcgaccagcaagattgtaatagtgataccgccgagacggtcaaacagagcgtgcccgcaatgcttgagcagggtgttctgaatagcgatcgagtgtaccctggctcggctcgccacgcgtacctggccaaccgcgcccgcaacgaaataagtcaggtcgggatgctgtctgatcgggaagggtgggtgaaagattttgcaaaactggccttcggcataacctgggaagcagaggatctcgcgagtctggatgatgtcaggagaaacgccgataaaatctggcgccgttcattgtttgataagctcattaccgaagttatccagggcgcacatgctaaagcagcagcgctggccgtcgattctgccgcagcaaagctggttcagaacgcggaaaatgctaatgaatatctctcggtgcgccatcagggggtgttgaccagtattcagaccttacaacatcagatcaacgggttgcttagcgatatcgataatatcgccgcctgccagaaagatgtcgacggcgaggtgcaacgggccatgaaagacatcactcgtgcaacggatgcgttgctggaacaggccgaatcaacgctgagcaaaaaactggatgaatacttcaaaaatgggaagcgccaggagaaagacgcacttgcgatcgatccgtcgcaggaattacagagccgcaatttccttggcatgtttgtgaagacgctgaccggtacggcgcagccgcgagtgcgcgatttcaatccgcaaaacccggaaatgacatttaactcgcgttttgacgccgaaaaattcgtccagcagatcgaagattctgtcaccagtttgctggcggagaccgaagtaaaaattaaaccgacgctgaccgagatcgttgcaggcatagaaaacagcttccatggcactgcgcttcaggccgttgaaagaattgcccatcaaatcaacacgcgtctggaagacgatggctttactgtcaatattcacttccctaaagtgagtcagctgcaaaccaacctgtctatcagaacccgcatgaccagtttactggaggaaaaaaccttcagtgaaaccaggcgtcgccgttccgatggggcatggggaacggtatgtaagtggttcaacaccgatgactggggctgggaagattacagcgtcactgttactcgcagcgtggtggatattcgtaagattaaaacggctgtgaataaacagaccaaagagcattttgccgagttaaacgaggccatcaacgcgaggatcaacaagcctattctgaacgaaattgagtcattcttcgcgacctttaaaaataaagtggagcagttgcgtaatacgcttatccagagcaccgaggaccataaaaacagtcagaatgcgcaggaacaactgacgctgcgcctgcgcgaactgaataaactcacaccggagatgatccgcgacagcaaagcgttgaaagaagaactggagccgatgctgtga

SEQ ID NO: 218959 - DNA, 903 bp, Klebsiella pneumoniae
atgaacccaattcaggaagcatttcccgatcatcagccatgccaaattctgacgtgcctaccggaaaagtttattgttgatttcgccaacggtatcgatctcacgcaagatcaccttcgggtgcagaaaaaccgcagctttatcacgcggatgaaagaagggcttagcggtcagtcttccgcccggcagcacgcgattaatagtgcacttgcggttggcgttgaggcctcactgacgtggctcaccgaactcacctcctcgttggctaccaccaactatgccttgacgcaggtgaatgacagagtgacgtctctggtcacggataccgcactgctcgcccactattctgccgacacccgtgagcaactgactgcactgtctctgcagctgagccaaaagctgaaccacctcgagcagcagcttcatcgcgtcgatatgctccagcggggccaattgcatcttgagcagatattttccaactggagcgccggacggtactcagccctgccgttggccggacgctgttatgtcgcccttgaggaattacgctggggagcattcggcgatgtgatacgtcatggtgatacgtatcaggcaaagcagatgatcgacattctcacaaacaaagctttagcccagcttgccgccgatcacaacagcctggcgagcgtacgccacgacacgcacagctggctgtcgtggcgtgcaggccaaacaaagcaaaatgactggcctgagacactcaactggatggctgactggtgtactgaagatgctcatcctgttatctgggctacgacccatatacaggacaatttaccgttgcgtatgccgcgtctgtgttcagcagaacgcattgctggcagcatggttgaggaaatattcagtcaggaggccgtatga

SEQ ID NO: 218960 - DNA, 1074 bp, Klebsiella pneumoniae
atgagccaaacgatgacagtgggtctggcgctttccggcggtggggcgattggagcctatgaagtagggatcgtcaaagcgcttgcggagtctggaatcgacgtccatatggtttccggcgccagcattggcgcgctgaacggcgcgattatcgcctcttcttcagggctttcgcaggcggcggaacggatggcggaaatctggacccatctgggcaatgacaccgttttgtcggtcaacaaatcagcctatttttcactgctgttgcagtttggcatcggaatggggctctccccgatactcagtaagacgggaagcatgctcagtacgatcctcaatcgcgctgcgctgttaaccggcatgaaaggaattgagaatcagcctttgctctcggatcaacccttgattaacctgatggatcgctatctggacatgaacgcccttgccagcggcttaccccttttcgtctcgttgtatcccacggagggcggattgcaggatattctccgttgtatagctgccgagctgggcttaggctcaacgcgcgattccgaattttaccatgtgcaaaatttaccccaggagcagcaaaaagaggcgctactggcatcagcggccttgccgttgctgttcaacccccgtgaagtcaacaacaccagttatagcgatggcggtatgggcggttgggcaagtttgcaggggaatacgccggttacaccactggtggaggctggttgtaacatggtgatcgtcacccatttaagcgatggttctctatgggatcgtcgggcatttcctgataccacggtattagagatccgaccgcagcgttcattacgccgcaacgaaggggcgctgggtggtgtaaaagatctgctgggctttacggcgatgcatattgattcatggattgaacagggctatcacgactgcatgagcactctggcgcgcatctgtaaaccactacaggccagacgcacgctacaagcgtccggtactgcgcttgaaagcagtctggcagagaacagcaaggcggattcggtcttgaaaaacgcaatgtcccgactgaaatag

SEQ ID NO: 218961 - DNA, 714 bp, Klebsiella pneumoniae
atgatccgcagcggcgaggcgaatatcgccctctgcggtggcgcggaagcggcgattcatcgcgttagccttgccgggtttgccgccgcaagggcgctgtccagcgcctacagcgaccagccggaaagcgcatcccgcccctttgaccgtgaccgcgatggttttgtgatgggagaaggcgcggggcttatcgtaattgagtcgctggagcacgcgctggcgcgcggtgccacgccgctggccgagctggtcggctacggcaccagcgcagatgcttatcacctgaccgcgggcccggaagatggtaacggcgcgcgtcgggccatggaaaccgcccttcgccaggccggggtgaccgccgcagagattgaccatatcaacgcccacgccacctcaacgcaggtcggtgataaaggtgagctggcggcgattaaaaatctgtttggcgcccatcccgtcgccattacctcgacgaaatcagccaccggccatctgctaggcgcagccggcgggatcgaggccatcttcaccattcaggcgctgcgtgaccaggtagtgccgccgacgctgaacctgcaccaccccgatgaagaggcggaaggcatgaacctggtggcgctggaggcccgcccacagaagatgcgctatgcgctgtcgaacggttttggctttggcggcgttaacgccagcctgctgctgaaacgttgggaataa

SEQ ID NO: 218962 - DNA, 1563 bp, Klebsiella pneumoniae
atgagcaccgctcaggcgctgtccgccccgcagggtctgtcgatgccgacggcgaagaagatcctcgcgttcgccagcatgtgcgtggggatgtttatcgcccttatcgatatccagatcgtctccgcctcgctgcgggatatcggcggcggcctgtcggcgggcgacgatgaaaccgtctgggtacaaaccagctatctgattgccgagatcattatcatcccgctttccggctggctggcccgggtgatgtcaacccgctggttgttcgccgcttccgcggcgggcttcacgctgatgagcctgctgtgcggctgggcgtggaacatccagagtatgatcgccttccgcgccctgcagggactggcgggcgggtcgatgatccccctggtgttcaccaccgctttcgccttttttcagggcaaacagcgggtcatcgccgcggcgacgatcggcggcctggcctccctcgcccctacgctgggtccaacggtgggcggctggatcaccgaaaactacaactggcactggctgttctttatcaacgttgttccggggatttacatcgcggtggcagtgccgctgctggtaaaagtagacagcgccgaccccactctgctgcgcggcgccgactatctcagtattctgctgctggccttgtccctcggctgcctggaatataccctcgaagaaggtccgcgctggggctggtttgatgacgcgaccctgacgaccaccgcctgggtcgccctgctctgcggcgtggcctttgttatccgcaccctgcgccatccgcagccggtgatggatctccgcgccctgcaggatcgaaccttcagcctcggctgctatttctcgtttatggccggcgtcggcatcttcgccaccatctatttaaccccgctgtatctggggagtgtgcgcggtttcagtgcgctggagatcggcctggcggtattttccaccggtctgttccaggtcatgtctattccgttttattcgtggctcgccaaccgcgtcgatctgcgctggctgctgatggccgggctgatcggctttgcggtgtcaatgtacagctttgttccgatcactcacgactggggggcggaccagttgctgctcccgcaggcctttcgcggactggcgcagcagtttgccgtcgcgccaacggtgaccctgacgctgggcagcctgccgcccgcgcgcctgaagctggcctccgggctgtttaatctgatgcgcaacctcgggggcgccatcggcatcgccctgtgcggcacggtgcttaatgacagaaccaatctgcactatagccgcctggcggaccatctgaataacgccaacctggcaatgagcgattttgttcagcgcagcgcggcaaacttcaccgtccaggggatctcgccggatgccgcgcagacggcggcgctgaaaaatctttccgcgctggcgctacgggaggcgcgaacccaggcattttccgatgcgttctacctcatcatgatgggttttttacttgccgcgctgctggttcccttgatgaaaaagccgccggcacactga

SEQ ID NO: 218963 - DNA, 231 bp, Klebsiella pneumoniae
atgatcagcgactggttaacaccggataaaattaatgtcattaacactattgatacctgggaaaatgccattcgacttgcagccgaacccttgctggcgcaagagtatgtgacgcaagaatatattacggcgattttaaaaagccatgaagaaatagggccttattatgtcctggcccctggtttagcgatgccacatgctcgccctgaacagggtgtgttaagaaattga

SEQ ID NO: 218964 - DNA, 564 bp, Klebsiella pneumoniae
atgtccactgatgcactggcgcaactcagccaaagaatggtctcattcaccatgatgctgttgattgctgttgttttattgaattcgcttgttctgtttttccctacattatcctttgcggatgagttgtacgggataagactgtcgcttgatgatcggcggctttctgctctcgatgtcaatctgcgcgcgttgccatggtggcaggccgcaggagtcggcgtgataagtctgctggttatggctcctctctgttacagcctgtatcagctacgctctttgtttaaagcttatgctcgccggaactatttttctgcccgttcggcacagcatatgagcagagttggagcctcactgggtctctggacggtaatggatctgcttgccggtcctgttctcagttactggttgtctctgcttaaccccactggcgagcgtgaaataatatttggatttgagctacatcatatcgtctggatttttatttcgctgtgcgtgatggcagtggcgaaaatactggaaaaggcaagcattctgtacgaagaaaataaactcttcctgtaa

SEQ ID NO: 218965 - DNA, 219 bp, Klebsiella pneumoniae
atggcaatcattgtaaaactggatgtattactcgccgcaaggaaagtgaagtcaaaggagcttgctgatgctattggcattaccgagcagaatctttcgctgataaaacaaggtaaaattaaaggttttcgattttcaacccttgatgcactgtgcaaatatcttgattgtcagcctggcgatctctttagttatattccatcgaaagaggatgagtga

SEQ ID NO: 218966 - DNA, 411 bp, Klebsiella pneumoniae
atgaaaggaaaagtactgagtatattgttttttatttttttcctcaacggcgttggcatagcagcacctcgagaagacagttcgggaaaagttaatcaacattctgacattcagaaagagcgtaaaggctcttcccgaccgggacataagaacgacaaaaataaatcgactcacagaccgacggctgtcaaacggaagcccggcgatcgctctcctgtttactattctgtatcagaaccgcctggaggcaaacgcatttacatgttacctggtggcaccaaaaaaatgaaatcaggagaggagggcgtgtatattgtcgatgatacttacattcgccgctataacgacggatatgaccagatcatatctccttttgatggcattgagatactggactataagggacgatga

SEQ ID NO: 218967 - DNA, 1431 bp, Klebsiella pneumoniae
atgtttaaaaggctattggcgttatcatttgttttctctttcattcctttaatcaccgttgctgctgagaagggtaccaatacggaactgactgcaagcacctcgatgaaaagtcacgatgagaggctagatcgtggtgagtatttaaatcgtatcgctttaaaggagagacgtctttccgcggatccttctaataagaccctgctctgggatcttatgcaagatgaactaatagcaggcaatttagataaagcagaaaaatatctcaaaccattattaagcgacccgcattatgcgaacaatgcactttatacgcagggagtggttcattatttaaagggggattacgtccaggctgaggctctttttcgaaagggtgccagggacctgaaaagtcgcatcaagttgctctatatctattatcagaccggtcagtattcaaaggcgagagaattgttcgatgatgatcaactgaaatctctcagtaaaaatgacatagccctgttgactttaatgagttccttcggcagtgcccagccttacagactggactggaaagctgataaggctgttcttccgttcatctcgatgaataatctccccgtagtctccgtcatggtgaacggacaacctgtcaatgtcttcatagatactggagccgatttgtttgttatcaaatctgaaatggcgaagacgctgggacttacatcacaggcaagtttcacggggacatatgccggcggaaagacagcagaaatcaatcattccagactacagacattgggtctgggagacgtcacattacatgatgttcctgttgatattgcagattttcctgagtcatgggttttcaccgatgaaagaacgggtaaaaaaattgatatcgacggtattttatccacgggtgtatttcaccagtttctcaccacgatggattatccagagcggcagttggtgctgatgccgagaaggaaaatcagtcagcgtgaggtttccgaacgggatggctcgcatatacccttcattcttgaaggaacgcattttatgatagtcaaaggtgcagtcaacggtaaggagggtatgacgttcttccttgattctggccttgacgatccggacgcttcaattttgttgcagaaagaagcactgaattatgctgggttgaaactgcaggacggggagcgctatgcgccggatgacaacaaaggagggcttggcggaggcggttttgcagtaacccggctgcccatcgacagtgtttctgtcggcgctttacatcagaaggggttaaccggcctttatggcgtgttaccggaacaactctatttcactgaatccggtatgattctggatggttttctcagtcaccagtttttaaggcactacaaatggaccattgattttgacgcaatgatgatgacatttcagtaa

SEQ ID NO: 218968 - DNA, 252 bp, Klebsiella pneumoniae
atgacacagcacgaacagttttgtcaggcctgcggaataccgatgtccgcacctgatgcgcagggtgccagcgaaaaatattgcgcctactgcagcgacagcgacggtaatctgaagtcctgggaagaggcggtatccagcctggcggggtttctcgattcatggcaaaaagttggcaaagaagaatcgcgcaagcgggcaatacgctatctgacagcaatgcccgcctgggcacataaagcagacgagtaa

SEQ ID NO: 218969 - DNA, 1371 bp, Klebsiella pneumoniae
atgaattatccggcagaacccttccgtattaaaagcgttgaaactgtatcgatgatttctcgtgatgcacgcattcagaaaatgcaggaagcgggttacaatactttcctgttaaattccaaagatatttatattgatctgctgacagatagcggcaccaatgcgatgagcgataagcagtgggccgggatgatgatcggtgacgaggcttatgctggcagcgaaaacttttatcatctggaaaaaaccgttcaggagctttttggctttaagcatattgttcctactcaccagggacgtggtgcagaaaacttgttgtctcagttggctattaagccagggcaatatgttgctggtaatatgtactttactacgacgcgttatcatcaggaaaagaatggtgcgacgtttgtggatatcgttcgtgacgaagcgcacgatgcagatttaaatatcccttttaaaggtgatattgatcttaaaaaattacagaagttgattgacgaaaagggtgctgaaaatattgcctatatctgtctggccgtcaccgtgaacctggcagggggacagcccgtttccatggccaacatgcgtgcagtccgtgaactaactcacgcacacggtattaaaattttctatgatgcgacccgctgcgttgaaaacgcgtacttcattaaagagcaggaagaagggtacgaaaacaagagcatcaaagatatcgttcatgagatgtttagctatgctgatggttgcaccatgagcggcaaaaaagattgcctggttaacatcggcggattcctgtgcatgaacgatgatgagatgttctctgcggcaaaagaactggtggtcgtttacgaagggatgccgtcttatggcggtctggctgggcgtgatatggaagctatggcgatcggtttgcgcgaagcgatgcagtttgagtacattgagcatcgtgtgaagcaggttcgctacctgggcgataaattgaaagcggctggcgtgccgatcgttgaaccaattggcggccatgctgtattcctggatgcccgacgcttctgcgcacatctgacacaggaccagttcccggcgcagagtcttgcggcaagtatctacatggaaaccggcgttcgtagcatggagcgcggcattatctctgcgggtcgaaacaaagagacgggcgatcaccaccgtccgaaactggaaacggtccggctgaccatcccgcgtcgtgtctatacttatgcgcatatggatatagtggcggacggtattattaaactctaccagcacaaagaagatatccgtggactgaagtttatttatgaacctaagcagcttcgtttcttaactgctcgttttgattatatctaa

SEQ ID NO: 218970 - DNA, 1266 bp, Klebsiella pneumoniae
atggatattaataccattgaacgacagagtggtactcccggcctaaccagcggtacgatgctcgtcattgctaccgtggttggtggtgggatgttctctctacctattgccatgtctggggtatggttccccggtgccactgttattctttttgctgttgccgttatgatgttattaactggactgatgctggttgaagtgaatcttcactacggcgcgggtgccagtttcaatacttttactcaggatttgctgggtcaaaaatggaacgtggttgtcggtatcgcttttggtttcgttctatatatattgacctatgcctatatttccggatcgtccgcggtaatggctcaaacagtgtttaaatacagcaattttcgtttgcctgccagtatttccgtgattgttgtaagtatcctggtcggcgcgatcgcgtggtatagctcactgttagtcggtcggatcaccactattctcatcattggtaagtttgttgctttttttgccaccttttctggactggttgggcacattgaagtggcgaagttggtggacagcgtggcgtttgcattacccaatgcgcaatatgcgccgtatatcctgatgacgttaccattttgcatcatttcatttggttttcacggcaatgtacccagcctggttaagctatatggcacggacggcattcataatattacgcgatcaattattataggaacactgttcgccgtcctgctatatgtcttctggctggcggtgaccatgggcaatatcagtcgcgcagaatttccgccgatcattgctaaagggggtaatattgatgtttttgtcgaggcgatcagcggcctgttttccagccgttatatggatctgatcctcacttttttcggtaacttcgccgtggccagctctctactggcggcaacgcttggcctgtttgattacattgctgatttattccacttccaggataacggcatggggcgcctgaaaaccgcgctagtgacttactttccaccggccgccgtctgtgtctttttcccgaatggctttgtccatgcgattggctacgctggactggcgtttactatctggagcgtgatcctgccgccgttcctggtgaaggccgcgcgtcgacgtttcgccactgcgatatataccgcgccatgcagtaatgtcgttctcaatctgattatcgtctgtggaggcattgtttacttgacggtggtgctggatgtttttggtttactgccaacgtttcgttag

SEQ ID NO: 218971 - DNA, 141 bp, Klebsiella pneumoniae
atgatgctgggcatcactcgtgggtacagggacactatcatgaaattgggtattctttttccggtggcgatctttattatcgctgtcgtctttctcggctggttttttgtcggcggctatgcggcgccgggtggggcataa

SEQ ID NO: 218972 - DNA, 891 bp, Klebsiella pneumoniae
atgtcctttcgttcgttacgccattttgtcgtcgttgccgaagagttacatatgcaccgggcggcggagcggttacatctcgctcagcccgccctcagccagcagattaaacaactggagcagcgcctgggcgtggtgcttttctcccgcgctaaccgtcggctgaccctcaccgccgcgggcgaggcctttttacacaagacgcggctggcgctggaaatggccgatcaggcggtactggacgcccagcgcaccgcgcgaggcgagcagggaaaattacatctggggtatgtctccagcgcgatgtatgacagcaagctgccggggttgctgcgcgcgctgcgcactgactggccgggcattgaactgtcgctggtacatggcgatgtgcaaatgctctacgacgcgctgcaggacctgcgcctggatatcgccattatccgcgcgccgctggcctcgccgccggacgagctggtagtcaggccgtttgtgcgggaaaagctctgtctggcgctctatcagcagcatccgctggcgggcgtggcagcccttaatctggcgtcattgcggactgacaactggatctctctcgacgatccgcagggcaccgggctggagcaggtgtttattggcgcttgtcgcgtcgcgggctttacgccgcaggtggcgcagcgcgtcaacgatgtcacttcgatgattagccttgtctccgccggggtgggagtagcgttggttccggtctcggcgcgggctctacgccttgataacgtggtgtatatcgatctgcaggaccggctggcggagagtgagctgagcatggtttaccaccgccatatccgttcggcggtggtgcggaaagttatttcgctgctcaatgccacggagcaataa

SEQ ID NO: 218973 - DNA, 1509 bp, Klebsiella pneumoniae
atgaccgcacccattcaggatctgcgcgacgccatcgcgctgctgcaacagcatgacaatcaatatctcgaaacgaatcatccggtagaccctaacgccgagctggctggcgtctatcgccatatcggcgcgggtggtaccgttaaacgccctacccgtatcggtccggcaatgatgtttaacaatattaagggctatccacactcgcgcattctggtgggggtacacgccagccgccagcgcgccgcgctgctgctgggctgtgaagcctctcaactggctctggaagtgggcaaagcggtcaaaaaaccggtcgcgcccgtagtcgtgccggccagcagcgccccctgtcaggagcaggtatttcgtgccgacgatccagactttgatttgcgcaaactgatcccggcgcccactaacaccccgatcgacgccggccccttcttctgcctggggctggcgctggccagcgatcctgacgacgcctcgctgaccgacgtcactatccaccgtttttgcgtgcagggccgggatgagctgtcgatgtttcttgctgccggccgccatatcgaagtgtttcgtcagaaagccgaagccgccggcaaaccgctgccgataaccattaacatgggcctcgatccagctatctacattggggcctgcttcgaagcgccgactacgccgtttggctataacgaactgggcgtcgccgggtcactgcgtcagcgtccggttgaactggtgcagggcgtcagcgtcccggagaaagccatcgcccgcgccgaaatcgtcattgaaggcgagctgctgccgggcgtgcgcgtcagagaggatcagcacaccaacagcggccacgccatgccggaatttccaggctactgcggcggcgccaatccgtcgttacccgtggtcaaagtgaaagcggtaaccatgcggcagaacgcgattctgcagacgctggtaggaccgggggaagagcacaccaccctcgccgggctgccaacggaagccagtatctggaatgccgtcgaggctgccatcccgggctttttacaaaatgtctacgcccataccgcgggtggcggtaaattcctggccattctgcaggtgaaaaaacgtcagcctgccgatgaggggcgtcaggggcaggccgcgctgctggcgctggcgacctactccgagcttaaaaatattattctggtcgatgaagatgtcgatatctttgacagcgacgatatcctgtgggcgatgaccacccgcatgcagggggatgtcagcattacgacaatccccggcattcgcggtcaccagctggatccgtcccagacgccggaatacagtccgtcgattcgcggcaagggcatcagctgcaagacgattttcgactgtaccgtgccgtgggatctgaaatcgcacttcgagcgtgcaccgtttgccgaggttgatccgcgcccctttgcgccagagtattttgcccgtctggaaaaaaaccagggcagcgcaaaataa

SEQ ID NO: 218974 - DNA, 411 bp, Klebsiella pneumoniae
gtgaatactcgcttgcgtaacaccctgatcgctcttgctctgaccaccagcttcaccgccgccagtcaggcgtcgacctcgactgatgtgccgtcggtctcgcaggatccggttgtccagcatctgaaactgagtgaggagcaggtcgccaaaatccaggcgctgcgtcaggggttcgaaaacaatgtgagccagattaaaatcagcggctatcaggacggcgctctggctgaagttattcactccgggaaatgggatgatgccaaagtcaaacagcagctggccgcctttggccagctggatcagcaggtgcgctattatcgggtgaaatactacttcgacgttagtcaggtgctgacgcctgagcagcgtgagcaggtcaaaaaagatctcgccgacgcggtcaactaa

SEQ ID NO: 218975 - DNA, 687 bp, Klebsiella pneumoniae
atggttgaagaaaacgtgaaaaataccttataccgcttcgtgctggagccggctattagcgatgatggcagctaccactcatgggaattgctcactaaggatattatagcacccgcacaaaatatcacctcagcgccaacgttttctttctccacgcttaccgaccgcgacaagattgcactattcactcgccaaatcgagctgctttctgtatttgattttacccgcctggataataagccggtatcgttgaatattgatgatttattaagccagtttattctggcggaccgctacctctgtgattttttacgctcctgtaaacatatcgcgctggaaattaatgagaattttcatgaattcatcgccgggagcgaactcaccacgctgagcgcgctggcggcgctttgcccggtctggctggatgacttcggtcgcggacgcacttctttcgccttactggacagatttcgcttcgattgcgtcaaagtggataaagattatttttgggataaagaagacgaccccacattgcccggcctgttacaggctatctctgctctgacccgccatgtgattgtcgagggggtggaaaccgagaagcaaaaacggctgatcggatcggccggcaatatcatcggtcagggtcgttactggaaagatgaatacatctttttgcactgctga

SEQ ID NO: 218976 - DNA, 888 bp, Klebsiella pneumoniae
atgtttcgtcatgtgaaacaactgcagtataccgtgcgcgttgctgaacccaatccgggactcgcgaatttactgctcgaacagtttggcggccctcagggcgagctggccgctgcgtgtcgttatttcacccagggattaagcgatgacgatcccggccgcaaagatatgctgatggatatcgcgacagaggagctgagccacctggagatcattggcaccctggtgggcatgctgaataaaggcgccaaaggggcactggcggagggcaccgagagcgaggcggaactctaccgttcgctgaccgccaacggtaacgacagtcatatcacctccctgctgtacggcggcggtaccccgctgaccaactcggcgggtgtaccgtggacggcggcctacgttgatacgatcggcgaacccaccgctgacctgcgatcgaacgtggcggcagaggcgagggcgaagatcgtctatgaacgcctgatcaatgtcaccgacgatcccggggtaaaagacgccctggcattcctgatgacccgcgaagcggcgcaccagctctctttcgagaaggcccagcagtcgattcgtaaccattttccaccgggtaaactgccgcccattagcgagtacgctaacacctactacaatatgtctgaaggtggagaagtgcgcggcagctggaacagtgacaaacactttgattatgtcaaggatccgcagccggcggtggatggcggcgatggcagtgcctctgtcagcctgacgccagagcaggaagcgttgtgcaaagcaatgctgaagcgaacacagtctgacccgcagggtgatcctttgaccggcgccgaacttggcgccgggaagcaaaacacctcatcatcggctaagtga

SEQ ID NO: 218977 - DNA, 492 bp, Klebsiella pneumoniae
atgtctgattatcgtcgcagttatatccctggcggctgctggttcttcaccgttaacctgcaaaatcggcgcagcgatctcctgacgcggcatattgttcatctgcgtgccgctacagcgtctgttaaaagcaaaaaaccttttctgattaacgcctgggtggttttacccgagcatatgcactgcatctggaccctgcctgagggggataccgattattccggtcgctggcgggacataaaaaaaacgtttacccgagcgctggcgcagcgccatatctggcagccgcgattctgggaacatgccatccgtaatgaagaagattaccggcggcatatggattacgtttatatcaatcccgttaagcacggtcatgtccgtcgggtgcaggattggccgtattcgacctttcatcgcgatgtgcgccggggatggtatccgccgaattgggcgggtgaggtaagcgaatttgatgcaggcgagaggcgataa

SEQ ID NO: 218978 - DNA, 324 bp, Klebsiella pneumoniae
atgtacacttttattgagctgcagggtttcagtaaacggcgtcaggcgcttctaccggatgacgagtttcgcgtttttcaggagatgttgattgaggatcctgaggctggcgataccattgcagggactggggaatttcgaaaaattcgctggagccgaccggggatgggcaagcgtggcggggtgagaattatttattacaatgtgacgcgtaaagggcgaatttatctggcattggtctatcccaaaaatgagctggatgatttaacggaagaacaaaagaagatgctgaagcagttatccgctatgctggtattccgctga

SEQ ID NO: 218979 - DNA, 297 bp, Klebsiella pneumoniae
atgaaagacgagttatttgccgatctgctggccagtgcagaggaaatggtaaaaattgaaaaaggtgagcaaacgccagagccgcagtatgttcacacttttagcccgattgatgtgaaagcgattcgcgaggctaccggcttaaaacagcaggattttgctctcgccgtaggcgttagctatgacttagttaaaagctgggaaactaaacggcgcgagccaaccggcgccccgagaaaattgctgcttttattacagctcaatccttttattatcaatcagcttaaagcaatttag

SEQ ID NO: 218980 - DNA, 1437 bp, Klebsiella pneumoniae
atgaataacgcgcagacacatttgaaaatgggctacgtctggacgatttgtctggtcgctgcctgcggtggtttactgtttggctatgactgggtggtgattggcggcgctaagccattttatgaagcctggttttcaattaccgacccggcgcagtcgggttgggcgatgagctcagcgctgttggggtgcattttcggcgcattaatttcgggatggtgcgccgataaactgggacgcaaactgccattaattctttccgctgtgctgttcagcgcgtcggcgtgggggacggcggtcgccagtcatttcgacatgtttgtggtttaccgcattgtgggtggcgtggggattggtctggcatccgcgctcagcccgctctacattgccgaagttagcccggcagagaaaagaggacgctttgtcgcggtcaaccagctcaccatcgtgattggcgtgctggccgctcagttaatcaatctgatgattgctgaaccggtggagacgggggcgacgcagcagatgattgtggagagctggaacgggcagatgggatggcgctggatgttcggcgcggaactggttccggcgctggcgtttctggttctgatgttttttgttcccgagtcgccgcgctggctcatgaaggccggtaaaccggagcgcgcccgggcggcgctggaacgcattggttctgccgactatgccgaccggatcctgcgtgaaatcgcgcataccctggaaaaggataacaacaaagtttcctacggcgcgctgttggctccccaggtgaaaccgattgtgatcattggcatggtgctcgccatattccagcagtggtgcgggattaacgtcatctttaactacgcgcaggagatttttgcctcggcggggttcgatattaacagcacgctgaaatcgatcgtcgcgacgggcgtcgttaatctggtctttaccattgcggcgctgccgctggtggataaaatcggtcgccgtaaattaatgctgcttggcgcttcgggattgacgctgatctatgtgctgatcgccggcgcttacgccatgggcataatggggtggccggtactgttgctggtgctggcggcgattgctatttatgcgttgaccctggcgccggtgacctgggtgctgctggcggagatttttcccaaccgcgtacgtggactcgcgatgtctttaggtactctggcgctttggattgcctgcttcctgttaacctatactttcccgctgctgaatgccggcctgggcgcggcaggcagcttcctgctgtatggcgtcatttgtgcggccggctacctctatatcctgcgcaacgtgccggaaacgaaaggtatcacccttgaagcgctggaagagcagctggcgcagcgtcattcgggcgttaatgcggcgaagcaggagcagatgcgctaa

SEQ ID NO: 218981 - DNA, 1278 bp, Klebsiella pneumoniae
atgatgaccgtcattgaaccaccatctgcgctttccagtccacagcgccgtagccaggtgctcctgatgttttatctgcccgggcagtcggtaacgactgaacggcttggcagaatcaacctcgttgatgagaccacggcccggcaggatattgaggagaccggacgcgaaattcagcgttaccaccgcttgaccctccagtcacaggtggacggcagctatcggattgaaggcgccgcgctcgaccaacgtttatgtctgctgcatgcgctgcggcgggggctgcgtctgtgcccgcagttcgttaaccatcattttaccccggcgctgaaaacgcagcttaaacaggaaggtatcgcccgcactttatacgacgataccaatctgcaggcgctggtcaatcgctgcgcgcgggcgctcaatcgccagttcgactgccgggacgtgcagtttctgcgcctgtacctgcagtattgcctgcttgaacatcaccggggctattcgcctgactttaacgatgaacagcagcactgggcccagaccgccgccgagtttaccctggcgcaggagattgtccgccactggcagcgccgggtcggggctccgccgcatgtcggggaaccctttttcctctcattgctgtttatgttgctcaaaactcccgatccgcttcgcgacggtcatccgcaggatcgccgcctgcggctggctatctccggcctgatccaccgcttccagatcctcgccggcaggtcgttcagtgatgagcaggggctcagcgatcaactctatattcatttgtcgcaggcattgatccgcagcgtgtttgccatcggcatcgacagtgcgctcacagaggaagtgagccggctctatccccgcttactgcgcaccacccaggcggcattgggtgaattcgaggaggcctggcacattcgttttaatgaggaggagaccagcttaatcgcggtgatctttggcgcctggctgatgcaaaaaagcgacctgcacgagaagcaggtcctgctgctgaccgatgataatccggatattgaagcgacgctggaacagcaactgcgcgaactcacgctgctgccgctaaatatcaaataccagagcgtagagcgctttcaaaaggaaggtacaccgaaaggggtcacactgattgtcaccccctatgcgacggcgctgccgctgttttcgccgccgctaatccatgcggaaaacggctttactgaacgtcagcagcagcatatctgcgcgatgctcgaagactag

SEQ ID NO: 218982 - DNA, 195 bp, Klebsiella pneumoniae
atggtccagcgcattttaaaggcgctcaacagaccgtcttcgatcaccggctcgctgtgcaaactgatgaagctatgcggatgcgcggcggctgaccacgataaaaccatgaaaaacgccgcgccggtgcattgtttcactctgttcatctgttcctcacgtgaaaaattctgtgaccttcgccagcaatcctga

SEQ ID NO: 218983 - DNA, 876 bp, Klebsiella pneumoniae
atgacattatccgccgcaccgcgcatcagctgtgaggtcatcgacacgcgccccgaccgggcgcgcatttttaacctccagcgctactcgctcaacgatggccaggggatccgcacgttggtcttttttaaaggctgcccccacacctgcccgtggtgcgctaatcccgagtcaatctccccaaaaattcagaccctgcgccgggagagcaaatgcctgcactgcgcccgctgccagcaggacgtcgccgagtgtccgtccggcgcatgggagcagatcggtcgcgacgtaacgctggacaccctgctgcaggaggtgctgaaagacgaggtcttcttccgcgcctccggtggcggtgttaccctctccggcggcgaagtgctcatgcaggccgaatttgccgcccgctttctccggcgcctgcgccagtgggggatccataccgccatcgaaaccgccggcgacagcgccttcagccgttttttaccgctggccgaagcctgcgatgaagtgttattcgatttaaaaatcatggaccctgagcgggcgcggtcgctgctgcgaatgaatcagccgcgggtcatggacaactttcgccagctggcagcgcgagacatcaacctgatcccgcgagtgccgctgatccccggttacaccatgagccttgagaattttcgtcagattctggcgttcctcgcgcccttcgcgcttaaagaaatacacctgctgccgtttcatcattatggcgagccaaaatatcgtctgctgggcaaacgctggccgctggctggcgtaaacgccccagaagaagcagaaattcttccttaccgggcgctggccgaagcggccggcttccacgtcactatcggcggttaa

SEQ ID NO: 218984 - DNA, 1077 bp, Klebsiella pneumoniae
atgaacgaactggtgcaaatactaaaaaatactcgccagcatctgatgaccggcgtgtcacacatgatccccttcgtcgtctccggcgggatcctgctggcggtttccgtcatgttgtatggcaaaggcgccgtgcctgatgccgcgaccgatcccaatctgaagaaactctttgacatcggggtcgccgggctgacgctgatggtcccctttctcgccgcctacatcggctactccatcgccgaccgcgccgcgctggcgccctgcgccatcggcgcctgggtgggcaacagcttcggcgccggcttcttcggcgcgttaatcgccgggatgatcggcggcctggtggtctattacctgaaaaaaataccggtccacaaggtgctgcgatcggtgatgccaattttcattatccccatcatcggcacctttattactgccgggatcatgatgtgggggctcggcgaaccggtcggcgcgctaacggcaaacctgaccagctggctgcagggcatgcgcgaaggcagcatcgtggtgctggccatcattatgggcctgatgctggcgtttgatatgggcggtccggtgaacaaagtggcctacgctttcatgctgatctgcgtttcacaaggggtctacagcgtagtggctatcgccgccgttggcatcgccgtgccgccgctggggatggggctggcgacgctaatcggccgcaaatatttcaccgccgaagagcgggaaaccggcaaagcggcgctggtgatgggctgcgtcggggtcaccgaaggggccattccctttgccgctgccgatccgctacgcgttattccagccaatatgattggcgccgccagcggctgcgtcaccgccgcgctgctgggcgcccagtgttacgccggctggggcgggctcatcgtgctgccggtggtccagggcaaactcggctttgtcgccgcgctgctggtcggcgcctgcgttagcgccgcctgcgtgattgtgctgaaggcgctggctaaaaagaaatcatctgacaccaaagccgacgacgaattagacctcgatttcgaaattaactaa

SEQ ID NO: 218985 - DNA, 2004 bp, Klebsiella pneumoniae
gtgaaagatatcgaactgcggctgctggacaatgacggcaccgccagcgctatcctggacgctcatcgttcgctggcgacggatgcctcgctgcgccagcatctgctcggcgggatcctcaccggtctcagctgcgcccaggcgatcgtcgccaccagcgaccacttctgcgcccagttccgcgattccggcaacagctatctacaggagcgggtgctggatgtgcgtgatgtctgcttccagctgttgcagcatatctacggcgaagcccgtttcccggcgccgggccagctgcgggaggccgccatttgccttgccgacgagctcacccctagccagtttctggaactggataaaacgcatctcaaaggactgctgctgcgcagcggcggcaccacgtcgcacaccgtgatccttgcccgctcattcaatatcccaaccctggtgggggtagacctggacgcggtgctgccgtggggcgatacccaggtgcagattgacggcaacgccgggctgctggtggtcgacctgagtccggcggtggcgcgctactatcaacaggaggcgtgggtacaggcgcaaatgcagcaacagcagcaggtatggctggataaagccggacagacgcaagacggtatccgccttgaggtggcggccaatatcgctcattcggtagaagcggtggcggcgtttaaccacggcgcgcagtcggttggtctgttccgcacggagatgttgtatatggaccggccgggcgcgccatcggaagacgaactctacaacatcttttgccaggcgctggagccggccgccgggcgcagcattattgtgcgcaccatggatatcggcggcgataaaccggtggcctatctcaacatccctgcagaaaacaatccgttcctcggctaccgcgcggtgcgcatttatgaagagtaccaggcgctgtttcatacccagctgcgggcgatcctgcgggcctcggcgcacggctcgctgaagattatgatcccgatgatttcctcaatggaggagattctgtgggtgaaagagcggctggcggaggccaaacagtcgctgcgtgccgagcagatcccctttgatgaaaagatcccgctgggcattatgctggaggtgccgtcggtgatgtttatcatcgatcagtgctgcgaagaggtggatttctttagcatcggcagcaacgacttaacgcagtatttgctggctgtcgaccgtgataacgcaaaagtgacgcgccattacaatagcctcaatccagcctttctacgcgcgctggactatgccgtgcaggcggtacaccgccaggggaaatggattggcctgtgcggcgagctgggagccaaaggttcggtactgccgctgctggtcggtctcggtttagatgagctgagcatgagcgcgccggcgatcccggcgaccaaggcgcgtctggcgcagctggacagccgcgcctgccgccagctgctgaatcaggccatgcagtgtcgtacctcgctggaagtggagcatctgctggcccagttccgcatgcgccagcaggatgtgccgctgattagccgccagtgcatcacccttaacagcgactggcgcagcaaggaagaggtgttgaaggggatgacggacaatctgctgctggccggacgctgtcgctatccgcgcaagctggaggctgatctgtgggcccgcgaagcggtgttctccaccggactgggttttagctttgccattccgcatagtaaatccgagcatattgagcagtcgaccatcagcgttgcccggctggcccagccggtggcgtggggcgatgaagaggcgcagtttgtgatcatgctgacgctgaacaagcactcggcgggtgaccagcatatgcgcattttttcacggctggcgcggcgcattatgcacgccgagttccgccaggcgctggtatccgcagagagcagcgaggctatcgcgacgttgctccagcgtgagctggagctttaa

SEQ ID NO: 218986 - DNA, 1488 bp, Klebsiella pneumoniae
atgaattttcagcacctggcttactggcaggaaaaagcgaaaaacctggccattgaaacgcgcttatttattaacggcgaatattgcgccgcggccgataataccacctttgaaaccattgaccctgccgcgcaacagacattagcccaggtcgcccgcggtaaaaaagccgacgttgagctggcggtaaaagccgcgcgccaggcttttgataacggcgactggtcgcaggcgtcccccgcacagcgtaaagcggttctcactaaatttgccgacctgatggaagcccatcgcgaagagctggcgctgctggaaacgctggataccggcaaaccgatccgccacagtctgcgcgacgatattcccggcgccgcccgcgccattcgctggtacgccgaagcgctggataaagtttatggcgaagtggcccccaccggcagcaacgagctggcgatgatcgttcgcgaaccgattggcgtgatcgccgcggtggtgccgtggaacttcccgctgctgctggcctgctggaagcttggcccggcgctggcggcgggcaacagcgtgatcctcaaaccctcggaaaagtcgccgctcaccgccctgcgtctggccgggctggcaaaagaggccggcctgccggacggggtgctgaacgtgatcagcggctttggtcatgaggcgggacaggcgctggccctgcatcccgatgtcgaagtcattaccttcaccggatccacccgcaccggcaagcagctgctgaaggatgccggcgacagcaatatgaagcgcgtgtggctggaagccggcggcaagagcgccaacatcgtcttcgccgactgcccggatctgcaaaaagcggtcagcaccaccgccggcggcatcttctacaaccagggccaggtctgcatcgccgggacccgcctgctgctcgaggagagcatcgccgacgagttcctggcgcggctgaaagccgaggcgcaacactggcagccaggcaacccgctcgacccgaacaccaccatggggatgctgattgacaatacccatgccgacaacgtgcatagctttattcgcggcggtgaaagccaaagcaccctgttcctcgacgggcgtaaaaatccgtggcctgccgccgtcggtccgaccattttcgttgacgtcgacccggcctctcgcctcagccgggaagagatcttcggcccggtattggtggtgacgcgcttcaaaagcgaagacgaggcgctaaagctcgccaacgacagcgactacggcctcggcgccgcggtgtggacccgcgatctctcccgcgcccaccgcatgagccgtcgcctgaaggccggttcggtcttcgtcaacaactacaacgatggtgatatgaccgttccgttcggcggctacaagcagagcggcaacgggcgcgataaatcgctgcacgcgctggaaaaattcaccgaactgaaaaccatctggattgccctggagtcttga

SEQ ID NO: 218987 - DNA, 678 bp, Klebsiella pneumoniae
atgagtgattcatggatgatatattcaagcgttaattatgagcttactaagactgaagcttgtacaattagagcgtacttgctgaaaaattatttaagatatttattgaaggataatatacaaaaaacaaaaaccatgaaatggttcaaggttgacgacaagtgtaagtttgcacgccgatttaatattgtgatgagcatctcaatttttttatcctttattatgttctttatgcttcttggttattctgttgaatctgtgcttgcatttttaattgtatttccggcagttatttttatctttaaaaaatacaaataccgattacaggacttttgttataaaacctattcggcaaggtgtattaaatataggaagtttacgcttcgttgtcttactataataagggctaatggtttgataaagatcagtatgcactcattgcgcagaaccaagagcgtagagttgaacaatattgacggcctgggaaagatagtcaccagtgcgggaaaaatgcagtattttgaatgtagcactttacgagtcgttgcagatgtcggtgatgttattttttacggggtgattgacagggataatgggaatttttatatactgccgatcccggtaaggtatcattcacggtttgcacgcgtcataaccggcaaccataatacgctttaa

SEQ ID NO: 218988 - DNA, 705 bp, Klebsiella pneumoniae
atggtcgcgcaggcgtaccgggatcattttggcgttataggtctggttttgcttcaggctgaagacctgcgaggtcccggactttgccgcaatctggtacggcgcggtatggaacagcttatagccggtgccgttgggcagattcgccatgccgtacatgccgttgcgtacaatgccccagtacggggatttcggatcgcccacctgcggcaggtccgccggctgctgataacgttccacatgattaccctgcttcatcgaatagagcagatgtggatcctgcaccttaccgttgttcagcagggtggtaagcgcttttaccatctgaatgggcgtggcgatccagtacccctggccgatgccgaccgagatggtgtccccctgataccatggctttttatgcacccgctgtttccactcccggctcggcagcaccccggcgtactcctcattaaggtcgatgccggtggactgaccgtagccgaatttgctcagccactcatggatccggtcaatgcccatctcgaaggcaacctggtagaaaaaggtgtcagccgactcttcaatggctttggtcacgttgagcatcccgtggccggttttcagccagtcacggtagcggcgttgcgtgcccggcagcgtccacgtcggcgccccgaagaaggtagtgttcggggtgatcacgcctgcagacagcgccgatag

SEQ ID NO: 218989 - DNA, 1062 bp, Klebsiella pneumoniae
atgttaaaagatggatgtgcgccgtcggggtctggctcgtccgaggagacggccgatttttattttagccacgtgatggccgagcaggcggcgcgggcgcgcctgacgctggacgacgatcagctgtcgcttatcgcccggcttgacgccctgggccagcagctgatgtccgcgtccggcacgcctcaggggctgtacgtctggggacgtaccggacgcggcaaaagttttatcctcgaccacttttttgccagcctgccgctcgctgcccggcggagggtccattttcatcacttcttccgcgaactgcaccagcggctgaatgcccccggcgcgcccgatctgcaggcggtgatgaggcagatgacctccggttgccgtctgctgtgctttgacgaatttcatctgcacgaccccggcgacgccatgctgatcaaggtgttgctggaacacctctttcaacggggcatcgtgctgctggcgacgtcaaactacccaccggagttgttgctgcctaatccgctgtatcacgaacgctttttaccgtcgatcgcgctgatccgcgcccatctggcggttgtcgcgcttaacggcgaagaggattatcgcgaacggcatctgagccaggataacgccttctgcagcgggcggaggtgggttaccccaagcgcgcaacagcgtcagctgtacgatctaccatcgctgcctggcgaacccgtctcgctggaggtcggttaccgcaccctccaggcggtcgcggcgtcacctgacttgctgcacttcacctttgcccagctctgtcagtccgccacggcggtgatggactatctcacgctcagcgaaagctatgccgtctggttactggacgaggtgccgccgctggcgacggtggggccggcggcccagcagcgctttatcaacgtgattgatgtgctgtatgaaaagcagatccgcctgctgctggtaacctgttgcgatctgcagacgctggtggccggggtggaactggaggatattcaacgaacgtggagtcgcctgcaacagctgccgcgggcggtataa

SEQ ID NO: 218990 - DNA, 966 bp, Klebsiella pneumoniae
atgaacaaacacgtcgctgctctgctgacgatgcttattattccgtctgcttttgcgcaaacacctttaacagacagcaaaactatcgttattaaaccaagcgctctggccgtcgagatggtgcctgatattgcctattcatttacgcaaaatatcatgggacgaccgctccagttaacgatggatttgctcaagccttatgctgataaaccgttacccgcagtagtatttattaccggcggcggctttctcgatgcgcccaaatcaaaatttatcggtcagcgggtcgatattgcccgggctggttatgtggtcgccagcattacctatcgggtcgtacccaatgtgactttcccgggcatggttgaagatgcgaaaacggcggtcagatttttacgcgccaatgctgaaaaattaggcatcgatcccaaccatatcgctgtgatgggcgagtcggcgggtgggtatttagccgctatggtgggtaccaccagcggtcataaggaattcgaccagggagagtattcaaatcaaagcagcgatgtgcaggcggtggttgatctctatggcctgtccgatctgacgaaagtcggcgctgacttttccgcggacattcaaaaagcgcatcagtcaccggccataccagaggcgatgctggttaatggtattccctggcaaggcggtggcgctatctccgcctatcccgaaaaggcgaaacgggctaatcccatcacctggatttcgaataaaacgccgccttttctgctaatgaacggcgatgccgacaatgtggtttcacccagccagtcaacgcttttacacgaggcgctgctagcgaaaaaaataccgtccacccattacgtggtgaaaggggcggatcacgcaggtttgatgtggtatcagcctgaagtatcaaaaattattattaattttttagaccaaaatctcaaagataagcatcaataa

SEQ ID NO: 218991 - DNA, 504 bp, Klebsiella pneumoniae
atgattaagaatcaacagcattgtcccggcattgatgagaatgaacgagccctacgcttcgaatatcgtttccggcgctacgggataattatcctgagcctcatcatccttaccgcgctaagcggcctgtggtcctccgggtatttcagcgaagcgcaccgggatagtgccactggtgaattaagcgtcgattaccagcgttatgccaggctgatgagtgagaccgaactgaatattctgatacaccccgatcagaaaaacgagacgacgataagcttcgccagcaccctattatcccgctaccagatcggcgatatccgtccgcaaccggataaaatgtacagcagcggggggaaattatatctcgtataccagcagacgccccatcgtttgccgatgtcagtgtggctttccattaccccaaaaacggcgggaaatatcacgctgaaggcggcagtaaacgatcgtcccgctgtcacctggactcaatttatttatccgtag

SEQ ID NO: 218992 - DNA, 183 bp, Klebsiella pneumoniae
atggttaaacgccacactatcgcgctccccgccgccgagggagaggtgcctctgctgttaaccgccagacaacaggctctggttgacgcagtcgctaacagacccctcccggcaacgcagaatgaatcagcgcccgttgacccaccctgcgagaaagaggttggtgtgcgcaaaccgcgctga

SEQ ID NO: 218993 - DNA, 507 bp, Klebsiella pneumoniae
atgactgatattgaaaattaccacaactggcttcgcgatgcgcatgcaatggaaaaacaagctgaaacgatgttgatagcggtgagtcgcagggtagaaaactatccgccattacgcacccgtcttgaacaacatctttacgaaacccgtcggcaattatcggcgctgcaggatcttattgcccgcaatcatatttcccgctccgcgttgaaagaggcgatgagccgtgtggcggcgctgggccagaccatcggcatgatgctgcccggcgatgagatcgttaaaatcattaccactacctatgtttttgcccaattcgaggtcgcctgctataccgccttattaacggcggctaaacgggcaggtgaccaccatgcccttcacgccctggaagcgatactggcggaggagcgaggtatggcagactggctgcgtcatcatcagtcggcgctggtggcggaatttcttcatcgcgctgaacgtcctggcgtagaggtcggacattaa

SEQ ID NO: 218994 - DNA, 1380 bp, Klebsiella pneumoniae
atgggctttaccccggcggtgacggcgcagcagacctcaaccctgagcggcggccagcacacgcgcctgctgctggcccgggcgctgatccgccagcctgacctgttgctgctggatgagcctggcaaccatctcgatctgcccaccctgctgtggctggaaagcttcctgcaaacctggcaggggagcttcgtgctggtgtcacacgacaacaccttactggatgctgtaactaataccagctggatcctccgtgaccagacgctgcacagcttcgccttgccctgcagcgccgcccgtcaggcactgcaggagcaggatgaaagcgctgcgctgcggcataaggccgagcagaaagagatcgaccgggtcagcgccagcgcccggcggttggccacctggggtcgggtctatgacaacgaagacctcgcccgcaaagccaaacagatggagaagcaagtcgcccgcctgaaagacgagcaaaccgagctcagcgtcggcccgccgtggcgtctgtcattgcagggggacgccctgccggctgaccgcctgctggagatggacaccctgcccgtcgcgcccgcgccgggcctgccatccctcttcaccaccggcgtggcgcgcctgcgcagtggcgatcgcgtggccatcatggggcgtaacggcggtggtaaatcgtccctgctgcgcctgctgtggcagcagatgaacgacacatcgccactcccggggctgcgcctgcatccccggctgcaccccggctattatgaccagacgctggagcagttaccggacgatgccagcctgctcgacgccctgacgccgttcgccccgtcggcagaggtgcgcaaacgggcgctgatcgccgccgggtttggctgggcgcgacatagccagcaggtcaacagcctcagcggtggcgagcggtcacgattgctgttcgttggcctgtcgctggcgcgctacagcctgctgttgctggatgaacccaccaaccatcttgatatggagggcaaagcggcgctggcgcagacgctgcgcgactaccccggcggcgtgctgctggtcagtcatgatcgtgagcttattagcgaaagctgtaaccgcttctggctgatcgaccatgacgggttaacggaatggcacagcctggaggccgtgtatgaccgtctgcaggccgtagctcccgctccggagagtcggcctgctttgcaaaatccccccgtcggagtggatgatgaggaagtcctgctggcgcggctgattgacctggagcagtggctggctgacgatatggcccgcaagccgaagcatcaaaagccatcacttcaggcgcagtggcgggaggaaattgcccgcctgcttatccagctgacgtaa

SEQ ID NO: 218995 - DNA, 1029 bp, Klebsiella pneumoniae
atgcatcgtcattttcgcctgcccgcgctggccgcgctgtttctctctggcgccttttccgtctgggctgccgacacgccggttaaaggcggcaccttgatttatctggagcagcaaccgcacaccaatctctatccgcccgccggcggcttttatccaaatggcggaattctcaatcagataaccgataagcttacctggcagaacccgaaaacgctggagattgagccgtggatcgccgagagctggaccagcaatgccgataaaaccgaatacaccttccacctgcgcaaaggggtcactttctcagatggcaccccgctggacgccgccgccgtggctaaaaacttcgacacctatggtctgggagataaagcccatcgcctgcccgtctcggaggtgatcaataactaccagcgcagcgaagtgatcgacccgttgacggtaaaattttacttcaacaaaccgtcgccgggcttcctgcagggcaccgccaccatcggctccggtctggtgtccctcagcaccctgcagcgcaattttgaagcgctgggcgatgcccggcatattatcggctccgggccctttgtggtgcaggatgaaaagccaggccgcgagctgacgctggtggcgcgcaaggattatcagtgggggccgaaaaacagtgcccagcagggaccggctaacctcgacggcatcacctatattgtgacgccggaagatagcgtgcgcatcggcgcgttgctggcgggccaggcgggctttattcgccaggtgcaggcctacgatgagaagcaggcgaccgatcaggggtttaaggtctacgcggcccctacccgcggggtcaacgacagcctgagcttccgcccggataaccctctggtcgccgacctgcgggtgcgtcaggccctgctccatgccaccaacgccaggcaggtggtggagacgctgttctccgctaactacccgcaagccacctccgtactggccagctctgccgccggctatgtcaatctgagcgatatatag

SEQ ID NO: 218996 - DNA, 732 bp, Klebsiella pneumoniae
atgagtgaaatgatttacggcatccatgcggtgcaggcactgctggagcgcgcacctgagcgttttcaggaagtttatattctgaaaggccgtgaggataagcgcctgctgccgctgatccatgccctggaagcgcagggcgtggtgattcagctggccaaccgtcagtttcttgatgagaagagcgaaggcgcagtgcaccaggggatcattgcccgcgtgaagccggggcgtcagtaccaggagaacgatctgccggatctgctggcgcaactcgatcaacccttcctgctgatcctcgacggtgtgaccgatccgcacaatctcggcgcctgtctgcgcagcgccgacgctgccggggtgcacgcggtaattgtgccgaaagatcgttccgcgcagctgaatgcgacggcgaagaaagtcgcctgtggcgcagcggagaacgttccgctgatccgcgtcaccaacctggcgcgcactatgcgcctgctgcaggaagaaaacgtctggatcgtcggaaccgctggcgaagccgaccatacgctattccagagcaaaatgaccgggccgatggcgctggtgatgggggcggaaggtgaaggtatgcgccgcctgacccgcgagcactgcgatgagctgatcagcatcccgatggcgggcagcgtctcctcgctgaacgtctcggtcgctaccggcatctgtttgtttgaagcagtacgccagcgcagctaa

SEQ ID NO: 218997 - DNA, 405 bp, Klebsiella pneumoniae
atgggatggactcctcgagcgctcgcgagtgcgctccagcaggcacctgagttaaatgtaaacatcgatgataacgagcattcatttatcattataatgaatgattacggcgatctacgacttaatgtattatttacctcccgacaaataattattgaaactattatttgtccgctgagcactattcagcggcaggacttgtttaacgccttcattttacgccatcaaaaattactccctctctcctcggtcgcgatatcccgtcttaagaatgatgaatattatgtcgcgtttggcgccctgtcgctcaattcctcgctggaagatgtggtgctggagatcgcgacgctggccgctaatgcattagatcttgctgagttgatagaacaatatacgaacgaataa

SEQ ID NO: 218998 - DNA, 699 bp, Klebsiella pneumoniae
atgggaatattaaagagcctgtttacgctgggtaaatccatggtctcgcaggccggagagaccattgaggaagcgcagggcgtcaggatcctcgaacaacatattcgcgatgcaaaaagcgcactggataaagcaggccaatcgcgtgtcgacctgctcgcacgggtaaaactaagcaacgataaactgcaagatctgcgtgcgcgtaaagacatgctggaagcacgtgccctggaggcgctgaataaaaatgtcgctgcggatttgattaacgaagtcgctacagagattgcccgcctggaaaacgagattgctgtagaaaagcgcgtgctcgctaaccttgaatcctcgcgcgatggcgttgagcaggccgttcatgcgacggctcaacgtatcgcccagtttgaacagcagctggaagtcgttaaggcgacggaagccatgcagcgggcgcagcaggcggtcacaacatccaccctcggggcgtcttctcgggtctccaccgcggcggagtcactccggcgtttgcaaacccgtcaggcggaacgccaggccagactggatgctgctgcgcaactggaaaaggtggcggatggaagcgatctcgttgagaagctcgcgcaagccggcattggtacaaccgacaaaagcgcggctgaggatgtactggcgcgtctgcgtcgacaacagagcaaatga

SEQ ID NO: 218999 - DNA, 660 bp, Klebsiella pneumoniae
atggcccatttttttcagcgtctttttgctaaaaagagtacgccggctcccgtatgcggtccgctggggttacatcttaaagcgggttttacgctggagaccctggcgtttcgcctgctggaggataaccttctggttgagctgccgggcgaggcatataccattgccgcgaccggtcaaattgatttggggggcggtagccggatttatcgttactacaccagcggcgatgagtttctgcaaattaatactactggcggggcggatgtcgatgatatcgatgatattaagctctttgtctatgtccaaagcgatggtatcagccaggaaaaacactggcgttcggcaatcagcccagcgagtattggtaccccgacatttagctggcgccagcagcgttggcagcgtttttttaacggcggcgagccagggaacattgcgccagtttatatgctggagaaagtcgaaaatcagcagcatgccgtatgggaggttcataattttacgatgggctatcagcggcaggtagcggaagagatgtgggagtacctgctgctaaacggagaagagtcgtttaatgaccggggagaatctgaatggctcttctcatacgcgttgggagtggatattccactcacctcactggatattattgggtaa

SEQ ID NO: 219000 - DNA, 399 bp, Klebsiella pneumoniae
atgcacgttctgaactcattactggctttttgtacctatttttttatcggtgcagcgatggtgatcttgtttctttttatctattcaaaaatcaccccacataatgaatggcagctgataaaaaataacaatatgtcggcctcgctggcgtttagcggaacgctgttgggatatgctattccattatccagcgcggcgataaacgccgtcagtattgctgattatttagcctggggtgtcattgccctggtagtacagctgattatctatggtggagtacggctatatatgccggcgctaagcgaaaaaattattaatcacaatattgctgcaggcttgtttatgggctctgctgcgctggccggcgggatttttaacgccgcctgcatgacatggtaa

SEQ ID NO: 219001 - DNA, 651 bp, Klebsiella pneumoniae
atggctaaaaaacgtaaatccagatcccgtaatacggcacaaaataacgcccaggccactcacgcttccctcgcgcgggttaatcgccaggcgagcgcggtgcaggcaaagcgaagccgctacagcggcaaatacctgacgctggctattatgggcggcgcggcgttctttgcgcttaaggcctgtagcgatgatacgaatgcggataatggcggtgacggcgtattttactcttccgtcaatgattgtgttgatggcggtaacagcgccagcgtctgcgctcacggctggaacaatgcgaagtcgaacttttatgcccatgtccctaagcaaatgagccaggaaggctgtgagtcgcagtatgtcgactgctattttgacagcatcgatcggagctggacgccgatgatgagcggttttctactcagccgggcagtgcgtaaagatcgcgatgaagaatatgcctattacaatggcggcgcgtcctattcttcccgggctgtatggcgaacatcgtcgggcgcgtatgcctggcgtagtggtaaaaacgatattgccaccagccatacgctggctgcgaaaaaaacggcgactgtttcccgcggcggctacggacgatcgtccagcgcgcgcggccattggggaggttga

SEQ ID NO: 219002 - DNA, 1167 bp, Klebsiella pneumoniae
atgttgcgacacgctattcctgttcgcagggatctggatcggattgccgacgaacacggtttcgattttcatgtcattgacaacgagatctactgggacgagagtcgagcctaccgcttcacattacgccagatagaagagcagattgaaaaaccgaccgccgaattgcatcaaatgtgtctcgaggtcgttgagcgggcggtgaaggacgagcagctgttgcagcagctggcgatcccgccgctatactgggatgcgattgcggaaagctggcgtcagggggatccttctctctatggccgtatggattttgtatggtgcggtgccgacgctccgcttaagttgctggaatataatgcggatacgccaacgtcactgtacgaagctgcctggtttcaatggttttggctgacagacgcccgacacagcggggcgatcccgcgtgacgccgaccagtacaatgccattcaggaacggctgattgcccgctttagtgaactttacagcccggagccgctctacttttgctgttgtgaagggagtgatgaagatcgcacgacggtgctttatctccaggactgtgcgcagcaggcgggtcaggaaacgcgttttctctatgttgaagagctgggactcggcgtcggcggtatgctgaccgatttggatgacaacgttatccgtcgggcgtttaagctctatcccctggaatggatgatgcgagatgataatggcccgctgttgtgtaagcggcgagagcggtggatcgaaccgttatggaagagtgtactcagcaacaaagggttgatgccgctgctatggcggttctttccccgtcatcctaatctgctacccgcctggtttgccaatgaatcgccacagatcgcgccgggcgagagctatgtgcgtaaaccgatcttttcacgtgaaggcggcaacgtcaccatctttaatggccagcagcagattatcgaacatgctgatggagactacgcggaagagccgatgatctttcaggccttccagcccttgccgcgctttggtgacagctacacgctgattggcagctggatcgtggatgatgaggcttgcgggatggggatccgggaggataatacattgattactaaagatacttctcgttttattcctcactatataaccggctaa

SEQ ID NO: 219003 - DNA, 2127 bp, Klebsiella pneumoniae
atgctgatgaaaaaatggtatgtttggctggcgcttatttttctgccattgctggcctgggttctggttgacgaagggacagcaaccgcctcacatccacgggattgccggttatcaacttacgttgattatgatccagcgccggtttttactcgctggcagtggataccaagcaaagagtgggacccggccaataccgccagtgatggtaatattctgctctggtcagatggcaagaaacgtgtggcggcgaatgaagcgacgctgctgattgacggcaactggcaaacgctggcaccggtattatctggcttacttgaaaaggaaaattttaaactccggacaacatcaatgccgatcattcgtctggaaaaagattggggacaggtgctcttgtcacgccgcccggagatagccgtgcgtctggcgcaacaatttatcgcgcccacactacaacgggcggcgcaagagggagacatcacgccagccgaaggcgaacaaaaaatcgaatgggcaatatcgcaacacctgctatggggtgtctggagagatccgaagcagttgcaaccagaattacagcaggacatcccttttattatcgccagcaaaacgtacaacgcaggagtcagtaaacgcacaacctacatgcaaataatggatgtcggtttagtctttggccaacccaaagtcgcattaacattaacaacctgcgacataacgccaaacccggaatattccatcaaaaaagccgccgaaaatggcaaggcacggctcgctgactcttcacttttcggcacgaatattcagcgactgcaacgctatttaaccgaccgatttgtgcctgctgaaagtattaaacccgttctggcccagctgaaagaaaataatattaccagcgagttggcttcaacggctttggcctgggtgaaaacaacgccggcagaggataaaacgcctgaacgtcaacctcaggaagcggcgcaatccggaacgattagcgtagaaaccatcgcacttaacgatatcttccccgatactgacgattcacgaacgattgagagctatcaggaacttccgcaaggaaatgccttattcgcgacaacacgctacgaccgagaacagcaaagtaaagtggcggaactatatatcacgaaaccagcagatccacggcaggtcacccaactctggcaaggaaaaaggttgtccaggttaatcttggtgcatcagggagcaaaggcctggttcgaagcgttcccgcgacaatggttctcactggatatctcaaaccataaaatcacggcaatgaccgcagcgcagacagaatctgacgcttattcattagcatcatggttcaacgatatgcacgatgagcccgttgcttactatactgatcacagtgacgaaggaaaagggtgtctggtttttcggcgtatggatccccgccttccggcgacggaaaatgtcatcttcagaacatgccgtaattattacgccatcggtaactccgttcaggcggtacgtatttcaacgccaggctatttctggctggaagacagcaatggattagtcaaacttaacgctaagactggtagagcggaatcatcgtattcggttcccttccgtacggaaggggatcccagaacgctcgtcatgaagttatcgaacgatgatattgcccgaaattcgccgctaccgctgggttctcgtgaagcacactggatagcgttacattatgcatatttgttccctccgctgaataatctgaataaaagaagtattgggacatattttattgatagccttagcggcaaatggcgctttagcgcagaactgaaaaattctgacagcattgatgcaaccgcacgctccgcccatggccgtttttatgctcaggctggttgtgaaaagccatccgggtcgggaacaagaattgatatctgggaggtggcaaccgcgacgagaattgtgtcattacagcgcccgaaatattgtgggttgcaaggaatggcttttaactggcagggaaatacgctgattctggtttatcgcgacgaatggctacgggtaaggatgccggacggaatgcaggatgccgcaagtgtagacgccattcctgagcagggataa

SEQ ID NO: 219004 - DNA, 219 bp, Klebsiella pneumoniae; identical to SEQ ID NO: 23434

SEQ ID NO: 219005 - DNA, 540 bp, Klebsiella pneumoniae
atgaacgtttattatgattatgatatcgaatcggtttttaactgggttaaggaacacttcattctgaagcattccgcttctctcgttaatagcccttggtatgactacgacatagagatagatttgcgcttagttaagcaagcgttgataaatggtaattttgaatttttatatgttgttcgtgatcatggcacaatgttgcttttgctttctgagtttcactcctccaggtctctagactgggaaggtagtgaaagctttgagtactatcattgtaagatgataagtaaacaaggtattaagttgaccaaaaaagcagcaggtgaacttttagatcgtgggcctttactcaactccttcagtgccggaagtaaaaactcctatctgaaagagattttagagtttgttaataataaaggctttaacttttcccctgcaaagtcactttttgactgtaaacgcataggagacgagttaaaccttccctcaatgagtaacttcatagcaagagttgagaaccatatgctccgtatgaactaa

SEQ ID NO: 219006 - DNA, 336 bp, Klebsiella pneumoniae
atgactctgatgactctgacggtactgatgactctgacggctctgatgactctgacggctctgatgactctgacggctctgatgactctgatgactctgatgactctgatgactctgatgactctgatgactctgacggctctgacggctctgatgactctgacggctctgatgactctgatggctctgatggttctgatggctctgatggctctgatggctctgatggctctgatggctctgatggctctgacggttctgatggctctgatgaccctgacggctctgacggttctgatggctctgatgactctgacgtctctgatggttctgtaa

SEQ ID NO: 219007 - DNA, 894 bp, Klebsiella pneumoniae
  misc_feature (677)..(686): n is a, c, g, or t
atgactactgctaaaactaacgctacaactgctactcgtgctaaaacatccacatcagctaaaccatcacgcccggcggctagaaaaattgataaagattcaattttgatggctcatgccaaagcattttatggtgaagaaattccaccatcaaatactggtagtgatatctctaaaatagaaaagggcaccgataacgataagacctacgtctggtatatgactgagtctgtaagccgcgtaatcgagttaaaggcgcttgaagaaagttctaaactgaagcatttagttggttgtgaacgttctgtaatctacagcgttaatgtcggtgatgttttcattaaggagatcaacctcgatgaggctgaacaacttcttgaagagtttcccgatattccacgtgaaaaaacgctcgatgcttttttatcatctcttgatgaaaagtttattgagttgaatattagctccattgttacgtcagaaactcttaacttcggaaaagataagttgatgaaactaggagctgttaaagtaagcaaatggcttgatctggttattgatgaggtgcatgttttttataaacgtgagcactttgttgaaacagttgaatctcgtcatcatgacctcaatgatctgtatggtaaattgaagcctttgatgaaggagtttggccttannnnnnnnnngcttgaagcatcattgaaagatgatgaattgaaagccaaagcagtcatggaaacaaatcaagcgcaagaaattaaaactgttgaaaataatagcattggaaagaggttagatgttacggtatcaagagtgctcaagggtgctgcttgtcttgcttttctctatatcggatttgccagtgttatgaatttcattagctattacagatga

SEQ ID NO: 219008 - DNA, 852 bp, Klebsiella pneumoniae
atgaaaagaaccctgacagctgtactggcctgctctctccttgcaggatgcgcgacacaaccatcaagtccagaaaaccgtatgttcaccaagatgcacgaagtatactggcacgctgatcctcagaaatctgttgctgttaatgcgtattctcttgccggtgtacaggtcaacgtagaagaggctgagaatgcgtctggaggcgtcgatgagggtatggcttcgaaaatgcttctgaacactgcgacaggtgctatcactggtggtctcaaggcagggattggaatgttcacagcttcattgtatagcgaaggtgatgcggaatatattcaggtcatgcaatatgtggtctttgtacctaacgaaaaaaacttaccgatcaacgatgattcattggtaaaagcgggtgctaaaactatcattgagtcattaaaagataaacctcaaatcggtggcgctacctatgaagctcaaatgaaagcattgagcgaatgtaagattagcaaagctattgttggtaagtgggatagttgcgagacagcaaaaaatatacctggttctggtagcaataaaacgcgctttttcgatttccaggttattagacctgctactggtgatgaattgaaagagatgaaactgaataaaggcaattattcagtgattcgttatattgactttttccctttagggcttgaatttgatacaaccaatttcccgggatttactttgatgccacaaacacctaaaacagcacctggttatgcaagtgtatcgataaatgggggcgagtattattttatcaaaggcaatatggggcataaagcattcccattgaaaaaagcagttaaataa

SEQ ID NO: 219009 - DNA, 3330 bp, Klebsiella pneumoniae
atgtcgctcacacttgctcctgatggtagcttctctccaatgacaaaagttactttagatgatggtacggagcttaattttaacaaaatttggtcaactccgtcccgtcgaactcttcaacctgtcgccggatatcaggaagttgcgggtaaatttgtttatttttttgatataagcgatctggccagcgcttcttacgttgcaacatattctgtgtctaatacagcgggcaatgattccagttataccgaaccggaatctaaacttatactgtctgatgaaccatctgtttccgttttcaaggacggctcagagcttgttaagcgggaccaggtgtacttcctgaatgagatcgttattgctgcattccagggcgaagagggtgttgccgacatcaagagcgttgtcattgataacgtcatggcttcatacactcccacaaacgtcaaagggatctaccggttaaagccgatgccgtcactcgaaacaaacaaagtccatactttgacggttgttgctgagaatgttaacggtatatccaaaacctattcaatcgattttacctatatgccgatgactttcactctgaagtccatcgaatcagcgtctacgatttacggttacgtccgtccttacacttcgctggttactcagcaatcagggaatacctgtaagattttctctactgaagaagacgctcaggcgtttcttagccagttcggaactgcggtttatggaacggcctgttatgttcagtggaacaacgttccatctggtctcgaattttactcgaagtctaaagttcctggcctgacgggttacttctctaaagttggcgataacgtccttgactacaacgtctatgtgattaatacaaaaggctctaaagccattgccactcataaccgtaaaaccgttaaagccgttgaaccgtttgcacctgaaatttcatacaagatgagtaaaacggtagagactcttggtaaggatacagcactggtttatatcactggtggggacgcagctaaggtgcttgcaaaatcagtaccggctaacgttgtccttacaactaaggttgaaggccaggacgctgaaactaaaacctacaagaataaatcaggtggtgatacgccggtaacttattctgagcgtataaaagtacctgcagcgccattgtggacgcaaacgaatgtaaacatcgaagcttcctacgaaaatgaagccagtataaagtcatccagtgtgctcaaaatttatactgttccaaacttcagtattcgtgcctatatgaaagttgcagagcgtaaatcagcaacgagtttgaaagtaccggtatcggtaaacatcggccaatggaataacagctgtaactgtacattgtacgatgcctccacaatggggcagtgggatgtggtggtttacaaagttacctctaaatgggttacggatgaagaaaccggtaaagatgtttcggtaactgagcgaactcctctgaccggtgatctgcccgttaactctgaggggattgcgaccggtgagctcaacatggacgatctgactctgggtagtcaccgcatcatcgcagtagctacggtacgcagtccgtttaaagattttgtactcaaacgtgagacatcaacaacaagtatcagggtgtataaaggggccaacctcgaaggtgggctgtctaaatcgcttattgtaggccgagttcctctgtcagcaatggtctcattcagaacgaaaagtaccgatgattatgattccctgagtccgactgaatggcagatgtccagtaacaatggatcaacctggaatacgcttgaagatatgaccggacttcgaagcgtaagcatcaaacaaaaagaagtaggtaagtggctttaccgcgccaaactgaccaacaaatacacaggtaaggtctcatataccgataatctcacggtggttgcttaccgggaacctaaacctgttatctcggttggaaaggttcttgaggggcacagcatcccggtgacactgactgataacaatgaagatgtacaaggtagtgcagttgaagtccagtggtcagaggatggagaggaatggactgaggggggggttaaatacatgattacgtcctcggaggtgcccaagtatatctttgcaaaagtacggtataccgaaaccgacgaaatggccgggaaatcggcatggaaagaaactcgtgctcgtgtcactgtcattaagcataagaaattgtcggttaaggttgaggggaactcgcaggtagaggtaggtaaaaaagttactttgcagggtacctacacgaaccctaatatcgagtactcatctgatgctaaagttgtccaggagtgggtgctccctgatggaagcgtaaaacagggggggctgcttgataccgtcctgaccgaagacatgttagatgaacgtgggtatgcaacgtttacgtatcaggcctacatgccggaggcaaaagacagaaccatagcaaaacggaaaatcagcgtaaaatcttgggtatacaaattcccggagccacgcctgaatacaaaactgaaatacaccatgataccttcggaactcaccgtatcagtctctggtgtggatgtttcttatcctggagttgtgttcacccaggactggcaatacgacaaaaatgtgatgacgctgtccagcgacaataacgggacgaaagtgttccaggtaacaaaatcgggtacacatacgttgacgtatgtcctgaaggataacaggaacaatgaagcccgggttgattacacttttatcgtgaacgaacagagtccgatggaaattagcgttactcccaaatactctaacaagttcatgagggccccgctggacctgtccttgaggtccagtgttaagctggcccactcggcagactcaattgacaatgtgacgtttaagctgaatggtaagcctgtcgatggtggcaaaaattactggtcacagacgtttgagaacatcatggaaggtagttataaactggaaatggacgttgtcagtacgcagggtcagagaggggttgttgtggttgattttgacgtgataccgaacacgcctcctacatgtaacctgacatacactgaaacgcaactgagctgggcatttactgcaaaatgcagtgatcctgacggcaagatttccagttatgtttggaaggtgaatgatcaggttcgtggtgtgttcggaagtactgcaacactgtccaaagctcaaaataagggtaagctggtggtgtctataactgcttacgatgacagcggtgattcagcgacaagtttcattacgttgaataactga

SEQ ID NO: 219010 - DNA, 609 bp, Klebsiella pneumoniae
  misc_feature (593)..(600): n is a, c, g, or t
atgactaaaattaataaaatctctttcctgatgttctgttctgtgttcagtgctttttcaaacgcagaatcgataatggtttccggtaccctggaaacgtcattaccagatgtcaaattttctaccagttcacaagtaaatacggccttcgtgaaagaaagtacggttacagctattccggtatctgagggatgcgaggtgtcctctgatcctaatgtcaaaagtacggctggtagcctgaaatgtgtgtttgaatggttacctaataattccggtatgccgattgctaatgggttctcactgaagggcatccctgccatcgctggggatatcaaacttccatggcaaatcgtttactactcgggctcagaacgtgaaaaagtcatagtcaaggaaggggagtacaacttcaagactgttgcgcctgtagctcctgtgattacttctataaaaggttcaatgagcaacggttcttccggttcaacactgacgtcatacattaaaaacgagacactctcaaatattgatataaccgttgaaccccgagactacgatatggtcgcgtctgtcggttctgggacatcctgcgccannnnnnnngggatgtag

SEQ ID NO: 219011 - DNA, 405 bp, Klebsiella pneumoniae; identical to SEQ ID NO: 95520

SEQ ID NO: 219012 - DNA, 828 bp, Klebsiella pneumoniae
  misc_feature (333)..(342): n is a, c, g, or t
atgactattctttcaaatctaagtattgaccttactgattttacaggacgaattcttatcgtcagtgacctttatggacattttgaactgttactcaagggcctttcaaaactgacccagtccggtgatgaagtggttgttataactactggtaatttgtttgactggggcccttccccctgtcagctgcttgaggcagtggtttacaaaaaatttggtgacaggaaagttcattttttcactgtggtaggttttcatgaattacttatgacagatgctattactcaaaagtaccttaaaaccttcaggtactttccggatacacatactcgnnnnnnnnnngataaacatactcgtaaacactggagaagtttaggtggaagctggcatgactcttacgaccagattttgcttgaacgtgatatttataaaatcgattacccactggtaataaatctcaaaacaaaactaggaacatacataattggttcgtcagatatcccccacgatggtggtgactggaacactctcatggcaaccttgaacaagttggataaccaaaacttacgcattatggcgagtaatataaccagaactaggtattttctagaatcaggaaagacaatggatgatatatcgcttgtagtattaggagtgcatcaacctgatcaattaaaacgaattctctcagggcaaactgaactagctaaatcaaccttgtgtctgttccctaacaactgggatggactctcaaatgcaccactggatttcaaaattagatttcttgacatcactgaaagtgaatatgggagttgctatgagttttaa

SEQ ID NO: 219013 - DNA, 717 bp, Klebsiella pneumoniae
atgagttttaagaatttagcttgtgttatcttattgttaccaaacgcaagctacgtaatggcaggctctcagctccagctaagttctgatgttatggttgaccagaaaatgaaaaacattgttgtccaaacaagttattttaaaaacaaaattgacaacacaaaatttattcgaattagcaatcacacaagatcattcccattaatcctctccttaccggaaattaaatactctgtcatcataaaaaatggacacagtacgcttctctcagaagatgatggcatgatttgggtagaacctgggagtaacgtcatactaaaaattaaagaagctgaaaaactctacgatttcattccaatagtctacattacagggaaaaagaaaccaaatgtacttactgttttacccggtaaagcaattagtgctgcaaaagagacaaagctaattgaatataaagtttcaccaaatcaaaaaagaatgtcacatgatgacaaggttgttaagctatcaggctttggtaatataaataaactgaagaaaggtttttatgaagtacaggtcgacaaatttacttctgtgagctttgataaggaggcttttataattacccgaaataatatgcttgcgggatcacaatattacactaaaaatcttgtagcctatccacatgaaaaaataataatgaacattagcggagaaactcatgttgaaaaatag

SEQ ID NO: 219014 - DNA, 465 bp, Klebsiella pneumoniae; identical to SEQ ID NO: 95466

SEQ ID NO: 219015 - DNA, 519 bp, Klebsiella pneumoniae
atgacaaaaaaaagtaacttttcaattttcacttggggcattttgttcagtgtcggtctagggatggggttttttatagggaatttagcaaaggaacgcaccgcgatagttcaaattgtgccatcggaatatacagtgcaagaatcagcgccccctggctttgatgattttaaggtatatgactctgacaaattgctatctgataaggatttcactcgaaagggtagctttgattcaaaaccggatgaaagttttgatgaaaaaagcatcaccacacttgatcagaaaaccaatgaacaggcaatagagttgcctcacattgaactggatagtgatagtcagttctatgagcaactcgaaaataacgttttcaaaaatttacgggctgagcctccttactctgtaccgcagatagatggaaaggtcaggtcattgagggtaaagagatatttaccaccaagtaataaaggtcaatataatgaaaactttgaagctgaaggaattgtgggaagaaaataa

SEQ ID NO: 219016 - DNA, 315 bp, Klebsiella pneumoniae
atgaaaagtcggatggtagaggtcgctgggttaaatcttaaaattaccatacataacaacatgttagctttgagttataatattgatgggctcagtatttacaattcaagtcgtattattcgcaactcaaaactaaccgaatctgagattttcgcaagaattggcgctgatttggttggcaaagttttttctgtaaatatcaagcagataaacaacatcgtacactctaatgtctgcgtaatacctatacagactcaagctaaacaggttaactttgcggctggagtaatggcgtcttgtttcaagaatttctga

SEQ ID NO: 219017 - DNA, 2286 bp, Klebsiella pneumoniae
atgaccctggcgacccgcaccatcaccctgccgggcggcctgcaggccaccctggtgcatcagccgcaggccgtgcgcgcggcggctctggcgcgggtcgccgccggcagccaccacgagccgtcgcactttcccggtctggcgcacctgctggaacacctgctgttttacggcggtgagcgctaccgggacgctgaccggctgatgggctgggtaccgcgccagggcgggagcgtcaacgctaccactctggcccgccgcagcgcgttcttcttcgaggtctccgccggggacctggcggagggcatggcacgtctgggagagatgctgcaggccccgcggctgctcagggacgatattcagcgcgaagtggcggtgattgatgccgaataccgcctgatccagcagcatgagccgtcgcgccgggaggccgccgtgcgccacgccgtcatcgcgcccgcggcgtttcgtcgctttcaggtaggcagcgctgacgcgctggcgggcgatctccctgcgttgcaggcagccttacgcgattttcaccgcacccattacgtcgcccgacgaatgcagttctggctgcaggggccgcagtcgctggaggcgctcggcgagctggcggcacgtttcgccgccgggtttgccgcgggcgaggctccgccgccggcgccgccgctgcgcctgggcgagttcactgcactgcagctggcggtctccagccagcccgcgctgtggcgttgcccgctgatcgctttaagtgacaacgtcacgttactgcgcgagtttttgctggatgaagcccccggcagcctgatggccggcctgcgccagcgccagctggccggggatgtggcgctgaactggctgtatcaggatcggcacctcggctggctggcgctggtcttcgccagcgaccggccggaacaggttgaccggcagataacccactggttgcaggcgctacagcagacgacgcctgtgcagcagcaacactactatcagctgtcccggcgccgttttcaggcgctgtcgcctctcggtcagctgcgccagcgggcattcggctttgcccccggggcgccgcccaccgggttcgccgatttttgcgccgccctgctggccgcccccgcggtcagcctggcctgccagacgcagccccccggagcaacggtagccacccagggctttagtctgccgctcagccgctggcgccgccgcccggtcactgacccggcgctggcgtttgctttttatccgcagaccgctgacaacctcgtggccgacagcccgcaggatgccgcgccgctgctccacctcccgtccccggaagcaccgccgacgcttctgctgcgctcccctttctacggttcgcccgatctggccaaagggctggcgcgcggggaacagctgcgcccactgcttgccgccctgcgccacgccgggggatacggcgagtggcatctgttcgacggcagctggcagctgatcctgcagctgccagctgccggccagcgcccggcggcgatcctgcaggccatcgtacggcagctcgcgctcccggtcgccccgctgaccccgccgccggagagtattgcgatccgtcatctcatggcccagctccccgaacggctgggtacgtcagcgcaccaggaagggtggctggcggccctggcgggcggcagcgcggaagatgcgcagtgggtagcgcgtcagctgagcctgattaccgccccggttaatctgccgatgcccgctccggccccctgccgccgcggtgtcgggcggctggctttccccggggacggcacggcgctgctggtctttattccgctggcggaaggcgcctcgctggcggccctgcgggtgctggcgcagtactgtgaggcgccgtttttccagcgtctacgggtggagcagcagattggctatgtggtgagctgccgctatcaacggctggccgatcgcgacggactgctgatggcgctgcagtcaccggatcgccgccccggggagctactgcgctgctgtaaaacctttctgcgccagctggcgccgatcgatgaggcgaccttcaggccgctacagcagcggctggccgcccaggctcgcgcccgaatcccccccgaggagcaggcgctggacgccctgcgccagagatatggtttaccggtggtgacgccgcaggcggctgacgcgctgcgcgttgcagaggtggtcgccctgtggcgtgagatgacccgccggcgtcgccgctggcgagtgctgttcacgacagggagttaa

SEQ ID NO: 219018 - DNA, 1020 bp, Klebsiella pneumoniae
atggcgatttttgatggtcacaatgacctgctgctgaatatctggcttcaccatcgtgaggatccggtgagcgccttctttaccgggatagaaaacggccatctcgactttccgcgtatccgccagggcgggctggccggcggcctgttcgccctctttgtaccgccgcaggagtatattgcccgcgtggcgccgcagtacgccagtcaggcgtgggatccgctggcgatcctctggcagcagctggcgattctcaaggcgatttgcgcccatgacgccacccgcgcgcggctgtgcctgagcgcggcggatattgaacgctgtcgacaggataacgcgctggcaatggtggcgcacatcgaaggcgccggcgggttcgacgcgcaaggcgacgatctgcaggccttttatcgcgccggggtgcgcagcattggtccgttctggaacatcgccaatcgcttcggctgcggggtcaccggcgcctttcccggcagcccggacagcggcccgggtcttacccgcgagggcattgcgctcatcactcaggccaacgccctgaagatgcagatcgatgtttcgcatatgaacgagcatgctttttgggataccgcccgccactccaccgccccgctggtggccacccactccaatgcccacgccctgtgcccgcagccgcgcaatctgaccgaccggcaactgcggacgatccgtgacagcggcggcgtggtgggcgtcaatttcggcaatgccttcctgcgcgccgacggacggcgcgacagcgacacgcccttaaccaccattgtccggcatatcgactatcttattaacataatgggtgaggatcatgtggctctcggctcggatttcgacggcatcaccctgccggacgagctgggcgatgtggccggcttaccgcggcttatcaatgccttgcgggacaatggctatgatcaattggtgctggataagctgcggtggaacaactggctgcgggtattaaaaaatgtttggcaacaatag

SEQ ID NO: 219019 - DNA, 993 bp, Klebsiella pneumoniae
atgaacagattagccctgatccggtttaccagcgccgcggcgctgggattatccaccctgtggtccgccgccgtttgcgccgcggaagatgcgggggcgttcgacaagatccaccagatccacgccggcgacctgaatatgggttatgtggatatcggcccgcgcgacggccagccggtgatcctgctgcacggctggccctatgatattcagagctatgcccaggtggcgccggctctagcgcagaagggttaccgggtgattgtgccgtatctgcgcggctacggcacgacccgtttcctctccgccagcacgccgcgtaacggtcagccgtcggcgatggcggccgatattgtccatctgatggacgccctgcacatcaggcaggcggatctggccggctttgactggggcgcgcgcacggcggatattgtcgccgcgctgtggccgcagcgggtgaaatccctggtttcggtgagcgggtatctgatcagcagtcagcagattggcgaaaaaccgctgccgccgcaggcggagctgtcgtggtggtaccagttctattttgccaccccgcgcggcgaagccggttaccggcagaatacccacgactttgcgaaatttatctggcatcaggcatcgccgcagtggcaattcagcgacgcgacctttgccaaaaccgcccgggcgctggataacccggaccacgtggcgatcaccatcagcaattaccgctggcgcctggggctggacaagggggaagcgaagtatgccggctatgaacaacggctggcggcgctgccgccgataaccgtgcccaccatcaccctggaaggggcgaataacggcgcgccgcatcctgctcccgccagctaccgggccaaatttaccggaaaatatgagcaccgggatctgccgggagcggtgggccataacccgccgcaggaggacccgacggcgtttgtgcaggcggtggtggacgccgatcgtttgtaa

SEQ ID NO: 219020 - DNA, 657 bp, Klebsiella pneumoniae
atgtcgatattaattgcatttttgggcgggatgttaactctgctgagcccctgtacgctgccggtgatcccgctgctgttcgccagcgtccggggccgccgggggcagctggcgattatgctggctggaatggcgctgatgttcggcgcggtttcgtggctggtgacggtcgccagcggctgggtggtgaatctgactctggctggccgcggcctggcgctggcgttcttcgccctggtcgggctaagcctgctttcgcagcgcgtggcgcagcggctgacctcccccctggtggcgctgggaaatcggcttaacaacgccagctcacgccagcgtgactggacaggatcgctgctggccgggctggcggtggggctgctgtgggcgccgtgcgccgggccggtattgggggcgatactcagcctgggctttgtgcatccgggccagacgaccaccggcggattgctgctggcctacggcagcggcggggcgctgatgttattcctgctggggtggtgtggtgcagggttgatcgcccgactgcgtcgcggacaggcgtgcggcgaacggttgcgcaggctggcgggggtggcgatgctggcctcggtggcgctgatcgccagcggcggcgatcgctatctgcaaagtgcgggatga

SEQ ID NO: 219021 - DNA, 882 bp, Klebsiella pneumoniae
atggaaaaacgcttaccagggctggatctcgacgcgctgcgcagctttgtgaccggcatagagtgcggtagcttcgcccaggcagcgctgcgcctgtcgcgttccacctccgcggtcagcgcccagcttaaaaagctggagagccagtgcggtgcggcgctggtggttaagcaaggccgacatcttgcgctgacggctgaaggcgaaaagctgatgagctacgccagacgcctgctggcgctcaacgatgaaactctgcgtgcgctgcagggcgagcggcttaccggcgagattcatctgggcatgcaggaagatttcggtgagtcgctgatgccggggatcctcgggcagtttacccgccaccatccgcaggtgcggatagttgccagggtggatcgcaatggtccgctgcgtcaggcgctggcggaagaggcgctggatctggcgctgctgtggcaaaccgaagatcagggtcccgggctgggcctctgcccgctggcgtggattgcgcatcctgacctggatattcgcgctctgctggcctccggcgagccgctgccgctggtgatgttcgacagcccgtgcctgatgcgatcccgcgctatcgcctgtctcgatgccgcggagatcccctggcaggtggtgttcgtcagccacagcctgagcggcatctgggcggcggtgcaggccgggctgggcctgacgatacgtacccatatcggtatgcccggcaatctgcgcaccgcaggaggtctgctgccagcgccaggtaacctggccgtcagcctgcgacaaaccccgcgtgaggagcaccattccgccgccgtggcgctgctcggcgaactgatgaccgaggccctgcagggatggctcgacaggtga

SEQ ID NO: 219022 - DNA, 1473 bp, Klebsiella pneumoniae
atgtccacattgaatccgattcttgctggttcggcgcagagcattgaggcctatcagcaggttatcgaccagaccagtcaggccgttgtgcagtggctgaagcaacctgagatgtatcaggggaaaagcgttgacgaactgcgtgaacgtatctcccttgaatttaacgaacagggtctgggtaaccaggcggcgattgaccgtgcgattgagtacttcctgaaagacagcctgtcggtgcatcacccgcagtgcgtggcgcacctgcactgtccgagcctggtgattagccaggcggcggaagtgttgatcaacgccaccaaccagagcatggactcctgggaccagagcccgtcggcaaccatcattgagatgaagctgatcgaatggctgcgcgcccgggtcggttatccggctggcgacgccggcgtcttcaccagcggcggcacccagagcaacctgatgggcctgatgctggcgcgcgacgccttcttcgcccgtcagggacactccatccagcaggatgggctgccgggagatatccgcaagtacaaagtgttgtgctcggaaaacgcccacttctcggtgcagaagaacatggcgctgatgggcctcggctaccgctcggtaacgctggtgaaaaccgacgaattcgcgcggatggacgtgaccgatctgaaagcgaagattgcgcaagcccaggctaacggcgagcagatcatggcgatcgtcgccaccgccgggaccaccgacgcgggggctatcgacccgctgcgcgacatcgccggtatcgctgcggaacatcagatctggctgcacgttgacgcagcctggggcggcgccctgctgctgtctgagcagtatcgcgactaccttgacggtctggagctggtggattccgttaccctggacttccacaagcagttcttccagaccatcagctgcggcgccttcctgctgaaggacgcgcgccattacgagctgatgcgttatcaggcggcctatctcaactccgagttcgatgaagagcatggcgtaccgaacctggtgtccaaatcgctgcagaccacccgccgcttcgatgcgctgaagctgtggatgggcctcgaagcgctgggccagaaacagtacgcggcgatcatcgaccacggcgtcacgatggcgaaaaacgtggcggaattcgtcaagtcgcagccgacgctggagctggtgatgcagccgcagctggcgagcgtgctgttccgttctcgtccggcgcagatggcgcagagcgatgcagcggctatcgcgctgctcaaccagcgcgtcggtgatgccctgctggcctccggccgcgctaacgttggcgtgaccgagcacaacggtgtcacctgcctgaagctgaccctgctgaacccggtggtaaccctggatgacgtgaaggttctgctgagtctggtggaacgcaccgcgcaggagctgctggcgcaataa

SEQ ID NO: 219023 - DNA, 741 bp, Klebsiella pneumoniae
atgaacggacgtctctggcgcgggggcatggtgttctgcgggctgatgatcctctgggggctggccagccgcagcggcatccctcactttcttttaccctccccgagggcagtcgccgaggcgctttgggttaatctcgcctatcttggctggcacacgcttatcaccctcagtgagatcctgtgcggactggtgttgggggttgcgctcggcgtcacgctggcgctgggcatgatcctctctccgcgccttcagcgctggctgatgccgctggtgctcaccagtcaggcgatcccggtctttgccctcgccccgctgctggtgctgtggctggggtttggtatgagcgccaaagtggcgatggcggtgctggtaattttctttccggtgacttccgctttctttgacggcctgcggcgggtcaaccacgagtatctcgatctggcgcgcagcatgaacgcttccttcggcgctcagctgcgccatgtccggctgatggccgccctgccagcgctgggctccggcctgcgcatggcggcggcggtggcgcccatcggcgcgattatcggcgaatgggtcggctctgccgaagggctgggctacgtgatgctcaatgccaacgcccggctgcaaaccgatgtctgctttgccgcgctgtttattttagtgctgctgaccattctgctatggctggcggtggacaccctgctgcaccggctgatcgactggtcgccggaataa

SEQ ID NO: 219024 - DNA, 945 bp, Klebsiella pneumoniae
atgagagcatccggagcggtgttgacgctgctgttggcgacctgtggcgcgtcggccgcggaacccgacgagaacgacagctattttccgatctggggcgatgaggcgcgcgccagggggtactcgattccgttaccctacggcgtcaacctcagctatatgaatatccgtcaggatatcatggtcgacagtattaccttttccgggcttaagctcggtaaccatcctatccccagcgatatgttcgccatcgatgctggacatacccgtgagaagagcaaaacggaaaacctgcgtctcgacatgtgggtctttccgtttctcaacgtttacgggctggtggggcatacccgcggatcgtccgtctctcaggtctctgtggattcggatccctcgcagtttcgtggcctggaccgggcgatcgccggcgcggttcatcagctttatcagagtggaaaactgcaggacattgatttcacgcttgattttaaaggcaccacctggggtaccggctttacccttgccgggggatacggcaactggtttgggttagtagacactaactacacccgtaccgatttcgatattctcgacggcagtatctcggcggtcaccgtttcgccgcgcgtcggctatcgtttcagttttcaggggatcgacgggccatcccacctcagcctgtgggtcggaagcatgtatcaggacgtgcagcaggagtttaaaggcgatctcgccgatctacacatgccgccagaacttcagccgcttatcgccgcagtcaacaaagacggcgagggcaaatttgacgttaagcaaaagctgacctcgccgtggaatatgctgattggcgcccagtatgaagtcaccaaaaactttaacgtgctgacagaatttggttttaacgagcgcaatagcttctttgtctccggtgaataccgtttttaa

SEQ ID NO: 219025 - DNA, 942 bp, Klebsiella pneumoniae
atggtgcgtgttctggttctcctgtcggtagtttctctctctgcgccggcaatactggcggcggacggtcacgccatcaaacagcgtgctgacgcggtattgacgctgatgagctataccgtggtccccgacgtaacggccagcgatctcaacatcggttccgggagcaatgacaaacataacctgaccatgacccagtttggtggcggggcaacgctgagcgatgcttttccactgtatctcgaaggcaccctgggctacagtcgttacgacccgcgctttgtggtcagcaatggcgaacagacgcggaatgtgccgaccaaatggaacagtctgaccaccaccggcggcgtcggctgggatttttcgctgcaccgggacagcctcggcggtaacctggtgctgcggccgattgtcaatgtgatgcttggcaccctggccagcgatgcgcgtatcggtagctgggccattgagcgaaagaccgacgccgagctgcaatttcttgacggcggacggttcaacgcctgggggctgggcggggcgctgatgctggattacgaacgcttctccgccacccaggatattgatgccgaactgcgttactcctatatgcatctgcaaagtttcggcagtagcgccgaggtggtacagggcgaggccagcgcggagaatctcggcctgtatctgcgccgccgcgcgccgatagccgactggacgctgctgggcaacccgctgcgttatgtgctggagggggcgcatactgaatttctcggcgagcagcgaggggcgctgggctttaccggtttgacctccctgggggttggcctcgagctggacagcagtaaatacccggtctttatcacccgcacccgattggtggcgcgctatatgttcggcaataacaccacgggctatggcgtaggcctggcaatgagtttttga

SEQ ID NO: 219026 - DNA, 591 bp, Klebsiella pneumoniae
atgccaaatcaactcagtaacatcagtaaaaacagcgcgctgttggttatggattttcagacgatcatccttaacaatttcctcccgcacgaaagcgctggaaacgttatccgcaataccgcatcgctgattgccgctgcgcgcacggcaggcgtaccggtcatttatgtcagcgtcggattccgcaaggggtatccagaggtcagcaagaacaacactatcttcgcttcgattaaggagaatggaatttttatggctgataacgagagcacggcaattcatcctgatgttgctccggcagaaaatgaagtcgtcatcgtcaaacgcagagttggagctttctcgtttactgaacttgagatgatccttcgtgctcaaggcatcgaaaacctgatccttacgggtgtgactaccagtggtgtggtgctttacacagtcgggcaagcttttgatctggattaccgccttatcgttgtgaatgattgttgcgcagatccagaccatgacaccaatatatttttacttgaaaaagtgctacctcaacatgcttttgttaccagttcctctgtaatatcaaaagcctgggcataa

SEQ ID NO: 219027 - DNA, 1203 bp, Klebsiella pneumoniae
atgacccaattctataacagcttctggcggcgaaacctgattgtttgcttcattggctcgttctcaaccgtctttgcaatgaccctgatgctgccctttctgcctttgtatgtcgaagaactgggtgttagcgggcatacagcggtcgttcaatggtctggcgtggcattcagcgcaacgtttatcactgccggtttgatcgccccagtctggggaaaactcggtgacagatatggacgcaaatcgatgctcgtgagagccagccttggcatggcggttactgtttcgcttatggggctggtgacaaatatatggcagctggtcggactcaggttgttagttggcctggcgggaggatactcatccggcgcgacaattcttatcgcagttcaggctcccagagagcgtgcagcctgggcgctggggattgtttcatcgggtgtaatggctggcaatcttgtcggtccacttgccggaggatggctccctggtttgatcggtattcgaaccacatttttctgtgcaggcgtactgatatttctgtcatttatcatgacccttactctcattcgcgaagaagtgcaaaagcctgcggatacagtggcaaaagcaggagtgagctggtcgcagttgcctgcccgtactgtaattatctgcatgctttgcaccggtctgctactgatgctggccaatatgtcgatagagcccattatcacagtctatgtgcgcactctcgtcagcgaggcttctcagataacgaaagtggcgggatatgtgatggcagcagcggcgctgggcagcattatttccgcctcatggcttggaaaactggcggacaggataggacatttacgcattatcacgctggggctgactgcggccggtttgctgctgatccctcaggcatttgtcacttccgggtggcaactgattgccctgcgtttccttatgggactggcgctcggcggcttattgccttgtattgcagcagtgatacgtcatcgtgtaccagaagggatggtgggcagcattcttggctattccgtcgcagcgcagttcgctggccagttcatcgggccactgatgggcggctttgtcggagggcatatcggtatgcgagccgtcttcctggcaaccagcggcatcctgctagccggcgctgcctggaactttaaaatacatcgccagtcagcaacacgctga

SEQ ID NO: 219028 - DNA, 651 bp, Klebsiella pneumoniae
atgagccaggcatcagaagttgaaaaccaattaagaaaactgatacttaacatggagctggggccgggagaacggttaacggagcgctgggccgaagcaacgtttaacgcgtcacgtacgcctgtgcgtgccgcattacaaaagctggagtcagaagggctggtctgtcgtgatgggctacgctggttagtggcaccgatcgatgtcagtgaagttgaacagctgtgtatttaccgggaagtactggaagtggcggcattaaaactctctgccagccagatgacagaagaacaacttaacggtctggaaaacctgctaaaaacgaatactgtggatgcgtcagaagatgtgatggacgatgttggcacacaattccatctccagttggccggtctttgtcagaatgcgtttattttccaggggataagcgatgccctgcgccggctttcacgggcacgatggctcgacaaagcaccgtcaaatcccgcgtgggatgatcatcgagaaataattgctgcgcttcggtcgcgggatactgataaggcagcagaattactcgccattcatctgtgcgaaagccgcctccgccttcttgaggcaatcaattcaagcagacgtagcctgagggcgagggggattgcgatatcctga

SEQ ID NO: 219029 - DNA, 738 bp, Klebsiella pneumoniae
atgctgagaggtaaaagagctgtaattaccggtggtggcacgggatttggtcaggcgctgagcgtatggttagcgcgagaaggcgtcgaggtggatttttgcgcgaggcgcgctgatgatattcaaaaaacctgcagtatcatcacggctgaaggcggaatggcgaaagggcatctctgtgatttaaccctagctgaatccctttctcagttttcttcacagttgttaactttagacaagcccatagacattttaatcctcaatgctgctcagtggctttcaggaacgttagacgatcaatcagagacagaaattatcaataccatcagttcaggactgacaggttctattctgctgactcaggcattgctacccgggttacgacgttcagaaagtgctgatatcgtctcaattatatcttcatgtgggattcctaattttacagattcaattgcgcaccccgctttttttgccagtaaacacgggcttagcgggtttacaactaaactctcgcaccagttgtccgaagaaaatatacgtgtgaccggtttgtatccaccggatttcgagctgacagggttagactctttagccgatagccagaccaaaatgggggaacggctgatgaatgggcgttctgtctgggaaacaattcgctttgtgctgacccaaccgcgtagttgccatatcaagagcatctactttgaaggcccaacgcgcgaaaaactgggagtctga

SEQ ID NO: 219030 - DNA, 480 bp, Klebsiella pneumoniae; identical to SEQ ID NO: 95396

SEQ ID NO: 219031 - DNA, 279 bp, Klebsiella pneumoniae; identical to SEQ ID NO: 185160

SEQ ID NO: 219032 - DNA, 141 bp, Klebsiella pneumoniae; identical to SEQ ID NO: 102204

SEQ ID NO: 219033 - DNA, 306 bp, Klebsiella pneumoniae; identical to SEQ ID NO: 102205

SEQ ID NO: 219034 - DNA, 3969 bp, Klebsiella pneumoniae
atgagtaattacactatttataccattggtgatatcgattttgtttatacggcttttaacgggatcgcgctgattttttcctctcatggttccaatgaatggctcagatttgctgcctatgcagcagcaattggactcttctataaatcaatgaaatgggttcttgctcccacaaaaaatgatgtcccgatcttctcctggatcatggggttattgttctattccattgccgtaattaaagccgatgtcacacttgaatcggttaaaacgggggaggtcaggaacatagacgatgttccggtctttatcgcgtctaccggtgaactgacaaccggattactgcacggtctcattacggactggcgagcagcgtttgacccgcttacgccggtgggccaggtcagcgatacgctcgatgacagcctgacgctaggcccaatgaccaaaatggtcaaatatatggagtggggtggggaatccagtggattctgtcaggctttcccaaatacgatgagcgggagtgaaaaacctgttacttttgatgtctgcagaatcatccagtctattgcacgcgattgtattaaaacgacccaagactcagaggtcaatacaccactcagaggggtggcgttgaatgaaatctatgccacagatcttgcgtcagtaatgaacgtgatggattcaatgacggccaacagcctgaagacagccagcgtcccaatggtgacatcgacaggtttgcagtatgcgtcgtgtacagatgcctgggcggcggttaaagccgcattcgactcgcctcagggcgcgtcaattatgcgtaatttgggtcagatgaatcagtttgtagcaccgcagcaggaggatagcggccaacaaaccgattttatcggaggtgcagccaccacgctttttggaagtgccggtcaggctcacaatatcacgactgctgcatttgtcctcaaccaaatagataaaggtgtgctgcagtatcgcaagtcgttgggtatagccgcagattaccaactctttgaagcgagcatgaaacggaccaacgccatggtcagtcaggggcaactctggctgaacatctcaggcgctgcaatcagttttctcgagatgttcagttatatggttgcgccctttgctctgattgcgatcctcttcctgggaggtgaaggcataacttcagctgcaaaataccttcaactgatagtcttcgttaacatgtggccgataacagcggtcatggtcaatgcatacgtaaaaatggtattaaatcagcagtttgacacatggtcatcgctgggtgtacagaccactatgaactgggcgaatatgggaagtattcaggagacgtacgggagctacctgtccgtagcttcagcgctgtattgcatggtgccgatgctgacactgttcctgttgaccaccagcatccacccgatgatgggagcgttgaaaaatgtcacgccggatgctcctgccaatactggccatgtcacaccagaagtgtggtcggcgggtaatgcgggtaaacagtcctttggtgaccagacacacaccgcagccacttcaaccggtgccggtatgtcatcaggcgggcttctgaatgcagccgttcgtagttctatgccctctctgtcacttggcaataacttgcaggatactgtttctgcagcaggtaggaatgatattggcacgacgcgtcagtcaacgcgaatgacgagtcaaggtctaagtgaggcatggtcgtcagcttttcaggggcagcattctcaaaacgcttccataacgacgcaaggcgggcagaaacttgtggaagatatagcaacaggtataagtaatgggatcggttctaatgttggaatgtcaagtgatgcaattaaagggaaggcaatggcagcaacccttcaggccggtggggatattgcagcgcagcttggtttaggtacaggaaaatcagcaggtgtagcaggtgttatgcctggaaaaatcatggctgccttgaaaggtgcgcttcttgggcaaataagcagcgattcaaaattgtcagatgctgctaaaaaagggatgactgacaatattgagaatatgtttaaatcaggtagtgcgttttcaagtgacctttctaagtatgcttcaaatgtaacacaagatggttttagtagctctgacacatatcagaaagccgctcagaaaatggaccaatatagccagtctattagtaataccgaaacaaatgcattcagcaaaactggtggacaagcatctcaactggctatgagtaacagtctgaatattgatggcaatatgatctcagataccatgagaacaccggcaaccgaggattcagtaagagcttgggcgtcagcttcaggtcttaatgcagatgcgatagctggtcagtggaagtcaacacgcgatatgatgaacaggagtaacacgctcggttctgataaaaatggtaatgatgcctttgcaaaggtattacttgaccaggcgcaagctaaaactcaaatggaatccggggaaaccgtcgccaaaaatctggctgatattaaacagacatctgcgatgttcaaaaatgcagtcagcatgatgggagccaatgaacaaattctttcaccagcagcagaaaaattagatcaatttgtggctttgggaagtggtggacagtatgccaactaccaagagcaggcacaaactgcgcccgatacatcaggtgtctcttcagccggagctattaccggtggcatggatagtcagcgaggtctgacatcttctaatctaggacaacaccaggaagccgctagagttcaacctagcacatcaattggtggcatatctgctcaaacactttcaggtaacaatgggcgccagtatgttgaagatgaagctggaaagggggcatcgcgtgttctttcctctggtgatagagacaagctcaattatattagagaaaatatgccggtaggctctccaaaagaaacatacgaaagtgcgaaacaagctggagacgctgctgatgccacaacaggaaaagcgcagtctctcgttctgggagatcctaaatcaagcgattacaaagctagtacacaacagactatgcaaagtttgcagtcagaagaaccccctaaaagcattgatacctttagatcatcaggtgacagaaccagcgatgctgaaagcgcgctggcccaggctgcactgcatgctgccaacgccaataatcaaataggaaccgcaagagagcagagtttagctgagagcaatgcctatagagaaaaatacaatcaaataaccggaagtaatctctccgaggctggagttgaacgcatagttcgacaagccgctgacggaaaaaataatggctttagtggtggtcttaaggatgtaattagtgctgaagttaatggtactggaacaacaggccgaccagttaccggatctgctgactcatcgcttggtaaggagttgcgtgaaaataacggggcaagcgaacatcccatggataaggcgtccgctgcgtttcaaaagacaggagacgctattcctggccatgaagtagcttcagatttagcacaacgtgttgcgggtattatccctggtgggaatgcactggttccagacattggttcgcaaagaaacgtgccgaatgcaatgggtatatcgaacaatagagctccgggctcacttatcagtaatatcagtaataacatacagttaagtcaggctgttgatagtgcttctgttaacgctggtataaatgatgagaaatttaccaggatgtctgatcaaaatcagatgcttaccgaatcagtacaaaaagcattagctaatgattcgcgatatgggcccgatgtagcggcagaatatcctaagtttatagcaagtttacctagtaacatcggtgtaaatgaagggactaaaatgactaaagattttttagataagcatagaaagaattag

SEQ ID NO: 219035 - DNA, 1356 bp, Klebsiella pneumoniae; identical to SEQ ID NO: 185111

SEQ ID NO: 219036 - DNA, 2940 bp, Klebsiella pneumoniae; identical to SEQ ID NO: 185115

SEQ ID NO: 219037 - DNA, 486 bp, Klebsiella pneumoniae
atgaaaccaacagaagcatatacaatgcttatggagaacgtggcgtcagtgttagattgccgagaacagggcatacaatctggtgtcttgctagaggacatggaagacctggaagcaatcaattggttgaattctttaacattatggcatggtggatacgatagagtttactcacctggcatctttaacggttttcttgttgaatactgtaagcccgagtatgccatcggccttcaacacttttaccctcaactcgcagcgcgagaagggattgaattaactaatgaaatatgggactcatcaatcgatattctaatagacatttatgattatgctttaagaactcgcgaattagatggtaaacagcattggggcgtagtcttcagagatgactatttgcagcaatgggataatgcattcctgaataagagaagaccaagtcttataataccaaatttcttaaaaaaatggttgaggctaagctaa

SEQ ID NO: 219038 - DNA, 135 bp, Klebsiella pneumoniae; identical to SEQ ID NO: 185261

SEQ ID NO: 219039 - DNA, 561 bp, Klebsiella pneumoniae
atgaaaaagaaactgaccgccgccgatatgcacgacccgcaggtcatcgccgagacgccgtggttcagcatgcgtaaggtggggattgatgtcgcctccggcgagcgccgcgacttttattccattcattacccgcgcccggcggtggggattgtggctatccaggatgagaaagtactgctgattcgccactaccgctatctgatcgatcaggtggtgtgggccattccctctggcggcgtcgatgaaggggaagatccggcggtcgccgcgctgcgcgagctgcgggaagagaccggctggcaggcgcaacgcgtcgaggagatcattcgcttcaacccctcctacggcagcagcgatcagctgtttatcacctggctggccaccggtttacgctgggtcgggatggatgcagatcaggatgaggtgatggagaccggctggtttaccttcgacgagataaaccagctgatcgcccgcggcgagatgccggacgggctgtcgctggtgccgctgctgcagctgatggcgcagcggcgaagcggcccgcttacggcttaa

SEQ ID NO: 219040 - DNA, 1050 bp, Klebsiella pneumoniae
atgctgatcaacgctattggtacctactccgccagccagccgctggaatcaatggccatcacccgccgcgacccggggccgcaggatgtacagatcgccatcgcttactgcggcgtctgccactccgatctccaccaggcgcgatcggaatgggcgggaacgctgtatccctgcgtgccggggcatgaaattgtgggtcgggtgaccgcggtcggcaacgccgtctcgcgctacgccgtcggcgatctggtgggcgtcggctgtatggtcgatagctgtcaacagtgcgaagagtgcgctgaggggctggaaaactactgcgaccacatggtgctgacctataacgggccgacccaggacgcgccgggacacacgcttggcggttattcccagcagattgtggttaatgaacgctacgtgctgcggataacccatcccgaagcgcagctggccgccgtcgcgccgctgctgtgcgccgggatcacgacatactcgccgctgcgccactggcacgtcgggccgggtaaaaaagtcggcgtggtcggcatcggcggcctcgggcatatggggatcaagttggcccacgccatgggggcccacgtggtggcctttaccacctccgaatccaagcgtaatgcggccagagcgctgggcgccgatgacgtggtggtgtcgcgcaacgacgacgaaatggcggcccacgtcaaaagcttcgattttatcctcaacaccgtggcggcgccgcacaatctcgatgccttcaccacgctgctgaaacgcgatggcaccatgaccctcgtaggcgctccggccacgccgcatccgtcgccggaagtgttcaatctgatcttccgccgccggtcgattgccggctcgatgatcggcggtattccggaaactcaggagatgctcgacttctgcgccgaacacggcatcgtcgccgatatcgagctgatccgcggcgatgagatcaacgaagcctgggaaagaatggtcaagggtgacgtgaaataccgcttcgtgatcgacagtgcgaccctcgccggctaa

SEQ ID NO: 219041 - DNA, 903 bp, Klebsiella pneumoniae
atgacaccaataagtgcaccggtggcaattgccaccctgccgttcagtaatctggagatccccccgcagccgccgcagatccaacgctcccttgagcaggggaatgtgctctatctgccgcagctggccttttcattaaccgcggcggagcaggggttgctcacgcccgagctggtcgcgccgcggcgcaagaacatcagttatcaacccgactcgcgcacgctcaaaggcgttgccgatcagcaaaaaaccgccgccgtcgcccggctgctggcgcgttatcatcagatgacgctgcagctgatcgacgcgttattgccaggctatggcgaggcgttgcaccatccgcaaaccagtctgcgcctgcatcccatcaccgcctggcgggagaagacctcctggcgcaaagatgactcccgtctgcatgtggatgcttttccgtcacgaccggtcaatggtgagcgtattctgcgcgtcttttgcaatattcacccccgcggcgaaccacgcacctggcgaacgggggagcatttcgataccctcgcggcgcgcttcctgccgcagctgaaaccctggtcgccgtttggcgcctggctgcagtcggccctggggatcaccaaaacccggcgcagccattacgatcatttgatgctggccctgcacgatgcgatgaaaagcgcccctgagtaccaacgacagggggcacagcaggagatcgactttgccgctggcagcacctggatctgcttttccgatcagaccccgcatgcggcgatgcgcggccagtatctgcttgaacagacgttcctgctgccggtaagcgcgatgactaacccgcagctttcgccgctgcgggtgctggaaacgctcctgcaaaagccgttagtggcgcgcaccagataa

SEQ ID NO: 219042 - DNA, 288 bp, Klebsiella pneumoniae
atgcgaaaacctgccccattgccgaaaagtattctgctgcttgagatcctcgggatggggttattaaccctggcctggctctcgcttaatcagtatgtccggctgcctgcgcctgtggccagtccgaccgcggcgctggtgatgatttttgccgggatcctgctgatgatccccgccgccatcgccgtcatgtggcgggtggcgcagattgtggccccgcagttaacgcactcttctaagcctgaaacattgtctgacagagaaaaacgcaatgacgccgaccattga

SEQ ID NO: 219043 - DNA, 273 bp, Klebsiella pneumoniae
atgaaatatgcagctttagtggcaggggcagcattgtttttaacagcgaatgccttctccgctgagattttaacgaaagaagcctttaataaggtccatacccaatataccaaaattggcaccatttcttcgaccggccagacggcgccgagcgatgcccgtgaagaactgattaaaaaggccgatgaaaaaggcgcggacgtcatcgtgctctcctccggtaatacggataaaaaactgcacgtctccgctaatatctataagaagaaataa

SEQ ID NO: 219044 - DNA, 306 bp, Klebsiella pneumoniae
atgaaaagcagtgaaactgaggaaataaccgatgaaatcatcggcgaggcggttctcgcgctgttgaaaacgaatcgcccaattactaccccgaccctgctggtccggcttcggttgatgcaggcgacggagccagattgccagcgacgaaaaatcatcgcggcggtgatcgaagaaatttgcgcaaagctagcccaacaacgcaagcaagcgcctttgcaggtaaagaaaatcaatggccgttgggaatccagaggatcgctggcgcaaagcaatatggcgtcggaaagcaaaaagatccactga

SEQ ID NO: 219045 - DNA, 1065 bp, Klebsiella pneumoniae
atgcagatgacaatgcgctggtttgggccagaggaagataaggtttcattagaacatattcgccaggtgcccggtgtcgagggggtggtcggtgcgctctatgacgtcgctgtgggtgaggtatggccggtggataaaattgaacgtctggtcggtcaggcccatgccgcaggcctgaaaatggaggtgatagagagcgttaacattcatgatgacatcaaaatcggccttccttcccgtgaccgctatattgccaattaccagcagaccatccgcaatcttgcccgctttggcgtcaaggtcatctgttataacttcatgccggttttcgactggatgaagacggatatgaactacgttctaccggatggctcattgacgatggctttcgagaagaaagatatcgataagcggctggaagacgtggtgaaggaggtgctggaaaactcaaacggcttcgcgttgccgggctgggagccggaaaggctggcggaggtgcagaccttgtttgccaaatatagcgcggtagatgacgaaaagctgcgggagaacctggtctattttctgcgggcggtgatcccggtttgcgaagaggtcggggtgaaaatggcgatccacccggacgatccgccgtactcgatttttggcttgccgcgggtggtaaaaaaccgcgacgatctggactggctctgccgggccgtcgattcgcccgccaacggcattacgctctgcaccggctcgatcgccgaagatccggataacgacgtgtacactatcctggccgaatttacccggcgcaagcgaattcattttgcccacgtccgtaatattaagctgatacgggataaagatttttacgagtgcgcccatccgtcagaatacggttctctggatatgtataaagtgatgcaagcgctgtatgacaatgggttcgacggctatattcgcccggatcatggccgttttatctggggtgagaccggacggccgggctatggcttatacgatcgcgccctcggcgtgacctacctgaaaggactctgggaggcattaagcaagcgttaa

SEQ ID NO: 219046 - DNA, 726 bp, Klebsiella pneumoniae
atgaggctccgcgttgcgcccctcgcgctgttaaaacgtctggcgctgcgtttgctgttgatcgccgctgttttctggggcgggggtattgcgctgtttagcgtgctgccggtaccgttttcggcggtgatgtttgagcggcaggtgagcgcctggctgtccggagatttccactacctggcgcactctgactgggtcggtatggatgagatctctccgtggatggggctggcggtgattgccgccgaagatcagaagttcccggaacactgggggttcgacgtatcggcgatagaaaaagcgctggcgcacaatgagcgcaatgagaaccggatccgcggcgcgtccacgctgtcacagcagacggcgaaaaacctgtttttatgggatggccgcagctggctacgtaaagggctggaggccgggctgactgtcggaatagaaaccgtctggagtaaaaagcggatcctgactgtctatctgaatattgccgagttcggcgacggggtatttggtgtggaagcggccgcccagcgctattttcataagcctgccagccagctgacgccgggtgaagcggcgctgctggccgcggtgctgccaaacccgatccgctatcgcgccgacgcgccctcgggctatgtgcgcagccgccaggcctggatcttgcgccagatgcgacagctgggtggggaagggtttatgcgtaaccatcagttaaggtaa

SEQ ID NO: 219047 - DNA, 1044 bp, Klebsiella pneumoniae
atgaatggttataatgtagcaaccgtctttaaacgtgatattttacatcaaaacaaaatcgatgttttacttgagcaggaaggtattcgtcgcgatgaccatctggactatcgatgtgctatttttgatgaacacgacaatgcgattgcaacaggaagttgctttggtaacacattgcgctgtatggcagttagttcatcccaccaaggattcggattattgaataaaatagttacgcatcttattgaggtacagcaccaaagaaacaatgatcacatatttttatatactaaacctgaaagtgctaatttctttctggatatcggttttcatattatcactacggttagtagacaactcgtctttatggaaaacaaattagacgggttcaggaattatctcaaaaaattacaaaaagagacgatctggccacaatcagctgcaataataatgaatgcaaatcctttcaccttgggtcatttacatctcatagaaactgccgctaaagaaaatgacagattgcacttattcatcgtaagcgaggatgttagcctgtttccttatgaaattcgacgaaaattaatcattgatagcactgagcatttaatgaatatatcataccatacgtgtggagattatatgattagtaacgcaacattccctgggtattttatgcacagtaaaaaagatattctcactgctcaagcaatagtagacgtcaacatctttaaagatatagcccggacattgaatattactcgccgctatgttggtgaagaacccaatagtacagtaactaaaatatataatgatgttatgtccacaatgctacctgcggctggaatcgagtgcattattattgacagaaaaatgcatgatggcatcgtgattagtgcttcaagagtacgccaggcaattcatgatggtaaatttggccttctctccgactggttgccttcaacaacactctcattccttaaatcgccatcagcaacatctataatagaaaagatccagaggagttcaaatgtcgttcactactaa

SEQ ID NO: 219048 - DNA, 861 bp, Klebsiella pneumoniae
atggatgaacgcgactttgagcttttaatgacaatagaaaaaacaaaaaatattacacatgctgccgatttgttatatacatcacaatcagccatatctaaaagaattaatgcaatagagcacgaattaggtataacattattgttacgttctcgtaacggagttcattttacaccagctggggaatccgttctgtaccatacaaaaaaggttacagatgaactagcgttgctacggcaaaggataaaaatagataaacacggagtttcaggcacgctccgagctggagtgtcgattaattatgctttataccaactacctgaacttctgaccatttttcgcaataaattcccttacgttgacacacatatcattacagaacatagtcgaaaaatttatctccagttattagacggatacttcgatcttgctattattcgtggggagtttccatggaaaggccataaaaaactcattgattgcgacagaatctatgcaatttgtagtaataaagataaaaataaaccactaaatgaaatctcttttattggtcgaaaaactgataccgtatttgaacgtgagttatctcagtggatgcgtgaaaacaatcataatccggagcggcaaggtatttatgttgacaacattagcacctgtgtggaacttgttgacagagggcttggctggactgttgttccagaaatctgtttgcgccatttcaccggacatagaattcctttatcctttaaaaatggagctcctttcgttcggtctacctggttagtttatacagatgaaataaccgcactcccccaagtaagagcttttattgaaacaattcctacaacatacaggaaatag

SEQ ID NO: 219049 - DNA, 297 bp, Klebsiella pneumoniae
atggaaatatataataaagggattgctggtacgcttgaatccagtgatgccatgataacggttgagccaaatgagagtggaatcgagctctatgtcgatagcgtggtgatgaacgtctatggcagacagataaaagaactgattttaaaaacgctcgcaaccctggaggtggcaaaagctaaggtgacggtcattgataaaggtgctctggaatgcacattaaaagccagacttgagtgtgcggtatatcgtagttgtgatgcatctcgcaaaaatatcccatgggagaatatctga

SEQ ID NO: 219050 - DNA, 912 bp, Klebsiella pneumoniae
atgattcctcgtcaacgacctataaaaaaccgcctgcgccgcactatgatgtttatgaatgctcaaaaacccgggctactaaaggatgcttggatttatggtgccgatagcatcattttagatctggaagacgcagtggctgaaaaccaaaaagatgccgctcgcttttcactatatcacgcattgaaaaatattgactatggcgatactgaagtgattgtcagaatcaatggtctggatacgccgcattggcaggaagatattcgctgtgtcgttgcggctggcgctgatggtattcgtatcgcgaaatgtgaaagtgcgcaggatgtccatctggttgaagaacacgttcttgctgcggaaaaagagtttgctcaggaagaagggcgcacattattaatggccgctcttgaaagcccgaaaggtatattgaacgctctggagatcgtgacagcttcagaacgtatttttggttgcgctatttctggtggcgatttccgtaaaaatatgcatgttcgtattgaagaaggcggtattgagatgctggctgctcgcggaaatatgctgattgcggctcgtgctgctggcgttcagtgttttgatacgatgtatcctcatatcgatgatatcgaagggtttgaagccgaggtcagacaaaacagaaaaatgggtttcgatggaaaaagtatcgttaatccacggcaaataaaatacgtacatgacacatttgcaccaacagtaaaagaaattgcttatgctgaaaaattgatttattcctttgatgaacaaactgaagctggtgttggtgtatataccgtggacggtaaaatggttgatattcctttctttgaggatgcacggcgtattattgcactcgctaaagcttgtggcgtctaccacggaaatctttaa

SEQ ID NO: 219051 - DNA, 1476 bp, Klebsiella pneumoniae
atggacggtaaatatgtgaaaaaggattcacctttttcacgtcgtcatgtaaaaccggtcgaagataaaatttgcgcaaccatccgggaagcttgtgaacgctgtggtgcgcatgatggcatgacattttcttttcacactgagttccgtgaaggcgattatgtcgcggcaatggtcgccagagtattaatcgaagagatgggactaaaagatattactgttgcagccacttcgttaggcaatgcacaggatgttattgcggattatattgaacagggaaaaattatcggtgtacaaacgtccggtgttcgtgggcgaattggcgaggtaatttctgcaggaaaactggccagtccggcggttattcgtagtcatggtggacgtccgcgcgcggtagaagcaggtgaggttcatattgatatcgcctttctggctgcatctactgccgattgttgcggcaatgcaaaaggaacgggggggaaaaataactgtggctcaatgggatttgcaatccatgatgcaaagtatgccgatcacacggtcatcattaccgatacgttagtcgattttcctaatatgccctcctctattgcggctattgacgtcgattgcgtatgtgtagtggataatatcggtgatgcaagcaaaatcgcgacgaaagaagcacggatgacggataacccgcgtgaattgatgatggcggaacaggtagctaaggtgatttccgctacgccgtggtttaaagatggattctcattccagactggtgtcggcggaccgtctcttgcagtaaaccgtttccttgagaaatatatggttgataaccgtattacgatgagttttgctctggggggaaccagcagtgcgatttgtgagttgcaaagtaaaggtctggttaaacatattcttgatacacaggattttgattcaggtgcgattgaacatttaacacagcatccaggtcatcatgaaattgatctgagtgaatatgcgaacccggcaaataaaggggcatacgttaataaacttgattatgtcgtgctctccgcgctagaaattgatacagcttttaacgtcaatgttattactggttccgatggtattctgcggggcgcgccaggtggccatccggacactgctgccgggagcaaatgctgcattattgttacaccattaacacgtggaagaatggcaaccgtatgcgatgaagtagtgacggtgacaactccgggtgattgtgttgatgttttggttacggattacggcacggcggtgaatccgttgcgccaggatattattgattggttggatgatgcagggatccaacatatttcaattgaatctttgcgcgataaagcctattcgattgtcggagttccggataatctgcaatgggaggaaaaagtcgttgcagtaattgaggcccgggatggtactattcttgacgttgtcaaaaaaatcaaaacgattaaataa

SEQ ID NO: 219052 - DNA, 1266 bp, Klebsiella pneumoniae
atggctattcaaattttgtcattattttttctcatatttgctatagttcttggtttttttaagaaaacgaatattggttttgtggcttttggttgtgttctgattttatcgacgattgggggattgaaggcgtctgtagttttagcgtgttttcctgaaaaattatttatcacattacttggtactatgttttttttctgtctgttacagcaaaatcagacactggagctgctttccaggaaaatggttgtggcagtaggaaagcaagcatggcttattccaattattatctatctggtatcatgggggctctccgctgcgggtcctggcgcaatctccgtacagtcagtgatgatcattttcgccgtgtcattagctgtgcaaatgaacgcctcacctgtattattaggttcgatggcgattcttggcgcggtcggtggcacaacatcgccaattgcattgtccggtattattgttactgatattactaattctcttggatatcatggtgtagcccaaccggtatttattgccgtcagtatcgttaactttatatgtgcaatgttgttgtatgtcggatttaaaggttatgcacttaatgcgggaaatcttaattcgattccacagcttccgaaatttaataaaaaacaaacaataagcattgtggctatagttgcattgattgtcgtagtcgtggggttacgctatgatgttgggctggtggcatttacattatcgctcttgcttattttatgcgaggccgtagatgaaaaatcagcagtgaaattaatcccatggaacgtgcttattcttatctgtggtgtgagtgttttaatgagtgtaacaagcttgttaggtggaatagacttgctgtctcacttcctttcatcgctaatgaatgataaaacagcctctccgcttattggtcttacagctgggataatgtcatggttcagttcagcgaatggtgtcgttcttcctacgctaataccaacggttcctggaattgtgaataatattggcggtggaattagtttgcctgagctggtgatggcaattgtaggtggtgcgacagttgccggaattagtcctctttcaacaggcggtagccttattctggcaacttatgcgcaggaagcaaaggtttcagataatgctctacaatcgatattttccagactcttcttgctgtctttcggcgttgtagtcgtagtgatgatttttgctggagtgaatggttttaaattatttgtgacaggagtgtaa

SEQ ID NO: 219053 - DNA, 1050 bp, Klebsiella pneumoniae
atgatgaatggattactatttgttggctgccgtacgacgaaagaacgaggtgccagaggtaaaggaattaaagcatttgagaccaatacgactaccccaggagtgttgaagcatttaacctctgggctggttaatccctcatggttgtgcctggatgaaaaaaaagaatttctttataccattcatggtgatatgagcgatgtgtctgcattttctattaataaaattaacggaggattaaccaggattaataccgtgtctacggctggtgaaaatcctgtccatatttcaatagacaagactaaccgctgggtttttgtcgccaacctgcagacaggaacaatttccgtaattccacgaaactctgatggtagcctcgggaatttacataaattgtatactattccgggcctgaccgacggcgcaatttctcatcctcatcaggtattccaggatatatctcgtaactacctggttgtcccatgtcaggggcgaaaatatggctttggacagatagttgttttccgtattaattcagtcgatggcacgctggaagaaacatgtacggtacgtagtcgtgaactggcggaaccaaggcactgcgtatttcatgccagtaatcgctactgttattgcgttaatgagaaagattttactattaccgcctactcttttgatgagacgcaaggggtgttatctcctttccaggtcattcctacgcttccggatacctgcaccgatgatggatgggccagcggtattattatggatcaaacatcgcgtttcgttatcgtgtctaatcgtaagcaaaacagcatttcctcactgctggttgacccaaacactggaaggttaacactaattgatacaatggggtcgtttggagaacagccgaggtttatttatctattgccgaatggtctgttgttagtggcgaatgaattaaccgattctcttgagttttttaatctggatgataatggaaaatttcatcatctaaacatgcagattaaaacggaaagtccggtaagcgctgtttcctggcagtaa

SEQ ID NO: 219054 - DNA, 891 bp, Klebsiella pneumoniae
atgactcacaccacaataaatatgtccatagatatcgtgtgcgaatacttcactcaactagtactacgcgctatgcagacggaggttaatctaacacctaaaccggggttggtcgattcaagaaatagtggtgctcattgtgatatggatctacaggattttcatcgtagcgctaaagcaatatctgtttatgttccggaatttattttatgtgggttttcaactgctaaaaaggatacgcgtttgatcttaagcgagttgcgtattcccgggaaaaaatgtgagcaggcaatgtataaggcgacatctggagtaaatacacataaaggagccctgttctctctgggattattttgtgccgcgattggtcgtcattatgcgttgaatcagtcgttgacgcctcgggcgctaagccatacggtggcgagtatttgtcagggaatcgtgaaccgtgaactgaacggactttctgagcattataatttgacagctggacagttattgtttgttaaatatggacttaccggtgcgcgaggcgaagccgagaatggttatccgttagtgatcaatattgcgctgccctatttccgacagcaaataaagtctggtttaagtcaagattattcattgctaaatacattgttattaatcatgtcatataacaatgacacgaatattgtttcaagaggtgggctgtcatcattgcagtggattaaagattgtgctgaaggtttattacaaaatggcggagttcgttcagcaagtgacttaccggggatttatcagctcgatgatctctgtatttcccgcaacctcagccccggcggcagcgctgatttactgatgttgacctggtttctttcacactttcacgaagaggagagtcaatga

SEQ ID NO: 219055 - DNA, 1035 bp, Klebsiella pneumoniae
atgaacacgataaaagtcgtcggtatcgatctggctaaatccgtttttcagctttgtgtctggatgaatgatgggaccgttgcctggaatcgaaaagtttctcgcagcaagctgttagatacggttcgtcaattcccgccggatacacttattgcaatggaagcttgtgcaacctcgcattactgggggcgaactttccaatccatgggatacgccatccggctcattccaacccaacatgtaaaggcgttaactcgtcatcagaaaaatgatgccaatgatgctctggcaatatgtgagacggcatttcgtccggggattcactttgttgccgtaaaaacggttgagcagcaagatatcaaagcgctgcgttgtgcccgtcagttgatggtcgaacagcgcaccgccgccgccaaccaaattcgtgctctggccgctgagcagggcttcgggttcccggttgggatacatactttgcaacagcgattacccgatttgattgaagatgcggaaaagccggtgtctccggtattacgccatttgctttccactttattggaaaacatccacacactgaatgaatatattcgttcaacagaatatgaaatcgcagtattgtgtcaacagcagccccggtatcgggctctgatgacgataccgggtgttggcccgctcatcgccgccgcttttttaagtgaggttgatgcagaacaatttgctaacggaagacaactttccgcctggtgtggtctggttccccggcaacacagttcaggcgggaaacacatcctcacttcgatgactaaaaatggtaactgcgaccttcggacactcatcattcatggcgccagagcagtcatccgctgtgtccaaaagcgggatgaccgtcttggaagatggcttaatcatgtcactgagcgacggggaaaaatgaaagccaccgtggcgctggcaaataagttaacacgtgttgtctggcggctgctgtctgaaccggttgatttcaatatggacaaggcatttgcgatgaagtaa

SEQ ID NO: 219056 - DNA, 516 bp, Klebsiella pneumoniae
atgccgatcataccatttatccccgatgaagaacgacgcctgatgcgaaaagaagcccagaaaacccgtgataaaaaccatgccagacggctcattgccgcactgatgctacatcagggaatgactgtcactgacgtcgctaaaatgctttgcgccgctcgttcctccgttggaagatggataacctggtttactttacatggcgttgaaggattaaaaagtctcaggcccggatatgctacacgatggccggttaacgatatccttcaggctctgccgctgctggtacaacgctccccgaaagattttggctggctacgctcgcgctggagtacagaattactggcccgtattattaatcagctttttaatgtgacgcttcatcgctccaccttgcaccggtatctgaaacaggcgggcattgtctggcgcagagccgcaccaacgctgaaaatcaaagacccgcactatgaggaaatacggcttgccatcaaacaggctctggttcaggagtag

SEQ ID NO: 219057 - DNA, 525 bp, Klebsiella pneumoniae
atgaaagaaattgatatcaaattgaaaattgtagagtttcttttaaactctgaacccgctgatacatacctagctgctgaggttagatttagtttcgggtcaagacgtgctgatatcgtttcaatttcatcggatattgcaactgtttatgaaataaaaagtgaaaaagattccgttgaaagacttgtttatcaaatagatagttataaagaatattttgattactgttatatagtttgtgtgaatcaaaatttagatgcggtcaggaagaaaattagcacgaatgtgggtattattgtcgtggatgatattagtgttaagagaattagaaaggcaaagcgtattgcccggcaagaaaaattatgtttagcgagcactataccagtgaatgaattgaaaaagatcgttatgaataaaaaagggctatcaaaatacgagttatgtatttcgttagctaatgataaatcccttgctgaaataaagagcttatcgagaaagtttttattaaataatatcaccagatga

SEQ ID NO: 219058 - DNA, 1002 bp, Klebsiella pneumoniae
atgaagactcgggacgctgagttaaaagcggtgtcaaaactctcttcaggagtatttgatcatattctaccaatttatgagctaacaaagtcacgaaaagccaaaattgctccagatggagacattcatcgtagaatgctgactatcaaagatattcagggagaaagaccttttattttagatttaacatcaaatgagaaatatattaacgatcaaatccgacaacttgttgatgaaaaagatggttattatgaatggagatacttcatcaatctttatagccatttgaacattattccaatgatacacatctatgatgatgaagatttttctgaagtacggagttttgttagcgaaataacaaaaacaaaaaagatactggcattacgccttccacacgatttagatgattattctatttttatcaaacctatcgccgatagtttagaagatgatagtaaattttatgttattttagatgcaggccaagttgaaggagctactgataaagaagaagagtatttttcaaatgcttgtagtgatctagaaatgtttaatgataaaattgaagatgttatcattgcttgtacatcattcccctccagtccgattaagtatggacacgatgatcgaggtgaaatacctattttagaagaaaaaatattcaaaaaaattagcgaagactatcaagtaaaatatggtgattatgcttcaattaatattgagcaaattgaaatgaaaggagggacttttgtaccaagaatagatatttctttggaggataagtttatctataaaaggtatagaagagacgccggaagttatccgttgtgtgcagcaatgatggtaaaagatgtacggtatacaccaattgggatatgggctgatcatgaaattagtcttgcagccaaaaatacaccttcgggtataagtccatctttttggattgcggtaagaatgaattatttcatgtcaagtcgtgttctattaagaaactcttaa

SEQ ID NO: 219059 - DNA, 543 bp, Klebsiella pneumoniae
atggcgtttatgactaagaaattaaaaagcagtggtgtaataagcggccaagacattgatatgacaacggcttcagagcttattgtttttgctaagaaaaacaatattgaaacaaaccctttagatgtttcaagacttaccagtttgttaggtattacaatgcgactagagccgatgaaaggagaagaatcgggttctctcaaacaagggaaaagcggcaattgggtaatgacggtaaactctttacaccatccgcatcgccaacgcttcactatcgcccatgaactaggccattttattcgccatactctcaatagaaatagttttacagacacggttttcttcagaaatgaagaaacaaataaaatggaagctgaagcaaatagattcgcagccgaattattaatgccagagaatgaattcagtaagtttatagaagaaaaatcaaatcaagtggctgatatagcaacacatttccaagtgtcttcaatggctgtgagaatccgtgctcaacaattaggcttcagtggacataatttataa

SEQ ID NO: 219060 - DNA, 705 bp, Klebsiella pneumoniae
atgtcgataaaagataaggcacaacacggaggtttaagccctaagccaaaactttgccatcatagtaaatggattacttttctatccattgctttctgcaccttagtaactagttttttttggctcttcattttctatttagttctacgcccaagtttttactcttacattggatttgctgataattttgtgcttaaaaagcccgatataatttctgatcccaagacttttcaaaacatcggcaaaatggtcactgatggaacccttttaagtcttgacgatttttggtctttccaaagtaatttatatcaaacaattattactgtgctcattgcactcaatggaatagtagctgcgttttcatttcttattattaaaaactcttctacagcaaaagcaaaagaagaagcgagagatattgctgttgtcgaagtaaaccaatatgtagaaagttcaaaatttgaaaaagaaataaagaaaattttatacgaaaagattgagcctgtacaatttgatttattagctcaaattagttcaattgacgagattaagcttagccaacaagaacacaatcagtcatttgaaaagcttgagcaagaactagatggtttaaaaaggaatcttaaattaattgctgaaagcatttctttaaaagatacctcagatgaagatggcggcaactttatcttaggacggagaacttaa

SEQ ID NO: 219061 - DNA, 186 bp, Klebsiella pneumoniae
atggatactatttggcatgccgaaaaagaagctttccctgtaaatgaggtaggttcaccttgggcgatccttgcgccggctcgcttcgttgctattaaatattcgtctcgtcaatgttcctggaccaaggggatcactgctgatcttaatggcgtattcttcgtcccccattatcaatgtgaatga

SEQ ID NO: 219062 - DNA, 519 bp, Klebsiella pneumoniae
atgaataattattcacccgttgcatctggcggtaatactgtcgatgccgataacacacgcgcatttctgcaacaggctgttgatcattatccgcgattggcggcattcagctttacgctgaaattgccttatcgtgagaccctgaatgaataccggtcattgattttgctctttcatactgaagtctggcagcgaactggcaagtattcgcgccagcgccagcaggcacaccgtcattcaccgccaactattctgcgatggatgtgggagtctgtcagtgccccagagtgcaaaatggtgctgctgatgaatcttgatacgctggggggctgccgcgatgaggtcgtacagcaggacatgagcgggatactcagagaggcatggcgcacggtgacgggcaccgtgtgcaacggcgtaacaagcatcacgccgatgatactcaatcactctggttgcggaaacttcgcgacgccctttagcaagttaaaaatacaggtacaaacgatgcagcccctatag

SEQ ID NO: 219063 - DNA, 1593 bp, Klebsiella pneumoniae
atgagtaaccttaacaactaccctgttgaaagttttcctggaaagttacgtgatgttattgaaacgctgcatgaggatacccttatccccatagaaatgattggcagcacggtgctggcggcgctatcgctggctttacaacctcttcttgatgtagcctctccttatggaaataaaaaaactgaaccctgctcgctttattttttgacgctcgcaaaatccggtgaagggaaaagccctcttcgtgaattacttatgacaccattcgatgagtttgcttctgagatgcacgaggaatatgaaggcttactggatatctacaaacaagaccatgctatctggtcatcaaaagaaaaggctctcaatcgtaattatcaaaaagcagtaaagaatggtggtgatggagatgttgaagaatttcttctgcgtgaacatcaggccgctgaaccgaaaaagcccagggcctttgaaatgttttatgaagatgccacaccggaaggtatcattcagggactgagcgaatatccgtatgctggcgtatttgcagatgaagccattactttctttacaggtcagctaaaaaacaatctgggattgctcaacaaaatatggaaaaacgaaccccttcaggtctcccgaaaaaaagaaggtactatacgcattaatgcatacctgacctttcttctgatggttcagcccgaagtatttgaagagtatctggaacgacatggaaaacgagctgtatccagcggattccttgcccgatttttatttacggaaacaataagtactattggccagagaagaatcagcctgaatcaggataattcaaggcaagcactggacaacctattcactaatttaaataaatttttgaaagagcaaaaggaacatttttacgataccagaaaatctaaaaagacactaacattaactgaggatgcgaaaaaattatttgaagaaaaagtaagtcagtaccaattgaatttagcccaaaaccagtgctgggagcacatcccggaatttgtgtctaaagcaggtagtcatgcaatacgcatagcggccatgtttgactgttattctgaaagagatatcacagagcaaaatttatataattcttttaccattactgagtggcaccttaatcaggcagctaagtatttttataaactaagtgcgcagtatcaacttcagcaagatgtataccagttgttcgactggataaaaaatcgctttgctaatccgacaggtgtaatgaaagtcactaattttcaaacagggcaagtgactgatgtaagacttaatccctggcagccattctcgaagaatgaactggagacgcatggtcccgccagactcagaagaattgaacgtttaacacctgcactcaatcaactcattcagctcggtctgattgtcacaatatgctacccaccacaacgagcacgttatatcgctatggcaggtaccaatccgaatggtaatatatttgccctgaatgttttttttactcaatacaaccttgtggactaccgaaataacgccactccaccactgagtggttacgatttcaacagactgcaatggcaataa

SEQ ID NO: 219064 - DNA, 210 bp, Klebsiella pneumoniae
atgacagatacaacccaaagcctgctcagtgataaaatggtcgatatggcgttcattacggaatttacggggttaagtgataaatggttctataaattaatacaggatggtttgtttccaaaaccgattaaactaggccgcagctctcgctggctaaagagtgaggttgaggactgggttcagaaacgtattaccgagtcccgtgcgtaa

SEQ ID NO: 219065 - DNA, 630 bp, Klebsiella pneumoniae
atgaattttaatactaacaactacggtacactgaaccagaattacgttacacgtattcaggacactatcacaaaagccctgaatgaatatccccgagtaatggttttgaggatagatctccgtttacctgatattgagacgggttcatataaaacggattccgggctggtaacacgtttcgttgtttccctgaaggcacagattgaagcagacttactgaaaaaacgtaatgccggtaaacgggttcacacctgtcatgttcgtcatatctgggcaagggaatttaatgagtgcgggaaaaaacattaccacgtggcgctacttttcaatcgtgaagcatatgcctatccagggagttataccggcacaggcggagaatatacccacaatctggctatgatgattatggaagcctggataagagccttggggctgaataccgttgttaatcatcaacagtattatcctctggtagagtttcctgctaatggctactaccacctgagtaaaaaccacaacgactttacggctcagttatcaaatgtcactgaccggcttaactatctggccaaggactacagcaaagataattcagacaaccagcgtaactttggctgcagtcagtactga

SEQ ID NO: 219066 - DNA, 138 bp, Klebsiella pneumoniae
atgacgctggtcgatttacccggtgccggagaatctctggactatgaccgtgaatacccgcagttgtataaagagcagttaccgacgctggatctcatcctttgggtgataaaagcagaagagcgaacctgtggatga

SEQ ID NO: 219067 - DNA, 825 bp, Klebsiella pneumoniae
atgaaactagtcagtcgttttggacgggtaaatcaggtgcggcgcgaccgcccgttaacccgtgaagaattaatgcattacgtccccagtgtttttagtgagaataaacacgaatcccgttcagaccgatacacctggataccgaccatcactattcttgagaatctacagcgagaaggttttgagcctttctttgcctgccagacccgcgttcgggaccagagcagacgggagcacactaaacacatgttgcgcctgcgtcgagccgggcagttcaccggccagcaggtgcccgaaattatcctcctcaattcacacgatggctcatccagctatcagatgctgccgggattgtttcgtggcgtctgcaccaacggactggtctgcgggcagtcgtttggcgaagtgcgggtgccgcataaaggggatgtggtggagaaagttattgaaggggcttatgaggtactggggatatttgaccgggtggaggagaaacgtgatgccatgcagtcgactctgttaccgccaccagcgcagcaggcgatggcgagggctgctctgcactatcgttttggtgaagaccaccagcccgtcactactgctcagatactgacgccacgtcgttacgaagaccgcagtgatgacctctggacggtataccagcggatgcaggagaacctgatgaagggagggcttgcggggcgcactgcacaagggcgaagcaaccgtacccgtgctgtgaacggtatcgacggcgatgtgaaacttaatcgtgcgctgtgggtgatggcagagaatatgctcgaactgctggggcaggcatga

SEQ ID NO: 219068 - DNA, 249 bp, Klebsiella pneumoniae
atgcggagaaacatacccgtgaacaccgaaactcacccgcaacttccctcaggcccgtttacccgtgagcaggcctcaggcattgcagcgcaatatgacaacgtcgccattgaagacgaccagggaacgcattttcgtctggttattcgttgcgaaggtgtgatggtctggcgggcatggaactttgaacctgaagccggagtgatgctgaatcgctacattgctcgttatggcatccgcaggtactga

SEQ ID NO: 219069 - DNA, 444 bp, Klebsiella pneumoniae
atgaacaacgcattaacggataacaccattccgacagacactctttgtgccacacctgttaaagatgaacagcgccttcgtttctggcctcagcattttggccgtatcccgcagtggataaccctcgaaccccgcatctttgcctggatggaccggttgtgtgcggattacagcggtggcgtctgggctttttacactctcagcaacggtggtgctttcatggctccggaagagagtgaaggttcctggtcgctgttcaatattctgaatggtaacggggctgaaatgagtgctgaagctgcagggattgccgcctgcctgatgacttacagccatcatgcctgccgcacggaatgcgatgccatgacggagcattattaccgtctgcgcgactatgcgctgcaccaccctgaacgcaatgccattatgcacatcatcgactga

SEQ ID NO: 219070 - DNA, 480 bp, Klebsiella pneumoniae
atggaaaaacagttaccgttgtttgcatatgaactgacggcatcagcacaacagaccatccgtgaggcgctggccctgctggagcgccagttacgcgaacccggcgcgtcgtttacctccagcagctcagtacgtgactggttacggctccagctgacaatggaggaaagagaggcatttgttctgctgcttctggataaccagcaccggctgattacgcacgaaacgctgttcaaaggcaccatcagccataccgaagtccatccacgggaagtggtgaaagcctccctgaaatacaatgcggcagcggtcattgttgctcactgtcatccttcaggtcatgccgaacccagtcaggctgacaggcgagtgacagagcgtctgaagaatgctctggaccttgtgggggtgcgtctcctggaccacctcgttatcggcggaatggatatcgtctcgtttgctggacggggctggttgtaa

SEQ ID NO: 219071 - DNA, 222 bp, Klebsiella pneumoniae
atgaaaattatcagtaaacgccaggcgatggcgatataccgccagcatccacagtcccggttgttccgcttctgtaccggcaaatacgcgtggtccggcagcatctgccactatgccggtcgcgaggtggacgatatcagcggtgtactggccgtattcgcagagcgccgccaggaccgcaatggcccgtatgtcgtattacgcagcgtaagcctgaattaa

SEQ ID NO: 219072 - DNA, 360 bp, Klebsiella pneumoniae
ttgtcgaagaaaaccacgatagcaacgcatgatatcagcgaatcctggtgggggctcagacgcattgtctccgcgtgttttggtgcccgactggtccaggagggaaaccgcctgcattacctggctgaccgcgcgaattttaacggacagttctgcgatgcggatttgcgccatcttgaccaggctttcccggtattgatgaaacagctggagttaatgctcacaagcggtgaactgaatccccgtcatcagcactgcgtcacgctgtatgcaaaaggtctgacctgcgaggcggatacgctcggttcgcacggctatgtttatatcgcgatttatcccattcccgtcaccacagaataa

SEQ ID NO: 219073 - DNA, 390 bp, Klebsiella pneumoniae
atgcaaaccaaatcatcccctttaatgcgggcggcatcgtcacgtccgtctcccatgagtgtctggcagaccctgctgacctgcctgctggaacaccactatggcctcacgcttagcgatacgccgttcattgatgaacaggtgattcagcagcatatcgacgcgggtatctcgctggccgatgccctgaattttattgtagaaaagtacgaactggtccggactgaccggccaggattcagcatcctgacgcagtctccgtttatcacacccatagatatcctccgggccagaaaagcaacggggctgatgaaccgtgacacgtataaagaggtgacggctattaccagagggcaacatccgcaggccagcacttcaggcaagcgatga

SEQ ID NO: 219074 - DNA, 846 bp, Klebsiella pneumoniae
atggtcgcgcaaaatgttaatgaacccgaagtattaaccgggcacaccgatgtgatttgctccaccagcattgaacgtattgtcacaggccgtaatgctgcactgacacggattgaggcgctaattcgtcagcttgatgacgtttcccagcttactctcgggattggtggcgacgtagctaatcattgggtgatgcggcagggccattctttcgactgctggttggtgcaacctgtagataaagcgatgccagtcatcacccgcaatatcgactgcagcatctggcgcgatctgatgttgaagtcagggatgctgacattgatggatgctgaggcgcgtagccagtgggctaaaaacctcgaagagggcgatctcccggcaatcagcgaagcgaatatcctgagtacctttgagcaacttcatctcaacaaacaggaggtcttcgagcgtggcatcatcaatgtgttcaggggattaagctgggattacaaaaccaataacccctgttacttcggcaagaagattatcgttaacaatctggtgaagtacgataaatggggctatagcctgagttggggctggcggcgtgaccagttagccgatctggagcgcatgttgttcctgctggatggtaaaaccattcccgataaccggcacgatgtgactatccgactgatggatttcattcgcgataatccacgactgcaggtattcggagatgatctcttcactattcgccttttccaaaagggtagtggtcatatctcgtttaagcgtatggatctggtagagaagatgaacgatatcatcgcgaagcactatccggggatgctggctgctaagtga

SEQ ID NO: 219075 - DNA, 798 bp, Klebsiella pneumoniae
atgatacagaacaatatcaaacagcttcgtactcaactgtcgattacgcagcgcgagttggcgtatatggtcggcaccagccaacagcaaatccaacgcatcgaaaccggaaaggtcgcagcaaagttgggcattgcacaggcaatatgcaatgctctggataagcctttaaacatcgtattcccggaaagcgatcagttgattaacgactttcacaagacgcgccgtaaaaccgatgatgatcttgaggcgatagctacaagcggtattgaaatggacagcggtctctggaccgtaaaactctggctacaggggcagcaggattatttattgttgcccatttctgctgcggataagcggaggttttattattattttcaggaaacaactagtccgaatgtagagcggttttttgtctttgactcggaccagtatcgctatgcgttaaatatgcgtgaagtggtatttcaccagttcttgtctgatggtctaccgccaatcgttgctgaagaatatgatgattacgaagacgattattttaatgtccatatcaccttggtgaacggtggccctgtgattccgctgagcgttgagcctgatgcgccgcaaaacgaagaggcggatgatatcggtcagttgaatgcgttctttgaaaaactggactgcgaacctgaaacgacagatcgttatatgctaaccgacgaagatggagaagatgcttttatccgcattggttctattgccatggtgcgagtcgtacttgacgcgctggagtctgtggaagaagatgaagaatag

SEQ ID NO: 219076 - DNA, 1260 bp, Klebsiella pneumoniae
atgttaactgacagcaagatccgcgccgcgaaatccctcgcaaaatcctataagctcaccgatgcacaaggtctgtacctgacggtatccaccagtggctctaagctgtggtatttccgctaccgttttgaaggtaaggaaaatcgtctggccttcggcccctacccacaggttacgctggcagaagcccgcgagaagcgcgatgcggcacgtaagctgctggtatccggcgttagcccttccctgccccgaaaggcggaaaaagccgccgttgacggcacacgcacctttcagtacatcgccacggcatggcataccagttgtcttaagctgtggtcagaagatcacgccgacaagatcctgacctgcctgaagcgctacgtcttccctgatgttggcgcaatggacattgcagaggttgaaacccgccatctggcgcagcttgtaaaatccatagacgataagggcgtgcatgacgttgccgggcgggtgcgccagcatctgaccaaaatcatgcgccatgccgtacagcagggaacgattaaatataatccggcttacgatctggatggcgtcgtgaccccggttgtgacccaacatcaccccgccctgcccctgaaacgcctgccagagctgctggacaagattaatggctacaaggggcgggaactgacccgtctggcgctggagctgaatctgcacgttttcctgcgctccagtgagctacgcctcgcccgctgggttgagttcaacctgaaagcccatatctggacggtgcctgcacagcgcgatgcggttaaaggtgtaagattttcatcgcgtggcgcaaagatgaaggatgagcatctggtgccgttatccgcgcaggccgtcgccctgctggagcagataaaggaaattaccggagattccgttttcgtgtttgcgggtgcgcactccatgaacaagccgatgagtgaaaacaccatcaacaaggcgctgcgcgtgattggctacaacaccaaaaccgaggtctgtggtcacggcttccgcacgatggcctgtagcgccctgaacgaatccgcgttgtggtcaaaggatgccatcgagcgccagatgagccacaaggagcgcaacggcgtgcgggcggcgtatgtgcataaggcggaacatctggaagcccgtatggagatgatgcagtggtggtcggattatctcgacatgagccacgaggggtacgttgcgccgtatatttatgcgcagcggcataaagtggcctga

SEQ ID NO: 219077 - DNA, 888 bp, Klebsiella pneumoniae
atgggaatactggagcaggaaatgaagcgactggcgcagcaggcaggcggtagccataaaaccgttcacgaccgcattaagctggcgcagcggttttgtgagcgtctggttctggcgcagaatgtgcagatccgccgggtggaacagcttaaggcgcggcatattgaaggttatgttcgtgaacggctggcgcagggcatcacgaagcgttccctgcaaaacgagatggcggcggtacgttgcattctgaaacaggccgggcgtgacaggctggcgcagagtgaacggctgaataaccgttcgctgggattgtccggtgcatcccgcaacggtacgaagctggctatcacgccggagtactatctcgatgtgctggagacggcccgtgcaaaagatccggggctggcgtcagcgctggaactctcaaggctgatggggctgcgttcgcaggaggcggtgcagagcgtacagtcgctgaaaacgtggcgacaggcactggatcgtggtgacactcgcttaaccgtggtgtttggcaccaaaggcgggcgaccccgtgagacgattattcttgatgttgtcgctgtcagaaaagcgctggctaatgcgctgaccgtggcagaggatcgccacggcaggctgattgacaagcccgatctgaaaagcgcaatgaaatactggcatagccaggcgtcgggtcttggcttaactggcgcatactctccgcactctcttcgctatgcgtgggcacaggatgcgatccgccattatctggtgcagggattttgtgagaaggaagcgctggcaatgacggcgatggatttggggcatggcgacgggcgcgggcggtatgtggcgcaggtttacgggagaaaggatggtgctgattga

SEQ ID NO: 219078 - DNA, 1164 bp, Klebsiella pneumoniae
ttgaaaggccgtttgtttattgctgtatctttgctcgcttcgagcgtttcctgcgcatttgccgtcgacttacctgctacggtcgcgccgccttccattcaggctggctcctgggtgctgatggattacaccaccggtcaggtcctgaccgcgggtaacgaacatcagcagcgcaatcctgccagtctgaccaaactgatgaccggctacgtggtcgatcgcgccatcgacagccatcgtatcacctttgacgatatcgtcaccgtgggtaaagacgcctgggcgaagggcaacccggtgttcgacgggtcatcgctgatgttcttaaagccaggggatcgcgtcagcgtccgcgacctcagccgcgggctgattgtcgactccggtaacgacgcctgcgtcgcgctggccgactatgtcgccggcggccagccgcagtttgtcgccctgatgaatcagtatgtcgaaaaactgcacctgcgggacacccatttcgaaaccgtccacggcctcgacgctccgggccagcacagttcggcctatgacctcgcggtgctctcgcgggcgattattcatggcgaaccagacgtctaccacatgtacagccagaaaagcctgacgtggaacggcatcacccagcaaaaccgtaacggtctgctgtgggataaaaccatgaacgtcgatggtctgaaaaccggtcacacctcgggcgccgggttcaacctgatcgcctcggcggtggatggccagcgccggctgatcgccgtggtgatgggggcggatagcccgaaaggccgcgagcagcaggccgccaaactgctgcactggggccaacagaactttgacaccgtgcaggtgctgcagaagggccagaaggtcggcagcgaacgcatctggtacggcgataaagagcagattaagctcggcaccgatcaggatttctggttagcgctgccgaaggcggaagtgtcgcggattaaagcgaaatacgtgctggataagaaggatctggaggcgccgatcgccgccaaccagcgggtcggcgagatttcgctgtatgacggcgacaaggtggtggggcactatccgctggtcactctcgaaagcgtcaataaaggcggggtgttctcgcgaatgagcgattacctgcaccacgagctgtaa

SEQ ID NO: 219079 - DNA, 1425 bp, Klebsiella pneumoniae
atgcaagatagcgtcaaccagcccggatttttattccacgattatgaaaccttcggcaccagcccttccctcgaccggccggcgcagttcgccgccatccgcaccgacgcggagctgaatgtgctcggcgagcccgaagtgttttactgcaaacccgctgacgattacctgccgcagccgcaggcggtgatgatcaccgggatcaccccgcaggaagcgctggccaaaggggataatgaggccgcgtttgcccgccgcatccacgatctgttcacggtgccgcaaacctgtatcgtcggctataacaacgtgcgctttgatgacgaagtgacgcggaatatcttctatcgcaacttctatgacccttatgcctggagctggcagcacgataactcgcgctgggatctgctcgacgtgatgcgcgcctgctatgccctgcgcccggaagggatcgcctggccggagaatgacgaagggttgccgagcttccggcttgaacatctgaccgtcgccaacggtattgaacaccagaacgcccatgacgcgatggccgatgtgtacgccaccatcgccatggcgaagctggtgaaaacccggcagccgcggctgtttgattatctctacagccaccgcaataagcgcaagctggcgacgctcatcgacgtgccgcagatgaaaccgctggtgcatgtctccggcatgtttggcgccgcgcgcggcaacaccagcctggtggcgcccctggcctggcatccggaaaaccgcaatgcggtgattatggtcgatctggcgggcgatatggcgccgctgctggaactggatgccgatgccttgcgcgggcggctttacaccccgcgcgccgagcttggcgatctgccggcggcgccgatcaagctggtgcatctcaataaatgtccggtgctggctcaggccaataccctgcgcccgcaggatgccgaccggctggggatctccattcagcgctgtctggagaatgcccagctgctgcgggcgaatccgcaggtgcgggagaaagtggtggcggtctatgccgaagccgagccgttcgtgccgtccgaaaacgtcgacgcccagctgtacaatgggttctttagcgatgccgaccgcgcggcgatgaaaatcgtgctggaaaccgaaccgcgcaatctgccggcgctggatatcaccttcgccgacaaacgtattgaacgcctgctgtttaactaccgggcgcgaaatttccctggcacgctcgatgaagccgatcagcagcgctggttagagcaccgtcgccaggtgtttaccccggagtttttgcaagcctatgccgatgagctgcagatgctgtatcagcagtatgcggatgataaagagaagctggcgcagctgaaggcgctgtggcagtacgcacaggatattgtctga

SEQ ID NO: 219080 - DNA, 1998 bp, Klebsiella pneumoniae
atgagccataagctgggtgaagtacacgatggcgcggcaaccaccgactggatggcccaggagcaagagcgcgggatcaccattacctcggcggcggtcagctgcttctggccggggatggaccgcagcttcgagccgcaccggatcaatatcatcgacaccccggggcacgtggatttcaccattgaggtggagcgttccatgcgcgtgctcgacggcgcggtgatggtgtatgactccgtcggcggggtgcagccccagtcggaaaccgtctggcgccaggcgaataaataccacgttccgcggctggccttcgtcaacaagatggaccgcccgggggcggacttcttccgcgtggtgcagatgatgatcgaccgcctgaaggctaacccggtgccgattgtgatccccattggcgctgaagagcatttcaccggcgtcgtcgacctggtgaaaatgcgcgccatcctgtgggatgacgccacccagggcatgacctttagctatgggccagtccctgacgagctgttggcgacggcgcagcagtggcgggagaaaatggtctcggcggcggcggaagccagcgatgagctgatggataaatacctggaaaccggtgagctggacgaggcggagatcgttgccggtctgcgccagcgcacggtgaagggagagatccaggcggtgctctgcgggagcgcctttaaaaacaaaggcgtgcagcgcatgctcgatgcggtagtggagctgatgccgtcgccgctggatattccggcgatacagggcgttgatgagcaaggccagccggcggaacgccatccgagcgacgatgagccgctgtcggcgctggcgttcaaactgatgaccgacccctacgtcggccagttgacctttatccgcgtctactccgggacgctgaagaaaggcgatgcggtgtggaacccggtgaagggcaagaaagagcgcatcgggcgtatcgtgctgatgcaggccaacgaccgtcacgaagttgacgaactgcacgccggggatatcgcggcctgcgtcggtctgaaggatgtgaccaccggcgatacgttatgcgatccggatgcggtgattaccctcgaacggatggagtttccggagccggtgatttcgctggcgattgagccgaagaccaaagcgggccaggagaaaatgggcatcgcgctgcagcggctggcggcggaagatccgtcgttccgtctgcataccgatgaagagtccggccagacgattatctccggcatgggtgagctgcatctggagatcattgtcgaccggatgaagcgcgagtttggcgtcgaggccaacattggccgtccgcaggtcacctaccgcgaaaccctgcgcaagaaagtgacggacgtggaaggcaaatttgtgcgccagtccggcggcaaagggcagtatggccacgtcgtactgaccctggagccgctggagccgggcagcggtttcgtcttcgaggacgccaccaaaggcggcgtggtgccgcgcgagtacatcccttccgtggagaaagggctgcgcgaagcgatgggcaccggcgtgctggcgggttatccggtggttgacgtgaaagcgaccctgaccttcgggtcgtaccacgacgtggactcctcggagatggcgttccgcatggcggcgatcttcggcttccgggagggcgcgcgcaaagcggatccggtgatccttgagccaatgatgcatgtcgaggtggagacgccggaagagtacgccgggaatattatgggcgatctctcttcccgtcgcgggatggtgcaggggatggaagagcgcttcggcagccagatcatccgcgccgatgtgccgctggcggagatgtttggttattccaccacgctgcgctcaatgtcacagggacgagcaacctacagcatggagttccaccattacgcggaagcgccgcgtaacgtagcggatgaaatcatcgccagccgcgcgaaaggctaa

SEQ ID NO: 219081 - DNA, 309 bp, Klebsiella pneumoniae
atgatcgccaatcaccccgaacgagaacaaattcgcctggaaaatgtcctttccgcgctcggtaacccactgcgactggagatcatccgcacgctggccgacggcagcgagctgagctgcaacgccctgcgccaggaagaggtggccaagtccaccatgacccaccactggcgcgtcctgcgcgacagcggtgtgatctggcaacggcctcagggacgggagaacatgatttcgctgcgccgggaagatctggacgcccgttttcccggcctgctggatacgctgctgaacgtcatgcagcagccgtga

SEQ ID NO: 219082 - DNA, 3516 bp, Klebsiella pneumoniae
atgtccggaaacatgaaaacaatggatggcaacacggcggcggcctggatctcctacgcctttaccgacgtggcggccatctaccccatcaccccctccacgccgatggcggaaaatgtcgatgaatgggccgctaaggggaaaaagaatctgtttggccagccggtgcgcctgatggaaatgcaatccgaagccggtgccgccggggcggtgcacggcgcgctgcaggcgggagcgctcaccaccacctacaccgcgtcgcaggggctgctgctgatgatccccaatttgtacaaaattgccggtgaactgctgccgggtgtttttcacgtcagcgcgcgggcgctggcgaccaattcgctgaatatttttggcgaccaccaggacgtgatggcggtacgccagaccggctgcgccatgctggtagagaataacgttcagcaggtgatggacctgtcggcggtggcgcacctggcggcgatcgccgggcggatcccgtttatcaactttttcgacggctttcgcacctcgcacgaaatacagaagattgaggtgctggcgtatgagcaactggcgacgctgctggaccggccggcgctggagcgctttcgtcggcaggcgctgcacccggatcatccggtgatccgcggcaccgcgcaaaatccggatatctacttccaggagcgggaggcgggtaaccgcttctacctcgcactgcccgatctggtggaaagctatatggcgaagatcaccgcgctgaccgggcgggaatatcacctgtttaattaccacggcgcgccggatgccgagcgggtgattatcgccatgggctcagtgtgcgacaccgtccaggaggtggtggagacgctgaatgcggcgggggagaaggtggggctgctcagcgtccatctctatcggccgttctcgctggcgcactttttcgcgcaactgcccggcagcgtgcagcgtattgccgtccttgaccgcaccaaagagccgggggcgcaggcggaaccgctgtgcctcgacgtcaagaacgccttctatcaacgcgacgatgcgccgctgatcgtcggcggccgctacgcgctcggcggtaaggacgtgctgcccaacgatatcgccgcggtgtttgacaacctcaggcagccgctgccgaaggacggatttaccctgggtattgtcgatgatgtcacttttacctcgctgcccgcccggcaggaaccgctggcggtctcccatgccgggatcaccgcctgtaaattctgggggatgggctcggacggcaccgtcggggcgaacaaaagcgccatcaagatcatcggcgataacacgccactctacgcccaggcctacttttcctacgactcgaaaaagtccggagggatcaccgtttcgcacctgcgctttggcgatcggccgatcacctcgccctacctgatccaccgggccgattttatcgcctgctctcagcaatcctatgtcgaccgctacgacctgctggaggggctgaagccgggaggcacctttctgctcaactgcagctggtccgagacagagctggagcagcacctgccggtcagcgtccggcgctatctggcgcaggaaaagatcgacttttatacccttaatgcggtggacattgcccgcgagctgggcctcggtgggcgctttaacatgctgatgcaggcggcgttctttaagctgacggcgattatcgatccgcaaacggcggcagactatctcaagcaggcggtggagaaaagctatggcagcaaaggggcgagcgtcattgagatgaaccagcgggctatcgagctggggatggcggcgctgcaccgggtgacggtacccgcccactgggcgacccttgaggcgccggcaccgcaggcgagcaccctgatgccggacttcatccgcgatatcctgcagcccatgaaccgccagcgtggcgacctgttgccggtgagcgccttcgccgggatggaagacggcacctttccctccggcaccgccgcctgggagaagcgcggcatcgcgctggaggtgccggtctggcagcctgacggctgtacccagtgtaaccagtgcgcctttgtctgcccgcatgcggcgatccgcccggcgttactgagccctgaagagcaggacacggctcccgccgggctgctgagtaaacccgcccagggggccaaagactatcactatcatctggccatctcgccgctggactgctccggctgcggcaactgcgtggagagctgcccgtcgcgcggcaaggcgctgcagatggtctccctcgacagccagcgggcgatggctccggtctgggattacgccctgggactggcgccaaaagataacccgtttcgcaaaacgacggtcaaaggcagccagttcgaaacgccgctgctggagttttccggcgcctgcgcgggctgcggagaaacgccctatgcccggcttatcacccagctgtttggcgaccggatgctgatcgccaatgccaccggctgctcttcgatctggggcgccagcgcgccttcgatgccctataccaccaaccatcgcggccacgggccggcctgggcaaactcgctgtttgaggataacgccgagttcggtctcggcatgatgcttggcggccaggcgatccgccaacagatcgccgaggagctaaccgccgcgctggcgctgccggtcagcgacgcgcttcacgccgcgatgcggcagtggctggcgcagcaggatgagggggaggggacccgcgagcgcgcggaccgcctcagtgcgttgctggcggaggaaaaagagggcgtcccgctgctggagcagctctggcagaaccgcgactatttcgtccggcgttcgcagtggatcttcggcggcgacggctgggcctacgatatcggctttggcggcctcgatcatgtgctggccagtggggaagacgtcaacattctggtgtttgataccgaggtctactccaacaccggcggccagtcgtccaagtcgaccccggtggcggcgatcgccaaatttgccgctcaggggaaacgcacgcgtaaaaaagatctcggcatgatggcgatgagctacggcaatgtttacgtcgcccagatcgccatgggcgccgataaagatcagaccctgcgggccatcgccgaggccgaggcctggccgggaccgtcgctggtgatcgcctatgccgcctgtatcaaccacggtctgaaagccgggatgcgctgcagtcagcgcgaggcgaagcgggcggtggaggcgggatactggcacctgtggcgctatcatccgcagcgggaagccgagggcaaaacgccgtttatactggactccgaagagccggaagagagtttccgcgactttttgctcggcgaggtgcgctatgccgcgctgcataaaaccacgccggatctggcggacgcgctgttccggcaaacggaggacgatgcccgggcccgtttcaggcagtatcagcggctggcgggagaggagtag

SEQ ID NO: 219083 - DNA, 882 bp, Klebsiella pneumoniae
atgaccatgcgtcaatgcgctatctacggtaaaggcggtatcggtaaatccaccaccacccagaatctcgtcgcggccctcgccgagatgggtaagaaagtgatgatcgtcggctgcgatccgaaagcggactccacccgtctgatccttcacgctaaagcccagaacaccatcatggagatggcggcggaagtgggctcggtcgaggatctggagctcgaagacgtgctgcaaatcggctatggcgatgtccgttgcgccgaatccggcggcccggagccaggcgtcggttgcgccggacgcggggtgatcaccgccatcaacttcctcgaagaagaaggcgcctatgaggaagatttggatttcgtcttctatgacgtcctcggcgacgtggtctgcggcggcttcgccatgccgatccgcgaaaacaaagcccaggagatctacatcgtctgctccggcgagatgatggcgatgtatgccgccaacaatatctccaaagggatcgtgaagtacgccaaatccggcaaggtgcgcctcggcggcctgatctgtaactcgcgcaaaaccgaccgggaagacgaactgatcatcgccctggcggagaagcttggcacgcagatgatccacttcgttccccgcgacaacattgtgcagcgcgcggagatccgccggatgacggtgatcgagtacgacccgacctgtcagcaggcgaatgaatatcgtcaactggcgcagaagatcgtcaataacaccaaaaaagtggtgccaacgccgtgcaccatggacgagctggaatcgctgctgatggagttcggcatcatggaagaagaagacaccagcatcattggtaaaaccgccgctgaagaaaacgcggcctga

SEQ ID NO: 219084 - DNA, 1449 bp, Klebsiella pneumoniae
atgaccaacgcaacaggcgaacgtaaccttgcgctcatccaggaagtcctggaggtgtttcccgaaaccgcgcgcaaagagcgcagaaagcacatgatgatcagcgatccacagatggagagcgtcggcaagtgcattatctcgaaccgtaaatcgcagcccggggtgatgaccgtgcgcggctgcgcctatgcgggctcgaaaggggtggtgtttgggccaatcaaagacatggcccatatctcgcacggccccatcggctgcggccagtactcgcgcgccggacggcgcaactactataccggcgtcagcggtgtcgacagcttcggcaccctgaacttcacctctgattttcaggagcgcgatattgttttcggcggcgataaaaagctgaccaaactgatcgaagagatggagctgctgttcccgctgaccaaagggatcaccatccagtcggagtgcccggtgggcctgatcggcgatgacatcagcgccgtggccaacgccagcagcaaggcgctggataaaccggtgatcccggtgcgctgcgaaggctttcgcggcgtatcgcaatcgctgggccaccatatcgccaacgacgtggtgcgcgactgggtgctgaacaatcgcgaagggcagccgtttgccagcaccccgtatgatgttgccatcattggcgattacaacatcggcggcgacgcctgggcctcgcgcattctgctggaagagatggggctgcgcgtagtggcgcagtggtccggcgacggcaccctggtggagatggagaacaccccattcgttaagcttaacctcgtccactgctaccgttcgatgaactatatcgcccgccatatggaggagaaacatcagatcccgtggatggaatataacttcttcggcccgaccaaaatcgccgaatcgctgcgcaagatcgccgatcaatttgatgacaccattcgcgccaatgcggaagcggtgatcgccaaatatgaggggcaaatggcggccatcatcgccaaatatcgcccgcggctggaggggcgcaaagtgctgctgtacatgggggggctgcggccgcgccacgtcatcggcgcctatgaggatctcgggatggagatcatcgccgccggctacgagtttgcccataacgatgattacgaccgcaccctgccggacctgaaagagggcaccctgctgtttgacgatgccagcagctatgagctggaggccttcgtcaaagcgctgaaacctgacctcatcggctccgggatcaaagagaaatatattttccagaaaatgggggtgccgttccgccagatgcactcctgggactattccggcccctatcacggctatgacggcttcgccatctttgcccgcgatatggatatgaccctgaacaatccggcgtggaacgaactgactgccccgtggctgaagtctgcgtga

SEQ ID NO: 219085 - DNA, 1563 bp, Klebsiella pneumoniae
atgagccaaacgattgataaaattcacagctgttatccgctgtttgaacaggatgaataccagaccctgttccagaataaaaagacccttgaagaggcgcacgacgcgcagcgtgtacaggaggtttttgcctggaccaccaccgccgagtatgaagcgctgaacttccagcgcgaggcgctgaccgtcgacccggcaaaagcctgccagccgctcggcgccgtactctgcgcgctggggttcgccggcaccctgccctacgtgcacggctcccagggctgcgtcgcctattttcgcacctactttaaccgccattttaaagagccggtcgcctgcgtctccgactccatgaccgaggacgcggcggtgttcggcggcaacaacaacatgaatctgggcctgcagaatgccagcgcgctgtataaacccgagattatcgccgtctccaccacctgcatggccgaggtgatcggcgacgatctgcaggcgtttatcgccaacgccaaaaaagagggatttgttgacgacagcatcgccattccttacgcccatacccccagctttatcggcagccatgtcaccggctgggacaatatgttcgaagggttcgcgaagacctttaccgctgactacgccgggcagccgggcaaacagcaaaagctcaatctggtgaccggatttgagacctatctcggcaacttccgcgtgctgaagcggatgatggcgcagatggatgtcccgtgcagcctgctctccgacccatcagaggtgctcgacacccccgccgacggccattaccggatgtacgccggcggcaccagccaggaggagatcaaaaccgcgccggacgctattgacaccctgctgctgcagccgtggcagctggtgaaaagcaaaaaggtggttcaggagatgtggaaccagcccgccaccgaggtggccgttccgctgggcctggccgccaccgacgcgctgctgatgaccgtcagtcagctgaccggcaaaccgatcgccgacgctctgaccctggagcgcggccggctggtcgacatgatgctggattcccacacctggctgcatggcaaaaaattcggcctctacggcgatccggatttcgtgatggggctgacgcgcttcctgctggagctgggctgcgagccgacggtgatcctcagccataacgccaataaacgctggcaaaaagcgatgaagaaaatgctcgatgcctcgccgtacggtcaggaaagcgaagtgttcatcaactgcgacctgtggcacttccggtcgctgatgttcacccgtcagccggactttatgatcggtaactcctatggcaagtttatccagcgcgataccctggcgaaaggcaaagccttcgaagtgccgctgatccgtctgggctttccgctgttcgaccgccatcatctgcaccgccagaccacctggggctatgaaggcgcaatgaacatcgtcacgacgctggtgaacgccgtgctggaaaaactggaccacgacaccagccagttgggcaaaaccgattacagcttcgacctcgttcgttaa

SEQ ID NO: 219086 - DNA, 219 bp, Klebsiella pneumoniae
atgcccatcgtgattttccgtgagcgcggcgaggcgttgtatgcctatatcgccaaacaggatctggaggcccgggtgctccaggtcgaacatgacgagacggaccgctggggcggcgcgattgccctcgaggggggacgtcgctactacgtcaatccgcagccggggcgacccgtcttcccgataagcctgcgcgccacccgcagcacgctgctataa

SEQ ID NO: 219087 - DNA, 663 bp, Klebsiella pneumoniae
atgtccgacaacgatacccttttctggcgtctgctggcgctgttccagacgctgccggagctgcagccggtgcaagtcgtcgactggctggcgcaggagtgcggcgaaacgttgaccccggcacggttaaccaccctgacgcagcctcagctggccgccagctttccttcggcgacggcggtgatgtccccggcccgctgggcgcgggtcatcgcctgcctgcagggggtgctgcccggccatttgcgcatcgcccgcccccctcagcgaacgccgcagctgcgggtcgctttttgctcgcaggatggcctggccatcaatggtcattttggccagaaccggctgttttttatctatgccttcgatgaccagggcggctggctggcggatctgcgccgctatgcctcttcttctgcggcgtcggacgccagcgagatgcgcgccaggctgctggaggattgccatctgctgttttgtcaggagattggcgggcctgccgccgcgaggttgatccgccatcagatccatccgatgaaagcgccgccgggcacgacgattcaggcgcagtgcgacgcggtaagcacgatgctggccggtcggctgccgccgtggctggcgaagcgcctcaaccgggataaccctctggaggaacgtgttttttaa

SEQ ID NO: 219088 - DNA, 1374 bp, Klebsiella pneumoniae
atgaagggaaaggaaattctggcgctgctggacgaacccgcctgcgagcacaaccagaagcaaaaatccggctgcagcgcccctaagcccggcgctaccgccggcggttgcgccttcgacggcgcgcagataacgctcctgcccatcgccgacgtcgcgcacctggtgcacggccccatcggctgcgcgggcagctcgtgggataaccgcggcagcgtcagcgccggcccggccctcaaccggctcggctttaccaccgatcttaacgaacaggatgtgattatgggccgcggcgaacgccgcctgttccacgccgtgcgtcacatcgtcgaccgctatcatccggcggcggtctttatctacaacacctgcgtaccggcgatggagggcgatgacatcgaggcggtctgccaggccgcacagaccgccaccggcgtcccggtcatcgctattgacgccgccggtttctacggcagtaaaaatcttggcaaccgaatggcgggcgacgtgatgctcaggcaggtgattggccagcgcgaaccggccccgtggccagacaacacgccctttgccccggcccagcgccacgatatcggcctgattggcgaattcaatatcgccggcgagttctggcaggtccagccgctgctcgacgagctggggatccgcgtcctcggcagcctctccggcgacggccgctttgccgagatccagaccctgcaccgggcgcaggccaatatgctggtgtgctcgcgcgcgctgatcaacgtcgcccgggggctggagctgcgctacggcacgccgtggtttgaaggcagcttctacgggatccgcgccacctccgacgccttgcgccagctggcgacgctgctgggggatgacgacctgcgccgccgcaccgacgcgctaatcgcccgcgaagagcaggcggcggagcaggctcttgcgccgtggcgtgagcagctccgcgggcgcaaagtgctgctctataccggcggcgtgaaatcctggtcggtggtatcggccctgcaggatctcggcatgaccgtggtggccaccggcacgcgtaaatccaccgaggaggacaaacagcggatccgtgagctgatgggcgacgaggcggtgatgcttgaggagggcaatgcccgcaccctgctcgacgtggtgtaccgctatcaggccgacctgatgatcgccggcggacgcaatatgtacaccgcctggaaagcccggctgccgtttctcgatatcaatcaggagcgcgagcacgcctacgccggctatcagggcatcatcaccctcgcccgccagctctgtctgaccctcgccagccccgtctggccgcaaacgcatacccgcgccccgtggcgctag

SEQ ID NO: 219089 - DNA, 1386 bp, Klebsiella pneumoniae
atggcagatattatccgcagtgaaaaaccgctggcggtgagcccgattaaaaccgggcaaccgctcggggcgatcctcgccagcctcgggctggcccaggccatcccgctggtccacggcgcccagggctgcagcgccttcgccaaagttttctttattcagcatttccatgacccggtgccgctgcagtcgacggccatggatccgaccgccacgatcatgggggccgacggcaatatcttcaccgcgctcgacaccctctgccagcgccacagcccgcaggccatcgtgctgctcagcaccggtctggcggaagcgcagggcagcgatatcgcccgggtggtgcgccagtttcgcgaggcgcatccgcgccataacggcgtggcgatcctcaccgtcaataccccggatttttttggctctatggaaaacggctacagcgcggtgatcgagagcgtgatcgagcagtgggtcgcgccgacgccgcgtccggggcagcggccccggcgggtcaacctgctggtcagccacctctgttcgccaggggatatcgaatggctgggccgctgcgtggaggcctttggcctgcagccggtgatcctgccggacctctcgcagtcaatggatggccacctcggtgaaggggattttacgcccctgacccagggcggcgcctcgctgcgccagattgcccagatgggccagagtctgggcagcttcgccattggcgtgtcgctccagcgggcggcatcgctcctgacccaacgcagccgcggcgacgtgatcgccctgccgcatctgatgaccctcgaccattgcgatacctttatccatcagctggcgaagatgtccggacgccgcgtaccggcctggattgagctccagcgtggccagctgcaggatgcgatgatcgactgccatatgtggcttcagggccagcgcatggcgatggcggcggagggcgacctgctggcggcgtggtgtgatttcgcccgcagccaggggatgcagcccggcccgctggtcgcccccaccagccaccccagcctgcgccagctgccggtcgagcaagtcgtgccgggggatcttgaggatctgcagcagctgctgagccaccaacccgccgatctgctggtggctaactctcacgcccgcgatctggcggagcagtttgccctgccgctgatccgcgtcggttttcccctcttcgaccggctcggtgagtttcgtcgcgtccgccaggggtacgccggtatgcgagatacgctgtttgaactggccaatctgctgcgcgaccgccatcaccacaccgccctctaccgctcgccgcttcgccagggcgccgacccccagccggcttcaggagacgcttatgccgcccattaa

SEQ ID NO: 219090 - DNA, 471 bp, Klebsiella pneumoniae
atgccgcccattaatcgtcagtttgatatggtccacgccgacgagtggtcgatgaaagtcgccttcgccagctccgattaccgccacgtcgatcagcatttcggcgccacgccgcggctggtggtctacggcgtcaaagccgaccgggtcaccctgctgcgggtggtggagttcccggtcgccagcggtcaccagaccgagaagatagccgagcgcatccacgcccttgaggattgcgtcaccctgttctgcgtggcgattggcgaggcggtttttcgccagctgctgcaggtgggcgtccgcgccgaacgtgtcccagaccagaccaccatcctcggcttgctgcaggagatccaactctcctggtatgaaaaagcgcagcgccgcagcgcgcggcaacgcgatccgcagcgctttaaccgcctgctggaggagccggcgtggcgggaggagcccgacccgctcccctga

SEQ ID NO: 219091 - DNA, 840 bp, Klebsiella pneumoniae
atgtggaactactccgagaaagtgaaagaccatttttttcatccccgcaacgcgcgcgtggtcgacaacgccaacgcggtgggcgatgtgggttcattaagctgcggcgatgcgctgcgcctgatgctgcgggttgatccgcagaccgagatcatcgaggaggcgggcttccagaccttcggctgcggcagcgccatcgcctcctcttccgcgctgacggagctgattatcggccacaccctgaccgaagccgggcagatcaccaaccagcagatcgccgactacctcgacggtctgccgccggaaaaaatgcactgctcggtgatgggccaggaagcgctgcgtgcggccatcgcccattttcgcggcgaaagccttgaggaggagcatgaggagggcaagctgatctgtaaatgcttcggcgtcgacgaagggcatattcgccgggccgtggtgaacaacggcctgaccaccctcgaagaagtgatcaactacaccaaagccggcggcggctgcaccgcctgccatgaaaaaattgagctggcgctggcggcgatcctcgcccaacagccgccagcgcccctgccagcggagacggaccacgatgcgcactggcaaagcgtggtcgataccatcaacgaactgcgcccgcacattcaggccgacggcggcgacatgacgttgctcaacgtcaccccgcgtcaggtgaccgtcagcctctccggcagctgcagcggctgcatgatgaccgacatgaccctcgcctggctgcagcaaaagctgatggagcgtaccggaacttacatggacgtggtggcggccccggccgcggttaactaa

SEQ ID NO: 219092 - DNA, 1203 bp, Klebsiella pneumoniae
atgaaacctgtttatcttgataacaacgccaccacccgtctcgacccgatggttctcgacgcgatgatgccctttttaaccgacttttacggcaacccttcgtcgatacacgattttggtctgccggcgcaggcggcccttgaacgggcgcaccagcaggtggccgccctgctcggggccgactaccccagcgagatcatctttacctcctgcgccaccgaggccaccaccaccgctatcgcctcggcggtggccctgatgccggagcggcgcgagatcatcaccagcgcggtcgaacatcccgccactctggcggtgtgcgagcagctggagcgccagggatacctgatccaccgtatcgccgtggatcagcagggcgccctggatatggcgcaatttcgggcggcgcttagcccgcgcgtggcgctggtcagcatcatgtgggccaataacgaaaccggcgtcatgttcccggtgcccgaactggcggagctggctcatgagcagggcgcgctgtttcactgcgacgcggtgcaggtggtgggcaaaatcccgatggcgctcagccagacgcggatcgatatgctctcctgctcggcgcataaattccacggtcccaaaggggtgggctgcctctggctgcggcggggaacgcgttttcgcccgctgctgcgcggcggccaccaggcgcatggccggcgggccggtacagaaaatatcagcggcattgtcgggatgggcgccgccagcgagctggcgcaggttcatttgccgggcatggcgcagattagccagctgcgcgatcgtcttgaacagcatctccaggccactatcccggcggtgacggtgatgggcggcagccagccgcgggtgcccggcaccctcaatctggccttcgagtgtatcgagggcgaggcaatcctgctgctgatgaatcaggccgggatcgccgcctccagcggcagcgcctgcacctccggctcgctggagccgtcgcacgtcatgcgggcaatgaatatcccctacactgcggcccacggcaccatccgcttctccctctcacgctatacccgggaaaaagagatcgactacgtcatcgccaccctgccgtcggttatcgaccggctgcgcgccctgtcgccctactggcgacagggtcagccgcacctgcaggatggcgccttcacgccggtctacggctaa

SEQ ID NO: 219093 - DNA, 1143 bp, Klebsiella pneumoniae
atgggacgcgtactgattaacgacaccaccctgcgcgatggtgaacagagtcccggcgtggcctttcaggccagcgaaaagatcgccatcgccgaggcgctgtacgcggcggggatcgaagccatggaggtcggcaccccggcgatgggcgaggaggagtgcgcccgcatccggcaggtgcgccgtcagctcccgggcgccacgctgatgacctggtgccggatgcaggcgggagaaattcgccagagcgccgacctgggcatggactgggtggatatctccatccccgcctccgacaagctgcggcagtacaaactgcgcgaaggcttaccgctgctgctggagcggctggcggccctgatccacctcgcccacacccttggcctgaaggtctgcattggctgtgaggacgcctcgcgagccagcgacgcgacgctgcaggacattgcccacctggcccgggaggcgggagccacccgtctgcgctatgccgataccgtcggtatcctcgacccgttcaccaccgcggcgcagatcgccgccctgcgccgcgtctggcccggcgaactcgagatgcacgcccataacgatctgggcctggctaccgccaacaccctggcggcggtgcgcgccggggccaccagcgtgaacaccaccgtgctgggcctgggcgaacgcgcgggcaacgcggcgctggagaccgtggcgctcggactggagcgctgcctggagttcaagaccggcgtgcgtttcaccgccctgccggcgctgtgcgaacaggtggccctcgccacccgccgcccggtggatccccagcagccgctggtgggtgagctggtctttacccacgaatccggcgtgcacgttgcggcgctgctgcgcgacagcgagagctatcaggcgatcgaccccgccctgctgggccgcggctatcggctggtgctgggcaaacactccggtcgccaggcggttaacggcgtcttcgatcggatgggttatcacctgacatcagcgcaaattgaccagctgctgccagcgctccgtcgctttgccgaaaacggcaaacgcagcccgcgggatgatgagctggcggcaatctaccacgcgctctgcagcgccgaaacgctgcaggccagggggtga

SEQ ID NO: 219094 - DNA, 258 bp, Klebsiella pneumoniae
atggagtggttttatcagatccccggcgtgggcgacctgcgctccgccgatgcgttctttcagtttttcgccgttccctaccagcccgagcgcctggcccactgcagcctgccggtgctggccacctttcaccgcaagctgaaggcggaagtgcctctgctcaaccagctggaggataacccgcgcgcgcactggctgctggcgcgccgactgctggcggagagttatcagcaacagttcgaggagaacacgccatga

SEQ ID NO: 219095 - DNA, 444 bp, Klebsiella pneumoniae
atgagaccccgatttacctttagcgaagcggtccgcgtcgtgcgcgccatccgtaacgatggcacctatgcgggcctgccgtccggcgccctgctggtgcgccggggcagcatcggctatgtccgcgactggggagtattcttgcaggaccagatcatctaccagatccacttcccggactgcgaccgggtggtcggctgtcgcgaacaggagctgattgccggcgatcggccctggctggccggcaatctgcagtatggcgatagcgtaatctgtcagacggcgctggcgatgcagggcgagatggtggtcagcgtcggtcagttggggcgcatcgaagccaccgaccggggcgagcacggcgacggctatatcgtcgacttcggcggccgctggttccaggtcccggtaagcgcgctggcgctggcagaggaggaagaataa

SEQ ID NO: 219096 - DNA, 801 bp, Klebsiella pneumoniae
atggagccctggcaacgatttggccggcagcggctggcgcagagccgctggaactgcgagccggcggccatcgccgcggtcgaccggcaggccttcgaggcggcctggcagcgccaggcccagatggagcaggttattgtcgcccagattgcgccggaggcgatccccgccgcgctgcaggagggcctcgccacttcgctgggcgcctggctggatgagggaggatttacgccagcggagcgggcggcgatcgtcctgcaccacgcccggctggaaaccgccttcgccgggattgccagccaggcgccgcggccggatcccgccacggtgcaggcctggtatctgcggcatcaggcgcagtttatgcgcccggaacagcgcctgacccgccatctgctgctcaccgtcgatggcgacgaccagacggtttactcgcgcatacgggagcttcatgggcaaatcgaagcctcccgcgaggcgtttgcgccgctggcccagcgacactcccactgcccgagcgcgctggacggcggactgctgggctggatcggccgggggctgctctatccgcagctggaggaggcgctgtttgcgctggcggaaaatgcgctgagcgcgccggtggccagcgagctcggctggcatctggtctggtgtgaggccattcgccctgccgcgccgatgacgcctgagcaggcgctggaaagcgcccgcgattacctcagtcaacagagccagcgccgccaccagcgccagtggctggccgagatgttagcgcgccagccggggctgtgcgggtag

SEQ ID NO: 219097 - DNA, 531 bp, Klebsiella pneumoniae
atggcgaacattggcattttctttggtaccgataccggtaaaacccgcaagatcgcgaaaatgatccacaagcagctgggggaggccgccgccgccccggtcaatattaaccgcgccacgctggcggacctgctggcctacccggccctgctgttggggacgccgacgctgggcgacggccagttgccgggcctcgaggccgggggcgagagcgagtcgtgggccgagtttatccgcaacctcggcgacgttagcctgcaggggaaaacggtggcgctgtttggcctcggcgatcagcgtggctatccggataacttcgccagcgggctgcggccgctgtacgacgccctgcgtgcccgcggggcgacgatgatcggcagctggccgaacgaggggtatgagttcagcgcctcatcggcgctggagggggatcgctttgtcggactggtgctggaccaggataaccagttcgacgagaccgacgcgcggctggcgacctggcttgaggagattaaaccgcatctgctgtag

SEQ ID NO: 219098 - DNA, 1485 bp, Klebsiella pneumoniae
atgaccctgaatatgatgctcgataacgccgcgccggaggccatcgccggcgcgctgattcaacaacatccggggctgttttttaccatggtggaacaggcctcggtggccatctccctcaccgatgccagcgccaggatcatttacgccaacccggcgttttgccgccagaccggctattcgctggcgcaattgttaaaccagaacccgcgcctgctggccagcagccagacgccgcgcgagatctatcaggagatgtggcataccctgctccagcgtcagccctggcgcggtcagctgattaatcagcgtcgggacggcggcctgtacctggtggagattgacatcaccccggtgcttagcccgcaaggggaactggagcattatctggcgatgcagcgggatatcagcgtcagctacaccctcgaacagcggctgcgcaaccatatgaccctgatggaggcggtgctgaataatatccccgccgccgtggtagtggtggacgagcaggatcgggtggtgatggacaacctcgcctacaaaaccttctgcgctgactgcggcggccgggagctgctcaccgagctgcaggtctcccctggccggatgacgcccggcgtggaggcgatcctgccggtggcgctgcgcggggccgcgcgctggctgtcggtaacctgctggccgttgcccggcgtcagtgaagaggccagccgctactttatcgacagcgcgctggcgcggaccctggtggtgatcgccgactgtacccagcagcgtcagcagcaggagcaagggcgccttgaccggctgaagcagcaaatgaccgccggcaagctgctggcggcgatccgcgagtcgctggacgccgcgctgatccagctgaactgcccgattaatatgctggcggcagcccgtcggctgaacggcgagggaagcgggaatgtggcgctggaggccgcctggcgtgaaggggaagaggcgatggcgcggctccagcgctgtcgcccatcgctggaactcgaaaagcccgccgtctggccgctgcagccctttttcgacgatctgtgcgccctctaccgtacccgcttcgatcccgacgggctgcaggtcgacatggcctcaccgcatctgatcggctttggccagcgcaccccgctgctggcgtgcttaagcctgtggctcgaccgcaccctggccctcgccgccgaattgccctccgtgccgctggcgatgcagctctatgccgaggagaacgacggctggctgtcgctgtacctgactgataacgtaccgctgttgcaggtgcgctacgcccactcccccgacgcgctgaactcgccgggtaaaggcatggagctgcggctgatccagaccctggtggcgcaccatcgcggggccattgagctggcttcccgaccgcagggcggcacctgcctgaccctgcgtttcccgctgtttaacaccctgaccggaggtgaagcatga

SEQ ID NO: 219099 - DNA, 1575 bp, Klebsiella pneumoniae
atgatccctgaatccgacccggacaccaccgtcagacgcttcgatctctctcagcagttcaccgccatgcagcggataagcgtagtgctgagccgggccaccgaggccagcaaaacgctgcaggaggtactcagcgtattacacaacgatgcctttatgcagcacgggatgatctgcctgtacgacagcgagcaggagatcctcagtatcgaagcgctgcagcaaaccggccagcagcccctccccggcagcacgcagatccgctatcgccccggcgagggactggtggggaccgtgctggcccaggggcagtcgctggtgctgccccgggtcgccgacgatcagcgttttctcgaccgcctgagcctctacgattacgatctgccgtttatcgccgtaccgttgatggggcccaacgcccggccaataggggtgctggcggcccagccgatggcgcgccaggaagagcggctgccggcctgcacccgttttctcgaaaccgtcgccaacctcgtcgcccagaccatccggctgatgatccttccggcctcacccgccctgtcgagccgccagccgccgaaggtggaacggccgccggcctgctcgtcgtcgcgcggcgtgggccttgacaatatggtcggcaagagcccggcgatgcgccagatcgtggaggtgatccgtcaggtctcgcgctgggacaccaccgtgctggtacgcggcgaaagcggcaccgggaaagagttgatcgccaacgccatccatcaccattcgccacgggctggcgccgccttcgtcaaatttaactgcgcggcgctgccggacaccctgctggaaagcgaactgttcggccatgagaaaggcgcctttaccggggcggtgcgtcagcgtaaaggacgttttgagctggcggatggcggcaccctgttcctcgatgagattggtgaaagcagcgcctcgttccaggccaagctgctgcgtatcctccaggagggggagatggagcgggtcggcggcgatgagaccctgcgggtgaatgtccgcatcatcgccgccaccaaccgtcacctggaggaggaggtccggctgggccatttccgcgaggatctctattatcgtctgaacgtgatgcccatcgccctgcccccgctgcgcgagcgtcaggaggacatcgccgagctggcgcacttcctggtgcgcaaaatcggccagcatcaggggcgcacgctgcggatcagcgagggcgcgatccgcctgctgatggagtacagctggccgggtaacgttcgcgaactggagaactgcctcgaacgatcggcggtgatgtcggagagtggcctgatcgatcgcgacgtgatcctcttcactcaccaggatcgtcccgccaaagccctgcctgccagcgggccagcggaagacagctggctggacaacagcctggacgaacgtcagcgactgatcgccgcgctggaaaaagccggctgggtgcaggccaaggcggcacggctgctggggatgacgccgcgccaggtcgcttaccggatccagatcatggatatcaccctgccgcgtctgtag

SEQ ID NO: 219100 - DNA, 1407 bp, Klebsiella pneumoniae
atgacttcctgctcttctttttccggcggtaacgcctgtcagtcggcggacgccagcgcgttagcgccgcgggtggccgacaaggtcgccgcgcacccctgctactcccgcagcgggcaccaccgtttcgcccggatgcatcttccggtcgccccggcctgcaatctgcagtgcaactactgcaaccgtaaattcgactgcagcaatgagtcccgtcccggggtgtcatcgacgctgctgactcccgagcaggcggtgttgaaagtgcgccaggtggcccaggccatcccgcagttgtcggtggtcggcatagccgggcccggcgatccgctggccaatatgacccgcaccttccgcaccctggagctggtccgcgaccagcttccggatctcaaattatgcctgtcgaccaacgggctgatgctgcccgacgcggtcgatcgcctgctggaggtcggcgtggatcacgtcacggtgaccatcaataccctggatgccgatatcgccgggcaaatctatgcctggctgtggctcgacggcgaacgctactgcggccgggaagccggggagatcctgattgcccgccagcttgaaggagtccgcaggctgaccgccgcgggagtgctggtcaagataaactcggtgctgatcccggggatcaacgacggcggcatggctgaggtcggccgtcgtttgcgggaaagtggcgcgtttattcacaatattatgccgctgattgccagaccggagcacggcacggtttttggtctcaacggccagccggagccggacgccgggatgctcgccgcgatccgcagccagtgcggggaggtgatgccgcagatgacccactgccaccagtgccgtgccgacgccatcggcatgctgggcgaagatcgcagccagcagttcacccggctgccggacccggacagcctccccgactggctgcccatcctccaccagcgcgccgaacttcatgccagcctcgctacgcagggggagtcggacgcggatgacgcctgtctggtggccgtggcctcccgccacggcgaggtcattgactgtcattttggccatgccgaccgcttctcgatctacagcctgtcggccgccggtatggtgctggtgggcgagcgctttacgccaaaatattgccgcggcgaagaggagtgtgatccacaggagaacgaggccagactggcggcgctgctggcgctgctcgccgacgtaaaagcggtgttctgcgtgcgtatcggccatacgccatggcagcaactggaattgcagggcattgagccgcaggtggacggcgcgtggcgttcggtcgccgaggtgctgcccgcctggtggcagcggcggcgacagagcctggcggcatcgcgtctgcgtcagggggtcgcctga

SEQ ID NO: 219101 - DNA, 516 bp, Klebsiella pneumoniae
atggcgccggtcgactggttgacccgcctgtggcgattgtatcacgccggaaaaggctgctttccgctgcggatggggctgactcccggagcgtggcgggcgctgcaacagcggctgggcgaggtggcgacgccgctggacagcgcgacgctgagccgccgtcggctgatgaccgagctgaatgccacccgcgacgaagagcgtcggcagctggggcagtggctgacggagtggatggcgccgggggccgaaccgatggcgcagatcgtcgccgaggtagcgctggcgtttaaccatctgtgggaggatctgggactcgattcgcgggcggaactgggccggctgatgagcgactgctttccactgctggtggtgcagaacgtccaccatatgcgctggaaaaagttcttttaccgccagcgctgcctgcagtcgcagggggagattgtctgccgatcgccgagctgcgacgagtgcctggagcgcagcctctgcttcgaaccgccaccgctataa

SEQ ID NO: 219102 - DNA, 633 bp, Klebsiella pneumoniae; identical to SEQ ID NO: 32308

SEQ ID NO: 219103 - DNA, 267 bp, Klebsiella pneumoniae; identical to SEQ ID NO: 95497

SEQ ID NO: 219104 - DNA, 495 bp, Klebsiella pneumoniae
atgataaacatccggacaactagattagccatttttccactggctgttatccttttatattacccactaacttcaattgccaaaactttctcggcgaaagtggtgcgtgttattgatggtgatacagtccaggcttatgacggtgcaaaaaatacaagaatacggctctatgggattgatgcccctgaaagtaagcaagccttcgggcagaaggcaaagcaaacaatgattcagttagtagcaaatcaggttgttaatattcaggaccatgggcaggacgtctatggtcgtatgcttggcacaatctatcttaacaacaacgatgttaacgccatcatggtcgcaaacggtatggcctgggcatatcggtatcagggcaggttgattgttcctgaatatggacctcttgaacaaaacgctcgaaatgaagggaaaggtctgtggtctgatccgcactcaattgaaccacgtcaatggcgaaaagcgaataattaa

SEQ ID NO: 219105 - DNA, 198 bp, Klebsiella pneumoniae
atgctgctggtaagcaggtacaacaatacccaccttatcagcgtgctcaaccacatcagtgggccagcagaagagacctttccagtaatctccaccagtctgctcaaaaatattctgccggtacctcccggtgatcatgttgatacgttcccgggcctgttcattctgaggtttatggtagaaggctacgacatatga

SEQ ID NO: 219106 - DNA, 1080 bp, Klebsiella pneumoniae
atgatgaagcgcaatattctggcagtggtgatccctgccctgctggtagccggtgcagcgaacgctgcagaaatctataacaaaaacggcaacaaactggacttctacggaaaaatggtcggcgaacacgtctggaccaccaatggcaataccagcagcgacgataccacctatgcccgtatcggcctgaaaggcgaaacccagatcaacgatcagctgaccggttacggccagtgggaatacaacatggatgcgtccaacgttgaaggtgcccagaccaccaaaactcgtctggcgttcgcgggtctgaaagcaggcgaatacggttcattcgattatggccgtaactacggtgcaatctacgacgtcgaagcggcaaccgatatgctggttaaatggggcggcgacggctggaactacaccgacaactacatgaccggccgtaccaatggcgtggcaacttaccgtaactctgacttcttcggtctggttgacggcctgagcttcgcgctgcagtaccagggtaaaaacgatcatgaccgcgcgattcgtaagcagaatggcgacggcttcagcaccgcagcgacctacgcgttcgacaacggtatcgcactgtctgcaggctactccggttccaaccgtagcgtcgaccagaaagctgacggcaatggcgacaaggccgaagcatgggcaacttctgcaaaatatgacgccaacaacgtctacgccgctgtcatgtactcccagacctacaacatgacgccggaagaagataaccacttcgccggcaaaacgcagaacttcgaagcggttgtccagtatcagttcgacttcggcctgcgtccgtccatcggctacgtgcagaccaaaggcaaagatctgcagtcccgtgctggcttctccggcggcgatgcggatctggttaaatacgttgaagtgggtacctggtactacttcaacaaaaatatgaacgtctatgctgcttataagttcaaccagctggacgacaacgattacaccaaagcggctggcgttgccaccgacgaccaggcggccgtgggtatcgtttaccagttctaa

SEQ ID NO: 219107 - DNA, 1401 bp, Klebsiella pneumoniae
atgagcgttgtgcctgtagccgacgtactccagggccgcgttgccgttgacagcgaagtcacggtccgcggatgggtgcgtacccgccgagattctaaagctggcttttcattcctcgccgtctatgacggttcctgctttgatcctgtacaggccgttattaataattctctgcccaattacaatcaggaagtgctgcgtctgaccaccggttgctcggtgattgtcaccggtaaagtcgtggcttcccagggtcagggtcaaagctttgagatccaggcgaccagcgtggaagtgaccggctgggtggaagacccggacacctacccgatggcggccaagcgccacagcatcgagtatctgcgtgaagtggcgcacctgcgtccgcgcaccaacctgattggcgcggtagcccgcgtgcgtcacaccctggcgcaggcgctgcaccgcttcttcgacgaacagggcttcttctgggtttccaccccgctgatcaccgcctccgataccgaaggcgccggcgaaatgttccgcgtgtcgacgctggatctggaaaacctgccgcgtaacgatcagggcaaagtcgatttcgacaaagacttcttcggtaaagagtcgttcctgaccgtttccggccagctgaacggcgagacctacgcctgtgcgctgtcgaagatttataccttcggcccgaccttccgcgcggaaaattccaacaccagccgccacctggcggaattctggatgctggagccggaagtggctttcgctaacctgaatgacgttgccggcctggcggaagcgatgcttaagtacgtctttaaagcggtactggaagagcgtgcggacgacatgcagttcttcgctgagcgcgtggataaagacgctatcgaccgtctgcagcgctttatcaccgctgattttgcccaagtggattataccgacgccgtcacaattctggaaaactgcggcaagcagttcgagaacccggtgtactggggtgtggatctctcctccgagcacgaacgttacctggcagaagagcacttcaaagcgccggtggtggtgaaaaactatccgaaagacattaaggcgttctatatgcgccttaacgaagacggtaaaaccgtcgcggcaatggacgtcctggcgccgggcatcggcgagatcatcggtggttcccagcgtgaagagcgtctcgacgtgctggacgcgcgtatggcagagatggggcttaacaaagaagactactggtggtatcgcgatctgcgtcgctacggcaccgtgccgcattccggctttggtctgggcttcgaacgccttatcgcctacgtgaccggtgtgcagaacgtccgcgatgtcattccgttcccacggactccacgcaacgcgacgttctaa

SEQ ID NO: 219108 - DNA, 2616 bp, Klebsiella pneumoniae
atgacacaacagccccaagccaaataccgccacgactatcgtgcgccggagtatctgattagcgatatcgatttgacctttgacctggatgccgcaaaaaccgttgttacggccgagagcaaggtctcccgccatgcggctacgtctgatgtgccattgcgcctggacggcgaagatctcaccctgatcgctctgcaggtgaatggccagccgtggagtgactataaagaagaaaacaatcagctggtgatcggcggcctgccggaacatttcaccctgactatcgtcaatgagatcagcccggcggcgaacactgcgctggaaggcctgtatcagtcaggcgaagcgctgtgcacccagtgcgaagcggaaggtttccgccatattacctggtatctggaccgcccggacgtgctggcgcggtttaccaccaaaatcatcgccgacaaagcgaaatacccgttcctgctctccaacggcaaccgcatggcggaaggagagctggagaacggtcgtcactgggtacagtggcaggatccgttcccgaagccgtgctacctgtttgcgctggtggccggtgattttgacgtcctgcgcgattcattccgcacccgctctggccgcgaagtggcgctggagctgtatgtcgatcgcggcaacctcgaccgcgcgccgtgggcgatgacctcgctgaaaaactccatgaagtgggatgaggagcgctttggtcttgagtatgacctcgacatctatatgattgtcgccgtcgacttctttaatatgggcgcgatggagaacaaaggactcaacgtctttaactccaaatatgtcctggcacgcaccgataccgccaccgataaagactacctcgatattgaacgcgtgatcggtcatgagtatttccataactggaccggcaaccgtgtcacctgccgcgactggttccagctcagcctgaaagaggggctgaccgtattccgcgatcaggagttcagctcggacctcggctcacgggcggtaaaccgcatcaacaacgtgcgcactatgcgcgggttgcagtttgccgaagacgctagcccgatggcgcacccgatccgcccggatatggttatcgagatgaacaacttctacaccctgacggtttatgaaaagggtgctgaagtgatccgcatgctgcacaccctgctgggtgaagaaaacttccagaaagggatgcagctatattttgaacgccatgacggcagcgccgccacctgcgacgatttcgtgcaggcgatggaggatgcctctaacgtcgacctgtcgcacttccgcctctggtacagccagtccgggacgccgatcgtcaccgtgcatgatgactataatccggaaaccgaacagtatacgctgaccatcagccagcgtacgccgccgaccgccgagcaggccgaaaagaagccgctgcatatcccgtttgccattgagctgtacgataacgagggcaaggtgatccccctgcagaaaggtggccacccggtacacccggtgcttaatgtgacccaggccgagcagacctttgtcttcgataacgtctatttccagccggtgccggcgctgctgtgcgaattttcagcaccggtgaaactggaatataaatggagcgatcagcagctgaacttcctgatgcgccacgcgcggaatgatttctcgcgctgggatgcggcgcagagcctgctggcgacctatatcaagctgaacgttaaccgtcatcagcaggggcagccgctgtcactgccggtacacgtggccgatgccttccgcgccatcctgctggatgagaaaattgacccggcgctggccgctgagatcttaaccctgccgtcggccaacgaaatcgccgagatgttcgcgattatcgatccgatcgctatagccaccgtgcgcgaagcgctcacccgcacactggcgaacgaactggcggacgaattcctcgcggtatataacgccaataagctcgacagctaccgggtggagcacgccgatatcggtaagcgcgccctgcgcaatacctgcctgcgctatctggcgtttgcggagccgacgctgggcgataagctggtggcggcgcagtatcaccaggcggataacatgaccgacgcgctggctgcgctgtcggcagcggttgccgccgagctgccgagccgcgatgcgctgatgcaggagtatgacgataaatggcatcaggatggtctggtgatggataagtggtttatcctgcagtccaccagcccggcggccaacgtggtggaaacggtacgtggtctgctgaaacaccgttcattcagcatgagcaacccgaaccgcgtgcgctcgttaattggcgctttcgccagcagcaacccggcggcgttccatgctgaagacggcagcggctaccagttcctggtggagatgctgaccgagctgaaccagcgcaacccgcaggtggcgtcgcgactgattgagccgttgattcgtctgaagcgttatgatgagaagcggcaggcgctgatgcgcgccgcgctggagcagctgaaggggctggagaatctctccggcgatctgttcgagaaaatcagtaaggcgctggcgtaa

SEQ ID NO: 219109 - DNA, 792 bp, Klebsiella pneumoniae
atggcaaaatcgactcatcccctgttgttacgtctcgccccctggctgcttccggtagggacggtcgttgtctggcagctggcgtcgtccgtcggctggctgtcgacgcgggtgctgccctcgccggagggggtattgaaagcgttctggacgctctcggccagcggtgagctgtggcagcatctggccatcagttcgtggcgggcgctggtcggcttcgccatcggcggctccatcgggctggtgctcggcctgatcagcggcctgtcacgctggggcgagcgcctgctggacacctcgatccagatgctgcgcaatgtgccgcatctggcgctgatcccactggtgattttgtggttcggcatcgacgagactgccaagatcttccttgtgtcgctgggtaccctgttcccgatctatatcaacacctggcacgggatccgcaatattgaccgtgggctggtggagatggcgcgcagctatggcttatccggcttcgccctgttccgtcacgtgatattacccggcgccctgccctcgattatggtcggcgtacgtttcgctcttggcctgatgtggctgacacttattgtcgccgaaaccatctcggcgaatgccggcatcggttatctggcgatgaacgcgcgtgaatttctgcaaaccgatgtggtggtggtagccatcattctttacgccatccttggcaaactggctgacgtcagcgcccagttgctggaacggctctggctacgctggaacccggcgtatcatcttcaggaggctaacgcatga

SEQ ID NO: 219110 - DNA, 1146 bp, Klebsiella pneumoniae
atgagtctgaatatgttctggtttttaccgacccatggtgatggtcgttatctgggcactgaagagggtgcccgtccggtcgattacggctatctgcagcaaatcgcccagacggcggatcgactgggcttcaccggcgtgctgatcccgaccggacgctcttgtgaagatgcctggctggttgcggcctcgatgatcccggtgacgcagcggctgaaatttcttgtcgccctcaggcctagcgtggtgtcgccgacggtagccgcccgccaggcggcgaccctggaccgactgtcgaacggccgggcgctgttcaatctggtgaccggtagcgatccggccgaactggccggcgacggtgtcttcctcgaccacaccgagcgctatgaggcctcggctgaatttacccacatctggcgcaagctgatggaaggggaaaccgtcacctataacggcaagcaccagcgcgttcgcgatgcaaagctgctgtttccgccgctccagcagccgcgtccaccgctctattttggcggatcgtctgaggtggcgcaggatctggccgctgagcaggtcgatctctatctcacctggggtgaaccgccggctcaggtagcagagaaaatcgctcaggtgcgggagaaagccgcccgccacggtcgccaggtgcgttttggcatccgtctgcacgtgatcgtgcgggagaccaacgaggaagcctggcaggcagcagatagcctgatttctcaccttgacgatgagacgatcgcccgcgcgcaggccgccttcgccagaaccgactccgttggtcagcagcgaatggcggccctgcataacgggcgacgcgacaaacttgaaatcagccccaacctgtgggctggcgtcggtttagcgcgcggcggcgccggcaccgcgctggtgggcgatgccgccaccgttgccgaacggatcaatgaatacgccgcgctgggtatcgatagctttatcttctccggctatccgcatctggaagaggcgtatcgggtcggcgagctgctgttccccctgctcgacgtcgccgtgccgtcgatcccgcagccgcaaaacctgcgcctgcagggagaagccgttgccaatgagtttatcccgcgtaaagtggcgcaaagctga

SEQ ID NO: 219111 - DNA, 411 bp, Klebsiella pneumoniae
atgaacgacaaaatcagtcaggacacgatcaacaaagccctgtgggccgcgtgtgatacgttccgtggcaccatcagtgctgatacctataaagactttatccttaccatgctgttccttaagtacatttcggatgtctggcaggatcattacgatgaatataaaaaacagtatggtgatgcaccagaactcattgaagccatgatggccaacgagcgttttgtactgccaaaaagtgccagcttttatgcgctgtacgaacgccgccatgagccgggtaacggtgagcgtatcgatcaggctctgcatgcgattgaagaagctaatggcaccaaactgaaagacgccgggaaaagcgtgttccaggatatttcgtttaacaccgatcgcctaaatagctgcgcggaatag

SEQ ID NO: 219112 - DNA, 147 bp, Klebsiella pneumoniae; identical to SEQ ID NO: 92401

SEQ ID NO: 219113 - DNA, 1956 bp, Klebsiella pneumoniae
atgaagacggttatttccgtgctgaccgcgcatttttttgtcctgagcgccttcatctggctggcatcccccgcctgcgctgacagtggaagtgactataaagccggttcggattttgcgaaacaggtgcagggcaatggtctgaactcactgaaaaatttcagtggtgagcaaaacctgccggggtataccgacaacccggatcagacaaaatactacggcggcgtcactgccagcggagacagttctctgaaaagcgattcagccctggagttcagccagggagataccggcaaaacgattacggagtcgttcacgaaccggccaccggatcagatatctcaggatgcgccgtttattcaggccgcaaaggatacagaatcccgtgccgacagcattgtcggtgataccggacagtcctgtaccgcccaggttgtgaaccgcagcgagttcacaaaccatacctgcgaacgtgatctgcaggtggaaaatttttgcacacgggaagcgaccctgaaggataacgccaccacgcagaaagttaaccgaacctatcagcaggtggtgacgctgaattatgcccggagtacccggcaatggagtggcaacctgacgatcccgaccaacggtcgtctgctgaatgcctcggtggatggtgagcctctggtgatcccctggattgaagaatgcgattccgaagggaaggtgcgggatagctgcaagagtgcagtcagtgaaagcctgaccctctttgaacgaacgttccccatagatgtgatcagctggccacgttcagaatcgatgtgttcaggcggtcagaacacgcattgtacgaaatatacctatgacgggaaggggaagattcatcagtcgtttggtgtggacaaagcggttactgcagggcagaacttttcagtaagcaaaacatcacggaccgtatcatcggccagccagaaacccgtacaggtcacggtcaccctggtgatggaagaaaccgaaaccgtctacgcacctgaagtcgtctgggttgaaagctgtccgttcagtaaggatgaaggaaaaaaaacgggggaggaatgtatcagtccgggaggaacgcgaaccatcaccctcggaggcagggattactcgttcacggaagcctgctggaaatataaggatacctggctcacgcagccggcggacagcggctcctgtgaaagcctgatgaaaaatacggcctgtactctgtcatcccgccagtgcgccttctccagcgaggaaggcacgtgcctgcatgaatatgcaacgtattcctgcgaaaccaggacgagtggcaagcaaatgatctgcggcggtgatgtcttctgccttgatggtgaatgtgataaagccacgtccgggaagagcaacgactttgggcaggcggtgtctgagctggcggcactggctgctgcggggaaggacgtcgcggcactgaacggggtggatgtccgggccttcaccggaaaagcgaagttctgtaagaaatttgctgcaggcttcagtaactgctgcaaagacagcggctggggccaggatgtggggctggcacgctgcagcagtgaggaaaaggcgctggccaaagcgaaaaaagacaagctgacggtcagtatcggggaattctgctctaaaaaggttctgggtatttgcctggagaaaaaaaggagctattgccagttcgactcaaaactggcgcagatcgttcagcagcagggaagaaacggtcagctgcatatcggttttggcggcgccagcagtcctgactgtcggggcattaccaccgcggaactccaggggattgattttaacaagcttgatttcaccaactttatggacgacctgatgaaaaatcaaaaaataccggaaaacgatgttctcaccaataagaccaaggaacgaattaaggaaatcatgagtcagcaatccgcgcaataa

SEQ ID NO: 219114 - DNA, 639 bp, Klebsiella pneumoniae
atgaaattaatgaatctgtttatggtcatgcttttgctgaccggacgagcagtgttggctgaaacctcctctgttacagacagagaatggctgaagcagcaggagaacctcagcgaacagctgcgccagcatccggataaacagctgcagcaggagcttgaggcgcaaatcaaccgtaatcctctgcccaaatcagaccgccagtttatcgataatctggtcagccagcagaaagcggcgaatcaggaaaagccagcagaaggggcgctgtactttgtctccttctcgatacctgaagaggggctgaagcggatgctgcacgaaacccggcagtacggcattccggcgacactgcgtgggctcgtcaataacgacatgaagaccaccactgacgcggtgctgcagctggtgaaggatggcgtgaccgacggcgtgcagatcgacccgacactatatacgcagtacagcatccggagtgtgccgtctctggtggtacggtgtcaggccgggtatgacgtggtacgcggtaacattcacgtcaaacaggcgctggagaaagtggcacaaaccggtgactgcgcacaggtggcccggcagatgcttgatgcgccctcgaatgccgccgggagccagccatga

SEQ ID NO: 219115 - DNA, 990 bp, Klebsiella pneumoniae; identical to SEQ ID NO: 218044

SEQ ID NO: 219116 - DNA, 390 bp, Klebsiella pneumoniae; identical to SEQ ID NO: 152530

SEQ ID NO: 219117 - DNA, 627 bp, Klebsiella pneumoniae
atgatacgactgaaagactgtctgctcgccgcctgcctggtatcgccgctgactcaggcggctgatctcggtacctggggggatttatggcccgtccgggagcaggacatgctgcagctcatcacgcagcgtctgcagtcactgcaatcctctggccagtgggaccagacgatggatgcgtttaagcagcgggttatcgagaacagtcagcgcccggcaccggtggagggcattaagcgtgcggagaaatacgagcagcgctggtttgatcccagtatccgcctgaccgaagacctgaaggacaatgaggggcgggtgtttgcccgcaagggcgatgtggtgaacccgcttaaaaccgtaccgtttgtccagaccctgtacttcatcaatggagacgatgccgaccagctggcctggatgaagcgtcaggtgccggaaaccctgatgagcaaaattatcctggtgcgtggcagtatcccggacacctccgcagcgctggacagccggatctatttcgaccagaacggcgtactgagcaagcgatttggcctgacggcggtcccggcgcggatcacgccggcgccctccggtgaacggctgaatattgaggtgtttcccgtccgttga

SEQ ID NO: 219118 - DNA, 390 bp, Klebsiella pneumoniae
atgaaaaacaacaccgaacaaccggtcagtacgacctctcatacctttcgccggatatctgtcatcgttgctctcgtgcttttcgccctggcaaccagcgcgtttctctcacgcgtggttctggagtactccacaccgcgggtggtggcttttgatatgaagaagacgctcgacagctttatggacagtgtcagtcagaagcagctgacagaagcgcagtcaaaagcgctctctgaccggtttaacgacgcgctggagaagagtctggcggagtatcagcagcagcatcatgtggtcattctggtttcacctgccgtggttcagggcgcgcccgatgtgacccgcaacatccagcacgacattgcccgccggatgaaaggagaacagtaa

SEQ ID NO: 219119 - DNA, 393 bp, Klebsiella pneumoniae; identical to SEQ ID NO: 217930

SEQ ID NO: 219120 - DNA, 267 bp, Klebsiella pneumoniae
atgaaaaccggtgaaacgaaaacccgctgtgtcaatagcacctatacttatactgaaaatgccgtttacagcggaacagaatatacgaccaccctaaggggaaaaataatgatgagcatgaatggtcgcaccatactcaaaaaccaggatattattggctatgagtcgaccgagtcttcttccgcagatagccttgcaaaggcccagaatgatattgtccggcttatggcttacaaaataaaagtgggcatcttcagcgccaaatga

SEQ ID NO: 219121 - DNA, 246 bp, Klebsiella pneumoniae
atggagtggtgggtaaaaaaaatacaggacaatgcttcagccagtccctgccgcgtcgtgctccagagcggcacgctggagatgatcgctgaaattgaagcctgtaggctccatctgcgggtgggggataaactcacgccgctgaccgatgcgcgctattgtctgaataataatccggcgcacacgctaaagatcctcaacgccagccattatagcagtgagcgctgggccaacttcgttggataa

SEQ ID NO: 219122 - DNA, 1011 bp, Klebsiella pneumoniae
atggtcatgcagacaaacccttcgcatgcggcaacggaagacaccgccgctgcgcgctatgaagttattcgtcagtttttacgtcatattctggttgcccagcgagtgcccaaggggctggtgcttctggaaggtccgttagcacaattattcggtaccagccgggtgccagtgcgtcgggcgctcagtctgttacatgaagaagggttaattacccgcttcgaggggcgtggttttatcgtggcgcagcctgacgaagaggtcgagccattgcgccttgccctgaccagggagctcttcggccttgacgagcagcagcccctggtggatacccgtaccagtggtgaaaaggtgctggaaaacctgcaggttgtactctcaacagcgatggtatttggctgttactcggtaaatgagcaaaaagcggcacaatattataatgttagccgctcggtgatccgtgaaagtctgatgcgtttgcgcgacaagggactggtagaaaaagaaccttactcacagtggttgaccggcccgcttaccgcgcgcgaaatcgccgatcacttcgagatccgcgccagccttgaacccgcagcgctgtgcaaggcaggccctcatcttccatcggcgtggctggcgtctatgctgcaaaagacgcagggttataaaggtcgacaattgaccgccgcggaactggagttactggaagaagatcttcacatccgctgcctcgaaccggcaggtaataagctgatgatgcagatcctgcgccagcatcagtcccctttcatcatcacgcgtatcttctatgatttactggccattccggtagaaaccgccacgctggaagaacacgctctggtgtatgacatgttgctgaaaggaaactgggcgctggcggccgcctgcctgaaagatcaccttgaacgcgcgcaatcccggacgcttcagcgtttaaaagtgctttccgtgctgcctgtccccgagttacccgattttatggaagcgaactaa

SEQ ID NO: 219123 - DNA, 1407 bp, Klebsiella pneumoniae
atgaacgcgaatacgattcgcctgcaatttcagcaggggcaaattgatgcctgtgccattgccgcgctgtttgccagcggccagctgtcgccacttgcgtttacggaagcctgcctgacggcggcaaaagagacccaggggatttttattacgctgactcccgaacgcgcccgtcaggaggctgccgcctcgacgcagcgctggcgtaagggcgcgccgctgagcccgctggacggtatcccggtctgctggaaagatttattcgatatcaccgggacccgaaccactgcaggttccgcaacccgtctggatgcgcctctcgcgacacacgatgccggaatggtagcgcgcctgacgcaggcgggaatggtgactatcggcaaaaccaatctgagtgagtttgccttttccggcctgggtattaacccgacgtttaccaccccggcattactggcaaccaatggcgaggaacatgttcctggcggctcttccagtggcgcggcgcgagcggttgctcaaggggtggcctgtattgcaataggaacggacaccgcgggttccgtgcgtatccctgctgcgtttaacggagcagtcggttttcgcgccagccgtcaccgctatgacgcgagcggagtgtttcccctggcggcgtctctcgatacgctcgggcctctttgtcgcagcgttcgcgatgcttacgcccttgatgtcattctctgtggcgaggagacgacttcgtcgccggttccacggttaattgtcgatccggacattctcgacgccgctgatgctagcgtccgtgacaacagtgtctcgttgctgtcccgattagcggcgtcaggcgttgttgttgaatatcggtgcctgccagcctttcatgaggcacttacctggattgctcaccatggctggccaggggcgattgaagcctttcagttacatgcctcgctgttggcatcaccggcagcaacggcgatggatccgttcattcgccgccggctgctggcctccggcacgattgatccggcggtgctcaccagctttatgcgtctacgtccggtctggcagcaggcactggctgaagaactcaatggcgcgattttggtgaccccgacggtcgcgcataccgcgccgcgactggcgcccttgcaggcggatgccgagacatttgccctcgccaatagcgccacgctgcgcttaaccatgccaggtagtttactggatatgcccggtctcgcggtgccaagcggtacgacggcgaacggcctgtataccagtctgcttttctcttcatcgagcggtgaagatcgctcgcttttaggcgctgcctgtgcagtagcgcatctgctggcgccctccaaaggtgatggcgccaattcgttatccctcaactcaaaaggaaaataa

SEQ ID NO: 219124 - DNA, 882 bp, Klebsiella pneumoniae
atggccaaagaaatcctttgcgcatttggtgtggacgttgatgccgttgccggctggctggggtcatacggtggcgaggattcaccagatgatatctcacgcggcttgtttgccggggaagtgggcgcgccacgactgctgaaactgttcgcggagcagcaattacgtacgacgtggtttattcccgggcattcgatagagacctttccggagcagatgaaagcggttgtggaggcagggcatgaggtggggatccatggttatagccatgagaacccgattgccatgacgccggcccaggaggaagcagtgctggatcgtagcatcgaactggtgacgcagttagccggtaaacgcccaaccgggtatgtggcgccgtggtgggaatttagcaatgtgactaacgagctgctgttaaaaaagggcattaaatacgaccacagtctgatgcacaacgacttccatccgtactatgtcagggtaggtgacagctggacaaaaatcgactacagcaagcatcccgatgcgtggatgaaaccattgcagcgcggagaggagaccgatctggttgaaattccagccaactggtatctcgacgatctgccaccgatgatgtttatcaaaaaatcccctaatagccatggcttcgtcaacccacgccatctggaggagatgtggcgcgaccagttcgactgggtctatcgcgaaaatgattacgccgtcttcaccatgactatccatcccgatgtttccggccgtccccaggtgttgttgatgcttgaacgcctgattcagtacatccgtagccacgatggcgttcgcttcgtgacctttgacgaaattgcagatgattttaaagcgcgcaaaccgcgctcggcataa

SEQ ID NO: 219125 - DNA, 1374 bp, Klebsiella pneumoniae
atgagcatttttaacaaaacctccgtaaacggctggcagccgcagcagttaaccatcaaggatgtgaaatttgccacctggattgccttttttgcctgggttttcgctgtctatgatttcatcctttttggcacgttgctgccggaaattggtctccattttggctggaatgaggttgagcaagcggaaatcgccacctgggtggcggtaggcggcgcagtgatcgcgctggcgattggtccgctggtcgatcgtctgggacgccggatggggattgtcattaccgttggcggtgccgcgttgtgctcattactgaccgctgtgggcggcgcatggggcaaaggtgcgctgacggccattcgctctgtcgcggggttgggatacgcggaacagacggtgaacgccacctatttatcggagctgtataccgcgctcgacgatccgaagctcaacaaacgtaaagggtttgtctacagtcttgtgcaaggtggctggccggtcggcgcgctggttgcttcagcattgaccgccattttaatgcccatcatcggctggcagggcagcttcatttttgcggcattaccttcactggtcatcgctgtgctggcgctaaaacttaaagaaacacctcagttccaggtacaaaagaaaatccaacatttgcgtgaacaagggcaggtcgccgaagcccgtcaggtcgctcaggattatcagatttcatgggaagaacatcaccgcggtgggattgccgcagcgtttcgtggtccatcactgcgcgccaccctggtactgggggcggcggtcctgattaactggtttgccattcagatttttagcgtgctcggaacgacggtcatcaccaaaacccatgatgtttcttttaacaactcattgcttatcttaatcctgtccaacctcgtgggctattgcggttacctggctcacggctggctgggcgaccggattgggcgtcgtaacactatcgcggtcgggtggatgctgggcggtgtggcgtttgccggcatgctttactgtccggacaactttgccactatcgtcacgctctacagtattggtctgttcttcctgattggtccctacgccgccgcgctgtttttcattagcgaaagctttcctaccgccatccgtgctacggcaggggcgctgattggcgcgatgggaccggtcggggcgatcatcgccagcgttggtaccaccgcggtgttaagccatggagggcactggcaggatgctgcgctgtggtttggcgccataccctgctttatctcgggtggggtgatgtggctggcgcgtggcgatgtccagcacgcgtcagggatgaacaagaccgttaatacgcaacctcaggcgtaa

SEQ ID NO: 219126 - DNA, 777 bp, Klebsiella pneumoniae
atggaaacgacaaacatcagtcagccagtagcggcaatcagtggtgcggcaagcggcattggtctggcgctggccaccctgtatgcccgccgcggtgtgcgggtgatcgccggttactacccggacgatccgcatgacccaactgtcgccgctgcacaggttgaggaggctggtggcgatgcgctctggctaccgctgaacgtcgccgatacggcgtcggttgatacgtttatagcgcaaggcgtcgctcattttggccgccttgattatgttatcgccaatgccgggatcttacgctgtgcctctattgaagagatgagcgacgagcgctggagcgaaatgcttaacgtagacttaaccggcgtgatgcggtgtttccgggcggcttcgccacggctggtcagcggcggaagcctggtcgcgatctcatcgattgccgggggcgtctatggctggcaggagcacgcgcactacgcggcggcgaaagccgcggtccccgggctctgtcgctcactggccgttgagcttgcaccacgaggtatccgctgcaacgccgtgatcccagggttgattgaaaccccacagtcgctggataaacagaactcactggggccggaggggctggcaaaagcagccagatcgattccactggggcgggttggctgtccggatgatattgctcgcgtagtggcttttctcaccagcgacgaaagccgctatctgaccgggcaaagccttattgttgacggtggtttgaccgtccgctggccggattaa

SEQ ID NO: 219127 - DNA, 747 bp, Klebsiella pneumoniae
atgcagttgcgaaacagacgttgtgtggtgacgggggcggcaagtggtatcggcgaggctatcgcactgctttttgccggcgaaggggcacgactgatacttaccgaccgggaccgtaaaaaactggaaggggtggtacagcgttgtcggttaattggggcgcaatgttatggcgtggtggctgacgttggcgaggtcgacggggcaacggctggcgtggatgcctgcctggggcactatgaggggattgacgttctggtcaacaatgcgggcatgcttacccaggctccctgcaccgatatcaccctggagatgtgggaaaccatgatggccgtcgatctgcgcagcgtgtttctggcctgccagcgagctctgccagtgatgttgagccaacgccgggggcgtattatcaatatcgcttcccaactgggcatcaaaggtggggcagagctgtgtcactatgcggccgctaaggctggcgtaattggcctgacgaaatcactggcgctggaagtctccagccacaatgtgctggtaaacgctatcgcacccggaccgattgaaaccccgcttattgaggggatccaccaggcgtggaagacggcaaaaacggcggagctgccgctggggcgctttgggcgagcagaagaagttgcgccggtggcgctgctgctggccagcgagccagggggaaatctgttcgttggccagacgctggggcctaattcgggtgatgtgatgccttga

SEQ ID NO: 219128 - DNA, 312 bp, Klebsiella pneumoniae
atgtgcggagtatgcggcctgcttgataacgggccgcagtggagcgatccgctgcggcaggatattcccctacgccagctgcgcctgcggcagctggcattactaaaccgtacgctgaagccctggcgcctctcgctgacggaatttcatggtcaatggctgctggccagcccgacgggacaacaggtgctggtccactccctggatcggttgtggaaagaagcagagaagatgctgcatcaggcgatcgatccgctcgatgatgcctggttagcctcgcttgaggccaaaggggaagcctatgcctgctga

SEQ ID NO: 219129 - DNA, 1023 bp, Klebsiella pneumoniae
atgcctgctgaagagaaattacccctccatgtgctgagcgggtttctgggtagcggtaaaacaacgctgctgaaaaactggctcacccggcaggacgtgaacgacattgctctgctggtgaatgagtttggcgaggtcgggatcgaccatcatctgcttcacgaagtcgcgccggataccgtgttattgccgagcggttgcgtatgctgtcagattcggggggaattgcaggccgctctgctggcgctttatgaacggcgggcgcgcggcctgatcccgccgtttcgctatgtggttctggaaaccagcgggctggccgatccggctcccatcttatcgacgcttctccacgatcgtcagttgcagagccatttcacgccagggacgctggtcacacttgtcgatgcggaacatgcccaccgtcaagccgatcttcagcccgagtggctggcgcaggtgacggcagcggacaaactgctggtgagtaagagcgatcgcgttgcccccgaggagacggtgacactccagcagtggctgcgtcagcttaatccgctggcggaagtgggcactacgcggctggcgcaggataccccggactggctgttccgaagtgaagtgtttcgcggctctcatgaacaacgtttccgctggttagggtcatgtgctgacaacacgttttcgttgctgccaaagcgcgatggcggggcgcatcccacgacagaaacgtgcgtgatttcgcttgagcagtcgctaaactggcccgcttttgctatctggttatccatgctattacattgccatggtggcgcggtgctgagaatgaaaggcattttgcgcgtgagcgacagcgatagtccggtggttattcatggtgtacagcatacgttgcatcctccggtgcatttggatgactggccgggagcgttaagccgttcaacgttggtatttatattacgtggactggaggcgcatcgcttgcagcaggcctttagccgctttatgcaagtattacaggagtcctga

SEQ ID NO: 219130 - DNA, 1191 bp, Klebsiella pneumoniae
atgagttctgcggcgattatttctcccccattaacgcttcgggttttgggcacatcggtgacgttactggagatattgcgcgttcgcgctgagcaggagctggggatcaagatcgaatacctgctgcatagcgtggaagatgcccagcgcatcgcggttatgcagcctgaaagttacgatctctatgaccagtggtttcataatatcgattttgtctggccggcacgtgctattcagccgctggaggtgaagcggctgaaatattgggacgaagtaaacgaactggcgaagcagggcacgctgaacggcgttgtcgccgatggcagtgtaccgtcccagcgcttgtacgttcaacgggatcgccatttaagcagccagccgagcgatctcatcagtatgctgccattgacgcataatgccgatagctttgcctatcatgtcgaccgtcttcccgaggcgcttcagcaggaagaagagagttggggatggttgctgcatagtgcgctcactggcgcggtcgccctgcaggaggatgcggctatgggagggatcgatgccgctctggctatgcagggcgcggggatggcgcagtttgccgatattggcaatctgacactggaagagatcgatgttttgactcaaggattagcccatcttaatcgccagggacattttgccgcattctggtcgtcccaggatcaggcatgcgatttaatcgataatcgatgcgttgaggtccagagtttatgggctcccatctatttccggcgccatttccatcagcgaggctataaaatggcgcgcccgcgagaaggctatcgggcgtggtatggcggcatgtcgctgtctcgctgcgtgaccgggaaggtaaaagaagcggcctatgattaccttaactggtggcagtctggttggcccggcgcagtaatggcccggcaggggtattatatttccaacccgcagcggagccgcgcttgtctgtcgcaggccgaatgggattattggtatgcaggaaaaccggccgctgaattactcctggatgcctctggcgcgccgctgattcctgcgggtgaacgtcgggatggtggaagctacgagcagcggatgggacatattgcggtatggaattcggtgatggatgaacataactatctgacgcgacgctggcaggaggcactaatgcgccgctaa

SEQ ID NO: 219131 - DNA, 156 bp, Klebsiella pneumoniae
atgaaagctcaaaagcaaaaagcctgctcgaaagcaggctttttaaatttggctcctctgactgggatcgcctttgccagtaactggctaataaataagctaaacctgaaaactctccctgtcaagaccaccagaatgaccaccaatcaaaactga

SEQ ID NO: 219132 - DNA, 1362 bp, Klebsiella pneumoniae
atgggcacggaaatttcacttaaggtttcaggtgcaacgctagattggagtaaaaatagcttaggtgttgatcatggtgcattgttccagtcaaccgaccacataatgatacctcagcacgaacgctatgatctcgaagaaaccgatgaaattgatgaagaaagacgccttcagtggaccgtactcaggaagcctcttgcagcagtagctgaacgggttgagttacttggtttttctcttactgctattcgtgcggaatatgaaaatcttgtaaagcatgaggtttatcaaagaaacgaaatgattgaagcctatcccgataattgggaacctttagaaaatctttttagttttgatgagtttctgggcttacttaagagctatgatctgggggagttaaacgataaagatatcgactttgataattcaaaaaaaacagagaatgataatttcatttttaagttattccctaacgacattttaaaaagaattcctctctatgatccttataacaacttttactggtcagaaaaaacagcgtttttcagtgtcataaacatacttcatccatactctatgatcaaacttttaagtgaaaacaaacataatcttagtgagtatgtcgagtgggactatggggaaatagtcgctaacggatgggttcacattaaccaaataaaaactgaaattaaccgtgaaaattcttttctcatagcaactgaaggttcctcggactcacatatattacaaaaggcatttaagctaattaagcctagcgtttgtgaattttttcgtttcatcgatgtaacatctggccatccattccccggcactgggggattatcaaagtttgctgagggattagtaaaaattgatgtacagaaccaaatcatttttgtactcgacaatgatagtgaaggggttgaagctttcaagaaaatcataaagatgaagcttcctcataatatgagttgcatatgtcttccgaatcttaaggagtttgaaagtttccctacttgtggcccagacggcctaaccttatccaatattaatggaactgctgccgctatagagtgttacttggatttaacatatagtgaatatgactcatacactgttagatggactaactataaaaaagagaccgggatgtatcaaggcgcacttgaatttaaagagtattacgcaaaaagatatcttgatacatcagaagctaagcttatcgaaagtaaatatgacacctccaaacttgaggctttgcttaatgcgatcattgatgcttgttccaaattatctggagcaatacgtattgaaaaaataaagagtcactatccaaatatatggactgaagaaaaagtttaa

SEQ ID NO: 219133 - DNA, 237 bp, Klebsiella pneumoniae
atgcagaataacttattagtaaactggacgcgacagcagcactgtagctcgcgcacaaaacaaatctccggatcgagtgtctttaacgacctgtctcaattaatcaaaaacggcgttctgctatttcttaacacaatccgtcgccaagagctgaggcagattgagattggccttgtagccaaaacgactatctacgagatgggtgcggaagtgaatttccgcctcgctttaatctga

SEQ ID NO: 219134 - DNA, 939 bp, Klebsiella pneumoniae
atggcgacgataacggtttctccggttcattttgaggactacagtggtatccagttcgagcgcctagtttttgcataccacctgcgcgcgggttggcatgatctgatttggcacggtcaatcaggaggtgatcaagggcgagatatctcgggtattgaaccatttgatgaccagccagcacgtaagaccatcatccaatgcgcgaaccgagacacattgacactggcaaaagccaagagcgacatgagtaagtcgattaaagcaactggcagtgtcccagacgtctttaagttcgtctctcgtggtgcggtctcggatgctggcagaacgcgcatcgagcaagcagcagcttccttgggcgtcaggcatgtaacgatatggtcgggcgtagagttcgaagaaaacttgcgtcttcgtgctgaatatctgctgcaccgttttgtccagggcgtcgagtttcctgatgttgaagctgatattcaaaaattcacggatgattttcccgacctttccgacgccgatgttctgcaactgatggctgccgtatttgaccggccagcatttcgcacaccgtttcaacaagaaagttctctccctgcttttcagaaggcaatcgaagataccattggcgcactaaatacaggtttgtggagaacgcgtgagggcgtcgagatcaggcgcattccttcgatccaccatctcaaaaatcaacgcatccagacagtgatgggaaaagtggttcgtcaggtcgaccaactgcggcgcatcttcgtaactcggcttaaggaaggggaaatcagaccttgtggatgtggtcagcccgattgccccacgtttacgctcacgcaacgcgtggctgacgagctagacgacgcgagacagagaatcctcacgacgtttcaatcagtgtatacttccttcagtgtgagccttagttag
